United States Patent Application Publication US 2018/0305689 A1 - sequence listing, part 58

SEQ ID NO: 833780 - RNA, 19 nt, Artificial Sequence
  Description of Artificial Sequence: Synthetic oligonucleotide
  Sense strand starting at position 3923 of SEQ ID NO: 587989
guacuaauuuguggacaaa

SEQ ID NO: 833781 - RNA, 19 nt, Artificial Sequence
  Description of Artificial Sequence: Synthetic oligonucleotide
  Antisense strand to SEQ ID NO: 833780
uuuguccacaaauuaguac

SEQ ID NO: 833782 - RNA, 19 nt, Artificial Sequence
  Description of Artificial Sequence: Synthetic oligonucleotide
  Sense strand starting at position 3958 of SEQ ID NO: 587989
gugaguguccguuacaaau

SEQ ID NO: 833783 - RNA, 19 nt, Artificial Sequence
  Description of Artificial Sequence: Synthetic oligonucleotide
  Antisense strand to SEQ ID NO: 833782
auuuguaacggacacucac

SEQ ID NO: 833784 - RNA, 19 nt, Artificial Sequence
  Description of Artificial Sequence: Synthetic oligonucleotide
  Sense strand starting at position 116 of SEQ ID NO: 587990
auuauuuccugauaaagag

SEQ ID NO: 833785 - RNA, 19 nt, Artificial Sequence
  Description of Artificial Sequence: Synthetic oligonucleotide
  Antisense strand to SEQ ID NO: 833784
cucuuuaucaggaaauaau

SEQ ID NO: 833786 - RNA, 19 nt, Artificial Sequence
  Description of Artificial Sequence: Synthetic oligonucleotide
  Sense strand starting at position 188 of SEQ ID NO: 587990
agacuuaaagcuugagaau

SEQ ID NO: 833787 - RNA, 19 nt, Artificial Sequence
  Description of Artificial Sequence: Synthetic oligonucleotide
  Antisense strand to SEQ ID NO: 833786
auucucaagcuuuaagucu

SEQ ID NO: 833788 - RNA, 19 nt, Artificial Sequence
  Description of Artificial Sequence: Synthetic oligonucleotide
  Sense strand starting at position 194 of SEQ ID NO: 587990
aaagcuugagaauguuagu

SEQ ID NO: 833789 - RNA, 19 nt, Artificial Sequence
  Description of Artificial Sequence: Synthetic oligonucleotide
  Antisense strand to SEQ ID NO: 833788
acuaacauucucaagcuuu

SEQ ID NO: 833790 - RNA, 19 nt, Artificial Sequence
  Description of Artificial Sequence: Synthetic oligonucleotide
  Sense strand starting at position 199 of SEQ ID NO: 587990
uugagaauguuaguuuccu

SEQ ID NO: 833791 - RNA, 19 nt, Artificial Sequence
  Description of Artificial Sequence: Synthetic oligonucleotide
  Antisense strand to SEQ ID NO: 833790
aggaaacuaacauucucaa

SEQ ID NO: 833792 - RNA, 19 nt, Artificial Sequence
  Description of Artificial Sequence: Synthetic oligonucleotide
  Sense strand starting at position 200 of SEQ ID NO: 587990
ugagaauguuaguuuccuu

SEQ ID NO: 833793 - RNA, 19 nt, Artificial Sequence
  Description of Artificial Sequence: Synthetic oligonucleotide
  Antisense strand to SEQ ID NO: 833792
aaggaaacuaacauucuca

SEQ ID NO: 833794 - RNA, 19 nt, Artificial Sequence
  Description of Artificial Sequence: Synthetic oligonucleotide
  Sense strand starting at position 434 of SEQ ID NO: 587990
auaucauuccauuagguuu

SEQ ID NO: 833795 - RNA, 19 nt, Artificial Sequence
  Description of Artificial Sequence: Synthetic oligonucleotide
  Antisense strand to SEQ ID NO: 833794
aaaccuaauggaaugauau

SEQ ID NO: 833796 - RNA, 19 nt, Artificial Sequence
  Description of Artificial Sequence: Synthetic oligonucleotide
  Sense strand starting at position 565 of SEQ ID NO: 587990
acuuguuacaugcaggaga

SEQ ID NO: 833797 - RNA, 19 nt, Artificial Sequence
  Description of Artificial Sequence: Synthetic oligonucleotide
  Antisense strand to SEQ ID NO: 833796
ucuccugcauguaacaagu

SEQ ID NO: 833798 - RNA, 19 nt, Artificial Sequence
  Description of Artificial Sequence: Synthetic oligonucleotide
  Sense strand starting at position 761 of SEQ ID NO: 587990
gcuguuaaauaagucauca

SEQ ID NO: 833799 - RNA, 19 nt, Artificial Sequence
  Description of Artificial Sequence: Synthetic oligonucleotide
  Antisense strand to SEQ ID NO: 833798
ugaugacuuauuuaacagc

SEQ ID NO: 833800 - RNA, 19 nt, Artificial Sequence
  Description of Artificial Sequence: Synthetic oligonucleotide
  Sense strand starting at position 782 of SEQ ID NO: 587990
auacuagauacgugggaag

SEQ ID NO: 833801 - RNA, 19 nt, Artificial Sequence
  Description of Artificial Sequence: Synthetic oligonucleotide
  Antisense strand to SEQ ID NO: 833800
cuucccacguaucuaguau

SEQ ID NO: 833802 - RNA, 19 nt, Artificial Sequence
  Description of Artificial Sequence: Synthetic oligonucleotide
  Sense strand starting at position 897 of SEQ ID NO: 587990
aucagaccuuguuucuuua

SEQ ID NO: 833803 - RNA, 19 nt, Artificial Sequence
  Description of Artificial Sequence: Synthetic oligonucleotide
  Antisense strand to SEQ ID NO: 833802
uaaagaaacaaggucugau

SEQ ID NO: 833804 - RNA, 19 nt, Artificial Sequence
  Description of Artificial Sequence: Synthetic oligonucleotide
  Sense strand starting at position 900 of SEQ ID NO: 587990
agaccuuguuucuuuaaag

SEQ ID NO: 833805 - RNA, 19 nt, Artificial Sequence
  Description of Artificial Sequence: Synthetic oligonucleotide
  Antisense strand to SEQ ID NO: 833804
cuuuaaagaaacaaggucu

SEQ ID NO: 833806 - RNA, 19 nt, Artificial Sequence
  Description of Artificial Sequence: Synthetic oligonucleotide
  Sense strand starting at position 1608 of SEQ ID NO: 587990
gcgggcucaccucaaacau

SEQ ID NO: 833807 - RNA, 19 nt, Artificial Sequence
  Description of Artificial Sequence: Synthetic oligonucleotide
  Antisense strand to SEQ ID NO: 833806
auguuugaggugagcccgc

SEQ ID NO: 833808 - RNA, 19 nt, Artificial Sequence
  Description of Artificial Sequence: Synthetic oligonucleotide
  Sense strand starting at position 1660 of SEQ ID NO: 587990
gacgauguccgcgugauuc

SEQ ID NO: 833809 - RNA, 19 nt, Artificial Sequence
  Description of Artificial Sequence: Synthetic oligonucleotide
  Antisense strand to SEQ ID NO: 833808
gaaucacgcggacaucguc

SEQ ID NO: 833810 - RNA, 19 nt, Artificial Sequence
  Description of Artificial Sequence: Synthetic oligonucleotide
  Sense strand starting at position 1672 of SEQ ID NO: 587990
gugauucugcaggacgaau

SEQ ID NO: 833811 - RNA, 19 nt, Artificial Sequence
  Description of Artificial Sequence: Synthetic oligonucleotide
  Antisense strand to SEQ ID NO: 833810
auucguccugcagaaucac

SEQ ID NO: 833812 - RNA, 19 nt, Artificial Sequence
  Description of Artificial Sequence: Synthetic oligonucleotide
  Sense strand starting at position 2375 of SEQ ID NO: 587990
guaaguuuggacuaacuua

SEQ ID NO: 833813 - RNA, 19 nt, Artificial Sequence
  Description of Artificial Sequence: Synthetic oligonucleotide
  Antisense strand to SEQ ID NO: 833812
uaaguuaguccaaacuuac

SEQ ID NO: 833814 - RNA, 19 nt, Artificial Sequence
  Description of Artificial Sequence: Synthetic oligonucleotide
  Sense strand starting at position 2499 of SEQ ID NO: 587990
aagggaucaguuuggguuu

SEQ ID NO: 833815 - RNA, 19 nt, Artificial Sequence
  Description of Artificial Sequence: Synthetic oligonucleotide
  Antisense strand to SEQ ID NO: 833814
aaacccaaacugaucccuu

SEQ ID NO: 833816 - RNA, 19 nt, Artificial Sequence
  Description of Artificial Sequence: Synthetic oligonucleotide
  Sense strand starting at position 2502 of SEQ ID NO: 587990
ggaucaguuuggguuuacu

SEQ ID NO: 833817 - RNA, 19 nt, Artificial Sequence
  Description of Artificial Sequence: Synthetic oligonucleotide
  Antisense strand to SEQ ID NO: 833816
aguaaacccaaacugaucc

SEQ ID NO: 833818 - RNA, 19 nt, Artificial Sequence
  Description of Artificial Sequence: Synthetic oligonucleotide
  Sense strand starting at position 2827 of SEQ ID NO: 587990
auauuacaacucuggugua

SEQ ID NO: 833819 - RNA, 19 nt, Artificial Sequence
  Description of Artificial Sequence: Synthetic oligonucleotide
  Antisense strand to SEQ ID NO: 833818
uacaccagaguuguaauau

SEQ ID NO: 833820 - RNA, 19 nt, Artificial Sequence
  Description of Artificial Sequence: Synthetic oligonucleotide
  Sense strand starting at position 2840 of SEQ ID NO: 587990
gguguaaccacuuaguggu

SEQ ID NO: 833821 - RNA, 19 nt, Artificial Sequence
  Description of Artificial Sequence: Synthetic oligonucleotide
  Antisense strand to SEQ ID NO: 833820
accacuaagugguuacacc

SEQ ID NO: 833822 - RNA, 19 nt, Artificial Sequence
  Description of Artificial Sequence: Synthetic oligonucleotide
  Sense strand starting at position 2846 of SEQ ID NO: 587990
accacuuagugguuuaaga

SEQ ID NO: 833823 - RNA, 19 nt, Artificial Sequence
  Description of Artificial Sequence: Synthetic oligonucleotide
  Antisense strand to SEQ ID NO: 833822
ucuuaaaccacuaaguggu

SEQ ID NO: 833824 - RNA, 19 nt, Artificial Sequence
  Description of Artificial Sequence: Synthetic oligonucleotide
  Sense strand starting at position 2848 of SEQ ID NO: 587990
cacuuagugguuuaagaau

SEQ ID NO: 833825 - RNA, 19 nt, Artificial Sequence
  Description of Artificial Sequence: Synthetic oligonucleotide
  Antisense strand to SEQ ID NO: 833824
auucuuaaaccacuaagug

SEQ ID NO: 833826 - RNA, 19 nt, Artificial Sequence
  Description of Artificial Sequence: Synthetic oligonucleotide
  Sense strand starting at position 2859 of SEQ ID NO: 587990
uuaagaauguggguuguua

SEQ ID NO: 833827 - RNA, 19 nt, Artificial Sequence
  Description of Artificial Sequence: Synthetic oligonucleotide
  Antisense strand to SEQ ID NO: 833826
uaacaacccacauucuuaa

SEQ ID NO: 833828 - RNA, 19 nt, Artificial Sequence
  Description of Artificial Sequence: Synthetic oligonucleotide
  Sense strand starting at position 2861 of SEQ ID NO: 587990
aagaauguggguuguuaaa

SEQ ID NO: 833829 - RNA, 19 nt, Artificial Sequence
  Description of Artificial Sequence: Synthetic oligonucleotide
  Antisense strand to SEQ ID NO: 833828
uuuaacaacccacauucuu

SEQ ID NO: 833830 - RNA, 19 nt, Artificial Sequence
  Description of Artificial Sequence: Synthetic oligonucleotide
  Sense strand starting at position 2895 of SEQ ID NO: 587990
uuauuacuuguacgaucaa

SEQ ID NO: 833831 - RNA, 19 nt, Artificial Sequence
  Description of Artificial Sequence: Synthetic oligonucleotide
  Antisense strand to SEQ ID NO: 833830
uugaucguacaaguaauaa

SEQ ID NO: 833832 - RNA, 19 nt, Artificial Sequence
  Description of Artificial Sequence: Synthetic oligonucleotide
  Sense strand starting at position 3047 of SEQ ID NO: 587990
agggacuuaucauucuagu

SEQ ID NO: 833833 - RNA, 19 nt, Artificial Sequence
  Description of Artificial Sequence: Synthetic oligonucleotide
  Antisense strand to SEQ ID NO: 833832
acuagaaugauaagucccu

SEQ ID NO: 833834 - RNA, 19 nt, Artificial Sequence
  Description of Artificial Sequence: Synthetic oligonucleotide
  Sense strand starting at position 3055 of SEQ ID NO: 587990
aucauucuagugugggaga

SEQ ID NO: 833835 - RNA, 19 nt, Artificial Sequence
  Description of Artificial Sequence: Synthetic oligonucleotide
  Antisense strand to SEQ ID NO: 833834
ucucccacacuagaaugau

SEQ ID NO: 833836 - RNA, 19 nt, Artificial Sequence
  Description of Artificial Sequence: Synthetic oligonucleotide
  Sense strand starting at position 3109 of SEQ ID NO: 587990
guuaaauugaguugagcaa

SEQ ID NO: 833837 - RNA, 19 nt, Artificial Sequence
  Description of Artificial Sequence: Synthetic oligonucleotide
  Antisense strand to SEQ ID NO: 833836
uugcucaacucaauuuaac

SEQ ID NO: 833838 - RNA, 19 nt, Artificial Sequence
  Description of Artificial Sequence: Synthetic oligonucleotide
  Sense strand starting at position 3170 of SEQ ID NO: 587990
acuuauacuugccugaaga

SEQ ID NO: 833839 - RNA, 19 nt, Artificial Sequence
  Description of Artificial Sequence: Synthetic oligonucleotide
  Antisense strand to SEQ ID NO: 833838
ucuucaggcaaguauaagu

SEQ ID NO: 833840 - RNA, 19 nt, Artificial Sequence
  Description of Artificial Sequence: Synthetic oligonucleotide
  Sense strand starting at position 3171 of SEQ ID NO: 587990
cuuauacuugccugaagac

SEQ ID NO: 833841 - RNA, 19 nt, Artificial Sequence
  Description of Artificial Sequence: Synthetic oligonucleotide
  Antisense strand to SEQ ID NO: 833840
gucuucaggcaaguauaag

SEQ ID NO: 833842 - RNA, 19 nt, Artificial Sequence
  Description of Artificial Sequence: Synthetic oligonucleotide
  Sense strand starting at position 3317 of SEQ ID NO: 587990
uuagucagggauuauucuu

SEQ ID NO: 833843 - RNA, 19 nt, Artificial Sequence
  Description of Artificial Sequence: Synthetic oligonucleotide
  Antisense strand to SEQ ID NO: 833842
aagaauaaucccugacuaa

SEQ ID NO: 833844 - RNA, 19 nt, Artificial Sequence
  Description of Artificial Sequence: Synthetic oligonucleotide
  Sense strand starting at position 3387 of SEQ ID NO: 587990
acguuuauacuagaaugau

SEQ ID NO: 833845 - RNA, 19 nt, Artificial Sequence
  Description of Artificial Sequence: Synthetic oligonucleotide
  Antisense strand to SEQ ID NO: 833844
aucauucuaguauaaacgu

SEQ ID NO: 833846 - RNA, 19 nt, Artificial Sequence
  Description of Artificial Sequence: Synthetic oligonucleotide
  Sense strand starting at position 3396 of SEQ ID NO: 587990
cuagaaugaugcuucuacu

SEQ ID NO: 833847 - RNA, 19 nt, Artificial Sequence
  Description of Artificial Sequence: Synthetic oligonucleotide
  Antisense strand to SEQ ID NO: 833846
aguagaagcaucauucuag

SEQ ID NO: 833848 - RNA, 19 nt, Artificial Sequence
  Description of Artificial Sequence: Synthetic oligonucleotide
  Sense strand starting at position 3407 of SEQ ID NO: 587990
cuucuacuggcagaaaguu

SEQ ID NO: 833849 - RNA, 19 nt, Artificial Sequence
  Description of Artificial Sequence: Synthetic oligonucleotide
  Antisense strand to SEQ ID NO: 833848
aacuuucugccaguagaag

SEQ ID NO: 833850 - RNA, 19 nt, Artificial Sequence
  Description of Artificial Sequence: Synthetic oligonucleotide
  Sense strand starting at position 3481 of SEQ ID NO: 587990
cugauuugguccuugccua

SEQ ID NO: 833851 - RNA, 19 nt, Artificial Sequence
  Description of Artificial Sequence: Synthetic oligonucleotide
  Antisense strand to SEQ ID NO: 833850
uaggcaaggaccaaaucag

SEQ ID NO: 833852 - RNA, 19 nt, Artificial Sequence
  Description of Artificial Sequence: Synthetic oligonucleotide
  Sense strand starting at position 3529 of SEQ ID NO: 587990
ggccauaaucucuguacca

SEQ ID NO: 833853 - RNA, 19 nt, Artificial Sequence
  Description of Artificial Sequence: Synthetic oligonucleotide
  Antisense strand to SEQ ID NO: 833852
ugguacagagauuauggcc

SEQ ID NO: 833854 - RNA, 19 nt, Artificial Sequence
  Description of Artificial Sequence: Synthetic oligonucleotide
  Sense strand starting at position 3530 of SEQ ID NO: 587990
gccauaaucucuguaccag

SEQ ID NO: 833855 - RNA, 19 nt, Artificial Sequence
  Description of Artificial Sequence: Synthetic oligonucleotide
  Antisense strand to SEQ ID NO: 833854
cugguacagagauuauggc

SEQ ID NO: 833856 - RNA, 19 nt, Artificial Sequence
  Description of Artificial Sequence: Synthetic oligonucleotide
  Sense strand starting at position 3542 of SEQ ID NO: 587990
guaccagcauuauugacua

SEQ ID NO: 833857 - RNA, 19 nt, Artificial Sequence
  Description of Artificial Sequence: Synthetic oligonucleotide
  Antisense strand to SEQ ID NO: 833856
uagucaauaaugcugguac

SEQ ID NO: 833858 - RNA, 19 nt, Artificial Sequence
  Description of Artificial Sequence: Synthetic oligonucleotide
  Sense strand starting at position 3729 of SEQ ID NO: 587990
uuagcaguuauguuguguu

SEQ ID NO: 833859 - RNA, 19 nt, Artificial Sequence
  Description of Artificial Sequence: Synthetic oligonucleotide
  Antisense strand to SEQ ID NO: 833858
aacacaacauaacugcuaa

SEQ ID NO: 833860 - RNA, 19 nt, Artificial Sequence
  Description of Artificial Sequence: Synthetic oligonucleotide
  Sense strand starting at position 3790 of SEQ ID NO: 587990
uuaggauauucuuuaccag

SEQ ID NO: 833861 - RNA, 19 nt, Artificial Sequence
  Description of Artificial Sequence: Synthetic oligonucleotide
  Antisense strand to SEQ ID NO: 833860
cugguaaagaauauccuaa

SEQ ID NO: 833862 - RNA, 19 nt, Artificial Sequence
  Description of Artificial Sequence: Synthetic oligonucleotide
  Sense strand starting at position 3963 of SEQ ID NO: 587990
ugucucugucuggaauguu

SEQ ID NO: 833863 - RNA, 19 nt, Artificial Sequence
  Description of Artificial Sequence: Synthetic oligonucleotide
  Antisense strand to SEQ ID NO: 833862
aacauuccagacagagaca

SEQ ID NO: 833864 - RNA, 19 nt, Artificial Sequence
  Description of Artificial Sequence: Synthetic oligonucleotide
  Sense strand starting at position 81 of SEQ ID NO: 587991
gaacaaagugcugauguaa

SEQ ID NO: 833865 - RNA, 19 nt, Artificial Sequence
  Description of Artificial Sequence: Synthetic oligonucleotide
  Antisense strand to SEQ ID NO: 833864
uuacaucagcacuuuguuc

SEQ ID NO: 833866 - RNA, 19 nt, Artificial Sequence
  Description of Artificial Sequence: Synthetic oligonucleotide
  Sense strand starting at position 120 of SEQ ID NO: 587991
agagcacugugcugaauga

SEQ ID NO: 833867 - RNA, 19 nt, Artificial Sequence
  Description of Artificial Sequence: Synthetic oligonucleotide
  Antisense strand to SEQ ID NO: 833866
ucauucagcacagugcucu

SEQ ID NO: 833868 - RNA, 19 nt, Artificial Sequence
  Description of Artificial Sequence: Synthetic oligonucleotide
  Sense strand starting at position 121 of SEQ ID NO: 587991
gagcacugugcugaaugaa

SEQ ID NO: 833869 - RNA, 19 nt, Artificial Sequence
  Description of Artificial Sequence: Synthetic oligonucleotide
  Antisense strand to SEQ ID NO: 833868
uucauucagcacagugcuc

SEQ ID NO: 833870 - RNA, 19 nt, Artificial Sequence
  Description of Artificial Sequence: Synthetic oligonucleotide
  Sense strand starting at position 327 of SEQ ID NO: 587991
ugguaacacaagugugaau

SEQ ID NO: 833871 - RNA, 19 nt, Artificial Sequence
  Description of Artificial Sequence: Synthetic oligonucleotide
  Antisense strand to SEQ ID NO: 833870
auucacacuuguguuacca

SEQ ID NO: 833872 - RNA, 19 nt, Artificial Sequence
  Description of Artificial Sequence: Synthetic oligonucleotide
  Sense strand starting at position 329 of SEQ ID NO: 587991
guaacacaagugugaauau

SEQ ID NO: 833873 - RNA, 19 nt, Artificial Sequence
  Description of Artificial Sequence: Synthetic oligonucleotide
  Antisense strand to SEQ ID NO: 833872
auauucacacuuguguuac

SEQ ID NO: 833874 - RNA, 19 nt, Artificial Sequence
  Description of Artificial Sequence: Synthetic oligonucleotide
  Sense strand starting at position 357 of SEQ ID NO: 587991
uacugaauuggccaggcau

SEQ ID NO: 833875 - RNA, 19 nt, Artificial Sequence
  Description of Artificial Sequence: Synthetic oligonucleotide
  Antisense strand to SEQ ID NO: 833874
augccuggccaauucagua

SEQ ID NO: 833876 - RNA, 19 nt, Artificial Sequence
  Description of Artificial Sequence: Synthetic oligonucleotide
  Sense strand starting at position 709 of SEQ ID NO: 587991
gcagguaaucgaggcucaa

SEQ ID NO: 833877 - RNA, 19 nt, Artificial Sequence
  Description of Artificial Sequence: Synthetic oligonucleotide
  Antisense strand to SEQ ID NO: 833876
uugagccucgauuaccugc

SEQ ID NO: 833878 - RNA, 19 nt, Artificial Sequence
  Description of Artificial Sequence: Synthetic oligonucleotide
  Sense strand starting at position 713 of SEQ ID NO: 587991
guaaucgaggcucaaugaa

SEQ ID NO: 833879 - RNA, 19 nt, Artificial Sequence
  Description of Artificial Sequence: Synthetic oligonucleotide
  Antisense strand to SEQ ID NO: 833878
uucauugagccucgauuac

SEQ ID NO: 833880 - RNA, 19 nt, Artificial Sequence
  Description of Artificial Sequence: Synthetic oligonucleotide
  Sense strand starting at position 772 of SEQ ID NO: 587991
guuuacauguuuccggaca

SEQ ID NO: 833881 - RNA, 19 nt, Artificial Sequence
  Description of Artificial Sequence: Synthetic oligonucleotide
  Antisense strand to SEQ ID NO: 833880
uguccggaaacauguaaac

SEQ ID NO: 833882 - RNA, 19 nt, Artificial Sequence
  Description of Artificial Sequence: Synthetic oligonucleotide
  Sense strand starting at position 773 of SEQ ID NO: 587991
uuuacauguuuccggacaa

SEQ ID NO: 833883 - RNA, 19 nt, Artificial Sequence
  Description of Artificial Sequence: Synthetic oligonucleotide
  Antisense strand to SEQ ID NO: 833882
uuguccggaaacauguaaa

SEQ ID NO: 833884 - RNA, 19 nt, Artificial Sequence
  Description of Artificial Sequence: Synthetic oligonucleotide
  Sense strand starting at position 774 of SEQ ID NO: 587991
uuacauguuuccggacaac

SEQ ID NO: 833885 - RNA, 19 nt, Artificial Sequence
  Description of Artificial Sequence: Synthetic oligonucleotide
  Antisense strand to SEQ ID NO: 833884
guuguccggaaacauguaa

SEQ ID NO: 833886 - RNA, 19 nt, Artificial Sequence
  Description of Artificial Sequence: Synthetic oligonucleotide
  Sense strand starting at position 777 of SEQ ID NO: 587991
cauguuuccggacaacugu

SEQ ID NO: 833887 - RNA, 19 nt, Artificial Sequence
  Description of Artificial Sequence: Synthetic oligonucleotide
  Antisense strand to SEQ ID NO: 833886
acaguuguccggaaacaug

SEQ ID NO: 833888 - RNA, 19 nt, Artificial Sequence
  Description of Artificial Sequence: Synthetic oligonucleotide
  Sense strand starting at position 866 of SEQ ID NO: 587991
agaucuuuaggacggcaau

SEQ ID NO: 833889 - RNA, 19 nt, Artificial Sequence
  Description of Artificial Sequence: Synthetic oligonucleotide
  Antisense strand to SEQ ID NO: 833888
auugccguccuaaagaucu

SEQ ID NO: 833890 - RNA, 19 nt, Artificial Sequence
  Description of Artificial Sequence: Synthetic oligonucleotide
  Sense strand starting at position 913 of SEQ ID NO: 587991
ggugcuuuguuucagguua

SEQ ID NO: 833891 - RNA, 19 nt, Artificial Sequence
  Description of Artificial Sequence: Synthetic oligonucleotide
  Antisense strand to SEQ ID NO: 833890
uaaccugaaacaaagcacc

SEQ ID NO: 833892 - RNA, 19 nt, Artificial Sequence
  Description of Artificial Sequence: Synthetic oligonucleotide
  Sense strand starting at position 934 of SEQ ID NO: 587991
aaauaaagaugucauaggu

SEQ ID NO: 833893 - RNA, 19 nt, Artificial Sequence
  Description of Artificial Sequence: Synthetic oligonucleotide
  Antisense strand to SEQ ID NO: 833892
accuaugacaucuuuauuu

SEQ ID NO: 833894 - RNA, 19 nt, Artificial Sequence
  Description of Artificial Sequence: Synthetic oligonucleotide
  Sense strand starting at position 940 of SEQ ID NO: 587991
agaugucauagguagcuau

SEQ ID NO: 833895 - RNA, 19 nt, Artificial Sequence
  Description of Artificial Sequence: Synthetic oligonucleotide
  Antisense strand to SEQ ID NO: 833894
auagcuaccuaugacaucu

SEQ ID NO: 833896 - RNA, 19 nt, Artificial Sequence
  Description of Artificial Sequence: Synthetic oligonucleotide
  Sense strand starting at position 944 of SEQ ID NO: 587991
gucauagguagcuaugacu

SEQ ID NO: 833897 - RNA, 19 nt, Artificial Sequence
  Description of Artificial Sequence: Synthetic oligonucleotide
  Antisense strand to SEQ ID NO: 833896
agucauagcuaccuaugac

SEQ ID NO: 833898 - RNA, 19 nt, Artificial Sequence
  Description of Artificial Sequence: Synthetic oligonucleotide
  Sense strand starting at position 950 of SEQ ID NO: 587991
gguagcuaugacuaccuua

SEQ ID NO: 833899 - RNA, 19 nt, Artificial Sequence
  Description of Artificial Sequence: Synthetic oligonucleotide
  Antisense strand to SEQ ID NO: 833898
uaagguagucauagcuacc

SEQ ID NO: 833900 - RNA, 19 nt, Artificial Sequence
  Description of Artificial Sequence: Synthetic oligonucleotide
  Sense strand starting at position 953 of SEQ ID NO: 587991
agcuaugacuaccuuagaa

SEQ ID NO: 833901 - RNA, 19 nt, Artificial Sequence
  Description of Artificial Sequence: Synthetic oligonucleotide
  Antisense strand to SEQ ID NO: 833900
uucuaagguagucauagcu

SEQ ID NO: 833902 - RNA, 19 nt, Artificial Sequence
  Description of Artificial Sequence: Synthetic oligonucleotide
  Sense strand starting at position 975 of SEQ ID NO: 587991
cgggacagucaccaguuua

SEQ ID NO: 833903 - RNA, 19 nt, Artificial Sequence
  Description of Artificial Sequence: Synthetic oligonucleotide
  Antisense strand to SEQ ID NO: 833902
uaaacuggugacugucccg

SEQ ID NO: 833904 - RNA, 19 nt, Artificial Sequence
  Description of Artificial Sequence: Synthetic oligonucleotide
  Sense strand starting at position 1136 of SEQ ID NO: 587991
agacauucacguugggaag

SEQ ID NO: 833905 - RNA, 19 nt, Artificial Sequence
  Description of Artificial Sequence: Synthetic oligonucleotide
  Antisense strand to SEQ ID NO: 833904
cuucccaacgugaaugucu

SEQ ID NO: 833906 - RNA, 19 nt, Artificial Sequence
  Description of Artificial Sequence: Synthetic oligonucleotide
  Sense strand starting at position 1230 of SEQ ID NO: 587991
caggguucccugggauaag

SEQ ID NO: 833907 - RNA, 19 nt, Artificial Sequence
  Description of Artificial Sequence: Synthetic oligonucleotide
  Antisense strand to SEQ ID NO: 833906
cuuaucccagggaacccug

SEQ ID NO: 833908 - RNA, 19 nt, Artificial Sequence
  Description of Artificial Sequence: Synthetic oligonucleotide
  Sense strand starting at position 1231 of SEQ ID NO: 587991
aggguucccugggauaagu

SEQ ID NO: 833909 - RNA, 19 nt, Artificial Sequence
  Description of Artificial Sequence: Synthetic oligonucleotide
  Antisense strand to SEQ ID NO: 833908
acuuaucccagggaacccu

SEQ ID NO: 833910 - RNA, 19 nt, Artificial Sequence
  Description of Artificial Sequence: Synthetic oligonucleotide
  Sense strand starting at position 1240 of SEQ ID NO: 587991
ugggauaaguuggaguuga

SEQ ID NO: 833911 - RNA, 19 nt, Artificial Sequence
  Description of Artificial Sequence: Synthetic oligonucleotide
  Antisense strand to SEQ ID NO: 833910
ucaacuccaacuuauccca

SEQ ID NO: 833912 - RNA, 19 nt, Artificial Sequence
  Description of Artificial Sequence: Synthetic oligonucleotide
  Sense strand starting at position 1241 of SEQ ID NO: 587991
gggauaaguuggaguugac

SEQ ID NO: 833913 - RNA, 19 nt, Artificial Sequence
  Description of Artificial Sequence: Synthetic oligonucleotide
  Antisense strand to SEQ ID NO: 833912
gucaacuccaacuuauccc

SEQ ID NO: 833914 - RNA, 19 nt, Artificial Sequence
  Description of Artificial Sequence: Synthetic oligonucleotide
  Sense strand starting at position 1263 of SEQ ID NO: 587991
gcgcuuaucccagagagca

SEQ ID NO: 833915 - RNA, 19 nt, Artificial Sequence
  Description of Artificial Sequence: Synthetic oligonucleotide
  Antisense strand to SEQ ID NO: 833914
ugcucucugggauaagcgc

SEQ ID NO: 833916 - RNA, 19 nt, Artificial Sequence
  Description of Artificial Sequence: Synthetic oligonucleotide
  Sense strand starting at position 1645 of SEQ ID NO: 587991
cggccuuggacagauguaa

SEQ ID NO: 833917 - RNA, 19 nt, Artificial Sequence
  Description of Artificial Sequence: Synthetic oligonucleotide
  Antisense strand to SEQ ID NO: 833916
uuacaucuguccaaggccg

SEQ ID NO: 833918 - RNA, 19 nt, Artificial Sequence
  Description of Artificial Sequence: Synthetic oligonucleotide
  Sense strand starting at position 2453 of SEQ ID NO: 587991
gaggaaagcuucugcaccu

SEQ ID NO: 833919 - RNA, 19 nt, Artificial Sequence
  Description of Artificial Sequence: Synthetic oligonucleotide
  Antisense strand to SEQ ID NO: 833918
aggugcagaagcuuuccuc

SEQ ID NO: 833920 - RNA, 19 nt, Artificial Sequence
  Description of Artificial Sequence: Synthetic oligonucleotide
  Sense strand starting at position 2880 of SEQ ID NO: 587991
gucguuaguucagugccaa

SEQ ID NO: 833921 - RNA, 19 nt, Artificial Sequence
  Description of Artificial Sequence: Synthetic oligonucleotide
  Antisense strand to SEQ ID NO: 833920
uuggcacugaacuaacgac

SEQ ID NO: 833922 - RNA, 19 nt, Artificial Sequence
  Description of Artificial Sequence: Synthetic oligonucleotide
  Sense strand starting at position 2881 of SEQ ID NO: 587991
ucguuaguucagugccaag

SEQ ID NO: 833923 - RNA, 19 nt, Artificial Sequence
  Description of Artificial Sequence: Synthetic oligonucleotide
  Antisense strand to SEQ ID NO: 833922
cuuggcacugaacuaacga

SEQ ID NO: 833924 - RNA, 19 nt, Artificial Sequence
  Description of Artificial Sequence: Synthetic oligonucleotide
  Sense strand starting at position 3062 of SEQ ID NO: 587991
agccgcucuccguuaugua

SEQ ID NO: 833925 - RNA, 19 nt, Artificial Sequence
  Description of Artificial Sequence: Synthetic oligonucleotide
  Antisense strand to SEQ ID NO: 833924
uacauaacggagagcggcu

SEQ ID NO: 833926 - RNA, 19 nt, Artificial Sequence
  Description of Artificial Sequence: Synthetic oligonucleotide
  Sense strand starting at position 3063 of SEQ ID NO: 587991
gccgcucuccguuauguau

SEQ ID NO: 833927 - RNA, 19 nt, Artificial Sequence
  Description of Artificial Sequence: Synthetic oligonucleotide
  Antisense strand to SEQ ID NO: 833926
auacauaacggagagcggc

SEQ ID NO: 833928 - RNA, 19 nt, Artificial Sequence
  Description of Artificial Sequence: Synthetic oligonucleotide
  Sense strand starting at position 3069 of SEQ ID NO: 587991
cuccguuauguauguuuaa

SEQ ID NO: 833929 - RNA, 19 nt, Artificial Sequence
  Description of Artificial Sequence: Synthetic oligonucleotide
  Antisense strand to SEQ ID NO: 833928
uuaaacauacauaacggag

SEQ ID NO: 833930 - RNA, 19 nt, Artificial Sequence
  Description of Artificial Sequence: Synthetic oligonucleotide
  Sense strand starting at position 3070 of SEQ ID NO: 587991
uccguuauguauguuuaau

SEQ ID NO: 833931 - RNA, 19 nt, Artificial Sequence
  Description of Artificial Sequence: Synthetic oligonucleotide
  Antisense strand to SEQ ID NO: 833930
auuaaacauacauaacgga

SEQ ID NO: 833932 - RNA, 19 nt, Artificial Sequence
  Description of Artificial Sequence: Synthetic oligonucleotide
  Sense strand starting at position 3072 of SEQ ID NO: 587991
cguuauguauguuuaaugu

SEQ ID NO: 833933 - RNA, 19 nt, Artificial Sequence
  Description of Artificial Sequence: Synthetic oligonucleotide
  Antisense strand to SEQ ID NO: 833932
acauuaaacauacauaacg

SEQ ID NO: 833934 - RNA, 19 nt, Artificial Sequence
  Description of Artificial Sequence: Synthetic oligonucleotide
  Sense strand starting at position 3081 of SEQ ID NO: 587991
uguuuaauguucuguuuga

SEQ ID NO: 833935 - RNA, 19 nt, Artificial Sequence
  Description of Artificial Sequence: Synthetic oligonucleotide
  Antisense strand to SEQ ID NO: 833934
ucaaacagaacauuaaaca

SEQ ID NO: 833936 - RNA, 19 nt, Artificial Sequence
  Description of Artificial Sequence: Synthetic oligonucleotide
  Sense strand starting at position 3082 of SEQ ID NO: 587991
guuuaauguucuguuugaa

SEQ ID NO: 833937 - RNA, 19 nt, Artificial Sequence
  Description of Artificial Sequence: Synthetic oligonucleotide
  Antisense strand to SEQ ID NO: 833936
uucaaacagaacauuaaac

SEQ ID NO: 833938 - RNA, 19 nt, Artificial Sequence
  Description of Artificial Sequence: Synthetic oligonucleotide
  Sense strand starting at position 3816 of SEQ ID NO: 587991
ggagaaauggucugagcca

SEQ ID NO: 833939 - RNA, 19 nt, Artificial Sequence
  Description of Artificial Sequence: Synthetic oligonucleotide
  Antisense strand to SEQ ID NO: 833938
uggcucagaccauuucucc

SEQ ID NO: 833940 - RNA, 19 nt, Artificial Sequence
  Description of Artificial Sequence: Synthetic oligonucleotide
  Sense strand starting at position 3817 of SEQ ID NO: 587991
gagaaauggucugagccag

SEQ ID NO: 833941 - RNA, 19 nt, Artificial Sequence
  Description of Artificial Sequence: Synthetic oligonucleotide
  Antisense strand to SEQ ID NO: 833940
cuggcucagaccauuucuc

SEQ ID NO: 833942 - RNA, 19 nt, Artificial Sequence
  Description of Artificial Sequence: Synthetic oligonucleotide
  Sense strand starting at position 49 of SEQ ID NO: 587992
agaucuuuaggacggcaau

SEQ ID NO: 833943 - RNA, 19 nt, Artificial Sequence
  Description of Artificial Sequence: Synthetic oligonucleotide
  Antisense strand to SEQ ID NO: 833942
auugccguccuaaagaucu

SEQ ID NO: 833944 - RNA, 19 nt, Artificial Sequence
  Description of Artificial Sequence: Synthetic oligonucleotide
  Sense strand starting at position 96 of SEQ ID NO: 587992
ggugcuuuguuucagguua

SEQ ID NO: 833945 - RNA, 19 nt, Artificial Sequence
  Description of Artificial Sequence: Synthetic oligonucleotide
  Antisense strand to SEQ ID NO: 833944
uaaccugaaacaaagcacc

SEQ ID NO: 833946 - RNA, 19 nt, Artificial Sequence
  Description of Artificial Sequence: Synthetic oligonucleotide
  Sense strand starting at position 117 of SEQ ID NO: 587992
aaauaaagaugucauaggu

SEQ ID NO: 833947 - RNA, 19 nt, Artificial Sequence
  Description of Artificial Sequence: Synthetic oligonucleotide
  Antisense strand to SEQ ID NO: 833946
accuaugacaucuuuauuu

SEQ ID NO: 833948 - RNA, 19 nt, Artificial Sequence
  Description of Artificial Sequence: Synthetic oligonucleotide
  Sense strand starting at position 123 of SEQ ID NO: 587992
agaugucauagguagcuau

SEQ ID NO: 833949 - RNA, 19 nt, Artificial Sequence
  Description of Artificial Sequence: Synthetic oligonucleotide
  Antisense strand to SEQ ID NO: 833948
auagcuaccuaugacaucu

SEQ ID NO: 833950 - RNA, 19 nt, Artificial Sequence
  Description of Artificial Sequence: Synthetic oligonucleotide
  Sense strand starting at position 127 of SEQ ID NO: 587992
gucauagguagcuaugacu

SEQ ID NO: 833951 - RNA, 19 nt, Artificial Sequence
  Description of Artificial Sequence: Synthetic oligonucleotide
  Antisense strand to SEQ ID NO: 833950
agucauagcuaccuaugac

SEQ ID NO: 833952 - RNA, 19 nt, Artificial Sequence
  Description of Artificial Sequence: Synthetic oligonucleotide
  Sense strand starting at position 133 of SEQ ID NO: 587992
gguagcuaugacuaccuua

SEQ ID NO: 833953 - RNA, 19 nt, Artificial Sequence
  Description of Artificial Sequence: Synthetic oligonucleotide
  Antisense strand to SEQ ID NO: 833952
uaagguagucauagcuacc

SEQ ID NO: 833954 - RNA, 19 nt, Artificial Sequence
  Description of Artificial Sequence: Synthetic oligonucleotide
  Sense strand starting at position 136 of SEQ ID NO: 587992
agcuaugacuaccuuagaa

SEQ ID NO: 833955 - RNA, 19 nt, Artificial Sequence
  Description of Artificial Sequence: Synthetic oligonucleotide
  Antisense strand to SEQ ID NO: 833954
uucuaagguagucauagcu

SEQ ID NO: 833956 - RNA, 19 nt, Artificial Sequence
  Description of Artificial Sequence: Synthetic oligonucleotide
  Sense strand starting at position 158 of SEQ ID NO: 587992
cgggacagucaccaguuua

SEQ ID NO: 833957 - RNA, 19 nt, Artificial Sequence
  Description of Artificial Sequence: Synthetic oligonucleotide
  Antisense strand to SEQ ID NO: 833956
uaaacuggugacugucccg

SEQ ID NO: 833958 - RNA, 19 nt, Artificial Sequence
  Description of Artificial Sequence: Synthetic oligonucleotide
  Sense strand starting at position 319 of SEQ ID NO: 587992
agacauucacguugggaag

SEQ ID NO: 833959 - RNA, 19 nt, Artificial Sequence
  Description of Artificial Sequence: Synthetic oligonucleotide
  Antisense strand to SEQ ID NO: 833958
cuucccaacgugaaugucu

SEQ ID NO: 833960 - RNA, 19 nt, Artificial Sequence
  Description of Artificial Sequence: Synthetic oligonucleotide
  Sense strand starting at position 413 of SEQ ID NO: 587992
caggguucccugggauaag

SEQ ID NO: 833961 - RNA, 19 nt, Artificial Sequence
  Description of Artificial Sequence: Synthetic oligonucleotide
  Antisense strand to SEQ ID NO: 833960
cuuaucccagggaacccug

SEQ ID NO: 833962 - RNA, 19 nt, Artificial Sequence
  Description of Artificial Sequence: Synthetic oligonucleotide
  Sense strand starting at position 414 of SEQ ID NO: 587992
aggguucccugggauaagu

SEQ ID NO: 833963 - RNA, 19 nt, Artificial Sequence
  Description of Artificial Sequence: Synthetic oligonucleotide
  Antisense strand to SEQ ID NO: 833962
acuuaucccagggaacccu

SEQ ID NO: 833964 - RNA, 19 nt, Artificial Sequence
  Description of Artificial Sequence: Synthetic oligonucleotide
  Sense strand starting at position 423 of SEQ ID NO: 587992
ugggauaaguuggaguuga

SEQ ID NO: 833965 - RNA, 19 nt, Artificial Sequence
  Description of Artificial Sequence: Synthetic oligonucleotide
  Antisense strand to SEQ ID NO: 833964
ucaacuccaacuuauccca

SEQ ID NO: 833966 - RNA, 19 nt, Artificial Sequence
  Description of Artificial Sequence: Synthetic oligonucleotide
  Sense strand starting at position 424 of SEQ ID NO: 587992
gggauaaguuggaguugac

SEQ ID NO: 833967 - RNA, 19 nt, Artificial Sequence
  Description of Artificial Sequence: Synthetic oligonucleotide
  Antisense strand to SEQ ID NO: 833966
gucaacuccaacuuauccc

SEQ ID NO: 833968 - RNA, 19 nt, Artificial Sequence
  Description of Artificial Sequence: Synthetic oligonucleotide
  Sense strand starting at position 446 of SEQ ID NO: 587992
gcgcuuaucccagagagca

SEQ ID NO: 833969 - RNA, 19 nt, Artificial Sequence
  Description of Artificial Sequence: Synthetic oligonucleotide
  Antisense strand to SEQ ID NO: 833968
ugcucucugggauaagcgc

SEQ ID NO: 833970 - RNA, 19 nt, Artificial Sequence
  Description of Artificial Sequence: Synthetic oligonucleotide
  Sense strand starting at position 828 of SEQ ID NO: 587992
cggccuuggacagauguaa

SEQ ID NO: 833971 - RNA, 19 nt, Artificial Sequence
  Description of Artificial Sequence: Synthetic oligonucleotide
  Antisense strand to SEQ ID NO: 833970
uuacaucuguccaaggccg

SEQ ID NO: 833972 - RNA, 19 nt, Artificial Sequence
  Description of Artificial Sequence: Synthetic oligonucleotide
  Sense strand starting at position 1636 of SEQ ID NO: 587992
gaggaaagcuucugcaccu

SEQ ID NO: 833973 - RNA, 19 nt, Artificial Sequence
  Description of Artificial Sequence: Synthetic oligonucleotide
  Antisense strand to SEQ ID NO: 833972
aggugcagaagcuuuccuc

SEQ ID NO: 833974 - RNA, 19 nt, Artificial Sequence
  Description of Artificial Sequence: Synthetic oligonucleotide
  Sense strand starting at position 2063 of SEQ ID NO: 587992
gucguuaguucagugccaa

SEQ ID NO: 833975 - RNA, 19 nt, Artificial Sequence
  Description of Artificial Sequence: Synthetic oligonucleotide
  Antisense strand to SEQ ID NO: 833974
uuggcacugaacuaacgac

SEQ ID NO: 833976 - RNA, 19 nt, Artificial Sequence
  Description of Artificial Sequence: Synthetic oligonucleotide
  Sense strand starting at position 2064 of SEQ ID NO: 587992
ucguuaguucagugccaag

SEQ ID NO: 833977 - RNA, 19 nt, Artificial Sequence
  Description of Artificial Sequence: Synthetic oligonucleotide
  Antisense strand to SEQ ID NO: 833976
cuuggcacugaacuaacga

SEQ ID NO: 833978 - RNA, 19 nt, Artificial Sequence
  Description of Artificial Sequence: Synthetic oligonucleotide
  Sense strand starting at position 2245 of SEQ ID NO: 587992
agccgcucuccguuaugua

SEQ ID NO: 833979 - RNA, 19 nt, Artificial Sequence
  Description of Artificial Sequence: Synthetic oligonucleotide
  Antisense strand to SEQ ID NO: 833978
uacauaacggagagcggcu

SEQ ID NO: 833980 - RNA, 19 nt, Artificial Sequence
  Description of Artificial Sequence: Synthetic oligonucleotide
  Sense strand starting at position 2246 of SEQ ID NO: 587992
gccgcucuccguuauguau

SEQ ID NO: 833981 - RNA, 19 nt, Artificial Sequence
  Description of Artificial Sequence: Synthetic oligonucleotide
  Antisense strand to SEQ ID NO: 833980
auacauaacggagagcggc

SEQ ID NO: 833982 - RNA, 19 nt, Artificial Sequence
  Description of Artificial Sequence: Synthetic oligonucleotide
  Sense strand starting at position 2252 of SEQ ID NO: 587992
cuccguuauguauguuuaa

SEQ ID NO: 833983 - RNA, 19 nt, Artificial Sequence
  Description of Artificial Sequence: Synthetic oligonucleotide
  Antisense strand to SEQ ID NO: 833982
uuaaacauacauaacggag

SEQ ID NO: 833984 - RNA, 19 nt, Artificial Sequence
  Description of Artificial Sequence: Synthetic oligonucleotide
  Sense strand starting at position 2253 of SEQ ID NO: 587992
uccguuauguauguuuaau

SEQ ID NO: 833985 - RNA, 19 nt, Artificial Sequence
  Description of Artificial Sequence: Synthetic oligonucleotide
  Antisense strand to SEQ ID NO: 833984
auuaaacauacauaacgga

SEQ ID NO: 833986 - RNA, 19 nt, Artificial Sequence
  Description of Artificial Sequence: Synthetic oligonucleotide
  Sense strand starting at position 2255 of SEQ ID NO: 587992
cguuauguauguuuaaugu

SEQ ID NO: 833987 - RNA, 19 nt, Artificial Sequence
  Description of Artificial Sequence: Synthetic oligonucleotide
  Antisense strand to SEQ ID NO: 833986
acauuaaacauacauaacg

SEQ ID NO: 833988 - RNA, 19 nt, Artificial Sequence
  Description of Artificial Sequence: Synthetic oligonucleotide
  Sense strand starting at position 2264 of SEQ ID NO: 587992
uguuuaauguucuguuuga

SEQ ID NO: 833989 - RNA, 19 nt, Artificial Sequence
  Description of Artificial Sequence: Synthetic oligonucleotide
  Antisense strand to SEQ ID NO: 833988
ucaaacagaacauuaaaca

SEQ ID NO: 833990 - RNA, 19 nt, Artificial Sequence
  Description of Artificial Sequence: Synthetic oligonucleotide
  Sense strand starting at position 2265 of SEQ ID NO: 587992
guuuaauguucuguuugaa

SEQ ID NO: 833991 - RNA, 19 nt, Artificial Sequence
  Description of Artificial Sequence: Synthetic oligonucleotide
  Antisense strand to SEQ ID NO: 833990
uucaaacagaacauuaaac

SEQ ID NO: 833992 - RNA, 19 nt, Artificial Sequence
  Description of Artificial Sequence: Synthetic oligonucleotide
  Sense strand starting at position 2999 of SEQ ID NO: 587992
ggagaaauggucugagcca

SEQ ID NO: 833993 - RNA, 19 nt, Artificial Sequence
  Description of Artificial Sequence: Synthetic oligonucleotide
  Antisense strand to SEQ ID NO: 833992
uggcucagaccauuucucc

SEQ ID NO: 833994 - RNA, 19 nt, Artificial Sequence
  Description of Artificial Sequence: Synthetic oligonucleotide
  Sense strand starting at position 3000 of SEQ ID NO: 587992
gagaaauggucugagccag

SEQ ID NO: 833995 - RNA, 19 nt, Artificial Sequence
  Description of Artificial Sequence: Synthetic oligonucleotide
  Antisense strand to SEQ ID NO: 833994
cuggcucagaccauuucuc

SEQ ID NO: 833996 - RNA, 19 nt, Artificial Sequence
  Description of Artificial Sequence: Synthetic oligonucleotide
  Sense strand starting at position 3174 of SEQ ID NO: 587992
gagucagaaugaguuauaa

SEQ ID NO: 833997 - RNA, 19 nt, Artificial Sequence
  Description of Artificial Sequence: Synthetic oligonucleotide
  Antisense strand to SEQ ID NO: 833996
uuauaacucauucugacuc

SEQ ID NO: 833998 - RNA, 19 nt, Artificial Sequence
  Description of Artificial Sequence: Synthetic oligonucleotide
  Sense strand starting at position 3227 of SEQ ID NO: 587992
ugauuuccagccugccaga

SEQ ID NO: 833999 - RNA, 19 nt, Artificial Sequence
  Description of Artificial Sequence: Synthetic oligonucleotide
  Antisense strand to SEQ ID NO: 833998
ucuggcaggcuggaaauca

SEQ ID NO: 834000 - RNA, 19 nt, Artificial Sequence
  Description of Artificial Sequence: Synthetic oligonucleotide
  Sense strand starting at position 3284 of SEQ ID NO: 587992
ggaagagugucucccugac

SEQ ID NO: 834001 - RNA, 19 nt, Artificial Sequence
  Description of Artificial Sequence: Synthetic oligonucleotide
  Antisense strand to SEQ ID NO: 834000
gucagggagacacucuucc

SEQ ID NO: 834002 - RNA, 19 nt, Artificial Sequence
  Description of Artificial Sequence: Synthetic oligonucleotide
  Sense strand starting at position 3286 of SEQ ID NO: 587992
aagagugucucccugacaa

SEQ ID NO: 834003 - RNA, 19 nt, Artificial Sequence
  Description of Artificial Sequence: Synthetic oligonucleotide
  Antisense strand to SEQ ID NO: 834002
uugucagggagacacucuu

SEQ ID NO: 834004 - RNA, 19 nt, Artificial Sequence
  Description of Artificial Sequence: Synthetic oligonucleotide
  Sense strand starting at position 3323 of SEQ ID NO: 587992
uggcuaccucaugguguua

SEQ ID NO: 834005 - RNA, 19 nt, Artificial Sequence
  Description of Artificial Sequence: Synthetic oligonucleotide
  Antisense strand to SEQ ID NO: 834004
uaacaccaugagguagcca

SEQ ID NO: 834006 - RNA, 19 nt, Artificial Sequence
  Description of Artificial Sequence: Synthetic oligonucleotide
  Sense strand starting at position 3451 of SEQ ID NO: 587992
cagggaaacucugucucuu

SEQ ID NO: 834007 - RNA, 19 nt, Artificial Sequence
  Description of Artificial Sequence: Synthetic oligonucleotide
  Antisense strand to SEQ ID NO: 834006
aagagacagaguuucccug

SEQ ID NO: 834008 - RNA, 19 nt, Artificial Sequence
  Description of Artificial Sequence: Synthetic oligonucleotide
  Sense strand starting at position 3455 of SEQ ID NO: 587992
gaaacucugucucuuggaa

SEQ ID NO: 834009 - RNA, 19 nt, Artificial Sequence
  Description of Artificial Sequence: Synthetic oligonucleotide
  Antisense strand to SEQ ID NO: 834008
uuccaagagacagaguuuc

SEQ ID NO: 834010 - RNA, 19 nt, Artificial Sequence
  Description of Artificial Sequence: Synthetic oligonucleotide
  Sense strand starting at position 3677 of SEQ ID NO: 587992
agcguaugggcuuaacaga

SEQ ID NO: 834011 - RNA, 19 nt, Artificial Sequence
  Description of Artificial Sequence: Synthetic oligonucleotide
  Antisense strand to SEQ ID NO: 834010
ucuguuaagcccauacgcu

SEQ ID NO: 834012 - RNA, 19 nt, Artificial Sequence
  Description of Artificial Sequence: Synthetic oligonucleotide
  Sense strand starting at position 3844 of SEQ ID NO: 587992
acaaauggcuggugcuauu

SEQ ID NO: 834013 - RNA, 19 nt, Artificial Sequence
  Description of Artificial Sequence: Synthetic oligonucleotide
  Antisense strand to SEQ ID NO: 834012
aauagcaccagccauuugu

SEQ ID NO: 834014 - RNA, 19 nt, Artificial Sequence
  Description of Artificial Sequence: Synthetic oligonucleotide
  Sense strand starting at position 3854 of SEQ ID NO: 587992
ggugcuauuuagggauuca

SEQ ID NO: 834015 - RNA, 19 nt, Artificial Sequence
  Description of Artificial Sequence: Synthetic oligonucleotide
  Antisense strand to SEQ ID NO: 834014
ugaaucccuaaauagcacc

SEQ ID NO: 834016 - RNA, 19 nt, Artificial Sequence
  Description of Artificial Sequence: Synthetic oligonucleotide
  Sense strand starting at position 3927 of SEQ ID NO: 587992
uucugucuguaaguggaua

SEQ ID NO: 834017 - RNA, 19 nt, Artificial Sequence
  Description of Artificial Sequence: Synthetic oligonucleotide
  Antisense strand to SEQ ID NO: 834016
uauccacuuacagacagaa

SEQ ID NO: 834018 - RNA, 19 nt, Artificial Sequence
  Description of Artificial Sequence: Synthetic oligonucleotide
  Sense strand starting at position 3928 of SEQ ID NO: 587992
ucugucuguaaguggauaa

SEQ ID NO: 834019 - RNA, 19 nt, Artificial Sequence
  Description of Artificial Sequence: Synthetic oligonucleotide
  Antisense strand to SEQ ID NO: 834018
uuauccacuuacagacaga

SEQ ID NO: 834020 - RNA, 19 nt, Artificial Sequence
  Description of Artificial Sequence: Synthetic oligonucleotide
  Sense strand starting at position 12 of SEQ ID NO: 587993
gaaguaacagugugaauga

SEQ ID NO: 834021 - RNA, 19 nt, Artificial Sequence
  Description of Artificial Sequence: Synthetic oligonucleotide
  Antisense strand to SEQ ID NO: 834020
ucauucacacuguuacuuc

SEQ ID NO: 834022 - RNA, 19 nt, Artificial Sequence
  Description of Artificial Sequence: Synthetic oligonucleotide
  Sense strand starting at position 19 of SEQ ID NO: 587993
cagugugaaugauuauaug

SEQ ID NO: 834023 - RNA, 19 nt, Artificial Sequence
  Description of Artificial Sequence: Synthetic oligonucleotide
  Antisense strand to SEQ ID NO: 834022
cauauaaucauucacacug

SEQ ID NO: 834024 - RNA, 19 nt, Artificial Sequence
  Description of Artificial Sequence: Synthetic oligonucleotide
  Sense strand starting at position 127 of SEQ ID NO: 587993
aaaguaucagcauguugau

SEQ ID NO: 834025 - RNA, 19 nt, Artificial Sequence
  Description of Artificial Sequence: Synthetic oligonucleotide
  Antisense strand to SEQ ID NO: 834024
aucaacaugcugauacuuu

SEQ ID NO: 834026 - RNA, 19 nt, Artificial Sequence
  Description of Artificial Sequence: Synthetic oligonucleotide
  Sense strand starting at position 239 of SEQ ID NO: 587993
guuugucaguaaccuagaa

SEQ ID NO: 834027 - RNA, 19 nt, Artificial Sequence
  Description of Artificial Sequence: Synthetic oligonucleotide
  Antisense strand to SEQ ID NO: 834026
uucuagguuacugacaaac

SEQ ID NO: 834028 - RNA, 19 nt, Artificial Sequence
  Description of Artificial Sequence: Synthetic oligonucleotide
  Sense strand starting at position 417 of SEQ ID NO: 587993
uagguaugcuuagcaggaa

SEQ ID NO: 834029 - RNA, 19 nt, Artificial Sequence
  Description of Artificial Sequence: Synthetic oligonucleotide
  Antisense strand to SEQ ID NO: 834028
uuccugcuaagcauaccua

SEQ ID NO: 834030 - RNA, 19 nt, Artificial Sequence
  Description of Artificial Sequence: Synthetic oligonucleotide
  Sense strand starting at position 619 of SEQ ID NO: 587993
caggaaccuuucucaggua

SEQ ID NO: 834031 - RNA, 19 nt, Artificial Sequence
  Description of Artificial Sequence: Synthetic oligonucleotide
  Antisense strand to SEQ ID NO: 834030
uaccugagaaagguuccug

SEQ ID NO: 834032 - RNA, 19 nt, Artificial Sequence
  Description of Artificial Sequence: Synthetic oligonucleotide
  Sense strand starting at position 631 of SEQ ID NO: 587993
ucagguauaugucuccauu

SEQ ID NO: 834033 - RNA, 19 nt, Artificial Sequence
  Description of Artificial Sequence: Synthetic oligonucleotide
  Antisense strand to SEQ ID NO: 834032
aauggagacauauaccuga

SEQ ID NO: 834034 - RNA, 19 nt, Artificial Sequence
  Description of Artificial Sequence: Synthetic oligonucleotide
  Sense strand starting at position 634 of SEQ ID NO: 587993
gguauaugucuccauugug

SEQ ID NO: 834035 - RNA, 19 nt, Artificial Sequence
  Description of Artificial Sequence: Synthetic oligonucleotide
  Antisense strand to SEQ ID NO: 834034
cacaauggagacauauacc

SEQ ID NO: 834036 - RNA, 19 nt, Artificial Sequence
  Description of Artificial Sequence: Synthetic oligonucleotide
  Sense strand starting at position 642 of SEQ ID NO: 587993
ucuccauugugaguaacca

SEQ ID NO: 834037 - RNA, 19 nt, Artificial Sequence
  Description of Artificial Sequence: Synthetic oligonucleotide
  Antisense strand to SEQ ID NO: 834036
ugguuacucacaauggaga

SEQ ID NO: 834038 - RNA, 19 nt, Artificial Sequence
  Description of Artificial Sequence: Synthetic oligonucleotide
  Sense strand starting at position 643 of SEQ ID NO: 587993
cuccauugugaguaaccau

SEQ ID NO: 834039 - RNA, 19 nt, Artificial Sequence
  Description of Artificial Sequence: Synthetic oligonucleotide
  Antisense strand to SEQ ID NO: 834038
augguuacucacaauggag

SEQ ID NO: 834040 - RNA, 19 nt, Artificial Sequence
  Description of Artificial Sequence: Synthetic oligonucleotide
  Sense strand starting at position 646 of SEQ ID NO: 587993
cauugugaguaaccauaga

SEQ ID NO: 834041 - RNA, 19 nt, Artificial Sequence
  Description of Artificial Sequence: Synthetic oligonucleotide
  Antisense strand to SEQ ID NO: 834040
ucuaugguuacucacaaug

SEQ ID NO: 834042 - RNA, 19 nt, Artificial Sequence
  Description of Artificial Sequence: Synthetic oligonucleotide
  Sense strand starting at position 718 of SEQ ID NO: 587993
gucaaauauuuguugugca

SEQ ID NO: 834043 - RNA, 19 nt, Artificial Sequence
  Description of Artificial Sequence: Synthetic oligonucleotide
  Antisense strand to SEQ ID NO: 834042
ugcacaacaaauauuugac

SEQ ID NO: 834044 - RNA, 19 nt, Artificial Sequence
  Description of Artificial Sequence: Synthetic oligonucleotide
  Sense strand starting at position 726 of SEQ ID NO: 587993
uuuguugugcaauagaauu

SEQ ID NO: 834045 - RNA, 19 nt, Artificial Sequence
  Description of Artificial Sequence: Synthetic oligonucleotide
  Antisense strand to SEQ ID NO: 834044
aauucuauugcacaacaaa

SEQ ID NO: 834046 - RNA, 19 nt, Artificial Sequence
  Description of Artificial Sequence: Synthetic oligonucleotide
  Sense strand starting at position 954 of SEQ ID NO: 587993
aguugcuuuagagauggau

SEQ ID NO: 834047 - RNA, 19 nt, Artificial Sequence
  Description of Artificial Sequence: Synthetic oligonucleotide
  Antisense strand to SEQ ID NO: 834046
auccaucucuaaagcaacu

SEQ ID NO: 834048 - RNA, 19 nt, Artificial Sequence
  Description of Artificial Sequence: Synthetic oligonucleotide
  Sense strand starting at position 970 of SEQ ID NO: 587993
gauuuaauauguuaggcag

SEQ ID NO: 834049 - RNA, 19 nt, Artificial Sequence
  Description of Artificial Sequence: Synthetic oligonucleotide
  Antisense strand to SEQ ID NO: 834048
cugccuaacauauuaaauc

SEQ ID NO: 834050 - RNA, 19 nt, Artificial Sequence
  Description of Artificial Sequence: Synthetic oligonucleotide
  Sense strand starting at position 973 of SEQ ID NO: 587993
uuaauauguuaggcagaag

SEQ ID NO: 834051 - RNA, 19 nt, Artificial Sequence
  Description of Artificial Sequence: Synthetic oligonucleotide
  Antisense strand to SEQ ID NO: 834050
cuucugccuaacauauuaa

SEQ ID NO: 834052 - RNA, 19 nt, Artificial Sequence
  Description of Artificial Sequence: Synthetic oligonucleotide
  Sense strand starting at position 976 of SEQ ID NO: 587993
auauguuaggcagaagcuu

SEQ ID NO: 834053 - RNA, 19 nt, Artificial Sequence
  Description of Artificial Sequence: Synthetic oligonucleotide
  Antisense strand to SEQ ID NO: 834052
aagcuucugccuaacauau

SEQ ID NO: 834054 - RNA, 19 nt, Artificial Sequence
  Description of Artificial Sequence: Synthetic oligonucleotide
  Sense strand starting at position 987 of SEQ ID NO: 587993
agaagcuuacacugugaaa

SEQ ID NO: 834055 - RNA, 19 nt, Artificial Sequence
  Description of Artificial Sequence: Synthetic oligonucleotide
  Antisense strand to SEQ ID NO: 834054
uuucacaguguaagcuucu

SEQ ID NO: 834056 - RNA, 19 nt, Artificial Sequence
  Description of Artificial Sequence: Synthetic oligonucleotide
  Sense strand starting at position 1024 of SEQ ID NO: 587993
uugguuucgccaucagcua

SEQ ID NO: 834057 - RNA, 19 nt, Artificial Sequence
  Description of Artificial Sequence: Synthetic oligonucleotide
  Antisense strand to SEQ ID NO: 834056
uagcugauggcgaaaccaa

SEQ ID NO: 834058 - RNA, 19 nt, Artificial Sequence
  Description of Artificial Sequence: Synthetic oligonucleotide
  Sense strand starting at position 1092 of SEQ ID NO: 587993
cucuauugacuuggaguuu

SEQ ID NO: 834059 - RNA, 19 nt, Artificial Sequence
  Description of Artificial Sequence: Synthetic oligonucleotide
  Antisense strand to SEQ ID NO: 834058
aaacuccaagucaauagag

SEQ ID NO: 834060 - RNA, 19 nt, Artificial Sequence
  Description of Artificial Sequence: Synthetic oligonucleotide
  Sense strand starting at position 2035 of SEQ ID NO: 587993
guuacaauuucugaucaag

SEQ ID NO: 834061 - RNA, 19 nt, Artificial Sequence
  Description of Artificial Sequence: Synthetic oligonucleotide
  Antisense strand to SEQ ID NO: 834060
cuugaucagaaauuguaac

SEQ ID NO: 834062 - RNA, 19 nt, Artificial Sequence
  Description of Artificial Sequence: Synthetic oligonucleotide
  Sense strand starting at position 2107 of SEQ ID NO: 587993
gggaauagggcucaugugu

SEQ ID NO: 834063 - RNA, 19 nt, Artificial Sequence
  Description of Artificial Sequence: Synthetic oligonucleotide
  Antisense strand to SEQ ID NO: 834062
acacaugagcccuauuccc

SEQ ID NO: 834064 - RNA, 19 nt, Artificial Sequence
  Description of Artificial Sequence: Synthetic oligonucleotide
  Sense strand starting at position 2148 of SEQ ID NO: 587993
gcaucucuaguguagaaug

SEQ ID NO: 834065 - RNA, 19 nt, Artificial Sequence
  Description of Artificial Sequence: Synthetic oligonucleotide
  Antisense strand to SEQ ID NO: 834064
cauucuacacuagagaugc

SEQ ID NO: 834066 - RNA, 19 nt, Artificial Sequence
  Description of Artificial Sequence: Synthetic oligonucleotide
  Sense strand starting at position 2153 of SEQ ID NO: 587993
ucuaguguagaauggagua

SEQ ID NO: 834067 - RNA, 19 nt, Artificial Sequence
  Description of Artificial Sequence: Synthetic oligonucleotide
  Antisense strand to SEQ ID NO: 834066
uacuccauucuacacuaga

SEQ ID NO: 834068 - RNA, 19 nt, Artificial Sequence
  Description of Artificial Sequence: Synthetic oligonucleotide
  Sense strand starting at position 2158 of SEQ ID NO: 587993
uguagaauggaguaacugu

SEQ ID NO: 834069 - RNA, 19 nt, Artificial Sequence
  Description of Artificial Sequence: Synthetic oligonucleotide
  Antisense strand to SEQ ID NO: 834068
acaguuacuccauucuaca

SEQ ID NO: 834070 - RNA, 19 nt, Artificial Sequence
  Description of Artificial Sequence: Synthetic oligonucleotide
  Sense strand starting at position 2198 of SEQ ID NO: 587993
gggaccaguucccucuuaa

SEQ ID NO: 834071 - RNA, 19 nt, Artificial Sequence
  Description of Artificial Sequence: Synthetic oligonucleotide
  Antisense strand to SEQ ID NO: 834070
uuaagagggaacugguccc

SEQ ID NO: 834072 - RNA, 19 nt, Artificial Sequence
  Description of Artificial Sequence: Synthetic oligonucleotide
  Sense strand starting at position 2466 of SEQ ID NO: 587993
auagcaagccuuugagaug

SEQ ID NO: 834073 - RNA, 19 nt, Artificial Sequence
  Description of Artificial Sequence: Synthetic oligonucleotide
  Antisense strand to SEQ ID NO: 834072
caucucaaaggcuugcuau

SEQ ID NO: 834074 - RNA, 19 nt, Artificial Sequence
  Description of Artificial Sequence: Synthetic oligonucleotide
  Sense strand starting at position 2573 of SEQ ID NO: 587993
gguagaugaagugguaaua

SEQ ID NO: 834075 - RNA, 19 nt, Artificial Sequence
  Description of Artificial Sequence: Synthetic oligonucleotide
  Antisense strand to SEQ ID NO: 834074
uauuaccacuucaucuacc

SEQ ID NO: 834076 - RNA, 19 nt, Artificial Sequence
  Description of Artificial Sequence: Synthetic oligonucleotide
  Sense strand starting at position 2881 of SEQ ID NO: 587993
ccagucaguccucacugau

SEQ ID NO: 834077 - RNA, 19 nt, Artificial Sequence
  Description of Artificial Sequence: Synthetic oligonucleotide
  Antisense strand to SEQ ID NO: 834076
aucagugaggacugacugg

SEQ ID NO: 834078 - RNA, 19 nt, Artificial Sequence
  Description of Artificial Sequence: Synthetic oligonucleotide
  Sense strand starting at position 2906 of SEQ ID NO: 587993
ucuucugcucuuggaggau

SEQ ID NO: 834079 - RNA, 19 nt, Artificial Sequence
  Description of Artificial Sequence: Synthetic oligonucleotide
  Antisense strand to SEQ ID NO: 834078
auccuccaagagcagaaga

SEQ ID NO: 834080 - RNA, 19 nt, Artificial Sequence
  Description of Artificial Sequence: Synthetic oligonucleotide
  Sense strand starting at position 3020 of SEQ ID NO: 587993
aucuaaguucugcagaaac

SEQ ID NO: 834081 - RNA, 19 nt, Artificial Sequence
  Description of Artificial Sequence: Synthetic oligonucleotide
  Antisense strand to SEQ ID NO: 834080
guuucugcagaacuuagau

SEQ ID NO: 834082 - RNA, 19 nt, Artificial Sequence
  Description of Artificial Sequence: Synthetic oligonucleotide
  Sense strand starting at position 3022 of SEQ ID NO: 587993
cuaaguucugcagaaacuc

SEQ ID NO: 834083 - RNA, 19 nt, Artificial Sequence
  Description of Artificial Sequence: Synthetic oligonucleotide
  Antisense strand to SEQ ID NO: 834082
gaguuucugcagaacuuag

SEQ ID NO: 834084 - RNA, 19 nt, Artificial Sequence
  Description of Artificial Sequence: Synthetic oligonucleotide
  Sense strand starting at position 3071 of SEQ ID NO: 587993
cacuccuugcuugauagga

SEQ ID NO: 834085 - RNA, 19 nt, Artificial Sequence
  Description of Artificial Sequence: Synthetic oligonucleotide
  Antisense strand to SEQ ID NO: 834084
uccuaucaagcaaggagug

SEQ ID NO: 834086 - RNA, 19 nt, Artificial Sequence
  Description of Artificial Sequence: Synthetic oligonucleotide
  Sense strand starting at position 3106 of SEQ ID NO: 587993
uccuucucagucuagacau

SEQ ID NO: 834087 - RNA, 19 nt, Artificial Sequence
  Description of Artificial Sequence: Synthetic oligonucleotide
  Antisense strand to SEQ ID NO: 834086
augucuagacugagaagga

SEQ ID NO: 834088 - RNA, 19 nt, Artificial Sequence
  Description of Artificial Sequence: Synthetic oligonucleotide
  Sense strand starting at position 3126 of SEQ ID NO: 587993
gcccuugaagcuugaaaua

SEQ ID NO: 834089 - RNA, 19 nt, Artificial Sequence
  Description of Artificial Sequence: Synthetic oligonucleotide
  Antisense strand to SEQ ID NO: 834088
uauuucaagcuucaagggc

SEQ ID NO: 834090 - RNA, 19 nt, Artificial Sequence
  Description of Artificial Sequence: Synthetic oligonucleotide
  Sense strand starting at position 3136 of SEQ ID NO: 587993
cuugaaauaucugucugag

SEQ ID NO: 834091 - RNA, 19 nt, Artificial Sequence
  Description of Artificial Sequence: Synthetic oligonucleotide
  Antisense strand to SEQ ID NO: 834090
cucagacagauauuucaag

SEQ ID NO: 834092 - RNA, 19 nt, Artificial Sequence
  Description of Artificial Sequence: Synthetic oligonucleotide
  Sense strand starting at position 3142 of SEQ ID NO: 587993
auaucugucugagcugaaa

SEQ ID NO: 834093 - RNA, 19 nt, Artificial Sequence
  Description of Artificial Sequence: Synthetic oligonucleotide
  Antisense strand to SEQ ID NO: 834092
uuucagcucagacagauau

SEQ ID NO: 834094 - RNA, 19 nt, Artificial Sequence
  Description of Artificial Sequence: Synthetic oligonucleotide
  Sense strand starting at position 3145 of SEQ ID NO: 587993
ucugucugagcugaaauca

SEQ ID NO: 834095 - RNA, 19 nt, Artificial Sequence
  Description of Artificial Sequence: Synthetic oligonucleotide
  Antisense strand to SEQ ID NO: 834094
ugauuucagcucagacaga

SEQ ID NO: 834096 - RNA, 19 nt, Artificial Sequence
  Description of Artificial Sequence: Synthetic oligonucleotide
  Sense strand starting at position 3201 of SEQ ID NO: 587993
ucaagugaaucaguacaau

SEQ ID NO: 834097 - RNA, 19 nt, Artificial Sequence
  Description of Artificial Sequence: Synthetic oligonucleotide
  Antisense strand to SEQ ID NO: 834096
auuguacugauucacuuga

SEQ ID NO: 834098 - RNA, 19 nt, Artificial Sequence
  Description of Artificial Sequence: Synthetic oligonucleotide
  Sense strand starting at position 3321 of SEQ ID NO: 587993
aggccucuuugagcuaaga

SEQ ID NO: 834099 - RNA, 19 nt, Artificial Sequence
  Description of Artificial Sequence: Synthetic oligonucleotide
  Antisense strand to SEQ ID NO: 834098
ucuuagcucaaagaggccu

SEQ ID NO: 834100 - RNA, 19 nt, Artificial Sequence
  Description of Artificial Sequence: Synthetic oligonucleotide
  Sense strand starting at position 94 of SEQ ID NO: 587994
accagagaaugugauguua

SEQ ID NO: 834101 - RNA, 19 nt, Artificial Sequence
  Description of Artificial Sequence: Synthetic oligonucleotide
  Antisense strand to SEQ ID NO: 834100
uaacaucacauucucuggu

SEQ ID NO: 834102 - RNA, 19 nt, Artificial Sequence
  Description of Artificial Sequence: Synthetic oligonucleotide
  Sense strand starting at position 96 of SEQ ID NO: 587994
cagagaaugugauguuaca

SEQ ID NO: 834103 - RNA, 19 nt, Artificial Sequence
  Description of Artificial Sequence: Synthetic oligonucleotide
  Antisense strand to SEQ ID NO: 834102
uguaacaucacauucucug

SEQ ID NO: 834104 - RNA, 19 nt, Artificial Sequence
  Description of Artificial Sequence: Synthetic oligonucleotide
  Sense strand starting at position 134 of SEQ ID NO: 587994
ggagaggaaugcuguguga

SEQ ID NO: 834105 - RNA, 19 nt, Artificial Sequence
  Description of Artificial Sequence: Synthetic oligonucleotide
  Antisense strand to SEQ ID NO: 834104
ucacacagcauuccucucc

SEQ ID NO: 834106 - RNA, 19 nt, Artificial Sequence
  Description of Artificial Sequence: Synthetic oligonucleotide
  Sense strand starting at position 136 of SEQ ID NO: 587994
agaggaaugcugugugaaa

SEQ ID NO: 834107 - RNA, 19 nt, Artificial Sequence
  Description of Artificial Sequence: Synthetic oligonucleotide
  Antisense strand to SEQ ID NO: 834106
uuucacacagcauuccucu

SEQ ID NO: 834108 - RNA, 19 nt, Artificial Sequence
  Description of Artificial Sequence: Synthetic oligonucleotide
  Sense strand starting at position 137 of SEQ ID NO: 587994
gaggaaugcugugugaaac

SEQ ID NO: 834109 - RNA, 19 nt, Artificial Sequence
  Description of Artificial Sequence: Synthetic oligonucleotide
  Antisense strand to SEQ ID NO: 834108
guuucacacagcauuccuc

SEQ ID NO: 834110 - RNA, 19 nt, Artificial Sequence
  Description of Artificial Sequence: Synthetic oligonucleotide
  Sense strand starting at position 138 of SEQ ID NO: 587994
aggaaugcugugugaaaca

SEQ ID NO: 834111 - RNA, 19 nt, Artificial Sequence
  Description of Artificial Sequence: Synthetic oligonucleotide
  Antisense strand to SEQ ID NO: 834110
uguuucacacagcauuccu

SEQ ID NO: 834112 - RNA, 19 nt, Artificial Sequence
  Description of Artificial Sequence: Synthetic oligonucleotide
  Sense strand starting at position 185 of SEQ ID NO: 587994
ucucacuagcucugugaaa

SEQ ID NO: 834113 - RNA, 19 nt, Artificial Sequence
  Description of Artificial Sequence: Synthetic oligonucleotide
  Antisense strand to SEQ ID NO: 834112
uuucacagagcuagugaga

SEQ ID NO: 834114 - RNA, 19 nt, Artificial Sequence
  Description of Artificial Sequence: Synthetic oligonucleotide
  Sense strand starting at position 186 of SEQ ID NO: 587994
cucacuagcucugugaaac

SEQ ID NO: 834115 - RNA, 19 nt, Artificial Sequence
  Description of Artificial Sequence: Synthetic oligonucleotide
  Antisense strand to SEQ ID NO: 834114
guuucacagagcuagugag

SEQ ID NO: 834116 - RNA, 19 nt, Artificial Sequence
  Description of Artificial Sequence: Synthetic oligonucleotide
  Sense strand starting at position 199 of SEQ ID NO: 587994
ugaaaccuuccagguacaa

SEQ ID NO: 834117 - RNA, 19 nt, Artificial Sequence
  Description of Artificial Sequence: Synthetic oligonucleotide
  Antisense strand to SEQ ID NO: 834116
uuguaccuggaagguuuca

SEQ ID NO: 834118 - RNA, 19 nt, Artificial Sequence
  Description of Artificial Sequence: Synthetic oligonucleotide
  Sense strand starting at position 445 of SEQ ID NO: 587994
ggcugugacuccucaggaa

SEQ ID NO: 834119 - RNA, 19 nt, Artificial Sequence
  Description of Artificial Sequence: Synthetic oligonucleotide
  Antisense strand to SEQ ID NO: 834118
uuccugaggagucacagcc

SEQ ID NO: 834120 - RNA, 19 nt, Artificial Sequence
  Description of Artificial Sequence: Synthetic oligonucleotide
  Sense strand starting at position 599 of SEQ ID NO: 587994
accucuccuccguggagaa

SEQ ID NO: 834121 - RNA, 19 nt, Artificial Sequence
  Description of Artificial Sequence: Synthetic oligonucleotide
  Antisense strand to SEQ ID NO: 834120
uucuccacggaggagaggu

SEQ ID NO: 834122 - RNA, 19 nt, Artificial Sequence
  Description of Artificial Sequence: Synthetic oligonucleotide
  Sense strand starting at position 987 of SEQ ID NO: 587994
gggcuuaggaugugaguaa

SEQ ID NO: 834123 - RNA, 19 nt, Artificial Sequence
  Description of Artificial Sequence: Synthetic oligonucleotide
  Antisense strand to SEQ ID NO: 834122
uuacucacauccuaagccc

SEQ ID NO: 834124 - RNA, 19 nt, Artificial Sequence
  Description of Artificial Sequence: Synthetic oligonucleotide
  Sense strand starting at position 991 of SEQ ID NO: 587994
uuaggaugugaguaaguuc

SEQ ID NO: 834125 - RNA, 19 nt, Artificial Sequence
  Description of Artificial Sequence: Synthetic oligonucleotide
  Antisense strand to SEQ ID NO: 834124
gaacuuacucacauccuaa

SEQ ID NO: 834126 - RNA, 19 nt, Artificial Sequence
  Description of Artificial Sequence: Synthetic oligonucleotide
  Sense strand starting at position 994 of SEQ ID NO: 587994
ggaugugaguaaguuccau

SEQ ID NO: 834127 - RNA, 19 nt, Artificial Sequence
  Description of Artificial Sequence: Synthetic oligonucleotide
  Antisense strand to SEQ ID NO: 834126
auggaacuuacucacaucc

SEQ ID NO: 834128 - RNA, 19 nt, Artificial Sequence
  Description of Artificial Sequence: Synthetic oligonucleotide
  Sense strand starting at position 1093 of SEQ ID NO: 587994
gcucuagacuugcaaauac

SEQ ID NO: 834129 - RNA, 19 nt, Artificial Sequence
  Description of Artificial Sequence: Synthetic oligonucleotide
  Antisense strand to SEQ ID NO: 834128
guauuugcaagucuagagc

SEQ ID NO: 834130 - RNA, 19 nt, Artificial Sequence
  Description of Artificial Sequence: Synthetic oligonucleotide
  Sense strand starting at position 1148 of SEQ ID NO: 587994
agaacugucuccuguacau

SEQ ID NO: 834131 - RNA, 19 nt, Artificial Sequence
  Description of Artificial Sequence: Synthetic oligonucleotide
  Antisense strand to SEQ ID NO: 834130
auguacaggagacaguucu

SEQ ID NO: 834132 - RNA, 19 nt, Artificial Sequence
  Description of Artificial Sequence: Synthetic oligonucleotide
  Sense strand starting at position 1180 of SEQ ID NO: 587994
gucagcuccugagagcuaa

SEQ ID NO: 834133 - RNA, 19 nt, Artificial Sequence
  Description of Artificial Sequence: Synthetic oligonucleotide
  Antisense strand to SEQ ID NO: 834132
uuagcucucaggagcugac

SEQ ID NO: 834134 - RNA, 19 nt, Artificial Sequence
  Description of Artificial Sequence: Synthetic oligonucleotide
  Sense strand starting at position 1246 of SEQ ID NO: 587994
aguugaguggcugauagaa

SEQ ID NO: 834135 - RNA, 19 nt, Artificial Sequence
  Description of Artificial Sequence: Synthetic oligonucleotide
  Antisense strand to SEQ ID NO: 834134
uucuaucagccacucaacu

SEQ ID NO: 834136 - RNA, 19 nt, Artificial Sequence
  Description of Artificial Sequence: Synthetic oligonucleotide
  Sense strand starting at position 1354 of SEQ ID NO: 587994
cacagaauguggugacucu

SEQ ID NO: 834137 - RNA, 19 nt, Artificial Sequence
  Description of Artificial Sequence: Synthetic oligonucleotide
  Antisense strand to SEQ ID NO: 834136
agagucaccacauucugug

SEQ ID NO: 834138 - RNA, 19 nt, Artificial Sequence
  Description of Artificial Sequence: Synthetic oligonucleotide
  Sense strand starting at position 1409 of SEQ ID NO: 587994
cagagcugucauuaaucag

SEQ ID NO: 834139 - RNA, 19 nt, Artificial Sequence
  Description of Artificial Sequence: Synthetic oligonucleotide
  Antisense strand to SEQ ID NO: 834138
cugauuaaugacagcucug

SEQ ID NO: 834140 - RNA, 19 nt, Artificial Sequence
  Description of Artificial Sequence: Synthetic oligonucleotide
  Sense strand starting at position 1412 of SEQ ID NO: 587994
agcugucauuaaucagaag

SEQ ID NO: 834141 - RNA, 19 nt, Artificial Sequence
  Description of Artificial Sequence: Synthetic oligonucleotide
  Antisense strand to SEQ ID NO: 834140
cuucugauuaaugacagcu

SEQ ID NO: 834142 - RNA, 19 nt, Artificial Sequence
  Description of Artificial Sequence: Synthetic oligonucleotide
  Sense strand starting at position 1415 of SEQ ID NO: 587994
ugucauuaaucagaaggaa

SEQ ID NO: 834143 - RNA, 19 nt, Artificial Sequence
  Description of Artificial Sequence: Synthetic oligonucleotide
  Antisense strand to SEQ ID NO: 834142
uuccuucugauuaaugaca

SEQ ID NO: 834144 - RNA, 19 nt, Artificial Sequence
  Description of Artificial Sequence: Synthetic oligonucleotide
  Sense strand starting at position 1517 of SEQ ID NO: 587994
uuacaauucucacaggaag

SEQ ID NO: 834145 - RNA, 19 nt, Artificial Sequence
  Description of Artificial Sequence: Synthetic oligonucleotide
  Antisense strand to SEQ ID NO: 834144
cuuccugugagaauuguaa

SEQ ID NO: 834146 - RNA, 19 nt, Artificial Sequence
  Description of Artificial Sequence: Synthetic oligonucleotide
  Sense strand starting at position 1542 of SEQ ID NO: 587994
gaauccugcgaauggguuu

SEQ ID NO: 834147 - RNA, 19 nt, Artificial Sequence
  Description of Artificial Sequence: Synthetic oligonucleotide
  Antisense strand to SEQ ID NO: 834146
aaacccauucgcaggauuc

SEQ ID NO: 834148 - RNA, 19 nt, Artificial Sequence
  Description of Artificial Sequence: Synthetic oligonucleotide
  Sense strand starting at position 1559 of SEQ ID NO: 587994
uuuccacuuguuuguuuau

SEQ ID NO: 834149 - RNA, 19 nt, Artificial Sequence
  Description of Artificial Sequence: Synthetic oligonucleotide
  Antisense strand to SEQ ID NO: 834148
auaaacaaacaaguggaaa

SEQ ID NO: 834150 - RNA, 19 nt, Artificial Sequence
  Description of Artificial Sequence: Synthetic oligonucleotide
  Sense strand starting at position 1634 of SEQ ID NO: 587994
gcuggcuggucucuuuaaa

SEQ ID NO: 834151 - RNA, 19 nt, Artificial Sequence
  Description of Artificial Sequence: Synthetic oligonucleotide
  Antisense strand to SEQ ID NO: 834150
uuuaaagagaccagccagc

SEQ ID NO: 834152 - RNA, 19 nt, Artificial Sequence
  Description of Artificial Sequence: Synthetic oligonucleotide
  Sense strand starting at position 1733 of SEQ ID NO: 587994
gcuauuaucugcucagagg

SEQ ID NO: 834153 - RNA, 19 nt, Artificial Sequence
  Description of Artificial Sequence: Synthetic oligonucleotide
  Antisense strand to SEQ ID NO: 834152
ccucugagcagauaauagc

SEQ ID NO: 834154 - RNA, 19 nt, Artificial Sequence
  Description of Artificial Sequence: Synthetic oligonucleotide
  Sense strand starting at position 1734 of SEQ ID NO: 587994
cuauuaucugcucagagga

SEQ ID NO: 834155 - RNA, 19 nt, Artificial Sequence
  Description of Artificial Sequence: Synthetic oligonucleotide
  Antisense strand to SEQ ID NO: 834154
uccucugagcagauaauag

SEQ ID NO: 834156 - RNA, 19 nt, Artificial Sequence
  Description of Artificial Sequence: Synthetic oligonucleotide
  Sense strand starting at position 2091 of SEQ ID NO: 587994
auccuaucuuucgggugaa

SEQ ID NO: 834157 - RNA, 19 nt, Artificial Sequence
  Description of Artificial Sequence: Synthetic oligonucleotide
  Antisense strand to SEQ ID NO: 834156
uucacccgaaagauaggau

SEQ ID NO: 834158 - RNA, 19 nt, Artificial Sequence
  Description of Artificial Sequence: Synthetic oligonucleotide
  Sense strand starting at position 2092 of SEQ ID NO: 587994
uccuaucuuucgggugaaa

SEQ ID NO: 834159 - RNA, 19 nt, Artificial Sequence
  Description of Artificial Sequence: Synthetic oligonucleotide
  Antisense strand to SEQ ID NO: 834158
uuucacccgaaagauagga

SEQ ID NO: 834160 - RNA, 19 nt, Artificial Sequence
  Description of Artificial Sequence: Synthetic oligonucleotide
  Sense strand starting at position 2177 of SEQ ID NO: 587994
ugggaacguucugcgucua

SEQ ID NO: 834161 - RNA, 19 nt, Artificial Sequence
  Description of Artificial Sequence: Synthetic oligonucleotide
  Antisense strand to SEQ ID NO: 834160
uagacgcagaacguuccca

SEQ ID NO: 834162 - RNA, 19 nt, Artificial Sequence
  Description of Artificial Sequence: Synthetic oligonucleotide
  Sense strand starting at position 2343 of SEQ ID NO: 587994
cauuucuacuccgagcaga

SEQ ID NO: 834163 - RNA, 19 nt, Artificial Sequence
  Description of Artificial Sequence: Synthetic oligonucleotide
  Antisense strand to SEQ ID NO: 834162
ucugcucggaguagaaaug

SEQ ID NO: 834164 - RNA, 19 nt, Artificial Sequence
  Description of Artificial Sequence: Synthetic oligonucleotide
  Sense strand starting at position 2375 of SEQ ID NO: 587994
gguggaugacucugggacu

SEQ ID NO: 834165 - RNA, 19 nt, Artificial Sequence
  Description of Artificial Sequence: Synthetic oligonucleotide
  Antisense strand to SEQ ID NO: 834164
agucccagagucauccacc

SEQ ID NO: 834166 - RNA, 19 nt, Artificial Sequence
  Description of Artificial Sequence: Synthetic oligonucleotide
  Sense strand starting at position 2414 of SEQ ID NO: 587994
ucuagucucagcgcggauu

SEQ ID NO: 834167 - RNA, 19 nt, Artificial Sequence
  Description of Artificial Sequence: Synthetic oligonucleotide
  Antisense strand to SEQ ID NO: 834166
aauccgcgcugagacuaga

SEQ ID NO: 834168 - RNA, 19 nt, Artificial Sequence
  Description of Artificial Sequence: Synthetic oligonucleotide
  Sense strand starting at position 2417 of SEQ ID NO: 587994
agucucagcgcggauucaa

SEQ ID NO: 834169 - RNA, 19 nt, Artificial Sequence
  Description of Artificial Sequence: Synthetic oligonucleotide
  Antisense strand to SEQ ID NO: 834168
uugaauccgcgcugagacu

SEQ ID NO: 834170 - RNA, 19 nt, Artificial Sequence
  Description of Artificial Sequence: Synthetic oligonucleotide
  Sense strand starting at position 2569 of SEQ ID NO: 587994
ggcguccuuccaggacauu

SEQ ID NO: 834171 - RNA, 19 nt, Artificial Sequence
  Description of Artificial Sequence: Synthetic oligonucleotide
  Antisense strand to SEQ ID NO: 834170
aauguccuggaaggacgcc

SEQ ID NO: 834172 - RNA, 19 nt, Artificial Sequence
  Description of Artificial Sequence: Synthetic oligonucleotide
  Sense strand starting at position 2795 of SEQ ID NO: 587994
aaacgugaaccuggucaaa

SEQ ID NO: 834173 - RNA, 19 nt, Artificial Sequence
  Description of Artificial Sequence: Synthetic oligonucleotide
  Antisense strand to SEQ ID NO: 834172
uuugaccagguucacguuu

SEQ ID NO: 834174 - RNA, 19 nt, Artificial Sequence
  Description of Artificial Sequence: Synthetic oligonucleotide
  Sense strand starting at position 2797 of SEQ ID NO: 587994
acgugaaccuggucaaaug

SEQ ID NO: 834175 - RNA, 19 nt, Artificial Sequence
  Description of Artificial Sequence: Synthetic oligonucleotide
  Antisense strand to SEQ ID NO: 834174
cauuugaccagguucacgu

SEQ ID NO: 834176 - RNA, 19 nt, Artificial Sequence
  Description of Artificial Sequence: Synthetic oligonucleotide
  Sense strand starting at position 2814 of SEQ ID NO: 587994
uggcgucuuaucugaccca

SEQ ID NO: 834177 - RNA, 19 nt, Artificial Sequence
  Description of Artificial Sequence: Synthetic oligonucleotide
  Antisense strand to SEQ ID NO: 834176
ugggucagauaagacgcca

SEQ ID NO: 834178 - RNA, 19 nt, Artificial Sequence
  Description of Artificial Sequence: Synthetic oligonucleotide
  Sense strand starting at position 2817 of SEQ ID NO: 587994
cgucuuaucugacccaauc

SEQ ID NO: 834179 - RNA, 19 nt, Artificial Sequence
  Description of Artificial Sequence: Synthetic oligonucleotide
  Antisense strand to SEQ ID NO: 834178
gauugggucagauaagacg

SEQ ID NO: 834180 - RNA, 19 nt, Artificial Sequence
  Description of Artificial Sequence: Synthetic oligonucleotide
  Sense strand starting at position 202 of SEQ ID NO: 587995
gauccuaucuuucggguga

SEQ ID NO: 834181 - RNA, 19 nt, Artificial Sequence
  Description of Artificial Sequence: Synthetic oligonucleotide
  Antisense strand to SEQ ID NO: 834180
ucacccgaaagauaggauc

SEQ ID NO: 834182 - RNA, 19 nt, Artificial Sequence
  Description of Artificial Sequence: Synthetic oligonucleotide
  Sense strand starting at position 203 of SEQ ID NO: 587995
auccuaucuuucgggugaa

SEQ ID NO: 834183 - RNA, 19 nt, Artificial Sequence
  Description of Artificial Sequence: Synthetic oligonucleotide
  Antisense strand to SEQ ID NO: 834182
uucacccgaaagauaggau

SEQ ID NO: 834184 - RNA, 19 nt, Artificial Sequence
  Description of Artificial Sequence: Synthetic oligonucleotide
  Sense strand starting at position 204 of SEQ ID NO: 587995
uccuaucuuucgggugaaa

SEQ ID NO: 834185 - RNA, 19 nt, Artificial Sequence
  Description of Artificial Sequence: Synthetic oligonucleotide
  Antisense strand to SEQ ID NO: 834184
uuucacccgaaagauagga

SEQ ID NO: 834186 - RNA, 19 nt, Artificial Sequence
  Description of Artificial Sequence: Synthetic oligonucleotide
  Sense strand starting at position 289 of SEQ ID NO: 587995
ugggaacguucugcgucua

SEQ ID NO: 834187 - RNA, 19 nt, Artificial Sequence
  Description of Artificial Sequence: Synthetic oligonucleotide
  Antisense strand to SEQ ID NO: 834186
uagacgcagaacguuccca

SEQ ID NO: 834188 - RNA, 19 nt, Artificial Sequence
  Description of Artificial Sequence: Synthetic oligonucleotide
  Sense strand starting at position 455 of SEQ ID NO: 587995
cauuucuacuccgagcaga

SEQ ID NO: 834189 - RNA, 19 nt, Artificial Sequence
  Description of Artificial Sequence: Synthetic oligonucleotide
  Antisense strand to SEQ ID NO: 834188
ucugcucggaguagaaaug

SEQ ID NO: 834190 - RNA, 19 nt, Artificial Sequence
  Description of Artificial Sequence: Synthetic oligonucleotide
  Sense strand starting at position 487 of SEQ ID NO: 587995
gguggaugacucugggacu

SEQ ID NO: 834191 - RNA, 19 nt, Artificial Sequence
  Description of Artificial Sequence: Synthetic oligonucleotide
  Antisense strand to SEQ ID NO: 834190
agucccagagucauccacc

SEQ ID NO: 834192 - RNA, 19 nt, Artificial Sequence
  Description of Artificial Sequence: Synthetic oligonucleotide
  Sense strand starting at position 526 of SEQ ID NO: 587995
ucuagucucagcgcggauu

SEQ ID NO: 834193 - RNA, 19 nt, Artificial Sequence
  Description of Artificial Sequence: Synthetic oligonucleotide
  Antisense strand to SEQ ID NO: 834192
aauccgcgcugagacuaga

SEQ ID NO: 834194 - RNA, 19 nt, Artificial Sequence
  Description of Artificial Sequence: Synthetic oligonucleotide
  Sense strand starting at position 529 of SEQ ID NO: 587995
agucucagcgcggauucaa

SEQ ID NO: 834195 - RNA, 19 nt, Artificial Sequence
  Description of Artificial Sequence: Synthetic oligonucleotide
  Antisense strand to SEQ ID NO: 834194
uugaauccgcgcugagacu

SEQ ID NO: 834196 - RNA, 19 nt, Artificial Sequence
  Description of Artificial Sequence: Synthetic oligonucleotide
  Sense strand starting at position 681 of SEQ ID NO: 587995
ggcguccuuccaggacauu

SEQ ID NO: 834197 - RNA, 19 nt, Artificial Sequence
  Description of Artificial Sequence: Synthetic oligonucleotide
  Antisense strand to SEQ ID NO: 834196
aauguccuggaaggacgcc

SEQ ID NO: 834198 - RNA, 19 nt, Artificial Sequence
  Description of Artificial Sequence: Synthetic oligonucleotide
  Sense strand starting at position 907 of SEQ ID NO: 587995
aaacgugaaccuggucaaa

SEQ ID NO: 834199 - RNA, 19 nt, Artificial Sequence
  Description of Artificial Sequence: Synthetic oligonucleotide
  Antisense strand to SEQ ID NO: 834198
uuugaccagguucacguuu

SEQ ID NO: 834200 - RNA, 19 nt, Artificial Sequence
  Description of Artificial Sequence: Synthetic oligonucleotide
  Sense strand starting at position 909 of SEQ ID NO: 587995
acgugaaccuggucaaaug

SEQ ID NO: 834201 - RNA, 19 nt, Artificial Sequence
  Description of Artificial Sequence: Synthetic oligonucleotide
  Antisense strand to SEQ ID NO: 834200
cauuugaccagguucacgu

SEQ ID NO: 834202 - RNA, 19 nt, Artificial Sequence
  Description of Artificial Sequence: Synthetic oligonucleotide
  Sense strand starting at position 926 of SEQ ID NO: 587995
uggcgucuuaucugaccca

SEQ ID NO: 834203 - RNA, 19 nt, Artificial Sequence
  Description of Artificial Sequence: Synthetic oligonucleotide
  Antisense strand to SEQ ID NO: 834202
ugggucagauaagacgcca

SEQ ID NO: 834204 - RNA, 19 nt, Artificial Sequence
  Description of Artificial Sequence: Synthetic oligonucleotide
  Sense strand starting at position 927 of SEQ ID NO: 587995
ggcgucuuaucugacccaa

SEQ ID NO: 834205 - RNA, 19 nt, Artificial Sequence
  Description of Artificial Sequence: Synthetic oligonucleotide
  Antisense strand to SEQ ID NO: 834204
uugggucagauaagacgcc

SEQ ID NO: 834206 - RNA, 19 nt, Artificial Sequence
  Description of Artificial Sequence: Synthetic oligonucleotide
  Sense strand starting at position 929 of SEQ ID NO: 587995
cgucuuaucugacccaauc

SEQ ID NO: 834207 - RNA, 19 nt, Artificial Sequence
  Description of Artificial Sequence: Synthetic oligonucleotide
  Antisense strand to SEQ ID NO: 834206
gauugggucagauaagacg

SEQ ID NO: 834208 - RNA, 19 nt, Artificial Sequence
  Description of Artificial Sequence: Synthetic oligonucleotide
  Sense strand starting at position 2679 of SEQ ID NO: 587995
ggugaugaauuccagaauc

SEQ ID NO: 834209 - RNA, 19 nt, Artificial Sequence
  Description of Artificial Sequence: Synthetic oligonucleotide
  Antisense strand to SEQ ID NO: 834208
gauucuggaauucaucacc

SEQ ID NO: 834210 - RNA, 19 nt, Artificial Sequence
  Description of Artificial Sequence: Synthetic oligonucleotide
  Sense strand starting at position 2727 of SEQ ID NO: 587995
ggaagaccugugcguggua

SEQ ID NO: 834211 - RNA, 19 nt, Artificial Sequence
  Description of Artificial Sequence: Synthetic oligonucleotide
  Antisense strand to SEQ ID NO: 834210
uaccacgcacaggucuucc

SEQ ID NO: 834212 - RNA, 19 nt, Artificial Sequence
  Description of Artificial Sequence: Synthetic oligonucleotide
  Sense strand starting at position 2801 of SEQ ID NO: 587995
gcgucuguucgcuuccaca

SEQ ID NO: 834213 - RNA, 19 nt, Artificial Sequence
  Description of Artificial Sequence: Synthetic oligonucleotide
  Antisense strand to SEQ ID NO: 834212
uguggaagcgaacagacgc

SEQ ID NO: 834214 - RNA, 19 nt, Artificial Sequence
  Description of Artificial Sequence: Synthetic oligonucleotide
  Sense strand starting at position 2804 of SEQ ID NO: 587995
ucuguucgcuuccacaaau

SEQ ID NO: 834215 - RNA, 19 nt, Artificial Sequence
  Description of Artificial Sequence: Synthetic oligonucleotide
  Antisense strand to SEQ ID NO: 834214
auuuguggaagcgaacaga

SEQ ID NO: 834216 - RNA, 19 nt, Artificial Sequence
  Description of Artificial Sequence: Synthetic oligonucleotide
  Sense strand starting at position 2820 of SEQ ID NO: 587995
aauagaaccuucuguugga

SEQ ID NO: 834217 - RNA, 19 nt, Artificial Sequence
  Description of Artificial Sequence: Synthetic oligonucleotide
  Antisense strand to SEQ ID NO: 834216
uccaacagaagguucuauu

SEQ ID NO: 834218 - RNA, 19 nt, Artificial Sequence
  Description of Artificial Sequence: Synthetic oligonucleotide
  Sense strand starting at position 2823 of SEQ ID NO: 587995
agaaccuucuguuggagga

SEQ ID NO: 834219 - RNA, 19 nt, Artificial Sequence
  Description of Artificial Sequence: Synthetic oligonucleotide
  Antisense strand to SEQ ID NO: 834218
uccuccaacagaagguucu

SEQ ID NO: 834220 - RNA, 19 nt, Artificial Sequence
  Description of Artificial Sequence: Synthetic oligonucleotide
  Sense strand starting at position 2824 of SEQ ID NO: 587995
gaaccuucuguuggaggaa

SEQ ID NO: 834221 - RNA, 19 nt, Artificial Sequence
  Description of Artificial Sequence: Synthetic oligonucleotide
  Antisense strand to SEQ ID NO: 834220
uuccuccaacagaagguuc

SEQ ID NO: 834222 - RNA, 19 nt, Artificial Sequence
  Description of Artificial Sequence: Synthetic oligonucleotide
  Sense strand starting at position 2825 of SEQ ID NO: 587995
aaccuucuguuggaggaaa

SEQ ID NO: 834223 - RNA, 19 nt, Artificial Sequence
  Description of Artificial Sequence: Synthetic oligonucleotide
  Antisense strand to SEQ ID NO: 834222
uuuccuccaacagaagguu

SEQ ID NO: 834224 - RNA, 19 nt, Artificial Sequence
  Description of Artificial Sequence: Synthetic oligonucleotide
  Sense strand starting at position 2827 of SEQ ID NO: 587995
ccuucuguuggaggaaaua

SEQ ID NO: 834225 - RNA, 19 nt, Artificial Sequence
  Description of Artificial Sequence: Synthetic oligonucleotide
  Antisense strand to SEQ ID NO: 834224
uauuuccuccaacagaagg

SEQ ID NO: 834226 - RNA, 19 nt, Artificial Sequence
  Description of Artificial Sequence: Synthetic oligonucleotide
  Sense strand starting at position 2917 of SEQ ID NO: 587995
cccggauugcacggaaaua

SEQ ID NO: 834227 - RNA, 19 nt, Artificial Sequence
  Description of Artificial Sequence: Synthetic oligonucleotide
  Antisense strand to SEQ ID NO: 834226
uauuuccgugcaauccggg

SEQ ID NO: 834228 - RNA, 19 nt, Artificial Sequence
  Description of Artificial Sequence: Synthetic oligonucleotide
  Sense strand starting at position 2978 of SEQ ID NO: 587995
gaaagagcuuccugagcca

SEQ ID NO: 834229 - RNA, 19 nt, Artificial Sequence
  Description of Artificial Sequence: Synthetic oligonucleotide
  Antisense strand to SEQ ID NO: 834228
uggcucaggaagcucuuuc

SEQ ID NO: 834230 - RNA, 19 nt, Artificial Sequence
  Description of Artificial Sequence: Synthetic oligonucleotide
  Sense strand starting at position 3140 of SEQ ID NO: 587995
ggaagucauucuggccacu

SEQ ID NO: 834231 - RNA, 19 nt, Artificial Sequence
  Description of Artificial Sequence: Synthetic oligonucleotide
  Antisense strand to SEQ ID NO: 834230
aguggccagaaugacuucc

SEQ ID NO: 834232 - RNA, 19 nt, Artificial Sequence
  Description of Artificial Sequence: Synthetic oligonucleotide
  Sense strand starting at position 3235 of SEQ ID NO: 587995
aucaaaguugcgcgugaaa

SEQ ID NO: 834233 - RNA, 19 nt, Artificial Sequence
  Description of Artificial Sequence: Synthetic oligonucleotide
  Antisense strand to SEQ ID NO: 834232
uuucacgcgcaacuuugau

SEQ ID NO: 834234 - RNA, 19 nt, Artificial Sequence
  Description of Artificial Sequence: Synthetic oligonucleotide
  Sense strand starting at position 3237 of SEQ ID NO: 587995
caaaguugcgcgugaaaca

SEQ ID NO: 834235 - RNA, 19 nt, Artificial Sequence
  Description of Artificial Sequence: Synthetic oligonucleotide
  Antisense strand to SEQ ID NO: 834234
uguuucacgcgcaacuuug

SEQ ID NO: 834236 - RNA, 19 nt, Artificial Sequence
  Description of Artificial Sequence: Synthetic oligonucleotide
  Sense strand starting at position 3238 of SEQ ID NO: 587995
aaaguugcgcgugaaacaa

SEQ ID NO: 834237 - RNA, 19 nt, Artificial Sequence
  Description of Artificial Sequence: Synthetic oligonucleotide
  Antisense strand to SEQ ID NO: 834236
uuguuucacgcgcaacuuu

SEQ ID NO: 834238 - RNA, 19 nt, Artificial Sequence
  Description of Artificial Sequence: Synthetic oligonucleotide
  Sense strand starting at position 3247 of SEQ ID NO: 587995
cgugaaacaacuuggaauc

SEQ ID NO: 834239 - RNA, 19 nt, Artificial Sequence
  Description of Artificial Sequence: Synthetic oligonucleotide
  Antisense strand to SEQ ID NO: 834238
gauuccaaguuguuucacg

SEQ ID NO: 834240 - RNA, 19 nt, Artificial Sequence
  Description of Artificial Sequence: Synthetic oligonucleotide
  Sense strand starting at position 3274 of SEQ ID NO: 587995
uucuuucuugagugaacca

SEQ ID NO: 834241 - RNA, 19 nt, Artificial Sequence
  Description of Artificial Sequence: Synthetic oligonucleotide
  Antisense strand to SEQ ID NO: 834240
ugguucacucaagaaagaa

SEQ ID NO: 834242 - RNA, 19 nt, Artificial Sequence
  Description of Artificial Sequence: Synthetic oligonucleotide
  Sense strand starting at position 3281 of SEQ ID NO: 587995
uugagugaaccaggucagu

SEQ ID NO: 834243 - RNA, 19 nt, Artificial Sequence
  Description of Artificial Sequence: Synthetic oligonucleotide
  Antisense strand to SEQ ID NO: 834242
acugaccugguucacucaa

SEQ ID NO: 834244 - RNA, 19 nt, Artificial Sequence
  Description of Artificial Sequence: Synthetic oligonucleotide
  Sense strand starting at position 3451 of SEQ ID NO: 587995
agcaucuaccaagagcuaa

SEQ ID NO: 834245 - RNA, 19 nt, Artificial Sequence
  Description of Artificial Sequence: Synthetic oligonucleotide
  Antisense strand to SEQ ID NO: 834244
uuagcucuugguagaugcu

SEQ ID NO: 834246 - RNA, 19 nt, Artificial Sequence
  Description of Artificial Sequence: Synthetic oligonucleotide
  Sense strand starting at position 3462 of SEQ ID NO: 587995
agagcuaaacgcugggaau

SEQ ID NO: 834247 - RNA, 19 nt, Artificial Sequence
  Description of Artificial Sequence: Synthetic oligonucleotide
  Antisense strand to SEQ ID NO: 834246
auucccagcguuuagcucu

SEQ ID NO: 834248 - RNA, 19 nt, Artificial Sequence
  Description of Artificial Sequence: Synthetic oligonucleotide
  Sense strand starting at position 3463 of SEQ ID NO: 587995
gagcuaaacgcugggaauu

SEQ ID NO: 834249 - RNA, 19 nt, Artificial Sequence
  Description of Artificial Sequence: Synthetic oligonucleotide
  Antisense strand to SEQ ID NO: 834248
aauucccagcguuuagcuc

SEQ ID NO: 834250 - RNA, 19 nt, Artificial Sequence
  Description of Artificial Sequence: Synthetic oligonucleotide
  Sense strand starting at position 3464 of SEQ ID NO: 587995
agcuaaacgcugggaauua

SEQ ID NO: 834251 - RNA, 19 nt, Artificial Sequence
  Description of Artificial Sequence: Synthetic oligonucleotide
  Antisense strand to SEQ ID NO: 834250
uaauucccagcguuuagcu

SEQ ID NO: 834252 - RNA, 19 nt, Artificial Sequence
  Description of Artificial Sequence: Synthetic oligonucleotide
  Sense strand starting at position 3529 of SEQ ID NO: 587995
cuacaaugugucggacacu

SEQ ID NO: 834253 - RNA, 19 nt, Artificial Sequence
  Description of Artificial Sequence: Synthetic oligonucleotide
  Antisense strand to SEQ ID NO: 834252
aguguccgacacauuguag

SEQ ID NO: 834254 - RNA, 19 nt, Artificial Sequence
  Description of Artificial Sequence: Synthetic oligonucleotide
  Sense strand starting at position 3541 of SEQ ID NO: 587995
ggacacuguucuuagcacu

SEQ ID NO: 834255 - RNA, 19 nt, Artificial Sequence
  Description of Artificial Sequence: Synthetic oligonucleotide
  Antisense strand to SEQ ID NO: 834254
agugcuaagaacagugucc

SEQ ID NO: 834256 - RNA, 19 nt, Artificial Sequence
  Description of Artificial Sequence: Synthetic oligonucleotide
  Sense strand starting at position 3629 of SEQ ID NO: 587995
acugaagccuuagaaggau

SEQ ID NO: 834257 - RNA, 19 nt, Artificial Sequence
  Description of Artificial Sequence: Synthetic oligonucleotide
  Antisense strand to SEQ ID NO: 834256
auccuucuaaggcuucagu

SEQ ID NO: 834258 - RNA, 19 nt, Artificial Sequence
  Description of Artificial Sequence: Synthetic oligonucleotide
  Sense strand starting at position 3635 of SEQ ID NO: 587995
gccuuagaaggaugaaguu

SEQ ID NO: 834259 - RNA, 19 nt, Artificial Sequence
  Description of Artificial Sequence: Synthetic oligonucleotide
  Antisense strand to SEQ ID NO: 834258
aacuucauccuucuaaggc

SEQ ID NO: 834260 - RNA, 19 nt, Artificial Sequence
  Description of Artificial Sequence: Synthetic oligonucleotide
  Sense strand starting at position 7 of SEQ ID NO: 587996
cacuucugccaguggaaac

SEQ ID NO: 834261 - RNA, 19 nt, Artificial Sequence
  Description of Artificial Sequence: Synthetic oligonucleotide
  Antisense strand to SEQ ID NO: 834260
guuuccacuggcagaagug

SEQ ID NO: 834262 - RNA, 19 nt, Artificial Sequence
  Description of Artificial Sequence: Synthetic oligonucleotide
  Sense strand starting at position 78 of SEQ ID NO: 587996
caggguuacucauugagac

SEQ ID NO: 834263 - RNA, 19 nt, Artificial Sequence
  Description of Artificial Sequence: Synthetic oligonucleotide
  Antisense strand to SEQ ID NO: 834262
gucucaaugaguaacccug

SEQ ID NO: 834264 - RNA, 19 nt, Artificial Sequence
  Description of Artificial Sequence: Synthetic oligonucleotide
  Sense strand starting at position 320 of SEQ ID NO: 587996
gcauuagcaggugaugaaa

SEQ ID NO: 834265 - RNA, 19 nt, Artificial Sequence
  Description of Artificial Sequence: Synthetic oligonucleotide
  Antisense strand to SEQ ID NO: 834264
uuucaucaccugcuaaugc

SEQ ID NO: 834266 - RNA, 19 nt, Artificial Sequence
  Description of Artificial Sequence: Synthetic oligonucleotide
  Sense strand starting at position 702 of SEQ ID NO: 587996
aucagagugccauggacau

SEQ ID NO: 834267 - RNA, 19 nt, Artificial Sequence
  Description of Artificial Sequence: Synthetic oligonucleotide
  Antisense strand to SEQ ID NO: 834266
auguccauggcacucugau

SEQ ID NO: 834268 - RNA, 19 nt, Artificial Sequence
  Description of Artificial Sequence: Synthetic oligonucleotide
  Sense strand starting at position 748 of SEQ ID NO: 587996
acauauguucugggucaca

SEQ ID NO: 834269 - RNA, 19 nt, Artificial Sequence
  Description of Artificial Sequence: Synthetic oligonucleotide
  Antisense strand to SEQ ID NO: 834268
ugugacccagaacauaugu

SEQ ID NO: 834270 - RNA, 19 nt, Artificial Sequence
  Description of Artificial Sequence: Synthetic oligonucleotide
  Sense strand starting at position 782 of SEQ ID NO: 587996
cuuccuaugggcuaagauu

SEQ ID NO: 834271 - RNA, 19 nt, Artificial Sequence
  Description of Artificial Sequence: Synthetic oligonucleotide
  Antisense strand to SEQ ID NO: 834270
aaucuuagcccauaggaag

SEQ ID NO: 834272 - RNA, 19 nt, Artificial Sequence
  Description of Artificial Sequence: Synthetic oligonucleotide
  Sense strand starting at position 820 of SEQ ID NO: 587996
gaguuaggcuaacccuuau

SEQ ID NO: 834273 - RNA, 19 nt, Artificial Sequence
  Description of Artificial Sequence: Synthetic oligonucleotide
  Antisense strand to SEQ ID NO: 834272
auaaggguuagccuaacuc

SEQ ID NO: 834274 - RNA, 19 nt, Artificial Sequence
  Description of Artificial Sequence: Synthetic oligonucleotide
  Sense strand starting at position 909 of SEQ ID NO: 587996
guuuauguauagucacuag

SEQ ID NO: 834275 - RNA, 19 nt, Artificial Sequence
  Description of Artificial Sequence: Synthetic oligonucleotide
  Antisense strand to SEQ ID NO: 834274
cuagugacuauacauaaac

SEQ ID NO: 834276 - RNA, 19 nt, Artificial Sequence
  Description of Artificial Sequence: Synthetic oligonucleotide
  Sense strand starting at position 913 of SEQ ID NO: 587996
auguauagucacuagaacu

SEQ ID NO: 834277 - RNA, 19 nt, Artificial Sequence
  Description of Artificial Sequence: Synthetic oligonucleotide
  Antisense strand to SEQ ID NO: 834276
aguucuagugacuauacau

SEQ ID NO: 834278 - RNA, 19 nt, Artificial Sequence
  Description of Artificial Sequence: Synthetic oligonucleotide
  Sense strand starting at position 939 of SEQ ID NO: 587996
uggagaugcugcuuuauaa

SEQ ID NO: 834279 - RNA, 19 nt, Artificial Sequence
  Description of Artificial Sequence: Synthetic oligonucleotide
  Antisense strand to SEQ ID NO: 834278
uuauaaagcagcaucucca

SEQ ID NO: 834280 - RNA, 19 nt, Artificial Sequence
  Description of Artificial Sequence: Synthetic oligonucleotide
  Sense strand starting at position 1016 of SEQ ID NO: 587996
gggaucagcuuggcaagua

SEQ ID NO: 834281 - RNA, 19 nt, Artificial Sequence
  Description of Artificial Sequence: Synthetic oligonucleotide
  Antisense strand to SEQ ID NO: 834280
uacuugccaagcugauccc

SEQ ID NO: 834282 - RNA, 19 nt, Artificial Sequence
  Description of Artificial Sequence: Synthetic oligonucleotide
  Sense strand starting at position 1049 of SEQ ID NO: 587996
gggaaaucuuaagacucca

SEQ ID NO: 834283 - RNA, 19 nt, Artificial Sequence
  Description of Artificial Sequence: Synthetic oligonucleotide
  Antisense strand to SEQ ID NO: 834282
uggagucuuaagauuuccc

SEQ ID NO: 834284 - RNA, 19 nt, Artificial Sequence
  Description of Artificial Sequence: Synthetic oligonucleotide
  Sense strand starting at position 1101 of SEQ ID NO: 587996
uucuaaauugagugugcca

SEQ ID NO: 834285 - RNA, 19 nt, Artificial Sequence
  Description of Artificial Sequence: Synthetic oligonucleotide
  Antisense strand to SEQ ID NO: 834284
uggcacacucaauuuagaa

SEQ ID NO: 834286 - RNA, 19 nt, Artificial Sequence
  Description of Artificial Sequence: Synthetic oligonucleotide
  Sense strand starting at position 1260 of SEQ ID NO: 587996
gucacuuuccguucgcauu

SEQ ID NO: 834287 - RNA, 19 nt, Artificial Sequence
  Description of Artificial Sequence: Synthetic oligonucleotide
  Antisense strand to SEQ ID NO: 834286
aaugcgaacggaaagugac

SEQ ID NO: 834288 - RNA, 19 nt, Artificial Sequence
  Description of Artificial Sequence: Synthetic oligonucleotide
  Sense strand starting at position 1464 of SEQ ID NO: 587996
gugcaaaucgcugcucuua

SEQ ID NO: 834289 - RNA, 19 nt, Artificial Sequence
  Description of Artificial Sequence: Synthetic oligonucleotide
  Antisense strand to SEQ ID NO: 834288
uaagagcagcgauuugcac

SEQ ID NO: 834290 - RNA, 19 nt, Artificial Sequence
  Description of Artificial Sequence: Synthetic oligonucleotide
  Sense strand starting at position 1861 of SEQ ID NO: 587996
gcaacuccuccuugaagga

SEQ ID NO: 834291 - RNA, 19 nt, Artificial Sequence
  Description of Artificial Sequence: Synthetic oligonucleotide
  Antisense strand to SEQ ID NO: 834290
uccuucaaggaggaguugc

SEQ ID NO: 834292 - RNA, 19 nt, Artificial Sequence
  Description of Artificial Sequence: Synthetic oligonucleotide
  Sense strand starting at position 2127 of SEQ ID NO: 587996
gcgggaaaucuugggagag

SEQ ID NO: 834293 - RNA, 19 nt, Artificial Sequence
  Description of Artificial Sequence: Synthetic oligonucleotide
  Antisense strand to SEQ ID NO: 834292
cucucccaagauuucccgc

SEQ ID NO: 834294 - RNA, 19 nt, Artificial Sequence
  Description of Artificial Sequence: Synthetic oligonucleotide
  Sense strand starting at position 2525 of SEQ ID NO: 587996
gcagaagagcuccgagaaa

SEQ ID NO: 834295 - RNA, 19 nt, Artificial Sequence
  Description of Artificial Sequence: Synthetic oligonucleotide
  Antisense strand to SEQ ID NO: 834294
uuucucggagcucuucugc

SEQ ID NO: 834296 - RNA, 19 nt, Artificial Sequence
  Description of Artificial Sequence: Synthetic oligonucleotide
  Sense strand starting at position 2572 of SEQ ID NO: 587996
gugaacaggucaucauguu

SEQ ID NO: 834297 - RNA, 19 nt, Artificial Sequence
  Description of Artificial Sequence: Synthetic oligonucleotide
  Antisense strand to SEQ ID NO: 834296
aacaugaugaccuguucac

SEQ ID NO: 834298 - RNA, 19 nt, Artificial Sequence
  Description of Artificial Sequence: Synthetic oligonucleotide
  Sense strand starting at position 2573 of SEQ ID NO: 587996
ugaacaggucaucauguuu

SEQ ID NO: 834299 - RNA, 19 nt, Artificial Sequence
  Description of Artificial Sequence: Synthetic oligonucleotide
  Antisense strand to SEQ ID NO: 834298
aaacaugaugaccuguuca

SEQ ID NO: 834300 - RNA, 19 nt, Artificial Sequence
  Description of Artificial Sequence: Synthetic oligonucleotide
  Sense strand starting at position 2609 of SEQ ID NO: 587996
ugaguacaauggcuguaau

SEQ ID NO: 834301 - RNA, 19 nt, Artificial Sequence
  Description of Artificial Sequence: Synthetic oligonucleotide
  Antisense strand to SEQ ID NO: 834300
auuacagccauuguacuca

SEQ ID NO: 834302 - RNA, 19 nt, Artificial Sequence
  Description of Artificial Sequence: Synthetic oligonucleotide
  Sense strand starting at position 2610 of SEQ ID NO: 587996
gaguacaauggcuguaaua

SEQ ID NO: 834303 - RNA, 19 nt, Artificial Sequence
  Description of Artificial Sequence: Synthetic oligonucleotide
  Antisense strand to SEQ ID NO: 834302
uauuacagccauuguacuc

SEQ ID NO: 834304 - RNA, 19 nt, Artificial Sequence
  Description of Artificial Sequence: Synthetic oligonucleotide
  Sense strand starting at position 2620 of SEQ ID NO: 587996
gcuguaauagcucuguuuc

SEQ ID NO: 834305 - RNA, 19 nt, Artificial Sequence
  Description of Artificial Sequence: Synthetic oligonucleotide
  Antisense strand to SEQ ID NO: 834304
gaaacagagcuauuacagc

SEQ ID NO: 834306 - RNA, 19 nt, Artificial Sequence
  Description of Artificial Sequence: Synthetic oligonucleotide
  Sense strand starting at position 2626 of SEQ ID NO: 587996
auagcucuguuuccaugaa

SEQ ID NO: 834307 - RNA, 19 nt, Artificial Sequence
  Description of Artificial Sequence: Synthetic oligonucleotide
  Antisense strand to SEQ ID NO: 834306
uucauggaaacagagcuau

SEQ ID NO: 834308 - RNA, 19 nt, Artificial Sequence
  Description of Artificial Sequence: Synthetic oligonucleotide
  Sense strand starting at position 2630 of SEQ ID NO: 587996
cucuguuuccaugaagugu

SEQ ID NO: 834309 - RNA, 19 nt, Artificial Sequence
  Description of Artificial Sequence: Synthetic oligonucleotide
  Antisense strand to SEQ ID NO: 834308
acacuucauggaaacagag

SEQ ID NO: 834310 - RNA, 19 nt, Artificial Sequence
  Description of Artificial Sequence: Synthetic oligonucleotide
  Sense strand starting at position 2636 of SEQ ID NO: 587996
uuccaugaagugugaggau

SEQ ID NO: 834311 - RNA, 19 nt, Artificial Sequence
  Description of Artificial Sequence: Synthetic oligonucleotide
  Antisense strand to SEQ ID NO: 834310
auccucacacuucauggaa

SEQ ID NO: 834312 - RNA, 19 nt, Artificial Sequence
  Description of Artificial Sequence: Synthetic oligonucleotide
  Sense strand starting at position 2669 of SEQ ID NO: 587996
guggaaagugcucaugaca

SEQ ID NO: 834313 - RNA, 19 nt, Artificial Sequence
  Description of Artificial Sequence: Synthetic oligonucleotide
  Antisense strand to SEQ ID NO: 834312
ugucaugagcacuuuccac

SEQ ID NO: 834314 - RNA, 19 nt, Artificial Sequence
  Description of Artificial Sequence: Synthetic oligonucleotide
  Sense strand starting at position 2701 of SEQ ID NO: 587996
ugggcaagugcccauuaaa

SEQ ID NO: 834315 - RNA, 19 nt, Artificial Sequence
  Description of Artificial Sequence: Synthetic oligonucleotide
  Antisense strand to SEQ ID NO: 834314
uuuaaugggcacuugccca

SEQ ID NO: 834316 - RNA, 19 nt, Artificial Sequence
  Description of Artificial Sequence: Synthetic oligonucleotide
  Sense strand starting at position 2739 of SEQ ID NO: 587996
cugcaaaguuuagcugaga

SEQ ID NO: 834317 - RNA, 19 nt, Artificial Sequence
  Description of Artificial Sequence: Synthetic oligonucleotide
  Antisense strand to SEQ ID NO: 834316
ucucagcuaaacuuugcag

SEQ ID NO: 834318 - RNA, 19 nt, Artificial Sequence
  Description of Artificial Sequence: Synthetic oligonucleotide
  Sense strand starting at position 2740 of SEQ ID NO: 587996
ugcaaaguuuagcugagau

SEQ ID NO: 834319 - RNA, 19 nt, Artificial Sequence
  Description of Artificial Sequence: Synthetic oligonucleotide
  Antisense strand to SEQ ID NO: 834318
aucucagcuaaacuuugca

SEQ ID NO: 834320 - RNA, 19 nt, Artificial Sequence
  Description of Artificial Sequence: Synthetic oligonucleotide
  Sense strand starting at position 2831 of SEQ ID NO: 587996
ucaguuugaucacuuuaca

SEQ ID NO: 834321 - RNA, 19 nt, Artificial Sequence
  Description of Artificial Sequence: Synthetic oligonucleotide
  Antisense strand to SEQ ID NO: 834320
uguaaagugaucaaacuga

SEQ ID NO: 834322 - RNA, 19 nt, Artificial Sequence
  Description of Artificial Sequence: Synthetic oligonucleotide
  Sense strand starting at position 2929 of SEQ ID NO: 587996
ccugcaugucuugagagag

SEQ ID NO: 834323 - RNA, 19 nt, Artificial Sequence
  Description of Artificial Sequence: Synthetic oligonucleotide
  Antisense strand to SEQ ID NO: 834322
cucucucaagacaugcagg

SEQ ID NO: 834324 - RNA, 19 nt, Artificial Sequence
  Description of Artificial Sequence: Synthetic oligonucleotide
  Sense strand starting at position 2984 of SEQ ID NO: 587996
aaggauguuucugcauuga

SEQ ID NO: 834325 - RNA, 19 nt, Artificial Sequence
  Description of Artificial Sequence: Synthetic oligonucleotide
  Antisense strand to SEQ ID NO: 834324
ucaaugcagaaacauccuu

SEQ ID NO: 834326 - RNA, 19 nt, Artificial Sequence
  Description of Artificial Sequence: Synthetic oligonucleotide
  Sense strand starting at position 3060 of SEQ ID NO: 587996
uuauaagagaugugaguuu

SEQ ID NO: 834327 - RNA, 19 nt, Artificial Sequence
  Description of Artificial Sequence: Synthetic oligonucleotide
  Antisense strand to SEQ ID NO: 834326
aaacucacaucucuuauaa

SEQ ID NO: 834328 - RNA, 19 nt, Artificial Sequence
  Description of Artificial Sequence: Synthetic oligonucleotide
  Sense strand starting at position 3067 of SEQ ID NO: 587996
agaugugaguuuccuaaac

SEQ ID NO: 834329 - RNA, 19 nt, Artificial Sequence
  Description of Artificial Sequence: Synthetic oligonucleotide
  Antisense strand to SEQ ID NO: 834328
guuuaggaaacucacaucu

SEQ ID NO: 834330 - RNA, 19 nt, Artificial Sequence
  Description of Artificial Sequence: Synthetic oligonucleotide
  Sense strand starting at position 3131 of SEQ ID NO: 587996
auagucuugcaagaauuag

SEQ ID NO: 834331 - RNA, 19 nt, Artificial Sequence
  Description of Artificial Sequence: Synthetic oligonucleotide
  Antisense strand to SEQ ID NO: 834330
cuaauucuugcaagacuau

SEQ ID NO: 834332 - RNA, 19 nt, Artificial Sequence
  Description of Artificial Sequence: Synthetic oligonucleotide
  Sense strand starting at position 3468 of SEQ ID NO: 587996
ugccuuucuguggaauaac

SEQ ID NO: 834333 - RNA, 19 nt, Artificial Sequence
  Description of Artificial Sequence: Synthetic oligonucleotide
  Antisense strand to SEQ ID NO: 834332
guuauuccacagaaaggca

SEQ ID NO: 834334 - RNA, 19 nt, Artificial Sequence
  Description of Artificial Sequence: Synthetic oligonucleotide
  Sense strand starting at position 3476 of SEQ ID NO: 587996
uguggaauaacuggccaua

SEQ ID NO: 834335 - RNA, 19 nt, Artificial Sequence
  Description of Artificial Sequence: Synthetic oligonucleotide
  Antisense strand to SEQ ID NO: 834334
uauggccaguuauuccaca

SEQ ID NO: 834336 - RNA, 19 nt, Artificial Sequence
  Description of Artificial Sequence: Synthetic oligonucleotide
  Sense strand starting at position 3581 of SEQ ID NO: 587996
gaaggugucugaguuaaca

SEQ ID NO: 834337 - RNA, 19 nt, Artificial Sequence
  Description of Artificial Sequence: Synthetic oligonucleotide
  Antisense strand to SEQ ID NO: 834336
uguuaacucagacaccuuc

SEQ ID NO: 834338 - RNA, 19 nt, Artificial Sequence
  Description of Artificial Sequence: Synthetic oligonucleotide
  Sense strand starting at position 3589 of SEQ ID NO: 587996
cugaguuaacagcagugaa

SEQ ID NO: 834339 - RNA, 19 nt, Artificial Sequence
  Description of Artificial Sequence: Synthetic oligonucleotide
  Antisense strand to SEQ ID NO: 834338
uucacugcuguuaacucag

SEQ ID NO: 834340 - RNA, 19 nt, Artificial Sequence
  Description of Artificial Sequence: Synthetic oligonucleotide
  Sense strand starting at position 34 of SEQ ID NO: 587997
ugugacuucccuuagagua

SEQ ID NO: 834341 - RNA, 19 nt, Artificial Sequence
  Description of Artificial Sequence: Synthetic oligonucleotide
  Antisense strand to SEQ ID NO: 834340
uacucuaagggaagucaca

SEQ ID NO: 834342 - RNA, 19 nt, Artificial Sequence
  Description of Artificial Sequence: Synthetic oligonucleotide
  Sense strand starting at position 48 of SEQ ID NO: 587997
gaguaaauacagugacaac

SEQ ID NO: 834343 - RNA, 19 nt, Artificial Sequence
  Description of Artificial Sequence: Synthetic oligonucleotide
  Antisense strand to SEQ ID NO: 834342
guugucacuguauuuacuc

SEQ ID NO: 834344 - RNA, 19 nt, Artificial Sequence
  Description of Artificial Sequence: Synthetic oligonucleotide
  Sense strand starting at position 58 of SEQ ID NO: 587997
agugacaaccuauguuaga

SEQ ID NO: 834345 - RNA, 19 nt, Artificial Sequence
  Description of Artificial Sequence: Synthetic oligonucleotide
  Antisense strand to SEQ ID NO: 834344
ucuaacauagguugucacu

SEQ ID NO: 834346 - RNA, 19 nt, Artificial Sequence
  Description of Artificial Sequence: Synthetic oligonucleotide
  Sense strand starting at position 59 of SEQ ID NO: 587997
gugacaaccuauguuagag

SEQ ID NO: 834347 - RNA, 19 nt, Artificial Sequence
  Description of Artificial Sequence: Synthetic oligonucleotide
  Antisense strand to SEQ ID NO: 834346
cucuaacauagguugucac

SEQ ID NO: 834348 - RNA, 19 nt, Artificial Sequence
  Description of Artificial Sequence: Synthetic oligonucleotide
  Sense strand starting at position 111 of SEQ ID NO: 587997
aggcaagacugucugaacu

SEQ ID NO: 834349 - RNA, 19 nt, Artificial Sequence
  Description of Artificial Sequence: Synthetic oligonucleotide
  Antisense strand to SEQ ID NO: 834348
aguucagacagucuugccu

SEQ ID NO: 834350 - RNA, 19 nt, Artificial Sequence
  Description of Artificial Sequence: Synthetic oligonucleotide
  Sense strand starting at position 260 of SEQ ID NO: 587997
gauguaauaccaggcuuua

SEQ ID NO: 834351 - RNA, 19 nt, Artificial Sequence
  Description of Artificial Sequence: Synthetic oligonucleotide
  Antisense strand to SEQ ID NO: 834350
uaaagccugguauuacauc

SEQ ID NO: 834352 - RNA, 19 nt, Artificial Sequence
  Description of Artificial Sequence: Synthetic oligonucleotide
  Sense strand starting at position 321 of SEQ ID NO: 587997
cuggaauggauugguguua

SEQ ID NO: 834353 - RNA, 19 nt, Artificial Sequence
  Description of Artificial Sequence: Synthetic oligonucleotide
  Antisense strand to SEQ ID NO: 834352
uaacaccaauccauuccag

SEQ ID NO: 834354 - RNA, 19 nt, Artificial Sequence
  Description of Artificial Sequence: Synthetic oligonucleotide
  Sense strand starting at position 322 of SEQ ID NO: 587997
uggaauggauugguguuaa

SEQ ID NO: 834355 - RNA, 19 nt, Artificial Sequence
  Description of Artificial Sequence: Synthetic oligonucleotide
  Antisense strand to SEQ ID NO: 834354
uuaacaccaauccauucca

SEQ ID NO: 834356 - RNA, 19 nt, Artificial Sequence
  Description of Artificial Sequence: Synthetic oligonucleotide
  Sense strand starting at position 410 of SEQ ID NO: 587997
cucucagucucacugggaa

SEQ ID NO: 834357 - RNA, 19 nt, Artificial Sequence
  Description of Artificial Sequence: Synthetic oligonucleotide
  Antisense strand to SEQ ID NO: 834356
uucccagugagacugagag

SEQ ID NO: 834358 - RNA, 19 nt, Artificial Sequence
  Description of Artificial Sequence: Synthetic oligonucleotide
  Sense strand starting at position 459 of SEQ ID NO: 587997
aacagucugugauugauaa

SEQ ID NO: 834359 - RNA, 19 nt, Artificial Sequence
  Description of Artificial Sequence: Synthetic oligonucleotide
  Antisense strand to SEQ ID NO: 834358
uuaucaaucacagacuguu

SEQ ID NO: 834360 - RNA, 19 nt, Artificial Sequence
  Description of Artificial Sequence: Synthetic oligonucleotide
  Sense strand starting at position 460 of SEQ ID NO: 587997
acagucugugauugauaaa

SEQ ID NO: 834361 - RNA, 19 nt, Artificial Sequence
  Description of Artificial Sequence: Synthetic oligonucleotide
  Antisense strand to SEQ ID NO: 834360
uuuaucaaucacagacugu

SEQ ID NO: 834362 - RNA, 19 nt, Artificial Sequence
  Description of Artificial Sequence: Synthetic oligonucleotide
  Sense strand starting at position 534 of SEQ ID NO: 587997
gggcuugacacauggaaga

SEQ ID NO: 834363 - RNA, 19 nt, Artificial Sequence
  Description of Artificial Sequence: Synthetic oligonucleotide
  Antisense strand to SEQ ID NO: 834362
ucuuccaugugucaagccc

SEQ ID NO: 834364 - RNA, 19 nt, Artificial Sequence
  Description of Artificial Sequence: Synthetic oligonucleotide
  Sense strand starting at position 557 of SEQ ID NO: 587997
aagaguguuaccuggugga

SEQ ID NO: 834365 - RNA, 19 nt, Artificial Sequence
  Description of Artificial Sequence: Synthetic oligonucleotide
  Antisense strand to SEQ ID NO: 834364
uccaccagguaacacucuu

SEQ ID NO: 834366 - RNA, 19 nt, Artificial Sequence
  Description of Artificial Sequence: Synthetic oligonucleotide
  Sense strand starting at position 781 of SEQ ID NO: 587997
acaagcagcuucucugaga

SEQ ID NO: 834367 - RNA, 19 nt, Artificial Sequence
  Description of Artificial Sequence: Synthetic oligonucleotide
  Antisense strand to SEQ ID NO: 834366
ucucagagaagcugcuugu

SEQ ID NO: 834368 - RNA, 19 nt, Artificial Sequence
  Description of Artificial Sequence: Synthetic oligonucleotide
  Sense strand starting at position 844 of SEQ ID NO: 587997
uuaagcuugccauaagauc

SEQ ID NO: 834369 - RNA, 19 nt, Artificial Sequence
  Description of Artificial Sequence: Synthetic oligonucleotide
  Antisense strand to SEQ ID NO: 834368
gaucuuauggcaagcuuaa

SEQ ID NO: 834370 - RNA, 19 nt, Artificial Sequence
  Description of Artificial Sequence: Synthetic oligonucleotide
  Sense strand starting at position 882 of SEQ ID NO: 587997
gcaagugguccugaaacac

SEQ ID NO: 834371 - RNA, 19 nt, Artificial Sequence
  Description of Artificial Sequence: Synthetic oligonucleotide
  Antisense strand to SEQ ID NO: 834370
guguuucaggaccacuugc

SEQ ID NO: 834372 - RNA, 19 nt, Artificial Sequence
  Description of Artificial Sequence: Synthetic oligonucleotide
  Sense strand starting at position 921 of SEQ ID NO: 587997
gucaucugcgaauauacca

SEQ ID NO: 834373 - RNA, 19 nt, Artificial Sequence
  Description of Artificial Sequence: Synthetic oligonucleotide
  Antisense strand to SEQ ID NO: 834372
ugguauauucgcagaugac

SEQ ID NO: 834374 - RNA, 19 nt, Artificial Sequence
  Description of Artificial Sequence: Synthetic oligonucleotide
  Sense strand starting at position 1096 of SEQ ID NO: 587997
aaacuagauuugggaguaa

SEQ ID NO: 834375 - RNA, 19 nt, Artificial Sequence
  Description of Artificial Sequence: Synthetic oligonucleotide
  Antisense strand to SEQ ID NO: 834374
uuacucccaaaucuaguuu

SEQ ID NO: 834376 - RNA, 19 nt, Artificial Sequence
  Description of Artificial Sequence: Synthetic oligonucleotide
  Sense strand starting at position 2279 of SEQ ID NO: 587997
gaguguaggaauugaguca

SEQ ID NO: 834377 - RNA, 19 nt, Artificial Sequence
  Description of Artificial Sequence: Synthetic oligonucleotide
  Antisense strand to SEQ ID NO: 834376
ugacucaauuccuacacuc

SEQ ID NO: 834378 - RNA, 19 nt, Artificial Sequence
  Description of Artificial Sequence: Synthetic oligonucleotide
  Sense strand starting at position 2296 of SEQ ID NO: 587997
cacggaaaguagccuaaua

SEQ ID NO: 834379 - RNA, 19 nt, Artificial Sequence
  Description of Artificial Sequence: Synthetic oligonucleotide
  Antisense strand to SEQ ID NO: 834378
uauuaggcuacuuuccgug

SEQ ID NO: 834380 - RNA, 19 nt, Artificial Sequence
  Description of Artificial Sequence: Synthetic oligonucleotide
  Sense strand starting at position 2751 of SEQ ID NO: 587997
ucuguaaugagguaguaac

SEQ ID NO: 834381 - RNA, 19 nt, Artificial Sequence
  Description of Artificial Sequence: Synthetic oligonucleotide
  Antisense strand to SEQ ID NO: 834380
guuacuaccucauuacaga

SEQ ID NO: 834382 - RNA, 19 nt, Artificial Sequence
  Description of Artificial Sequence: Synthetic oligonucleotide
  Sense strand starting at position 2994 of SEQ ID NO: 587997
agucauaaacaucgauucu

SEQ ID NO: 834383 - RNA, 19 nt, Artificial Sequence
  Description of Artificial Sequence: Synthetic oligonucleotide
  Antisense strand to SEQ ID NO: 834382
agaaucgauguuuaugacu

SEQ ID NO: 834384 - RNA, 19 nt, Artificial Sequence
  Description of Artificial Sequence: Synthetic oligonucleotide
  Sense strand starting at position 3120 of SEQ ID NO: 587997
ugauaaauuucggcuuucu

SEQ ID NO: 834385 - RNA, 19 nt, Artificial Sequence
  Description of Artificial Sequence: Synthetic oligonucleotide
  Antisense strand to SEQ ID NO: 834384
agaaagccgaaauuuauca

SEQ ID NO: 834386 - RNA, 19 nt, Artificial Sequence
  Description of Artificial Sequence: Synthetic oligonucleotide
  Sense strand starting at position 3186 of SEQ ID NO: 587997
auaucccuggugugaauua

SEQ ID NO: 834387 - RNA, 19 nt, Artificial Sequence
  Description of Artificial Sequence: Synthetic oligonucleotide
  Antisense strand to SEQ ID NO: 834386
uaauucacaccagggauau

SEQ ID NO: 834388 - RNA, 19 nt, Artificial Sequence
  Description of Artificial Sequence: Synthetic oligonucleotide
  Sense strand starting at position 3202 of SEQ ID NO: 587997
uuaaauuaccagugaagug

SEQ ID NO: 834389 - RNA, 19 nt, Artificial Sequence
  Description of Artificial Sequence: Synthetic oligonucleotide
  Antisense strand to SEQ ID NO: 834388
cacuucacugguaauuuaa

SEQ ID NO: 834390 - RNA, 19 nt, Artificial Sequence
  Description of Artificial Sequence: Synthetic oligonucleotide
  Sense strand starting at position 3214 of SEQ ID NO: 587997
ugaaguguaggucaguuau

SEQ ID NO: 834391 - RNA, 19 nt, Artificial Sequence
  Description of Artificial Sequence: Synthetic oligonucleotide
  Antisense strand to SEQ ID NO: 834390
auaacugaccuacacuuca

SEQ ID NO: 834392 - RNA, 19 nt, Artificial Sequence
  Description of Artificial Sequence: Synthetic oligonucleotide
  Sense strand starting at position 3237 of SEQ ID NO: 587997
ggucuuagugcugugugca

SEQ ID NO: 834393 - RNA, 19 nt, Artificial Sequence
  Description of Artificial Sequence: Synthetic oligonucleotide
  Antisense strand to SEQ ID NO: 834392
ugcacacagcacuaagacc

SEQ ID NO: 834394 - RNA, 19 nt, Artificial Sequence
  Description of Artificial Sequence: Synthetic oligonucleotide
  Sense strand starting at position 3483 of SEQ ID NO: 587997
gaguacaauaugugggaua

SEQ ID NO: 834395 - RNA, 19 nt, Artificial Sequence
  Description of Artificial Sequence: Synthetic oligonucleotide
  Antisense strand to SEQ ID NO: 834394
uaucccacauauuguacuc

SEQ ID NO: 834396 - RNA, 19 nt, Artificial Sequence
  Description of Artificial Sequence: Synthetic oligonucleotide
  Sense strand starting at position 3485 of SEQ ID NO: 587997
guacaauaugugggauauu

SEQ ID NO: 834397 - RNA, 19 nt, Artificial Sequence
  Description of Artificial Sequence: Synthetic oligonucleotide
  Antisense strand to SEQ ID NO: 834396
aauaucccacauauuguac

SEQ ID NO: 834398 - RNA, 19 nt, Artificial Sequence
  Description of Artificial Sequence: Synthetic oligonucleotide
  Sense strand starting at position 3486 of SEQ ID NO: 587997
uacaauaugugggauauuu

SEQ ID NO: 834399 - RNA, 19 nt, Artificial Sequence
  Description of Artificial Sequence: Synthetic oligonucleotide
  Antisense strand to SEQ ID NO: 834398
aaauaucccacauauugua

SEQ ID NO: 834400 - RNA, 19 nt, Artificial Sequence
  Description of Artificial Sequence: Synthetic oligonucleotide
  Sense strand starting at position 3534 of SEQ ID NO: 587997
agaccuugcuaucuaagua

SEQ ID NO: 834401 - RNA, 19 nt, Artificial Sequence
  Description of Artificial Sequence: Synthetic oligonucleotide
  Antisense strand to SEQ ID NO: 834400
uacuuagauagcaaggucu

SEQ ID NO: 834402 - RNA, 19 nt, Artificial Sequence
  Description of Artificial Sequence: Synthetic oligonucleotide
  Sense strand starting at position 3660 of SEQ ID NO: 587997
ugaggcucuggguauugaa

SEQ ID NO: 834403 - RNA, 19 nt, Artificial Sequence
  Description of Artificial Sequence: Synthetic oligonucleotide
  Antisense strand to SEQ ID NO: 834402
uucaauacccagagccuca

SEQ ID NO: 834404 - RNA, 19 nt, Artificial Sequence
  Description of Artificial Sequence: Synthetic oligonucleotide
  Sense strand starting at position 3704 of SEQ ID NO: 587997
ccucaaggagcucaguaua

SEQ ID NO: 834405 - RNA, 19 nt, Artificial Sequence
  Description of Artificial Sequence: Synthetic oligonucleotide
  Antisense strand to SEQ ID NO: 834404
uauacugagcuccuugagg

SEQ ID NO: 834406 - RNA, 19 nt, Artificial Sequence
  Description of Artificial Sequence: Synthetic oligonucleotide
  Sense strand starting at position 3709 of SEQ ID NO: 587997
aggagcucaguauaagagu

SEQ ID NO: 834407 - RNA, 19 nt, Artificial Sequence
  Description of Artificial Sequence: Synthetic oligonucleotide
  Antisense strand to SEQ ID NO: 834406
acucuuauacugagcuccu

SEQ ID NO: 834408 - RNA, 19 nt, Artificial Sequence
  Description of Artificial Sequence: Synthetic oligonucleotide
  Sense strand starting at position 3715 of SEQ ID NO: 587997
ucaguauaagaguggagau

SEQ ID NO: 834409 - RNA, 19 nt, Artificial Sequence
  Description of Artificial Sequence: Synthetic oligonucleotide
  Antisense strand to SEQ ID NO: 834408
aucuccacucuuauacuga

SEQ ID NO: 834410 - RNA, 19 nt, Artificial Sequence
  Description of Artificial Sequence: Synthetic oligonucleotide
  Sense strand starting at position 3804 of SEQ ID NO: 587997
acaggucucaaucgagaaa

SEQ ID NO: 834411 - RNA, 19 nt, Artificial Sequence
  Description of Artificial Sequence: Synthetic oligonucleotide
  Antisense strand to SEQ ID NO: 834410
uuucucgauugagaccugu

SEQ ID NO: 834412 - RNA, 19 nt, Artificial Sequence
  Description of Artificial Sequence: Synthetic oligonucleotide
  Sense strand starting at position 3807 of SEQ ID NO: 587997
ggucucaaucgagaaaguu

SEQ ID NO: 834413 - RNA, 19 nt, Artificial Sequence
  Description of Artificial Sequence: Synthetic oligonucleotide
  Antisense strand to SEQ ID NO: 834412
aacuuucucgauugagacc

SEQ ID NO: 834414 - RNA, 19 nt, Artificial Sequence
  Description of Artificial Sequence: Synthetic oligonucleotide
  Sense strand starting at position 3879 of SEQ ID NO: 587997
aaagaagauuucgaaggcu

SEQ ID NO: 834415 - RNA, 19 nt, Artificial Sequence
  Description of Artificial Sequence: Synthetic oligonucleotide
  Antisense strand to SEQ ID NO: 834414
agccuucgaaaucuucuuu

SEQ ID NO: 834416 - RNA, 19 nt, Artificial Sequence
  Description of Artificial Sequence: Synthetic oligonucleotide
  Sense strand starting at position 3887 of SEQ ID NO: 587997
uuucgaaggcuuuaauauu

SEQ ID NO: 834417 - RNA, 19 nt, Artificial Sequence
  Description of Artificial Sequence: Synthetic oligonucleotide
  Antisense strand to SEQ ID NO: 834416
aauauuaaagccuucgaaa

SEQ ID NO: 834418 - RNA, 19 nt, Artificial Sequence
  Description of Artificial Sequence: Synthetic oligonucleotide
  Sense strand starting at position 3947 of SEQ ID NO: 587997
uucaguuguggguagauaa

SEQ ID NO: 834419 - RNA, 19 nt, Artificial Sequence
  Description of Artificial Sequence: Synthetic oligonucleotide
  Antisense strand to SEQ ID NO: 834418
uuaucuacccacaacugaa

SEQ ID NO: 834420 - RNA, 19 nt, Artificial Sequence
  Description of Artificial Sequence: Synthetic oligonucleotide
  Sense strand starting at position 205 of SEQ ID NO: 587998
ggagcaagucaauagcuuu

SEQ ID NO: 834421 - RNA, 19 nt, Artificial Sequence
  Description of Artificial Sequence: Synthetic oligonucleotide
  Antisense strand to SEQ ID NO: 834420
aaagcuauugacuugcucc

SEQ ID NO: 834422 - RNA, 19 nt, Artificial Sequence
  Description of Artificial Sequence: Synthetic oligonucleotide
  Sense strand starting at position 228 of SEQ ID NO: 587998
gguuucucaaagugguaaa

SEQ ID NO: 834423 - RNA, 19 nt, Artificial Sequence
  Description of Artificial Sequence: Synthetic oligonucleotide
  Antisense strand to SEQ ID NO: 834422
uuuaccacuuugagaaacc

SEQ ID NO: 834424 - RNA, 19 nt, Artificial Sequence
  Description of Artificial Sequence: Synthetic oligonucleotide
  Sense strand starting at position 281 of SEQ ID NO: 587998
agguaauguuucccaaucu

SEQ ID NO: 834425 - RNA, 19 nt, Artificial Sequence
  Description of Artificial Sequence: Synthetic oligonucleotide
  Antisense strand to SEQ ID NO: 834424
agauugggaaacauuaccu

SEQ ID NO: 834426 - RNA, 19 nt, Artificial Sequence
  Description of Artificial Sequence: Synthetic oligonucleotide
  Sense strand starting at position 507 of SEQ ID NO: 587998
gcugaauggcaauacuuau

SEQ ID NO: 834427 - RNA, 19 nt, Artificial Sequence
  Description of Artificial Sequence: Synthetic oligonucleotide
  Antisense strand to SEQ ID NO: 834426
auaaguauugccauucagc

SEQ ID NO: 834428 - RNA, 19 nt, Artificial Sequence
  Description of Artificial Sequence: Synthetic oligonucleotide
  Sense strand starting at position 594 of SEQ ID NO: 587998
uguggaucauuacuuuaau

SEQ ID NO: 834429 - RNA, 19 nt, Artificial Sequence
  Description of Artificial Sequence: Synthetic oligonucleotide
  Antisense strand to SEQ ID NO: 834428
auuaaaguaaugauccaca

SEQ ID NO: 834430 - RNA, 19 nt, Artificial Sequence
  Description of Artificial Sequence: Synthetic oligonucleotide
  Sense strand starting at position 595 of SEQ ID NO: 587998
guggaucauuacuuuaaug

SEQ ID NO: 834431 - RNA, 19 nt, Artificial Sequence
  Description of Artificial Sequence: Synthetic oligonucleotide
  Antisense strand to SEQ ID NO: 834430
cauuaaaguaaugauccac

SEQ ID NO: 834432 - RNA, 19 nt, Artificial Sequence
  Description of Artificial Sequence: Synthetic oligonucleotide
  Sense strand starting at position 695 of SEQ ID NO: 587998
auuauugcccaaggacaaa

SEQ ID NO: 834433 - RNA, 19 nt, Artificial Sequence
  Description of Artificial Sequence: Synthetic oligonucleotide
  Antisense strand to SEQ ID NO: 834432
uuuguccuugggcaauaau

SEQ ID NO: 834434 - RNA, 19 nt, Artificial Sequence
  Description of Artificial Sequence: Synthetic oligonucleotide
  Sense strand starting at position 796 of SEQ ID NO: 587998
ggguuugcacuguaaaccu

SEQ ID NO: 834435 - RNA, 19 nt, Artificial Sequence
  Description of Artificial Sequence: Synthetic oligonucleotide
  Antisense strand to SEQ ID NO: 834434
agguuuacagugcaaaccc

SEQ ID NO: 834436 - RNA, 19 nt, Artificial Sequence
  Description of Artificial Sequence: Synthetic oligonucleotide
  Sense strand starting at position 892 of SEQ ID NO: 587998
cagaguauaugagcaaaca

SEQ ID NO: 834437 - RNA, 19 nt, Artificial Sequence
  Description of Artificial Sequence: Synthetic oligonucleotide
  Antisense strand to SEQ ID NO: 834436
uguuugcucauauacucug

SEQ ID NO: 834438 - RNA, 19 nt, Artificial Sequence
  Description of Artificial Sequence: Synthetic oligonucleotide
  Sense strand starting at position 949 of SEQ ID NO: 587998
acaccauacuuguugauca

SEQ ID NO: 834439 - RNA, 19 nt, Artificial Sequence
  Description of Artificial Sequence: Synthetic oligonucleotide
  Antisense strand to SEQ ID NO: 834438
ugaucaacaaguauggugu

SEQ ID NO: 834440 - RNA, 19 nt, Artificial Sequence
  Description of Artificial Sequence: Synthetic oligonucleotide
  Sense strand starting at position 951 of SEQ ID NO: 587998
accauacuuguugaucauu

SEQ ID NO: 834441 - RNA, 19 nt, Artificial Sequence
  Description of Artificial Sequence: Synthetic oligonucleotide
  Antisense strand to SEQ ID NO: 834440
aaugaucaacaaguauggu

SEQ ID NO: 834442 - RNA, 19 nt, Artificial Sequence
  Description of Artificial Sequence: Synthetic oligonucleotide
  Sense strand starting at position 956 of SEQ ID NO: 587998
acuuguugaucauuaagua

SEQ ID NO: 834443 - RNA, 19 nt, Artificial Sequence
  Description of Artificial Sequence: Synthetic oligonucleotide
  Antisense strand to SEQ ID NO: 834442
uacuuaaugaucaacaagu

SEQ ID NO: 834444 - RNA, 19 nt, Artificial Sequence
  Description of Artificial Sequence: Synthetic oligonucleotide
  Sense strand starting at position 957 of SEQ ID NO: 587998
cuuguugaucauuaaguau

SEQ ID NO: 834445 - RNA, 19 nt, Artificial Sequence
  Description of Artificial Sequence: Synthetic oligonucleotide
  Antisense strand to SEQ ID NO: 834444
auacuuaaugaucaacaag

SEQ ID NO: 834446 - RNA, 19 nt, Artificial Sequence
  Description of Artificial Sequence: Synthetic oligonucleotide
  Sense strand starting at position 969 of SEQ ID NO: 587998
uaaguaugagccgagugaa

SEQ ID NO: 834447 - RNA, 19 nt, Artificial Sequence
  Description of Artificial Sequence: Synthetic oligonucleotide
  Antisense strand to SEQ ID NO: 834446
uucacucggcucauacuua

SEQ ID NO: 834448 - RNA, 19 nt, Artificial Sequence
  Description of Artificial Sequence: Synthetic oligonucleotide
  Sense strand starting at position 1088 of SEQ ID NO: 587998
ucaggaggcuuauuaagcu

SEQ ID NO: 834449 - RNA, 19 nt, Artificial Sequence
  Description of Artificial Sequence: Synthetic oligonucleotide
  Antisense strand to SEQ ID NO: 834448
agcuuaauaagccuccuga

SEQ ID NO: 834450 - RNA, 19 nt, Artificial Sequence
  Description of Artificial Sequence: Synthetic oligonucleotide
  Sense strand starting at position 1427 of SEQ ID NO: 587998
gcgaguaaucggucagcac

SEQ ID NO: 834451 - RNA, 19 nt, Artificial Sequence
  Description of Artificial Sequence: Synthetic oligonucleotide
  Antisense strand to SEQ ID NO: 834450
gugcugaccgauuacucgc

SEQ ID NO: 834452 - RNA, 19 nt, Artificial Sequence
  Description of Artificial Sequence: Synthetic oligonucleotide
  Sense strand starting at position 1430 of SEQ ID NO: 587998
aguaaucggucagcacaaa

SEQ ID NO: 834453 - RNA, 19 nt, Artificial Sequence
  Description of Artificial Sequence: Synthetic oligonucleotide
  Antisense strand to SEQ ID NO: 834452
uuugugcugaccgauuacu

SEQ ID NO: 834454 - RNA, 19 nt, Artificial Sequence
  Description of Artificial Sequence: Synthetic oligonucleotide
  Sense strand starting at position 1649 of SEQ ID NO: 587998
cagugaucaccguaccuac

SEQ ID NO: 834455 - RNA, 19 nt, Artificial Sequence
  Description of Artificial Sequence: Synthetic oligonucleotide
  Antisense strand to SEQ ID NO: 834454
guagguacggugaucacug

SEQ ID NO: 834456 - RNA, 19 nt, Artificial Sequence
  Description of Artificial Sequence: Synthetic oligonucleotide
  Sense strand starting at position 1744 of SEQ ID NO: 587998
gaacgaucgucucccaaac

SEQ ID NO: 834457 - RNA, 19 nt, Artificial Sequence
  Description of Artificial Sequence: Synthetic oligonucleotide
  Antisense strand to SEQ ID NO: 834456
guuugggagacgaucguuc

SEQ ID NO: 834458 - RNA, 19 nt, Artificial Sequence
  Description of Artificial Sequence: Synthetic oligonucleotide
  Sense strand starting at position 1761 of SEQ ID NO: 587998
acgcuuuagggcucgcuaa

SEQ ID NO: 834459 - RNA, 19 nt, Artificial Sequence
  Description of Artificial Sequence: Synthetic oligonucleotide
  Antisense strand to SEQ ID NO: 834458
uuagcgagcccuaaagcgu

SEQ ID NO: 834460 - RNA, 19 nt, Artificial Sequence
  Description of Artificial Sequence: Synthetic oligonucleotide
  Sense strand starting at position 2141 of SEQ ID NO: 587998
ucuaauaccugucucacga

SEQ ID NO: 834461 - RNA, 19 nt, Artificial Sequence
  Description of Artificial Sequence: Synthetic oligonucleotide
  Antisense strand to SEQ ID NO: 834460
ucgugagacagguauuaga

SEQ ID NO: 834462 - RNA, 19 nt, Artificial Sequence
  Description of Artificial Sequence: Synthetic oligonucleotide
  Sense strand starting at position 2154 of SEQ ID NO: 587998
ucacgaggugacuguagaa

SEQ ID NO: 834463 - RNA, 19 nt, Artificial Sequence
  Description of Artificial Sequence: Synthetic oligonucleotide
  Antisense strand to SEQ ID NO: 834462
uucuacagucaccucguga

SEQ ID NO: 834464 - RNA, 19 nt, Artificial Sequence
  Description of Artificial Sequence: Synthetic oligonucleotide
  Sense strand starting at position 2181 of SEQ ID NO: 587998
uaaagacugugacuuguuu

SEQ ID NO: 834465 - RNA, 19 nt, Artificial Sequence
  Description of Artificial Sequence: Synthetic oligonucleotide
  Antisense strand to SEQ ID NO: 834464
aaacaagucacagucuuua

SEQ ID NO: 834466 - RNA, 19 nt, Artificial Sequence
  Description of Artificial Sequence: Synthetic oligonucleotide
  Sense strand starting at position 2187 of SEQ ID NO: 587998
cugugacuuguuuaguuaa

SEQ ID NO: 834467 - RNA, 19 nt, Artificial Sequence
  Description of Artificial Sequence: Synthetic oligonucleotide
  Antisense strand to SEQ ID NO: 834466
uuaacuaaacaagucacag

SEQ ID NO: 834468 - RNA, 19 nt, Artificial Sequence
  Description of Artificial Sequence: Synthetic oligonucleotide
  Sense strand starting at position 2508 of SEQ ID NO: 587998
agauguuacuuauuggaaa

SEQ ID NO: 834469 - RNA, 19 nt, Artificial Sequence
  Description of Artificial Sequence: Synthetic oligonucleotide
  Antisense strand to SEQ ID NO: 834468
uuuccaauaaguaacaucu

SEQ ID NO: 834470 - RNA, 19 nt, Artificial Sequence
  Description of Artificial Sequence: Synthetic oligonucleotide
  Sense strand starting at position 2584 of SEQ ID NO: 587998
cuaagaguauuauccacag

SEQ ID NO: 834471 - RNA, 19 nt, Artificial Sequence
  Description of Artificial Sequence: Synthetic oligonucleotide
  Antisense strand to SEQ ID NO: 834470
cuguggauaauacucuuag

SEQ ID NO: 834472 - RNA, 19 nt, Artificial Sequence
  Description of Artificial Sequence: Synthetic oligonucleotide
  Sense strand starting at position 2602 of SEQ ID NO: 587998
gccuauggacaaugaaaca

SEQ ID NO: 834473 - RNA, 19 nt, Artificial Sequence
  Description of Artificial Sequence: Synthetic oligonucleotide
  Antisense strand to SEQ ID NO: 834472
uguuucauuguccauaggc

SEQ ID NO: 834474 - RNA, 19 nt, Artificial Sequence
  Description of Artificial Sequence: Synthetic oligonucleotide
  Sense strand starting at position 2883 of SEQ ID NO: 587998
ccagaaggcuuucugaaau

SEQ ID NO: 834475 - RNA, 19 nt, Artificial Sequence
  Description of Artificial Sequence: Synthetic oligonucleotide
  Antisense strand to SEQ ID NO: 834474
auuucagaaagccuucugg

SEQ ID NO: 834476 - RNA, 19 nt, Artificial Sequence
  Description of Artificial Sequence: Synthetic oligonucleotide
  Sense strand starting at position 2910 of SEQ ID NO: 587998
auauuauggccaggaauug

SEQ ID NO: 834477 - RNA, 19 nt, Artificial Sequence
  Description of Artificial Sequence: Synthetic oligonucleotide
  Antisense strand to SEQ ID NO: 834476
caauuccuggccauaauau

SEQ ID NO: 834478 - RNA, 19 nt, Artificial Sequence
  Description of Artificial Sequence: Synthetic oligonucleotide
  Sense strand starting at position 3002 of SEQ ID NO: 587998
gguagaguuaaaugagauu

SEQ ID NO: 834479 - RNA, 19 nt, Artificial Sequence
  Description of Artificial Sequence: Synthetic oligonucleotide
  Antisense strand to SEQ ID NO: 834478
aaucucauuuaacucuacc

SEQ ID NO: 834480 - RNA, 19 nt, Artificial Sequence
  Description of Artificial Sequence: Synthetic oligonucleotide
  Sense strand starting at position 3109 of SEQ ID NO: 587998
ggguuuaucuugucugaua

SEQ ID NO: 834481 - RNA, 19 nt, Artificial Sequence
  Description of Artificial Sequence: Synthetic oligonucleotide
  Antisense strand to SEQ ID NO: 834480
uaucagacaagauaaaccc

SEQ ID NO: 834482 - RNA, 19 nt, Artificial Sequence
  Description of Artificial Sequence: Synthetic oligonucleotide
  Sense strand starting at position 3110 of SEQ ID NO: 587998
gguuuaucuugucugauag

SEQ ID NO: 834483 - RNA, 19 nt, Artificial Sequence
  Description of Artificial Sequence: Synthetic oligonucleotide
  Antisense strand to SEQ ID NO: 834482
cuaucagacaagauaaacc

SEQ ID NO: 834484 - RNA, 19 nt, Artificial Sequence
  Description of Artificial Sequence: Synthetic oligonucleotide
  Sense strand starting at position 3111 of SEQ ID NO: 587998
guuuaucuugucugauaga

SEQ ID NO: 834485 - RNA, 19 nt, Artificial Sequence
  Description of Artificial Sequence: Synthetic oligonucleotide
  Antisense strand to SEQ ID NO: 834484
ucuaucagacaagauaaac

SEQ ID NO: 834486 - RNA, 19 nt, Artificial Sequence
  Description of Artificial Sequence: Synthetic oligonucleotide
  Sense strand starting at position 3118 of SEQ ID NO: 587998
uugucugauagauacgguu

SEQ ID NO: 834487 - RNA, 19 nt, Artificial Sequence
  Description of Artificial Sequence: Synthetic oligonucleotide
  Antisense strand to SEQ ID NO: 834486
aaccguaucuaucagacaa

SEQ ID NO: 834488 - RNA, 19 nt, Artificial Sequence
  Description of Artificial Sequence: Synthetic oligonucleotide
  Sense strand starting at position 3173 of SEQ ID NO: 587998
ggacaagugccuugagauu

SEQ ID NO: 834489 - RNA, 19 nt, Artificial Sequence
  Description of Artificial Sequence: Synthetic oligonucleotide
  Antisense strand to SEQ ID NO: 834488
aaucucaaggcacuugucc

SEQ ID NO: 834490 - RNA, 19 nt, Artificial Sequence
  Description of Artificial Sequence: Synthetic oligonucleotide
  Sense strand starting at position 3216 of SEQ ID NO: 587998
gaugcaauuguuggaauaa

SEQ ID NO: 834491 - RNA, 19 nt, Artificial Sequence
  Description of Artificial Sequence: Synthetic oligonucleotide
  Antisense strand to SEQ ID NO: 834490
uuauuccaacaauugcauc

SEQ ID NO: 834492 - RNA, 19 nt, Artificial Sequence
  Description of Artificial Sequence: Synthetic oligonucleotide
  Sense strand starting at position 3296 of SEQ ID NO: 587998
ucugaaagcuugcuaaaug

SEQ ID NO: 834493 - RNA, 19 nt, Artificial Sequence
  Description of Artificial Sequence: Synthetic oligonucleotide
  Antisense strand to SEQ ID NO: 834492
cauuuagcaagcuuucaga

SEQ ID NO: 834494 - RNA, 19 nt, Artificial Sequence
  Description of Artificial Sequence: Synthetic oligonucleotide
  Sense strand starting at position 3307 of SEQ ID NO: 587998
gcuaaaugugaauaacucu

SEQ ID NO: 834495 - RNA, 19 nt, Artificial Sequence
  Description of Artificial Sequence: Synthetic oligonucleotide
  Antisense strand to SEQ ID NO: 834494
agaguuauucacauuuagc

SEQ ID NO: 834496 - RNA, 19 nt, Artificial Sequence
  Description of Artificial Sequence: Synthetic oligonucleotide
  Sense strand starting at position 3783 of SEQ ID NO: 587998
gaauguacuugaguccauu

SEQ ID NO: 834497 - RNA, 19 nt, Artificial Sequence
  Description of Artificial Sequence: Synthetic oligonucleotide
  Antisense strand to SEQ ID NO: 834496
aauggacucaaguacauuc

SEQ ID NO: 834498 - RNA, 19 nt, Artificial Sequence
  Description of Artificial Sequence: Synthetic oligonucleotide
  Sense strand starting at position 3914 of SEQ ID NO: 587998
cuuccagauguauguuaua

SEQ ID NO: 834499 - RNA, 19 nt, Artificial Sequence
  Description of Artificial Sequence: Synthetic oligonucleotide
  Antisense strand to SEQ ID NO: 834498
uauaacauacaucuggaag

SEQ ID NO: 834500 - RNA, 19 nt, Artificial Sequence
  Description of Artificial Sequence: Synthetic oligonucleotide
  Sense strand starting at position 22 of SEQ ID NO: 587999
uuaguaguucccguuuguu

SEQ ID NO: 834501 - RNA, 19 nt, Artificial Sequence
  Description of Artificial Sequence: Synthetic oligonucleotide
  Antisense strand to SEQ ID NO: 834500
aacaaacgggaacuacuaa

SEQ ID NO: 834502 - RNA, 19 nt, Artificial Sequence
  Description of Artificial Sequence: Synthetic oligonucleotide
  Sense strand starting at position 32 of SEQ ID NO: 587999
ccguuuguuagugcucaaa

SEQ ID NO: 834503 - RNA, 19 nt, Artificial Sequence
  Description of Artificial Sequence: Synthetic oligonucleotide
  Antisense strand to SEQ ID NO: 834502
uuugagcacuaacaaacgg

SEQ ID NO: 834504 - RNA, 19 nt, Artificial Sequence
  Description of Artificial Sequence: Synthetic oligonucleotide
  Sense strand starting at position 101 of SEQ ID NO: 587999
gacugaaggccuugaacaa

SEQ ID NO: 834505 - RNA, 19 nt, Artificial Sequence
  Description of Artificial Sequence: Synthetic oligonucleotide
  Antisense strand to SEQ ID NO: 834504
uuguucaaggccuucaguc

SEQ ID NO: 834506 - RNA, 19 nt, Artificial Sequence
  Description of Artificial Sequence: Synthetic oligonucleotide
  Sense strand starting at position 312 of SEQ ID NO: 587999
ggagcaagucaauagcuuu

SEQ ID NO: 834507 - RNA, 19 nt, Artificial Sequence
  Description of Artificial Sequence: Synthetic oligonucleotide
  Antisense strand to SEQ ID NO: 834506
aaagcuauugacuugcucc

SEQ ID NO: 834508 - RNA, 19 nt, Artificial Sequence
  Description of Artificial Sequence: Synthetic oligonucleotide
  Sense strand starting at position 335 of SEQ ID NO: 587999
gguuucucaaagugguaaa

SEQ ID NO: 834509 - RNA, 19 nt, Artificial Sequence
  Description of Artificial Sequence: Synthetic oligonucleotide
  Antisense strand to SEQ ID NO: 834508
uuuaccacuuugagaaacc

SEQ ID NO: 834510 - RNA, 19 nt, Artificial Sequence
  Description of Artificial Sequence: Synthetic oligonucleotide
  Sense strand starting at position 388 of SEQ ID NO: 587999
agguaauguuucccaaucu

SEQ ID NO: 834511 - RNA, 19 nt, Artificial Sequence
  Description of Artificial Sequence: Synthetic oligonucleotide
  Antisense strand to SEQ ID NO: 834510
agauugggaaacauuaccu

SEQ ID NO: 834512 - RNA, 19 nt, Artificial Sequence
  Description of Artificial Sequence: Synthetic oligonucleotide
  Sense strand starting at position 614 of SEQ ID NO: 587999
gcugaauggcaauacuuau

SEQ ID NO: 834513 - RNA, 19 nt, Artificial Sequence
  Description of Artificial Sequence: Synthetic oligonucleotide
  Antisense strand to SEQ ID NO: 834512
auaaguauugccauucagc

SEQ ID NO: 834514 - RNA, 19 nt, Artificial Sequence
  Description of Artificial Sequence: Synthetic oligonucleotide
  Sense strand starting at position 701 of SEQ ID NO: 587999
uguggaucauuacuuuaau

SEQ ID NO: 834515 - RNA, 19 nt, Artificial Sequence
  Description of Artificial Sequence: Synthetic oligonucleotide
  Antisense strand to SEQ ID NO: 834514
auuaaaguaaugauccaca

SEQ ID NO: 834516 - RNA, 19 nt, Artificial Sequence
  Description of Artificial Sequence: Synthetic oligonucleotide
  Sense strand starting at position 702 of SEQ ID NO: 587999
guggaucauuacuuuaaug

SEQ ID NO: 834517 - RNA, 19 nt, Artificial Sequence
  Description of Artificial Sequence: Synthetic oligonucleotide
  Antisense strand to SEQ ID NO: 834516
cauuaaaguaaugauccac

SEQ ID NO: 834518 - RNA, 19 nt, Artificial Sequence
  Description of Artificial Sequence: Synthetic oligonucleotide
  Sense strand starting at position 802 of SEQ ID NO: 587999
auuauugcccaaggacaaa

SEQ ID NO: 834519 - RNA, 19 nt, Artificial Sequence
  Description of Artificial Sequence: Synthetic oligonucleotide
  Antisense strand to SEQ ID NO: 834518
uuuguccuugggcaauaau

SEQ ID NO: 834520 - RNA, 19 nt, Artificial Sequence
  Description of Artificial Sequence: Synthetic oligonucleotide
  Sense strand starting at position 903 of SEQ ID NO: 587999
ggguuugcacuguaaaccu

SEQ ID NO: 834521 - RNA, 19 nt, Artificial Sequence
  Description of Artificial Sequence: Synthetic oligonucleotide
  Antisense strand to SEQ ID NO: 834520
agguuuacagugcaaaccc

SEQ ID NO: 834522 - RNA, 19 nt, Artificial Sequence
  Description of Artificial Sequence: Synthetic oligonucleotide
  Sense strand starting at position 999 of SEQ ID NO: 587999
cagaguauaugagcaaaca

SEQ ID NO: 834523 - RNA, 19 nt, Artificial Sequence
  Description of Artificial Sequence: Synthetic oligonucleotide
  Antisense strand to SEQ ID NO: 834522
uguuugcucauauacucug

SEQ ID NO: 834524 - RNA, 19 nt, Artificial Sequence
  Description of Artificial Sequence: Synthetic oligonucleotide
  Sense strand starting at position 1056 of SEQ ID NO: 587999
acaccauacuuguugauca

SEQ ID NO: 834525 - RNA, 19 nt, Artificial Sequence
  Description of Artificial Sequence: Synthetic oligonucleotide
  Antisense strand to SEQ ID NO: 834524
ugaucaacaaguauggugu

SEQ ID NO: 834526 - RNA, 19 nt, Artificial Sequence
  Description of Artificial Sequence: Synthetic oligonucleotide
  Sense strand starting at position 1058 of SEQ ID NO: 587999
accauacuuguugaucauu

SEQ ID NO: 834527 - RNA, 19 nt, Artificial Sequence
  Description of Artificial Sequence: Synthetic oligonucleotide
  Antisense strand to SEQ ID NO: 834526
aaugaucaacaaguauggu

SEQ ID NO: 834528 - RNA, 19 nt, Artificial Sequence
  Description of Artificial Sequence: Synthetic oligonucleotide
  Sense strand starting at position 1063 of SEQ ID NO: 587999
acuuguugaucauuaagua

SEQ ID NO: 834529 - RNA, 19 nt, Artificial Sequence
  Description of Artificial Sequence: Synthetic oligonucleotide
  Antisense strand to SEQ ID NO: 834528
uacuuaaugaucaacaagu

SEQ ID NO: 834530 - RNA, 19 nt, Artificial Sequence
  Description of Artificial Sequence: Synthetic oligonucleotide
  Sense strand starting at position 1064 of SEQ ID NO: 587999
cuuguugaucauuaaguau

SEQ ID NO: 834531 - RNA, 19 nt, Artificial Sequence
  Description of Artificial Sequence: Synthetic oligonucleotide
  Antisense strand to SEQ ID NO: 834530
auacuuaaugaucaacaag

SEQ ID NO: 834532 - RNA, 19 nt, Artificial Sequence
  Description of Artificial Sequence: Synthetic oligonucleotide
  Sense strand starting at position 1076 of SEQ ID NO: 587999
uaaguaugagccgagugaa

SEQ ID NO: 834533 - RNA, 19 nt, Artificial Sequence
  Description of Artificial Sequence: Synthetic oligonucleotide
  Antisense strand to SEQ ID NO: 834532
uucacucggcucauacuua

SEQ ID NO: 834534 - RNA, 19 nt, Artificial Sequence
  Description of Artificial Sequence: Synthetic oligonucleotide
  Sense strand starting at position 1195 of SEQ ID NO: 587999
ucaggaggcuuauuaagcu

SEQ ID NO: 834535 - RNA, 19 nt, Artificial Sequence
  Description of Artificial Sequence: Synthetic oligonucleotide
  Antisense strand to SEQ ID NO: 834534
agcuuaauaagccuccuga

SEQ ID NO: 834536 - RNA, 19 nt, Artificial Sequence
  Description of Artificial Sequence: Synthetic oligonucleotide
  Sense strand starting at position 1534 of SEQ ID NO: 587999
gcgaguaaucggucagcac

SEQ ID NO: 834537 - RNA, 19 nt, Artificial Sequence
  Description of Artificial Sequence: Synthetic oligonucleotide
  Antisense strand to SEQ ID NO: 834536
gugcugaccgauuacucgc

SEQ ID NO: 834538 - RNA, 19 nt, Artificial Sequence
  Description of Artificial Sequence: Synthetic oligonucleotide
  Sense strand starting at position 1756 of SEQ ID NO: 587999
cagugaucaccguaccuac

SEQ ID NO: 834539 - RNA, 19 nt, Artificial Sequence
  Description of Artificial Sequence: Synthetic oligonucleotide
  Antisense strand to SEQ ID NO: 834538
guagguacggugaucacug

SEQ ID NO: 834540 - RNA, 19 nt, Artificial Sequence
  Description of Artificial Sequence: Synthetic oligonucleotide
  Sense strand starting at position 1868 of SEQ ID NO: 587999
acgcuuuagggcucgcuaa

SEQ ID NO: 834541 - RNA, 19 nt, Artificial Sequence
  Description of Artificial Sequence: Synthetic oligonucleotide
  Antisense strand to SEQ ID NO: 834540
uuagcgagcccuaaagcgu

SEQ ID NO: 834542 - RNA, 19 nt, Artificial Sequence
  Description of Artificial Sequence: Synthetic oligonucleotide
  Sense strand starting at position 2248 of SEQ ID NO: 587999
ucuaauaccugucucacga

SEQ ID NO: 834543 - RNA, 19 nt, Artificial Sequence
  Description of Artificial Sequence: Synthetic oligonucleotide
  Antisense strand to SEQ ID NO: 834542
ucgugagacagguauuaga

SEQ ID NO: 834544 - RNA, 19 nt, Artificial Sequence
  Description of Artificial Sequence: Synthetic oligonucleotide
  Sense strand starting at position 2261 of SEQ ID NO: 587999
ucacgaggugacuguagaa

SEQ ID NO: 834545 - RNA, 19 nt, Artificial Sequence
  Description of Artificial Sequence: Synthetic oligonucleotide
  Antisense strand to SEQ ID NO: 834544
uucuacagucaccucguga

SEQ ID NO: 834546 - RNA, 19 nt, Artificial Sequence
  Description of Artificial Sequence: Synthetic oligonucleotide
  Sense strand starting at position 2288 of SEQ ID NO: 587999
uaaagacugugacuuguuu

SEQ ID NO: 834547 - RNA, 19 nt, Artificial Sequence
  Description of Artificial Sequence: Synthetic oligonucleotide
  Antisense strand to SEQ ID NO: 834546
aaacaagucacagucuuua

SEQ ID NO: 834548 - RNA, 19 nt, Artificial Sequence
  Description of Artificial Sequence: Synthetic oligonucleotide
  Sense strand starting at position 2294 of SEQ ID NO: 587999
cugugacuuguuuaguuaa

SEQ ID NO: 834549 - RNA, 19 nt, Artificial Sequence
  Description of Artificial Sequence: Synthetic oligonucleotide
  Antisense strand to SEQ ID NO: 834548
uuaacuaaacaagucacag

SEQ ID NO: 834550 - RNA, 19 nt, Artificial Sequence
  Description of Artificial Sequence: Synthetic oligonucleotide
  Sense strand starting at position 2615 of SEQ ID NO: 587999
agauguuacuuauuggaaa

SEQ ID NO: 834551 - RNA, 19 nt, Artificial Sequence
  Description of Artificial Sequence: Synthetic oligonucleotide
  Antisense strand to SEQ ID NO: 834550
uuuccaauaaguaacaucu

SEQ ID NO: 834552 - RNA, 19 nt, Artificial Sequence
  Description of Artificial Sequence: Synthetic oligonucleotide
  Sense strand starting at position 2691 of SEQ ID NO: 587999
cuaagaguauuauccacag

SEQ ID NO: 834553 - RNA, 19 nt, Artificial Sequence
  Description of Artificial Sequence: Synthetic oligonucleotide
  Antisense strand to SEQ ID NO: 834552
cuguggauaauacucuuag

SEQ ID NO: 834554 - RNA, 19 nt, Artificial Sequence
  Description of Artificial Sequence: Synthetic oligonucleotide
  Sense strand starting at position 2709 of SEQ ID NO: 587999
gccuauggacaaugaaaca

SEQ ID NO: 834555 - RNA, 19 nt, Artificial Sequence
  Description of Artificial Sequence: Synthetic oligonucleotide
  Antisense strand to SEQ ID NO: 834554
uguuucauuguccauaggc

SEQ ID NO: 834556 - RNA, 19 nt, Artificial Sequence
  Description of Artificial Sequence: Synthetic oligonucleotide
  Sense strand starting at position 2990 of SEQ ID NO: 587999
ccagaaggcuuucugaaau

SEQ ID NO: 834557 - RNA, 19 nt, Artificial Sequence
  Description of Artificial Sequence: Synthetic oligonucleotide
  Antisense strand to SEQ ID NO: 834556
auuucagaaagccuucugg

SEQ ID NO: 834558 - RNA, 19 nt, Artificial Sequence
  Description of Artificial Sequence: Synthetic oligonucleotide
  Sense strand starting at position 3017 of SEQ ID NO: 587999
auauuauggccaggaauug

SEQ ID NO: 834559 - RNA, 19 nt, Artificial Sequence
  Description of Artificial Sequence: Synthetic oligonucleotide
  Antisense strand to SEQ ID NO: 834558
caauuccuggccauaauau

SEQ ID NO: 834560 - RNA, 19 nt, Artificial Sequence
  Description of Artificial Sequence: Synthetic oligonucleotide
  Sense strand starting at position 3109 of SEQ ID NO: 587999
gguagaguuaaaugagauu

SEQ ID NO: 834561 - RNA, 19 nt, Artificial Sequence
  Description of Artificial Sequence: Synthetic oligonucleotide
  Antisense strand to SEQ ID NO: 834560
aaucucauuuaacucuacc

SEQ ID NO: 834562 - RNA, 19 nt, Artificial Sequence
  Description of Artificial Sequence: Synthetic oligonucleotide
  Sense strand starting at position 3216 of SEQ ID NO: 587999
ggguuuaucuugucugaua

SEQ ID NO: 834563 - RNA, 19 nt, Artificial Sequence
  Description of Artificial Sequence: Synthetic oligonucleotide
  Antisense strand to SEQ ID NO: 834562
uaucagacaagauaaaccc

SEQ ID NO: 834564 - RNA, 19 nt, Artificial Sequence
  Description of Artificial Sequence: Synthetic oligonucleotide
  Sense strand starting at position 3217 of SEQ ID NO: 587999
gguuuaucuugucugauag

SEQ ID NO: 834565 - RNA, 19 nt, Artificial Sequence
  Description of Artificial Sequence: Synthetic oligonucleotide
  Antisense strand to SEQ ID NO: 834564
cuaucagacaagauaaacc

SEQ ID NO: 834566 - RNA, 19 nt, Artificial Sequence
  Description of Artificial Sequence: Synthetic oligonucleotide
  Sense strand starting at position 3218 of SEQ ID NO: 587999
guuuaucuugucugauaga

SEQ ID NO: 834567 - RNA, 19 nt, Artificial Sequence
  Description of Artificial Sequence: Synthetic oligonucleotide
  Antisense strand to SEQ ID NO: 834566
ucuaucagacaagauaaac

SEQ ID NO: 834568 - RNA, 19 nt, Artificial Sequence
  Description of Artificial Sequence: Synthetic oligonucleotide
  Sense strand starting at position 3225 of SEQ ID NO: 587999
uugucugauagauacgguu

SEQ ID NO: 834569 - RNA, 19 nt, Artificial Sequence
  Description of Artificial Sequence: Synthetic oligonucleotide
  Antisense strand to SEQ ID NO: 834568
aaccguaucuaucagacaa

SEQ ID NO: 834570 - RNA, 19 nt, Artificial Sequence
  Description of Artificial Sequence: Synthetic oligonucleotide
  Sense strand starting at position 3280 of SEQ ID NO: 587999
ggacaagugccuugagauu

SEQ ID NO: 834571 - RNA, 19 nt, Artificial Sequence
  Description of Artificial Sequence: Synthetic oligonucleotide
  Antisense strand to SEQ ID NO: 834570
aaucucaaggcacuugucc

SEQ ID NO: 834572 - RNA, 19 nt, Artificial Sequence
  Description of Artificial Sequence: Synthetic oligonucleotide
  Sense strand starting at position 3323 of SEQ ID NO: 587999
gaugcaauuguuggaauaa

SEQ ID NO: 834573 - RNA, 19 nt, Artificial Sequence
  Description of Artificial Sequence: Synthetic oligonucleotide
  Antisense strand to SEQ ID NO: 834572
uuauuccaacaauugcauc

SEQ ID NO: 834574 - RNA, 19 nt, Artificial Sequence
  Description of Artificial Sequence: Synthetic oligonucleotide
  Sense strand starting at position 3403 of SEQ ID NO: 587999
ucugaaagcuugcuaaaug

SEQ ID NO: 834575 - RNA, 19 nt, Artificial Sequence
  Description of Artificial Sequence: Synthetic oligonucleotide
  Antisense strand to SEQ ID NO: 834574
cauuuagcaagcuuucaga

SEQ ID NO: 834576 - RNA, 19 nt, Artificial Sequence
  Description of Artificial Sequence: Synthetic oligonucleotide
  Sense strand starting at position 3414 of SEQ ID NO: 587999
gcuaaaugugaauaacucu

SEQ ID NO: 834577 - RNA, 19 nt, Artificial Sequence
  Description of Artificial Sequence: Synthetic oligonucleotide
  Antisense strand to SEQ ID NO: 834576
agaguuauucacauuuagc

SEQ ID NO: 834578 - RNA, 19 nt, Artificial Sequence
  Description of Artificial Sequence: Synthetic oligonucleotide
  Sense strand starting at position 3890 of SEQ ID NO: 587999
gaauguacuugaguccauu

SEQ ID NO: 834579 - RNA, 19 nt, Artificial Sequence
  Description of Artificial Sequence: Synthetic oligonucleotide
  Antisense strand to SEQ ID NO: 834578
aauggacucaaguacauuc

SEQ ID NO: 834580 - RNA, 19 nt, Artificial Sequence
  Description of Artificial Sequence: Synthetic oligonucleotide
  Sense strand starting at position 377 of SEQ ID NO: 588000
accagaauaugcuuuaaga

SEQ ID NO: 834581 - RNA, 19 nt, Artificial Sequence
  Description of Artificial Sequence: Synthetic oligonucleotide
  Antisense strand to SEQ ID NO: 834580
ucuuaaagcauauucuggu

SEQ ID NO: 834582 - RNA, 19 nt, Artificial Sequence
  Description of Artificial Sequence: Synthetic oligonucleotide
  Sense strand starting at position 387 of SEQ ID NO: 588000
gcuuuaagagguuaugauc

SEQ ID NO: 834583 - RNA, 19 nt, Artificial Sequence
  Description of Artificial Sequence: Synthetic oligonucleotide
  Antisense strand to SEQ ID NO: 834582
gaucauaaccucuuaaagc

SEQ ID NO: 834584 - RNA, 19 nt, Artificial Sequence
  Description of Artificial Sequence: Synthetic oligonucleotide
  Sense strand starting at position 470 of SEQ ID NO: 588000
uuaguaguucccguuuguu

SEQ ID NO: 834585 - RNA, 19 nt, Artificial Sequence
  Description of Artificial Sequence: Synthetic oligonucleotide
  Antisense strand to SEQ ID NO: 834584
aacaaacgggaacuacuaa

SEQ ID NO: 834586 - RNA, 19 nt, Artificial Sequence
  Description of Artificial Sequence: Synthetic oligonucleotide
  Sense strand starting at position 480 of SEQ ID NO: 588000
ccguuuguuagugcucaaa

SEQ ID NO: 834587 - RNA, 19 nt, Artificial Sequence
  Description of Artificial Sequence: Synthetic oligonucleotide
  Antisense strand to SEQ ID NO: 834586
uuugagcacuaacaaacgg

SEQ ID NO: 834588 - RNA, 19 nt, Artificial Sequence
  Description of Artificial Sequence: Synthetic oligonucleotide
  Sense strand starting at position 549 of SEQ ID NO: 588000
gacugaaggccuugaacaa

SEQ ID NO: 834589 - RNA, 19 nt, Artificial Sequence
  Description of Artificial Sequence: Synthetic oligonucleotide
  Antisense strand to SEQ ID NO: 834588
uuguucaaggccuucaguc

SEQ ID NO: 834590 - RNA, 19 nt, Artificial Sequence
  Description of Artificial Sequence: Synthetic oligonucleotide
  Sense strand starting at position 760 of SEQ ID NO: 588000
ggagcaagucaauagcuuu

SEQ ID NO: 834591 - RNA, 19 nt, Artificial Sequence
  Description of Artificial Sequence: Synthetic oligonucleotide
  Antisense strand to SEQ ID NO: 834590
aaagcuauugacuugcucc

SEQ ID NO: 834592 - RNA, 19 nt, Artificial Sequence
  Description of Artificial Sequence: Synthetic oligonucleotide
  Sense strand starting at position 783 of SEQ ID NO: 588000
gguuucucaaagugguaaa

SEQ ID NO: 834593 - RNA, 19 nt, Artificial Sequence
  Description of Artificial Sequence: Synthetic oligonucleotide
  Antisense strand to SEQ ID NO: 834592
uuuaccacuuugagaaacc

SEQ ID NO: 834594 - RNA, 19 nt, Artificial Sequence
  Description of Artificial Sequence: Synthetic oligonucleotide
  Sense strand starting at position 836 of SEQ ID NO: 588000
agguaauguuucccaaucu

SEQ ID NO: 834595 - RNA, 19 nt, Artificial Sequence
  Description of Artificial Sequence: Synthetic oligonucleotide
  Antisense strand to SEQ ID NO: 834594
agauugggaaacauuaccu

SEQ ID NO: 834596 - RNA, 19 nt, Artificial Sequence
  Description of Artificial Sequence: Synthetic oligonucleotide
  Sense strand starting at position 1062 of SEQ ID NO: 588000
gcugaauggcaauacuuau

SEQ ID NO: 834597 - RNA, 19 nt, Artificial Sequence
  Description of Artificial Sequence: Synthetic oligonucleotide
  Antisense strand to SEQ ID NO: 834596
auaaguauugccauucagc

SEQ ID NO: 834598 - RNA, 19 nt, Artificial Sequence
  Description of Artificial Sequence: Synthetic oligonucleotide
  Sense strand starting at position 1149 of SEQ ID NO: 588000
uguggaucauuacuuuaau

SEQ ID NO: 834599 - RNA, 19 nt, Artificial Sequence
  Description of Artificial Sequence: Synthetic oligonucleotide
  Antisense strand to SEQ ID NO: 834598
auuaaaguaaugauccaca

SEQ ID NO: 834600 - RNA, 19 nt, Artificial Sequence
  Description of Artificial Sequence: Synthetic oligonucleotide
  Sense strand starting at position 1150 of SEQ ID NO: 588000
guggaucauuacuuuaaug

SEQ ID NO: 834601 - RNA, 19 nt, Artificial Sequence
  Description of Artificial Sequence: Synthetic oligonucleotide
  Antisense strand to SEQ ID NO: 834600
cauuaaaguaaugauccac

SEQ ID NO: 834602 - RNA, 19 nt, Artificial Sequence
  Description of Artificial Sequence: Synthetic oligonucleotide
  Sense strand starting at position 1250 of SEQ ID NO: 588000
auuauugcccaaggacaaa

SEQ ID NO: 834603 - RNA, 19 nt, Artificial Sequence
  Description of Artificial Sequence: Synthetic oligonucleotide
  Antisense strand to SEQ ID NO: 834602
uuuguccuugggcaauaau

SEQ ID NO: 834604 - RNA, 19 nt, Artificial Sequence
  Description of Artificial Sequence: Synthetic oligonucleotide
  Sense strand starting at position 1351 of SEQ ID NO: 588000
ggguuugcacuguaaaccu

SEQ ID NO: 834605 - RNA, 19 nt, Artificial Sequence
  Description of Artificial Sequence: Synthetic oligonucleotide
  Antisense strand to SEQ ID NO: 834604
agguuuacagugcaaaccc

SEQ ID NO: 834606 - RNA, 19 nt, Artificial Sequence
  Description of Artificial Sequence: Synthetic oligonucleotide
  Sense strand starting at position 1447 of SEQ ID NO: 588000
cagaguauaugagcaaaca

SEQ ID NO: 834607 - RNA, 19 nt, Artificial Sequence
  Description of Artificial Sequence: Synthetic oligonucleotide
  Antisense strand to SEQ ID NO: 834606
uguuugcucauauacucug

SEQ ID NO: 834608 - RNA, 19 nt, Artificial Sequence
  Description of Artificial Sequence: Synthetic oligonucleotide
  Sense strand starting at position 1504 of SEQ ID NO: 588000
acaccauacuuguugauca

SEQ ID NO: 834609 - RNA, 19 nt, Artificial Sequence
  Description of Artificial Sequence: Synthetic oligonucleotide
  Antisense strand to SEQ ID NO: 834608
ugaucaacaaguauggugu

SEQ ID NO: 834610 - RNA, 19 nt, Artificial Sequence
  Description of Artificial Sequence: Synthetic oligonucleotide
  Sense strand starting at position 1506 of SEQ ID NO: 588000
accauacuuguugaucauu

SEQ ID NO: 834611 - RNA, 19 nt, Artificial Sequence
  Description of Artificial Sequence: Synthetic oligonucleotide
  Antisense strand to SEQ ID NO: 834610
aaugaucaacaaguauggu

SEQ ID NO: 834612 - RNA, 19 nt, Artificial Sequence
  Description of Artificial Sequence: Synthetic oligonucleotide
  Sense strand starting at position 1511 of SEQ ID NO: 588000
acuuguugaucauuaagua

SEQ ID NO: 834613 - RNA, 19 nt, Artificial Sequence
  Description of Artificial Sequence: Synthetic oligonucleotide
  Antisense strand to SEQ ID NO: 834612
uacuuaaugaucaacaagu

SEQ ID NO: 834614 - RNA, 19 nt, Artificial Sequence
  Description of Artificial Sequence: Synthetic oligonucleotide
  Sense strand starting at position 1512 of SEQ ID NO: 588000
cuuguugaucauuaaguau

SEQ ID NO: 834615 - RNA, 19 nt, Artificial Sequence
  Description of Artificial Sequence: Synthetic oligonucleotide
  Antisense strand to SEQ ID NO: 834614
auacuuaaugaucaacaag

SEQ ID NO: 834616 - RNA, 19 nt, Artificial Sequence
  Description of Artificial Sequence: Synthetic oligonucleotide
  Sense strand starting at position 1524 of SEQ ID NO: 588000
uaaguaugagccgagugaa

SEQ ID NO: 834617 - RNA, 19 nt, Artificial Sequence
  Description of Artificial Sequence: Synthetic oligonucleotide
  Antisense strand to SEQ ID NO: 834616
uucacucggcucauacuua

SEQ ID NO: 834618 - RNA, 19 nt, Artificial Sequence
  Description of Artificial Sequence: Synthetic oligonucleotide
  Sense strand starting at position 1643 of SEQ ID NO: 588000
ucaggaggcuuauuaagcu

SEQ ID NO: 834619 - RNA, 19 nt, Artificial Sequence
  Description of Artificial Sequence: Synthetic oligonucleotide
  Antisense strand to SEQ ID NO: 834618
agcuuaauaagccuccuga

SEQ ID NO: 834620 - RNA, 19 nt, Artificial Sequence
  Description of Artificial Sequence: Synthetic oligonucleotide
  Sense strand starting at position 1982 of SEQ ID NO: 588000
gcgaguaaucggucagcac

SEQ ID NO: 834621 - RNA, 19 nt, Artificial Sequence
  Description of Artificial Sequence: Synthetic oligonucleotide
  Antisense strand to SEQ ID NO: 834620
gugcugaccgauuacucgc

SEQ ID NO: 834622 - RNA, 19 nt, Artificial Sequence
  Description of Artificial Sequence: Synthetic oligonucleotide
  Sense strand starting at position 2204 of SEQ ID NO: 588000
cagugaucaccguaccuac

SEQ ID NO: 834623 - RNA, 19 nt, Artificial Sequence
  Description of Artificial Sequence: Synthetic oligonucleotide
  Antisense strand to SEQ ID NO: 834622
guagguacggugaucacug

SEQ ID NO: 834624 - RNA, 19 nt, Artificial Sequence
  Description of Artificial Sequence: Synthetic oligonucleotide
  Sense strand starting at position 2316 of SEQ ID NO: 588000
acgcuuuagggcucgcuaa

SEQ ID NO: 834625 - RNA, 19 nt, Artificial Sequence
  Description of Artificial Sequence: Synthetic oligonucleotide
  Antisense strand to SEQ ID NO: 834624
uuagcgagcccuaaagcgu

SEQ ID NO: 834626 - RNA, 19 nt, Artificial Sequence
  Description of Artificial Sequence: Synthetic oligonucleotide
  Sense strand starting at position 2709 of SEQ ID NO: 588000
ucacgaggugacuguagaa

SEQ ID NO: 834627 - RNA, 19 nt, Artificial Sequence
  Description of Artificial Sequence: Synthetic oligonucleotide
  Antisense strand to SEQ ID NO: 834626
uucuacagucaccucguga

SEQ ID NO: 834628 - RNA, 19 nt, Artificial Sequence
  Description of Artificial Sequence: Synthetic oligonucleotide
  Sense strand starting at position 2736 of SEQ ID NO: 588000
uaaagacugugacuuguuu

SEQ ID NO: 834629 - RNA, 19 nt, Artificial Sequence
  Description of Artificial Sequence: Synthetic oligonucleotide
  Antisense strand to SEQ ID NO: 834628
aaacaagucacagucuuua

SEQ ID NO: 834630 - RNA, 19 nt, Artificial Sequence
  Description of Artificial Sequence: Synthetic oligonucleotide
  Sense strand starting at position 2742 of SEQ ID NO: 588000
cugugacuuguuuaguuaa

SEQ ID NO: 834631 - RNA, 19 nt, Artificial Sequence
  Description of Artificial Sequence: Synthetic oligonucleotide
  Antisense strand to SEQ ID NO: 834630
uuaacuaaacaagucacag

SEQ ID NO: 834632 - RNA, 19 nt, Artificial Sequence
  Description of Artificial Sequence: Synthetic oligonucleotide
  Sense strand starting at position 3063 of SEQ ID NO: 588000
agauguuacuuauuggaaa

SEQ ID NO: 834633 - RNA, 19 nt, Artificial Sequence
  Description of Artificial Sequence: Synthetic oligonucleotide
  Antisense strand to SEQ ID NO: 834632
uuuccaauaaguaacaucu

SEQ ID NO: 834634 - RNA, 19 nt, Artificial Sequence
  Description of Artificial Sequence: Synthetic oligonucleotide
  Sense strand starting at position 3139 of SEQ ID NO: 588000
cuaagaguauuauccacag

SEQ ID NO: 834635 - RNA, 19 nt, Artificial Sequence
  Description of Artificial Sequence: Synthetic oligonucleotide
  Antisense strand to SEQ ID NO: 834634
cuguggauaauacucuuag

SEQ ID NO: 834636 - RNA, 19 nt, Artificial Sequence
  Description of Artificial Sequence: Synthetic oligonucleotide
  Sense strand starting at position 3157 of SEQ ID NO: 588000
gccuauggacaaugaaaca

SEQ ID NO: 834637 - RNA, 19 nt, Artificial Sequence
  Description of Artificial Sequence: Synthetic oligonucleotide
  Antisense strand to SEQ ID NO: 834636
uguuucauuguccauaggc

SEQ ID NO: 834638 - RNA, 19 nt, Artificial Sequence
  Description of Artificial Sequence: Synthetic oligonucleotide
  Sense strand starting at position 3438 of SEQ ID NO: 588000
ccagaaggcuuucugaaau

SEQ ID NO: 834639 - RNA, 19 nt, Artificial Sequence
  Description of Artificial Sequence: Synthetic oligonucleotide
  Antisense strand to SEQ ID NO: 834638
auuucagaaagccuucugg

SEQ ID NO: 834640 - RNA, 19 nt, Artificial Sequence
  Description of Artificial Sequence: Synthetic oligonucleotide
  Sense strand starting at position 3465 of SEQ ID NO: 588000
auauuauggccaggaauug

SEQ ID NO: 834641 - RNA, 19 nt, Artificial Sequence
  Description of Artificial Sequence: Synthetic oligonucleotide
  Antisense strand to SEQ ID NO: 834640
caauuccuggccauaauau

SEQ ID NO: 834642 - RNA, 19 nt, Artificial Sequence
  Description of Artificial Sequence: Synthetic oligonucleotide
  Sense strand starting at position 3557 of SEQ ID NO: 588000
gguagaguuaaaugagauu

SEQ ID NO: 834643 - RNA, 19 nt, Artificial Sequence
  Description of Artificial Sequence: Synthetic oligonucleotide
  Antisense strand to SEQ ID NO: 834642
aaucucauuuaacucuacc

SEQ ID NO: 834644 - RNA, 19 nt, Artificial Sequence
  Description of Artificial Sequence: Synthetic oligonucleotide
  Sense strand starting at position 3664 of SEQ ID NO: 588000
ggguuuaucuugucugaua

SEQ ID NO: 834645 - RNA, 19 nt, Artificial Sequence
  Description of Artificial Sequence: Synthetic oligonucleotide
  Antisense strand to SEQ ID NO: 834644
uaucagacaagauaaaccc

SEQ ID NO: 834646 - RNA, 19 nt, Artificial Sequence
  Description of Artificial Sequence: Synthetic oligonucleotide
  Sense strand starting at position 3665 of SEQ ID NO: 588000
gguuuaucuugucugauag

SEQ ID NO: 834647 - RNA, 19 nt, Artificial Sequence
  Description of Artificial Sequence: Synthetic oligonucleotide
  Antisense strand to SEQ ID NO: 834646
cuaucagacaagauaaacc

SEQ ID NO: 834648 - RNA, 19 nt, Artificial Sequence
  Description of Artificial Sequence: Synthetic oligonucleotide
  Sense strand starting at position 3666 of SEQ ID NO: 588000
guuuaucuugucugauaga

SEQ ID NO: 834649 - RNA, 19 nt, Artificial Sequence
  Description of Artificial Sequence: Synthetic oligonucleotide
  Antisense strand to SEQ ID NO: 834648
ucuaucagacaagauaaac

SEQ ID NO: 834650 - RNA, 19 nt, Artificial Sequence
  Description of Artificial Sequence: Synthetic oligonucleotide
  Sense strand starting at position 3673 of SEQ ID NO: 588000
uugucugauagauacgguu

SEQ ID NO: 834651 - RNA, 19 nt, Artificial Sequence
  Description of Artificial Sequence: Synthetic oligonucleotide
  Antisense strand to SEQ ID NO: 834650
aaccguaucuaucagacaa

SEQ ID NO: 834652 - RNA, 19 nt, Artificial Sequence
  Description of Artificial Sequence: Synthetic oligonucleotide
  Sense strand starting at position 3728 of SEQ ID NO: 588000
ggacaagugccuugagauu

SEQ ID NO: 834653 - RNA, 19 nt, Artificial Sequence
  Description of Artificial Sequence: Synthetic oligonucleotide
  Antisense strand to SEQ ID NO: 834652
aaucucaaggcacuugucc

SEQ ID NO: 834654 - RNA, 19 nt, Artificial Sequence
  Description of Artificial Sequence: Synthetic oligonucleotide
  Sense strand starting at position 3771 of SEQ ID NO: 588000
gaugcaauuguuggaauaa

SEQ ID NO: 834655 - RNA, 19 nt, Artificial Sequence
  Description of Artificial Sequence: Synthetic oligonucleotide
  Antisense strand to SEQ ID NO: 834654
uuauuccaacaauugcauc

SEQ ID NO: 834656 - RNA, 19 nt, Artificial Sequence
  Description of Artificial Sequence: Synthetic oligonucleotide
  Sense strand starting at position 3851 of SEQ ID NO: 588000
ucugaaagcuugcuaaaug

SEQ ID NO: 834657 - RNA, 19 nt, Artificial Sequence
  Description of Artificial Sequence: Synthetic oligonucleotide
  Antisense strand to SEQ ID NO: 834656
cauuuagcaagcuuucaga

SEQ ID NO: 834658 - RNA, 19 nt, Artificial Sequence
  Description of Artificial Sequence: Synthetic oligonucleotide
  Sense strand starting at position 3862 of SEQ ID NO: 588000
gcuaaaugugaauaacucu

SEQ ID NO: 834659 - RNA, 19 nt, Artificial Sequence
  Description of Artificial Sequence: Synthetic oligonucleotide
  Antisense strand to SEQ ID NO: 834658
agaguuauucacauuuagc

SEQ ID NO: 834660 - RNA, 19 nt, Artificial Sequence
  Description of Artificial Sequence: Synthetic oligonucleotide
  Sense strand starting at position 2016 of SEQ ID NO: 588001
uauugaugcgcuugcuuga

SEQ ID NO: 834661 - RNA, 19 nt, Artificial Sequence
  Description of Artificial Sequence: Synthetic oligonucleotide
  Antisense strand to SEQ ID NO: 834660
ucaagcaagcgcaucaaua

SEQ ID NO: 834662 - RNA, 19 nt, Artificial Sequence
  Description of Artificial Sequence: Synthetic oligonucleotide
  Sense strand starting at position 2019 of SEQ ID NO: 588001
ugaugcgcuugcuugagaa

SEQ ID NO: 834663 - RNA, 19 nt, Artificial Sequence
  Description of Artificial Sequence: Synthetic oligonucleotide
  Antisense strand to SEQ ID NO: 834662
uucucaagcaagcgcauca

SEQ ID NO: 834664 - RNA, 19 nt, Artificial Sequence
  Description of Artificial Sequence: Synthetic oligonucleotide
  Sense strand starting at position 2021 of SEQ ID NO: 588001
augcgcuugcuugagaaug

SEQ ID NO: 834665 - RNA, 19 nt, Artificial Sequence
  Description of Artificial Sequence: Synthetic oligonucleotide
  Antisense strand to SEQ ID NO: 834664
cauucucaagcaagcgcau

SEQ ID NO: 834666 - RNA, 19 nt, Artificial Sequence
  Description of Artificial Sequence: Synthetic oligonucleotide
  Sense strand starting at position 2128 of SEQ ID NO: 588001
cagggaaucuuauggacua

SEQ ID NO: 834667 - RNA, 19 nt, Artificial Sequence
  Description of Artificial Sequence: Synthetic oligonucleotide
  Antisense strand to SEQ ID NO: 834666
uaguccauaagauucccug

SEQ ID NO: 834668 - RNA, 19 nt, Artificial Sequence
  Description of Artificial Sequence: Synthetic oligonucleotide
  Sense strand starting at position 2129 of SEQ ID NO: 588001
agggaaucuuauggacuaa

SEQ ID NO: 834669 - RNA, 19 nt, Artificial Sequence
  Description of Artificial Sequence: Synthetic oligonucleotide
  Antisense strand to SEQ ID NO: 834668
uuaguccauaagauucccu

SEQ ID NO: 834670 - RNA, 19 nt, Artificial Sequence
  Description of Artificial Sequence: Synthetic oligonucleotide
  Sense strand starting at position 2192 of SEQ ID NO: 588001
cagugcugcucaugaauuc

SEQ ID NO: 834671 - RNA, 19 nt, Artificial Sequence
  Description of Artificial Sequence: Synthetic oligonucleotide
  Antisense strand to SEQ ID NO: 834670
gaauucaugagcagcacug

SEQ ID NO: 834672 - RNA, 19 nt, Artificial Sequence
  Description of Artificial Sequence: Synthetic oligonucleotide
  Sense strand starting at position 2229 of SEQ ID NO: 588001
gaaauugucagaggcgcau

SEQ ID NO: 834673 - RNA, 19 nt, Artificial Sequence
  Description of Artificial Sequence: Synthetic oligonucleotide
  Antisense strand to SEQ ID NO: 834672
augcgccucugacaauuuc

SEQ ID NO: 834674 - RNA, 19 nt, Artificial Sequence
  Description of Artificial Sequence: Synthetic oligonucleotide
  Sense strand starting at position 2331 of SEQ ID NO: 588001
acucuaagucgccagauga

SEQ ID NO: 834675 - RNA, 19 nt, Artificial Sequence
  Description of Artificial Sequence: Synthetic oligonucleotide
  Antisense strand to SEQ ID NO: 834674
ucaucuggcgacuuagagu

SEQ ID NO: 834676 - RNA, 19 nt, Artificial Sequence
  Description of Artificial Sequence: Synthetic oligonucleotide
  Sense strand starting at position 2462 of SEQ ID NO: 588001
gguggugcucacugcuaca

SEQ ID NO: 834677 - RNA, 19 nt, Artificial Sequence
  Description of Artificial Sequence: Synthetic oligonucleotide
  Antisense strand to SEQ ID NO: 834676
uguagcagugagcaccacc

SEQ ID NO: 834678 - RNA, 19 nt, Artificial Sequence
  Description of Artificial Sequence: Synthetic oligonucleotide
  Sense strand starting at position 2579 of SEQ ID NO: 588001
uuuagcauaucaucuggaa

SEQ ID NO: 834679 - RNA, 19 nt, Artificial Sequence
  Description of Artificial Sequence: Synthetic oligonucleotide
  Antisense strand to SEQ ID NO: 834678
uuccagaugauaugcuaaa

SEQ ID NO: 834680 - RNA, 19 nt, Artificial Sequence
  Description of Artificial Sequence: Synthetic oligonucleotide
  Sense strand starting at position 2582 of SEQ ID NO: 588001
agcauaucaucuggaaaua

SEQ ID NO: 834681 - RNA, 19 nt, Artificial Sequence
  Description of Artificial Sequence: Synthetic oligonucleotide
  Antisense strand to SEQ ID NO: 834680
uauuuccagaugauaugcu

SEQ ID NO: 834682 - RNA, 19 nt, Artificial Sequence
  Description of Artificial Sequence: Synthetic oligonucleotide
  Sense strand starting at position 2793 of SEQ ID NO: 588001
ugaucugaauuuggagaaa

SEQ ID NO: 834683 - RNA, 19 nt, Artificial Sequence
  Description of Artificial Sequence: Synthetic oligonucleotide
  Antisense strand to SEQ ID NO: 834682
uuucuccaaauucagauca

SEQ ID NO: 834684 - RNA, 19 nt, Artificial Sequence
  Description of Artificial Sequence: Synthetic oligonucleotide
  Sense strand starting at position 2826 of SEQ ID NO: 588001
uaaugcugcucucagguua

SEQ ID NO: 834685 - RNA, 19 nt, Artificial Sequence
  Description of Artificial Sequence: Synthetic oligonucleotide
  Antisense strand to SEQ ID NO: 834684
uaaccugagagcagcauua

SEQ ID NO: 834686 - RNA, 19 nt, Artificial Sequence
  Description of Artificial Sequence: Synthetic oligonucleotide
  Sense strand starting at position 2830 of SEQ ID NO: 588001
gcugcucucagguuagcau

SEQ ID NO: 834687 - RNA, 19 nt, Artificial Sequence
  Description of Artificial Sequence: Synthetic oligonucleotide
  Antisense strand to SEQ ID NO: 834686
augcuaaccugagagcagc

SEQ ID NO: 834688 - RNA, 19 nt, Artificial Sequence
  Description of Artificial Sequence: Synthetic oligonucleotide
  Sense strand starting at position 2872 of SEQ ID NO: 588001
agugaagagucagauacag

SEQ ID NO: 834689 - RNA, 19 nt, Artificial Sequence
  Description of Artificial Sequence: Synthetic oligonucleotide
  Antisense strand to SEQ ID NO: 834688
cuguaucugacucuucacu

SEQ ID NO: 834690 - RNA, 19 nt, Artificial Sequence
  Description of Artificial Sequence: Synthetic oligonucleotide
  Sense strand starting at position 2913 of SEQ ID NO: 588001
agauauagucaucacuguu

SEQ ID NO: 834691 - RNA, 19 nt, Artificial Sequence
  Description of Artificial Sequence: Synthetic oligonucleotide
  Antisense strand to SEQ ID NO: 834690
aacagugaugacuauaucu

SEQ ID NO: 834692 - RNA, 19 nt, Artificial Sequence
  Description of Artificial Sequence: Synthetic oligonucleotide
  Sense strand starting at position 2936 of SEQ ID NO: 588001
uguccuuugguccaagaaa

SEQ ID NO: 834693 - RNA, 19 nt, Artificial Sequence
  Description of Artificial Sequence: Synthetic oligonucleotide
  Antisense strand to SEQ ID NO: 834692
uuucuuggaccaaaggaca

SEQ ID NO: 834694 - RNA, 19 nt, Artificial Sequence
  Description of Artificial Sequence: Synthetic oligonucleotide
  Sense strand starting at position 2960 of SEQ ID NO: 588001
auuugaaagucagaaggau

SEQ ID NO: 834695 - RNA, 19 nt, Artificial Sequence
  Description of Artificial Sequence: Synthetic oligonucleotide
  Antisense strand to SEQ ID NO: 834694
auccuucugacuuucaaau

SEQ ID NO: 834696 - RNA, 19 nt, Artificial Sequence
  Description of Artificial Sequence: Synthetic oligonucleotide
  Sense strand starting at position 2968 of SEQ ID NO: 588001
gucagaaggaucugaguuc

SEQ ID NO: 834697 - RNA, 19 nt, Artificial Sequence
  Description of Artificial Sequence: Synthetic oligonucleotide
  Antisense strand to SEQ ID NO: 834696
gaacucagauccuucugac

SEQ ID NO: 834698 - RNA, 19 nt, Artificial Sequence
  Description of Artificial Sequence: Synthetic oligonucleotide
  Sense strand starting at position 2975 of SEQ ID NO: 588001
ggaucugaguuccaguaaa

SEQ ID NO: 834699 - RNA, 19 nt, Artificial Sequence
  Description of Artificial Sequence: Synthetic oligonucleotide
  Antisense strand to SEQ ID NO: 834698
uuuacuggaacucagaucc

SEQ ID NO: 834700 - RNA, 19 nt, Artificial Sequence
  Description of Artificial Sequence: Synthetic oligonucleotide
  Sense strand starting at position 2983 of SEQ ID NO: 588001
guuccaguaaaucguauca

SEQ ID NO: 834701 - RNA, 19 nt, Artificial Sequence
  Description of Artificial Sequence: Synthetic oligonucleotide
  Antisense strand to SEQ ID NO: 834700
ugauacgauuuacuggaac

SEQ ID NO: 834702 - RNA, 19 nt, Artificial Sequence
  Description of Artificial Sequence: Synthetic oligonucleotide
  Sense strand starting at position 3046 of SEQ ID NO: 588001
ucagaagauugcuauagug

SEQ ID NO: 834703 - RNA, 19 nt, Artificial Sequence
  Description of Artificial Sequence: Synthetic oligonucleotide
  Antisense strand to SEQ ID NO: 834702
cacuauagcaaucuucuga

SEQ ID NO: 834704 - RNA, 19 nt, Artificial Sequence
  Description of Artificial Sequence: Synthetic oligonucleotide
  Sense strand starting at position 3052 of SEQ ID NO: 588001
gauugcuauagugaguaga

SEQ ID NO: 834705 - RNA, 19 nt, Artificial Sequence
  Description of Artificial Sequence: Synthetic oligonucleotide
  Antisense strand to SEQ ID NO: 834704
ucuacucacuauagcaauc

SEQ ID NO: 834706 - RNA, 19 nt, Artificial Sequence
  Description of Artificial Sequence: Synthetic oligonucleotide
  Sense strand starting at position 3054 of SEQ ID NO: 588001
uugcuauagugaguagaga

SEQ ID NO: 834707 - RNA, 19 nt, Artificial Sequence
  Description of Artificial Sequence: Synthetic oligonucleotide
  Antisense strand to SEQ ID NO: 834706
ucucuacucacuauagcaa

SEQ ID NO: 834708 - RNA, 19 nt, Artificial Sequence
  Description of Artificial Sequence: Synthetic oligonucleotide
  Sense strand starting at position 3069 of SEQ ID NO: 588001
gagacauuauagugucuua

SEQ ID NO: 834709 - RNA, 19 nt, Artificial Sequence
  Description of Artificial Sequence: Synthetic oligonucleotide
  Antisense strand to SEQ ID NO: 834708
uaagacacuauaaugucuc

SEQ ID NO: 834710 - RNA, 19 nt, Artificial Sequence
  Description of Artificial Sequence: Synthetic oligonucleotide
  Sense strand starting at position 3072 of SEQ ID NO: 588001
acauuauagugucuuagac

SEQ ID NO: 834711 - RNA, 19 nt, Artificial Sequence
  Description of Artificial Sequence: Synthetic oligonucleotide
  Antisense strand to SEQ ID NO: 834710
gucuaagacacuauaaugu

SEQ ID NO: 834712 - RNA, 19 nt, Artificial Sequence
  Description of Artificial Sequence: Synthetic oligonucleotide
  Sense strand starting at position 3074 of SEQ ID NO: 588001
auuauagugucuuagacaa

SEQ ID NO: 834713 - RNA, 19 nt, Artificial Sequence
  Description of Artificial Sequence: Synthetic oligonucleotide
  Antisense strand to SEQ ID NO: 834712
uugucuaagacacuauaau

SEQ ID NO: 834714 - RNA, 19 nt, Artificial Sequence
  Description of Artificial Sequence: Synthetic oligonucleotide
  Sense strand starting at position 3155 of SEQ ID NO: 588001
cuaaauaccuguugaaaug

SEQ ID NO: 834715 - RNA, 19 nt, Artificial Sequence
  Description of Artificial Sequence: Synthetic oligonucleotide
  Antisense strand to SEQ ID NO: 834714
cauuucaacagguauuuag

SEQ ID NO: 834716 - RNA, 19 nt, Artificial Sequence
  Description of Artificial Sequence: Synthetic oligonucleotide
  Sense strand starting at position 3165 of SEQ ID NO: 588001
guugaaaugcuuugauauu

SEQ ID NO: 834717 - RNA, 19 nt, Artificial Sequence
  Description of Artificial Sequence: Synthetic oligonucleotide
  Antisense strand to SEQ ID NO: 834716
aauaucaaagcauuucaac

SEQ ID NO: 834718 - RNA, 19 nt, Artificial Sequence
  Description of Artificial Sequence: Synthetic oligonucleotide
  Sense strand starting at position 3374 of SEQ ID NO: 588001
ccauaauaagacugaggca

SEQ ID NO: 834719 - RNA, 19 nt, Artificial Sequence
  Description of Artificial Sequence: Synthetic oligonucleotide
  Antisense strand to SEQ ID NO: 834718
ugccucagucuuauuaugg

SEQ ID NO: 834720 - RNA, 19 nt, Artificial Sequence
  Description of Artificial Sequence: Synthetic oligonucleotide
  Sense strand starting at position 3431 of SEQ ID NO: 588001
ucacacugacuucguagaa

SEQ ID NO: 834721 - RNA, 19 nt, Artificial Sequence
  Description of Artificial Sequence: Synthetic oligonucleotide
  Antisense strand to SEQ ID NO: 834720
uucuacgaagucaguguga

SEQ ID NO: 834722 - RNA, 19 nt, Artificial Sequence
  Description of Artificial Sequence: Synthetic oligonucleotide
  Sense strand starting at position 3435 of SEQ ID NO: 588001
acugacuucguagaacuaa

SEQ ID NO: 834723 - RNA, 19 nt, Artificial Sequence
  Description of Artificial Sequence: Synthetic oligonucleotide
  Antisense strand to SEQ ID NO: 834722
uuaguucuacgaagucagu

SEQ ID NO: 834724 - RNA, 19 nt, Artificial Sequence
  Description of Artificial Sequence: Synthetic oligonucleotide
  Sense strand starting at position 3628 of SEQ ID NO: 588001
gugugcacuccaugcaaau

SEQ ID NO: 834725 - RNA, 19 nt, Artificial Sequence
  Description of Artificial Sequence: Synthetic oligonucleotide
  Antisense strand to SEQ ID NO: 834724
auuugcauggagugcacac

SEQ ID NO: 834726 - RNA, 19 nt, Artificial Sequence
  Description of Artificial Sequence: Synthetic oligonucleotide
  Sense strand starting at position 3645 of SEQ ID NO: 588001
augaaauaauggccucaau

SEQ ID NO: 834727 - RNA, 19 nt, Artificial Sequence
  Description of Artificial Sequence: Synthetic oligonucleotide
  Antisense strand to SEQ ID NO: 834726
auugaggccauuauuucau

SEQ ID NO: 834728 - RNA, 19 nt, Artificial Sequence
  Description of Artificial Sequence: Synthetic oligonucleotide
  Sense strand starting at position 3679 of SEQ ID NO: 588001
gagugcaacuuuguaacuu

SEQ ID NO: 834729 - RNA, 19 nt, Artificial Sequence
  Description of Artificial Sequence: Synthetic oligonucleotide
  Antisense strand to SEQ ID NO: 834728
aaguuacaaaguugcacuc

SEQ ID NO: 834730 - RNA, 19 nt, Artificial Sequence
  Description of Artificial Sequence: Synthetic oligonucleotide
  Sense strand starting at position 3762 of SEQ ID NO: 588001
agaaaccucuaguggguau

SEQ ID NO: 834731 - RNA, 19 nt, Artificial Sequence
  Description of Artificial Sequence: Synthetic oligonucleotide
  Antisense strand to SEQ ID NO: 834730
auacccacuagagguuucu

SEQ ID NO: 834732 - RNA, 19 nt, Artificial Sequence
  Description of Artificial Sequence: Synthetic oligonucleotide
  Sense strand starting at position 3888 of SEQ ID NO: 588001
auucuuuccuugguuugua

SEQ ID NO: 834733 - RNA, 19 nt, Artificial Sequence
  Description of Artificial Sequence: Synthetic oligonucleotide
  Antisense strand to SEQ ID NO: 834732
uacaaaccaaggaaagaau

SEQ ID NO: 834734 - RNA, 19 nt, Artificial Sequence
  Description of Artificial Sequence: Synthetic oligonucleotide
  Sense strand starting at position 3975 of SEQ ID NO: 588001
ggcugaacgagcuaaugau

SEQ ID NO: 834735 - RNA, 19 nt, Artificial Sequence
  Description of Artificial Sequence: Synthetic oligonucleotide
  Antisense strand to SEQ ID NO: 834734
aucauuagcucguucagcc

SEQ ID NO: 834736 - RNA, 19 nt, Artificial Sequence
  Description of Artificial Sequence: Synthetic oligonucleotide
  Sense strand starting at position 54 of SEQ ID NO: 588002
uugcucuacguagaugaua

SEQ ID NO: 834737 - RNA, 19 nt, Artificial Sequence
  Description of Artificial Sequence: Synthetic oligonucleotide
  Antisense strand to SEQ ID NO: 834736
uaucaucuacguagagcaa

SEQ ID NO: 834738 - RNA, 19 nt, Artificial Sequence
  Description of Artificial Sequence: Synthetic oligonucleotide
  Sense strand starting at position 57 of SEQ ID NO: 588002
cucuacguagaugauaaau

SEQ ID NO: 834739 - RNA, 19 nt, Artificial Sequence
  Description of Artificial Sequence: Synthetic oligonucleotide
  Antisense strand to SEQ ID NO: 834738
auuuaucaucuacguagag

SEQ ID NO: 834740 - RNA, 19 nt, Artificial Sequence
  Description of Artificial Sequence: Synthetic oligonucleotide
  Sense strand starting at position 130 of SEQ ID NO: 588002
agaaauccuucggcaaaua

SEQ ID NO: 834741 - RNA, 19 nt, Artificial Sequence
  Description of Artificial Sequence: Synthetic oligonucleotide
  Antisense strand to SEQ ID NO: 834740
uauuugccgaaggauuucu

SEQ ID NO: 834742 - RNA, 19 nt, Artificial Sequence
  Description of Artificial Sequence: Synthetic oligonucleotide
  Sense strand starting at position 222 of SEQ ID NO: 588002
auacuauuccagugguuga

SEQ ID NO: 834743 - RNA, 19 nt, Artificial Sequence
  Description of Artificial Sequence: Synthetic oligonucleotide
  Antisense strand to SEQ ID NO: 834742
ucaaccacuggaauaguau

SEQ ID NO: 834744 - RNA, 19 nt, Artificial Sequence
  Description of Artificial Sequence: Synthetic oligonucleotide
  Sense strand starting at position 225 of SEQ ID NO: 588002
cuauuccagugguugaaau

SEQ ID NO: 834745 - RNA, 19 nt, Artificial Sequence
  Description of Artificial Sequence: Synthetic oligonucleotide
  Antisense strand to SEQ ID NO: 834744
auuucaaccacuggaauag

SEQ ID NO: 834746 - RNA, 19 nt, Artificial Sequence
  Description of Artificial Sequence: Synthetic oligonucleotide
  Sense strand starting at position 226 of SEQ ID NO: 588002
uauuccagugguugaaauc

SEQ ID NO: 834747 - RNA, 19 nt, Artificial Sequence
  Description of Artificial Sequence: Synthetic oligonucleotide
  Antisense strand to SEQ ID NO: 834746
gauuucaaccacuggaaua

SEQ ID NO: 834748 - RNA, 19 nt, Artificial Sequence
  Description of Artificial Sequence: Synthetic oligonucleotide
  Sense strand starting at position 252 of SEQ ID NO: 588002
gacucaguucucuggagua

SEQ ID NO: 834749 - RNA, 19 nt, Artificial Sequence
  Description of Artificial Sequence: Synthetic oligonucleotide
  Antisense strand to SEQ ID NO: 834748
uacuccagagaacugaguc

SEQ ID NO: 834750 - RNA, 19 nt, Artificial Sequence
  Description of Artificial Sequence: Synthetic oligonucleotide
  Sense strand starting at position 254 of SEQ ID NO: 588002
cucaguucucuggaguaag

SEQ ID NO: 834751 - RNA, 19 nt, Artificial Sequence
  Description of Artificial Sequence: Synthetic oligonucleotide
  Antisense strand to SEQ ID NO: 834750
cuuacuccagagaacugag

SEQ ID NO: 834752 - RNA, 19 nt, Artificial Sequence
  Description of Artificial Sequence: Synthetic oligonucleotide
  Sense strand starting at position 257 of SEQ ID NO: 588002
aguucucuggaguaagcca

SEQ ID NO: 834753 - RNA, 19 nt, Artificial Sequence
  Description of Artificial Sequence: Synthetic oligonucleotide
  Antisense strand to SEQ ID NO: 834752
uggcuuacuccagagaacu

SEQ ID NO: 834754 - RNA, 19 nt, Artificial Sequence
  Description of Artificial Sequence: Synthetic oligonucleotide
  Sense strand starting at position 450 of SEQ ID NO: 588002
agagcaauuugucaauuuc

SEQ ID NO: 834755 - RNA, 19 nt, Artificial Sequence
  Description of Artificial Sequence: Synthetic oligonucleotide
  Antisense strand to SEQ ID NO: 834754
gaaauugacaaauugcucu

SEQ ID NO: 834756 - RNA, 19 nt, Artificial Sequence
  Description of Artificial Sequence: Synthetic oligonucleotide
  Sense strand starting at position 502 of SEQ ID NO: 588002
cugcuaggacuuugacaua

SEQ ID NO: 834757 - RNA, 19 nt, Artificial Sequence
  Description of Artificial Sequence: Synthetic oligonucleotide
  Antisense strand to SEQ ID NO: 834756
uaugucaaaguccuagcag

SEQ ID NO: 834758 - RNA, 19 nt, Artificial Sequence
  Description of Artificial Sequence: Synthetic oligonucleotide
  Sense strand starting at position 579 of SEQ ID NO: 588002
acagacauacucugucaca

SEQ ID NO: 834759 - RNA, 19 nt, Artificial Sequence
  Description of Artificial Sequence: Synthetic oligonucleotide
  Antisense strand to SEQ ID NO: 834758
ugugacagaguaugucugu

SEQ ID NO: 834760 - RNA, 19 nt, Artificial Sequence
  Description of Artificial Sequence: Synthetic oligonucleotide
  Sense strand starting at position 647 of SEQ ID NO: 588002
gugcaacacugguuaaaua

SEQ ID NO: 834761 - RNA, 19 nt, Artificial Sequence
  Description of Artificial Sequence: Synthetic oligonucleotide
  Antisense strand to SEQ ID NO: 834760
uauuuaaccaguguugcac

SEQ ID NO: 834762 - RNA, 19 nt, Artificial Sequence
  Description of Artificial Sequence: Synthetic oligonucleotide
  Sense strand starting at position 648 of SEQ ID NO: 588002
ugcaacacugguuaaauaa

SEQ ID NO: 834763 - RNA, 19 nt, Artificial Sequence
  Description of Artificial Sequence: Synthetic oligonucleotide
  Antisense strand to SEQ ID NO: 834762
uuauuuaaccaguguugca

SEQ ID NO: 834764 - RNA, 19 nt, Artificial Sequence
  Description of Artificial Sequence: Synthetic oligonucleotide
  Sense strand starting at position 769 of SEQ ID NO: 588002
guaaaucagaguggaaauc

SEQ ID NO: 834765 - RNA, 19 nt, Artificial Sequence
  Description of Artificial Sequence: Synthetic oligonucleotide
  Antisense strand to SEQ ID NO: 834764
gauuuccacucugauuuac

SEQ ID NO: 834766 - RNA, 19 nt, Artificial Sequence
  Description of Artificial Sequence: Synthetic oligonucleotide
  Sense strand starting at position 778 of SEQ ID NO: 588002
aguggaaaucugugaguuc

SEQ ID NO: 834767 - RNA, 19 nt, Artificial Sequence
  Description of Artificial Sequence: Synthetic oligonucleotide
  Antisense strand to SEQ ID NO: 834766
gaacucacagauuuccacu

SEQ ID NO: 834768 - RNA, 19 nt, Artificial Sequence
  Description of Artificial Sequence: Synthetic oligonucleotide
  Sense strand starting at position 781 of SEQ ID NO: 588002
ggaaaucugugaguucuua

SEQ ID NO: 834769 - RNA, 19 nt, Artificial Sequence
  Description of Artificial Sequence: Synthetic oligonucleotide
  Antisense strand to SEQ ID NO: 834768
uaagaacucacagauuucc

SEQ ID NO: 834770 - RNA, 19 nt, Artificial Sequence
  Description of Artificial Sequence: Synthetic oligonucleotide
  Sense strand starting at position 1077 of SEQ ID NO: 588002
ccgauaacugcauaaguaa

SEQ ID NO: 834771 - RNA, 19 nt, Artificial Sequence
  Description of Artificial Sequence: Synthetic oligonucleotide
  Antisense strand to SEQ ID NO: 834770
uuacuuaugcaguuaucgg

SEQ ID NO: 834772 - RNA, 19 nt, Artificial Sequence
  Description of Artificial Sequence: Synthetic oligonucleotide
  Sense strand starting at position 1237 of SEQ ID NO: 588002
gcucuaagugcagacaauu

SEQ ID NO: 834773 - RNA, 19 nt, Artificial Sequence
  Description of Artificial Sequence: Synthetic oligonucleotide
  Antisense strand to SEQ ID NO: 834772
aauugucugcacuuagagc

SEQ ID NO: 834774 - RNA, 19 nt, Artificial Sequence
  Description of Artificial Sequence: Synthetic oligonucleotide
  Sense strand starting at position 1309 of SEQ ID NO: 588002
uuaaauaguuauccaacga

SEQ ID NO: 834775 - RNA, 19 nt, Artificial Sequence
  Description of Artificial Sequence: Synthetic oligonucleotide
  Antisense strand to SEQ ID NO: 834774
ucguuggauaacuauuuaa

SEQ ID NO: 834776 - RNA, 19 nt, Artificial Sequence
  Description of Artificial Sequence: Synthetic oligonucleotide
  Sense strand starting at position 1313 of SEQ ID NO: 588002
auaguuauccaacgacuac

SEQ ID NO: 834777 - RNA, 19 nt, Artificial Sequence
  Description of Artificial Sequence: Synthetic oligonucleotide
  Antisense strand to SEQ ID NO: 834776
guagucguuggauaacuau

SEQ ID NO: 834778 - RNA, 19 nt, Artificial Sequence
  Description of Artificial Sequence: Synthetic oligonucleotide
  Sense strand starting at position 1336 of SEQ ID NO: 588002
uacagucauucggcuauuu

SEQ ID NO: 834779 - RNA, 19 nt, Artificial Sequence
  Description of Artificial Sequence: Synthetic oligonucleotide
  Antisense strand to SEQ ID NO: 834778
aaauagccgaaugacugua

SEQ ID NO: 834780 - RNA, 19 nt, Artificial Sequence
  Description of Artificial Sequence: Synthetic oligonucleotide
  Sense strand starting at position 1345 of SEQ ID NO: 588002
ucggcuauuugguucuaaa

SEQ ID NO: 834781 - RNA, 19 nt, Artificial Sequence
  Description of Artificial Sequence: Synthetic oligonucleotide
  Antisense strand to SEQ ID NO: 834780
uuuagaaccaaauagccga

SEQ ID NO: 834782 - RNA, 19 nt, Artificial Sequence
  Description of Artificial Sequence: Synthetic oligonucleotide
  Sense strand starting at position 1433 of SEQ ID NO: 588002
gaucuugugccagaugaua

SEQ ID NO: 834783 - RNA, 19 nt, Artificial Sequence
  Description of Artificial Sequence: Synthetic oligonucleotide
  Antisense strand to SEQ ID NO: 834782
uaucaucuggcacaagauc

SEQ ID NO: 834784 - RNA, 19 nt, Artificial Sequence
  Description of Artificial Sequence: Synthetic oligonucleotide
  Sense strand starting at position 1502 of SEQ ID NO: 588002
caagaauucgguuggacaa

SEQ ID NO: 834785 - RNA, 19 nt, Artificial Sequence
  Description of Artificial Sequence: Synthetic oligonucleotide
  Antisense strand to SEQ ID NO: 834784
uuguccaaccgaauucuug

SEQ ID NO: 834786 - RNA, 19 nt, Artificial Sequence
  Description of Artificial Sequence: Synthetic oligonucleotide
  Sense strand starting at position 1503 of SEQ ID NO: 588002
aagaauucgguuggacaaa

SEQ ID NO: 834787 - RNA, 19 nt, Artificial Sequence
  Description of Artificial Sequence: Synthetic oligonucleotide
  Antisense strand to SEQ ID NO: 834786
uuuguccaaccgaauucuu

SEQ ID NO: 834788 - RNA, 19 nt, Artificial Sequence
  Description of Artificial Sequence: Synthetic oligonucleotide
  Sense strand starting at position 1716 of SEQ ID NO: 588002
uuaagcgauuccuugaaau

SEQ ID NO: 834789 - RNA, 19 nt, Artificial Sequence
  Description of Artificial Sequence: Synthetic oligonucleotide
  Antisense strand to SEQ ID NO: 834788
auuucaaggaaucgcuuaa

SEQ ID NO: 834790 - RNA, 19 nt, Artificial Sequence
  Description of Artificial Sequence: Synthetic oligonucleotide
  Sense strand starting at position 2070 of SEQ ID NO: 588002
cgcggagcuccuucgcaaa

SEQ ID NO: 834791 - RNA, 19 nt, Artificial Sequence
  Description of Artificial Sequence: Synthetic oligonucleotide
  Antisense strand to SEQ ID NO: 834790
uuugcgaaggagcuccgcg

SEQ ID NO: 834792 - RNA, 19 nt, Artificial Sequence
  Description of Artificial Sequence: Synthetic oligonucleotide
  Sense strand starting at position 2504 of SEQ ID NO: 588002
auuccaaacguuugggaca

SEQ ID NO: 834793 - RNA, 19 nt, Artificial Sequence
  Description of Artificial Sequence: Synthetic oligonucleotide
  Antisense strand to SEQ ID NO: 834792
ugucccaaacguuuggaau

SEQ ID NO: 834794 - RNA, 19 nt, Artificial Sequence
  Description of Artificial Sequence: Synthetic oligonucleotide
  Sense strand starting at position 2554 of SEQ ID NO: 588002
uagauuaagucccugugaa

SEQ ID NO: 834795 - RNA, 19 nt, Artificial Sequence
  Description of Artificial Sequence: Synthetic oligonucleotide
  Antisense strand to SEQ ID NO: 834794
uucacagggacuuaaucua

SEQ ID NO: 834796 - RNA, 19 nt, Artificial Sequence
  Description of Artificial Sequence: Synthetic oligonucleotide
  Sense strand starting at position 2555 of SEQ ID NO: 588002
agauuaagucccugugaau

SEQ ID NO: 834797 - RNA, 19 nt, Artificial Sequence
  Description of Artificial Sequence: Synthetic oligonucleotide
  Antisense strand to SEQ ID NO: 834796
auucacagggacuuaaucu

SEQ ID NO: 834798 - RNA, 19 nt, Artificial Sequence
  Description of Artificial Sequence: Synthetic oligonucleotide
  Sense strand starting at position 2650 of SEQ ID NO: 588002
ugagguuaaacguaagcca

SEQ ID NO: 834799 - RNA, 19 nt, Artificial Sequence
  Description of Artificial Sequence: Synthetic oligonucleotide
  Antisense strand to SEQ ID NO: 834798
uggcuuacguuuaaccuca

SEQ ID NO: 834800 - RNA, 19 nt, Artificial Sequence
  Description of Artificial Sequence: Synthetic oligonucleotide
  Sense strand starting at position 2798 of SEQ ID NO: 588002
aagggaacugucugguaca

SEQ ID NO: 834801 - RNA, 19 nt, Artificial Sequence
  Description of Artificial Sequence: Synthetic oligonucleotide
  Antisense strand to SEQ ID NO: 834800
uguaccagacaguucccuu

SEQ ID NO: 834802 - RNA, 19 nt, Artificial Sequence
  Description of Artificial Sequence: Synthetic oligonucleotide
  Sense strand starting at position 2841 of SEQ ID NO: 588002
ucagguuuacaaggcuaga

SEQ ID NO: 834803 - RNA, 19 nt, Artificial Sequence
  Description of Artificial Sequence: Synthetic oligonucleotide
  Antisense strand to SEQ ID NO: 834802
ucuagccuuguaaaccuga

SEQ ID NO: 834804 - RNA, 19 nt, Artificial Sequence
  Description of Artificial Sequence: Synthetic oligonucleotide
  Sense strand starting at position 2871 of SEQ ID NO: 588002
cuuucuaaggcugauuaua

SEQ ID NO: 834805 - RNA, 19 nt, Artificial Sequence
  Description of Artificial Sequence: Synthetic oligonucleotide
  Antisense strand to SEQ ID NO: 834804
uauaaucagccuuagaaag

SEQ ID NO: 834806 - RNA, 19 nt, Artificial Sequence
  Description of Artificial Sequence: Synthetic oligonucleotide
  Sense strand starting at position 3241 of SEQ ID NO: 588002
uauggcuugcuggaggaua

SEQ ID NO: 834807 - RNA, 19 nt, Artificial Sequence
  Description of Artificial Sequence: Synthetic oligonucleotide
  Antisense strand to SEQ ID NO: 834806
uauccuccagcaagccaua

SEQ ID NO: 834808 - RNA, 19 nt, Artificial Sequence
  Description of Artificial Sequence: Synthetic oligonucleotide
  Sense strand starting at position 3598 of SEQ ID NO: 588002
uaaagaggauguucgaagu

SEQ ID NO: 834809 - RNA, 19 nt, Artificial Sequence
  Description of Artificial Sequence: Synthetic oligonucleotide
  Antisense strand to SEQ ID NO: 834808
acuucgaacauccucuuua

SEQ ID NO: 834810 - RNA, 19 nt, Artificial Sequence
  Description of Artificial Sequence: Synthetic oligonucleotide
  Sense strand starting at position 3601 of SEQ ID NO: 588002
agaggauguucgaagugau

SEQ ID NO: 834811 - RNA, 19 nt, Artificial Sequence
  Description of Artificial Sequence: Synthetic oligonucleotide
  Antisense strand to SEQ ID NO: 834810
aucacuucgaacauccucu

SEQ ID NO: 834812 - RNA, 19 nt, Artificial Sequence
  Description of Artificial Sequence: Synthetic oligonucleotide
  Sense strand starting at position 3605 of SEQ ID NO: 588002
gauguucgaagugaucauu

SEQ ID NO: 834813 - RNA, 19 nt, Artificial Sequence
  Description of Artificial Sequence: Synthetic oligonucleotide
  Antisense strand to SEQ ID NO: 834812
aaugaucacuucgaacauc

SEQ ID NO: 834814 - RNA, 19 nt, Artificial Sequence
  Description of Artificial Sequence: Synthetic oligonucleotide
  Sense strand starting at position 3877 of SEQ ID NO: 588002
uuuaauuugucuucucugu

SEQ ID NO: 834815 - RNA, 19 nt, Artificial Sequence
  Description of Artificial Sequence: Synthetic oligonucleotide
  Antisense strand to SEQ ID NO: 834814
acagagaagacaaauuaaa

SEQ ID NO: 834816 - RNA, 19 nt, Artificial Sequence
  Description of Artificial Sequence: Synthetic oligonucleotide
  Sense strand starting at position 117 of SEQ ID NO: 588003
uuacuagcccuguauauug

SEQ ID NO: 834817 - RNA, 19 nt, Artificial Sequence
  Description of Artificial Sequence: Synthetic oligonucleotide
  Antisense strand to SEQ ID NO: 834816
caauauacagggcuaguaa

SEQ ID NO: 834818 - RNA, 19 nt, Artificial Sequence
  Description of Artificial Sequence: Synthetic oligonucleotide
  Sense strand starting at position 211 of SEQ ID NO: 588003
cuaagaauauguuugacuu

SEQ ID NO: 834819 - RNA, 19 nt, Artificial Sequence
  Description of Artificial Sequence: Synthetic oligonucleotide
  Antisense strand to SEQ ID NO: 834818
aagucaaacauauucuuag

SEQ ID NO: 834820 - RNA, 19 nt, Artificial Sequence
  Description of Artificial Sequence: Synthetic oligonucleotide
  Sense strand starting at position 219 of SEQ ID NO: 588003
auguuugacuuguuaagau

SEQ ID NO: 834821 - RNA, 19 nt, Artificial Sequence
  Description of Artificial Sequence: Synthetic oligonucleotide
  Antisense strand to SEQ ID NO: 834820
aucuuaacaagucaaacau

SEQ ID NO: 834822 - RNA, 19 nt, Artificial Sequence
  Description of Artificial Sequence: Synthetic oligonucleotide
  Sense strand starting at position 226 of SEQ ID NO: 588003
acuuguuaagauuaagcau

SEQ ID NO: 834823 - RNA, 19 nt, Artificial Sequence
  Description of Artificial Sequence: Synthetic oligonucleotide
  Antisense strand to SEQ ID NO: 834822
augcuuaaucuuaacaagu

SEQ ID NO: 834824 - RNA, 19 nt, Artificial Sequence
  Description of Artificial Sequence: Synthetic oligonucleotide
  Sense strand starting at position 229 of SEQ ID NO: 588003
uguuaagauuaagcauauc

SEQ ID NO: 834825 - RNA, 19 nt, Artificial Sequence
  Description of Artificial Sequence: Synthetic oligonucleotide
  Antisense strand to SEQ ID NO: 834824
gauaugcuuaaucuuaaca

SEQ ID NO: 834826 - RNA, 19 nt, Artificial Sequence
  Description of Artificial Sequence: Synthetic oligonucleotide
  Sense strand starting at position 312 of SEQ ID NO: 588003
cuguccugucagcaucaga

SEQ ID NO: 834827 - RNA, 19 nt, Artificial Sequence
  Description of Artificial Sequence: Synthetic oligonucleotide
  Antisense strand to SEQ ID NO: 834826
ucugaugcugacaggacag

SEQ ID NO: 834828 - RNA, 19 nt, Artificial Sequence
  Description of Artificial Sequence: Synthetic oligonucleotide
  Sense strand starting at position 448 of SEQ ID NO: 588003
acguuaacugguggaauau

SEQ ID NO: 834829 - RNA, 19 nt, Artificial Sequence
  Description of Artificial Sequence: Synthetic oligonucleotide
  Antisense strand to SEQ ID NO: 834828
auauuccaccaguuaacgu

SEQ ID NO: 834830 - RNA, 19 nt, Artificial Sequence
  Description of Artificial Sequence: Synthetic oligonucleotide
  Sense strand starting at position 449 of SEQ ID NO: 588003
cguuaacugguggaauauc

SEQ ID NO: 834831 - RNA, 19 nt, Artificial Sequence
  Description of Artificial Sequence: Synthetic oligonucleotide
  Antisense strand to SEQ ID NO: 834830
gauauuccaccaguuaacg

SEQ ID NO: 834832 - RNA, 19 nt, Artificial Sequence
  Description of Artificial Sequence: Synthetic oligonucleotide
  Sense strand starting at position 656 of SEQ ID NO: 588003
acaugaugccagcaagauc

SEQ ID NO: 834833 - RNA, 19 nt, Artificial Sequence
  Description of Artificial Sequence: Synthetic oligonucleotide
  Antisense strand to SEQ ID NO: 834832
gaucuugcuggcaucaugu

SEQ ID NO: 834834 - RNA, 19 nt, Artificial Sequence
  Description of Artificial Sequence: Synthetic oligonucleotide
  Sense strand starting at position 665 of SEQ ID NO: 588003
cagcaagauccauagguuu

SEQ ID NO: 834835 - RNA, 19 nt, Artificial Sequence
  Description of Artificial Sequence: Synthetic oligonucleotide
  Antisense strand to SEQ ID NO: 834834
aaaccuauggaucuugcug

SEQ ID NO: 834836 - RNA, 19 nt, Artificial Sequence
  Description of Artificial Sequence: Synthetic oligonucleotide
  Sense strand starting at position 706 of SEQ ID NO: 588003
ugaagaauuguuggaaggu

SEQ ID NO: 834837 - RNA, 19 nt, Artificial Sequence
  Description of Artificial Sequence: Synthetic oligonucleotide
  Antisense strand to SEQ ID NO: 834836
accuuccaacaauucuuca

SEQ ID NO: 834838 - RNA, 19 nt, Artificial Sequence
  Description of Artificial Sequence: Synthetic oligonucleotide
  Sense strand starting at position 766 of SEQ ID NO: 588003
caaccaggcccagaguuau

SEQ ID NO: 834839 - RNA, 19 nt, Artificial Sequence
  Description of Artificial Sequence: Synthetic oligonucleotide
  Antisense strand to SEQ ID NO: 834838
auaacucugggccugguug

SEQ ID NO: 834840 - RNA, 19 nt, Artificial Sequence
  Description of Artificial Sequence: Synthetic oligonucleotide
  Sense strand starting at position 919 of SEQ ID NO: 588003
aggccuaacuugucucaga

SEQ ID NO: 834841 - RNA, 19 nt, Artificial Sequence
  Description of Artificial Sequence: Synthetic oligonucleotide
  Antisense strand to SEQ ID NO: 834840
ucugagacaaguuaggccu

SEQ ID NO: 834842 - RNA, 19 nt, Artificial Sequence
  Description of Artificial Sequence: Synthetic oligonucleotide
  Sense strand starting at position 920 of SEQ ID NO: 588003
ggccuaacuugucucagau

SEQ ID NO: 834843 - RNA, 19 nt, Artificial Sequence
  Description of Artificial Sequence: Synthetic oligonucleotide
  Antisense strand to SEQ ID NO: 834842
aucugagacaaguuaggcc

SEQ ID NO: 834844 - RNA, 19 nt, Artificial Sequence
  Description of Artificial Sequence: Synthetic oligonucleotide
  Sense strand starting at position 1140 of SEQ ID NO: 588003
guccaagauucccucugaa

SEQ ID NO: 834845 - RNA, 19 nt, Artificial Sequence
  Description of Artificial Sequence: Synthetic oligonucleotide
  Antisense strand to SEQ ID NO: 834844
uucagagggaaucuuggac

SEQ ID NO: 834846 - RNA, 19 nt, Artificial Sequence
  Description of Artificial Sequence: Synthetic oligonucleotide
  Sense strand starting at position 1185 of SEQ ID NO: 588003
cuuaaauugcuuuagaguc

SEQ ID NO: 834847 - RNA, 19 nt, Artificial Sequence
  Description of Artificial Sequence: Synthetic oligonucleotide
  Antisense strand to SEQ ID NO: 834846
gacucuaaagcaauuuaag

SEQ ID NO: 834848 - RNA, 19 nt, Artificial Sequence
  Description of Artificial Sequence: Synthetic oligonucleotide
  Sense strand starting at position 1358 of SEQ ID NO: 588003
uccuauaauccuggaguua

SEQ ID NO: 834849 - RNA, 19 nt, Artificial Sequence
  Description of Artificial Sequence: Synthetic oligonucleotide
  Antisense strand to SEQ ID NO: 834848
uaacuccaggauuauagga

SEQ ID NO: 834850 - RNA, 19 nt, Artificial Sequence
  Description of Artificial Sequence: Synthetic oligonucleotide
  Sense strand starting at position 1359 of SEQ ID NO: 588003
ccuauaauccuggaguuau

SEQ ID NO: 834851 - RNA, 19 nt, Artificial Sequence
  Description of Artificial Sequence: Synthetic oligonucleotide
  Antisense strand to SEQ ID NO: 834850
auaacuccaggauuauagg

SEQ ID NO: 834852 - RNA, 19 nt, Artificial Sequence
  Description of Artificial Sequence: Synthetic oligonucleotide
  Sense strand starting at position 1411 of SEQ ID NO: 588003
aaagaugcguuucucuaga

SEQ ID NO: 834853 - RNA, 19 nt, Artificial Sequence
  Description of Artificial Sequence: Synthetic oligonucleotide
  Antisense strand to SEQ ID NO: 834852
ucuagagaaacgcaucuuu

SEQ ID NO: 834854 - RNA, 19 nt, Artificial Sequence
  Description of Artificial Sequence: Synthetic oligonucleotide
  Sense strand starting at position 1482 of SEQ ID NO: 588003
accgcugucaggcauuuaa

SEQ ID NO: 834855 - RNA, 19 nt, Artificial Sequence
  Description of Artificial Sequence: Synthetic oligonucleotide
  Antisense strand to SEQ ID NO: 834854
uuaaaugccugacagcggu

SEQ ID NO: 834856 - RNA, 19 nt, Artificial Sequence
  Description of Artificial Sequence: Synthetic oligonucleotide
  Sense strand starting at position 1734 of SEQ ID NO: 588003
aaguuugaagccugcauuu

SEQ ID NO: 834857 - RNA, 19 nt, Artificial Sequence
  Description of Artificial Sequence: Synthetic oligonucleotide
  Antisense strand to SEQ ID NO: 834856
aaaugcaggcuucaaacuu

SEQ ID NO: 834858 - RNA, 19 nt, Artificial Sequence
  Description of Artificial Sequence: Synthetic oligonucleotide
  Sense strand starting at position 2535 of SEQ ID NO: 588003
guugauuaaucgucaagaa

SEQ ID NO: 834859 - RNA, 19 nt, Artificial Sequence
  Description of Artificial Sequence: Synthetic oligonucleotide
  Antisense strand to SEQ ID NO: 834858
uucuugacgauuaaucaac

SEQ ID NO: 834860 - RNA, 19 nt, Artificial Sequence
  Description of Artificial Sequence: Synthetic oligonucleotide
  Sense strand starting at position 2536 of SEQ ID NO: 588003
uugauuaaucgucaagaac

SEQ ID NO: 834861 - RNA, 19 nt, Artificial Sequence
  Description of Artificial Sequence: Synthetic oligonucleotide
  Antisense strand to SEQ ID NO: 834860
guucuugacgauuaaucaa

SEQ ID NO: 834862 - RNA, 19 nt, Artificial Sequence
  Description of Artificial Sequence: Synthetic oligonucleotide
  Sense strand starting at position 2620 of SEQ ID NO: 588003
agaguugaucuuggauuau

SEQ ID NO: 834863 - RNA, 19 nt, Artificial Sequence
  Description of Artificial Sequence: Synthetic oligonucleotide
  Antisense strand to SEQ ID NO: 834862
auaauccaagaucaacucu

SEQ ID NO: 834864 - RNA, 19 nt, Artificial Sequence
  Description of Artificial Sequence: Synthetic oligonucleotide
  Sense strand starting at position 2953 of SEQ ID NO: 588003
ccgcgcauuacgucaguuu

SEQ ID NO: 834865 - RNA, 19 nt, Artificial Sequence
  Description of Artificial Sequence: Synthetic oligonucleotide
  Antisense strand to SEQ ID NO: 834864
aaacugacguaaugcgcgg

SEQ ID NO: 834866 - RNA, 19 nt, Artificial Sequence
  Description of Artificial Sequence: Synthetic oligonucleotide
  Sense strand starting at position 2999 of SEQ ID NO: 588003
ggagccuucgcggaggaaa

SEQ ID NO: 834867 - RNA, 19 nt, Artificial Sequence
  Description of Artificial Sequence: Synthetic oligonucleotide
  Antisense strand to SEQ ID NO: 834866
uuuccuccgcgaaggcucc

SEQ ID NO: 834868 - RNA, 19 nt, Artificial Sequence
  Description of Artificial Sequence: Synthetic oligonucleotide
  Sense strand starting at position 3291 of SEQ ID NO: 588003
uccgaacgcguuaggaaua

SEQ ID NO: 834869 - RNA, 19 nt, Artificial Sequence
  Description of Artificial Sequence: Synthetic oligonucleotide
  Antisense strand to SEQ ID NO: 834868
uauuccuaacgcguucgga

SEQ ID NO: 834870 - RNA, 19 nt, Artificial Sequence
  Description of Artificial Sequence: Synthetic oligonucleotide
  Sense strand starting at position 3302 of SEQ ID NO: 588003
uaggaauaaugugauaaag

SEQ ID NO: 834871 - RNA, 19 nt, Artificial Sequence
  Description of Artificial Sequence: Synthetic oligonucleotide
  Antisense strand to SEQ ID NO: 834870
cuuuaucacauuauuccua

SEQ ID NO: 834872 - RNA, 19 nt, Artificial Sequence
  Description of Artificial Sequence: Synthetic oligonucleotide
  Sense strand starting at position 3304 of SEQ ID NO: 588003
ggaauaaugugauaaagac

SEQ ID NO: 834873 - RNA, 19 nt, Artificial Sequence
  Description of Artificial Sequence: Synthetic oligonucleotide
  Antisense strand to SEQ ID NO: 834872
gucuuuaucacauuauucc

SEQ ID NO: 834874 - RNA, 19 nt, Artificial Sequence
  Description of Artificial Sequence: Synthetic oligonucleotide
  Sense strand starting at position 3556 of SEQ ID NO: 588003
ccuaguuggugaucaggau

SEQ ID NO: 834875 - RNA, 19 nt, Artificial Sequence
  Description of Artificial Sequence: Synthetic oligonucleotide
  Antisense strand to SEQ ID NO: 834874
auccugaucaccaacuagg

SEQ ID NO: 834876 - RNA, 19 nt, Artificial Sequence
  Description of Artificial Sequence: Synthetic oligonucleotide
  Sense strand starting at position 3557 of SEQ ID NO: 588003
cuaguuggugaucaggauu

SEQ ID NO: 834877 - RNA, 19 nt, Artificial Sequence
  Description of Artificial Sequence: Synthetic oligonucleotide
  Antisense strand to SEQ ID NO: 834876
aauccugaucaccaacuag

SEQ ID NO: 834878 - RNA, 19 nt, Artificial Sequence
  Description of Artificial Sequence: Synthetic oligonucleotide
  Sense strand starting at position 3615 of SEQ ID NO: 588003
cuugaacucuauccugagu

SEQ ID NO: 834879 - RNA, 19 nt, Artificial Sequence
  Description of Artificial Sequence: Synthetic oligonucleotide
  Antisense strand to SEQ ID NO: 834878
acucaggauagaguucaag

SEQ ID NO: 834880 - RNA, 19 nt, Artificial Sequence
  Description of Artificial Sequence: Synthetic oligonucleotide
  Sense strand starting at position 3620 of SEQ ID NO: 588003
acucuauccugaguuggag

SEQ ID NO: 834881 - RNA, 19 nt, Artificial Sequence
  Description of Artificial Sequence: Synthetic oligonucleotide
  Antisense strand to SEQ ID NO: 834880
cuccaacucaggauagagu

SEQ ID NO: 834882 - RNA, 19 nt, Artificial Sequence
  Description of Artificial Sequence: Synthetic oligonucleotide
  Sense strand starting at position 3622 of SEQ ID NO: 588003
ucuauccugaguuggagaa

SEQ ID NO: 834883 - RNA, 19 nt, Artificial Sequence
  Description of Artificial Sequence: Synthetic oligonucleotide
  Antisense strand to SEQ ID NO: 834882
uucuccaacucaggauaga

SEQ ID NO: 834884 - RNA, 19 nt, Artificial Sequence
  Description of Artificial Sequence: Synthetic oligonucleotide
  Sense strand starting at position 3687 of SEQ ID NO: 588003
aaacucaaugggugcuuua

SEQ ID NO: 834885 - RNA, 19 nt, Artificial Sequence
  Description of Artificial Sequence: Synthetic oligonucleotide
  Antisense strand to SEQ ID NO: 834884
uaaagcacccauugaguuu

SEQ ID NO: 834886 - RNA, 19 nt, Artificial Sequence
  Description of Artificial Sequence: Synthetic oligonucleotide
  Sense strand starting at position 3797 of SEQ ID NO: 588003
cucugaauuaagcgugaca

SEQ ID NO: 834887 - RNA, 19 nt, Artificial Sequence
  Description of Artificial Sequence: Synthetic oligonucleotide
  Antisense strand to SEQ ID NO: 834886
ugucacgcuuaauucagag

SEQ ID NO: 834888 - RNA, 19 nt, Artificial Sequence
  Description of Artificial Sequence: Synthetic oligonucleotide
  Sense strand starting at position 3799 of SEQ ID NO: 588003
cugaauuaagcgugacauu

SEQ ID NO: 834889 - RNA, 19 nt, Artificial Sequence
  Description of Artificial Sequence: Synthetic oligonucleotide
  Antisense strand to SEQ ID NO: 834888
aaugucacgcuuaauucag

SEQ ID NO: 834890 - RNA, 19 nt, Artificial Sequence
  Description of Artificial Sequence: Synthetic oligonucleotide
  Sense strand starting at position 3800 of SEQ ID NO: 588003
ugaauuaagcgugacauuc

SEQ ID NO: 834891 - RNA, 19 nt, Artificial Sequence
  Description of Artificial Sequence: Synthetic oligonucleotide
  Antisense strand to SEQ ID NO: 834890
gaaugucacgcuuaauuca

SEQ ID NO: 834892 - RNA, 19 nt, Artificial Sequence
  Description of Artificial Sequence: Synthetic oligonucleotide
  Sense strand starting at position 3959 of SEQ ID NO: 588003
caaaguauaguagguguua

SEQ ID NO: 834893 - RNA, 19 nt, Artificial Sequence
  Description of Artificial Sequence: Synthetic oligonucleotide
  Antisense strand to SEQ ID NO: 834892
uaacaccuacuauacuuug

SEQ ID NO: 834894 - RNA, 19 nt, Artificial Sequence
  Description of Artificial Sequence: Synthetic oligonucleotide
  Sense strand starting at position 3960 of SEQ ID NO: 588003
aaaguauaguagguguuaa

SEQ ID NO: 834895 - RNA, 19 nt, Artificial Sequence
  Description of Artificial Sequence: Synthetic oligonucleotide
  Antisense strand to SEQ ID NO: 834894
uuaacaccuacuauacuuu

SEQ ID NO: 834896 - RNA, 19 nt, Artificial Sequence
  Description of Artificial Sequence: Synthetic oligonucleotide
  Sense strand starting at position 124 of SEQ ID NO: 588004
guccaagauucccucugaa

SEQ ID NO: 834897 - RNA, 19 nt, Artificial Sequence
  Description of Artificial Sequence: Synthetic oligonucleotide
  Antisense strand to SEQ ID NO: 834896
uucagagggaaucuuggac

SEQ ID NO: 834898 - RNA, 19 nt, Artificial Sequence
  Description of Artificial Sequence: Synthetic oligonucleotide
  Sense strand starting at position 169 of SEQ ID NO: 588004
cuuaaauugcuuuagaguc

SEQ ID NO: 834899 - RNA, 19 nt, Artificial Sequence
  Description of Artificial Sequence: Synthetic oligonucleotide
  Antisense strand to SEQ ID NO: 834898
gacucuaaagcaauuuaag

SEQ ID NO: 834900 - RNA, 19 nt, Artificial Sequence
  Description of Artificial Sequence: Synthetic oligonucleotide
  Sense strand starting at position 342 of SEQ ID NO: 588004
uccuauaauccuggaguua

SEQ ID NO: 834901 - RNA, 19 nt, Artificial Sequence
  Description of Artificial Sequence: Synthetic oligonucleotide
  Antisense strand to SEQ ID NO: 834900
uaacuccaggauuauagga

SEQ ID NO: 834902 - RNA, 19 nt, Artificial Sequence
  Description of Artificial Sequence: Synthetic oligonucleotide
  Sense strand starting at position 343 of SEQ ID NO: 588004
ccuauaauccuggaguuau

SEQ ID NO: 834903 - RNA, 19 nt, Artificial Sequence
  Description of Artificial Sequence: Synthetic oligonucleotide
  Antisense strand to SEQ ID NO: 834902
auaacuccaggauuauagg

SEQ ID NO: 834904 - RNA, 19 nt, Artificial Sequence
  Description of Artificial Sequence: Synthetic oligonucleotide
  Sense strand starting at position 395 of SEQ ID NO: 588004
aaagaugcguuucucuaga

SEQ ID NO: 834905 - RNA, 19 nt, Artificial Sequence
  Description of Artificial Sequence: Synthetic oligonucleotide
  Antisense strand to SEQ ID NO: 834904
ucuagagaaacgcaucuuu

SEQ ID NO: 834906 - RNA, 19 nt, Artificial Sequence
  Description of Artificial Sequence: Synthetic oligonucleotide
  Sense strand starting at position 466 of SEQ ID NO: 588004
accgcugucaggcauuuaa

SEQ ID NO: 834907 - RNA, 19 nt, Artificial Sequence
  Description of Artificial Sequence: Synthetic oligonucleotide
  Antisense strand to SEQ ID NO: 834906
uuaaaugccugacagcggu

SEQ ID NO: 834908 - RNA, 19 nt, Artificial Sequence
  Description of Artificial Sequence: Synthetic oligonucleotide
  Sense strand starting at position 718 of SEQ ID NO: 588004
aaguuugaagccugcauuu

SEQ ID NO: 834909 - RNA, 19 nt, Artificial Sequence
  Description of Artificial Sequence: Synthetic oligonucleotide
  Antisense strand to SEQ ID NO: 834908
aaaugcaggcuucaaacuu

SEQ ID NO: 834910 - RNA, 19 nt, Artificial Sequence
  Description of Artificial Sequence: Synthetic oligonucleotide
  Sense strand starting at position 1519 of SEQ ID NO: 588004
guugauuaaucgucaagaa

SEQ ID NO: 834911 - RNA, 19 nt, Artificial Sequence
  Description of Artificial Sequence: Synthetic oligonucleotide
  Antisense strand to SEQ ID NO: 834910
uucuugacgauuaaucaac

SEQ ID NO: 834912 - RNA, 19 nt, Artificial Sequence
  Description of Artificial Sequence: Synthetic oligonucleotide
  Sense strand starting at position 1520 of SEQ ID NO: 588004
uugauuaaucgucaagaac

SEQ ID NO: 834913 - RNA, 19 nt, Artificial Sequence
  Description of Artificial Sequence: Synthetic oligonucleotide
  Antisense strand to SEQ ID NO: 834912
guucuugacgauuaaucaa

SEQ ID NO: 834914 - RNA, 19 nt, Artificial Sequence
  Description of Artificial Sequence: Synthetic oligonucleotide
  Sense strand starting at position 1604 of SEQ ID NO: 588004
agaguugaucuuggauuau

SEQ ID NO: 834915 - RNA, 19 nt, Artificial Sequence
  Description of Artificial Sequence: Synthetic oligonucleotide
  Antisense strand to SEQ ID NO: 834914
auaauccaagaucaacucu

SEQ ID NO: 834916 - RNA, 19 nt, Artificial Sequence
  Description of Artificial Sequence: Synthetic oligonucleotide
  Sense strand starting at position 1937 of SEQ ID NO: 588004
ccgcgcauuacgucaguuu

SEQ ID NO: 834917 - RNA, 19 nt, Artificial Sequence
  Description of Artificial Sequence: Synthetic oligonucleotide
  Antisense strand to SEQ ID NO: 834916
aaacugacguaaugcgcgg

SEQ ID NO: 834918 - RNA, 19 nt, Artificial Sequence
  Description of Artificial Sequence: Synthetic oligonucleotide
  Sense strand starting at position 1983 of SEQ ID NO: 588004
ggagccuucgcggaggaaa

SEQ ID NO: 834919 - RNA, 19 nt, Artificial Sequence
  Description of Artificial Sequence: Synthetic oligonucleotide
  Antisense strand to SEQ ID NO: 834918
uuuccuccgcgaaggcucc

SEQ ID NO: 834920 - RNA, 19 nt, Artificial Sequence
  Description of Artificial Sequence: Synthetic oligonucleotide
  Sense strand starting at position 2275 of SEQ ID NO: 588004
uccgaacgcguuaggaaua

SEQ ID NO: 834921 - RNA, 19 nt, Artificial Sequence
  Description of Artificial Sequence: Synthetic oligonucleotide
  Antisense strand to SEQ ID NO: 834920
uauuccuaacgcguucgga

SEQ ID NO: 834922 - RNA, 19 nt, Artificial Sequence
  Description of Artificial Sequence: Synthetic oligonucleotide
  Sense strand starting at position 2540 of SEQ ID NO: 588004
ccuaguuggugaucaggau

SEQ ID NO: 834923 - RNA, 19 nt, Artificial Sequence
  Description of Artificial Sequence: Synthetic oligonucleotide
  Antisense strand to SEQ ID NO: 834922
auccugaucaccaacuagg

SEQ ID NO: 834924 - RNA, 19 nt, Artificial Sequence
  Description of Artificial Sequence: Synthetic oligonucleotide
  Sense strand starting at position 2541 of SEQ ID NO: 588004
cuaguuggugaucaggauu

SEQ ID NO: 834925 - RNA, 19 nt, Artificial Sequence
  Description of Artificial Sequence: Synthetic oligonucleotide
  Antisense strand to SEQ ID NO: 834924
aauccugaucaccaacuag

SEQ ID NO: 834926 - RNA, 19 nt, Artificial Sequence
  Description of Artificial Sequence: Synthetic oligonucleotide
  Sense strand starting at position 2599 of SEQ ID NO: 588004
cuugaacucuauccugagu

SEQ ID NO: 834927 - RNA, 19 nt, Artificial Sequence
  Description of Artificial Sequence: Synthetic oligonucleotide
  Antisense strand to SEQ ID NO: 834926
acucaggauagaguucaag

SEQ ID NO: 834928 - RNA, 19 nt, Artificial Sequence
  Description of Artificial Sequence: Synthetic oligonucleotide
  Sense strand starting at position 2604 of SEQ ID NO: 588004
acucuauccugaguuggag

SEQ ID NO: 834929 - RNA, 19 nt, Artificial Sequence
  Description of Artificial Sequence: Synthetic oligonucleotide
  Antisense strand to SEQ ID NO: 834928
cuccaacucaggauagagu

SEQ ID NO: 834930 - RNA, 19 nt, Artificial Sequence
  Description of Artificial Sequence: Synthetic oligonucleotide
  Sense strand starting at position 2606 of SEQ ID NO: 588004
ucuauccugaguuggagaa

SEQ ID NO: 834931 - RNA, 19 nt, Artificial Sequence
  Description of Artificial Sequence: Synthetic oligonucleotide
  Antisense strand to SEQ ID NO: 834930
uucuccaacucaggauaga

SEQ ID NO: 834932 - RNA, 19 nt, Artificial Sequence
  Description of Artificial Sequence: Synthetic oligonucleotide
  Sense strand starting at position 2671 of SEQ ID NO: 588004
aaacucaaugggugcuuua

SEQ ID NO: 834933 - RNA, 19 nt, Artificial Sequence
  Description of Artificial Sequence: Synthetic oligonucleotide
  Antisense strand to SEQ ID NO: 834932
uaaagcacccauugaguuu

SEQ ID NO: 834934 - RNA, 19 nt, Artificial Sequence
  Description of Artificial Sequence: Synthetic oligonucleotide
  Sense strand starting at position 2784 of SEQ ID NO: 588004
ugaauuaagcgugacauuc

SEQ ID NO: 834935 - RNA, 19 nt, Artificial Sequence
  Description of Artificial Sequence: Synthetic oligonucleotide
  Antisense strand to SEQ ID NO: 834934
gaaugucacgcuuaauuca

SEQ ID NO: 834936 - RNA, 19 nt, Artificial Sequence
  Description of Artificial Sequence: Synthetic oligonucleotide
  Sense strand starting at position 2943 of SEQ ID NO: 588004
caaaguauaguagguguua

SEQ ID NO: 834937 - RNA, 19 nt, Artificial Sequence
  Description of Artificial Sequence: Synthetic oligonucleotide
  Antisense strand to SEQ ID NO: 834936
uaacaccuacuauacuuug

SEQ ID NO: 834938 - RNA, 19 nt, Artificial Sequence
  Description of Artificial Sequence: Synthetic oligonucleotide
  Sense strand starting at position 2944 of SEQ ID NO: 588004
aaaguauaguagguguuaa

SEQ ID NO: 834939 - RNA, 19 nt, Artificial Sequence
  Description of Artificial Sequence: Synthetic oligonucleotide
  Antisense strand to SEQ ID NO: 834938
uuaacaccuacuauacuuu

SEQ ID NO: 834940 - RNA, 19 nt, Artificial Sequence
  Description of Artificial Sequence: Synthetic oligonucleotide
  Sense strand starting at position 3011 of SEQ ID NO: 588004
gggugacuuuaaguggcau

SEQ ID NO: 834941 - RNA, 19 nt, Artificial Sequence
  Description of Artificial Sequence: Synthetic oligonucleotide
  Antisense strand to SEQ ID NO: 834940
augccacuuaaagucaccc

SEQ ID NO: 834942 - RNA, 19 nt, Artificial Sequence
  Description of Artificial Sequence: Synthetic oligonucleotide
  Sense strand starting at position 3038 of SEQ ID NO: 588004
ucuggugaaagucaguuua

SEQ ID NO: 834943 - RNA, 19 nt, Artificial Sequence
  Description of Artificial Sequence: Synthetic oligonucleotide
  Antisense strand to SEQ ID NO: 834942
uaaacugacuuucaccaga

SEQ ID NO: 834944 - RNA, 19 nt, Artificial Sequence
  Description of Artificial Sequence: Synthetic oligonucleotide
  Sense strand starting at position 3040 of SEQ ID NO: 588004
uggugaaagucaguuuaaa

SEQ ID NO: 834945 - RNA, 19 nt, Artificial Sequence
  Description of Artificial Sequence: Synthetic oligonucleotide
  Antisense strand to SEQ ID NO: 834944
uuuaaacugacuuucacca

SEQ ID NO: 834946 - RNA, 19 nt, Artificial Sequence
  Description of Artificial Sequence: Synthetic oligonucleotide
  Sense strand starting at position 3076 of SEQ ID NO: 588004
ggagaagcaucuuuccuuu

SEQ ID NO: 834947 - RNA, 19 nt, Artificial Sequence
  Description of Artificial Sequence: Synthetic oligonucleotide
  Antisense strand to SEQ ID NO: 834946
aaaggaaagaugcuucucc

SEQ ID NO: 834948 - RNA, 19 nt, Artificial Sequence
  Description of Artificial Sequence: Synthetic oligonucleotide
  Sense strand starting at position 3118 of SEQ ID NO: 588004
uuagaaucuuagguacaau

SEQ ID NO: 834949 - RNA, 19 nt, Artificial Sequence
  Description of Artificial Sequence: Synthetic oligonucleotide
  Antisense strand to SEQ ID NO: 834948
auuguaccuaagauucuaa

SEQ ID NO: 834950 - RNA, 19 nt, Artificial Sequence
  Description of Artificial Sequence: Synthetic oligonucleotide
  Sense strand starting at position 3140 of SEQ ID NO: 588004
gaaucugagagccgaagau

SEQ ID NO: 834951 - RNA, 19 nt, Artificial Sequence
  Description of Artificial Sequence: Synthetic oligonucleotide
  Antisense strand to SEQ ID NO: 834950
aucuucggcucucagauuc

SEQ ID NO: 834952 - RNA, 19 nt, Artificial Sequence
  Description of Artificial Sequence: Synthetic oligonucleotide
  Sense strand starting at position 3412 of SEQ ID NO: 588004
ccauacacucuuuaugagu

SEQ ID NO: 834953 - RNA, 19 nt, Artificial Sequence
  Description of Artificial Sequence: Synthetic oligonucleotide
  Antisense strand to SEQ ID NO: 834952
acucauaaagaguguaugg

SEQ ID NO: 834954 - RNA, 19 nt, Artificial Sequence
  Description of Artificial Sequence: Synthetic oligonucleotide
  Sense strand starting at position 3547 of SEQ ID NO: 588004
cucauaugccuggaguuau

SEQ ID NO: 834955 - RNA, 19 nt, Artificial Sequence
  Description of Artificial Sequence: Synthetic oligonucleotide
  Antisense strand to SEQ ID NO: 834954
auaacuccaggcauaugag

SEQ ID NO: 834956 - RNA, 19 nt, Artificial Sequence
  Description of Artificial Sequence: Synthetic oligonucleotide
  Sense strand starting at position 3597 of SEQ ID NO: 588004
agaacagaguuagauuuau

SEQ ID NO: 834957 - RNA, 19 nt, Artificial Sequence
  Description of Artificial Sequence: Synthetic oligonucleotide
  Antisense strand to SEQ ID NO: 834956
auaaaucuaacucuguucu

SEQ ID NO: 834958 - RNA, 19 nt, Artificial Sequence
  Description of Artificial Sequence: Synthetic oligonucleotide
  Sense strand starting at position 3662 of SEQ ID NO: 588004
aucucauagucagcuacua

SEQ ID NO: 834959 - RNA, 19 nt, Artificial Sequence
  Description of Artificial Sequence: Synthetic oligonucleotide
  Antisense strand to SEQ ID NO: 834958
uaguagcugacuaugagau

SEQ ID NO: 834960 - RNA, 19 nt, Artificial Sequence
  Description of Artificial Sequence: Synthetic oligonucleotide
  Sense strand starting at position 3818 of SEQ ID NO: 588004
uggaaauaugcacggcaca

SEQ ID NO: 834961 - RNA, 19 nt, Artificial Sequence
  Description of Artificial Sequence: Synthetic oligonucleotide
  Antisense strand to SEQ ID NO: 834960
ugugccgugcauauuucca

SEQ ID NO: 834962 - RNA, 19 nt, Artificial Sequence
  Description of Artificial Sequence: Synthetic oligonucleotide
  Sense strand starting at position 3879 of SEQ ID NO: 588004
ugaaacauucuugagccau

SEQ ID NO: 834963 - RNA, 19 nt, Artificial Sequence
  Description of Artificial Sequence: Synthetic oligonucleotide
  Antisense strand to SEQ ID NO: 834962
auggcucaagaauguuuca

SEQ ID NO: 834964 - RNA, 19 nt, Artificial Sequence
  Description of Artificial Sequence: Synthetic oligonucleotide
  Sense strand starting at position 3885 of SEQ ID NO: 588004
auucuugagccaugacuaa

SEQ ID NO: 834965 - RNA, 19 nt, Artificial Sequence
  Description of Artificial Sequence: Synthetic oligonucleotide
  Antisense strand to SEQ ID NO: 834964
uuagucauggcucaagaau

SEQ ID NO: 834966 - RNA, 19 nt, Artificial Sequence
  Description of Artificial Sequence: Synthetic oligonucleotide
  Sense strand starting at position 3925 of SEQ ID NO: 588004
ugaaauauguauucgaaca

SEQ ID NO: 834967 - RNA, 19 nt, Artificial Sequence
  Description of Artificial Sequence: Synthetic oligonucleotide
  Antisense strand to SEQ ID NO: 834966
uguucgaauacauauuuca

SEQ ID NO: 834968 - RNA, 19 nt, Artificial Sequence
  Description of Artificial Sequence: Synthetic oligonucleotide
  Sense strand starting at position 3930 of SEQ ID NO: 588004
uauguauucgaacaguaag

SEQ ID NO: 834969 - RNA, 19 nt, Artificial Sequence
  Description of Artificial Sequence: Synthetic oligonucleotide
  Antisense strand to SEQ ID NO: 834968
cuuacuguucgaauacaua

SEQ ID NO: 834970 - RNA, 19 nt, Artificial Sequence
  Description of Artificial Sequence: Synthetic oligonucleotide
  Sense strand starting at position 3933 of SEQ ID NO: 588004
guauucgaacaguaagacu

SEQ ID NO: 834971 - RNA, 19 nt, Artificial Sequence
  Description of Artificial Sequence: Synthetic oligonucleotide
  Antisense strand to SEQ ID NO: 834970
agucuuacuguucgaauac

SEQ ID NO: 834972 - RNA, 19 nt, Artificial Sequence
  Description of Artificial Sequence: Synthetic oligonucleotide
  Sense strand starting at position 3954 of SEQ ID NO: 588004
uuuguauugaaaggguuaa

SEQ ID NO: 834973 - RNA, 19 nt, Artificial Sequence
  Description of Artificial Sequence: Synthetic oligonucleotide
  Antisense strand to SEQ ID NO: 834972
uuaacccuuucaauacaaa

SEQ ID NO: 834974 - RNA, 19 nt, Artificial Sequence
  Description of Artificial Sequence: Synthetic oligonucleotide
  Sense strand starting at position 3955 of SEQ ID NO: 588004
uuguauugaaaggguuaau

SEQ ID NO: 834975 - RNA, 19 nt, Artificial Sequence
  Description of Artificial Sequence: Synthetic oligonucleotide
  Antisense strand to SEQ ID NO: 834974
auuaacccuuucaauacaa

SEQ ID NO: 834976 - RNA, 19 nt, Artificial Sequence
  Description of Artificial Sequence: Synthetic oligonucleotide
  Sense strand starting at position 38 of SEQ ID NO: 588005
agcagaggucuaugccaca

SEQ ID NO: 834977 - RNA, 19 nt, Artificial Sequence
  Description of Artificial Sequence: Synthetic oligonucleotide
  Antisense strand to SEQ ID NO: 834976
uguggcauagaccucugcu

SEQ ID NO: 834978 - RNA, 19 nt, Artificial Sequence
  Description of Artificial Sequence: Synthetic oligonucleotide
  Sense strand starting at position 129 of SEQ ID NO: 588005
caggcacaccagugagaaa

SEQ ID NO: 834979 - RNA, 19 nt, Artificial Sequence
  Description of Artificial Sequence: Synthetic oligonucleotide
  Antisense strand to SEQ ID NO: 834978
uuucucacuggugugccug

SEQ ID NO: 834980 - RNA, 19 nt, Artificial Sequence
  Description of Artificial Sequence: Synthetic oligonucleotide
  Sense strand starting at position 174 of SEQ ID NO: 588005
cugcacugucagggacaua

SEQ ID NO: 834981 - RNA, 19 nt, Artificial Sequence
  Description of Artificial Sequence: Synthetic oligonucleotide
  Antisense strand to SEQ ID NO: 834980
uaugucccugacagugcag

SEQ ID NO: 834982 - RNA, 19 nt, Artificial Sequence
  Description of Artificial Sequence: Synthetic oligonucleotide
  Sense strand starting at position 175 of SEQ ID NO: 588005
ugcacugucagggacauaa

SEQ ID NO: 834983 - RNA, 19 nt, Artificial Sequence
  Description of Artificial Sequence: Synthetic oligonucleotide
  Antisense strand to SEQ ID NO: 834982
uuaugucccugacagugca

SEQ ID NO: 834984 - RNA, 19 nt, Artificial Sequence
  Description of Artificial Sequence: Synthetic oligonucleotide
  Sense strand starting at position 370 of SEQ ID NO: 588005
ggaaguguccagggaaggu

SEQ ID NO: 834985 - RNA, 19 nt, Artificial Sequence
  Description of Artificial Sequence: Synthetic oligonucleotide
  Antisense strand to SEQ ID NO: 834984
accuucccuggacacuucc

SEQ ID NO: 834986 - RNA, 19 nt, Artificial Sequence
  Description of Artificial Sequence: Synthetic oligonucleotide
  Sense strand starting at position 545 of SEQ ID NO: 588005
cugugcugcuguguccaaa

SEQ ID NO: 834987 - RNA, 19 nt, Artificial Sequence
  Description of Artificial Sequence: Synthetic oligonucleotide
  Antisense strand to SEQ ID NO: 834986
uuuggacacagcagcacag

SEQ ID NO: 834988 - RNA, 19 nt, Artificial Sequence
  Description of Artificial Sequence: Synthetic oligonucleotide
  Sense strand starting at position 548 of SEQ ID NO: 588005
ugcugcuguguccaaacau

SEQ ID NO: 834989 - RNA, 19 nt, Artificial Sequence
  Description of Artificial Sequence: Synthetic oligonucleotide
  Antisense strand to SEQ ID NO: 834988
auguuuggacacagcagca

SEQ ID NO: 834990 - RNA, 19 nt, Artificial Sequence
  Description of Artificial Sequence: Synthetic oligonucleotide
  Sense strand starting at position 680 of SEQ ID NO: 588005
acucaauacuguguccaca

SEQ ID NO: 834991 - RNA, 19 nt, Artificial Sequence
  Description of Artificial Sequence: Synthetic oligonucleotide
  Antisense strand to SEQ ID NO: 834990
uguggacacaguauugagu

SEQ ID NO: 834992 - RNA, 19 nt, Artificial Sequence
  Description of Artificial Sequence: Synthetic oligonucleotide
  Sense strand starting at position 682 of SEQ ID NO: 588005
ucaauacuguguccacacu

SEQ ID NO: 834993 - RNA, 19 nt, Artificial Sequence
  Description of Artificial Sequence: Synthetic oligonucleotide
  Antisense strand to SEQ ID NO: 834992
aguguggacacaguauuga

SEQ ID NO: 834994 - RNA, 19 nt, Artificial Sequence
  Description of Artificial Sequence: Synthetic oligonucleotide
  Sense strand starting at position 699 of SEQ ID NO: 588005
cugggaguauccuaagcaa

SEQ ID NO: 834995 - RNA, 19 nt, Artificial Sequence
  Description of Artificial Sequence: Synthetic oligonucleotide
  Antisense strand to SEQ ID NO: 834994
uugcuuaggauacucccag

SEQ ID NO: 834996 - RNA, 19 nt, Artificial Sequence
  Description of Artificial Sequence: Synthetic oligonucleotide
  Sense strand starting at position 702 of SEQ ID NO: 588005
ggaguauccuaagcaacaa

SEQ ID NO: 834997 - RNA, 19 nt, Artificial Sequence
  Description of Artificial Sequence: Synthetic oligonucleotide
  Antisense strand to SEQ ID NO: 834996
uuguugcuuaggauacucc

SEQ ID NO: 834998 - RNA, 19 nt, Artificial Sequence
  Description of Artificial Sequence: Synthetic oligonucleotide
  Sense strand starting at position 763 of SEQ ID NO: 588005
caagcagaugagugacaau

SEQ ID NO: 834999 - RNA, 19 nt, Artificial Sequence
  Description of Artificial Sequence: Synthetic oligonucleotide
  Antisense strand to SEQ ID NO: 834998
auugucacucaucugcuug

SEQ ID NO: 835000 - RNA, 19 nt, Artificial Sequence
  Description of Artificial Sequence: Synthetic oligonucleotide
  Sense strand starting at position 1017 of SEQ ID NO: 588005
cagaacuuccugugauaag

SEQ ID NO: 835001 - RNA, 19 nt, Artificial Sequence
  Description of Artificial Sequence: Synthetic oligonucleotide
  Antisense strand to SEQ ID NO: 835000
cuuaucacaggaaguucug

SEQ ID NO: 835002 - RNA, 19 nt, Artificial Sequence
  Description of Artificial Sequence: Synthetic oligonucleotide
  Sense strand starting at position 1018 of SEQ ID NO: 588005
agaacuuccugugauaagc

SEQ ID NO: 835003 - RNA, 19 nt, Artificial Sequence
  Description of Artificial Sequence: Synthetic oligonucleotide
  Antisense strand to SEQ ID NO: 835002
gcuuaucacaggaaguucu

SEQ ID NO: 835004 - RNA, 19 nt, Artificial Sequence
  Description of Artificial Sequence: Synthetic oligonucleotide
  Sense strand starting at position 1086 of SEQ ID NO: 588005
gcuacugagugucggacau

SEQ ID NO: 835005 - RNA, 19 nt, Artificial Sequence
  Description of Artificial Sequence: Synthetic oligonucleotide
  Antisense strand to SEQ ID NO: 835004
auguccgacacucaguagc

SEQ ID NO: 835006 - RNA, 19 nt, Artificial Sequence
  Description of Artificial Sequence: Synthetic oligonucleotide
  Sense strand starting at position 1088 of SEQ ID NO: 588005
uacugagugucggacaugu

SEQ ID NO: 835007 - RNA, 19 nt, Artificial Sequence
  Description of Artificial Sequence: Synthetic oligonucleotide
  Antisense strand to SEQ ID NO: 835006
acauguccgacacucagua

SEQ ID NO: 835008 - RNA, 19 nt, Artificial Sequence
  Description of Artificial Sequence: Synthetic oligonucleotide
  Sense strand starting at position 1090 of SEQ ID NO: 588005
cugagugucggacauguga

SEQ ID NO: 835009 - RNA, 19 nt, Artificial Sequence
  Description of Artificial Sequence: Synthetic oligonucleotide
  Antisense strand to SEQ ID NO: 835008
ucacauguccgacacucag

SEQ ID NO: 835010 - RNA, 19 nt, Artificial Sequence
  Description of Artificial Sequence: Synthetic oligonucleotide
  Sense strand starting at position 1238 of SEQ ID NO: 588005
cgaggucccuggagaguuu

SEQ ID NO: 835011 - RNA, 19 nt, Artificial Sequence
  Description of Artificial Sequence: Synthetic oligonucleotide
  Antisense strand to SEQ ID NO: 835010
aaacucuccagggaccucg

SEQ ID NO: 835012 - RNA, 19 nt, Artificial Sequence
  Description of Artificial Sequence: Synthetic oligonucleotide
  Sense strand starting at position 2460 of SEQ ID NO: 588005
cgaggaaacugagucucaa

SEQ ID NO: 835013 - RNA, 19 nt, Artificial Sequence
  Description of Artificial Sequence: Synthetic oligonucleotide
  Antisense strand to SEQ ID NO: 835012
uugagacucaguuuccucg

SEQ ID NO: 835014 - RNA, 19 nt, Artificial Sequence
  Description of Artificial Sequence: Synthetic oligonucleotide
  Sense strand starting at position 2792 of SEQ ID NO: 588005
gagugaugaguccgcugca

SEQ ID NO: 835015 - RNA, 19 nt, Artificial Sequence
  Description of Artificial Sequence: Synthetic oligonucleotide
  Antisense strand to SEQ ID NO: 835014
ugcagcggacucaucacuc

SEQ ID NO: 835016 - RNA, 19 nt, Artificial Sequence
  Description of Artificial Sequence: Synthetic oligonucleotide
  Sense strand starting at position 2842 of SEQ ID NO: 588005
cccucacucugugaugcuu

SEQ ID NO: 835017 - RNA, 19 nt, Artificial Sequence
  Description of Artificial Sequence: Synthetic oligonucleotide
  Antisense strand to SEQ ID NO: 835016
aagcaucacagagugaggg

SEQ ID NO: 835018 - RNA, 19 nt, Artificial Sequence
  Description of Artificial Sequence: Synthetic oligonucleotide
  Sense strand starting at position 3043 of SEQ ID NO: 588005
aagugugcucguggacacu

SEQ ID NO: 835019 - RNA, 19 nt, Artificial Sequence
  Description of Artificial Sequence: Synthetic oligonucleotide
  Antisense strand to SEQ ID NO: 835018
aguguccacgagcacacuu

SEQ ID NO: 835020 - RNA, 19 nt, Artificial Sequence
  Description of Artificial Sequence: Synthetic oligonucleotide
  Sense strand starting at position 3100 of SEQ ID NO: 588005
gagggaguguuccuggaca

SEQ ID NO: 835021 - RNA, 19 nt, Artificial Sequence
  Description of Artificial Sequence: Synthetic oligonucleotide
  Antisense strand to SEQ ID NO: 835020
uguccaggaacacucccuc

SEQ ID NO: 835022 - RNA, 19 nt, Artificial Sequence
  Description of Artificial Sequence: Synthetic oligonucleotide
  Sense strand starting at position 3140 of SEQ ID NO: 588005
uguguaugcuggcacaagu

SEQ ID NO: 835023 - RNA, 19 nt, Artificial Sequence
  Description of Artificial Sequence: Synthetic oligonucleotide
  Antisense strand to SEQ ID NO: 835022
acuugugccagcauacaca

SEQ ID NO: 835024 - RNA, 19 nt, Artificial Sequence
  Description of Artificial Sequence: Synthetic oligonucleotide
  Sense strand starting at position 3185 of SEQ ID NO: 588005
gguaguauauggcacaaau

SEQ ID NO: 835025 - RNA, 19 nt, Artificial Sequence
  Description of Artificial Sequence: Synthetic oligonucleotide
  Antisense strand to SEQ ID NO: 835024
auuugugccauauacuacc

SEQ ID NO: 835026 - RNA, 19 nt, Artificial Sequence
  Description of Artificial Sequence: Synthetic oligonucleotide
  Sense strand starting at position 3187 of SEQ ID NO: 588005
uaguauauggcacaaaugu

SEQ ID NO: 835027 - RNA, 19 nt, Artificial Sequence
  Description of Artificial Sequence: Synthetic oligonucleotide
  Antisense strand to SEQ ID NO: 835026
acauuugugccauauacua

SEQ ID NO: 835028 - RNA, 19 nt, Artificial Sequence
  Description of Artificial Sequence: Synthetic oligonucleotide
  Sense strand starting at position 3389 of SEQ ID NO: 588005
ucacucuucggcuaggaca

SEQ ID NO: 835029 - RNA, 19 nt, Artificial Sequence
  Description of Artificial Sequence: Synthetic oligonucleotide
  Antisense strand to SEQ ID NO: 835028
uguccuagccgaagaguga

SEQ ID NO: 835030 - RNA, 19 nt, Artificial Sequence
  Description of Artificial Sequence: Synthetic oligonucleotide
  Sense strand starting at position 3485 of SEQ ID NO: 588005
gaagguucgccaggaccaa

SEQ ID NO: 835031 - RNA, 19 nt, Artificial Sequence
  Description of Artificial Sequence: Synthetic oligonucleotide
  Antisense strand to SEQ ID NO: 835030
uugguccuggcgaaccuuc

SEQ ID NO: 835032 - RNA, 19 nt, Artificial Sequence
  Description of Artificial Sequence: Synthetic oligonucleotide
  Sense strand starting at position 3507 of SEQ ID NO: 588005
cugucugagagcugucagu

SEQ ID NO: 835033 - RNA, 19 nt, Artificial Sequence
  Description of Artificial Sequence: Synthetic oligonucleotide
  Antisense strand to SEQ ID NO: 835032
acugacagcucucagacag

SEQ ID NO: 835034 - RNA, 19 nt, Artificial Sequence
  Description of Artificial Sequence: Synthetic oligonucleotide
  Sense strand starting at position 3520 of SEQ ID NO: 588005
gucagucuggacugaggau

SEQ ID NO: 835035 - RNA, 19 nt, Artificial Sequence
  Description of Artificial Sequence: Synthetic oligonucleotide
  Antisense strand to SEQ ID NO: 835034
auccucaguccagacugac

SEQ ID NO: 835036 - RNA, 19 nt, Artificial Sequence
  Description of Artificial Sequence: Synthetic oligonucleotide
  Sense strand starting at position 3627 of SEQ ID NO: 588005
ccguguucaggugugcaaa

SEQ ID NO: 835037 - RNA, 19 nt, Artificial Sequence
  Description of Artificial Sequence: Synthetic oligonucleotide
  Antisense strand to SEQ ID NO: 835036
uuugcacaccugaacacgg

SEQ ID NO: 835038 - RNA, 19 nt, Artificial Sequence
  Description of Artificial Sequence: Synthetic oligonucleotide
  Sense strand starting at position 3693 of SEQ ID NO: 588005
agccgcuuucuugaccaua

SEQ ID NO: 835039 - RNA, 19 nt, Artificial Sequence
  Description of Artificial Sequence: Synthetic oligonucleotide
  Antisense strand to SEQ ID NO: 835038
uauggucaagaaagcggcu

SEQ ID NO: 835040 - RNA, 19 nt, Artificial Sequence
  Description of Artificial Sequence: Synthetic oligonucleotide
  Sense strand starting at position 3695 of SEQ ID NO: 588005
ccgcuuucuugaccauaca

SEQ ID NO: 835041 - RNA, 19 nt, Artificial Sequence
  Description of Artificial Sequence: Synthetic oligonucleotide
  Antisense strand to SEQ ID NO: 835040
uguauggucaagaaagcgg

SEQ ID NO: 835042 - RNA, 19 nt, Artificial Sequence
  Description of Artificial Sequence: Synthetic oligonucleotide
  Sense strand starting at position 3696 of SEQ ID NO: 588005
cgcuuucuugaccauacaa

SEQ ID NO: 835043 - RNA, 19 nt, Artificial Sequence
  Description of Artificial Sequence: Synthetic oligonucleotide
  Antisense strand to SEQ ID NO: 835042
uuguauggucaagaaagcg

SEQ ID NO: 835044 - RNA, 19 nt, Artificial Sequence
  Description of Artificial Sequence: Synthetic oligonucleotide
  Sense strand starting at position 3801 of SEQ ID NO: 588005
ccuguuggcuccuccgaaa

SEQ ID NO: 835045 - RNA, 19 nt, Artificial Sequence
  Description of Artificial Sequence: Synthetic oligonucleotide
  Antisense strand to SEQ ID NO: 835044
uuucggaggagccaacagg

SEQ ID NO: 835046 - RNA, 19 nt, Artificial Sequence
  Description of Artificial Sequence: Synthetic oligonucleotide
  Sense strand starting at position 3804 of SEQ ID NO: 588005
guuggcuccuccgaaaucu

SEQ ID NO: 835047 - RNA, 19 nt, Artificial Sequence
  Description of Artificial Sequence: Synthetic oligonucleotide
  Antisense strand to SEQ ID NO: 835046
agauuucggaggagccaac

SEQ ID NO: 835048 - RNA, 19 nt, Artificial Sequence
  Description of Artificial Sequence: Synthetic oligonucleotide
  Sense strand starting at position 3863 of SEQ ID NO: 588005
gguaaaccucuccguggaa

SEQ ID NO: 835049 - RNA, 19 nt, Artificial Sequence
  Description of Artificial Sequence: Synthetic oligonucleotide
  Antisense strand to SEQ ID NO: 835048
uuccacggagagguuuacc

SEQ ID NO: 835050 - RNA, 19 nt, Artificial Sequence
  Description of Artificial Sequence: Synthetic oligonucleotide
  Sense strand starting at position 3865 of SEQ ID NO: 588005
uaaaccucuccguggaaga

SEQ ID NO: 835051 - RNA, 19 nt, Artificial Sequence
  Description of Artificial Sequence: Synthetic oligonucleotide
  Antisense strand to SEQ ID NO: 835050
ucuuccacggagagguuua

SEQ ID NO: 835052 - RNA, 19 nt, Artificial Sequence
  Description of Artificial Sequence: Synthetic oligonucleotide
  Sense strand starting at position 42 of SEQ ID NO: 588006
agugccauucugcagaaca

SEQ ID NO: 835053 - RNA, 19 nt, Artificial Sequence
  Description of Artificial Sequence: Synthetic oligonucleotide
  Antisense strand to SEQ ID NO: 835052
uguucugcagaauggcacu

SEQ ID NO: 835054 - RNA, 19 nt, Artificial Sequence
  Description of Artificial Sequence: Synthetic oligonucleotide
  Sense strand starting at position 149 of SEQ ID NO: 588006
ggaaguucuggcugaugac

SEQ ID NO: 835055 - RNA, 19 nt, Artificial Sequence
  Description of Artificial Sequence: Synthetic oligonucleotide
  Antisense strand to SEQ ID NO: 835054
gucaucagccagaacuucc

SEQ ID NO: 835056 - RNA, 19 nt, Artificial Sequence
  Description of Artificial Sequence: Synthetic oligonucleotide
  Sense strand starting at position 150 of SEQ ID NO: 588006
gaaguucuggcugaugacu

SEQ ID NO: 835057 - RNA, 19 nt, Artificial Sequence
  Description of Artificial Sequence: Synthetic oligonucleotide
  Antisense strand to SEQ ID NO: 835056
agucaucagccagaacuuc

SEQ ID NO: 835058 - RNA, 19 nt, Artificial Sequence
  Description of Artificial Sequence: Synthetic oligonucleotide
  Sense strand starting at position 164 of SEQ ID NO: 588006
ugacuaauaccaugugcac

SEQ ID NO: 835059 - RNA, 19 nt, Artificial Sequence
  Description of Artificial Sequence: Synthetic oligonucleotide
  Antisense strand to SEQ ID NO: 835058
gugcacaugguauuaguca

SEQ ID NO: 835060 - RNA, 19 nt, Artificial Sequence
  Description of Artificial Sequence: Synthetic oligonucleotide
  Sense strand starting at position 295 of SEQ ID NO: 588006
acuggucguccuggaggau

SEQ ID NO: 835061 - RNA, 19 nt, Artificial Sequence
  Description of Artificial Sequence: Synthetic oligonucleotide
  Antisense strand to SEQ ID NO: 835060
auccuccaggacgaccagu

SEQ ID NO: 835062 - RNA, 19 nt, Artificial Sequence
  Description of Artificial Sequence: Synthetic oligonucleotide
  Sense strand starting at position 312 of SEQ ID NO: 588006
augacucaugaguguccau

SEQ ID NO: 835063 - RNA, 19 nt, Artificial Sequence
  Description of Artificial Sequence: Synthetic oligonucleotide
  Antisense strand to SEQ ID NO: 835062
auggacacucaugagucau

SEQ ID NO: 835064 - RNA, 19 nt, Artificial Sequence
  Description of Artificial Sequence: Synthetic oligonucleotide
  Sense strand starting at position 532 of SEQ ID NO: 588006
guccaaagggucuauagua

SEQ ID NO: 835065 - RNA, 19 nt, Artificial Sequence
  Description of Artificial Sequence: Synthetic oligonucleotide
  Antisense strand to SEQ ID NO: 835064
uacuauagacccuuuggac

SEQ ID NO: 835066 - RNA, 19 nt, Artificial Sequence
  Description of Artificial Sequence: Synthetic oligonucleotide
  Sense strand starting at position 583 of SEQ ID NO: 588006
ccaaauauguagucaacca

SEQ ID NO: 835067 - RNA, 19 nt, Artificial Sequence
  Description of Artificial Sequence: Synthetic oligonucleotide
  Antisense strand to SEQ ID NO: 835066
ugguugacuacauauuugg

SEQ ID NO: 835068 - RNA, 19 nt, Artificial Sequence
  Description of Artificial Sequence: Synthetic oligonucleotide
  Sense strand starting at position 629 of SEQ ID NO: 588006
agacuugugcaggaucagu

SEQ ID NO: 835069 - RNA, 19 nt, Artificial Sequence
  Description of Artificial Sequence: Synthetic oligonucleotide
  Antisense strand to SEQ ID NO: 835068
acugauccugcacaagucu

SEQ ID NO: 835070 - RNA, 19 nt, Artificial Sequence
  Description of Artificial Sequence: Synthetic oligonucleotide
  Sense strand starting at position 766 of SEQ ID NO: 588006
gggauugggccacaauucu

SEQ ID NO: 835071 - RNA, 19 nt, Artificial Sequence
  Description of Artificial Sequence: Synthetic oligonucleotide
  Antisense strand to SEQ ID NO: 835070
agaauuguggcccaauccc

SEQ ID NO: 835072 - RNA, 19 nt, Artificial Sequence
  Description of Artificial Sequence: Synthetic oligonucleotide
  Sense strand starting at position 775 of SEQ ID NO: 588006
ccacaauucuucguugauu

SEQ ID NO: 835073 - RNA, 19 nt, Artificial Sequence
  Description of Artificial Sequence: Synthetic oligonucleotide
  Antisense strand to SEQ ID NO: 835072
aaucaacgaagaauugugg

SEQ ID NO: 835074 - RNA, 19 nt, Artificial Sequence
  Description of Artificial Sequence: Synthetic oligonucleotide
  Sense strand starting at position 777 of SEQ ID NO: 588006
acaauucuucguugauuau

SEQ ID NO: 835075 - RNA, 19 nt, Artificial Sequence
  Description of Artificial Sequence: Synthetic oligonucleotide
  Antisense strand to SEQ ID NO: 835074
auaaucaacgaagaauugu

SEQ ID NO: 835076 - RNA, 19 nt, Artificial Sequence
  Description of Artificial Sequence: Synthetic oligonucleotide
  Sense strand starting at position 786 of SEQ ID NO: 588006
cguugauuaucuccacaau

SEQ ID NO: 835077 - RNA, 19 nt, Artificial Sequence
  Description of Artificial Sequence: Synthetic oligonucleotide
  Antisense strand to SEQ ID NO: 835076
auuguggagauaaucaacg

SEQ ID NO: 835078 - RNA, 19 nt, Artificial Sequence
  Description of Artificial Sequence: Synthetic oligonucleotide
  Sense strand starting at position 954 of SEQ ID NO: 588006
acccauauuccuugaugag

SEQ ID NO: 835079 - RNA, 19 nt, Artificial Sequence
  Description of Artificial Sequence: Synthetic oligonucleotide
  Antisense strand to SEQ ID NO: 835078
cucaucaaggaauaugggu

SEQ ID NO: 835080 - RNA, 19 nt, Artificial Sequence
  Description of Artificial Sequence: Synthetic oligonucleotide
  Sense strand starting at position 955 of SEQ ID NO: 588006
cccauauuccuugaugagc

SEQ ID NO: 835081 - RNA, 19 nt, Artificial Sequence
  Description of Artificial Sequence: Synthetic oligonucleotide
  Antisense strand to SEQ ID NO: 835080
gcucaucaaggaauauggg

SEQ ID NO: 835082 - RNA, 19 nt, Artificial Sequence
  Description of Artificial Sequence: Synthetic oligonucleotide
  Sense strand starting at position 995 of SEQ ID NO: 588006
uugcgaucgaaguagaacu

SEQ ID NO: 835083 - RNA, 19 nt, Artificial Sequence
  Description of Artificial Sequence: Synthetic oligonucleotide
  Antisense strand to SEQ ID NO: 835082
aguucuacuucgaucgcaa

SEQ ID NO: 835084 - RNA, 19 nt, Artificial Sequence
  Description of Artificial Sequence: Synthetic oligonucleotide
  Sense strand starting at position 1519 of SEQ ID NO: 588006
cgcuguucccacgaagaca

SEQ ID NO: 835085 - RNA, 19 nt, Artificial Sequence
  Description of Artificial Sequence: Synthetic oligonucleotide
  Antisense strand to SEQ ID NO: 835084
ugucuucgugggaacagcg

SEQ ID NO: 835086 - RNA, 19 nt, Artificial Sequence
  Description of Artificial Sequence: Synthetic oligonucleotide
  Sense strand starting at position 2398 of SEQ ID NO: 588006
cguaaagguggaugcuaua

SEQ ID NO: 835087 - RNA, 19 nt, Artificial Sequence
  Description of Artificial Sequence: Synthetic oligonucleotide
  Antisense strand to SEQ ID NO: 835086
uauagcauccaccuuuacg

SEQ ID NO: 835088 - RNA, 19 nt, Artificial Sequence
  Description of Artificial Sequence: Synthetic oligonucleotide
  Sense strand starting at position 2431 of SEQ ID NO: 588006
agcgauuugguacgcagua

SEQ ID NO: 835089 - RNA, 19 nt, Artificial Sequence
  Description of Artificial Sequence: Synthetic oligonucleotide
  Antisense strand to SEQ ID NO: 835088
uacugcguaccaaaucgcu

SEQ ID NO: 835090 - RNA, 19 nt, Artificial Sequence
  Description of Artificial Sequence: Synthetic oligonucleotide
  Sense strand starting at position 2432 of SEQ ID NO: 588006
gcgauuugguacgcaguaa

SEQ ID NO: 835091 - RNA, 19 nt, Artificial Sequence
  Description of Artificial Sequence: Synthetic oligonucleotide
  Antisense strand to SEQ ID NO: 835090
uuacugcguaccaaaucgc

SEQ ID NO: 835092 - RNA, 19 nt, Artificial Sequence
  Description of Artificial Sequence: Synthetic oligonucleotide
  Sense strand starting at position 2496 of SEQ ID NO: 588006
ucauuugugccaggcacuu

SEQ ID NO: 835093 - RNA, 19 nt, Artificial Sequence
  Description of Artificial Sequence: Synthetic oligonucleotide
  Antisense strand to SEQ ID NO: 835092
aagugccuggcacaaauga

SEQ ID NO: 835094 - RNA, 19 nt, Artificial Sequence
  Description of Artificial Sequence: Synthetic oligonucleotide
  Sense strand starting at position 2513 of SEQ ID NO: 588006
uuuacuaggugcuuuaaau

SEQ ID NO: 835095 - RNA, 19 nt, Artificial Sequence
  Description of Artificial Sequence: Synthetic oligonucleotide
  Antisense strand to SEQ ID NO: 835094
auuuaaagcaccuaguaaa

SEQ ID NO: 835096 - RNA, 19 nt, Artificial Sequence
  Description of Artificial Sequence: Synthetic oligonucleotide
  Sense strand starting at position 2545 of SEQ ID NO: 588006
uuacaaaggagguguugau

SEQ ID NO: 835097 - RNA, 19 nt, Artificial Sequence
  Description of Artificial Sequence: Synthetic oligonucleotide
  Antisense strand to SEQ ID NO: 835096
aucaacaccuccuuuguaa

SEQ ID NO: 835098 - RNA, 19 nt, Artificial Sequence
  Description of Artificial Sequence: Synthetic oligonucleotide
  Sense strand starting at position 2700 of SEQ ID NO: 588006
aauggcaaguccuuccaga

SEQ ID NO: 835099 - RNA, 19 nt, Artificial Sequence
  Description of Artificial Sequence: Synthetic oligonucleotide
  Antisense strand to SEQ ID NO: 835098
ucuggaaggacuugccauu

SEQ ID NO: 835100 - RNA, 19 nt, Artificial Sequence
  Description of Artificial Sequence: Synthetic oligonucleotide
  Sense strand starting at position 2805 of SEQ ID NO: 588006
cucuucugccugggaacau

SEQ ID NO: 835101 - RNA, 19 nt, Artificial Sequence
  Description of Artificial Sequence: Synthetic oligonucleotide
  Antisense strand to SEQ ID NO: 835100
auguucccaggcagaagag

SEQ ID NO: 835102 - RNA, 19 nt, Artificial Sequence
  Description of Artificial Sequence: Synthetic oligonucleotide
  Sense strand starting at position 2839 of SEQ ID NO: 588006
gcugccucaguuuacagau

SEQ ID NO: 835103 - RNA, 19 nt, Artificial Sequence
  Description of Artificial Sequence: Synthetic oligonucleotide
  Antisense strand to SEQ ID NO: 835102
aucuguaaacugaggcagc

SEQ ID NO: 835104 - RNA, 19 nt, Artificial Sequence
  Description of Artificial Sequence: Synthetic oligonucleotide
  Sense strand starting at position 2906 of SEQ ID NO: 588006
agcuccuguaauuggagua

SEQ ID NO: 835105 - RNA, 19 nt, Artificial Sequence
  Description of Artificial Sequence: Synthetic oligonucleotide
  Antisense strand to SEQ ID NO: 835104
uacuccaauuacaggagcu

SEQ ID NO: 835106 - RNA, 19 nt, Artificial Sequence
  Description of Artificial Sequence: Synthetic oligonucleotide
  Sense strand starting at position 2907 of SEQ ID NO: 588006
gcuccuguaauuggaguaa

SEQ ID NO: 835107 - RNA, 19 nt, Artificial Sequence
  Description of Artificial Sequence: Synthetic oligonucleotide
  Antisense strand to SEQ ID NO: 835106
uuacuccaauuacaggagc

SEQ ID NO: 835108 - RNA, 19 nt, Artificial Sequence
  Description of Artificial Sequence: Synthetic oligonucleotide
  Sense strand starting at position 3004 of SEQ ID NO: 588006
gcagaagcccuagaaacuu

SEQ ID NO: 835109 - RNA, 19 nt, Artificial Sequence
  Description of Artificial Sequence: Synthetic oligonucleotide
  Antisense strand to SEQ ID NO: 835108
aaguuucuagggcuucugc

SEQ ID NO: 835110 - RNA, 19 nt, Artificial Sequence
  Description of Artificial Sequence: Synthetic oligonucleotide
  Sense strand starting at position 3088 of SEQ ID NO: 588006
gcucuuacuagugagguaa

SEQ ID NO: 835111 - RNA, 19 nt, Artificial Sequence
  Description of Artificial Sequence: Synthetic oligonucleotide
  Antisense strand to SEQ ID NO: 835110
uuaccucacuaguaagagc

SEQ ID NO: 835112 - RNA, 19 nt, Artificial Sequence
  Description of Artificial Sequence: Synthetic oligonucleotide
  Sense strand starting at position 3126 of SEQ ID NO: 588006
gggaccuguggcuaaugua

SEQ ID NO: 835113 - RNA, 19 nt, Artificial Sequence
  Description of Artificial Sequence: Synthetic oligonucleotide
  Antisense strand to SEQ ID NO: 835112
uacauuagccacagguccc

SEQ ID NO: 835114 - RNA, 19 nt, Artificial Sequence
  Description of Artificial Sequence: Synthetic oligonucleotide
  Sense strand starting at position 3242 of SEQ ID NO: 588006
ccgggaccucauuacucaa

SEQ ID NO: 835115 - RNA, 19 nt, Artificial Sequence
  Description of Artificial Sequence: Synthetic oligonucleotide
  Antisense strand to SEQ ID NO: 835114
uugaguaaugaggucccgg

SEQ ID NO: 835116 - RNA, 19 nt, Artificial Sequence
  Description of Artificial Sequence: Synthetic oligonucleotide
  Sense strand starting at position 3245 of SEQ ID NO: 588006
ggaccucauuacucaaagu

SEQ ID NO: 835117 - RNA, 19 nt, Artificial Sequence
  Description of Artificial Sequence: Synthetic oligonucleotide
  Antisense strand to SEQ ID NO: 835116
acuuugaguaaugaggucc

SEQ ID NO: 835118 - RNA, 19 nt, Artificial Sequence
  Description of Artificial Sequence: Synthetic oligonucleotide
  Sense strand starting at position 3283 of SEQ ID NO: 588006
cugauaucaccugaaagcu

SEQ ID NO: 835119 - RNA, 19 nt, Artificial Sequence
  Description of Artificial Sequence: Synthetic oligonucleotide
  Antisense strand to SEQ ID NO: 835118
agcuuucaggugauaucag

SEQ ID NO: 835120 - RNA, 19 nt, Artificial Sequence
  Description of Artificial Sequence: Synthetic oligonucleotide
  Sense strand starting at position 3292 of SEQ ID NO: 588006
ccugaaagcuuguuaaaga

SEQ ID NO: 835121 - RNA, 19 nt, Artificial Sequence
  Description of Artificial Sequence: Synthetic oligonucleotide
  Antisense strand to SEQ ID NO: 835120
ucuuuaacaagcuuucagg

SEQ ID NO: 835122 - RNA, 19 nt, Artificial Sequence
  Description of Artificial Sequence: Synthetic oligonucleotide
  Sense strand starting at position 3361 of SEQ ID NO: 588006
uaacaagauccugggugau

SEQ ID NO: 835123 - RNA, 19 nt, Artificial Sequence
  Description of Artificial Sequence: Synthetic oligonucleotide
  Antisense strand to SEQ ID NO: 835122
aucacccaggaucuuguua

SEQ ID NO: 835124 - RNA, 19 nt, Artificial Sequence
  Description of Artificial Sequence: Synthetic oligonucleotide
  Sense strand starting at position 3509 of SEQ ID NO: 588006
cccuguaugaucuggcaag

SEQ ID NO: 835125 - RNA, 19 nt, Artificial Sequence
  Description of Artificial Sequence: Synthetic oligonucleotide
  Antisense strand to SEQ ID NO: 835124
cuugccagaucauacaggg

SEQ ID NO: 835126 - RNA, 19 nt, Artificial Sequence
  Description of Artificial Sequence: Synthetic oligonucleotide
  Sense strand starting at position 3547 of SEQ ID NO: 588006
ugaguuaccucucugaccu

SEQ ID NO: 835127 - RNA, 19 nt, Artificial Sequence
  Description of Artificial Sequence: Synthetic oligonucleotide
  Antisense strand to SEQ ID NO: 835126
aggucagagagguaacuca

SEQ ID NO: 835128 - RNA, 19 nt, Artificial Sequence
  Description of Artificial Sequence: Synthetic oligonucleotide
  Sense strand starting at position 3787 of SEQ ID NO: 588006
cccuuuauccuaugguacu

SEQ ID NO: 835129 - RNA, 19 nt, Artificial Sequence
  Description of Artificial Sequence: Synthetic oligonucleotide
  Antisense strand to SEQ ID NO: 835128
aguaccauaggauaaaggg

SEQ ID NO: 835130 - RNA, 19 nt, Artificial Sequence
  Description of Artificial Sequence: Synthetic oligonucleotide
  Sense strand starting at position 3930 of SEQ ID NO: 588006
ugcaacagugucugacaua

SEQ ID NO: 835131 - RNA, 19 nt, Artificial Sequence
  Description of Artificial Sequence: Synthetic oligonucleotide
  Antisense strand to SEQ ID NO: 835130
uaugucagacacuguugca

SEQ ID NO: 835132 - RNA, 19 nt, Artificial Sequence
  Description of Artificial Sequence: Synthetic oligonucleotide
  Sense strand starting at position 450 of SEQ ID NO: 588007
ggaaugugggccugugaga

SEQ ID NO: 835133 - RNA, 19 nt, Artificial Sequence
  Description of Artificial Sequence: Synthetic oligonucleotide
  Antisense strand to SEQ ID NO: 835132
ucucacaggcccacauucc

SEQ ID NO: 835134 - RNA, 19 nt, Artificial Sequence
  Description of Artificial Sequence: Synthetic oligonucleotide
  Sense strand starting at position 561 of SEQ ID NO: 588007
auuugauauuccggaacag

SEQ ID NO: 835135 - RNA, 19 nt, Artificial Sequence
  Description of Artificial Sequence: Synthetic oligonucleotide
  Antisense strand to SEQ ID NO: 835134
cuguuccggaauaucaaau

SEQ ID NO: 835136 - RNA, 19 nt, Artificial Sequence
  Description of Artificial Sequence: Synthetic oligonucleotide
  Sense strand starting at position 650 of SEQ ID NO: 588007
gcuguaucccuguaggaag

SEQ ID NO: 835137 - RNA, 19 nt, Artificial Sequence
  Description of Artificial Sequence: Synthetic oligonucleotide
  Antisense strand to SEQ ID NO: 835136
cuuccuacagggauacagc

SEQ ID NO: 835138 - RNA, 19 nt, Artificial Sequence
  Description of Artificial Sequence: Synthetic oligonucleotide
  Sense strand starting at position 908 of SEQ ID NO: 588007
cuguuagacucagcaacau

SEQ ID NO: 835139 - RNA, 19 nt, Artificial Sequence
  Description of Artificial Sequence: Synthetic oligonucleotide
  Antisense strand to SEQ ID NO: 835138
auguugcugagucuaacag

SEQ ID NO: 835140 - RNA, 19 nt, Artificial Sequence
  Description of Artificial Sequence: Synthetic oligonucleotide
  Sense strand starting at position 994 of SEQ ID NO: 588007
ggcucacucacgugagauc

SEQ ID NO: 835141 - RNA, 19 nt, Artificial Sequence
  Description of Artificial Sequence: Synthetic oligonucleotide
  Antisense strand to SEQ ID NO: 835140
gaucucacgugagugagcc

SEQ ID NO: 835142 - RNA, 19 nt, Artificial Sequence
  Description of Artificial Sequence: Synthetic oligonucleotide
  Sense strand starting at position 1003 of SEQ ID NO: 588007
acgugagaucggcgucuuu

SEQ ID NO: 835143 - RNA, 19 nt, Artificial Sequence
  Description of Artificial Sequence: Synthetic oligonucleotide
  Antisense strand to SEQ ID NO: 835142
aaagacgccgaucucacgu

SEQ ID NO: 835144 - RNA, 19 nt, Artificial Sequence
  Description of Artificial Sequence: Synthetic oligonucleotide
  Sense strand starting at position 1004 of SEQ ID NO: 588007
cgugagaucggcgucuuua

SEQ ID NO: 835145 - RNA, 19 nt, Artificial Sequence
  Description of Artificial Sequence: Synthetic oligonucleotide
  Antisense strand to SEQ ID NO: 835144
uaaagacgccgaucucacg

SEQ ID NO: 835146 - RNA, 19 nt, Artificial Sequence
  Description of Artificial Sequence: Synthetic oligonucleotide
  Sense strand starting at position 1013 of SEQ ID NO: 588007
ggcgucuuuagaggagaca

SEQ ID NO: 835147 - RNA, 19 nt, Artificial Sequence
  Description of Artificial Sequence: Synthetic oligonucleotide
  Antisense strand to SEQ ID NO: 835146
ugucuccucuaaagacgcc

SEQ ID NO: 835148 - RNA, 19 nt, Artificial Sequence
  Description of Artificial Sequence: Synthetic oligonucleotide
  Sense strand starting at position 1014 of SEQ ID NO: 588007
gcgucuuuagaggagacaa

SEQ ID NO: 835149 - RNA, 19 nt, Artificial Sequence
  Description of Artificial Sequence: Synthetic oligonucleotide
  Antisense strand to SEQ ID NO: 835148
uugucuccucuaaagacgc

SEQ ID NO: 835150 - RNA, 19 nt, Artificial Sequence
  Description of Artificial Sequence: Synthetic oligonucleotide
  Sense strand starting at position 1151 of SEQ ID NO: 588007
gucaguugcaccuguaaug

SEQ ID NO: 835151 - RNA, 19 nt, Artificial Sequence
  Description of Artificial Sequence: Synthetic oligonucleotide
  Antisense strand to SEQ ID NO: 835150
cauuacaggugcaacugac

SEQ ID NO: 835152 - RNA, 19 nt, Artificial Sequence
  Description of Artificial Sequence: Synthetic oligonucleotide
  Sense strand starting at position 1156 of SEQ ID NO: 588007
uugcaccuguaaugucaaa

SEQ ID NO: 835153 - RNA, 19 nt, Artificial Sequence
  Description of Artificial Sequence: Synthetic oligonucleotide
  Antisense strand to SEQ ID NO: 835152
uuugacauuacaggugcaa

SEQ ID NO: 835154 - RNA, 19 nt, Artificial Sequence
  Description of Artificial Sequence: Synthetic oligonucleotide
  Sense strand starting at position 1612 of SEQ ID NO: 588007
gccagauuccuccagggca

SEQ ID NO: 835155 - RNA, 19 nt, Artificial Sequence
  Description of Artificial Sequence: Synthetic oligonucleotide
  Antisense strand to SEQ ID NO: 835154
ugcccuggaggaaucuggc

SEQ ID NO: 835156 - RNA, 19 nt, Artificial Sequence
  Description of Artificial Sequence: Synthetic oligonucleotide
  Sense strand starting at position 2498 of SEQ ID NO: 588007
ggcgaaucacguuggguga

SEQ ID NO: 835157 - RNA, 19 nt, Artificial Sequence
  Description of Artificial Sequence: Synthetic oligonucleotide
  Antisense strand to SEQ ID NO: 835156
ucacccaacgugauucgcc

SEQ ID NO: 835158 - RNA, 19 nt, Artificial Sequence
  Description of Artificial Sequence: Synthetic oligonucleotide
  Sense strand starting at position 2726 of SEQ ID NO: 588007
gucaucgucuuccaucgaa

SEQ ID NO: 835159 - RNA, 19 nt, Artificial Sequence
  Description of Artificial Sequence: Synthetic oligonucleotide
  Antisense strand to SEQ ID NO: 835158
uucgauggaagacgaugac

SEQ ID NO: 835160 - RNA, 19 nt, Artificial Sequence
  Description of Artificial Sequence: Synthetic oligonucleotide
  Sense strand starting at position 2866 of SEQ ID NO: 588007
ggugaaauccgguaucuaa

SEQ ID NO: 835161 - RNA, 19 nt, Artificial Sequence
  Description of Artificial Sequence: Synthetic oligonucleotide
  Antisense strand to SEQ ID NO: 835160
uuagauaccggauuucacc

SEQ ID NO: 835162 - RNA, 19 nt, Artificial Sequence
  Description of Artificial Sequence: Synthetic oligonucleotide
  Sense strand starting at position 3119 of SEQ ID NO: 588007
acaucuugcuaugaaagga

SEQ ID NO: 835163 - RNA, 19 nt, Artificial Sequence
  Description of Artificial Sequence: Synthetic oligonucleotide
  Antisense strand to SEQ ID NO: 835162
uccuuucauagcaagaugu

SEQ ID NO: 835164 - RNA, 19 nt, Artificial Sequence
  Description of Artificial Sequence: Synthetic oligonucleotide
  Sense strand starting at position 3142 of SEQ ID NO: 588007
ucaugaugauaacguuuaa

SEQ ID NO: 835165 - RNA, 19 nt, Artificial Sequence
  Description of Artificial Sequence: Synthetic oligonucleotide
  Antisense strand to SEQ ID NO: 835164
uuaaacguuaucaucauga

SEQ ID NO: 835166 - RNA, 19 nt, Artificial Sequence
  Description of Artificial Sequence: Synthetic oligonucleotide
  Sense strand starting at position 3265 of SEQ ID NO: 588007
gcaggcagcguugcuuaau

SEQ ID NO: 835167 - RNA, 19 nt, Artificial Sequence
  Description of Artificial Sequence: Synthetic oligonucleotide
  Antisense strand to SEQ ID NO: 835166
auuaagcaacgcugccugc

SEQ ID NO: 835168 - RNA, 19 nt, Artificial Sequence
  Description of Artificial Sequence: Synthetic oligonucleotide
  Sense strand starting at position 3266 of SEQ ID NO: 588007
caggcagcguugcuuaaua

SEQ ID NO: 835169 - RNA, 19 nt, Artificial Sequence
  Description of Artificial Sequence: Synthetic oligonucleotide
  Antisense strand to SEQ ID NO: 835168
uauuaagcaacgcugccug

SEQ ID NO: 835170 - RNA, 19 nt, Artificial Sequence
  Description of Artificial Sequence: Synthetic oligonucleotide
  Sense strand starting at position 3268 of SEQ ID NO: 588007
ggcagcguugcuuaauaaa

SEQ ID NO: 835171 - RNA, 19 nt, Artificial Sequence
  Description of Artificial Sequence: Synthetic oligonucleotide
  Antisense strand to SEQ ID NO: 835170
uuuauuaagcaacgcugcc

SEQ ID NO: 835172 - RNA, 19 nt, Artificial Sequence
  Description of Artificial Sequence: Synthetic oligonucleotide
  Sense strand starting at position 3271 of SEQ ID NO: 588007
agcguugcuuaauaaagau

SEQ ID NO: 835173 - RNA, 19 nt, Artificial Sequence
  Description of Artificial Sequence: Synthetic oligonucleotide
  Antisense strand to SEQ ID NO: 835172
aucuuuauuaagcaacgcu

SEQ ID NO: 835174 - RNA, 19 nt, Artificial Sequence
  Description of Artificial Sequence: Synthetic oligonucleotide
  Sense strand starting at position 3659 of SEQ ID NO: 588007
agcaguuacuaauuaugau

SEQ ID NO: 835175 - RNA, 19 nt, Artificial Sequence
  Description of Artificial Sequence: Synthetic oligonucleotide
  Antisense strand to SEQ ID NO: 835174
aucauaauuaguaacugcu

SEQ ID NO: 835176 - RNA, 19 nt, Artificial Sequence
  Description of Artificial Sequence: Synthetic oligonucleotide
  Sense strand starting at position 3693 of SEQ ID NO: 588007
uuuguauucuguugaccau

SEQ ID NO: 835177 - RNA, 19 nt, Artificial Sequence
  Description of Artificial Sequence: Synthetic oligonucleotide
  Antisense strand to SEQ ID NO: 835176
auggucaacagaauacaaa

SEQ ID NO: 835178 - RNA, 19 nt, Artificial Sequence
  Description of Artificial Sequence: Synthetic oligonucleotide
  Sense strand starting at position 3694 of SEQ ID NO: 588007
uuguauucuguugaccaua

SEQ ID NO: 835179 - RNA, 19 nt, Artificial Sequence
  Description of Artificial Sequence: Synthetic oligonucleotide
  Antisense strand to SEQ ID NO: 835178
uauggucaacagaauacaa

SEQ ID NO: 835180 - RNA, 19 nt, Artificial Sequence
  Description of Artificial Sequence: Synthetic oligonucleotide
  Sense strand starting at position 3696 of SEQ ID NO: 588007
guauucuguugaccauagu

SEQ ID NO: 835181 - RNA, 19 nt, Artificial Sequence
  Description of Artificial Sequence: Synthetic oligonucleotide
  Antisense strand to SEQ ID NO: 835180
acuauggucaacagaauac

SEQ ID NO: 835182 - RNA, 19 nt, Artificial Sequence
  Description of Artificial Sequence: Synthetic oligonucleotide
  Sense strand starting at position 3705 of SEQ ID NO: 588007
ugaccauagugucgaacua

SEQ ID NO: 835183 - RNA, 19 nt, Artificial Sequence
  Description of Artificial Sequence: Synthetic oligonucleotide
  Antisense strand to SEQ ID NO: 835182
uaguucgacacuaugguca

SEQ ID NO: 835184 - RNA, 19 nt, Artificial Sequence
  Description of Artificial Sequence: Synthetic oligonucleotide
  Sense strand starting at position 3731 of SEQ ID NO: 588007
uuucuuaagucauuguacu

SEQ ID NO: 835185 - RNA, 19 nt, Artificial Sequence
  Description of Artificial Sequence: Synthetic oligonucleotide
  Antisense strand to SEQ ID NO: 835184
aguacaaugacuuaagaaa

SEQ ID NO: 835186 - RNA, 19 nt, Artificial Sequence
  Description of Artificial Sequence: Synthetic oligonucleotide
  Sense strand starting at position 3732 of SEQ ID NO: 588007
uucuuaagucauuguacuu

SEQ ID NO: 835187 - RNA, 19 nt, Artificial Sequence
  Description of Artificial Sequence: Synthetic oligonucleotide
  Antisense strand to SEQ ID NO: 835186
aaguacaaugacuuaagaa

SEQ ID NO: 835188 - RNA, 19 nt, Artificial Sequence
  Description of Artificial Sequence: Synthetic oligonucleotide
  Sense strand starting at position 255 of SEQ ID NO: 588008
ccgaacaucucaguuauga

SEQ ID NO: 835189 - RNA, 19 nt, Artificial Sequence
  Description of Artificial Sequence: Synthetic oligonucleotide
  Antisense strand to SEQ ID NO: 835188
ucauaacugagauguucgg

SEQ ID NO: 835190 - RNA, 19 nt, Artificial Sequence
  Description of Artificial Sequence: Synthetic oligonucleotide
  Sense strand starting at position 322 of SEQ ID NO: 588008
guuucugggccuuaagaga

SEQ ID NO: 835191 - RNA, 19 nt, Artificial Sequence
  Description of Artificial Sequence: Synthetic oligonucleotide
  Antisense strand to SEQ ID NO: 835190
ucucuuaaggcccagaaac

SEQ ID NO: 835192 - RNA, 19 nt, Artificial Sequence
  Description of Artificial Sequence: Synthetic oligonucleotide
  Sense strand starting at position 331 of SEQ ID NO: 588008
ccuuaagagauccgugguu

SEQ ID NO: 835193 - RNA, 19 nt, Artificial Sequence
  Description of Artificial Sequence: Synthetic oligonucleotide
  Antisense strand to SEQ ID NO: 835192
aaccacggaucucuuaagg

SEQ ID NO: 835194 - RNA, 19 nt, Artificial Sequence
  Description of Artificial Sequence: Synthetic oligonucleotide
  Sense strand starting at position 333 of SEQ ID NO: 588008
uuaagagauccgugguuac

SEQ ID NO: 835195 - RNA, 19 nt, Artificial Sequence
  Description of Artificial Sequence: Synthetic oligonucleotide
  Antisense strand to SEQ ID NO: 835194
guaaccacggaucucuuaa

SEQ ID NO: 835196 - RNA, 19 nt, Artificial Sequence
  Description of Artificial Sequence: Synthetic oligonucleotide
  Sense strand starting at position 371 of SEQ ID NO: 588008
ugaagaaauugagcuuccu

SEQ ID NO: 835197 - RNA, 19 nt, Artificial Sequence
  Description of Artificial Sequence: Synthetic oligonucleotide
  Antisense strand to SEQ ID NO: 835196
aggaagcucaauuucuuca

SEQ ID NO: 835198 - RNA, 19 nt, Artificial Sequence
  Description of Artificial Sequence: Synthetic oligonucleotide
  Sense strand starting at position 379 of SEQ ID NO: 588008
uugagcuuccuuugaggua

SEQ ID NO: 835199 - RNA, 19 nt, Artificial Sequence
  Description of Artificial Sequence: Synthetic oligonucleotide
  Antisense strand to SEQ ID NO: 835198
uaccucaaaggaagcucaa

SEQ ID NO: 835200 - RNA, 19 nt, Artificial Sequence
  Description of Artificial Sequence: Synthetic oligonucleotide
  Sense strand starting at position 804 of SEQ ID NO: 588008
gcccuaguaucaccgaaag

SEQ ID NO: 835201 - RNA, 19 nt, Artificial Sequence
  Description of Artificial Sequence: Synthetic oligonucleotide
  Antisense strand to SEQ ID NO: 835200
cuuucggugauacuagggc

SEQ ID NO: 835202 - RNA, 19 nt, Artificial Sequence
  Description of Artificial Sequence: Synthetic oligonucleotide
  Sense strand starting at position 922 of SEQ ID NO: 588008
ccgagaucucggagugguc

SEQ ID NO: 835203 - RNA, 19 nt, Artificial Sequence
  Description of Artificial Sequence: Synthetic oligonucleotide
  Antisense strand to SEQ ID NO: 835202
gaccacuccgagaucucgg

SEQ ID NO: 835204 - RNA, 19 nt, Artificial Sequence
  Description of Artificial Sequence: Synthetic oligonucleotide
  Sense strand starting at position 929 of SEQ ID NO: 588008
cucggagugguccaugguu

SEQ ID NO: 835205 - RNA, 19 nt, Artificial Sequence
  Description of Artificial Sequence: Synthetic oligonucleotide
  Antisense strand to SEQ ID NO: 835204
aaccauggaccacuccgag

SEQ ID NO: 835206 - RNA, 19 nt, Artificial Sequence
  Description of Artificial Sequence: Synthetic oligonucleotide
  Sense strand starting at position 1028 of SEQ ID NO: 588008
agggaauucuuagcagucu

SEQ ID NO: 835207 - RNA, 19 nt, Artificial Sequence
  Description of Artificial Sequence: Synthetic oligonucleotide
  Antisense strand to SEQ ID NO: 835206
agacugcuaagaauucccu

SEQ ID NO: 835208 - RNA, 19 nt, Artificial Sequence
  Description of Artificial Sequence: Synthetic oligonucleotide
  Sense strand starting at position 1232 of SEQ ID NO: 588008
cuaucaaauucuguggcuu

SEQ ID NO: 835209 - RNA, 19 nt, Artificial Sequence
  Description of Artificial Sequence: Synthetic oligonucleotide
  Antisense strand to SEQ ID NO: 835208
aagccacagaauuugauag

SEQ ID NO: 835210 - RNA, 19 nt, Artificial Sequence
  Description of Artificial Sequence: Synthetic oligonucleotide
  Sense strand starting at position 1250 of SEQ ID NO: 588008
ucuauuagaucaccgaggu

SEQ ID NO: 835211 - RNA, 19 nt, Artificial Sequence
  Description of Artificial Sequence: Synthetic oligonucleotide
  Antisense strand to SEQ ID NO: 835210
accucggugaucuaauaga

SEQ ID NO: 835212 - RNA, 19 nt, Artificial Sequence
  Description of Artificial Sequence: Synthetic oligonucleotide
  Sense strand starting at position 1254 of SEQ ID NO: 588008
uuagaucaccgaggucuuu

SEQ ID NO: 835213 - RNA, 19 nt, Artificial Sequence
  Description of Artificial Sequence: Synthetic oligonucleotide
  Antisense strand to SEQ ID NO: 835212
aaagaccucggugaucuaa

SEQ ID NO: 835214 - RNA, 19 nt, Artificial Sequence
  Description of Artificial Sequence: Synthetic oligonucleotide
  Sense strand starting at position 1260 of SEQ ID NO: 588008
caccgaggucuuuaagaac

SEQ ID NO: 835215 - RNA, 19 nt, Artificial Sequence
  Description of Artificial Sequence: Synthetic oligonucleotide
  Antisense strand to SEQ ID NO: 835214
guucuuaaagaccucggug

SEQ ID NO: 835216 - RNA, 19 nt, Artificial Sequence
  Description of Artificial Sequence: Synthetic oligonucleotide
  Sense strand starting at position 1361 of SEQ ID NO: 588008
ugagacaacuccucggaca

SEQ ID NO: 835217 - RNA, 19 nt, Artificial Sequence
  Description of Artificial Sequence: Synthetic oligonucleotide
  Antisense strand to SEQ ID NO: 835216
uguccgaggaguugucuca

SEQ ID NO: 835218 - RNA, 19 nt, Artificial Sequence
  Description of Artificial Sequence: Synthetic oligonucleotide
  Sense strand starting at position 1362 of SEQ ID NO: 588008
gagacaacuccucggacaa

SEQ ID NO: 835219 - RNA, 19 nt, Artificial Sequence
  Description of Artificial Sequence: Synthetic oligonucleotide
  Antisense strand to SEQ ID NO: 835218
uuguccgaggaguugucuc

SEQ ID NO: 835220 - RNA, 19 nt, Artificial Sequence
  Description of Artificial Sequence: Synthetic oligonucleotide
  Sense strand starting at position 1484 of SEQ ID NO: 588008
ggagggauccguugaagag

SEQ ID NO: 835221 - RNA, 19 nt, Artificial Sequence
  Description of Artificial Sequence: Synthetic oligonucleotide
  Antisense strand to SEQ ID NO: 835220
cucuucaacggaucccucc

SEQ ID NO: 835222 - RNA, 19 nt, Artificial Sequence
  Description of Artificial Sequence: Synthetic oligonucleotide
  Sense strand starting at position 1801 of SEQ ID NO: 588008
acuguugccuuucugaaga

SEQ ID NO: 835223 - RNA, 19 nt, Artificial Sequence
  Description of Artificial Sequence: Synthetic oligonucleotide
  Antisense strand to SEQ ID NO: 835222
ucuucagaaaggcaacagu

SEQ ID NO: 835224 - RNA, 19 nt, Artificial Sequence
  Description of Artificial Sequence: Synthetic oligonucleotide
  Sense strand starting at position 1806 of SEQ ID NO: 588008
ugccuuucugaagacuaaa

SEQ ID NO: 835225 - RNA, 19 nt, Artificial Sequence
  Description of Artificial Sequence: Synthetic oligonucleotide
  Antisense strand to SEQ ID NO: 835224
uuuagucuucagaaaggca

SEQ ID NO: 835226 - RNA, 19 nt, Artificial Sequence
  Description of Artificial Sequence: Synthetic oligonucleotide
  Sense strand starting at position 1862 of SEQ ID NO: 588008
ugagccaugucaccaacuu

SEQ ID NO: 835227 - RNA, 19 nt, Artificial Sequence
  Description of Artificial Sequence: Synthetic oligonucleotide
  Antisense strand to SEQ ID NO: 835226
aaguuggugacauggcuca

SEQ ID NO: 835228 - RNA, 19 nt, Artificial Sequence
  Description of Artificial Sequence: Synthetic oligonucleotide
  Sense strand starting at position 1942 of SEQ ID NO: 588008
gcucauauugcugccgcaa

SEQ ID NO: 835229 - RNA, 19 nt, Artificial Sequence
  Description of Artificial Sequence: Synthetic oligonucleotide
  Antisense strand to SEQ ID NO: 835228
uugcggcagcaauaugagc

SEQ ID NO: 835230 - RNA, 19 nt, Artificial Sequence
  Description of Artificial Sequence: Synthetic oligonucleotide
  Sense strand starting at position 2016 of SEQ ID NO: 588008
auggucguaaagcaauaaa

SEQ ID NO: 835231 - RNA, 19 nt, Artificial Sequence
  Description of Artificial Sequence: Synthetic oligonucleotide
  Antisense strand to SEQ ID NO: 835230
uuuauugcuuuacgaccau

SEQ ID NO: 835232 - RNA, 19 nt, Artificial Sequence
  Description of Artificial Sequence: Synthetic oligonucleotide
  Sense strand starting at position 2019 of SEQ ID NO: 588008
gucguaaagcaauaaagau

SEQ ID NO: 835233 - RNA, 19 nt, Artificial Sequence
  Description of Artificial Sequence: Synthetic oligonucleotide
  Antisense strand to SEQ ID NO: 835232
aucuuuauugcuuuacgac

SEQ ID NO: 835234 - RNA, 19 nt, Artificial Sequence
  Description of Artificial Sequence: Synthetic oligonucleotide
  Sense strand starting at position 2104 of SEQ ID NO: 588008
ucgcuaauuguguuucugu

SEQ ID NO: 835235 - RNA, 19 nt, Artificial Sequence
  Description of Artificial Sequence: Synthetic oligonucleotide
  Antisense strand to SEQ ID NO: 835234
acagaaacacaauuagcga

SEQ ID NO: 835236 - RNA, 19 nt, Artificial Sequence
  Description of Artificial Sequence: Synthetic oligonucleotide
  Sense strand starting at position 2106 of SEQ ID NO: 588008
gcuaauuguguuucuguuu

SEQ ID NO: 835237 - RNA, 19 nt, Artificial Sequence
  Description of Artificial Sequence: Synthetic oligonucleotide
  Antisense strand to SEQ ID NO: 835236
aaacagaaacacaauuagc

SEQ ID NO: 835238 - RNA, 19 nt, Artificial Sequence
  Description of Artificial Sequence: Synthetic oligonucleotide
  Sense strand starting at position 2157 of SEQ ID NO: 588008
acagaaucucagugggacu

SEQ ID NO: 835239 - RNA, 19 nt, Artificial Sequence
  Description of Artificial Sequence: Synthetic oligonucleotide
  Antisense strand to SEQ ID NO: 835238
agucccacugagauucugu

SEQ ID NO: 835240 - RNA, 19 nt, Artificial Sequence
  Description of Artificial Sequence: Synthetic oligonucleotide
  Sense strand starting at position 2198 of SEQ ID NO: 588008
acgugaagaauggauguau

SEQ ID NO: 835241 - RNA, 19 nt, Artificial Sequence
  Description of Artificial Sequence: Synthetic oligonucleotide
  Antisense strand to SEQ ID NO: 835240
auacauccauucuucacgu

SEQ ID NO: 835242 - RNA, 19 nt, Artificial Sequence
  Description of Artificial Sequence: Synthetic oligonucleotide
  Sense strand starting at position 2202 of SEQ ID NO: 588008
gaagaauggauguaucgca

SEQ ID NO: 835243 - RNA, 19 nt, Artificial Sequence
  Description of Artificial Sequence: Synthetic oligonucleotide
  Antisense strand to SEQ ID NO: 835242
ugcgauacauccauucuuc

SEQ ID NO: 835244 - RNA, 19 nt, Artificial Sequence
  Description of Artificial Sequence: Synthetic oligonucleotide
  Sense strand starting at position 2229 of SEQ ID NO: 588008
gucacccuauguguaaauu

SEQ ID NO: 835245 - RNA, 19 nt, Artificial Sequence
  Description of Artificial Sequence: Synthetic oligonucleotide
  Antisense strand to SEQ ID NO: 835244
aauuuacacauagggugac

SEQ ID NO: 835246 - RNA, 19 nt, Artificial Sequence
  Description of Artificial Sequence: Synthetic oligonucleotide
  Sense strand starting at position 2230 of SEQ ID NO: 588008
ucacccuauguguaaauua

SEQ ID NO: 835247 - RNA, 19 nt, Artificial Sequence
  Description of Artificial Sequence: Synthetic oligonucleotide
  Antisense strand to SEQ ID NO: 835246
uaauuuacacauaggguga

SEQ ID NO: 835248 - RNA, 19 nt, Artificial Sequence
  Description of Artificial Sequence: Synthetic oligonucleotide
  Sense strand starting at position 2419 of SEQ ID NO: 588008
uuguauuugugggcuuguu

SEQ ID NO: 835249 - RNA, 19 nt, Artificial Sequence
  Description of Artificial Sequence: Synthetic oligonucleotide
  Antisense strand to SEQ ID NO: 835248
aacaagcccacaaauacaa

SEQ ID NO: 835250 - RNA, 19 nt, Artificial Sequence
  Description of Artificial Sequence: Synthetic oligonucleotide
  Sense strand starting at position 2428 of SEQ ID NO: 588008
ugggcuuguuacuuaugau

SEQ ID NO: 835251 - RNA, 19 nt, Artificial Sequence
  Description of Artificial Sequence: Synthetic oligonucleotide
  Antisense strand to SEQ ID NO: 835250
aucauaaguaacaagccca

SEQ ID NO: 835252 - RNA, 19 nt, Artificial Sequence
  Description of Artificial Sequence: Synthetic oligonucleotide
  Sense strand starting at position 2429 of SEQ ID NO: 588008
gggcuuguuacuuaugaua

SEQ ID NO: 835253 - RNA, 19 nt, Artificial Sequence
  Description of Artificial Sequence: Synthetic oligonucleotide
  Antisense strand to SEQ ID NO: 835252
uaucauaaguaacaagccc

SEQ ID NO: 835254 - RNA, 19 nt, Artificial Sequence
  Description of Artificial Sequence: Synthetic oligonucleotide
  Sense strand starting at position 2532 of SEQ ID NO: 588008
uccguuguccaacugugua

SEQ ID NO: 835255 - RNA, 19 nt, Artificial Sequence
  Description of Artificial Sequence: Synthetic oligonucleotide
  Antisense strand to SEQ ID NO: 835254
uacacaguuggacaacgga

SEQ ID NO: 835256 - RNA, 19 nt, Artificial Sequence
  Description of Artificial Sequence: Synthetic oligonucleotide
  Sense strand starting at position 2606 of SEQ ID NO: 588008
ggaguugcaguguugcgau

SEQ ID NO: 835257 - RNA, 19 nt, Artificial Sequence
  Description of Artificial Sequence: Synthetic oligonucleotide
  Antisense strand to SEQ ID NO: 835256
aucgcaacacugcaacucc

SEQ ID NO: 835258 - RNA, 19 nt, Artificial Sequence
  Description of Artificial Sequence: Synthetic oligonucleotide
  Sense strand starting at position 2656 of SEQ ID NO: 588008
ucgagagauuguccuaccu

SEQ ID NO: 835259 - RNA, 19 nt, Artificial Sequence
  Description of Artificial Sequence: Synthetic oligonucleotide
  Antisense strand to SEQ ID NO: 835258
agguaggacaaucucucga

SEQ ID NO: 835260 - RNA, 19 nt, Artificial Sequence
  Description of Artificial Sequence: Synthetic oligonucleotide
  Sense strand starting at position 2731 of SEQ ID NO: 588008
guauaaauauuggcaagga

SEQ ID NO: 835261 - RNA, 19 nt, Artificial Sequence
  Description of Artificial Sequence: Synthetic oligonucleotide
  Antisense strand to SEQ ID NO: 835260
uccuugccaauauuuauac

SEQ ID NO: 835262 - RNA, 19 nt, Artificial Sequence
  Description of Artificial Sequence: Synthetic oligonucleotide
  Sense strand starting at position 2875 of SEQ ID NO: 588008
gagauaccugcgcagguuu

SEQ ID NO: 835263 - RNA, 19 nt, Artificial Sequence
  Description of Artificial Sequence: Synthetic oligonucleotide
  Antisense strand to SEQ ID NO: 835262
aaaccugcgcagguaucuc

SEQ ID NO: 835264 - RNA, 19 nt, Artificial Sequence
  Description of Artificial Sequence: Synthetic oligonucleotide
  Sense strand starting at position 2901 of SEQ ID NO: 588008
ggauauguugugggaugcu

SEQ ID NO: 835265 - RNA, 19 nt, Artificial Sequence
  Description of Artificial Sequence: Synthetic oligonucleotide
  Antisense strand to SEQ ID NO: 835264
agcaucccacaacauaucc

SEQ ID NO: 835266 - RNA, 19 nt, Artificial Sequence
  Description of Artificial Sequence: Synthetic oligonucleotide
  Sense strand starting at position 3132 of SEQ ID NO: 588008
aaauucuagcgucaaggua

SEQ ID NO: 835267 - RNA, 19 nt, Artificial Sequence
  Description of Artificial Sequence: Synthetic oligonucleotide
  Antisense strand to SEQ ID NO: 835266
uaccuugacgcuagaauuu

SEQ ID NO: 835268 - RNA, 19 nt, Artificial Sequence
  Description of Artificial Sequence: Synthetic oligonucleotide
  Sense strand starting at position 153 of SEQ ID NO: 588009
ggaagacaguuuguuauau

SEQ ID NO: 835269 - RNA, 19 nt, Artificial Sequence
  Description of Artificial Sequence: Synthetic oligonucleotide
  Antisense strand to SEQ ID NO: 835268
auauaacaaacugucuucc

SEQ ID NO: 835270 - RNA, 19 nt, Artificial Sequence
  Description of Artificial Sequence: Synthetic oligonucleotide
  Sense strand starting at position 154 of SEQ ID NO: 588009
gaagacaguuuguuauauu

SEQ ID NO: 835271 - RNA, 19 nt, Artificial Sequence
  Description of Artificial Sequence: Synthetic oligonucleotide
  Antisense strand to SEQ ID NO: 835270
aauauaacaaacugucuuc

SEQ ID NO: 835272 - RNA, 19 nt, Artificial Sequence
  Description of Artificial Sequence: Synthetic oligonucleotide
  Sense strand starting at position 479 of SEQ ID NO: 588009
gaguaagauggauguauac

SEQ ID NO: 835273 - RNA, 19 nt, Artificial Sequence
  Description of Artificial Sequence: Synthetic oligonucleotide
  Antisense strand to SEQ ID NO: 835272
guauacauccaucuuacuc

SEQ ID NO: 835274 - RNA, 19 nt, Artificial Sequence
  Description of Artificial Sequence: Synthetic oligonucleotide
  Sense strand starting at position 621 of SEQ ID NO: 588009
cuggguaugugacugacaa

SEQ ID NO: 835275 - RNA, 19 nt, Artificial Sequence
  Description of Artificial Sequence: Synthetic oligonucleotide
  Antisense strand to SEQ ID NO: 835274
uugucagucacauacccag

SEQ ID NO: 835276 - RNA, 19 nt, Artificial Sequence
  Description of Artificial Sequence: Synthetic oligonucleotide
  Sense strand starting at position 622 of SEQ ID NO: 588009
uggguaugugacugacaaa

SEQ ID NO: 835277 - RNA, 19 nt, Artificial Sequence
  Description of Artificial Sequence: Synthetic oligonucleotide
  Antisense strand to SEQ ID NO: 835276
uuugucagucacauaccca

SEQ ID NO: 835278 - RNA, 19 nt, Artificial Sequence
  Description of Artificial Sequence: Synthetic oligonucleotide
  Sense strand starting at position 637 of SEQ ID NO: 588009
caaacuaagguuugaggua

SEQ ID NO: 835279 - RNA, 19 nt, Artificial Sequence
  Description of Artificial Sequence: Synthetic oligonucleotide
  Antisense strand to SEQ ID NO: 835278
uaccucaaaccuuaguuug

SEQ ID NO: 835280 - RNA, 19 nt, Artificial Sequence
  Description of Artificial Sequence: Synthetic oligonucleotide
  Sense strand starting at position 715 of SEQ ID NO: 588009
uuguguuaccuagauuauu

SEQ ID NO: 835281 - RNA, 19 nt, Artificial Sequence
  Description of Artificial Sequence: Synthetic oligonucleotide
  Antisense strand to SEQ ID NO: 835280
aauaaucuagguaacacaa

SEQ ID NO: 835282 - RNA, 19 nt, Artificial Sequence
  Description of Artificial Sequence: Synthetic oligonucleotide
  Sense strand starting at position 1022 of SEQ ID NO: 588009
uguuaaacugguuaauguu

SEQ ID NO: 835283 - RNA, 19 nt, Artificial Sequence
  Description of Artificial Sequence: Synthetic oligonucleotide
  Antisense strand to SEQ ID NO: 835282
aacauuaaccaguuuaaca

SEQ ID NO: 835284 - RNA, 19 nt, Artificial Sequence
  Description of Artificial Sequence: Synthetic oligonucleotide
  Sense strand starting at position 1229 of SEQ ID NO: 588009
gaacuauacuggguugcuu

SEQ ID NO: 835285 - RNA, 19 nt, Artificial Sequence
  Description of Artificial Sequence: Synthetic oligonucleotide
  Antisense strand to SEQ ID NO: 835284
aagcaacccaguauaguuc

SEQ ID NO: 835286 - RNA, 19 nt, Artificial Sequence
  Description of Artificial Sequence: Synthetic oligonucleotide
  Sense strand starting at position 1251 of SEQ ID NO: 588009
ugucuugacacuuaagugu

SEQ ID NO: 835287 - RNA, 19 nt, Artificial Sequence
  Description of Artificial Sequence: Synthetic oligonucleotide
  Antisense strand to SEQ ID NO: 835286
acacuuaagugucaagaca

SEQ ID NO: 835288 - RNA, 19 nt, Artificial Sequence
  Description of Artificial Sequence: Synthetic oligonucleotide
  Sense strand starting at position 1260 of SEQ ID NO: 588009
acuuaaguguuacuaguaa

SEQ ID NO: 835289 - RNA, 19 nt, Artificial Sequence
  Description of Artificial Sequence: Synthetic oligonucleotide
  Antisense strand to SEQ ID NO: 835288
uuacuaguaacacuuaagu

SEQ ID NO: 835290 - RNA, 19 nt, Artificial Sequence
  Description of Artificial Sequence: Synthetic oligonucleotide
  Sense strand starting at position 1369 of SEQ ID NO: 588009
ugauaagucugagcuucca

SEQ ID NO: 835291 - RNA, 19 nt, Artificial Sequence
  Description of Artificial Sequence: Synthetic oligonucleotide
  Antisense strand to SEQ ID NO: 835290
uggaagcucagacuuauca

SEQ ID NO: 835292 - RNA, 19 nt, Artificial Sequence
  Description of Artificial Sequence: Synthetic oligonucleotide
  Sense strand starting at position 1460 of SEQ ID NO: 588009
guagguucaggagacucau

SEQ ID NO: 835293 - RNA, 19 nt, Artificial Sequence
  Description of Artificial Sequence: Synthetic oligonucleotide
  Antisense strand to SEQ ID NO: 835292
augagucuccugaaccuac

SEQ ID NO: 835294 - RNA, 19 nt, Artificial Sequence
  Description of Artificial Sequence: Synthetic oligonucleotide
  Sense strand starting at position 1486 of SEQ ID NO: 588009
aggaguucuccaugcuuga

SEQ ID NO: 835295 - RNA, 19 nt, Artificial Sequence
  Description of Artificial Sequence: Synthetic oligonucleotide
  Antisense strand to SEQ ID NO: 835294
ucaagcauggagaacuccu

SEQ ID NO: 835296 - RNA, 19 nt, Artificial Sequence
  Description of Artificial Sequence: Synthetic oligonucleotide
  Sense strand starting at position 1491 of SEQ ID NO: 588009
uucuccaugcuugagauca

SEQ ID NO: 835297 - RNA, 19 nt, Artificial Sequence
  Description of Artificial Sequence: Synthetic oligonucleotide
  Antisense strand to SEQ ID NO: 835296
ugaucucaagcauggagaa

SEQ ID NO: 835298 - RNA, 19 nt, Artificial Sequence
  Description of Artificial Sequence: Synthetic oligonucleotide
  Sense strand starting at position 2222 of SEQ ID NO: 588009
gagggaagccacugauguu

SEQ ID NO: 835299 - RNA, 19 nt, Artificial Sequence
  Description of Artificial Sequence: Synthetic oligonucleotide
  Antisense strand to SEQ ID NO: 835298
aacaucaguggcuucccuc

SEQ ID NO: 835300 - RNA, 19 nt, Artificial Sequence
  Description of Artificial Sequence: Synthetic oligonucleotide
  Sense strand starting at position 2259 of SEQ ID NO: 588009
ugucaaaguuaguugggau

SEQ ID NO: 835301 - RNA, 19 nt, Artificial Sequence
  Description of Artificial Sequence: Synthetic oligonucleotide
  Antisense strand to SEQ ID NO: 835300
aucccaacuaacuuugaca

SEQ ID NO: 835302 - RNA, 19 nt, Artificial Sequence
  Description of Artificial Sequence: Synthetic oligonucleotide
  Sense strand starting at position 2260 of SEQ ID NO: 588009
gucaaaguuaguugggaug

SEQ ID NO: 835303 - RNA, 19 nt, Artificial Sequence
  Description of Artificial Sequence: Synthetic oligonucleotide
  Antisense strand to SEQ ID NO: 835302
caucccaacuaacuuugac

SEQ ID NO: 835304 - RNA, 19 nt, Artificial Sequence
  Description of Artificial Sequence: Synthetic oligonucleotide
  Sense strand starting at position 2480 of SEQ ID NO: 588009
acuggauuacagcaugcau

SEQ ID NO: 835305 - RNA, 19 nt, Artificial Sequence
  Description of Artificial Sequence: Synthetic oligonucleotide
  Antisense strand to SEQ ID NO: 835304
augcaugcuguaauccagu

SEQ ID NO: 835306 - RNA, 19 nt, Artificial Sequence
  Description of Artificial Sequence: Synthetic oligonucleotide
  Sense strand starting at position 2832 of SEQ ID NO: 588009
augacuggccuccauauau

SEQ ID NO: 835307 - RNA, 19 nt, Artificial Sequence
  Description of Artificial Sequence: Synthetic oligonucleotide
  Antisense strand to SEQ ID NO: 835306
auauauggaggccagucau

SEQ ID NO: 835308 - RNA, 19 nt, Artificial Sequence
  Description of Artificial Sequence: Synthetic oligonucleotide
  Sense strand starting at position 2935 of SEQ ID NO: 588009
cuguuauaugauugagucu

SEQ ID NO: 835309 - RNA, 19 nt, Artificial Sequence
  Description of Artificial Sequence: Synthetic oligonucleotide
  Antisense strand to SEQ ID NO: 835308
agacucaaucauauaacag

SEQ ID NO: 835310 - RNA, 19 nt, Artificial Sequence
  Description of Artificial Sequence: Synthetic oligonucleotide
  Sense strand starting at position 2938 of SEQ ID NO: 588009
uuauaugauugagucuaug

SEQ ID NO: 835311 - RNA, 19 nt, Artificial Sequence
  Description of Artificial Sequence: Synthetic oligonucleotide
  Antisense strand to SEQ ID NO: 835310
cauagacucaaucauauaa

SEQ ID NO: 835312 - RNA, 19 nt, Artificial Sequence
  Description of Artificial Sequence: Synthetic oligonucleotide
  Sense strand starting at position 3044 of SEQ ID NO: 588009
ggaacuagccuagaauugu

SEQ ID NO: 835313 - RNA, 19 nt, Artificial Sequence
  Description of Artificial Sequence: Synthetic oligonucleotide
  Antisense strand to SEQ ID NO: 835312
acaauucuaggcuaguucc

SEQ ID NO: 835314 - RNA, 19 nt, Artificial Sequence
  Description of Artificial Sequence: Synthetic oligonucleotide
  Sense strand starting at position 3086 of SEQ ID NO: 588009
augaaaccguuucuuauua

SEQ ID NO: 835315 - RNA, 19 nt, Artificial Sequence
  Description of Artificial Sequence: Synthetic oligonucleotide
  Antisense strand to SEQ ID NO: 835314
uaauaagaaacgguuucau

SEQ ID NO: 835316 - RNA, 19 nt, Artificial Sequence
  Description of Artificial Sequence: Synthetic oligonucleotide
  Sense strand starting at position 3087 of SEQ ID NO: 588009
ugaaaccguuucuuauuaa

SEQ ID NO: 835317 - RNA, 19 nt, Artificial Sequence
  Description of Artificial Sequence: Synthetic oligonucleotide
  Antisense strand to SEQ ID NO: 835316
uuaauaagaaacgguuuca

SEQ ID NO: 835318 - RNA, 19 nt, Artificial Sequence
  Description of Artificial Sequence: Synthetic oligonucleotide
  Sense strand starting at position 3222 of SEQ ID NO: 588009
aagagugauugggugguua

SEQ ID NO: 835319 - RNA, 19 nt, Artificial Sequence
  Description of Artificial Sequence: Synthetic oligonucleotide
  Antisense strand to SEQ ID NO: 835318
uaaccacccaaucacucuu

SEQ ID NO: 835320 - RNA, 19 nt, Artificial Sequence
  Description of Artificial Sequence: Synthetic oligonucleotide
  Sense strand starting at position 3224 of SEQ ID NO: 588009
gagugauugggugguuacu

SEQ ID NO: 835321 - RNA, 19 nt, Artificial Sequence
  Description of Artificial Sequence: Synthetic oligonucleotide
  Antisense strand to SEQ ID NO: 835320
aguaaccacccaaucacuc

SEQ ID NO: 835322 - RNA, 19 nt, Artificial Sequence
  Description of Artificial Sequence: Synthetic oligonucleotide
  Sense strand starting at position 3243 of SEQ ID NO: 588009
guguccagacccuauucua

SEQ ID NO: 835323 - RNA, 19 nt, Artificial Sequence
  Description of Artificial Sequence: Synthetic oligonucleotide
  Antisense strand to SEQ ID NO: 835322
uagaauagggucuggacac

SEQ ID NO: 835324 - RNA, 19 nt, Artificial Sequence
  Description of Artificial Sequence: Synthetic oligonucleotide
  Sense strand starting at position 3251 of SEQ ID NO: 588009
acccuauucuagguacuga

SEQ ID NO: 835325 - RNA, 19 nt, Artificial Sequence
  Description of Artificial Sequence: Synthetic oligonucleotide
  Antisense strand to SEQ ID NO: 835324
ucaguaccuagaauagggu

SEQ ID NO: 835326 - RNA, 19 nt, Artificial Sequence
  Description of Artificial Sequence: Synthetic oligonucleotide
  Sense strand starting at position 3269 of SEQ ID NO: 588009
agggcacuccugugaacaa

SEQ ID NO: 835327 - RNA, 19 nt, Artificial Sequence
  Description of Artificial Sequence: Synthetic oligonucleotide
  Antisense strand to SEQ ID NO: 835326
uuguucacaggagugcccu

SEQ ID NO: 835328 - RNA, 19 nt, Artificial Sequence
  Description of Artificial Sequence: Synthetic oligonucleotide
  Sense strand starting at position 3339 of SEQ ID NO: 588009
auggaugauuaacaagaua

SEQ ID NO: 835329 - RNA, 19 nt, Artificial Sequence
  Description of Artificial Sequence: Synthetic oligonucleotide
  Antisense strand to SEQ ID NO: 835328
uaucuuguuaaucauccau

SEQ ID NO: 835330 - RNA, 19 nt, Artificial Sequence
  Description of Artificial Sequence: Synthetic oligonucleotide
  Sense strand starting at position 3373 of SEQ ID NO: 588009
ugauauaagaaauggcagu

SEQ ID NO: 835331 - RNA, 19 nt, Artificial Sequence
  Description of Artificial Sequence: Synthetic oligonucleotide
  Antisense strand to SEQ ID NO: 835330
acugccauuucuuauauca

SEQ ID NO: 835332 - RNA, 19 nt, Artificial Sequence
  Description of Artificial Sequence: Synthetic oligonucleotide
  Sense strand starting at position 3432 of SEQ ID NO: 588009
uacagugacguuggaauaa

SEQ ID NO: 835333 - RNA, 19 nt, Artificial Sequence
  Description of Artificial Sequence: Synthetic oligonucleotide
  Antisense strand to SEQ ID NO: 835332
uuauuccaacgucacugua

SEQ ID NO: 835334 - RNA, 19 nt, Artificial Sequence
  Description of Artificial Sequence: Synthetic oligonucleotide
  Sense strand starting at position 3517 of SEQ ID NO: 588009
uucuguucugagggagaug

SEQ ID NO: 835335 - RNA, 19 nt, Artificial Sequence
  Description of Artificial Sequence: Synthetic oligonucleotide
  Antisense strand to SEQ ID NO: 835334
caucucccucagaacagaa

SEQ ID NO: 835336 - RNA, 19 nt, Artificial Sequence
  Description of Artificial Sequence: Synthetic oligonucleotide
  Sense strand starting at position 3640 of SEQ ID NO: 588009
ugaguaaagguuuacaagu

SEQ ID NO: 835337 - RNA, 19 nt, Artificial Sequence
  Description of Artificial Sequence: Synthetic oligonucleotide
  Antisense strand to SEQ ID NO: 835336
acuuguaaaccuuuacuca

SEQ ID NO: 835338 - RNA, 19 nt, Artificial Sequence
  Description of Artificial Sequence: Synthetic oligonucleotide
  Sense strand starting at position 3650 of SEQ ID NO: 588009
uuuacaagucaaugugaca

SEQ ID NO: 835339 - RNA, 19 nt, Artificial Sequence
  Description of Artificial Sequence: Synthetic oligonucleotide
  Antisense strand to SEQ ID NO: 835338
ugucacauugacuuguaaa

SEQ ID NO: 835340 - RNA, 19 nt, Artificial Sequence
  Description of Artificial Sequence: Synthetic oligonucleotide
  Sense strand starting at position 3777 of SEQ ID NO: 588009
uagugaaugcacugggaau

SEQ ID NO: 835341 - RNA, 19 nt, Artificial Sequence
  Description of Artificial Sequence: Synthetic oligonucleotide
  Antisense strand to SEQ ID NO: 835340
auucccagugcauucacua

SEQ ID NO: 835342 - RNA, 19 nt, Artificial Sequence
  Description of Artificial Sequence: Synthetic oligonucleotide
  Sense strand starting at position 3789 of SEQ ID NO: 588009
ugggaauguuugccaacca

SEQ ID NO: 835343 - RNA, 19 nt, Artificial Sequence
  Description of Artificial Sequence: Synthetic oligonucleotide
  Antisense strand to SEQ ID NO: 835342
ugguuggcaaacauuccca

SEQ ID NO: 835344 - RNA, 19 nt, Artificial Sequence
  Description of Artificial Sequence: Synthetic oligonucleotide
  Sense strand starting at position 3900 of SEQ ID NO: 588009
agccuuucuucucuagaag

SEQ ID NO: 835345 - RNA, 19 nt, Artificial Sequence
  Description of Artificial Sequence: Synthetic oligonucleotide
  Antisense strand to SEQ ID NO: 835344
cuucuagagaagaaaggcu

SEQ ID NO: 835346 - RNA, 19 nt, Artificial Sequence
  Description of Artificial Sequence: Synthetic oligonucleotide
  Sense strand starting at position 3901 of SEQ ID NO: 588009
gccuuucuucucuagaagu

SEQ ID NO: 835347 - RNA, 19 nt, Artificial Sequence
  Description of Artificial Sequence: Synthetic oligonucleotide
  Antisense strand to SEQ ID NO: 835346
acuucuagagaagaaaggc

SEQ ID NO: 835348 - RNA, 19 nt, Artificial Sequence
  Description of Artificial Sequence: Synthetic oligonucleotide
  Sense strand starting at position 89 of SEQ ID NO: 588010
ugauuaaggucagucuuaa

SEQ ID NO: 835349 - RNA, 19 nt, Artificial Sequence
  Description of Artificial Sequence: Synthetic oligonucleotide
  Antisense strand to SEQ ID NO: 835348
uuaagacugaccuuaauca

SEQ ID NO: 835350 - RNA, 19 nt, Artificial Sequence
  Description of Artificial Sequence: Synthetic oligonucleotide
  Sense strand starting at position 148 of SEQ ID NO: 588010
gguccuagggaucguccua

SEQ ID NO: 835351 - RNA, 19 nt, Artificial Sequence
  Description of Artificial Sequence: Synthetic oligonucleotide
  Antisense strand to SEQ ID NO: 835350
uaggacgaucccuaggacc

SEQ ID NO: 835352 - RNA, 19 nt, Artificial Sequence
  Description of Artificial Sequence: Synthetic oligonucleotide
  Sense strand starting at position 155 of SEQ ID NO: 588010
gggaucguccuaggagaua

SEQ ID NO: 835353 - RNA, 19 nt, Artificial Sequence
  Description of Artificial Sequence: Synthetic oligonucleotide
  Antisense strand to SEQ ID NO: 835352
uaucuccuaggacgauccc

SEQ ID NO: 835354 - RNA, 19 nt, Artificial Sequence
  Description of Artificial Sequence: Synthetic oligonucleotide
  Sense strand starting at position 220 of SEQ ID NO: 588010
uugcuuugguaauccacaa

SEQ ID NO: 835355 - RNA, 19 nt, Artificial Sequence
  Description of Artificial Sequence: Synthetic oligonucleotide
  Antisense strand to SEQ ID NO: 835354
uuguggauuaccaaagcaa

SEQ ID NO: 835356 - RNA, 19 nt, Artificial Sequence
  Description of Artificial Sequence: Synthetic oligonucleotide
  Sense strand starting at position 371 of SEQ ID NO: 588010
guuuaacagugguucucua

SEQ ID NO: 835357 - RNA, 19 nt, Artificial Sequence
  Description of Artificial Sequence: Synthetic oligonucleotide
  Antisense strand to SEQ ID NO: 835356
uagagaaccacuguuaaac

SEQ ID NO: 835358 - RNA, 19 nt, Artificial Sequence
  Description of Artificial Sequence: Synthetic oligonucleotide
  Sense strand starting at position 619 of SEQ ID NO: 588010
uguguagguguacaacuua

SEQ ID NO: 835359 - RNA, 19 nt, Artificial Sequence
  Description of Artificial Sequence: Synthetic oligonucleotide
  Antisense strand to SEQ ID NO: 835358
uaaguuguacaccuacaca

SEQ ID NO: 835360 - RNA, 19 nt, Artificial Sequence
  Description of Artificial Sequence: Synthetic oligonucleotide
  Sense strand starting at position 655 of SEQ ID NO: 588010
ucaauuauguaagcagaua

SEQ ID NO: 835361 - RNA, 19 nt, Artificial Sequence
  Description of Artificial Sequence: Synthetic oligonucleotide
  Antisense strand to SEQ ID NO: 835360
uaucugcuuacauaauuga

SEQ ID NO: 835362 - RNA, 19 nt, Artificial Sequence
  Description of Artificial Sequence: Synthetic oligonucleotide
  Sense strand starting at position 706 of SEQ ID NO: 588010
cuagucacauucccgaaau

SEQ ID NO: 835363 - RNA, 19 nt, Artificial Sequence
  Description of Artificial Sequence: Synthetic oligonucleotide
  Antisense strand to SEQ ID NO: 835362
auuucgggaaugugacuag

SEQ ID NO: 835364 - RNA, 19 nt, Artificial Sequence
  Description of Artificial Sequence: Synthetic oligonucleotide
  Sense strand starting at position 835 of SEQ ID NO: 588010
aaaguuaaugguggauuaa

SEQ ID NO: 835365 - RNA, 19 nt, Artificial Sequence
  Description of Artificial Sequence: Synthetic oligonucleotide
  Antisense strand to SEQ ID NO: 835364
uuaauccaccauuaacuuu

SEQ ID NO: 835366 - RNA, 19 nt, Artificial Sequence
  Description of Artificial Sequence: Synthetic oligonucleotide
  Sense strand starting at position 897 of SEQ ID NO: 588010
aaauaaauggcagguuauu

SEQ ID NO: 835367 - RNA, 19 nt, Artificial Sequence
  Description of Artificial Sequence: Synthetic oligonucleotide
  Antisense strand to SEQ ID NO: 835366
aauaaccugccauuuauuu

SEQ ID NO: 835368 - RNA, 19 nt, Artificial Sequence
  Description of Artificial Sequence: Synthetic oligonucleotide
  Sense strand starting at position 1014 of SEQ ID NO: 588010
gcaagcuuauucucacaag

SEQ ID NO: 835369 - RNA, 19 nt, Artificial Sequence
  Description of Artificial Sequence: Synthetic oligonucleotide
  Antisense strand to SEQ ID NO: 835368
cuugugagaauaagcuugc

SEQ ID NO: 835370 - RNA, 19 nt, Artificial Sequence
  Description of Artificial Sequence: Synthetic oligonucleotide
  Sense strand starting at position 1105 of SEQ ID NO: 588010
ugcuucuugaaauggguaa

SEQ ID NO: 835371 - RNA, 19 nt, Artificial Sequence
  Description of Artificial Sequence: Synthetic oligonucleotide
  Antisense strand to SEQ ID NO: 835370
uuacccauuucaagaagca

SEQ ID NO: 835372 - RNA, 19 nt, Artificial Sequence
  Description of Artificial Sequence: Synthetic oligonucleotide
  Sense strand starting at position 1106 of SEQ ID NO: 588010
gcuucuugaaauggguaau

SEQ ID NO: 835373 - RNA, 19 nt, Artificial Sequence
  Description of Artificial Sequence: Synthetic oligonucleotide
  Antisense strand to SEQ ID NO: 835372
auuacccauuucaagaagc

SEQ ID NO: 835374 - RNA, 19 nt, Artificial Sequence
  Description of Artificial Sequence: Synthetic oligonucleotide
  Sense strand starting at position 1222 of SEQ ID NO: 588010
gcaccauugcucuaagcug

SEQ ID NO: 835375 - RNA, 19 nt, Artificial Sequence
  Description of Artificial Sequence: Synthetic oligonucleotide
  Antisense strand to SEQ ID NO: 835374
cagcuuagagcaauggugc

SEQ ID NO: 835376 - RNA, 19 nt, Artificial Sequence
  Description of Artificial Sequence: Synthetic oligonucleotide
  Sense strand starting at position 1239 of SEQ ID NO: 588010
ugggcuuccagcugggaau

SEQ ID NO: 835377 - RNA, 19 nt, Artificial Sequence
  Description of Artificial Sequence: Synthetic oligonucleotide
  Antisense strand to SEQ ID NO: 835376
auucccagcuggaagccca

SEQ ID NO: 835378 - RNA, 19 nt, Artificial Sequence
  Description of Artificial Sequence: Synthetic oligonucleotide
  Sense strand starting at position 1240 of SEQ ID NO: 588010
gggcuuccagcugggaaua

SEQ ID NO: 835379 - RNA, 19 nt, Artificial Sequence
  Description of Artificial Sequence: Synthetic oligonucleotide
  Antisense strand to SEQ ID NO: 835378
uauucccagcuggaagccc

SEQ ID NO: 835380 - RNA, 19 nt, Artificial Sequence
  Description of Artificial Sequence: Synthetic oligonucleotide
  Sense strand starting at position 1241 of SEQ ID NO: 588010
ggcuuccagcugggaauaa

SEQ ID NO: 835381 - RNA, 19 nt, Artificial Sequence
  Description of Artificial Sequence: Synthetic oligonucleotide
  Antisense strand to SEQ ID NO: 835380
uuauucccagcuggaagcc

SEQ ID NO: 835382 - RNA, 19 nt, Artificial Sequence
  Description of Artificial Sequence: Synthetic oligonucleotide
  Sense strand starting at position 2031 of SEQ ID NO: 588010
uggguaguccagcacuuua

SEQ ID NO: 835383 - RNA, 19 nt, Artificial Sequence
  Description of Artificial Sequence: Synthetic oligonucleotide
  Antisense strand to SEQ ID NO: 835382
uaaagugcuggacuaccca

SEQ ID NO: 835384 - RNA, 19 nt, Artificial Sequence
  Description of Artificial Sequence: Synthetic oligonucleotide
  Sense strand starting at position 2075 of SEQ ID NO: 588010
gaaugccuucuuggaugau

SEQ ID NO: 835385 - RNA, 19 nt, Artificial Sequence
  Description of Artificial Sequence: Synthetic oligonucleotide
  Antisense strand to SEQ ID NO: 835384
aucauccaagaaggcauuc

SEQ ID NO: 835386 - RNA, 19 nt, Artificial Sequence
  Description of Artificial Sequence: Synthetic oligonucleotide
  Sense strand starting at position 2078 of SEQ ID NO: 588010
ugccuucuuggaugaugaa

SEQ ID NO: 835387 - RNA, 19 nt, Artificial Sequence
  Description of Artificial Sequence: Synthetic oligonucleotide
  Antisense strand to SEQ ID NO: 835386
uucaucauccaagaaggca

SEQ ID NO: 835388 - RNA, 19 nt, Artificial Sequence
  Description of Artificial Sequence: Synthetic oligonucleotide
  Sense strand starting at position 2157 of SEQ ID NO: 588010
ugagaucauuauuaggaac

SEQ ID NO: 835389 - RNA, 19 nt, Artificial Sequence
  Description of Artificial Sequence: Synthetic oligonucleotide
  Antisense strand to SEQ ID NO: 835388
guuccuaauaaugaucuca

SEQ ID NO: 835390 - RNA, 19 nt, Artificial Sequence
  Description of Artificial Sequence: Synthetic oligonucleotide
  Sense strand starting at position 2329 of SEQ ID NO: 588010
gcauccauggagugcauaa

SEQ ID NO: 835391 - RNA, 19 nt, Artificial Sequence
  Description of Artificial Sequence: Synthetic oligonucleotide
  Antisense strand to SEQ ID NO: 835390
uuaugcacuccauggaugc

SEQ ID NO: 835392 - RNA, 19 nt, Artificial Sequence
  Description of Artificial Sequence: Synthetic oligonucleotide
  Sense strand starting at position 2792 of SEQ ID NO: 588010
guucuaaugcaucaugguu

SEQ ID NO: 835393 - RNA, 19 nt, Artificial Sequence
  Description of Artificial Sequence: Synthetic oligonucleotide
  Antisense strand to SEQ ID NO: 835392
aaccaugaugcauuagaac

SEQ ID NO: 835394 - RNA, 19 nt, Artificial Sequence
  Description of Artificial Sequence: Synthetic oligonucleotide
  Sense strand starting at position 2815 of SEQ ID NO: 588010
uuacucuaguaucuagaga

SEQ ID NO: 835395 - RNA, 19 nt, Artificial Sequence
  Description of Artificial Sequence: Synthetic oligonucleotide
  Antisense strand to SEQ ID NO: 835394
ucucuagauacuagaguaa

SEQ ID NO: 835396 - RNA, 19 nt, Artificial Sequence
  Description of Artificial Sequence: Synthetic oligonucleotide
  Sense strand starting at position 2839 of SEQ ID NO: 588010
ucacuugugccaugaacac

SEQ ID NO: 835397 - RNA, 19 nt, Artificial Sequence
  Description of Artificial Sequence: Synthetic oligonucleotide
  Antisense strand to SEQ ID NO: 835396
guguucauggcacaaguga

SEQ ID NO: 835398 - RNA, 19 nt, Artificial Sequence
  Description of Artificial Sequence: Synthetic oligonucleotide
  Sense strand starting at position 2907 of SEQ ID NO: 588010
uuucuaaacgcaugaaauu

SEQ ID NO: 835399 - RNA, 19 nt, Artificial Sequence
  Description of Artificial Sequence: Synthetic oligonucleotide
  Antisense strand to SEQ ID NO: 835398
aauuucaugcguuuagaaa

SEQ ID NO: 835400 - RNA, 19 nt, Artificial Sequence
  Description of Artificial Sequence: Synthetic oligonucleotide
  Sense strand starting at position 2908 of SEQ ID NO: 588010
uucuaaacgcaugaaauua

SEQ ID NO: 835401 - RNA, 19 nt, Artificial Sequence
  Description of Artificial Sequence: Synthetic oligonucleotide
  Antisense strand to SEQ ID NO: 835400
uaauuucaugcguuuagaa

SEQ ID NO: 835402 - RNA, 19 nt, Artificial Sequence
  Description of Artificial Sequence: Synthetic oligonucleotide
  Sense strand starting at position 2967 of SEQ ID NO: 588010
aacccaaugcuuugggaga

SEQ ID NO: 835403 - RNA, 19 nt, Artificial Sequence
  Description of Artificial Sequence: Synthetic oligonucleotide
  Antisense strand to SEQ ID NO: 835402
ucucccaaagcauuggguu

SEQ ID NO: 835404 - RNA, 19 nt, Artificial Sequence
  Description of Artificial Sequence: Synthetic oligonucleotide
  Sense strand starting at position 2995 of SEQ ID NO: 588010
gaggcuuguguccaagagu

SEQ ID NO: 835405 - RNA, 19 nt, Artificial Sequence
  Description of Artificial Sequence: Synthetic oligonucleotide
  Antisense strand to SEQ ID NO: 835404
acucuuggacacaagccuc

SEQ ID NO: 835406 - RNA, 19 nt, Artificial Sequence
  Description of Artificial Sequence: Synthetic oligonucleotide
  Sense strand starting at position 3100 of SEQ ID NO: 588010
aguccuagcuauuccaaga

SEQ ID NO: 835407 - RNA, 19 nt, Artificial Sequence
  Description of Artificial Sequence: Synthetic oligonucleotide
  Antisense strand to SEQ ID NO: 835406
ucuuggaauagcuaggacu

SEQ ID NO: 835408 - RNA, 19 nt, Artificial Sequence
  Description of Artificial Sequence: Synthetic oligonucleotide
  Sense strand starting at position 3163 of SEQ ID NO: 588010
gugaguuccgaucaugcua

SEQ ID NO: 835409 - RNA, 19 nt, Artificial Sequence
  Description of Artificial Sequence: Synthetic oligonucleotide
  Antisense strand to SEQ ID NO: 835408
uagcaugaucggaacucac

SEQ ID NO: 835410 - RNA, 19 nt, Artificial Sequence
  Description of Artificial Sequence: Synthetic oligonucleotide
  Sense strand starting at position 3343 of SEQ ID NO: 588010
guuguagguacugauaaua

SEQ ID NO: 835411 - RNA, 19 nt, Artificial Sequence
  Description of Artificial Sequence: Synthetic oligonucleotide
  Antisense strand to SEQ ID NO: 835410
uauuaucaguaccuacaac

SEQ ID NO: 835412 - RNA, 19 nt, Artificial Sequence
  Description of Artificial Sequence: Synthetic oligonucleotide
  Sense strand starting at position 3370 of SEQ ID NO: 588010
guuuguugccugccuuuau

SEQ ID NO: 835413 - RNA, 19 nt, Artificial Sequence
  Description of Artificial Sequence: Synthetic oligonucleotide
  Antisense strand to SEQ ID NO: 835412
auaaaggcaggcaacaaac

SEQ ID NO: 835414 - RNA, 19 nt, Artificial Sequence
  Description of Artificial Sequence: Synthetic oligonucleotide
  Sense strand starting at position 3609 of SEQ ID NO: 588010
ugcuacgaugccuuuguua

SEQ ID NO: 835415 - RNA, 19 nt, Artificial Sequence
  Description of Artificial Sequence: Synthetic oligonucleotide
  Antisense strand to SEQ ID NO: 835414
uaacaaaggcaucguagca

SEQ ID NO: 835416 - RNA, 19 nt, Artificial Sequence
  Description of Artificial Sequence: Synthetic oligonucleotide
  Sense strand starting at position 3612 of SEQ ID NO: 588010
uacgaugccuuuguuaaag

SEQ ID NO: 835417 - RNA, 19 nt, Artificial Sequence
  Description of Artificial Sequence: Synthetic oligonucleotide
  Antisense strand to SEQ ID NO: 835416
cuuuaacaaaggcaucgua

SEQ ID NO: 835418 - RNA, 19 nt, Artificial Sequence
  Description of Artificial Sequence: Synthetic oligonucleotide
  Sense strand starting at position 3899 of SEQ ID NO: 588010
ugccuuauuuggucauggu

SEQ ID NO: 835419 - RNA, 19 nt, Artificial Sequence
  Description of Artificial Sequence: Synthetic oligonucleotide
  Antisense strand to SEQ ID NO: 835418
accaugaccaaauaaggca

SEQ ID NO: 835420 - RNA, 19 nt, Artificial Sequence
  Description of Artificial Sequence: Synthetic oligonucleotide
  Sense strand starting at position 3903 of SEQ ID NO: 588010
uuauuuggucaugguguaa

SEQ ID NO: 835421 - RNA, 19 nt, Artificial Sequence
  Description of Artificial Sequence: Synthetic oligonucleotide
  Antisense strand to SEQ ID NO: 835420
uuacaccaugaccaaauaa

SEQ ID NO: 835422 - RNA, 19 nt, Artificial Sequence
  Description of Artificial Sequence: Synthetic oligonucleotide
  Sense strand starting at position 3907 of SEQ ID NO: 588010
uuggucaugguguaauaag

SEQ ID NO: 835423 - RNA, 19 nt, Artificial Sequence
  Description of Artificial Sequence: Synthetic oligonucleotide
  Antisense strand to SEQ ID NO: 835422
cuuauuacaccaugaccaa

SEQ ID NO: 835424 - RNA, 19 nt, Artificial Sequence
  Description of Artificial Sequence: Synthetic oligonucleotide
  Sense strand starting at position 3952 of SEQ ID NO: 588010
augggaggucccuaguugu

SEQ ID NO: 835425 - RNA, 19 nt, Artificial Sequence
  Description of Artificial Sequence: Synthetic oligonucleotide
  Antisense strand to SEQ ID NO: 835424
acaacuagggaccucccau

SEQ ID NO: 835426 - RNA, 19 nt, Artificial Sequence
  Description of Artificial Sequence: Synthetic oligonucleotide
  Sense strand starting at position 3955 of SEQ ID NO: 588010
ggaggucccuaguuguaua

SEQ ID NO: 835427 - RNA, 19 nt, Artificial Sequence
  Description of Artificial Sequence: Synthetic oligonucleotide
  Antisense strand to SEQ ID NO: 835426
uauacaacuagggaccucc

SEQ ID NO: 835428 - RNA, 19 nt, Artificial Sequence
  Description of Artificial Sequence: Synthetic oligonucleotide
  Sense strand starting at position 348 of SEQ ID NO: 588011
cauguauaguguuaugaaa

SEQ ID NO: 835429 - RNA, 19 nt, Artificial Sequence
  Description of Artificial Sequence: Synthetic oligonucleotide
  Antisense strand to SEQ ID NO: 835428
uuucauaacacuauacaug

SEQ ID NO: 835430 - RNA, 19 nt, Artificial Sequence
  Description of Artificial Sequence: Synthetic oligonucleotide
  Sense strand starting at position 470 of SEQ ID NO: 588011
gcacaacuguuauaaagau

SEQ ID NO: 835431 - RNA, 19 nt, Artificial Sequence
  Description of Artificial Sequence: Synthetic oligonucleotide
  Antisense strand to SEQ ID NO: 835430
aucuuuauaacaguugugc

SEQ ID NO: 835432 - RNA, 19 nt, Artificial Sequence
  Description of Artificial Sequence: Synthetic oligonucleotide
  Sense strand starting at position 494 of SEQ ID NO: 588011
cccguuaacgagcacagau

SEQ ID NO: 835433 - RNA, 19 nt, Artificial Sequence
  Description of Artificial Sequence: Synthetic oligonucleotide
  Antisense strand to SEQ ID NO: 835432
aucugugcucguuaacggg

SEQ ID NO: 835434 - RNA, 19 nt, Artificial Sequence
  Description of Artificial Sequence: Synthetic oligonucleotide
  Sense strand starting at position 496 of SEQ ID NO: 588011
cguuaacgagcacagauua

SEQ ID NO: 835435 - RNA, 19 nt, Artificial Sequence
  Description of Artificial Sequence: Synthetic oligonucleotide
  Antisense strand to SEQ ID NO: 835434
uaaucugugcucguuaacg

SEQ ID NO: 835436 - RNA, 19 nt, Artificial Sequence
  Description of Artificial Sequence: Synthetic oligonucleotide
  Sense strand starting at position 528 of SEQ ID NO: 588011
acaguaaagucauaacacu

SEQ ID NO: 835437 - RNA, 19 nt, Artificial Sequence
  Description of Artificial Sequence: Synthetic oligonucleotide
  Antisense strand to SEQ ID NO: 835436
aguguuaugacuuuacugu

SEQ ID NO: 835438 - RNA, 19 nt, Artificial Sequence
  Description of Artificial Sequence: Synthetic oligonucleotide
  Sense strand starting at position 697 of SEQ ID NO: 588011
cagaauguauccugaggua

SEQ ID NO: 835439 - RNA, 19 nt, Artificial Sequence
  Description of Artificial Sequence: Synthetic oligonucleotide
  Antisense strand to SEQ ID NO: 835438
uaccucaggauacauucug

SEQ ID NO: 835440 - RNA, 19 nt, Artificial Sequence
  Description of Artificial Sequence: Synthetic oligonucleotide
  Sense strand starting at position 700 of SEQ ID NO: 588011
aauguauccugagguauua

SEQ ID NO: 835441 - RNA, 19 nt, Artificial Sequence
  Description of Artificial Sequence: Synthetic oligonucleotide
  Antisense strand to SEQ ID NO: 835440
uaauaccucaggauacauu

SEQ ID NO: 835442 - RNA, 19 nt, Artificial Sequence
  Description of Artificial Sequence: Synthetic oligonucleotide
  Sense strand starting at position 710 of SEQ ID NO: 588011
gagguauuacucuaaagca

SEQ ID NO: 835443 - RNA, 19 nt, Artificial Sequence
  Description of Artificial Sequence: Synthetic oligonucleotide
  Antisense strand to SEQ ID NO: 835442
ugcuuuagaguaauaccuc

SEQ ID NO: 835444 - RNA, 19 nt, Artificial Sequence
  Description of Artificial Sequence: Synthetic oligonucleotide
  Sense strand starting at position 1135 of SEQ ID NO: 588011
gggugagccucugacucaa

SEQ ID NO: 835445 - RNA, 19 nt, Artificial Sequence
  Description of Artificial Sequence: Synthetic oligonucleotide
  Antisense strand to SEQ ID NO: 835444
uugagucagaggcucaccc

SEQ ID NO: 835446 - RNA, 19 nt, Artificial Sequence
  Description of Artificial Sequence: Synthetic oligonucleotide
  Sense strand starting at position 1185 of SEQ ID NO: 588011
ggcagaucacacggguuaa

SEQ ID NO: 835447 - RNA, 19 nt, Artificial Sequence
  Description of Artificial Sequence: Synthetic oligonucleotide
  Antisense strand to SEQ ID NO: 835446
uuaacccgugugaucugcc

SEQ ID NO: 835448 - RNA, 19 nt, Artificial Sequence
  Description of Artificial Sequence: Synthetic oligonucleotide
  Sense strand starting at position 1186 of SEQ ID NO: 588011
gcagaucacacggguuaac

SEQ ID NO: 835449 - RNA, 19 nt, Artificial Sequence
  Description of Artificial Sequence: Synthetic oligonucleotide
  Antisense strand to SEQ ID NO: 835448
guuaacccgugugaucugc

SEQ ID NO: 835450 - RNA, 19 nt, Artificial Sequence
  Description of Artificial Sequence: Synthetic oligonucleotide
  Sense strand starting at position 1189 of SEQ ID NO: 588011
gaucacacggguuaacauu

SEQ ID NO: 835451 - RNA, 19 nt, Artificial Sequence
  Description of Artificial Sequence: Synthetic oligonucleotide
  Antisense strand to SEQ ID NO: 835450
aauguuaacccgugugauc

SEQ ID NO: 835452 - RNA, 19 nt, Artificial Sequence
  Description of Artificial Sequence: Synthetic oligonucleotide
  Sense strand starting at position 1244 of SEQ ID NO: 588011
ucugaaauggucuaauguc

SEQ ID NO: 835453 - RNA, 19 nt, Artificial Sequence
  Description of Artificial Sequence: Synthetic oligonucleotide
  Antisense strand to SEQ ID NO: 835452
gacauuagaccauuucaga

SEQ ID NO: 835454 - RNA, 19 nt, Artificial Sequence
  Description of Artificial Sequence: Synthetic oligonucleotide
  Sense strand starting at position 1274 of SEQ ID NO: 588011
cguuaauacuugugugcuc

SEQ ID NO: 835455 - RNA, 19 nt, Artificial Sequence
  Description of Artificial Sequence: Synthetic oligonucleotide
  Antisense strand to SEQ ID NO: 835454
gagcacacaaguauuaacg

SEQ ID NO: 835456 - RNA, 19 nt, Artificial Sequence
  Description of Artificial Sequence: Synthetic oligonucleotide
  Sense strand starting at position 1275 of SEQ ID NO: 588011
guuaauacuugugugcuca

SEQ ID NO: 835457 - RNA, 19 nt, Artificial Sequence
  Description of Artificial Sequence: Synthetic oligonucleotide
  Antisense strand to SEQ ID NO: 835456
ugagcacacaaguauuaac

SEQ ID NO: 835458 - RNA, 19 nt, Artificial Sequence
  Description of Artificial Sequence: Synthetic oligonucleotide
  Sense strand starting at position 1329 of SEQ ID NO: 588011
aguugaacagcuuaucuaa

SEQ ID NO: 835459 - RNA, 19 nt, Artificial Sequence
  Description of Artificial Sequence: Synthetic oligonucleotide
  Antisense strand to SEQ ID NO: 835458
uuagauaagcuguucaacu

SEQ ID NO: 835460 - RNA, 19 nt, Artificial Sequence
  Description of Artificial Sequence: Synthetic oligonucleotide
  Sense strand starting at position 1331 of SEQ ID NO: 588011
uugaacagcuuaucuaaga

SEQ ID NO: 835461 - RNA, 19 nt, Artificial Sequence
  Description of Artificial Sequence: Synthetic oligonucleotide
  Antisense strand to SEQ ID NO: 835460
ucuuagauaagcuguucaa

SEQ ID NO: 835462 - RNA, 19 nt, Artificial Sequence
  Description of Artificial Sequence: Synthetic oligonucleotide
  Sense strand starting at position 1332 of SEQ ID NO: 588011
ugaacagcuuaucuaagaa

SEQ ID NO: 835463 - RNA, 19 nt, Artificial Sequence
  Description of Artificial Sequence: Synthetic oligonucleotide
  Antisense strand to SEQ ID NO: 835462
uucuuagauaagcuguuca

SEQ ID NO: 835464 - RNA, 19 nt, Artificial Sequence
  Description of Artificial Sequence: Synthetic oligonucleotide
  Sense strand starting at position 1441 of SEQ ID NO: 588011
cguauucagucagguaaga

SEQ ID NO: 835465 - RNA, 19 nt, Artificial Sequence
  Description of Artificial Sequence: Synthetic oligonucleotide
  Antisense strand to SEQ ID NO: 835464
ucuuaccugacugaauacg

SEQ ID NO: 835466 - RNA, 19 nt, Artificial Sequence
  Description of Artificial Sequence: Synthetic oligonucleotide
  Sense strand starting at position 1446 of SEQ ID NO: 588011
ucagucagguaagaaagau

SEQ ID NO: 835467 - RNA, 19 nt, Artificial Sequence
  Description of Artificial Sequence: Synthetic oligonucleotide
  Antisense strand to SEQ ID NO: 835466
aucuuucuuaccugacuga

SEQ ID NO: 835468 - RNA, 19 nt, Artificial Sequence
  Description of Artificial Sequence: Synthetic oligonucleotide
  Sense strand starting at position 1485 of SEQ ID NO: 588011
gagcaaucguccucuacuc

SEQ ID NO: 835469 - RNA, 19 nt, Artificial Sequence
  Description of Artificial Sequence: Synthetic oligonucleotide
  Antisense strand to SEQ ID NO: 835468
gaguagaggacgauugcuc

SEQ ID NO: 835470 - RNA, 19 nt, Artificial Sequence
  Description of Artificial Sequence: Synthetic oligonucleotide
  Sense strand starting at position 1507 of SEQ ID NO: 588011
aacccaugucaaggagagu

SEQ ID NO: 835471 - RNA, 19 nt, Artificial Sequence
  Description of Artificial Sequence: Synthetic oligonucleotide
  Antisense strand to SEQ ID NO: 835470
acucuccuugacauggguu

SEQ ID NO: 835472 - RNA, 19 nt, Artificial Sequence
  Description of Artificial Sequence: Synthetic oligonucleotide
  Sense strand starting at position 2156 of SEQ ID NO: 588011
ccgcaauucccuugugaau

SEQ ID NO: 835473 - RNA, 19 nt, Artificial Sequence
  Description of Artificial Sequence: Synthetic oligonucleotide
  Antisense strand to SEQ ID NO: 835472
auucacaagggaauugcgg

SEQ ID NO: 835474 - RNA, 19 nt, Artificial Sequence
  Description of Artificial Sequence: Synthetic oligonucleotide
  Sense strand starting at position 2512 of SEQ ID NO: 588011
auaagugggcauugacaga

SEQ ID NO: 835475 - RNA, 19 nt, Artificial Sequence
  Description of Artificial Sequence: Synthetic oligonucleotide
  Antisense strand to SEQ ID NO: 835474
ucugucaaugcccacuuau

SEQ ID NO: 835476 - RNA, 19 nt, Artificial Sequence
  Description of Artificial Sequence: Synthetic oligonucleotide
  Sense strand starting at position 2523 of SEQ ID NO: 588011
uugacagauuugcguugau

SEQ ID NO: 835477 - RNA, 19 nt, Artificial Sequence
  Description of Artificial Sequence: Synthetic oligonucleotide
  Antisense strand to SEQ ID NO: 835476
aucaacgcaaaucugucaa

SEQ ID NO: 835478 - RNA, 19 nt, Artificial Sequence
  Description of Artificial Sequence: Synthetic oligonucleotide
  Sense strand starting at position 2822 of SEQ ID NO: 588011
agugauaccuagucucuac

SEQ ID NO: 835479 - RNA, 19 nt, Artificial Sequence
  Description of Artificial Sequence: Synthetic oligonucleotide
  Antisense strand to SEQ ID NO: 835478
guagagacuagguaucacu

SEQ ID NO: 835480 - RNA, 19 nt, Artificial Sequence
  Description of Artificial Sequence: Synthetic oligonucleotide
  Sense strand starting at position 363 of SEQ ID NO: 588012
gccucaaaugacgaaacuu

SEQ ID NO: 835481 - RNA, 19 nt, Artificial Sequence
  Description of Artificial Sequence: Synthetic oligonucleotide
  Antisense strand to SEQ ID NO: 835480
aaguuucgucauuugaggc

SEQ ID NO: 835482 - RNA, 19 nt, Artificial Sequence
  Description of Artificial Sequence: Synthetic oligonucleotide
  Sense strand starting at position 411 of SEQ ID NO: 588012
aguauaauguuuccugaaa

SEQ ID NO: 835483 - RNA, 19 nt, Artificial Sequence
  Description of Artificial Sequence: Synthetic oligonucleotide
  Antisense strand to SEQ ID NO: 835482
uuucaggaaacauuauacu

SEQ ID NO: 835484 - RNA, 19 nt, Artificial Sequence
  Description of Artificial Sequence: Synthetic oligonucleotide
  Sense strand starting at position 694 of SEQ ID NO: 588012
gagacuugcuucuuccaga

SEQ ID NO: 835485 - RNA, 19 nt, Artificial Sequence
  Description of Artificial Sequence: Synthetic oligonucleotide
  Antisense strand to SEQ ID NO: 835484
ucuggaagaagcaagucuc

SEQ ID NO: 835486 - RNA, 19 nt, Artificial Sequence
  Description of Artificial Sequence: Synthetic oligonucleotide
  Sense strand starting at position 695 of SEQ ID NO: 588012
agacuugcuucuuccagaa

SEQ ID NO: 835487 - RNA, 19 nt, Artificial Sequence
  Description of Artificial Sequence: Synthetic oligonucleotide
  Antisense strand to SEQ ID NO: 835486
uucuggaagaagcaagucu

SEQ ID NO: 835488 - RNA, 19 nt, Artificial Sequence
  Description of Artificial Sequence: Synthetic oligonucleotide
  Sense strand starting at position 857 of SEQ ID NO: 588012
gugaauuaaaugcaggcua

SEQ ID NO: 835489 - RNA, 19 nt, Artificial Sequence
  Description of Artificial Sequence: Synthetic oligonucleotide
  Antisense strand to SEQ ID NO: 835488
uagccugcauuuaauucac

SEQ ID NO: 835490 - RNA, 19 nt, Artificial Sequence
  Description of Artificial Sequence: Synthetic oligonucleotide
  Sense strand starting at position 918 of SEQ ID NO: 588012
ccaucuuugccuggaaaca

SEQ ID NO: 835491 - RNA, 19 nt, Artificial Sequence
  Description of Artificial Sequence: Synthetic oligonucleotide
  Antisense strand to SEQ ID NO: 835490
uguuuccaggcaaagaugg

SEQ ID NO: 835492 - RNA, 19 nt, Artificial Sequence
  Description of Artificial Sequence: Synthetic oligonucleotide
  Sense strand starting at position 956 of SEQ ID NO: 588012
acucccuagauucgggaaa

SEQ ID NO: 835493 - RNA, 19 nt, Artificial Sequence
  Description of Artificial Sequence: Synthetic oligonucleotide
  Antisense strand to SEQ ID NO: 835492
uuucccgaaucuagggagu

SEQ ID NO: 835494 - RNA, 19 nt, Artificial Sequence
  Description of Artificial Sequence: Synthetic oligonucleotide
  Sense strand starting at position 1071 of SEQ ID NO: 588012
ccacuaaaggucugggaau

SEQ ID NO: 835495 - RNA, 19 nt, Artificial Sequence
  Description of Artificial Sequence: Synthetic oligonucleotide
  Antisense strand to SEQ ID NO: 835494
auucccagaccuuuagugg

SEQ ID NO: 835496 - RNA, 19 nt, Artificial Sequence
  Description of Artificial Sequence: Synthetic oligonucleotide
  Sense strand starting at position 1095 of SEQ ID NO: 588012
caaagagauguauagccuu

SEQ ID NO: 835497 - RNA, 19 nt, Artificial Sequence
  Description of Artificial Sequence: Synthetic oligonucleotide
  Antisense strand to SEQ ID NO: 835496
aaggcuauacaucucuuug

SEQ ID NO: 835498 - RNA, 19 nt, Artificial Sequence
  Description of Artificial Sequence: Synthetic oligonucleotide
  Sense strand starting at position 1098 of SEQ ID NO: 588012
agagauguauagccuuauc

SEQ ID NO: 835499 - RNA, 19 nt, Artificial Sequence
  Description of Artificial Sequence: Synthetic oligonucleotide
  Antisense strand to SEQ ID NO: 835498
gauaaggcuauacaucucu

SEQ ID NO: 835500 - RNA, 19 nt, Artificial Sequence
  Description of Artificial Sequence: Synthetic oligonucleotide
  Sense strand starting at position 1163 of SEQ ID NO: 588012
aagcuaucccgagagguuu

SEQ ID NO: 835501 - RNA, 19 nt, Artificial Sequence
  Description of Artificial Sequence: Synthetic oligonucleotide
  Antisense strand to SEQ ID NO: 835500
aaaccucucgggauagcuu

SEQ ID NO: 835502 - RNA, 19 nt, Artificial Sequence
  Description of Artificial Sequence: Synthetic oligonucleotide
  Sense strand starting at position 1272 of SEQ ID NO: 588012
aggaauguccgcgagaaua

SEQ ID NO: 835503 - RNA, 19 nt, Artificial Sequence
  Description of Artificial Sequence: Synthetic oligonucleotide
  Antisense strand to SEQ ID NO: 835502
uauucucgcggacauuccu

SEQ ID NO: 835504 - RNA, 19 nt, Artificial Sequence
  Description of Artificial Sequence: Synthetic oligonucleotide
  Sense strand starting at position 2230 of SEQ ID NO: 588012
guguguaccgcgaaaugcu

SEQ ID NO: 835505 - RNA, 19 nt, Artificial Sequence
  Description of Artificial Sequence: Synthetic oligonucleotide
  Antisense strand to SEQ ID NO: 835504
agcauuucgcgguacacac

SEQ ID NO: 835506 - RNA, 19 nt, Artificial Sequence
  Description of Artificial Sequence: Synthetic oligonucleotide
  Sense strand starting at position 2396 of SEQ ID NO: 588012
gcuuucugguauuugcaga

SEQ ID NO: 835507 - RNA, 19 nt, Artificial Sequence
  Description of Artificial Sequence: Synthetic oligonucleotide
  Antisense strand to SEQ ID NO: 835506
ucugcaaauaccagaaagc

SEQ ID NO: 835508 - RNA, 19 nt, Artificial Sequence
  Description of Artificial Sequence: Synthetic oligonucleotide
  Sense strand starting at position 2452 of SEQ ID NO: 588012
agacauagguuuccuugua

SEQ ID NO: 835509 - RNA, 19 nt, Artificial Sequence
  Description of Artificial Sequence: Synthetic oligonucleotide
  Antisense strand to SEQ ID NO: 835508
uacaaggaaaccuaugucu

SEQ ID NO: 835510 - RNA, 19 nt, Artificial Sequence
  Description of Artificial Sequence: Synthetic oligonucleotide
  Sense strand starting at position 2492 of SEQ ID NO: 588012
gcagaacgacacugauauu

SEQ ID NO: 835511 - RNA, 19 nt, Artificial Sequence
  Description of Artificial Sequence: Synthetic oligonucleotide
  Antisense strand to SEQ ID NO: 835510
aauaucagugucguucugc

SEQ ID NO: 835512 - RNA, 19 nt, Artificial Sequence
  Description of Artificial Sequence: Synthetic oligonucleotide
  Sense strand starting at position 2524 of SEQ ID NO: 588012
uauuuagauuuguggagcu

SEQ ID NO: 835513 - RNA, 19 nt, Artificial Sequence
  Description of Artificial Sequence: Synthetic oligonucleotide
  Antisense strand to SEQ ID NO: 835512
agcuccacaaaucuaaaua

SEQ ID NO: 835514 - RNA, 19 nt, Artificial Sequence
  Description of Artificial Sequence: Synthetic oligonucleotide
  Sense strand starting at position 2539 of SEQ ID NO: 588012
agcugaaacuugccugaaa

SEQ ID NO: 835515 - RNA, 19 nt, Artificial Sequence
  Description of Artificial Sequence: Synthetic oligonucleotide
  Antisense strand to SEQ ID NO: 835514
uuucaggcaaguuucagcu

SEQ ID NO: 835516 - RNA, 19 nt, Artificial Sequence
  Description of Artificial Sequence: Synthetic oligonucleotide
  Sense strand starting at position 2621 of SEQ ID NO: 588012
uuaaacugcgcauauauca

SEQ ID NO: 835517 - RNA, 19 nt, Artificial Sequence
  Description of Artificial Sequence: Synthetic oligonucleotide
  Antisense strand to SEQ ID NO: 835516
ugauauaugcgcaguuuaa

SEQ ID NO: 835518 - RNA, 19 nt, Artificial Sequence
  Description of Artificial Sequence: Synthetic oligonucleotide
  Sense strand starting at position 2629 of SEQ ID NO: 588012
cgcauauaucaacaauagu

SEQ ID NO: 835519 - RNA, 19 nt, Artificial Sequence
  Description of Artificial Sequence: Synthetic oligonucleotide
  Antisense strand to SEQ ID NO: 835518
acuauuguugauauaugcg

SEQ ID NO: 835520 - RNA, 19 nt, Artificial Sequence
  Description of Artificial Sequence: Synthetic oligonucleotide
  Sense strand starting at position 2655 of SEQ ID NO: 588012
guugcagcagucuaaauuu

SEQ ID NO: 835521 - RNA, 19 nt, Artificial Sequence
  Description of Artificial Sequence: Synthetic oligonucleotide
  Antisense strand to SEQ ID NO: 835520
aaauuuagacugcugcaac

SEQ ID NO: 835522 - RNA, 19 nt, Artificial Sequence
  Description of Artificial Sequence: Synthetic oligonucleotide
  Sense strand starting at position 2741 of SEQ ID NO: 588012
auaccauuauguccagacu

SEQ ID NO: 835523 - RNA, 19 nt, Artificial Sequence
  Description of Artificial Sequence: Synthetic oligonucleotide
  Antisense strand to SEQ ID NO: 835522
agucuggacauaaugguau

SEQ ID NO: 835524 - RNA, 19 nt, Artificial Sequence
  Description of Artificial Sequence: Synthetic oligonucleotide
  Sense strand starting at position 2744 of SEQ ID NO: 588012
ccauuauguccagacuucu

SEQ ID NO: 835525 - RNA, 19 nt, Artificial Sequence
  Description of Artificial Sequence: Synthetic oligonucleotide
  Antisense strand to SEQ ID NO: 835524
agaagucuggacauaaugg

SEQ ID NO: 835526 - RNA, 19 nt, Artificial Sequence
  Description of Artificial Sequence: Synthetic oligonucleotide
  Sense strand starting at position 2905 of SEQ ID NO: 588012
uggaacugaagaugucauu

SEQ ID NO: 835527 - RNA, 19 nt, Artificial Sequence
  Description of Artificial Sequence: Synthetic oligonucleotide
  Antisense strand to SEQ ID NO: 835526
aaugacaucuucaguucca

SEQ ID NO: 835528 - RNA, 19 nt, Artificial Sequence
  Description of Artificial Sequence: Synthetic oligonucleotide
  Sense strand starting at position 2911 of SEQ ID NO: 588012
ugaagaugucauugguuua

SEQ ID NO: 835529 - RNA, 19 nt, Artificial Sequence
  Description of Artificial Sequence: Synthetic oligonucleotide
  Antisense strand to SEQ ID NO: 835528
uaaaccaaugacaucuuca

SEQ ID NO: 835530 - RNA, 19 nt, Artificial Sequence
  Description of Artificial Sequence: Synthetic oligonucleotide
  Sense strand starting at position 2914 of SEQ ID NO: 588012
agaugucauugguuuauaa

SEQ ID NO: 835531 - RNA, 19 nt, Artificial Sequence
  Description of Artificial Sequence: Synthetic oligonucleotide
  Antisense strand to SEQ ID NO: 835530
uuauaaaccaaugacaucu

SEQ ID NO: 835532 - RNA, 19 nt, Artificial Sequence
  Description of Artificial Sequence: Synthetic oligonucleotide
  Sense strand starting at position 2916 of SEQ ID NO: 588012
augucauugguuuauaaga

SEQ ID NO: 835533 - RNA, 19 nt, Artificial Sequence
  Description of Artificial Sequence: Synthetic oligonucleotide
  Antisense strand to SEQ ID NO: 835532
ucuuauaaaccaaugacau

SEQ ID NO: 835534 - RNA, 19 nt, Artificial Sequence
  Description of Artificial Sequence: Synthetic oligonucleotide
  Sense strand starting at position 3130 of SEQ ID NO: 588012
uagauuacguucucuggaa

SEQ ID NO: 835535 - RNA, 19 nt, Artificial Sequence
  Description of Artificial Sequence: Synthetic oligonucleotide
  Antisense strand to SEQ ID NO: 835534
uuccagagaacguaaucua

SEQ ID NO: 835536 - RNA, 19 nt, Artificial Sequence
  Description of Artificial Sequence: Synthetic oligonucleotide
  Sense strand starting at position 3131 of SEQ ID NO: 588012
agauuacguucucuggaac

SEQ ID NO: 835537 - RNA, 19 nt, Artificial Sequence
  Description of Artificial Sequence: Synthetic oligonucleotide
  Antisense strand to SEQ ID NO: 835536
guuccagagaacguaaucu

SEQ ID NO: 835538 - RNA, 19 nt, Artificial Sequence
  Description of Artificial Sequence: Synthetic oligonucleotide
  Sense strand starting at position 3242 of SEQ ID NO: 588012
agaaguuauggugguauac

SEQ ID NO: 835539 - RNA, 19 nt, Artificial Sequence
  Description of Artificial Sequence: Synthetic oligonucleotide
  Antisense strand to SEQ ID NO: 835538
guauaccaccauaacuucu

SEQ ID NO: 835540 - RNA, 19 nt, Artificial Sequence
  Description of Artificial Sequence: Synthetic oligonucleotide
  Sense strand starting at position 3269 of SEQ ID NO: 588012
uucucagauguccaccuua

SEQ ID NO: 835541 - RNA, 19 nt, Artificial Sequence
  Description of Artificial Sequence: Synthetic oligonucleotide
  Antisense strand to SEQ ID NO: 835540
uaagguggacaucugagaa

SEQ ID NO: 835542 - RNA, 19 nt, Artificial Sequence
  Description of Artificial Sequence: Synthetic oligonucleotide
  Sense strand starting at position 3328 of SEQ ID NO: 588012
gacuguguccuugagggau

SEQ ID NO: 835543 - RNA, 19 nt, Artificial Sequence
  Description of Artificial Sequence: Synthetic oligonucleotide
  Antisense strand to SEQ ID NO: 835542
aucccucaaggacacaguc

SEQ ID NO: 835544 - RNA, 19 nt, Artificial Sequence
  Description of Artificial Sequence: Synthetic oligonucleotide
  Sense strand starting at position 3332 of SEQ ID NO: 588012
guguccuugagggauguuu

SEQ ID NO: 835545 - RNA, 19 nt, Artificial Sequence
  Description of Artificial Sequence: Synthetic oligonucleotide
  Antisense strand to SEQ ID NO: 835544
aaacaucccucaaggacac

SEQ ID NO: 835546 - RNA, 19 nt, Artificial Sequence
  Description of Artificial Sequence: Synthetic oligonucleotide
  Sense strand starting at position 3368 of SEQ ID NO: 588012
cggaaucagccagaagcau

SEQ ID NO: 835547 - RNA, 19 nt, Artificial Sequence
  Description of Artificial Sequence: Synthetic oligonucleotide
  Antisense strand to SEQ ID NO: 835546
augcuucuggcugauuccg

SEQ ID NO: 835548 - RNA, 19 nt, Artificial Sequence
  Description of Artificial Sequence: Synthetic oligonucleotide
  Sense strand starting at position 3391 of SEQ ID NO: 588012
gguguuagccuuguugugu

SEQ ID NO: 835549 - RNA, 19 nt, Artificial Sequence
  Description of Artificial Sequence: Synthetic oligonucleotide
  Antisense strand to SEQ ID NO: 835548
acacaacaaggcuaacacc

SEQ ID NO: 835550 - RNA, 19 nt, Artificial Sequence
  Description of Artificial Sequence: Synthetic oligonucleotide
  Sense strand starting at position 3404 of SEQ ID NO: 588012
uugugucaucaacauuaca

SEQ ID NO: 835551 - RNA, 19 nt, Artificial Sequence
  Description of Artificial Sequence: Synthetic oligonucleotide
  Antisense strand to SEQ ID NO: 835550
uguaauguugaugacacaa

SEQ ID NO: 835552 - RNA, 19 nt, Artificial Sequence
  Description of Artificial Sequence: Synthetic oligonucleotide
  Sense strand starting at position 3681 of SEQ ID NO: 588012
uucugacacucaucacagu

SEQ ID NO: 835553 - RNA, 19 nt, Artificial Sequence
  Description of Artificial Sequence: Synthetic oligonucleotide
  Antisense strand to SEQ ID NO: 835552
acugugaugagugucagaa

SEQ ID NO: 835554 - RNA, 19 nt, Artificial Sequence
  Description of Artificial Sequence: Synthetic oligonucleotide
  Sense strand starting at position 3737 of SEQ ID NO: 588012
agaaguaucuucucaggag

SEQ ID NO: 835555 - RNA, 19 nt, Artificial Sequence
  Description of Artificial Sequence: Synthetic oligonucleotide
  Antisense strand to SEQ ID NO: 835554
cuccugagaagauacuucu

SEQ ID NO: 835556 - RNA, 19 nt, Artificial Sequence
  Description of Artificial Sequence: Synthetic oligonucleotide
  Sense strand starting at position 3769 of SEQ ID NO: 588012
ccagucauauccuuucuag

SEQ ID NO: 835557 - RNA, 19 nt, Artificial Sequence
  Description of Artificial Sequence: Synthetic oligonucleotide
  Antisense strand to SEQ ID NO: 835556
cuagaaaggauaugacugg

SEQ ID NO: 835558 - RNA, 19 nt, Artificial Sequence
  Description of Artificial Sequence: Synthetic oligonucleotide
  Sense strand starting at position 3925 of SEQ ID NO: 588012
auucgaguaggugggauua

SEQ ID NO: 835559 - RNA, 19 nt, Artificial Sequence
  Description of Artificial Sequence: Synthetic oligonucleotide
  Antisense strand to SEQ ID NO: 835558
uaaucccaccuacucgaau

SEQ ID NO: 835560 - RNA, 19 nt, Artificial Sequence
  Description of Artificial Sequence: Synthetic oligonucleotide
  Sense strand starting at position 55 of SEQ ID NO: 588013
gccaguaucucagcagcaa

SEQ ID NO: 835561 - RNA, 19 nt, Artificial Sequence
  Description of Artificial Sequence: Synthetic oligonucleotide
  Antisense strand to SEQ ID NO: 835560
uugcugcugagauacuggc

SEQ ID NO: 835562 - RNA, 19 nt, Artificial Sequence
  Description of Artificial Sequence: Synthetic oligonucleotide
  Sense strand starting at position 59 of SEQ ID NO: 588013
guaucucagcagcaaguua

SEQ ID NO: 835563 - RNA, 19 nt, Artificial Sequence
  Description of Artificial Sequence: Synthetic oligonucleotide
  Antisense strand to SEQ ID NO: 835562
uaacuugcugcugagauac

SEQ ID NO: 835564 - RNA, 19 nt, Artificial Sequence
  Description of Artificial Sequence: Synthetic oligonucleotide
  Sense strand starting at position 208 of SEQ ID NO: 588013
uguagagagcagugaagua

SEQ ID NO: 835565 - RNA, 19 nt, Artificial Sequence
  Description of Artificial Sequence: Synthetic oligonucleotide
  Antisense strand to SEQ ID NO: 835564
uacuucacugcucucuaca

SEQ ID NO: 835566 - RNA, 19 nt, Artificial Sequence
  Description of Artificial Sequence: Synthetic oligonucleotide
  Sense strand starting at position 253 of SEQ ID NO: 588013
uccacuuugugauccugua

SEQ ID NO: 835567 - RNA, 19 nt, Artificial Sequence
  Description of Artificial Sequence: Synthetic oligonucleotide
  Antisense strand to SEQ ID NO: 835566
uacaggaucacaaagugga

SEQ ID NO: 835568 - RNA, 19 nt, Artificial Sequence
  Description of Artificial Sequence: Synthetic oligonucleotide
  Sense strand starting at position 284 of SEQ ID NO: 588013
aucauuagaucugagucuu

SEQ ID NO: 835569 - RNA, 19 nt, Artificial Sequence
  Description of Artificial Sequence: Synthetic oligonucleotide
  Antisense strand to SEQ ID NO: 835568
aagacucagaucuaaugau

SEQ ID NO: 835570 - RNA, 19 nt, Artificial Sequence
  Description of Artificial Sequence: Synthetic oligonucleotide
  Sense strand starting at position 290 of SEQ ID NO: 588013
agaucugagucuuagauuc

SEQ ID NO: 835571 - RNA, 19 nt, Artificial Sequence
  Description of Artificial Sequence: Synthetic oligonucleotide
  Antisense strand to SEQ ID NO: 835570
gaaucuaagacucagaucu

SEQ ID NO: 835572 - RNA, 19 nt, Artificial Sequence
  Description of Artificial Sequence: Synthetic oligonucleotide
  Sense strand starting at position 292 of SEQ ID NO: 588013
aucugagucuuagauucua

SEQ ID NO: 835573 - RNA, 19 nt, Artificial Sequence
  Description of Artificial Sequence: Synthetic oligonucleotide
  Antisense strand to SEQ ID NO: 835572
uagaaucuaagacucagau

SEQ ID NO: 835574 - RNA, 19 nt, Artificial Sequence
  Description of Artificial Sequence: Synthetic oligonucleotide
  Sense strand starting at position 383 of SEQ ID NO: 588013
uuaucucaguucccugaga

SEQ ID NO: 835575 - RNA, 19 nt, Artificial Sequence
  Description of Artificial Sequence: Synthetic oligonucleotide
  Antisense strand to SEQ ID NO: 835574
ucucagggaacugagauaa

SEQ ID NO: 835576 - RNA, 19 nt, Artificial Sequence
  Description of Artificial Sequence: Synthetic oligonucleotide
  Sense strand starting at position 545 of SEQ ID NO: 588013
agaaauuuacagcguguua

SEQ ID NO: 835577 - RNA, 19 nt, Artificial Sequence
  Description of Artificial Sequence: Synthetic oligonucleotide
  Antisense strand to SEQ ID NO: 835576
uaacacgcuguaaauuucu

SEQ ID NO: 835578 - RNA, 19 nt, Artificial Sequence
  Description of Artificial Sequence: Synthetic oligonucleotide
  Sense strand starting at position 547 of SEQ ID NO: 588013
aaauuuacagcguguuaag

SEQ ID NO: 835579 - RNA, 19 nt, Artificial Sequence
  Description of Artificial Sequence: Synthetic oligonucleotide
  Antisense strand to SEQ ID NO: 835578
cuuaacacgcuguaaauuu

SEQ ID NO: 835580 - RNA, 19 nt, Artificial Sequence
  Description of Artificial Sequence: Synthetic oligonucleotide
  Sense strand starting at position 910 of SEQ ID NO: 588013
cagcaaucugccgggaauc

SEQ ID NO: 835581 - RNA, 19 nt, Artificial Sequence
  Description of Artificial Sequence: Synthetic oligonucleotide
  Antisense strand to SEQ ID NO: 835580
gauucccggcagauugcug

SEQ ID NO: 835582 - RNA, 19 nt, Artificial Sequence
  Description of Artificial Sequence: Synthetic oligonucleotide
  Sense strand starting at position 1084 of SEQ ID NO: 588013
uccgcauugucugucucaa

SEQ ID NO: 835583 - RNA, 19 nt, Artificial Sequence
  Description of Artificial Sequence: Synthetic oligonucleotide
  Antisense strand to SEQ ID NO: 835582
uugagacagacaaugcgga

SEQ ID NO: 835584 - RNA, 19 nt, Artificial Sequence
  Description of Artificial Sequence: Synthetic oligonucleotide
  Sense strand starting at position 1086 of SEQ ID NO: 588013
cgcauugucugucucaauu

SEQ ID NO: 835585 - RNA, 19 nt, Artificial Sequence
  Description of Artificial Sequence: Synthetic oligonucleotide
  Antisense strand to SEQ ID NO: 835584
aauugagacagacaaugcg

SEQ ID NO: 835586 - RNA, 19 nt, Artificial Sequence
  Description of Artificial Sequence: Synthetic oligonucleotide
  Sense strand starting at position 1118 of SEQ ID NO: 588013
uauggauuccucgggccuu

SEQ ID NO: 835587 - RNA, 19 nt, Artificial Sequence
  Description of Artificial Sequence: Synthetic oligonucleotide
  Antisense strand to SEQ ID NO: 835586
aaggcccgaggaauccaua

SEQ ID NO: 835588 - RNA, 19 nt, Artificial Sequence
  Description of Artificial Sequence: Synthetic oligonucleotide
  Sense strand starting at position 1476 of SEQ ID NO: 588013
ccuauuaccugucauugag

SEQ ID NO: 835589 - RNA, 19 nt, Artificial Sequence
  Description of Artificial Sequence: Synthetic oligonucleotide
  Antisense strand to SEQ ID NO: 835588
cucaaugacagguaauagg

SEQ ID NO: 835590 - RNA, 19 nt, Artificial Sequence
  Description of Artificial Sequence: Synthetic oligonucleotide
  Sense strand starting at position 2149 of SEQ ID NO: 588013
ccucgauugggcugcucaa

SEQ ID NO: 835591 - RNA, 19 nt, Artificial Sequence
  Description of Artificial Sequence: Synthetic oligonucleotide
  Antisense strand to SEQ ID NO: 835590
uugagcagcccaaucgagg

SEQ ID NO: 835592 - RNA, 19 nt, Artificial Sequence
  Description of Artificial Sequence: Synthetic oligonucleotide
  Sense strand starting at position 2241 of SEQ ID NO: 588013
gugggaugucuccagagug

SEQ ID NO: 835593 - RNA, 19 nt, Artificial Sequence
  Description of Artificial Sequence: Synthetic oligonucleotide
  Antisense strand to SEQ ID NO: 835592
cacucuggagacaucccac

SEQ ID NO: 835594 - RNA, 19 nt, Artificial Sequence
  Description of Artificial Sequence: Synthetic oligonucleotide
  Sense strand starting at position 2257 of SEQ ID NO: 588013
gugaguguuccggagagca

SEQ ID NO: 835595 - RNA, 19 nt, Artificial Sequence
  Description of Artificial Sequence: Synthetic oligonucleotide
  Antisense strand to SEQ ID NO: 835594
ugcucuccggaacacucac

SEQ ID NO: 835596 - RNA, 19 nt, Artificial Sequence
  Description of Artificial Sequence: Synthetic oligonucleotide
  Sense strand starting at position 2269 of SEQ ID NO: 588013
gagagcacguguuagggaa

SEQ ID NO: 835597 - RNA, 19 nt, Artificial Sequence
  Description of Artificial Sequence: Synthetic oligonucleotide
  Antisense strand to SEQ ID NO: 835596
uucccuaacacgugcucuc

SEQ ID NO: 835598 - RNA, 19 nt, Artificial Sequence
  Description of Artificial Sequence: Synthetic oligonucleotide
  Sense strand starting at position 2365 of SEQ ID NO: 588013
uuguguucuuucgcucgga

SEQ ID NO: 835599 - RNA, 19 nt, Artificial Sequence
  Description of Artificial Sequence: Synthetic oligonucleotide
  Antisense strand to SEQ ID NO: 835598
uccgagcgaaagaacacaa

SEQ ID NO: 835600 - RNA, 19 nt, Artificial Sequence
  Description of Artificial Sequence: Synthetic oligonucleotide
  Sense strand starting at position 2366 of SEQ ID NO: 588013
uguguucuuucgcucggau

SEQ ID NO: 835601 - RNA, 19 nt, Artificial Sequence
  Description of Artificial Sequence: Synthetic oligonucleotide
  Antisense strand to SEQ ID NO: 835600
auccgagcgaaagaacaca

SEQ ID NO: 835602 - RNA, 19 nt, Artificial Sequence
  Description of Artificial Sequence: Synthetic oligonucleotide
  Sense strand starting at position 2367 of SEQ ID NO: 588013
guguucuuucgcucggauu

SEQ ID NO: 835603 - RNA, 19 nt, Artificial Sequence
  Description of Artificial Sequence: Synthetic oligonucleotide
  Antisense strand to SEQ ID NO: 835602
aauccgagcgaaagaacac

SEQ ID NO: 835604 - RNA, 19 nt, Artificial Sequence
  Description of Artificial Sequence: Synthetic oligonucleotide
  Sense strand starting at position 2397 of SEQ ID NO: 588013
gcccuaauuauuuggcgga

SEQ ID NO: 835605 - RNA, 19 nt, Artificial Sequence
  Description of Artificial Sequence: Synthetic oligonucleotide
  Antisense strand to SEQ ID NO: 835604
uccgccaaauaauuagggc

SEQ ID NO: 835606 - RNA, 19 nt, Artificial Sequence
  Description of Artificial Sequence: Synthetic oligonucleotide
  Sense strand starting at position 2398 of SEQ ID NO: 588013
cccuaauuauuuggcggau

SEQ ID NO: 835607 - RNA, 19 nt, Artificial Sequence
  Description of Artificial Sequence: Synthetic oligonucleotide
  Antisense strand to SEQ ID NO: 835606
auccgccaaauaauuaggg

SEQ ID NO: 835608 - RNA, 19 nt, Artificial Sequence
  Description of Artificial Sequence: Synthetic oligonucleotide
  Sense strand starting at position 2455 of SEQ ID NO: 588013
aguuguauuuauggugaag

SEQ ID NO: 835609 - RNA, 19 nt, Artificial Sequence
  Description of Artificial Sequence: Synthetic oligonucleotide
  Antisense strand to SEQ ID NO: 835608
cuucaccauaaauacaacu

SEQ ID NO: 835610 - RNA, 19 nt, Artificial Sequence
  Description of Artificial Sequence: Synthetic oligonucleotide
  Sense strand starting at position 2457 of SEQ ID NO: 588013
uuguauuuauggugaaguu

SEQ ID NO: 835611 - RNA, 19 nt, Artificial Sequence
  Description of Artificial Sequence: Synthetic oligonucleotide
  Antisense strand to SEQ ID NO: 835610
aacuucaccauaaauacaa

SEQ ID NO: 835612 - RNA, 19 nt, Artificial Sequence
  Description of Artificial Sequence: Synthetic oligonucleotide
  Sense strand starting at position 2543 of SEQ ID NO: 588013
gccuuuccagaaggagaua

SEQ ID NO: 835613 - RNA, 19 nt, Artificial Sequence
  Description of Artificial Sequence: Synthetic oligonucleotide
  Antisense strand to SEQ ID NO: 835612
uaucuccuucuggaaaggc

SEQ ID NO: 835614 - RNA, 19 nt, Artificial Sequence
  Description of Artificial Sequence: Synthetic oligonucleotide
  Sense strand starting at position 2559 of SEQ ID NO: 588013
auaguaggauccuggaguu

SEQ ID NO: 835615 - RNA, 19 nt, Artificial Sequence
  Description of Artificial Sequence: Synthetic oligonucleotide
  Antisense strand to SEQ ID NO: 835614
aacuccaggauccuacuau

SEQ ID NO: 835616 - RNA, 19 nt, Artificial Sequence
  Description of Artificial Sequence: Synthetic oligonucleotide
  Sense strand starting at position 2572 of SEQ ID NO: 588013
ggaguuggcuuugcagcaa

SEQ ID NO: 835617 - RNA, 19 nt, Artificial Sequence
  Description of Artificial Sequence: Synthetic oligonucleotide
  Antisense strand to SEQ ID NO: 835616
uugcugcaaagccaacucc

SEQ ID NO: 835618 - RNA, 19 nt, Artificial Sequence
  Description of Artificial Sequence: Synthetic oligonucleotide
  Sense strand starting at position 2649 of SEQ ID NO: 588013
uguggaaauuuccacuaau

SEQ ID NO: 835619 - RNA, 19 nt, Artificial Sequence
  Description of Artificial Sequence: Synthetic oligonucleotide
  Antisense strand to SEQ ID NO: 835618
auuaguggaaauuuccaca

SEQ ID NO: 835620 - RNA, 19 nt, Artificial Sequence
  Description of Artificial Sequence: Synthetic oligonucleotide
  Sense strand starting at position 2672 of SEQ ID NO: 588013
ugauauaaaugauucguga

SEQ ID NO: 835621 - RNA, 19 nt, Artificial Sequence
  Description of Artificial Sequence: Synthetic oligonucleotide
  Antisense strand to SEQ ID NO: 835620
ucacgaaucauuuauauca

SEQ ID NO: 835622 - RNA, 19 nt, Artificial Sequence
  Description of Artificial Sequence: Synthetic oligonucleotide
  Sense strand starting at position 2894 of SEQ ID NO: 588013
ugucucagucuauggagua

SEQ ID NO: 835623 - RNA, 19 nt, Artificial Sequence
  Description of Artificial Sequence: Synthetic oligonucleotide
  Antisense strand to SEQ ID NO: 835622
uacuccauagacugagaca

SEQ ID NO: 835624 - RNA, 19 nt, Artificial Sequence
  Description of Artificial Sequence: Synthetic oligonucleotide
  Sense strand starting at position 3105 of SEQ ID NO: 588013
ccgaguuucuacuauaaga

SEQ ID NO: 835625 - RNA, 19 nt, Artificial Sequence
  Description of Artificial Sequence: Synthetic oligonucleotide
  Antisense strand to SEQ ID NO: 835624
ucuuauaguagaaacucgg

SEQ ID NO: 835626 - RNA, 19 nt, Artificial Sequence
  Description of Artificial Sequence: Synthetic oligonucleotide
  Sense strand starting at position 3287 of SEQ ID NO: 588013
ggcugugcgcgccuguaaa

SEQ ID NO: 835627 - RNA, 19 nt, Artificial Sequence
  Description of Artificial Sequence: Synthetic oligonucleotide
  Antisense strand to SEQ ID NO: 835626
uuuacaggcgcgcacagcc

SEQ ID NO: 835628 - RNA, 19 nt, Artificial Sequence
  Description of Artificial Sequence: Synthetic oligonucleotide
  Sense strand starting at position 3477 of SEQ ID NO: 588013
ugacuuucuucucaaaggu

SEQ ID NO: 835629 - RNA, 19 nt, Artificial Sequence
  Description of Artificial Sequence: Synthetic oligonucleotide
  Antisense strand to SEQ ID NO: 835628
accuuugagaagaaaguca

SEQ ID NO: 835630 - RNA, 19 nt, Artificial Sequence
  Description of Artificial Sequence: Synthetic oligonucleotide
  Sense strand starting at position 3552 of SEQ ID NO: 588013
ugacauuccuucuacagag

SEQ ID NO: 835631 - RNA, 19 nt, Artificial Sequence
  Description of Artificial Sequence: Synthetic oligonucleotide
  Antisense strand to SEQ ID NO: 835630
cucuguagaaggaauguca

SEQ ID NO: 835632 - RNA, 19 nt, Artificial Sequence
  Description of Artificial Sequence: Synthetic oligonucleotide
  Sense strand starting at position 3616 of SEQ ID NO: 588013
ggaaguucuucugagcaaa

SEQ ID NO: 835633 - RNA, 19 nt, Artificial Sequence
  Description of Artificial Sequence: Synthetic oligonucleotide
  Antisense strand to SEQ ID NO: 835632
uuugcucagaagaacuucc

SEQ ID NO: 835634 - RNA, 19 nt, Artificial Sequence
  Description of Artificial Sequence: Synthetic oligonucleotide
  Sense strand starting at position 3719 of SEQ ID NO: 588013
accauuggcccagauuagu

SEQ ID NO: 835635 - RNA, 19 nt, Artificial Sequence
  Description of Artificial Sequence: Synthetic oligonucleotide
  Antisense strand to SEQ ID NO: 835634
acuaaucugggccaauggu

SEQ ID NO: 835636 - RNA, 19 nt, Artificial Sequence
  Description of Artificial Sequence: Synthetic oligonucleotide
  Sense strand starting at position 3757 of SEQ ID NO: 588013
caaggucacuauuagaugu

SEQ ID NO: 835637 - RNA, 19 nt, Artificial Sequence
  Description of Artificial Sequence: Synthetic oligonucleotide
  Antisense strand to SEQ ID NO: 835636
acaucuaauagugaccuug

SEQ ID NO: 835638 - RNA, 19 nt, Artificial Sequence
  Description of Artificial Sequence: Synthetic oligonucleotide
  Sense strand starting at position 3807 of SEQ ID NO: 588013
aguagacacugcuagauuu

SEQ ID NO: 835639 - RNA, 19 nt, Artificial Sequence
  Description of Artificial Sequence: Synthetic oligonucleotide
  Antisense strand to SEQ ID NO: 835638
aaaucuagcagugucuacu

SEQ ID NO: 835640 - RNA, 19 nt, Artificial Sequence
  Description of Artificial Sequence: Synthetic oligonucleotide
  Sense strand starting at position 182 of SEQ ID NO: 588014
cuggauuaagacugcaaac

SEQ ID NO: 835641 - RNA, 19 nt, Artificial Sequence
  Description of Artificial Sequence: Synthetic oligonucleotide
  Antisense strand to SEQ ID NO: 835640
guuugcagucuuaauccag

SEQ ID NO: 835642 - RNA, 19 nt, Artificial Sequence
  Description of Artificial Sequence: Synthetic oligonucleotide
  Sense strand starting at position 207 of SEQ ID NO: 588014
ccaagaaucagguggucau

SEQ ID NO: 835643 - RNA, 19 nt, Artificial Sequence
  Description of Artificial Sequence: Synthetic oligonucleotide
  Antisense strand to SEQ ID NO: 835642
augaccaccugauucuugg

SEQ ID NO: 835644 - RNA, 19 nt, Artificial Sequence
  Description of Artificial Sequence: Synthetic oligonucleotide
  Sense strand starting at position 208 of SEQ ID NO: 588014
caagaaucagguggucauu

SEQ ID NO: 835645 - RNA, 19 nt, Artificial Sequence
  Description of Artificial Sequence: Synthetic oligonucleotide
  Antisense strand to SEQ ID NO: 835644
aaugaccaccugauucuug

SEQ ID NO: 835646 - RNA, 19 nt, Artificial Sequence
  Description of Artificial Sequence: Synthetic oligonucleotide
  Sense strand starting at position 210 of SEQ ID NO: 588014
agaaucagguggucauuaa

SEQ ID NO: 835647 - RNA, 19 nt, Artificial Sequence
  Description of Artificial Sequence: Synthetic oligonucleotide
  Antisense strand to SEQ ID NO: 835646
uuaaugaccaccugauucu

SEQ ID NO: 835648 - RNA, 19 nt, Artificial Sequence
  Description of Artificial Sequence: Synthetic oligonucleotide
  Sense strand starting at position 214 of SEQ ID NO: 588014
ucagguggucauuaagcaa

SEQ ID NO: 835649 - RNA, 19 nt, Artificial Sequence
  Description of Artificial Sequence: Synthetic oligonucleotide
  Antisense strand to SEQ ID NO: 835648
uugcuuaaugaccaccuga

SEQ ID NO: 835650 - RNA, 19 nt, Artificial Sequence
  Description of Artificial Sequence: Synthetic oligonucleotide
  Sense strand starting at position 266 of SEQ ID NO: 588014
ggauuuaaauuagggaaag

SEQ ID NO: 835651 - RNA, 19 nt, Artificial Sequence
  Description of Artificial Sequence: Synthetic oligonucleotide
  Antisense strand to SEQ ID NO: 835650
cuuucccuaauuuaaaucc

SEQ ID NO: 835652 - RNA, 19 nt, Artificial Sequence
  Description of Artificial Sequence: Synthetic oligonucleotide
  Sense strand starting at position 327 of SEQ ID NO: 588014
uugacuagccagggaaagu

SEQ ID NO: 835653 - RNA, 19 nt, Artificial Sequence
  Description of Artificial Sequence: Synthetic oligonucleotide
  Antisense strand to SEQ ID NO: 835652
acuuucccuggcuagucaa

SEQ ID NO: 835654 - RNA, 19 nt, Artificial Sequence
  Description of Artificial Sequence: Synthetic oligonucleotide
  Sense strand starting at position 394 of SEQ ID NO: 588014
acaacugagccaggauaau

SEQ ID NO: 835655 - RNA, 19 nt, Artificial Sequence
  Description of Artificial Sequence: Synthetic oligonucleotide
  Antisense strand to SEQ ID NO: 835654
auuauccuggcucaguugu

SEQ ID NO: 835656 - RNA, 19 nt, Artificial Sequence
  Description of Artificial Sequence: Synthetic oligonucleotide
  Sense strand starting at position 472 of SEQ ID NO: 588014
ccugaccuuccucaguuua

SEQ ID NO: 835657 - RNA, 19 nt, Artificial Sequence
  Description of Artificial Sequence: Synthetic oligonucleotide
  Antisense strand to SEQ ID NO: 835656
uaaacugaggaaggucagg

SEQ ID NO: 835658 - RNA, 19 nt, Artificial Sequence
  Description of Artificial Sequence: Synthetic oligonucleotide
  Sense strand starting at position 766 of SEQ ID NO: 588014
ucgcuuuaugcacugcuua

SEQ ID NO: 835659 - RNA, 19 nt, Artificial Sequence
  Description of Artificial Sequence: Synthetic oligonucleotide
  Antisense strand to SEQ ID NO: 835658
uaagcagugcauaaagcga

SEQ ID NO: 835660 - RNA, 19 nt, Artificial Sequence
  Description of Artificial Sequence: Synthetic oligonucleotide
  Sense strand starting at position 847 of SEQ ID NO: 588014
cgaagaaaucuguaggcuu

SEQ ID NO: 835661 - RNA, 19 nt, Artificial Sequence
  Description of Artificial Sequence: Synthetic oligonucleotide
  Antisense strand to SEQ ID NO: 835660
aagccuacagauuucuucg

SEQ ID NO: 835662 - RNA, 19 nt, Artificial Sequence
  Description of Artificial Sequence: Synthetic oligonucleotide
  Sense strand starting at position 1001 of SEQ ID NO: 588014
auuagaaugaagugugguu

SEQ ID NO: 835663 - RNA, 19 nt, Artificial Sequence
  Description of Artificial Sequence: Synthetic oligonucleotide
  Antisense strand to SEQ ID NO: 835662
aaccacacuucauucuaau

SEQ ID NO: 835664 - RNA, 19 nt, Artificial Sequence
  Description of Artificial Sequence: Synthetic oligonucleotide
  Sense strand starting at position 1014 of SEQ ID NO: 588014
gugguuguaaaguaauaca

SEQ ID NO: 835665 - RNA, 19 nt, Artificial Sequence
  Description of Artificial Sequence: Synthetic oligonucleotide
  Antisense strand to SEQ ID NO: 835664
uguauuacuuuacaaccac

SEQ ID NO: 835666 - RNA, 19 nt, Artificial Sequence
  Description of Artificial Sequence: Synthetic oligonucleotide
  Sense strand starting at position 1059 of SEQ ID NO: 588014
uuaguaucuccuuacugau

SEQ ID NO: 835667 - RNA, 19 nt, Artificial Sequence
  Description of Artificial Sequence: Synthetic oligonucleotide
  Antisense strand to SEQ ID NO: 835666
aucaguaaggagauacuaa

SEQ ID NO: 835668 - RNA, 19 nt, Artificial Sequence
  Description of Artificial Sequence: Synthetic oligonucleotide
  Sense strand starting at position 1061 of SEQ ID NO: 588014
aguaucuccuuacugauau

SEQ ID NO: 835669 - RNA, 19 nt, Artificial Sequence
  Description of Artificial Sequence: Synthetic oligonucleotide
  Antisense strand to SEQ ID NO: 835668
auaucaguaaggagauacu

SEQ ID NO: 835670 - RNA, 19 nt, Artificial Sequence
  Description of Artificial Sequence: Synthetic oligonucleotide
  Sense strand starting at position 1166 of SEQ ID NO: 588014
gggauuuggugcgcuacua

SEQ ID NO: 835671 - RNA, 19 nt, Artificial Sequence
  Description of Artificial Sequence: Synthetic oligonucleotide
  Antisense strand to SEQ ID NO: 835670
uaguagcgcaccaaauccc

SEQ ID NO: 835672 - RNA, 19 nt, Artificial Sequence
  Description of Artificial Sequence: Synthetic oligonucleotide
  Sense strand starting at position 1199 of SEQ ID NO: 588014
acuaguguccuacacaaca

SEQ ID NO: 835673 - RNA, 19 nt, Artificial Sequence
  Description of Artificial Sequence: Synthetic oligonucleotide
  Antisense strand to SEQ ID NO: 835672
uguuguguaggacacuagu

SEQ ID NO: 835674 - RNA, 19 nt, Artificial Sequence
  Description of Artificial Sequence: Synthetic oligonucleotide
  Sense strand starting at position 1462 of SEQ ID NO: 588014
accuuucuucuggaguaag

SEQ ID NO: 835675 - RNA, 19 nt, Artificial Sequence
  Description of Artificial Sequence: Synthetic oligonucleotide
  Antisense strand to SEQ ID NO: 835674
cuuacuccagaagaaaggu

SEQ ID NO: 835676 - RNA, 19 nt, Artificial Sequence
  Description of Artificial Sequence: Synthetic oligonucleotide
  Sense strand starting at position 1535 of SEQ ID NO: 588014
auucuaaacgaauagcuau

SEQ ID NO: 835677 - RNA, 19 nt, Artificial Sequence
  Description of Artificial Sequence: Synthetic oligonucleotide
  Antisense strand to SEQ ID NO: 835676
auagcuauucguuuagaau

SEQ ID NO: 835678 - RNA, 19 nt, Artificial Sequence
  Description of Artificial Sequence: Synthetic oligonucleotide
  Sense strand starting at position 2058 of SEQ ID NO: 588014
ggaguuucuccgcagggaa

SEQ ID NO: 835679 - RNA, 19 nt, Artificial Sequence
  Description of Artificial Sequence: Synthetic oligonucleotide
  Antisense strand to SEQ ID NO: 835678
uucccugcggagaaacucc

SEQ ID NO: 835680 - RNA, 19 nt, Artificial Sequence
  Description of Artificial Sequence: Synthetic oligonucleotide
  Sense strand starting at position 2070 of SEQ ID NO: 588014
cagggaaaccucuguuaag

SEQ ID NO: 835681 - RNA, 19 nt, Artificial Sequence
  Description of Artificial Sequence: Synthetic oligonucleotide
  Antisense strand to SEQ ID NO: 835680
cuuaacagagguuucccug

SEQ ID NO: 835682 - RNA, 19 nt, Artificial Sequence
  Description of Artificial Sequence: Synthetic oligonucleotide
  Sense strand starting at position 2071 of SEQ ID NO: 588014
agggaaaccucuguuaagu

SEQ ID NO: 835683 - RNA, 19 nt, Artificial Sequence
  Description of Artificial Sequence: Synthetic oligonucleotide
  Antisense strand to SEQ ID NO: 835682
acuuaacagagguuucccu

SEQ ID NO: 835684 - RNA, 19 nt, Artificial Sequence
  Description of Artificial Sequence: Synthetic oligonucleotide
  Sense strand starting at position 2226 of SEQ ID NO: 588014
ucuagucuuggucagauuc

SEQ ID NO: 835685 - RNA, 19 nt, Artificial Sequence
  Description of Artificial Sequence: Synthetic oligonucleotide
  Antisense strand to SEQ ID NO: 835684
gaaucugaccaagacuaga

SEQ ID NO: 835686 - RNA, 19 nt, Artificial Sequence
  Description of Artificial Sequence: Synthetic oligonucleotide
  Sense strand starting at position 2736 of SEQ ID NO: 588014
cagggaggauccgucucaa

SEQ ID NO: 835687 - RNA, 19 nt, Artificial Sequence
  Description of Artificial Sequence: Synthetic oligonucleotide
  Antisense strand to SEQ ID NO: 835686
uugagacggauccucccug

SEQ ID NO: 835688 - RNA, 19 nt, Artificial Sequence
  Description of Artificial Sequence: Synthetic oligonucleotide
  Sense strand starting at position 2766 of SEQ ID NO: 588014
agcagaucucgagacuauc

SEQ ID NO: 835689 - RNA, 19 nt, Artificial Sequence
  Description of Artificial Sequence: Synthetic oligonucleotide
  Antisense strand to SEQ ID NO: 835688
gauagucucgagaucugcu

SEQ ID NO: 835690 - RNA, 19 nt, Artificial Sequence
  Description of Artificial Sequence: Synthetic oligonucleotide
  Sense strand starting at position 3178 of SEQ ID NO: 588014
agucccagucauuaugaaa

SEQ ID NO: 835691 - RNA, 19 nt, Artificial Sequence
  Description of Artificial Sequence: Synthetic oligonucleotide
  Antisense strand to SEQ ID NO: 835690
uuucauaaugacugggacu

SEQ ID NO: 835692 - RNA, 19 nt, Artificial Sequence
  Description of Artificial Sequence: Synthetic oligonucleotide
  Sense strand starting at position 3189 of SEQ ID NO: 588014
uuaugaaacucagucuagu

SEQ ID NO: 835693 - RNA, 19 nt, Artificial Sequence
  Description of Artificial Sequence: Synthetic oligonucleotide
  Antisense strand to SEQ ID NO: 835692
acuagacugaguuucauaa

SEQ ID NO: 835694 - RNA, 19 nt, Artificial Sequence
  Description of Artificial Sequence: Synthetic oligonucleotide
  Sense strand starting at position 3216 of SEQ ID NO: 588014
gagacauguaaacggguaa

SEQ ID NO: 835695 - RNA, 19 nt, Artificial Sequence
  Description of Artificial Sequence: Synthetic oligonucleotide
  Antisense strand to SEQ ID NO: 835694
uuacccguuuacaugucuc

SEQ ID NO: 835696 - RNA, 19 nt, Artificial Sequence
  Description of Artificial Sequence: Synthetic oligonucleotide
  Sense strand starting at position 3220 of SEQ ID NO: 588014
cauguaaacggguaagaug

SEQ ID NO: 835697 - RNA, 19 nt, Artificial Sequence
  Description of Artificial Sequence: Synthetic oligonucleotide
  Antisense strand to SEQ ID NO: 835696
caucuuacccguuuacaug

SEQ ID NO: 835698 - RNA, 19 nt, Artificial Sequence
  Description of Artificial Sequence: Synthetic oligonucleotide
  Sense strand starting at position 3276 of SEQ ID NO: 588014
ggaaaugugagccauguga

SEQ ID NO: 835699 - RNA, 19 nt, Artificial Sequence
  Description of Artificial Sequence: Synthetic oligonucleotide
  Antisense strand to SEQ ID NO: 835698
ucacauggcucacauuucc

SEQ ID NO: 835700 - RNA, 19 nt, Artificial Sequence
  Description of Artificial Sequence: Synthetic oligonucleotide
  Sense strand starting at position 3738 of SEQ ID NO: 588014
agaagagcacucugaccuu

SEQ ID NO: 835701 - RNA, 19 nt, Artificial Sequence
  Description of Artificial Sequence: Synthetic oligonucleotide
  Antisense strand to SEQ ID NO: 835700
aaggucagagugcucuucu

SEQ ID NO: 835702 - RNA, 19 nt, Artificial Sequence
  Description of Artificial Sequence: Synthetic oligonucleotide
  Sense strand starting at position 3841 of SEQ ID NO: 588014
gggaguugaggccgagaaa

SEQ ID NO: 835703 - RNA, 19 nt, Artificial Sequence
  Description of Artificial Sequence: Synthetic oligonucleotide
  Antisense strand to SEQ ID NO: 835702
uuucucggccucaacuccc

SEQ ID NO: 835704 - RNA, 19 nt, Artificial Sequence
  Description of Artificial Sequence: Synthetic oligonucleotide
  Sense strand starting at position 3842 of SEQ ID NO: 588014
ggaguugaggccgagaaac

SEQ ID NO: 835705 - RNA, 19 nt, Artificial Sequence
  Description of Artificial Sequence: Synthetic oligonucleotide
  Antisense strand to SEQ ID NO: 835704
guuucucggccucaacucc

SEQ ID NO: 835706 - RNA, 19 nt, Artificial Sequence
  Description of Artificial Sequence: Synthetic oligonucleotide
  Sense strand starting at position 3844 of SEQ ID NO: 588014
aguugaggccgagaaacau

SEQ ID NO: 835707 - RNA, 19 nt, Artificial Sequence
  Description of Artificial Sequence: Synthetic oligonucleotide
  Antisense strand to SEQ ID NO: 835706
auguuucucggccucaacu

SEQ ID NO: 835708 - RNA, 19 nt, Artificial Sequence
  Description of Artificial Sequence: Synthetic oligonucleotide
  Sense strand starting at position 3852 of SEQ ID NO: 588014
ccgagaaacaucuguacag

SEQ ID NO: 835709 - RNA, 19 nt, Artificial Sequence
  Description of Artificial Sequence: Synthetic oligonucleotide
  Antisense strand to SEQ ID NO: 835708
cuguacagauguuucucgg

SEQ ID NO: 835710 - RNA, 19 nt, Artificial Sequence
  Description of Artificial Sequence: Synthetic oligonucleotide
  Sense strand starting at position 3853 of SEQ ID NO: 588014
cgagaaacaucuguacaga

SEQ ID NO: 835711 - RNA, 19 nt, Artificial Sequence
  Description of Artificial Sequence: Synthetic oligonucleotide
  Antisense strand to SEQ ID NO: 835710
ucuguacagauguuucucg

SEQ ID NO: 835712 - RNA, 19 nt, Artificial Sequence
  Description of Artificial Sequence: Synthetic oligonucleotide
  Sense strand starting at position 3874 of SEQ ID NO: 588014
uuguuaaacuaaccaguau

SEQ ID NO: 835713 - RNA, 19 nt, Artificial Sequence
  Description of Artificial Sequence: Synthetic oligonucleotide
  Antisense strand to SEQ ID NO: 835712
auacugguuaguuuaacaa

SEQ ID NO: 835714 - RNA, 19 nt, Artificial Sequence
  Description of Artificial Sequence: Synthetic oligonucleotide
  Sense strand starting at position 3885 of SEQ ID NO: 588014
accaguaucuuccuagaua

SEQ ID NO: 835715 - RNA, 19 nt, Artificial Sequence
  Description of Artificial Sequence: Synthetic oligonucleotide
  Antisense strand to SEQ ID NO: 835714
uaucuaggaagauacuggu

SEQ ID NO: 835716 - RNA, 19 nt, Artificial Sequence
  Description of Artificial Sequence: Synthetic oligonucleotide
  Sense strand starting at position 3888 of SEQ ID NO: 588014
aguaucuuccuagauacuc

SEQ ID NO: 835717 - RNA, 19 nt, Artificial Sequence
  Description of Artificial Sequence: Synthetic oligonucleotide
  Antisense strand to SEQ ID NO: 835716
gaguaucuaggaagauacu

SEQ ID NO: 835718 - RNA, 19 nt, Artificial Sequence
  Description of Artificial Sequence: Synthetic oligonucleotide
  Sense strand starting at position 3896 of SEQ ID NO: 588014
ccuagauacucuuccacga

SEQ ID NO: 835719 - RNA, 19 nt, Artificial Sequence
  Description of Artificial Sequence: Synthetic oligonucleotide
  Antisense strand to SEQ ID NO: 835718
ucguggaagaguaucuagg

SEQ ID NO: 835720 - RNA, 19 nt, Artificial Sequence
  Description of Artificial Sequence: Synthetic oligonucleotide
  Sense strand starting at position 51 of SEQ ID NO: 588015
cugguaagugcugggaaua

SEQ ID NO: 835721 - RNA, 19 nt, Artificial Sequence
  Description of Artificial Sequence: Synthetic oligonucleotide
  Antisense strand to SEQ ID NO: 835720
uauucccagcacuuaccag

SEQ ID NO: 835722 - RNA, 19 nt, Artificial Sequence
  Description of Artificial Sequence: Synthetic oligonucleotide
  Sense strand starting at position 52 of SEQ ID NO: 588015
ugguaagugcugggaauac

SEQ ID NO: 835723 - RNA, 19 nt, Artificial Sequence
  Description of Artificial Sequence: Synthetic oligonucleotide
  Antisense strand to SEQ ID NO: 835722
guauucccagcacuuacca

SEQ ID NO: 835724 - RNA, 19 nt, Artificial Sequence
  Description of Artificial Sequence: Synthetic oligonucleotide
  Sense strand starting at position 106 of SEQ ID NO: 588015
gcauauuucuggcugggca

SEQ ID NO: 835725 - RNA, 19 nt, Artificial Sequence
  Description of Artificial Sequence: Synthetic oligonucleotide
  Antisense strand to SEQ ID NO: 835724
ugcccagccagaaauaugc

SEQ ID NO: 835726 - RNA, 19 nt, Artificial Sequence
  Description of Artificial Sequence: Synthetic oligonucleotide
  Sense strand starting at position 462 of SEQ ID NO: 588015
cggaaauggugagugugaa

SEQ ID NO: 835727 - RNA, 19 nt, Artificial Sequence
  Description of Artificial Sequence: Synthetic oligonucleotide
  Antisense strand to SEQ ID NO: 835726
uucacacucaccauuuccg

SEQ ID NO: 835728 - RNA, 19 nt, Artificial Sequence
  Description of Artificial Sequence: Synthetic oligonucleotide
  Sense strand starting at position 463 of SEQ ID NO: 588015
ggaaauggugagugugaau

SEQ ID NO: 835729 - RNA, 19 nt, Artificial Sequence
  Description of Artificial Sequence: Synthetic oligonucleotide
  Antisense strand to SEQ ID NO: 835728
auucacacucaccauuucc

SEQ ID NO: 835730 - RNA, 19 nt, Artificial Sequence
  Description of Artificial Sequence: Synthetic oligonucleotide
  Sense strand starting at position 528 of SEQ ID NO: 588015
cagcuugagugagugagaa

SEQ ID NO: 835731 - RNA, 19 nt, Artificial Sequence
  Description of Artificial Sequence: Synthetic oligonucleotide
  Antisense strand to SEQ ID NO: 835730
uucucacucacucaagcug

SEQ ID NO: 835732 - RNA, 19 nt, Artificial Sequence
  Description of Artificial Sequence: Synthetic oligonucleotide
  Sense strand starting at position 550 of SEQ ID NO: 588015
ucaggacagucuuuguaca

SEQ ID NO: 835733 - RNA, 19 nt, Artificial Sequence
  Description of Artificial Sequence: Synthetic oligonucleotide
  Antisense strand to SEQ ID NO: 835732
uguacaaagacuguccuga

SEQ ID NO: 835734 - RNA, 19 nt, Artificial Sequence
  Description of Artificial Sequence: Synthetic oligonucleotide
  Sense strand starting at position 551 of SEQ ID NO: 588015
caggacagucuuuguacau

SEQ ID NO: 835735 - RNA, 19 nt, Artificial Sequence
  Description of Artificial Sequence: Synthetic oligonucleotide
  Antisense strand to SEQ ID NO: 835734
auguacaaagacuguccug

SEQ ID NO: 835736 - RNA, 19 nt, Artificial Sequence
  Description of Artificial Sequence: Synthetic oligonucleotide
  Sense strand starting at position 552 of SEQ ID NO: 588015
aggacagucuuuguacauu

SEQ ID NO: 835737 - RNA, 19 nt, Artificial Sequence
  Description of Artificial Sequence: Synthetic oligonucleotide
  Antisense strand to SEQ ID NO: 835736
aauguacaaagacuguccu

SEQ ID NO: 835738 - RNA, 19 nt, Artificial Sequence
  Description of Artificial Sequence: Synthetic oligonucleotide
  Sense strand starting at position 606 of SEQ ID NO: 588015
gcaacauuucuaggcaucu

SEQ ID NO: 835739 - RNA, 19 nt, Artificial Sequence
  Description of Artificial Sequence: Synthetic oligonucleotide
  Antisense strand to SEQ ID NO: 835738
agaugccuagaaauguugc

SEQ ID NO: 835740 - RNA, 19 nt, Artificial Sequence
  Description of Artificial Sequence: Synthetic oligonucleotide
  Sense strand starting at position 629 of SEQ ID NO: 588015
ccuugugagcagggagaaa

SEQ ID NO: 835741 - RNA, 19 nt, Artificial Sequence
  Description of Artificial Sequence: Synthetic oligonucleotide
  Antisense strand to SEQ ID NO: 835740
uuucucccugcucacaagg

SEQ ID NO: 835742 - RNA, 19 nt, Artificial Sequence
  Description of Artificial Sequence: Synthetic oligonucleotide
  Sense strand starting at position 691 of SEQ ID NO: 588015
ggucucuaacuuuagaauu

SEQ ID NO: 835743 - RNA, 19 nt, Artificial Sequence
  Description of Artificial Sequence: Synthetic oligonucleotide
  Antisense strand to SEQ ID NO: 835742
aauucuaaaguuagagacc

SEQ ID NO: 835744 - RNA, 19 nt, Artificial Sequence
  Description of Artificial Sequence: Synthetic oligonucleotide
  Sense strand starting at position 925 of SEQ ID NO: 588015
ugauccuacuccgucaaua

SEQ ID NO: 835745 - RNA, 19 nt, Artificial Sequence
  Description of Artificial Sequence: Synthetic oligonucleotide
  Antisense strand to SEQ ID NO: 835744
uauugacggaguaggauca

SEQ ID NO: 835746 - RNA, 19 nt, Artificial Sequence
  Description of Artificial Sequence: Synthetic oligonucleotide
  Sense strand starting at position 1045 of SEQ ID NO: 588015
auagcuucuguccaaagca

SEQ ID NO: 835747 - RNA, 19 nt, Artificial Sequence
  Description of Artificial Sequence: Synthetic oligonucleotide
  Antisense strand to SEQ ID NO: 835746
ugcuuuggacagaagcuau

SEQ ID NO: 835748 - RNA, 19 nt, Artificial Sequence
  Description of Artificial Sequence: Synthetic oligonucleotide
  Sense strand starting at position 1071 of SEQ ID NO: 588015
uacagaaucgagugaccuu

SEQ ID NO: 835749 - RNA, 19 nt, Artificial Sequence
  Description of Artificial Sequence: Synthetic oligonucleotide
  Antisense strand to SEQ ID NO: 835748
aaggucacucgauucugua

SEQ ID NO: 835750 - RNA, 19 nt, Artificial Sequence
  Description of Artificial Sequence: Synthetic oligonucleotide
  Sense strand starting at position 1072 of SEQ ID NO: 588015
acagaaucgagugaccuuu

SEQ ID NO: 835751 - RNA, 19 nt, Artificial Sequence
  Description of Artificial Sequence: Synthetic oligonucleotide
  Antisense strand to SEQ ID NO: 835750
aaaggucacucgauucugu

SEQ ID NO: 835752 - RNA, 19 nt, Artificial Sequence
  Description of Artificial Sequence: Synthetic oligonucleotide
  Sense strand starting at position 1176 of SEQ ID NO: 588015
cugauugcagugcagauua

SEQ ID NO: 835753 - RNA, 19 nt, Artificial Sequence
  Description of Artificial Sequence: Synthetic oligonucleotide
  Antisense strand to SEQ ID NO: 835752
uaaucugcacugcaaucag

SEQ ID NO: 835754 - RNA, 19 nt, Artificial Sequence
  Description of Artificial Sequence: Synthetic oligonucleotide
  Sense strand starting at position 1181 of SEQ ID NO: 588015
ugcagugcagauuaaauga

SEQ ID NO: 835755 - RNA, 19 nt, Artificial Sequence
  Description of Artificial Sequence: Synthetic oligonucleotide
  Antisense strand to SEQ ID NO: 835754
ucauuuaaucugcacugca

SEQ ID NO: 835756 - RNA, 19 nt, Artificial Sequence
  Description of Artificial Sequence: Synthetic oligonucleotide
  Sense strand starting at position 1216 of SEQ ID NO: 588015
ugguguuuggcuuauaaua

SEQ ID NO: 835757 - RNA, 19 nt, Artificial Sequence
  Description of Artificial Sequence: Synthetic oligonucleotide
  Antisense strand to SEQ ID NO: 835756
uauuauaagccaaacacca

SEQ ID NO: 835758 - RNA, 19 nt, Artificial Sequence
  Description of Artificial Sequence: Synthetic oligonucleotide
  Sense strand starting at position 1248 of SEQ ID NO: 588015
cgucauuauccugagccaa

SEQ ID NO: 835759 - RNA, 19 nt, Artificial Sequence
  Description of Artificial Sequence: Synthetic oligonucleotide
  Antisense strand to SEQ ID NO: 835758
uuggcucaggauaaugacg

SEQ ID NO: 835760 - RNA, 19 nt, Artificial Sequence
  Description of Artificial Sequence: Synthetic oligonucleotide
  Sense strand starting at position 1639 of SEQ ID NO: 588015
gaaagcacugucuaugauu

SEQ ID NO: 835761 - RNA, 19 nt, Artificial Sequence
  Description of Artificial Sequence: Synthetic oligonucleotide
  Antisense strand to SEQ ID NO: 835760
aaucauagacagugcuuuc

SEQ ID NO: 835762 - RNA, 19 nt, Artificial Sequence
  Description of Artificial Sequence: Synthetic oligonucleotide
  Sense strand starting at position 1773 of SEQ ID NO: 588015
gggaguuguagucaaagcu

SEQ ID NO: 835763 - RNA, 19 nt, Artificial Sequence
  Description of Artificial Sequence: Synthetic oligonucleotide
  Antisense strand to SEQ ID NO: 835762
agcuuugacuacaacuccc

SEQ ID NO: 835764 - RNA, 19 nt, Artificial Sequence
  Description of Artificial Sequence: Synthetic oligonucleotide
  Sense strand starting at position 1856 of SEQ ID NO: 588015
cugugacugucgaagggaa

SEQ ID NO: 835765 - RNA, 19 nt, Artificial Sequence
  Description of Artificial Sequence: Synthetic oligonucleotide
  Antisense strand to SEQ ID NO: 835764
uucccuucgacagucacag

SEQ ID NO: 835766 - RNA, 19 nt, Artificial Sequence
  Description of Artificial Sequence: Synthetic oligonucleotide
  Sense strand starting at position 2076 of SEQ ID NO: 588015
gggucaauaacgugguaaa

SEQ ID NO: 835767 - RNA, 19 nt, Artificial Sequence
  Description of Artificial Sequence: Synthetic oligonucleotide
  Antisense strand to SEQ ID NO: 835766
uuuaccacguuauugaccc

SEQ ID NO: 835768 - RNA, 19 nt, Artificial Sequence
  Description of Artificial Sequence: Synthetic oligonucleotide
  Sense strand starting at position 2077 of SEQ ID NO: 588015
ggucaauaacgugguaaau

SEQ ID NO: 835769 - RNA, 19 nt, Artificial Sequence
  Description of Artificial Sequence: Synthetic oligonucleotide
  Antisense strand to SEQ ID NO: 835768
auuuaccacguuauugacc

SEQ ID NO: 835770 - RNA, 19 nt, Artificial Sequence
  Description of Artificial Sequence: Synthetic oligonucleotide
  Sense strand starting at position 2152 of SEQ ID NO: 588015
ucuguagccguguuucaga

SEQ ID NO: 835771 - RNA, 19 nt, Artificial Sequence
  Description of Artificial Sequence: Synthetic oligonucleotide
  Antisense strand to SEQ ID NO: 835770
ucugaaacacggcuacaga

SEQ ID NO: 835772 - RNA, 19 nt, Artificial Sequence
  Description of Artificial Sequence: Synthetic oligonucleotide
  Sense strand starting at position 2378 of SEQ ID NO: 588015
ggaugaaugugggcuauaa

SEQ ID NO: 835773 - RNA, 19 nt, Artificial Sequence
  Description of Artificial Sequence: Synthetic oligonucleotide
  Antisense strand to SEQ ID NO: 835772
uuauagcccacauucaucc

SEQ ID NO: 835774 - RNA, 19 nt, Artificial Sequence
  Description of Artificial Sequence: Synthetic oligonucleotide
  Sense strand starting at position 2402 of SEQ ID NO: 588015
uccuuaucucccuaacggu

SEQ ID NO: 835775 - RNA, 19 nt, Artificial Sequence
  Description of Artificial Sequence: Synthetic oligonucleotide
  Antisense strand to SEQ ID NO: 835774
accguuagggagauaagga

SEQ ID NO: 835776 - RNA, 19 nt, Artificial Sequence
  Description of Artificial Sequence: Synthetic oligonucleotide
  Sense strand starting at position 3149 of SEQ ID NO: 588015
uuuauugagcuccacaguu

SEQ ID NO: 835777 - RNA, 19 nt, Artificial Sequence
  Description of Artificial Sequence: Synthetic oligonucleotide
  Antisense strand to SEQ ID NO: 835776
aacuguggagcucaauaaa

SEQ ID NO: 835778 - RNA, 19 nt, Artificial Sequence
  Description of Artificial Sequence: Synthetic oligonucleotide
  Sense strand starting at position 3162 of SEQ ID NO: 588015
acaguuugguacucuacaa

SEQ ID NO: 835779 - RNA, 19 nt, Artificial Sequence
  Description of Artificial Sequence: Synthetic oligonucleotide
  Antisense strand to SEQ ID NO: 835778
uuguagaguaccaaacugu

SEQ ID NO: 835780 - RNA, 19 nt, Artificial Sequence
  Description of Artificial Sequence: Synthetic oligonucleotide
  Sense strand starting at position 3280 of SEQ ID NO: 588015
gaaagauagcccuguaagc

SEQ ID NO: 835781 - RNA, 19 nt, Artificial Sequence
  Description of Artificial Sequence: Synthetic oligonucleotide
  Antisense strand to SEQ ID NO: 835780
gcuuacagggcuaucuuuc

SEQ ID NO: 835782 - RNA, 19 nt, Artificial Sequence
  Description of Artificial Sequence: Synthetic oligonucleotide
  Sense strand starting at position 3317 of SEQ ID NO: 588015
uccugagugcuaugauaga

SEQ ID NO: 835783 - RNA, 19 nt, Artificial Sequence
  Description of Artificial Sequence: Synthetic oligonucleotide
  Antisense strand to SEQ ID NO: 835782
ucuaucauagcacucagga

SEQ ID NO: 835784 - RNA, 19 nt, Artificial Sequence
  Description of Artificial Sequence: Synthetic oligonucleotide
  Sense strand starting at position 3334 of SEQ ID NO: 588015
gagauauacacaggguguu

SEQ ID NO: 835785 - RNA, 19 nt, Artificial Sequence
  Description of Artificial Sequence: Synthetic oligonucleotide
  Antisense strand to SEQ ID NO: 835784
aacacccuguguauaucuc

SEQ ID NO: 835786 - RNA, 19 nt, Artificial Sequence
  Description of Artificial Sequence: Synthetic oligonucleotide
  Sense strand starting at position 3344 of SEQ ID NO: 588015
caggguguugcagaaccau

SEQ ID NO: 835787 - RNA, 19 nt, Artificial Sequence
  Description of Artificial Sequence: Synthetic oligonucleotide
  Antisense strand to SEQ ID NO: 835786
augguucugcaacacccug

SEQ ID NO: 835788 - RNA, 19 nt, Artificial Sequence
  Description of Artificial Sequence: Synthetic oligonucleotide
  Sense strand starting at position 3412 of SEQ ID NO: 588015
guguucaaagguuaggaau

SEQ ID NO: 835789 - RNA, 19 nt, Artificial Sequence
  Description of Artificial Sequence: Synthetic oligonucleotide
  Antisense strand to SEQ ID NO: 835788
auuccuaaccuuugaacac

SEQ ID NO: 835790 - RNA, 19 nt, Artificial Sequence
  Description of Artificial Sequence: Synthetic oligonucleotide
  Sense strand starting at position 3468 of SEQ ID NO: 588015
uuaggaaccugagugcaaa

SEQ ID NO: 835791 - RNA, 19 nt, Artificial Sequence
  Description of Artificial Sequence: Synthetic oligonucleotide
  Antisense strand to SEQ ID NO: 835790
uuugcacucagguuccuaa

SEQ ID NO: 835792 - RNA, 19 nt, Artificial Sequence
  Description of Artificial Sequence: Synthetic oligonucleotide
  Sense strand starting at position 3486 of SEQ ID NO: 588015
aggaacuaccagugauuau

SEQ ID NO: 835793 - RNA, 19 nt, Artificial Sequence
  Description of Artificial Sequence: Synthetic oligonucleotide
  Antisense strand to SEQ ID NO: 835792
auaaucacugguaguuccu

SEQ ID NO: 835794 - RNA, 19 nt, Artificial Sequence
  Description of Artificial Sequence: Synthetic oligonucleotide
  Sense strand starting at position 3498 of SEQ ID NO: 588015
ugauuauugcugcaguuua

SEQ ID NO: 835795 - RNA, 19 nt, Artificial Sequence
  Description of Artificial Sequence: Synthetic oligonucleotide
  Antisense strand to SEQ ID NO: 835794
uaaacugcagcaauaauca

SEQ ID NO: 835796 - RNA, 19 nt, Artificial Sequence
  Description of Artificial Sequence: Synthetic oligonucleotide
  Sense strand starting at position 3865 of SEQ ID NO: 588015
cuuuguauauaggcuaaga

SEQ ID NO: 835797 - RNA, 19 nt, Artificial Sequence
  Description of Artificial Sequence: Synthetic oligonucleotide
  Antisense strand to SEQ ID NO: 835796
ucuuagccuauauacaaag

SEQ ID NO: 835798 - RNA, 19 nt, Artificial Sequence
  Description of Artificial Sequence: Synthetic oligonucleotide
  Sense strand starting at position 3919 of SEQ ID NO: 588015
gcacaaucugaagaucagu

SEQ ID NO: 835799 - RNA, 19 nt, Artificial Sequence
  Description of Artificial Sequence: Synthetic oligonucleotide
  Antisense strand to SEQ ID NO: 835798
acugaucuucagauugugc

SEQ ID NO: 835800 - RNA, 19 nt, Artificial Sequence
  Description of Artificial Sequence: Synthetic oligonucleotide
  Sense strand starting at position 2 of SEQ ID NO: 588016
cgaauaguaaguggaaacu

SEQ ID NO: 835801 - RNA, 19 nt, Artificial Sequence
  Description of Artificial Sequence: Synthetic oligonucleotide
  Antisense strand to SEQ ID NO: 835800
aguuuccacuuacuauucg

SEQ ID NO: 835802 - RNA, 19 nt, Artificial Sequence
  Description of Artificial Sequence: Synthetic oligonucleotide
  Sense strand starting at position 11 of SEQ ID NO: 588016
aguggaaacucagacauuu

SEQ ID NO: 835803 - RNA, 19 nt, Artificial Sequence
  Description of Artificial Sequence: Synthetic oligonucleotide
  Antisense strand to SEQ ID NO: 835802
aaaugucugaguuuccacu

SEQ ID NO: 835804 - RNA, 19 nt, Artificial Sequence
  Description of Artificial Sequence: Synthetic oligonucleotide
  Sense strand starting at position 86 of SEQ ID NO: 588016
agagcugacuuugcaauga

SEQ ID NO: 835805 - RNA, 19 nt, Artificial Sequence
  Description of Artificial Sequence: Synthetic oligonucleotide
  Antisense strand to SEQ ID NO: 835804
ucauugcaaagucagcucu

SEQ ID NO: 835806 - RNA, 19 nt, Artificial Sequence
  Description of Artificial Sequence: Synthetic oligonucleotide
  Sense strand starting at position 90 of SEQ ID NO: 588016
cugacuuugcaaugagaca

SEQ ID NO: 835807 - RNA, 19 nt, Artificial Sequence
  Description of Artificial Sequence: Synthetic oligonucleotide
  Antisense strand to SEQ ID NO: 835806
ugucucauugcaaagucag

SEQ ID NO: 835808 - RNA, 19 nt, Artificial Sequence
  Description of Artificial Sequence: Synthetic oligonucleotide
  Sense strand starting at position 104 of SEQ ID NO: 588016
agacauuugccguacguag

SEQ ID NO: 835809 - RNA, 19 nt, Artificial Sequence
  Description of Artificial Sequence: Synthetic oligonucleotide
  Antisense strand to SEQ ID NO: 835808
cuacguacggcaaaugucu

SEQ ID NO: 835810 - RNA, 19 nt, Artificial Sequence
  Description of Artificial Sequence: Synthetic oligonucleotide
  Sense strand starting at position 158 of SEQ ID NO: 588016
acgagaaggaacugugguu

SEQ ID NO: 835811 - RNA, 19 nt, Artificial Sequence
  Description of Artificial Sequence: Synthetic oligonucleotide
  Antisense strand to SEQ ID NO: 835810
aaccacaguuccuucucgu

SEQ ID NO: 835812 - RNA, 19 nt, Artificial Sequence
  Description of Artificial Sequence: Synthetic oligonucleotide
  Sense strand starting at position 177 of SEQ ID NO: 588016
caucauaacccagggugua

SEQ ID NO: 835813 - RNA, 19 nt, Artificial Sequence
  Description of Artificial Sequence: Synthetic oligonucleotide
  Antisense strand to SEQ ID NO: 835812
uacacccuggguuaugaug

SEQ ID NO: 835814 - RNA, 19 nt, Artificial Sequence
  Description of Artificial Sequence: Synthetic oligonucleotide
  Sense strand starting at position 409 of SEQ ID NO: 588016
augagauaacauugguucu

SEQ ID NO: 835815 - RNA, 19 nt, Artificial Sequence
  Description of Artificial Sequence: Synthetic oligonucleotide
  Antisense strand to SEQ ID NO: 835814
agaaccaauguuaucucau

SEQ ID NO: 835816 - RNA, 19 nt, Artificial Sequence
  Description of Artificial Sequence: Synthetic oligonucleotide
  Sense strand starting at position 411 of SEQ ID NO: 588016
gagauaacauugguucuuu

SEQ ID NO: 835817 - RNA, 19 nt, Artificial Sequence
  Description of Artificial Sequence: Synthetic oligonucleotide
  Antisense strand to SEQ ID NO: 835816
aaagaaccaauguuaucuc

SEQ ID NO: 835818 - RNA, 19 nt, Artificial Sequence
  Description of Artificial Sequence: Synthetic oligonucleotide
  Sense strand starting at position 480 of SEQ ID NO: 588016
gcauguucaggagaccgaa

SEQ ID NO: 835819 - RNA, 19 nt, Artificial Sequence
  Description of Artificial Sequence: Synthetic oligonucleotide
  Antisense strand to SEQ ID NO: 835818
uucggucuccugaacaugc

SEQ ID NO: 835820 - RNA, 19 nt, Artificial Sequence
  Description of Artificial Sequence: Synthetic oligonucleotide
  Sense strand starting at position 541 of SEQ ID NO: 588016
gcaaguguaaggcaaauca

SEQ ID NO: 835821 - RNA, 19 nt, Artificial Sequence
  Description of Artificial Sequence: Synthetic oligonucleotide
  Antisense strand to SEQ ID NO: 835820
ugauuugccuuacacuugc

SEQ ID NO: 835822 - RNA, 19 nt, Artificial Sequence
  Description of Artificial Sequence: Synthetic oligonucleotide
  Sense strand starting at position 574 of SEQ ID NO: 588016
auauucuaagccugaugga

SEQ ID NO: 835823 - RNA, 19 nt, Artificial Sequence
  Description of Artificial Sequence: Synthetic oligonucleotide
  Antisense strand to SEQ ID NO: 835822
uccaucaggcuuagaauau

SEQ ID NO: 835824 - RNA, 19 nt, Artificial Sequence
  Description of Artificial Sequence: Synthetic oligonucleotide
  Sense strand starting at position 685 of SEQ ID NO: 588016
ugaaacugccucugaucau

SEQ ID NO: 835825 - RNA, 19 nt, Artificial Sequence
  Description of Artificial Sequence: Synthetic oligonucleotide
  Antisense strand to SEQ ID NO: 835824
augaucagaggcaguuuca

SEQ ID NO: 835826 - RNA, 19 nt, Artificial Sequence
  Description of Artificial Sequence: Synthetic oligonucleotide
  Sense strand starting at position 711 of SEQ ID NO: 588016
acaacuccuugggauuuau

SEQ ID NO: 835827 - RNA, 19 nt, Artificial Sequence
  Description of Artificial Sequence: Synthetic oligonucleotide
  Antisense strand to SEQ ID NO: 835826
auaaaucccaaggaguugu

SEQ ID NO: 835828 - RNA, 19 nt, Artificial Sequence
  Description of Artificial Sequence: Synthetic oligonucleotide
  Sense strand starting at position 779 of SEQ ID NO: 588016
ugcgaaauuucccucugcu

SEQ ID NO: 835829 - RNA, 19 nt, Artificial Sequence
  Description of Artificial Sequence: Synthetic oligonucleotide
  Antisense strand to SEQ ID NO: 835828
agcagagggaaauuucgca

SEQ ID NO: 835830 - RNA, 19 nt, Artificial Sequence
  Description of Artificial Sequence: Synthetic oligonucleotide
  Sense strand starting at position 1172 of SEQ ID NO: 588016
ccaggaacucuccgacauc

SEQ ID NO: 835831 - RNA, 19 nt, Artificial Sequence
  Description of Artificial Sequence: Synthetic oligonucleotide
  Antisense strand to SEQ ID NO: 835830
gaugucggagaguuccugg

SEQ ID NO: 835832 - RNA, 19 nt, Artificial Sequence
  Description of Artificial Sequence: Synthetic oligonucleotide
  Sense strand starting at position 1252 of SEQ ID NO: 588016
gcgagauuggagugaagac

SEQ ID NO: 835833 - RNA, 19 nt, Artificial Sequence
  Description of Artificial Sequence: Synthetic oligonucleotide
  Antisense strand to SEQ ID NO: 835832
gucuucacuccaaucucgc

SEQ ID NO: 835834 - RNA, 19 nt, Artificial Sequence
  Description of Artificial Sequence: Synthetic oligonucleotide
  Sense strand starting at position 2557 of SEQ ID NO: 588016
uaacaaucaugggugcauu

SEQ ID NO: 835835 - RNA, 19 nt, Artificial Sequence
  Description of Artificial Sequence: Synthetic oligonucleotide
  Antisense strand to SEQ ID NO: 835834
aaugcacccaugauuguua

SEQ ID NO: 835836 - RNA, 19 nt, Artificial Sequence
  Description of Artificial Sequence: Synthetic oligonucleotide
  Sense strand starting at position 2558 of SEQ ID NO: 588016
aacaaucaugggugcauua

SEQ ID NO: 835837 - RNA, 19 nt, Artificial Sequence
  Description of Artificial Sequence: Synthetic oligonucleotide
  Antisense strand to SEQ ID NO: 835836
uaaugcacccaugauuguu

SEQ ID NO: 835838 - RNA, 19 nt, Artificial Sequence
  Description of Artificial Sequence: Synthetic oligonucleotide
  Sense strand starting at position 2577 of SEQ ID NO: 588016
aggcuuguauaaucgauuu

SEQ ID NO: 835839 - RNA, 19 nt, Artificial Sequence
  Description of Artificial Sequence: Synthetic oligonucleotide
  Antisense strand to SEQ ID NO: 835838
aaaucgauuauacaagccu

SEQ ID NO: 835840 - RNA, 19 nt, Artificial Sequence
  Description of Artificial Sequence: Synthetic oligonucleotide
  Sense strand starting at position 2616 of SEQ ID NO: 588016
uuucgaauucccuauucug

SEQ ID NO: 835841 - RNA, 19 nt, Artificial Sequence
  Description of Artificial Sequence: Synthetic oligonucleotide
  Antisense strand to SEQ ID NO: 835840
cagaauagggaauucgaaa

SEQ ID NO: 835842 - RNA, 19 nt, Artificial Sequence
  Description of Artificial Sequence: Synthetic oligonucleotide
  Sense strand starting at position 2886 of SEQ ID NO: 588016
uaguuauaaguggauucuu

SEQ ID NO: 835843 - RNA, 19 nt, Artificial Sequence
  Description of Artificial Sequence: Synthetic oligonucleotide
  Antisense strand to SEQ ID NO: 835842
aagaauccacuuauaacua

SEQ ID NO: 835844 - RNA, 19 nt, Artificial Sequence
  Description of Artificial Sequence: Synthetic oligonucleotide
  Sense strand starting at position 2938 of SEQ ID NO: 588016
gauguaacauuguuaggaa

SEQ ID NO: 835845 - RNA, 19 nt, Artificial Sequence
  Description of Artificial Sequence: Synthetic oligonucleotide
  Antisense strand to SEQ ID NO: 835844
uuccuaacaauguuacauc

SEQ ID NO: 835846 - RNA, 19 nt, Artificial Sequence
  Description of Artificial Sequence: Synthetic oligonucleotide
  Sense strand starting at position 2972 of SEQ ID NO: 588016
ugaaauaaugucgauuagu

SEQ ID NO: 835847 - RNA, 19 nt, Artificial Sequence
  Description of Artificial Sequence: Synthetic oligonucleotide
  Antisense strand to SEQ ID NO: 835846
acuaaucgacauuauuuca

SEQ ID NO: 835848 - RNA, 19 nt, Artificial Sequence
  Description of Artificial Sequence: Synthetic oligonucleotide
  Sense strand starting at position 2975 of SEQ ID NO: 588016
aauaaugucgauuagugau

SEQ ID NO: 835849 - RNA, 19 nt, Artificial Sequence
  Description of Artificial Sequence: Synthetic oligonucleotide
  Antisense strand to SEQ ID NO: 835848
aucacuaaucgacauuauu

SEQ ID NO: 835850 - RNA, 19 nt, Artificial Sequence
  Description of Artificial Sequence: Synthetic oligonucleotide
  Sense strand starting at position 2982 of SEQ ID NO: 588016
ucgauuagugauuaguuau

SEQ ID NO: 835851 - RNA, 19 nt, Artificial Sequence
  Description of Artificial Sequence: Synthetic oligonucleotide
  Antisense strand to SEQ ID NO: 835850
auaacuaaucacuaaucga

SEQ ID NO: 835852 - RNA, 19 nt, Artificial Sequence
  Description of Artificial Sequence: Synthetic oligonucleotide
  Sense strand starting at position 3005 of SEQ ID NO: 588016
aguuaagucauaggaugug

SEQ ID NO: 835853 - RNA, 19 nt, Artificial Sequence
  Description of Artificial Sequence: Synthetic oligonucleotide
  Antisense strand to SEQ ID NO: 835852
cacauccuaugacuuaacu

SEQ ID NO: 835854 - RNA, 19 nt, Artificial Sequence
  Description of Artificial Sequence: Synthetic oligonucleotide
  Sense strand starting at position 3494 of SEQ ID NO: 588016
aagggagccuugguuugaa

SEQ ID NO: 835855 - RNA, 19 nt, Artificial Sequence
  Description of Artificial Sequence: Synthetic oligonucleotide
  Antisense strand to SEQ ID NO: 835854
uucaaaccaaggcucccuu

SEQ ID NO: 835856 - RNA, 19 nt, Artificial Sequence
  Description of Artificial Sequence: Synthetic oligonucleotide
  Sense strand starting at position 3627 of SEQ ID NO: 588016
aacaguuuaaggugaggua

SEQ ID NO: 835857 - RNA, 19 nt, Artificial Sequence
  Description of Artificial Sequence: Synthetic oligonucleotide
  Antisense strand to SEQ ID NO: 835856
uaccucaccuuaaacuguu

SEQ ID NO: 835858 - RNA, 19 nt, Artificial Sequence
  Description of Artificial Sequence: Synthetic oligonucleotide
  Sense strand starting at position 3628 of SEQ ID NO: 588016
acaguuuaaggugagguaa

SEQ ID NO: 835859 - RNA, 19 nt, Artificial Sequence
  Description of Artificial Sequence: Synthetic oligonucleotide
  Antisense strand to SEQ ID NO: 835858
uuaccucaccuuaaacugu

SEQ ID NO: 835860 - RNA, 19 nt, Artificial Sequence
  Description of Artificial Sequence: Synthetic oligonucleotide
  Sense strand starting at position 3639 of SEQ ID NO: 588016
ugagguaauuguucuagau

SEQ ID NO: 835861 - RNA, 19 nt, Artificial Sequence
  Description of Artificial Sequence: Synthetic oligonucleotide
  Antisense strand to SEQ ID NO: 835860
aucuagaacaauuaccuca

SEQ ID NO: 835862 - RNA, 19 nt, Artificial Sequence
  Description of Artificial Sequence: Synthetic oligonucleotide
  Sense strand starting at position 3643 of SEQ ID NO: 588016
guaauuguucuagaugagg

SEQ ID NO: 835863 - RNA, 19 nt, Artificial Sequence
  Description of Artificial Sequence: Synthetic oligonucleotide
  Antisense strand to SEQ ID NO: 835862
ccucaucuagaacaauuac

SEQ ID NO: 835864 - RNA, 19 nt, Artificial Sequence
  Description of Artificial Sequence: Synthetic oligonucleotide
  Sense strand starting at position 3654 of SEQ ID NO: 588016
agaugagguaauugcacua

SEQ ID NO: 835865 - RNA, 19 nt, Artificial Sequence
  Description of Artificial Sequence: Synthetic oligonucleotide
  Antisense strand to SEQ ID NO: 835864
uagugcaauuaccucaucu

SEQ ID NO: 835866 - RNA, 19 nt, Artificial Sequence
  Description of Artificial Sequence: Synthetic oligonucleotide
  Sense strand starting at position 3659 of SEQ ID NO: 588016
agguaauugcacuaacuca

SEQ ID NO: 835867 - RNA, 19 nt, Artificial Sequence
  Description of Artificial Sequence: Synthetic oligonucleotide
  Antisense strand to SEQ ID NO: 835866
ugaguuagugcaauuaccu

SEQ ID NO: 835868 - RNA, 19 nt, Artificial Sequence
  Description of Artificial Sequence: Synthetic oligonucleotide
  Sense strand starting at position 3809 of SEQ ID NO: 588016
ucgccuugcggcucaauaa

SEQ ID NO: 835869 - RNA, 19 nt, Artificial Sequence
  Description of Artificial Sequence: Synthetic oligonucleotide
  Antisense strand to SEQ ID NO: 835868
uuauugagccgcaaggcga

SEQ ID NO: 835870 - RNA, 19 nt, Artificial Sequence
  Description of Artificial Sequence: Synthetic oligonucleotide
  Sense strand starting at position 3829 of SEQ ID NO: 588016
agguuugggaccuagucaa

SEQ ID NO: 835871 - RNA, 19 nt, Artificial Sequence
  Description of Artificial Sequence: Synthetic oligonucleotide
  Antisense strand to SEQ ID NO: 835870
uugacuaggucccaaaccu

SEQ ID NO: 835872 - RNA, 19 nt, Artificial Sequence
  Description of Artificial Sequence: Synthetic oligonucleotide
  Sense strand starting at position 3904 of SEQ ID NO: 588016
uagggacuugccuggaaau

SEQ ID NO: 835873 - RNA, 19 nt, Artificial Sequence
  Description of Artificial Sequence: Synthetic oligonucleotide
  Antisense strand to SEQ ID NO: 835872
auuuccaggcaagucccua

SEQ ID NO: 835874 - RNA, 19 nt, Artificial Sequence
  Description of Artificial Sequence: Synthetic oligonucleotide
  Sense strand starting at position 3905 of SEQ ID NO: 588016
agggacuugccuggaaauc

SEQ ID NO: 835875 - RNA, 19 nt, Artificial Sequence
  Description of Artificial Sequence: Synthetic oligonucleotide
  Antisense strand to SEQ ID NO: 835874
gauuuccaggcaagucccu

SEQ ID NO: 835876 - RNA, 19 nt, Artificial Sequence
  Description of Artificial Sequence: Synthetic oligonucleotide
  Sense strand starting at position 3906 of SEQ ID NO: 588016
gggacuugccuggaaaucu

SEQ ID NO: 835877 - RNA, 19 nt, Artificial Sequence
  Description of Artificial Sequence: Synthetic oligonucleotide
  Antisense strand to SEQ ID NO: 835876
agauuuccaggcaaguccc

SEQ ID NO: 835878 - RNA, 19 nt, Artificial Sequence
  Description of Artificial Sequence: Synthetic oligonucleotide
  Sense strand starting at position 3926 of SEQ ID NO: 588016
uuuagaaucuugguaaaug

SEQ ID NO: 835879 - RNA, 19 nt, Artificial Sequence
  Description of Artificial Sequence: Synthetic oligonucleotide
  Antisense strand to SEQ ID NO: 835878
cauuuaccaagauucuaaa

SEQ ID NO: 835880 - RNA, 19 nt, Artificial Sequence
  Description of Artificial Sequence: Synthetic oligonucleotide
  Sense strand starting at position 527 of SEQ ID NO: 588017
cucagugcacuacagauua

SEQ ID NO: 835881 - RNA, 19 nt, Artificial Sequence
  Description of Artificial Sequence: Synthetic oligonucleotide
  Antisense strand to SEQ ID NO: 835880
uaaucuguagugcacugag

SEQ ID NO: 835882 - RNA, 19 nt, Artificial Sequence
  Description of Artificial Sequence: Synthetic oligonucleotide
  Sense strand starting at position 555 of SEQ ID NO: 588017
agcaaaucuccuuggaaau

SEQ ID NO: 835883 - RNA, 19 nt, Artificial Sequence
  Description of Artificial Sequence: Synthetic oligonucleotide
  Antisense strand to SEQ ID NO: 835882
auuuccaaggagauuugcu

SEQ ID NO: 835884 - RNA, 19 nt, Artificial Sequence
  Description of Artificial Sequence: Synthetic oligonucleotide
  Sense strand starting at position 556 of SEQ ID NO: 588017
gcaaaucuccuuggaaauu

SEQ ID NO: 835885 - RNA, 19 nt, Artificial Sequence
  Description of Artificial Sequence: Synthetic oligonucleotide
  Antisense strand to SEQ ID NO: 835884
aauuuccaaggagauuugc

SEQ ID NO: 835886 - RNA, 19 nt, Artificial Sequence
  Description of Artificial Sequence: Synthetic oligonucleotide
  Sense strand starting at position 660 of SEQ ID NO: 588017
accaccuaucagugacuau

SEQ ID NO: 835887 - RNA, 19 nt, Artificial Sequence
  Description of Artificial Sequence: Synthetic oligonucleotide
  Antisense strand to SEQ ID NO: 835886
auagucacugauagguggu

SEQ ID NO: 835888 - RNA, 19 nt, Artificial Sequence
  Description of Artificial Sequence: Synthetic oligonucleotide
  Sense strand starting at position 742 of SEQ ID NO: 588017
cugauuuauuuacaugucu

SEQ ID NO: 835889 - RNA, 19 nt, Artificial Sequence
  Description of Artificial Sequence: Synthetic oligonucleotide
  Antisense strand to SEQ ID NO: 835888
agacauguaaauaaaucag

SEQ ID NO: 835890 - RNA, 19 nt, Artificial Sequence
  Description of Artificial Sequence: Synthetic oligonucleotide
  Sense strand starting at position 753 of SEQ ID NO: 588017
acaugucuguuacuacaga

SEQ ID NO: 835891 - RNA, 19 nt, Artificial Sequence
  Description of Artificial Sequence: Synthetic oligonucleotide
  Antisense strand to SEQ ID NO: 835890
ucuguaguaacagacaugu

SEQ ID NO: 835892 - RNA, 19 nt, Artificial Sequence
  Description of Artificial Sequence: Synthetic oligonucleotide
  Sense strand starting at position 818 of SEQ ID NO: 588017
gcuaaugggaguugagauc

SEQ ID NO: 835893 - RNA, 19 nt, Artificial Sequence
  Description of Artificial Sequence: Synthetic oligonucleotide
  Antisense strand to SEQ ID NO: 835892
gaucucaacucccauuagc

SEQ ID NO: 835894 - RNA, 19 nt, Artificial Sequence
  Description of Artificial Sequence: Synthetic oligonucleotide
  Sense strand starting at position 825 of SEQ ID NO: 588017
ggaguugagaucuggucua

SEQ ID NO: 835895 - RNA, 19 nt, Artificial Sequence
  Description of Artificial Sequence: Synthetic oligonucleotide
  Antisense strand to SEQ ID NO: 835894
uagaccagaucucaacucc

SEQ ID NO: 835896 - RNA, 19 nt, Artificial Sequence
  Description of Artificial Sequence: Synthetic oligonucleotide
  Sense strand starting at position 830 of SEQ ID NO: 588017
ugagaucuggucuauguag

SEQ ID NO: 835897 - RNA, 19 nt, Artificial Sequence
  Description of Artificial Sequence: Synthetic oligonucleotide
  Antisense strand to SEQ ID NO: 835896
cuacauagaccagaucuca

SEQ ID NO: 835898 - RNA, 19 nt, Artificial Sequence
  Description of Artificial Sequence: Synthetic oligonucleotide
  Sense strand starting at position 960 of SEQ ID NO: 588017
ugucaauuagguuaacgga

SEQ ID NO: 835899 - RNA, 19 nt, Artificial Sequence
  Description of Artificial Sequence: Synthetic oligonucleotide
  Antisense strand to SEQ ID NO: 835898
uccguuaaccuaauugaca

SEQ ID NO: 835900 - RNA, 19 nt, Artificial Sequence
  Description of Artificial Sequence: Synthetic oligonucleotide
  Sense strand starting at position 990 of SEQ ID NO: 588017
accugauguuuccuaacag

SEQ ID NO: 835901 - RNA, 19 nt, Artificial Sequence
  Description of Artificial Sequence: Synthetic oligonucleotide
  Antisense strand to SEQ ID NO: 835900
cuguuaggaaacaucaggu

SEQ ID NO: 835902 - RNA, 19 nt, Artificial Sequence
  Description of Artificial Sequence: Synthetic oligonucleotide
  Sense strand starting at position 1537 of SEQ ID NO: 588017
gguugaaagucauccacua

SEQ ID NO: 835903 - RNA, 19 nt, Artificial Sequence
  Description of Artificial Sequence: Synthetic oligonucleotide
  Antisense strand to SEQ ID NO: 835902
uaguggaugacuuucaacc

SEQ ID NO: 835904 - RNA, 19 nt, Artificial Sequence
  Description of Artificial Sequence: Synthetic oligonucleotide
  Sense strand starting at position 1760 of SEQ ID NO: 588017
auuucccuuccgcgacaaa

SEQ ID NO: 835905 - RNA, 19 nt, Artificial Sequence
  Description of Artificial Sequence: Synthetic oligonucleotide
  Antisense strand to SEQ ID NO: 835904
uuugucgcggaagggaaau

SEQ ID NO: 835906 - RNA, 19 nt, Artificial Sequence
  Description of Artificial Sequence: Synthetic oligonucleotide
  Sense strand starting at position 1912 of SEQ ID NO: 588017
aagcguugccuucugggua

SEQ ID NO: 835907 - RNA, 19 nt, Artificial Sequence
  Description of Artificial Sequence: Synthetic oligonucleotide
  Antisense strand to SEQ ID NO: 835906
uacccagaaggcaacgcuu

SEQ ID NO: 835908 - RNA, 19 nt, Artificial Sequence
  Description of Artificial Sequence: Synthetic oligonucleotide
  Sense strand starting at position 2059 of SEQ ID NO: 588017
gggugaggccaauggagua

SEQ ID NO: 835909 - RNA, 19 nt, Artificial Sequence
  Description of Artificial Sequence: Synthetic oligonucleotide
  Antisense strand to SEQ ID NO: 835908
uacuccauuggccucaccc

SEQ ID NO: 835910 - RNA, 19 nt, Artificial Sequence
  Description of Artificial Sequence: Synthetic oligonucleotide
  Sense strand starting at position 2117 of SEQ ID NO: 588017
uugugaugugaugggaaga

SEQ ID NO: 835911 - RNA, 19 nt, Artificial Sequence
  Description of Artificial Sequence: Synthetic oligonucleotide
  Antisense strand to SEQ ID NO: 835910
ucuucccaucacaucacaa

SEQ ID NO: 835912 - RNA, 19 nt, Artificial Sequence
  Description of Artificial Sequence: Synthetic oligonucleotide
  Sense strand starting at position 2118 of SEQ ID NO: 588017
ugugaugugaugggaagaa

SEQ ID NO: 835913 - RNA, 19 nt, Artificial Sequence
  Description of Artificial Sequence: Synthetic oligonucleotide
  Antisense strand to SEQ ID NO: 835912
uucuucccaucacaucaca

SEQ ID NO: 835914 - RNA, 19 nt, Artificial Sequence
  Description of Artificial Sequence: Synthetic oligonucleotide
  Sense strand starting at position 2176 of SEQ ID NO: 588017
uucuguuauuugcuguuaa

SEQ ID NO: 835915 - RNA, 19 nt, Artificial Sequence
  Description of Artificial Sequence: Synthetic oligonucleotide
  Antisense strand to SEQ ID NO: 835914
uuaacagcaaauaacagaa

SEQ ID NO: 835916 - RNA, 19 nt, Artificial Sequence
  Description of Artificial Sequence: Synthetic oligonucleotide
  Sense strand starting at position 2274 of SEQ ID NO: 588017
cuuucuauugaaggacuga

SEQ ID NO: 835917 - RNA, 19 nt, Artificial Sequence
  Description of Artificial Sequence: Synthetic oligonucleotide
  Antisense strand to SEQ ID NO: 835916
ucaguccuucaauagaaag

SEQ ID NO: 835918 - RNA, 19 nt, Artificial Sequence
  Description of Artificial Sequence: Synthetic oligonucleotide
  Sense strand starting at position 2427 of SEQ ID NO: 588017
ccaggauuccucuggagua

SEQ ID NO: 835919 - RNA, 19 nt, Artificial Sequence
  Description of Artificial Sequence: Synthetic oligonucleotide
  Antisense strand to SEQ ID NO: 835918
uacuccagaggaauccugg

SEQ ID NO: 835920 - RNA, 19 nt, Artificial Sequence
  Description of Artificial Sequence: Synthetic oligonucleotide
  Sense strand starting at position 2503 of SEQ ID NO: 588017
ugcuuuggaccugaauaua

SEQ ID NO: 835921 - RNA, 19 nt, Artificial Sequence
  Description of Artificial Sequence: Synthetic oligonucleotide
  Antisense strand to SEQ ID NO: 835920
uauauucagguccaaagca

SEQ ID NO: 835922 - RNA, 19 nt, Artificial Sequence
  Description of Artificial Sequence: Synthetic oligonucleotide
  Sense strand starting at position 2511 of SEQ ID NO: 588017
accugaauauacuuuccga

SEQ ID NO: 835923 - RNA, 19 nt, Artificial Sequence
  Description of Artificial Sequence: Synthetic oligonucleotide
  Antisense strand to SEQ ID NO: 835922
ucggaaaguauauucaggu

SEQ ID NO: 835924 - RNA, 19 nt, Artificial Sequence
  Description of Artificial Sequence: Synthetic oligonucleotide
  Sense strand starting at position 2514 of SEQ ID NO: 588017
ugaauauacuuuccgaagu

SEQ ID NO: 835925 - RNA, 19 nt, Artificial Sequence
  Description of Artificial Sequence: Synthetic oligonucleotide
  Antisense strand to SEQ ID NO: 835924
acuucggaaaguauauuca

SEQ ID NO: 835926 - RNA, 19 nt, Artificial Sequence
  Description of Artificial Sequence: Synthetic oligonucleotide
  Sense strand starting at position 2582 of SEQ ID NO: 588017
uaaugacuccgcgagaaau

SEQ ID NO: 835927 - RNA, 19 nt, Artificial Sequence
  Description of Artificial Sequence: Synthetic oligonucleotide
  Antisense strand to SEQ ID NO: 835926
auuucucgcggagucauua

SEQ ID NO: 835928 - RNA, 19 nt, Artificial Sequence
  Description of Artificial Sequence: Synthetic oligonucleotide
  Sense strand starting at position 2755 of SEQ ID NO: 588017
ugugucaauuugguuccua

SEQ ID NO: 835929 - RNA, 19 nt, Artificial Sequence
  Description of Artificial Sequence: Synthetic oligonucleotide
  Antisense strand to SEQ ID NO: 835928
uaggaaccaaauugacaca

SEQ ID NO: 835930 - RNA, 19 nt, Artificial Sequence
  Description of Artificial Sequence: Synthetic oligonucleotide
  Sense strand starting at position 2756 of SEQ ID NO: 588017
gugucaauuugguuccuag

SEQ ID NO: 835931 - RNA, 19 nt, Artificial Sequence
  Description of Artificial Sequence: Synthetic oligonucleotide
  Antisense strand to SEQ ID NO: 835930
cuaggaaccaaauugacac

SEQ ID NO: 835932 - RNA, 19 nt, Artificial Sequence
  Description of Artificial Sequence: Synthetic oligonucleotide
  Sense strand starting at position 2868 of SEQ ID NO: 588017
guaauuaucucauuguaga

SEQ ID NO: 835933 - RNA, 19 nt, Artificial Sequence
  Description of Artificial Sequence: Synthetic oligonucleotide
  Antisense strand to SEQ ID NO: 835932
ucuacaaugagauaauuac

SEQ ID NO: 835934 - RNA, 19 nt, Artificial Sequence
  Description of Artificial Sequence: Synthetic oligonucleotide
  Sense strand starting at position 2914 of SEQ ID NO: 588017
ugaauaacuuguccaagag

SEQ ID NO: 835935 - RNA, 19 nt, Artificial Sequence
  Description of Artificial Sequence: Synthetic oligonucleotide
  Antisense strand to SEQ ID NO: 835934
cucuuggacaaguuauuca

SEQ ID NO: 835936 - RNA, 19 nt, Artificial Sequence
  Description of Artificial Sequence: Synthetic oligonucleotide
  Sense strand starting at position 2954 of SEQ ID NO: 588017
guucuucuuccagaaucug

SEQ ID NO: 835937 - RNA, 19 nt, Artificial Sequence
  Description of Artificial Sequence: Synthetic oligonucleotide
  Antisense strand to SEQ ID NO: 835936
cagauucuggaagaagaac

SEQ ID NO: 835938 - RNA, 19 nt, Artificial Sequence
  Description of Artificial Sequence: Synthetic oligonucleotide
  Sense strand starting at position 3108 of SEQ ID NO: 588017
guggaagguuaggucagaa

SEQ ID NO: 835939 - RNA, 19 nt, Artificial Sequence
  Description of Artificial Sequence: Synthetic oligonucleotide
  Antisense strand to SEQ ID NO: 835938
uucugaccuaaccuuccac

SEQ ID NO: 835940 - RNA, 19 nt, Artificial Sequence
  Description of Artificial Sequence: Synthetic oligonucleotide
  Sense strand starting at position 3554 of SEQ ID NO: 588017
cgaagucuuaggcauaaac

SEQ ID NO: 835941 - RNA, 19 nt, Artificial Sequence
  Description of Artificial Sequence: Synthetic oligonucleotide
  Antisense strand to SEQ ID NO: 835940
guuuaugccuaagacuucg

SEQ ID NO: 835942 - RNA, 19 nt, Artificial Sequence
  Description of Artificial Sequence: Synthetic oligonucleotide
  Sense strand starting at position 3597 of SEQ ID NO: 588017
gggagcuagcaugacugau

SEQ ID NO: 835943 - RNA, 19 nt, Artificial Sequence
  Description of Artificial Sequence: Synthetic oligonucleotide
  Antisense strand to SEQ ID NO: 835942
aucagucaugcuagcuccc

SEQ ID NO: 835944 - RNA, 19 nt, Artificial Sequence
  Description of Artificial Sequence: Synthetic oligonucleotide
  Sense strand starting at position 3609 of SEQ ID NO: 588017
gacugauaguuacugguga

SEQ ID NO: 835945 - RNA, 19 nt, Artificial Sequence
  Description of Artificial Sequence: Synthetic oligonucleotide
  Antisense strand to SEQ ID NO: 835944
ucaccaguaacuaucaguc

SEQ ID NO: 835946 - RNA, 19 nt, Artificial Sequence
  Description of Artificial Sequence: Synthetic oligonucleotide
  Sense strand starting at position 3634 of SEQ ID NO: 588017
accauuacucagugauauc

SEQ ID NO: 835947 - RNA, 19 nt, Artificial Sequence
  Description of Artificial Sequence: Synthetic oligonucleotide
  Antisense strand to SEQ ID NO: 835946
gauaucacugaguaauggu

SEQ ID NO: 835948 - RNA, 19 nt, Artificial Sequence
  Description of Artificial Sequence: Synthetic oligonucleotide
  Sense strand starting at position 3674 of SEQ ID NO: 588017
agcucagagcugggacaau

SEQ ID NO: 835949 - RNA, 19 nt, Artificial Sequence
  Description of Artificial Sequence: Synthetic oligonucleotide
  Antisense strand to SEQ ID NO: 835948
auugucccagcucugagcu

SEQ ID NO: 835950 - RNA, 19 nt, Artificial Sequence
  Description of Artificial Sequence: Synthetic oligonucleotide
  Sense strand starting at position 3820 of SEQ ID NO: 588017
uagucaguccuguauacag

SEQ ID NO: 835951 - RNA, 19 nt, Artificial Sequence
  Description of Artificial Sequence: Synthetic oligonucleotide
  Antisense strand to SEQ ID NO: 835950
cuguauacaggacugacua

SEQ ID NO: 835952 - RNA, 19 nt, Artificial Sequence
  Description of Artificial Sequence: Synthetic oligonucleotide
  Sense strand starting at position 3837 of SEQ ID NO: 588017
agcacuaaagcugaugaau

SEQ ID NO: 835953 - RNA, 19 nt, Artificial Sequence
  Description of Artificial Sequence: Synthetic oligonucleotide
  Antisense strand to SEQ ID NO: 835952
auucaucagcuuuagugcu

SEQ ID NO: 835954 - RNA, 19 nt, Artificial Sequence
  Description of Artificial Sequence: Synthetic oligonucleotide
  Sense strand starting at position 3846 of SEQ ID NO: 588017
gcugaugaaugaucuaucu

SEQ ID NO: 835955 - RNA, 19 nt, Artificial Sequence
  Description of Artificial Sequence: Synthetic oligonucleotide
  Antisense strand to SEQ ID NO: 835954
agauagaucauucaucagc

SEQ ID NO: 835956 - RNA, 19 nt, Artificial Sequence
  Description of Artificial Sequence: Synthetic oligonucleotide
  Sense strand starting at position 3903 of SEQ ID NO: 588017
ugcaguacauuuguacauu

SEQ ID NO: 835957 - RNA, 19 nt, Artificial Sequence
  Description of Artificial Sequence: Synthetic oligonucleotide
  Antisense strand to SEQ ID NO: 835956
aauguacaaauguacugca

SEQ ID NO: 835958 - RNA, 19 nt, Artificial Sequence
  Description of Artificial Sequence: Synthetic oligonucleotide
  Sense strand starting at position 3938 of SEQ ID NO: 588017
gaggguagguacucaauaa

SEQ ID NO: 835959 - RNA, 19 nt, Artificial Sequence
  Description of Artificial Sequence: Synthetic oligonucleotide
  Antisense strand to SEQ ID NO: 835958
uuauugaguaccuacccuc

SEQ ID NO: 835960 - RNA, 19 nt, Artificial Sequence
  Description of Artificial Sequence: Synthetic oligonucleotide
  Sense strand starting at position 199 of SEQ ID NO: 588018
ugggcucauccugagauac

SEQ ID NO: 835961 - RNA, 19 nt, Artificial Sequence
  Description of Artificial Sequence: Synthetic oligonucleotide
  Antisense strand to SEQ ID NO: 835960
guaucucaggaugagccca

SEQ ID NO: 835962 - RNA, 19 nt, Artificial Sequence
  Description of Artificial Sequence: Synthetic oligonucleotide
  Sense strand starting at position 271 of SEQ ID NO: 588018
uuacuuuauguaggauuga

SEQ ID NO: 835963 - RNA, 19 nt, Artificial Sequence
  Description of Artificial Sequence: Synthetic oligonucleotide
  Antisense strand to SEQ ID NO: 835962
ucaauccuacauaaaguaa

SEQ ID NO: 835964 - RNA, 19 nt, Artificial Sequence
  Description of Artificial Sequence: Synthetic oligonucleotide
  Sense strand starting at position 288 of SEQ ID NO: 588018
gacgguguucggguuuguu

SEQ ID NO: 835965 - RNA, 19 nt, Artificial Sequence
  Description of Artificial Sequence: Synthetic oligonucleotide
  Antisense strand to SEQ ID NO: 835964
aacaaacccgaacaccguc

SEQ ID NO: 835966 - RNA, 19 nt, Artificial Sequence
  Description of Artificial Sequence: Synthetic oligonucleotide
  Sense strand starting at position 289 of SEQ ID NO: 588018
acgguguucggguuuguuu

SEQ ID NO: 835967 - RNA, 19 nt, Artificial Sequence
  Description of Artificial Sequence: Synthetic oligonucleotide
  Antisense strand to SEQ ID NO: 835966
aaacaaacccgaacaccgu

SEQ ID NO: 835968 - RNA, 19 nt, Artificial Sequence
  Description of Artificial Sequence: Synthetic oligonucleotide
  Sense strand starting at position 392 of SEQ ID NO: 588018
cggcacuuccacugagauc

SEQ ID NO: 835969 - RNA, 19 nt, Artificial Sequence
  Description of Artificial Sequence: Synthetic oligonucleotide
  Antisense strand to SEQ ID NO: 835968
gaucucaguggaagugccg

SEQ ID NO: 835970 - RNA, 19 nt, Artificial Sequence
  Description of Artificial Sequence: Synthetic oligonucleotide
  Sense strand starting at position 2541 of SEQ ID NO: 588018
agaaaucggaagugugcuu

SEQ ID NO: 835971 - RNA, 19 nt, Artificial Sequence
  Description of Artificial Sequence: Synthetic oligonucleotide
  Antisense strand to SEQ ID NO: 835970
aagcacacuuccgauuucu

SEQ ID NO: 835972 - RNA, 19 nt, Artificial Sequence
  Description of Artificial Sequence: Synthetic oligonucleotide
  Sense strand starting at position 2556 of SEQ ID NO: 588018
gcuuucugaccugagauua

SEQ ID NO: 835973 - RNA, 19 nt, Artificial Sequence
  Description of Artificial Sequence: Synthetic oligonucleotide
  Antisense strand to SEQ ID NO: 835972
uaaucucaggucagaaagc

SEQ ID NO: 835974 - RNA, 19 nt, Artificial Sequence
  Description of Artificial Sequence: Synthetic oligonucleotide
  Sense strand starting at position 2564 of SEQ ID NO: 588018
accugagauuagucaauga

SEQ ID NO: 835975 - RNA, 19 nt, Artificial Sequence
  Description of Artificial Sequence: Synthetic oligonucleotide
  Antisense strand to SEQ ID NO: 835974
ucauugacuaaucucaggu

SEQ ID NO: 835976 - RNA, 19 nt, Artificial Sequence
  Description of Artificial Sequence: Synthetic oligonucleotide
  Sense strand starting at position 2568 of SEQ ID NO: 588018
gagauuagucaaugaagua

SEQ ID NO: 835977 - RNA, 19 nt, Artificial Sequence
  Description of Artificial Sequence: Synthetic oligonucleotide
  Antisense strand to SEQ ID NO: 835976
uacuucauugacuaaucuc

SEQ ID NO: 835978 - RNA, 19 nt, Artificial Sequence
  Description of Artificial Sequence: Synthetic oligonucleotide
  Sense strand starting at position 2575 of SEQ ID NO: 588018
gucaaugaaguaugguauu

SEQ ID NO: 835979 - RNA, 19 nt, Artificial Sequence
  Description of Artificial Sequence: Synthetic oligonucleotide
  Antisense strand to SEQ ID NO: 835978
aauaccauacuucauugac

SEQ ID NO: 835980 - RNA, 19 nt, Artificial Sequence
  Description of Artificial Sequence: Synthetic oligonucleotide
  Sense strand starting at position 2578 of SEQ ID NO: 588018
aaugaaguaugguauuuag

SEQ ID NO: 835981 - RNA, 19 nt, Artificial Sequence
  Description of Artificial Sequence: Synthetic oligonucleotide
  Antisense strand to SEQ ID NO: 835980
cuaaauaccauacuucauu

SEQ ID NO: 835982 - RNA, 19 nt, Artificial Sequence
  Description of Artificial Sequence: Synthetic oligonucleotide
  Sense strand starting at position 2587 of SEQ ID NO: 588018
ugguauuuagcacagcgua

SEQ ID NO: 835983 - RNA, 19 nt, Artificial Sequence
  Description of Artificial Sequence: Synthetic oligonucleotide
  Antisense strand to SEQ ID NO: 835982
uacgcugugcuaaauacca

SEQ ID NO: 835984 - RNA, 19 nt, Artificial Sequence
  Description of Artificial Sequence: Synthetic oligonucleotide
  Sense strand starting at position 2625 of SEQ ID NO: 588018
aggagagauccguggaaug

SEQ ID NO: 835985 - RNA, 19 nt, Artificial Sequence
  Description of Artificial Sequence: Synthetic oligonucleotide
  Antisense strand to SEQ ID NO: 835984
cauuccacggaucucuccu

SEQ ID NO: 835986 - RNA, 19 nt, Artificial Sequence
  Description of Artificial Sequence: Synthetic oligonucleotide
  Sense strand starting at position 2630 of SEQ ID NO: 588018
agauccguggaaugaaaca

SEQ ID NO: 835987 - RNA, 19 nt, Artificial Sequence
  Description of Artificial Sequence: Synthetic oligonucleotide
  Antisense strand to SEQ ID NO: 835986
uguuucauuccacggaucu

SEQ ID NO: 835988 - RNA, 19 nt, Artificial Sequence
  Description of Artificial Sequence: Synthetic oligonucleotide
  Sense strand starting at position 2647 of SEQ ID NO: 588018
cagagcuuccagcgauaac

SEQ ID NO: 835989 - RNA, 19 nt, Artificial Sequence
  Description of Artificial Sequence: Synthetic oligonucleotide
  Antisense strand to SEQ ID NO: 835988
guuaucgcuggaagcucug

SEQ ID NO: 835990 - RNA, 19 nt, Artificial Sequence
  Description of Artificial Sequence: Synthetic oligonucleotide
  Sense strand starting at position 2682 of SEQ ID NO: 588018
uauugauucucugugcgaa

SEQ ID NO: 835991 - RNA, 19 nt, Artificial Sequence
  Description of Artificial Sequence: Synthetic oligonucleotide
  Antisense strand to SEQ ID NO: 835990
uucgcacagagaaucaaua

SEQ ID NO: 835992 - RNA, 19 nt, Artificial Sequence
  Description of Artificial Sequence: Synthetic oligonucleotide
  Sense strand starting at position 2685 of SEQ ID NO: 588018
ugauucucugugcgaauga

SEQ ID NO: 835993 - RNA, 19 nt, Artificial Sequence
  Description of Artificial Sequence: Synthetic oligonucleotide
  Antisense strand to SEQ ID NO: 835992
ucauucgcacagagaauca

SEQ ID NO: 835994 - RNA, 19 nt, Artificial Sequence
  Description of Artificial Sequence: Synthetic oligonucleotide
  Sense strand starting at position 2690 of SEQ ID NO: 588018
cucugugcgaaugaaauua

SEQ ID NO: 835995 - RNA, 19 nt, Artificial Sequence
  Description of Artificial Sequence: Synthetic oligonucleotide
  Antisense strand to SEQ ID NO: 835994
uaauuucauucgcacagag

SEQ ID NO: 835996 - RNA, 19 nt, Artificial Sequence
  Description of Artificial Sequence: Synthetic oligonucleotide
  Sense strand starting at position 2705 of SEQ ID NO: 588018
auuaccuuccaguggagaa

SEQ ID NO: 835997 - RNA, 19 nt, Artificial Sequence
  Description of Artificial Sequence: Synthetic oligonucleotide
  Antisense strand to SEQ ID NO: 835996
uucuccacuggaagguaau

SEQ ID NO: 835998 - RNA, 19 nt, Artificial Sequence
  Description of Artificial Sequence: Synthetic oligonucleotide
  Sense strand starting at position 2726 of SEQ ID NO: 588018
agagaacucuuugccugac

SEQ ID NO: 835999 - RNA, 19 nt, Artificial Sequence
  Description of Artificial Sequence: Synthetic oligonucleotide
  Antisense strand to SEQ ID NO: 835998
gucaggcaaagaguucucu

SEQ ID NO: 836000 - RNA, 19 nt, Artificial Sequence
  Description of Artificial Sequence: Synthetic oligonucleotide
  Sense strand starting at position 2728 of SEQ ID NO: 588018
agaacucuuugccugacau

SEQ ID NO: 836001 - RNA, 19 nt, Artificial Sequence
  Description of Artificial Sequence: Synthetic oligonucleotide
  Antisense strand to SEQ ID NO: 836000
augucaggcaaagaguucu

SEQ ID NO: 836002 - RNA, 19 nt, Artificial Sequence
  Description of Artificial Sequence: Synthetic oligonucleotide
  Sense strand starting at position 2756 of SEQ ID NO: 588018
gaagcuagguugccaaaua

SEQ ID NO: 836003 - RNA, 19 nt, Artificial Sequence
  Description of Artificial Sequence: Synthetic oligonucleotide
  Antisense strand to SEQ ID NO: 836002
uauuuggcaaccuagcuuc

SEQ ID NO: 836004 - RNA, 19 nt, Artificial Sequence
  Description of Artificial Sequence: Synthetic oligonucleotide
  Sense strand starting at position 2792 of SEQ ID NO: 588018
agaaauaugcacugaaguu

SEQ ID NO: 836005 - RNA, 19 nt, Artificial Sequence
  Description of Artificial Sequence: Synthetic oligonucleotide
  Antisense strand to SEQ ID NO: 836004
aacuucagugcauauuucu

SEQ ID NO: 836006 - RNA, 19 nt, Artificial Sequence
  Description of Artificial Sequence: Synthetic oligonucleotide
  Sense strand starting at position 2814 of SEQ ID NO: 588018
agagauacucauugcacaa

SEQ ID NO: 836007 - RNA, 19 nt, Artificial Sequence
  Description of Artificial Sequence: Synthetic oligonucleotide
  Antisense strand to SEQ ID NO: 836006
uugugcaaugaguaucucu

SEQ ID NO: 836008 - RNA, 19 nt, Artificial Sequence
  Description of Artificial Sequence: Synthetic oligonucleotide
  Sense strand starting at position 3071 of SEQ ID NO: 588018
cacagcauuggugauacua

SEQ ID NO: 836009 - RNA, 19 nt, Artificial Sequence
  Description of Artificial Sequence: Synthetic oligonucleotide
  Antisense strand to SEQ ID NO: 836008
uaguaucaccaaugcugug

SEQ ID NO: 836010 - RNA, 19 nt, Artificial Sequence
  Description of Artificial Sequence: Synthetic oligonucleotide
  Sense strand starting at position 3082 of SEQ ID NO: 588018
ugauacuauuuccauacgu

SEQ ID NO: 836011 - RNA, 19 nt, Artificial Sequence
  Description of Artificial Sequence: Synthetic oligonucleotide
  Antisense strand to SEQ ID NO: 836010
acguauggaaauaguauca

SEQ ID NO: 836012 - RNA, 19 nt, Artificial Sequence
  Description of Artificial Sequence: Synthetic oligonucleotide
  Sense strand starting at position 3209 of SEQ ID NO: 588018
gcccuuucucaagaagaau

SEQ ID NO: 836013 - RNA, 19 nt, Artificial Sequence
  Description of Artificial Sequence: Synthetic oligonucleotide
  Antisense strand to SEQ ID NO: 836012
auucuucuugagaaagggc

SEQ ID NO: 836014 - RNA, 19 nt, Artificial Sequence
  Description of Artificial Sequence: Synthetic oligonucleotide
  Sense strand starting at position 3224 of SEQ ID NO: 588018
gaauacaucggagacguuu

SEQ ID NO: 836015 - RNA, 19 nt, Artificial Sequence
  Description of Artificial Sequence: Synthetic oligonucleotide
  Antisense strand to SEQ ID NO: 836014
aaacgucuccgauguauuc

SEQ ID NO: 836016 - RNA, 19 nt, Artificial Sequence
  Description of Artificial Sequence: Synthetic oligonucleotide
  Sense strand starting at position 3226 of SEQ ID NO: 588018
auacaucggagacguuuaa

SEQ ID NO: 836017 - RNA, 19 nt, Artificial Sequence
  Description of Artificial Sequence: Synthetic oligonucleotide
  Antisense strand to SEQ ID NO: 836016
uuaaacgucuccgauguau

SEQ ID NO: 836018 - RNA, 19 nt, Artificial Sequence
  Description of Artificial Sequence: Synthetic oligonucleotide
  Sense strand starting at position 3334 of SEQ ID NO: 588018
uggauucucucaucgauug

SEQ ID NO: 836019 - RNA, 19 nt, Artificial Sequence
  Description of Artificial Sequence: Synthetic oligonucleotide
  Antisense strand to SEQ ID NO: 836018
caaucgaugagagaaucca

SEQ ID NO: 836020 - RNA, 19 nt, Artificial Sequence
  Description of Artificial Sequence: Synthetic oligonucleotide
  Sense strand starting at position 3335 of SEQ ID NO: 588018
ggauucucucaucgauugu

SEQ ID NO: 836021 - RNA, 19 nt, Artificial Sequence
  Description of Artificial Sequence: Synthetic oligonucleotide
  Antisense strand to SEQ ID NO: 836020
acaaucgaugagagaaucc

SEQ ID NO: 836022 - RNA, 19 nt, Artificial Sequence
  Description of Artificial Sequence: Synthetic oligonucleotide
  Sense strand starting at position 3433 of SEQ ID NO: 588018
uguaaugcugacgaaagua

SEQ ID NO: 836023 - RNA, 19 nt, Artificial Sequence
  Description of Artificial Sequence: Synthetic oligonucleotide
  Antisense strand to SEQ ID NO: 836022
uacuuucgucagcauuaca

SEQ ID NO: 836024 - RNA, 19 nt, Artificial Sequence
  Description of Artificial Sequence: Synthetic oligonucleotide
  Sense strand starting at position 3451 of SEQ ID NO: 588018
agaccuguucccugaacua

SEQ ID NO: 836025 - RNA, 19 nt, Artificial Sequence
  Description of Artificial Sequence: Synthetic oligonucleotide
  Antisense strand to SEQ ID NO: 836024
uaguucagggaacaggucu

SEQ ID NO: 836026 - RNA, 19 nt, Artificial Sequence
  Description of Artificial Sequence: Synthetic oligonucleotide
  Sense strand starting at position 3478 of SEQ ID NO: 588018
agaauuugggugugucuuu

SEQ ID NO: 836027 - RNA, 19 nt, Artificial Sequence
  Description of Artificial Sequence: Synthetic oligonucleotide
  Antisense strand to SEQ ID NO: 836026
aaagacacacccaaauucu

SEQ ID NO: 836028 - RNA, 19 nt, Artificial Sequence
  Description of Artificial Sequence: Synthetic oligonucleotide
  Sense strand starting at position 3522 of SEQ ID NO: 588018
agguccuggcucuagugau

SEQ ID NO: 836029 - RNA, 19 nt, Artificial Sequence
  Description of Artificial Sequence: Synthetic oligonucleotide
  Antisense strand to SEQ ID NO: 836028
aucacuagagccaggaccu

SEQ ID NO: 836030 - RNA, 19 nt, Artificial Sequence
  Description of Artificial Sequence: Synthetic oligonucleotide
  Sense strand starting at position 3635 of SEQ ID NO: 588018
ucaugaaauuaggaugauu

SEQ ID NO: 836031 - RNA, 19 nt, Artificial Sequence
  Description of Artificial Sequence: Synthetic oligonucleotide
  Antisense strand to SEQ ID NO: 836030
aaucauccuaauuucauga

SEQ ID NO: 836032 - RNA, 19 nt, Artificial Sequence
  Description of Artificial Sequence: Synthetic oligonucleotide
  Sense strand starting at position 3665 of SEQ ID NO: 588018
gauguaaugagaggacugu

SEQ ID NO: 836033 - RNA, 19 nt, Artificial Sequence
  Description of Artificial Sequence: Synthetic oligonucleotide
  Antisense strand to SEQ ID NO: 836032
acaguccucucauuacauc

SEQ ID NO: 836034 - RNA, 19 nt, Artificial Sequence
  Description of Artificial Sequence: Synthetic oligonucleotide
  Sense strand starting at position 3894 of SEQ ID NO: 588018
auggucuuaucucuuuaag

SEQ ID NO: 836035 - RNA, 19 nt, Artificial Sequence
  Description of Artificial Sequence: Synthetic oligonucleotide
  Antisense strand to SEQ ID NO: 836034
cuuaaagagauaagaccau

SEQ ID NO: 836036 - RNA, 19 nt, Artificial Sequence
  Description of Artificial Sequence: Synthetic oligonucleotide
  Sense strand starting at position 3903 of SEQ ID NO: 588018
ucucuuuaagcgggaccua

SEQ ID NO: 836037 - RNA, 19 nt, Artificial Sequence
  Description of Artificial Sequence: Synthetic oligonucleotide
  Antisense strand to SEQ ID NO: 836036
uaggucccgcuuaaagaga

SEQ ID NO: 836038 - RNA, 19 nt, Artificial Sequence
  Description of Artificial Sequence: Synthetic oligonucleotide
  Sense strand starting at position 3964 of SEQ ID NO: 588018
ccgaauugauauucugucu

SEQ ID NO: 836039 - RNA, 19 nt, Artificial Sequence
  Description of Artificial Sequence: Synthetic oligonucleotide
  Antisense strand to SEQ ID NO: 836038
agacagaauaucaauucgg

SEQ ID NO: 836040 - RNA, 19 nt, Artificial Sequence
  Description of Artificial Sequence: Synthetic oligonucleotide
  Sense strand starting at position 344 of SEQ ID NO: 588019
gguguauuugugcgugugu

SEQ ID NO: 836041 - RNA, 19 nt, Artificial Sequence
  Description of Artificial Sequence: Synthetic oligonucleotide
  Antisense strand to SEQ ID NO: 836040
acacacgcacaaauacacc

SEQ ID NO: 836042 - RNA, 19 nt, Artificial Sequence
  Description of Artificial Sequence: Synthetic oligonucleotide
  Sense strand starting at position 582 of SEQ ID NO: 588019
acacuuguauuucgauuga

SEQ ID NO: 836043 - RNA, 19 nt, Artificial Sequence
  Description of Artificial Sequence: Synthetic oligonucleotide
  Antisense strand to SEQ ID NO: 836042
ucaaucgaaauacaagugu

SEQ ID NO: 836044 - RNA, 19 nt, Artificial Sequence
  Description of Artificial Sequence: Synthetic oligonucleotide
  Sense strand starting at position 933 of SEQ ID NO: 588019
ggcagugaccuuggcauca

SEQ ID NO: 836045 - RNA, 19 nt, Artificial Sequence
  Description of Artificial Sequence: Synthetic oligonucleotide
  Antisense strand to SEQ ID NO: 836044
ugaugccaaggucacugcc

SEQ ID NO: 836046 - RNA, 19 nt, Artificial Sequence
  Description of Artificial Sequence: Synthetic oligonucleotide
  Sense strand starting at position 1797 of SEQ ID NO: 588019
aagcuucuuccugggagca

SEQ ID NO: 836047 - RNA, 19 nt, Artificial Sequence
  Description of Artificial Sequence: Synthetic oligonucleotide
  Antisense strand to SEQ ID NO: 836046
ugcucccaggaagaagcuu

SEQ ID NO: 836048 - RNA, 19 nt, Artificial Sequence
  Description of Artificial Sequence: Synthetic oligonucleotide
  Sense strand starting at position 1798 of SEQ ID NO: 588019
agcuucuuccugggagcaa

SEQ ID NO: 836049 - RNA, 19 nt, Artificial Sequence
  Description of Artificial Sequence: Synthetic oligonucleotide
  Antisense strand to SEQ ID NO: 836048
uugcucccaggaagaagcu

SEQ ID NO: 836050 - RNA, 19 nt, Artificial Sequence
  Description of Artificial Sequence: Synthetic oligonucleotide
  Sense strand starting at position 2058 of SEQ ID NO: 588019
cgcuaucucuuccaagaga

SEQ ID NO: 836051 - RNA, 19 nt, Artificial Sequence
  Description of Artificial Sequence: Synthetic oligonucleotide
  Antisense strand to SEQ ID NO: 836050
ucucuuggaagagauagcg

SEQ ID NO: 836052 - RNA, 19 nt, Artificial Sequence
  Description of Artificial Sequence: Synthetic oligonucleotide
  Sense strand starting at position 2531 of SEQ ID NO: 588019
ggacaagaagucugaagug

SEQ ID NO: 836053 - RNA, 19 nt, Artificial Sequence
  Description of Artificial Sequence: Synthetic oligonucleotide
  Antisense strand to SEQ ID NO: 836052
cacuucagacuucuugucc

SEQ ID NO: 836054 - RNA, 19 nt, Artificial Sequence
  Description of Artificial Sequence: Synthetic oligonucleotide
  Sense strand starting at position 2620 of SEQ ID NO: 588019
aggagauauccguggcauc

SEQ ID NO: 836055 - RNA, 19 nt, Artificial Sequence
  Description of Artificial Sequence: Synthetic oligonucleotide
  Antisense strand to SEQ ID NO: 836054
gaugccacggauaucuccu

SEQ ID NO: 836056 - RNA, 19 nt, Artificial Sequence
  Description of Artificial Sequence: Synthetic oligonucleotide
  Sense strand starting at position 2621 of SEQ ID NO: 588019
ggagauauccguggcauca

SEQ ID NO: 836057 - RNA, 19 nt, Artificial Sequence
  Description of Artificial Sequence: Synthetic oligonucleotide
  Antisense strand to SEQ ID NO: 836056
ugaugccacggauaucucc

SEQ ID NO: 836058 - RNA, 19 nt, Artificial Sequence
  Description of Artificial Sequence: Synthetic oligonucleotide
  Sense strand starting at position 2623 of SEQ ID NO: 588019
agauauccguggcaucaaa

SEQ ID NO: 836059 - RNA, 19 nt, Artificial Sequence
  Description of Artificial Sequence: Synthetic oligonucleotide
  Antisense strand to SEQ ID NO: 836058
uuugaugccacggauaucu

SEQ ID NO: 836060 - RNA, 19 nt, Artificial Sequence
  Description of Artificial Sequence: Synthetic oligonucleotide
  Sense strand starting at position 2653 of SEQ ID NO: 588019
gggauaaccuuuccacguu

SEQ ID NO: 836061 - RNA, 19 nt, Artificial Sequence
  Description of Artificial Sequence: Synthetic oligonucleotide
  Antisense strand to SEQ ID NO: 836060
aacguggaaagguuauccc

SEQ ID NO: 836062 - RNA, 19 nt, Artificial Sequence
  Description of Artificial Sequence: Synthetic oligonucleotide
  Sense strand starting at position 2680 of SEQ ID NO: 588019
ugacucucuauccgaguga

SEQ ID NO: 836063 - RNA, 19 nt, Artificial Sequence
  Description of Artificial Sequence: Synthetic oligonucleotide
  Antisense strand to SEQ ID NO: 836062
ucacucggauagagaguca

SEQ ID NO: 836064 - RNA, 19 nt, Artificial Sequence
  Description of Artificial Sequence: Synthetic oligonucleotide
  Sense strand starting at position 2681 of SEQ ID NO: 588019
gacucucuauccgagugaa

SEQ ID NO: 836065 - RNA, 19 nt, Artificial Sequence
  Description of Artificial Sequence: Synthetic oligonucleotide
  Antisense strand to SEQ ID NO: 836064
uucacucggauagagaguc

SEQ ID NO: 836066 - RNA, 19 nt, Artificial Sequence
  Description of Artificial Sequence: Synthetic oligonucleotide
  Sense strand starting at position 2694 of SEQ ID NO: 588019
agugaaauuacuggccagu

SEQ ID NO: 836067 - RNA, 19 nt, Artificial Sequence
  Description of Artificial Sequence: Synthetic oligonucleotide
  Antisense strand to SEQ ID NO: 836066
acuggccaguaauuucacu

SEQ ID NO: 836068 - RNA, 19 nt, Artificial Sequence
  Description of Artificial Sequence: Synthetic oligonucleotide
  Sense strand starting at position 2823 of SEQ ID NO: 588019
cacaaaguaggcugugaaa

SEQ ID NO: 836069 - RNA, 19 nt, Artificial Sequence
  Description of Artificial Sequence: Synthetic oligonucleotide
  Antisense strand to SEQ ID NO: 836068
uuucacagccuacuuugug

SEQ ID NO: 836070 - RNA, 19 nt, Artificial Sequence
  Description of Artificial Sequence: Synthetic oligonucleotide
  Sense strand starting at position 2825 of SEQ ID NO: 588019
caaaguaggcugugaaaga

SEQ ID NO: 836071 - RNA, 19 nt, Artificial Sequence
  Description of Artificial Sequence: Synthetic oligonucleotide
  Antisense strand to SEQ ID NO: 836070
ucuuucacagccuacuuug

SEQ ID NO: 836072 - RNA, 19 nt, Artificial Sequence
  Description of Artificial Sequence: Synthetic oligonucleotide
  Sense strand starting at position 3085 of SEQ ID NO: 588019
uuuccauacuuacgugaua

SEQ ID NO: 836073 - RNA, 19 nt, Artificial Sequence
  Description of Artificial Sequence: Synthetic oligonucleotide
  Antisense strand to SEQ ID NO: 836072
uaucacguaaguauggaaa

SEQ ID NO: 836074 - RNA, 19 nt, Artificial Sequence
  Description of Artificial Sequence: Synthetic oligonucleotide
  Sense strand starting at position 3086 of SEQ ID NO: 588019
uuccauacuuacgugauaa

SEQ ID NO: 836075 - RNA, 19 nt, Artificial Sequence
  Description of Artificial Sequence: Synthetic oligonucleotide
  Antisense strand to SEQ ID NO: 836074
uuaucacguaaguauggaa

SEQ ID NO: 836076 - RNA, 19 nt, Artificial Sequence
  Description of Artificial Sequence: Synthetic oligonucleotide
  Sense strand starting at position 3088 of SEQ ID NO: 588019
ccauacuuacgugauaaug

SEQ ID NO: 836077 - RNA, 19 nt, Artificial Sequence
  Description of Artificial Sequence: Synthetic oligonucleotide
  Antisense strand to SEQ ID NO: 836076
cauuaucacguaaguaugg

SEQ ID NO: 836078 - RNA, 19 nt, Artificial Sequence
  Description of Artificial Sequence: Synthetic oligonucleotide
  Sense strand starting at position 3094 of SEQ ID NO: 588019
uuacgugauaauggaucaa

SEQ ID NO: 836079 - RNA, 19 nt, Artificial Sequence
  Description of Artificial Sequence: Synthetic oligonucleotide
  Antisense strand to SEQ ID NO: 836078
uugauccauuaucacguaa

SEQ ID NO: 836080 - RNA, 19 nt, Artificial Sequence
  Description of Artificial Sequence: Synthetic oligonucleotide
  Sense strand starting at position 3315 of SEQ ID NO: 588019
aaccguguaucuccuggau

SEQ ID NO: 836081 - RNA, 19 nt, Artificial Sequence
  Description of Artificial Sequence: Synthetic oligonucleotide
  Antisense strand to SEQ ID NO: 836080
auccaggagauacacgguu

SEQ ID NO: 836082 - RNA, 19 nt, Artificial Sequence
  Description of Artificial Sequence: Synthetic oligonucleotide
  Sense strand starting at position 3327 of SEQ ID NO: 588019
ccuggauucucgcaucggu

SEQ ID NO: 836083 - RNA, 19 nt, Artificial Sequence
  Description of Artificial Sequence: Synthetic oligonucleotide
  Antisense strand to SEQ ID NO: 836082
accgaugcgagaauccagg

SEQ ID NO: 836084 - RNA, 19 nt, Artificial Sequence
  Description of Artificial Sequence: Synthetic oligonucleotide
  Sense strand starting at position 3343 of SEQ ID NO: 588019
gguuguucaugcucugaga

SEQ ID NO: 836085 - RNA, 19 nt, Artificial Sequence
  Description of Artificial Sequence: Synthetic oligonucleotide
  Antisense strand to SEQ ID NO: 836084
ucucagagcaugaacaacc

SEQ ID NO: 836086 - RNA, 19 nt, Artificial Sequence
  Description of Artificial Sequence: Synthetic oligonucleotide
  Sense strand starting at position 3405 of SEQ ID NO: 588019
guuagcaccuuugaugcaa

SEQ ID NO: 836087 - RNA, 19 nt, Artificial Sequence
  Description of Artificial Sequence: Synthetic oligonucleotide
  Antisense strand to SEQ ID NO: 836086
uugcaucaaaggugcuaac

SEQ ID NO: 836088 - RNA, 19 nt, Artificial Sequence
  Description of Artificial Sequence: Synthetic oligonucleotide
  Sense strand starting at position 3650 of SEQ ID NO: 588019
uaaggauggugaugaaaug

SEQ ID NO: 836089 - RNA, 19 nt, Artificial Sequence
  Description of Artificial Sequence: Synthetic oligonucleotide
  Antisense strand to SEQ ID NO: 836088
cauuucaucaccauccuua

SEQ ID NO: 836090 - RNA, 19 nt, Artificial Sequence
  Description of Artificial Sequence: Synthetic oligonucleotide
  Sense strand starting at position 3720 of SEQ ID NO: 588019
aggugugcuucaucagaag

SEQ ID NO: 836091 - RNA, 19 nt, Artificial Sequence
  Description of Artificial Sequence: Synthetic oligonucleotide
  Antisense strand to SEQ ID NO: 836090
cuucugaugaagcacaccu

SEQ ID NO: 836092 - RNA, 19 nt, Artificial Sequence
  Description of Artificial Sequence: Synthetic oligonucleotide
  Sense strand starting at position 3739 of SEQ ID NO: 588019
gcuuccuaugcccgaugua

SEQ ID NO: 836093 - RNA, 19 nt, Artificial Sequence
  Description of Artificial Sequence: Synthetic oligonucleotide
  Antisense strand to SEQ ID NO: 836092
uacaucgggcauaggaagc

SEQ ID NO: 836094 - RNA, 19 nt, Artificial Sequence
  Description of Artificial Sequence: Synthetic oligonucleotide
  Sense strand starting at position 3740 of SEQ ID NO: 588019
cuuccuaugcccgauguaa

SEQ ID NO: 836095 - RNA, 19 nt, Artificial Sequence
  Description of Artificial Sequence: Synthetic oligonucleotide
  Antisense strand to SEQ ID NO: 836094
uuacaucgggcauaggaag

SEQ ID NO: 836096 - RNA, 19 nt, Artificial Sequence
  Description of Artificial Sequence: Synthetic oligonucleotide
  Sense strand starting at position 3742 of SEQ ID NO: 588019
uccuaugcccgauguaaag

SEQ ID NO: 836097 - RNA, 19 nt, Artificial Sequence
  Description of Artificial Sequence: Synthetic oligonucleotide
  Antisense strand to SEQ ID NO: 836096
cuuuacaucgggcauagga

SEQ ID NO: 836098 - RNA, 19 nt, Artificial Sequence
  Description of Artificial Sequence: Synthetic oligonucleotide
  Sense strand starting at position 3882 of SEQ ID NO: 588019
gguguuggauggucuuauc

SEQ ID NO: 836099 - RNA, 19 nt, Artificial Sequence
  Description of Artificial Sequence: Synthetic oligonucleotide
  Antisense strand to SEQ ID NO: 836098
gauaagaccauccaacacc

SEQ ID NO: 836100 - RNA, 19 nt, Artificial Sequence
  Description of Artificial Sequence: Synthetic oligonucleotide
  Sense strand starting at position 3916 of SEQ ID NO: 588019
uaggaauuguuguccuuua

SEQ ID NO: 836101 - RNA, 19 nt, Artificial Sequence
  Description of Artificial Sequence: Synthetic oligonucleotide
  Antisense strand to SEQ ID NO: 836100
uaaaggacaacaauuccua

SEQ ID NO: 836102 - RNA, 19 nt, Artificial Sequence
  Description of Artificial Sequence: Synthetic oligonucleotide
  Sense strand starting at position 3921 of SEQ ID NO: 588019
auuguuguccuuuaaugcu

SEQ ID NO: 836103 - RNA, 19 nt, Artificial Sequence
  Description of Artificial Sequence: Synthetic oligonucleotide
  Antisense strand to SEQ ID NO: 836102
agcauuaaaggacaacaau

SEQ ID NO: 836104 - RNA, 19 nt, Artificial Sequence
  Description of Artificial Sequence: Synthetic oligonucleotide
  Sense strand starting at position 285 of SEQ ID NO: 588020
gacgguguucggguuuguu

SEQ ID NO: 836105 - RNA, 19 nt, Artificial Sequence
  Description of Artificial Sequence: Synthetic oligonucleotide
  Antisense strand to SEQ ID NO: 836104
aacaaacccgaacaccguc

SEQ ID NO: 836106 - RNA, 19 nt, Artificial Sequence
  Description of Artificial Sequence: Synthetic oligonucleotide
  Sense strand starting at position 286 of SEQ ID NO: 588020
acgguguucggguuuguuu

SEQ ID NO: 836107 - RNA, 19 nt, Artificial Sequence
  Description of Artificial Sequence: Synthetic oligonucleotide
  Antisense strand to SEQ ID NO: 836106
aaacaaacccgaacaccgu

SEQ ID NO: 836108 - RNA, 19 nt, Artificial Sequence
  Description of Artificial Sequence: Synthetic oligonucleotide
  Sense strand starting at position 332 of SEQ ID NO: 588020
cgugcuuguggguguauuu

SEQ ID NO: 836109 - RNA, 19 nt, Artificial Sequence
  Description of Artificial Sequence: Synthetic oligonucleotide
  Antisense strand to SEQ ID NO: 836108
aaauacacccacaagcacg

SEQ ID NO: 836110 - RNA, 19 nt, Artificial Sequence
  Description of Artificial Sequence: Synthetic oligonucleotide
  Sense strand starting at position 391 of SEQ ID NO: 588020
cgacacuuccacugagauc

SEQ ID NO: 836111 - RNA, 19 nt, Artificial Sequence
  Description of Artificial Sequence: Synthetic oligonucleotide
  Antisense strand to SEQ ID NO: 836110
gaucucaguggaagugucg

SEQ ID NO: 836112 - RNA, 19 nt, Artificial Sequence
  Description of Artificial Sequence: Synthetic oligonucleotide
  Sense strand starting at position 2102 of SEQ ID NO: 588020
cgcaucaucccuuauagaa

SEQ ID NO: 836113 - RNA, 19 nt, Artificial Sequence
  Description of Artificial Sequence: Synthetic oligonucleotide
  Antisense strand to SEQ ID NO: 836112
uucuauaagggaugaugcg

SEQ ID NO: 836114 - RNA, 19 nt, Artificial Sequence
  Description of Artificial Sequence: Synthetic oligonucleotide
  Sense strand starting at position 2542 of SEQ ID NO: 588020
agaaaucggaagugugcuu

SEQ ID NO: 836115 - RNA, 19 nt, Artificial Sequence
  Description of Artificial Sequence: Synthetic oligonucleotide
  Antisense strand to SEQ ID NO: 836114
aagcacacuuccgauuucu

SEQ ID NO: 836116 - RNA, 19 nt, Artificial Sequence
  Description of Artificial Sequence: Synthetic oligonucleotide
  Sense strand starting at position 2554 of SEQ ID NO: 588020
ugugcuuucugaccugaga

SEQ ID NO: 836117 - RNA, 19 nt, Artificial Sequence
  Description of Artificial Sequence: Synthetic oligonucleotide
  Antisense strand to SEQ ID NO: 836116
ucucaggucagaaagcaca

SEQ ID NO: 836118 - RNA, 19 nt, Artificial Sequence
  Description of Artificial Sequence: Synthetic oligonucleotide
  Sense strand starting at position 2557 of SEQ ID NO: 588020
gcuuucugaccugagauua

SEQ ID NO: 836119 - RNA, 19 nt, Artificial Sequence
  Description of Artificial Sequence: Synthetic oligonucleotide
  Antisense strand to SEQ ID NO: 836118
uaaucucaggucagaaagc

SEQ ID NO: 836120 - RNA, 19 nt, Artificial Sequence
  Description of Artificial Sequence: Synthetic oligonucleotide
  Sense strand starting at position 2565 of SEQ ID NO: 588020
accugagauuagucaauga

SEQ ID NO: 836121 - RNA, 19 nt, Artificial Sequence
  Description of Artificial Sequence: Synthetic oligonucleotide
  Antisense strand to SEQ ID NO: 836120
ucauugacuaaucucaggu

SEQ ID NO: 836122 - RNA, 19 nt, Artificial Sequence
  Description of Artificial Sequence: Synthetic oligonucleotide
  Sense strand starting at position 2569 of SEQ ID NO: 588020
gagauuagucaaugaagua

SEQ ID NO: 836123 - RNA, 19 nt, Artificial Sequence
  Description of Artificial Sequence: Synthetic oligonucleotide
  Antisense strand to SEQ ID NO: 836122
uacuucauugacuaaucuc

SEQ ID NO: 836124 - RNA, 19 nt, Artificial Sequence
  Description of Artificial Sequence: Synthetic oligonucleotide
  Sense strand starting at position 2576 of SEQ ID NO: 588020
gucaaugaaguaugguauu

SEQ ID NO: 836125 - RNA, 19 nt, Artificial Sequence
  Description of Artificial Sequence: Synthetic oligonucleotide
  Antisense strand to SEQ ID NO: 836124
aauaccauacuucauugac

SEQ ID NO: 836126 - RNA, 19 nt, Artificial Sequence
  Description of Artificial Sequence: Synthetic oligonucleotide
  Sense strand starting at position 2579 of SEQ ID NO: 588020
aaugaaguaugguauuuag

SEQ ID NO: 836127 - RNA, 19 nt, Artificial Sequence
  Description of Artificial Sequence: Synthetic oligonucleotide
  Antisense strand to SEQ ID NO: 836126
cuaaauaccauacuucauu

SEQ ID NO: 836128 - RNA, 19 nt, Artificial Sequence
  Description of Artificial Sequence: Synthetic oligonucleotide
  Sense strand starting at position 2588 of SEQ ID NO: 588020
ugguauuuagcacagcgua

SEQ ID NO: 836129 - RNA, 19 nt, Artificial Sequence
  Description of Artificial Sequence: Synthetic oligonucleotide
  Antisense strand to SEQ ID NO: 836128
uacgcugugcuaaauacca

SEQ ID NO: 836130 - RNA, 19 nt, Artificial Sequence
  Description of Artificial Sequence: Synthetic oligonucleotide
  Sense strand starting at position 2626 of SEQ ID NO: 588020
aggagagauccguggaaug

SEQ ID NO: 836131 - RNA, 19 nt, Artificial Sequence
  Description of Artificial Sequence: Synthetic oligonucleotide
  Antisense strand to SEQ ID NO: 836130
cauuccacggaucucuccu

SEQ ID NO: 836132 - RNA, 19 nt, Artificial Sequence
  Description of Artificial Sequence: Synthetic oligonucleotide
  Sense strand starting at position 2631 of SEQ ID NO: 588020
agauccguggaaugaaaca

SEQ ID NO: 836133 - RNA, 19 nt, Artificial Sequence
  Description of Artificial Sequence: Synthetic oligonucleotide
  Antisense strand to SEQ ID NO: 836132
uguuucauuccacggaucu

SEQ ID NO: 836134 - RNA, 19 nt, Artificial Sequence
  Description of Artificial Sequence: Synthetic oligonucleotide
  Sense strand starting at position 2648 of SEQ ID NO: 588020
cagagcuuccagcgauaac

SEQ ID NO: 836135 - RNA, 19 nt, Artificial Sequence
  Description of Artificial Sequence: Synthetic oligonucleotide
  Antisense strand to SEQ ID NO: 836134
guuaucgcuggaagcucug

SEQ ID NO: 836136 - RNA, 19 nt, Artificial Sequence
  Description of Artificial Sequence: Synthetic oligonucleotide
  Sense strand starting at position 2683 of SEQ ID NO: 588020
uauugauucucugugcgaa

SEQ ID NO: 836137 - RNA, 19 nt, Artificial Sequence
  Description of Artificial Sequence: Synthetic oligonucleotide
  Antisense strand to SEQ ID NO: 836136
uucgcacagagaaucaaua

SEQ ID NO: 836138 - RNA, 19 nt, Artificial Sequence
  Description of Artificial Sequence: Synthetic oligonucleotide
  Sense strand starting at position 2684 of SEQ ID NO: 588020
auugauucucugugcgaau

SEQ ID NO: 836139 - RNA, 19 nt, Artificial Sequence
  Description of Artificial Sequence: Synthetic oligonucleotide
  Antisense strand to SEQ ID NO: 836138
auucgcacagagaaucaau

SEQ ID NO: 836140 - RNA, 19 nt, Artificial Sequence
  Description of Artificial Sequence: Synthetic oligonucleotide
  Sense strand starting at position 2685 of SEQ ID NO: 588020
uugauucucugugcgaaug

SEQ ID NO: 836141 - RNA, 19 nt, Artificial Sequence
  Description of Artificial Sequence: Synthetic oligonucleotide
  Antisense strand to SEQ ID NO: 836140
cauucgcacagagaaucaa

SEQ ID NO: 836142 - RNA, 19 nt, Artificial Sequence
  Description of Artificial Sequence: Synthetic oligonucleotide
  Sense strand starting at position 2686 of SEQ ID NO: 588020
ugauucucugugcgaauga

SEQ ID NO: 836143 - RNA, 19 nt, Artificial Sequence
  Description of Artificial Sequence: Synthetic oligonucleotide
  Antisense strand to SEQ ID NO: 836142
ucauucgcacagagaauca

SEQ ID NO: 836144 - RNA, 19 nt, Artificial Sequence
  Description of Artificial Sequence: Synthetic oligonucleotide
  Sense strand starting at position 2691 of SEQ ID NO: 588020
cucugugcgaaugaaauua

SEQ ID NO: 836145 - RNA, 19 nt, Artificial Sequence
  Description of Artificial Sequence: Synthetic oligonucleotide
  Antisense strand to SEQ ID NO: 836144
uaauuucauucgcacagag

SEQ ID NO: 836146 - RNA, 19 nt, Artificial Sequence
  Description of Artificial Sequence: Synthetic oligonucleotide
  Sense strand starting at position 2706 of SEQ ID NO: 588020
auuaccuuccaguggagaa

SEQ ID NO: 836147 - RNA, 19 nt, Artificial Sequence
  Description of Artificial Sequence: Synthetic oligonucleotide
  Antisense strand to SEQ ID NO: 836146
uucuccacuggaagguaau

SEQ ID NO: 836148 - RNA, 19 nt, Artificial Sequence
  Description of Artificial Sequence: Synthetic oligonucleotide
  Sense strand starting at position 2727 of SEQ ID NO: 588020
agagaacucuuugccugac

SEQ ID NO: 836149 - RNA, 19 nt, Artificial Sequence
  Description of Artificial Sequence: Synthetic oligonucleotide
  Antisense strand to SEQ ID NO: 836148
gucaggcaaagaguucucu

SEQ ID NO: 836150 - RNA, 19 nt, Artificial Sequence
  Description of Artificial Sequence: Synthetic oligonucleotide
  Sense strand starting at position 2729 of SEQ ID NO: 588020
agaacucuuugccugacau

SEQ ID NO: 836151 - RNA, 19 nt, Artificial Sequence
  Description of Artificial Sequence: Synthetic oligonucleotide
  Antisense strand to SEQ ID NO: 836150
augucaggcaaagaguucu

SEQ ID NO: 836152 - RNA, 19 nt, Artificial Sequence
  Description of Artificial Sequence: Synthetic oligonucleotide
  Sense strand starting at position 2793 of SEQ ID NO: 588020
agaaauaugcacugaaguu

SEQ ID NO: 836153 - RNA, 19 nt, Artificial Sequence
  Description of Artificial Sequence: Synthetic oligonucleotide
  Antisense strand to SEQ ID NO: 836152
aacuucagugcauauuucu

SEQ ID NO: 836154 - RNA, 19 nt, Artificial Sequence
  Description of Artificial Sequence: Synthetic oligonucleotide
  Sense strand starting at position 2815 of SEQ ID NO: 588020
agagauacucauugcacaa

SEQ ID NO: 836155 - RNA, 19 nt, Artificial Sequence
  Description of Artificial Sequence: Synthetic oligonucleotide
  Antisense strand to SEQ ID NO: 836154
uugugcaaugaguaucucu

SEQ ID NO: 836156 - RNA, 19 nt, Artificial Sequence
  Description of Artificial Sequence: Synthetic oligonucleotide
  Sense strand starting at position 3072 of SEQ ID NO: 588020
cacagcauuggugauacua

SEQ ID NO: 836157 - RNA, 19 nt, Artificial Sequence
  Description of Artificial Sequence: Synthetic oligonucleotide
  Antisense strand to SEQ ID NO: 836156
uaguaucaccaaugcugug

SEQ ID NO: 836158 - RNA, 19 nt, Artificial Sequence
  Description of Artificial Sequence: Synthetic oligonucleotide
  Sense strand starting at position 3083 of SEQ ID NO: 588020
ugauacuauuuccauacgu

SEQ ID NO: 836159 - RNA, 19 nt, Artificial Sequence
  Description of Artificial Sequence: Synthetic oligonucleotide
  Antisense strand to SEQ ID NO: 836158
acguauggaaauaguauca

SEQ ID NO: 836160 - RNA, 19 nt, Artificial Sequence
  Description of Artificial Sequence: Synthetic oligonucleotide
  Sense strand starting at position 3206 of SEQ ID NO: 588020
ugaggcccuuucucaagaa

SEQ ID NO: 836161 - RNA, 19 nt, Artificial Sequence
  Description of Artificial Sequence: Synthetic oligonucleotide
  Antisense strand to SEQ ID NO: 836160
uucuugagaaagggccuca

SEQ ID NO: 836162 - RNA, 19 nt, Artificial Sequence
  Description of Artificial Sequence: Synthetic oligonucleotide
  Sense strand starting at position 3225 of SEQ ID NO: 588020
gaauacaucggagacguuu

SEQ ID NO: 836163 - RNA, 19 nt, Artificial Sequence
  Description of Artificial Sequence: Synthetic oligonucleotide
  Antisense strand to SEQ ID NO: 836162
aaacgucuccgauguauuc

SEQ ID NO: 836164 - RNA, 19 nt, Artificial Sequence
  Description of Artificial Sequence: Synthetic oligonucleotide
  Sense strand starting at position 3227 of SEQ ID NO: 588020
auacaucggagacguuuaa

SEQ ID NO: 836165 - RNA, 19 nt, Artificial Sequence
  Description of Artificial Sequence: Synthetic oligonucleotide
  Antisense strand to SEQ ID NO: 836164
uuaaacgucuccgauguau

SEQ ID NO: 836166 - RNA, 19 nt, Artificial Sequence
  Description of Artificial Sequence: Synthetic oligonucleotide
  Sense strand starting at position 3434 of SEQ ID NO: 588020
uguaaugcugacgaaagua

SEQ ID NO: 836167 - RNA, 19 nt, Artificial Sequence
  Description of Artificial Sequence: Synthetic oligonucleotide
  Antisense strand to SEQ ID NO: 836166
uacuuucgucagcauuaca

SEQ ID NO: 836168 - RNA, 19 nt, Artificial Sequence
  Description of Artificial Sequence: Synthetic oligonucleotide
  Sense strand starting at position 3452 of SEQ ID NO: 588020
agaccuguucccugaacua

SEQ ID NO: 836169 - RNA, 19 nt, Artificial Sequence
  Description of Artificial Sequence: Synthetic oligonucleotide
  Antisense strand to SEQ ID NO: 836168
uaguucagggaacaggucu

SEQ ID NO: 836170 - RNA, 19 nt, Artificial Sequence
  Description of Artificial Sequence: Synthetic oligonucleotide
  Sense strand starting at position 3479 of SEQ ID NO: 588020
agaauuugggugugucuuu

SEQ ID NO: 836171 - RNA, 19 nt, Artificial Sequence
  Description of Artificial Sequence: Synthetic oligonucleotide
  Antisense strand to SEQ ID NO: 836170
aaagacacacccaaauucu

SEQ ID NO: 836172 - RNA, 19 nt, Artificial Sequence
  Description of Artificial Sequence: Synthetic oligonucleotide
  Sense strand starting at position 3523 of SEQ ID NO: 588020
agguccuggcucuagugau

SEQ ID NO: 836173 - RNA, 19 nt, Artificial Sequence
  Description of Artificial Sequence: Synthetic oligonucleotide
  Antisense strand to SEQ ID NO: 836172
aucacuagagccaggaccu

SEQ ID NO: 836174 - RNA, 19 nt, Artificial Sequence
  Description of Artificial Sequence: Synthetic oligonucleotide
  Sense strand starting at position 3595 of SEQ ID NO: 588020
caaggccucuagguguaaa

SEQ ID NO: 836175 - RNA, 19 nt, Artificial Sequence
  Description of Artificial Sequence: Synthetic oligonucleotide
  Antisense strand to SEQ ID NO: 836174
uuuacaccuagaggccuug

SEQ ID NO: 836176 - RNA, 19 nt, Artificial Sequence
  Description of Artificial Sequence: Synthetic oligonucleotide
  Sense strand starting at position 3598 of SEQ ID NO: 588020
ggccucuagguguaaagaa

SEQ ID NO: 836177 - RNA, 19 nt, Artificial Sequence
  Description of Artificial Sequence: Synthetic oligonucleotide
  Antisense strand to SEQ ID NO: 836176
uucuuuacaccuagaggcc

SEQ ID NO: 836178 - RNA, 19 nt, Artificial Sequence
  Description of Artificial Sequence: Synthetic oligonucleotide
  Sense strand starting at position 3636 of SEQ ID NO: 588020
ucaugaaauuaggaugauu

SEQ ID NO: 836179 - RNA, 19 nt, Artificial Sequence
  Description of Artificial Sequence: Synthetic oligonucleotide
  Antisense strand to SEQ ID NO: 836178
aaucauccuaauuucauga

SEQ ID NO: 836180 - RNA, 19 nt, Artificial Sequence
  Description of Artificial Sequence: Synthetic oligonucleotide
  Sense strand starting at position 3666 of SEQ ID NO: 588020
gauguaaugagaggacugu

SEQ ID NO: 836181 - RNA, 19 nt, Artificial Sequence
  Description of Artificial Sequence: Synthetic oligonucleotide
  Antisense strand to SEQ ID NO: 836180
acaguccucucauuacauc

SEQ ID NO: 836182 - RNA, 19 nt, Artificial Sequence
  Description of Artificial Sequence: Synthetic oligonucleotide
  Sense strand starting at position 3965 of SEQ ID NO: 588020
ccgaauugauauucugucu

SEQ ID NO: 836183 - RNA, 19 nt, Artificial Sequence
  Description of Artificial Sequence: Synthetic oligonucleotide
  Antisense strand to SEQ ID NO: 836182
agacagaauaucaauucgg

SEQ ID NO: 836184 - RNA, 19 nt, Artificial Sequence
  Description of Artificial Sequence: Synthetic oligonucleotide
  Sense strand starting at position 85 of SEQ ID NO: 588021
gucaauaggucacauuaag

SEQ ID NO: 836185 - RNA, 19 nt, Artificial Sequence
  Description of Artificial Sequence: Synthetic oligonucleotide
  Antisense strand to SEQ ID NO: 836184
cuuaaugugaccuauugac

SEQ ID NO: 836186 - RNA, 19 nt, Artificial Sequence
  Description of Artificial Sequence: Synthetic oligonucleotide
  Sense strand starting at position 186 of SEQ ID NO: 588021
acaugauguuucccauaug

SEQ ID NO: 836187 - RNA, 19 nt, Artificial Sequence
  Description of Artificial Sequence: Synthetic oligonucleotide
  Antisense strand to SEQ ID NO: 836186
cauaugggaaacaucaugu

SEQ ID NO: 836188 - RNA, 19 nt, Artificial Sequence
  Description of Artificial Sequence: Synthetic oligonucleotide
  Sense strand starting at position 235 of SEQ ID NO: 588021
uccaauugucccuguugua

SEQ ID NO: 836189 - RNA, 19 nt, Artificial Sequence
  Description of Artificial Sequence: Synthetic oligonucleotide
  Antisense strand to SEQ ID NO: 836188
uacaacagggacaauugga

SEQ ID NO: 836190 - RNA, 19 nt, Artificial Sequence
  Description of Artificial Sequence: Synthetic oligonucleotide
  Sense strand starting at position 2453 of SEQ ID NO: 588021
gcgcuugugcugggaugaa

SEQ ID NO: 836191 - RNA, 19 nt, Artificial Sequence
  Description of Artificial Sequence: Synthetic oligonucleotide
  Antisense strand to SEQ ID NO: 836190
uucaucccagcacaagcgc

SEQ ID NO: 836192 - RNA, 19 nt, Artificial Sequence
  Description of Artificial Sequence: Synthetic oligonucleotide
  Sense strand starting at position 2499 of SEQ ID NO: 588021
ucaucauccucucagcgau

SEQ ID NO: 836193 - RNA, 19 nt, Artificial Sequence
  Description of Artificial Sequence: Synthetic oligonucleotide
  Antisense strand to SEQ ID NO: 836192
aucgcugagaggaugauga

SEQ ID NO: 836194 - RNA, 19 nt, Artificial Sequence
  Description of Artificial Sequence: Synthetic oligonucleotide
  Sense strand starting at position 2522 of SEQ ID NO: 588021
gcacaagaagucugaagug

SEQ ID NO: 836195 - RNA, 19 nt, Artificial Sequence
  Description of Artificial Sequence: Synthetic oligonucleotide
  Antisense strand to SEQ ID NO: 836194
cacuucagacuucuugugc

SEQ ID NO: 836196 - RNA, 19 nt, Artificial Sequence
  Description of Artificial Sequence: Synthetic oligonucleotide
  Sense strand starting at position 2539 of SEQ ID NO: 588021
ugcacuuucugaccugaga

SEQ ID NO: 836197 - RNA, 19 nt, Artificial Sequence
  Description of Artificial Sequence: Synthetic oligonucleotide
  Antisense strand to SEQ ID NO: 836196
ucucaggucagaaagugca

SEQ ID NO: 836198 - RNA, 19 nt, Artificial Sequence
  Description of Artificial Sequence: Synthetic oligonucleotide
  Sense strand starting at position 2671 of SEQ ID NO: 588021
ugauucucuauccgaguga

SEQ ID NO: 836199 - RNA, 19 nt, Artificial Sequence
  Description of Artificial Sequence: Synthetic oligonucleotide
  Antisense strand to SEQ ID NO: 836198
ucacucggauagagaauca

SEQ ID NO: 836200 - RNA, 19 nt, Artificial Sequence
  Description of Artificial Sequence: Synthetic oligonucleotide
  Sense strand starting at position 2672 of SEQ ID NO: 588021
gauucucuauccgagugaa

SEQ ID NO: 836201 - RNA, 19 nt, Artificial Sequence
  Description of Artificial Sequence: Synthetic oligonucleotide
  Antisense strand to SEQ ID NO: 836200
uucacucggauagagaauc

SEQ ID NO: 836202 - RNA, 19 nt, Artificial Sequence
  Description of Artificial Sequence: Synthetic oligonucleotide
  Sense strand starting at position 2675 of SEQ ID NO: 588021
ucucuauccgagugaaauu

SEQ ID NO: 836203 - RNA, 19 nt, Artificial Sequence
  Description of Artificial Sequence: Synthetic oligonucleotide
  Antisense strand to SEQ ID NO: 836202
aauuucacucggauagaga

SEQ ID NO: 836204 - RNA, 19 nt, Artificial Sequence
  Description of Artificial Sequence: Synthetic oligonucleotide
  Sense strand starting at position 2685 of SEQ ID NO: 588021
agugaaauuaccggccagu

SEQ ID NO: 836205 - RNA, 19 nt, Artificial Sequence
  Description of Artificial Sequence: Synthetic oligonucleotide
  Antisense strand to SEQ ID NO: 836204
acuggccgguaauuucacu

SEQ ID NO: 836206 - RNA, 19 nt, Artificial Sequence
  Description of Artificial Sequence: Synthetic oligonucleotide
  Sense strand starting at position 2711 of SEQ ID NO: 588021
aagacaggucuuugcauga

SEQ ID NO: 836207 - RNA, 19 nt, Artificial Sequence
  Description of Artificial Sequence: Synthetic oligonucleotide
  Antisense strand to SEQ ID NO: 836206
ucaugcaaagaccugucuu

SEQ ID NO: 836208 - RNA, 19 nt, Artificial Sequence
  Description of Artificial Sequence: Synthetic oligonucleotide
  Sense strand starting at position 2715 of SEQ ID NO: 588021
caggucuuugcaugaaaug

SEQ ID NO: 836209 - RNA, 19 nt, Artificial Sequence
  Description of Artificial Sequence: Synthetic oligonucleotide
  Antisense strand to SEQ ID NO: 836208
cauuucaugcaaagaccug

SEQ ID NO: 836210 - RNA, 19 nt, Artificial Sequence
  Description of Artificial Sequence: Synthetic oligonucleotide
  Sense strand starting at position 2799 of SEQ ID NO: 588021
aagagauacucagcgcaca

SEQ ID NO: 836211 - RNA, 19 nt, Artificial Sequence
  Description of Artificial Sequence: Synthetic oligonucleotide
  Antisense strand to SEQ ID NO: 836210
ugugcgcugaguaucucuu

SEQ ID NO: 836212 - RNA, 19 nt, Artificial Sequence
  Description of Artificial Sequence: Synthetic oligonucleotide
  Sense strand starting at position 2800 of SEQ ID NO: 588021
agagauacucagcgcacaa

SEQ ID NO: 836213 - RNA, 19 nt, Artificial Sequence
  Description of Artificial Sequence: Synthetic oligonucleotide
  Antisense strand to SEQ ID NO: 836212
uugugcgcugaguaucucu

SEQ ID NO: 836214 - RNA, 19 nt, Artificial Sequence
  Description of Artificial Sequence: Synthetic oligonucleotide
  Sense strand starting at position 3054 of SEQ ID NO: 588021
ucucacagcaugggugaua

SEQ ID NO: 836215 - RNA, 19 nt, Artificial Sequence
  Description of Artificial Sequence: Synthetic oligonucleotide
  Antisense strand to SEQ ID NO: 836214
uaucacccaugcugugaga

SEQ ID NO: 836216 - RNA, 19 nt, Artificial Sequence
  Description of Artificial Sequence: Synthetic oligonucleotide
  Sense strand starting at position 3059 of SEQ ID NO: 588021
cagcaugggugauacuauu

SEQ ID NO: 836217 - RNA, 19 nt, Artificial Sequence
  Description of Artificial Sequence: Synthetic oligonucleotide
  Antisense strand to SEQ ID NO: 836216
aauaguaucacccaugcug

SEQ ID NO: 836218 - RNA, 19 nt, Artificial Sequence
  Description of Artificial Sequence: Synthetic oligonucleotide
  Sense strand starting at position 3076 of SEQ ID NO: 588021
uuuccacacguaugugaua

SEQ ID NO: 836219 - RNA, 19 nt, Artificial Sequence
  Description of Artificial Sequence: Synthetic oligonucleotide
  Antisense strand to SEQ ID NO: 836218
uaucacauacguguggaaa

SEQ ID NO: 836220 - RNA, 19 nt, Artificial Sequence
  Description of Artificial Sequence: Synthetic oligonucleotide
  Sense strand starting at position 3077 of SEQ ID NO: 588021
uuccacacguaugugauaa

SEQ ID NO: 836221 - RNA, 19 nt, Artificial Sequence
  Description of Artificial Sequence: Synthetic oligonucleotide
  Antisense strand to SEQ ID NO: 836220
uuaucacauacguguggaa

SEQ ID NO: 836222 - RNA, 19 nt, Artificial Sequence
  Description of Artificial Sequence: Synthetic oligonucleotide
  Sense strand starting at position 3085 of SEQ ID NO: 588021
guaugugauaauggcucaa

SEQ ID NO: 836223 - RNA, 19 nt, Artificial Sequence
  Description of Artificial Sequence: Synthetic oligonucleotide
  Antisense strand to SEQ ID NO: 836222
uugagccauuaucacauac

SEQ ID NO: 836224 - RNA, 19 nt, Artificial Sequence
  Description of Artificial Sequence: Synthetic oligonucleotide
  Sense strand starting at position 3087 of SEQ ID NO: 588021
augugauaauggcucaaca

SEQ ID NO: 836225 - RNA, 19 nt, Artificial Sequence
  Description of Artificial Sequence: Synthetic oligonucleotide
  Antisense strand to SEQ ID NO: 836224
uguugagccauuaucacau

SEQ ID NO: 836226 - RNA, 19 nt, Artificial Sequence
  Description of Artificial Sequence: Synthetic oligonucleotide
  Sense strand starting at position 3089 of SEQ ID NO: 588021
gugauaauggcucaacauu

SEQ ID NO: 836227 - RNA, 19 nt, Artificial Sequence
  Description of Artificial Sequence: Synthetic oligonucleotide
  Antisense strand to SEQ ID NO: 836226
aauguugagccauuaucac

SEQ ID NO: 836228 - RNA, 19 nt, Artificial Sequence
  Description of Artificial Sequence: Synthetic oligonucleotide
  Sense strand starting at position 3321 of SEQ ID NO: 588021
ggauucucgcaucgauugu

SEQ ID NO: 836229 - RNA, 19 nt, Artificial Sequence
  Description of Artificial Sequence: Synthetic oligonucleotide
  Antisense strand to SEQ ID NO: 836228
acaaucgaugcgagaaucc

SEQ ID NO: 836230 - RNA, 19 nt, Artificial Sequence
  Description of Artificial Sequence: Synthetic oligonucleotide
  Sense strand starting at position 3328 of SEQ ID NO: 588021
cgcaucgauuguucaugau

SEQ ID NO: 836231 - RNA, 19 nt, Artificial Sequence
  Description of Artificial Sequence: Synthetic oligonucleotide
  Antisense strand to SEQ ID NO: 836230
aucaugaacaaucgaugcg

SEQ ID NO: 836232 - RNA, 19 nt, Artificial Sequence
  Description of Artificial Sequence: Synthetic oligonucleotide
  Sense strand starting at position 3576 of SEQ ID NO: 588021
gcgccaaggccucuaguuu

SEQ ID NO: 836233 - RNA, 19 nt, Artificial Sequence
  Description of Artificial Sequence: Synthetic oligonucleotide
  Antisense strand to SEQ ID NO: 836232
aaacuagaggccuuggcgc

SEQ ID NO: 836234 - RNA, 19 nt, Artificial Sequence
  Description of Artificial Sequence: Synthetic oligonucleotide
  Sense strand starting at position 3709 of SEQ ID NO: 588021
ccaggugugguccaucaga

SEQ ID NO: 836235 - RNA, 19 nt, Artificial Sequence
  Description of Artificial Sequence: Synthetic oligonucleotide
  Antisense strand to SEQ ID NO: 836234
ucugauggaccacaccugg

SEQ ID NO: 836236 - RNA, 19 nt, Artificial Sequence
  Description of Artificial Sequence: Synthetic oligonucleotide
  Sense strand starting at position 3731 of SEQ ID NO: 588021
cuucgugcgccugauguaa

SEQ ID NO: 836237 - RNA, 19 nt, Artificial Sequence
  Description of Artificial Sequence: Synthetic oligonucleotide
  Antisense strand to SEQ ID NO: 836236
uuacaucaggcgcacgaag

SEQ ID NO: 836238 - RNA, 19 nt, Artificial Sequence
  Description of Artificial Sequence: Synthetic oligonucleotide
  Sense strand starting at position 3912 of SEQ ID NO: 588021
aucggugugcuuucauguu

SEQ ID NO: 836239 - RNA, 19 nt, Artificial Sequence
  Description of Artificial Sequence: Synthetic oligonucleotide
  Antisense strand to SEQ ID NO: 836238
aacaugaaagcacaccgau

SEQ ID NO: 836240 - RNA, 19 nt, Artificial Sequence
  Description of Artificial Sequence: Synthetic oligonucleotide
  Sense strand starting at position 3958 of SEQ ID NO: 588021
cgauaaccugucugcgagu

SEQ ID NO: 836241 - RNA, 19 nt, Artificial Sequence
  Description of Artificial Sequence: Synthetic oligonucleotide
  Antisense strand to SEQ ID NO: 836240
acucgcagacagguuaucg

SEQ ID NO: 836242 - RNA, 19 nt, Artificial Sequence
  Description of Artificial Sequence: Synthetic oligonucleotide
  Sense strand starting at position 3961 of SEQ ID NO: 588021
uaaccugucugcgagucau

SEQ ID NO: 836243 - RNA, 19 nt, Artificial Sequence
  Description of Artificial Sequence: Synthetic oligonucleotide
  Antisense strand to SEQ ID NO: 836242
augacucgcagacagguua

SEQ ID NO: 836244 - RNA, 19 nt, Artificial Sequence
  Description of Artificial Sequence: Synthetic oligonucleotide
  Sense strand starting at position 3967 of SEQ ID NO: 588021
gucugcgagucaugcucau

SEQ ID NO: 836245 - RNA, 19 nt, Artificial Sequence
  Description of Artificial Sequence: Synthetic oligonucleotide
  Antisense strand to SEQ ID NO: 836244
augagcaugacucgcagac

SEQ ID NO: 836246 - RNA, 19 nt, Artificial Sequence
  Description of Artificial Sequence: Synthetic oligonucleotide
  Sense strand starting at position 3971 of SEQ ID NO: 588021
gcgagucaugcucaucaca

SEQ ID NO: 836247 - RNA, 19 nt, Artificial Sequence
  Description of Artificial Sequence: Synthetic oligonucleotide
  Antisense strand to SEQ ID NO: 836246
ugugaugagcaugacucgc

SEQ ID NO: 836248 - RNA, 19 nt, Artificial Sequence
  Description of Artificial Sequence: Synthetic oligonucleotide
  Sense strand starting at position 391 of SEQ ID NO: 588022
cgguacuuccacugugauc

SEQ ID NO: 836249 - RNA, 19 nt, Artificial Sequence
  Description of Artificial Sequence: Synthetic oligonucleotide
  Antisense strand to SEQ ID NO: 836248
gaucacaguggaaguaccg

SEQ ID NO: 836250 - RNA, 19 nt, Artificial Sequence
  Description of Artificial Sequence: Synthetic oligonucleotide
  Sense strand starting at position 393 of SEQ ID NO: 588022
guacuuccacugugaucac

SEQ ID NO: 836251 - RNA, 19 nt, Artificial Sequence
  Description of Artificial Sequence: Synthetic oligonucleotide
  Antisense strand to SEQ ID NO: 836250
gugaucacaguggaaguac

SEQ ID NO: 836252 - RNA, 19 nt, Artificial Sequence
  Description of Artificial Sequence: Synthetic oligonucleotide
  Sense strand starting at position 400 of SEQ ID NO: 588022
cacugugaucacuggcaca

SEQ ID NO: 836253 - RNA, 19 nt, Artificial Sequence
  Description of Artificial Sequence: Synthetic oligonucleotide
  Antisense strand to SEQ ID NO: 836252
ugugccagugaucacagug

SEQ ID NO: 836254 - RNA, 19 nt, Artificial Sequence
  Description of Artificial Sequence: Synthetic oligonucleotide
  Sense strand starting at position 403 of SEQ ID NO: 588022
ugugaucacuggcacacaa

SEQ ID NO: 836255 - RNA, 19 nt, Artificial Sequence
  Description of Artificial Sequence: Synthetic oligonucleotide
  Antisense strand to SEQ ID NO: 836254
uugugugccagugaucaca

SEQ ID NO: 836256 - RNA, 19 nt, Artificial Sequence
  Description of Artificial Sequence: Synthetic oligonucleotide
  Sense strand starting at position 429 of SEQ ID NO: 588022
ucucuugcuguguuuguua

SEQ ID NO: 836257 - RNA, 19 nt, Artificial Sequence
  Description of Artificial Sequence: Synthetic oligonucleotide
  Antisense strand to SEQ ID NO: 836256
uaacaaacacagcaagaga

SEQ ID NO: 836258 - RNA, 19 nt, Artificial Sequence
  Description of Artificial Sequence: Synthetic oligonucleotide
  Sense strand starting at position 431 of SEQ ID NO: 588022
ucuugcuguguuuguuauu

SEQ ID NO: 836259 - RNA, 19 nt, Artificial Sequence
  Description of Artificial Sequence: Synthetic oligonucleotide
  Antisense strand to SEQ ID NO: 836258
aauaacaaacacagcaaga

SEQ ID NO: 836260 - RNA, 19 nt, Artificial Sequence
  Description of Artificial Sequence: Synthetic oligonucleotide
  Sense strand starting at position 440 of SEQ ID NO: 588022
guuuguuauucccuuugga

SEQ ID NO: 836261 - RNA, 19 nt, Artificial Sequence
  Description of Artificial Sequence: Synthetic oligonucleotide
  Antisense strand to SEQ ID NO: 836260
uccaaagggaauaacaaac

SEQ ID NO: 836262 - RNA, 19 nt, Artificial Sequence
  Description of Artificial Sequence: Synthetic oligonucleotide
  Sense strand starting at position 443 of SEQ ID NO: 588022
uguuauucccuuuggaucu

SEQ ID NO: 836263 - RNA, 19 nt, Artificial Sequence
  Description of Artificial Sequence: Synthetic oligonucleotide
  Antisense strand to SEQ ID NO: 836262
agauccaaagggaauaaca

SEQ ID NO: 836264 - RNA, 19 nt, Artificial Sequence
  Description of Artificial Sequence: Synthetic oligonucleotide
  Sense strand starting at position 465 of SEQ ID NO: 588022
ggugcucccuugcagagaa

SEQ ID NO: 836265 - RNA, 19 nt, Artificial Sequence
  Description of Artificial Sequence: Synthetic oligonucleotide
  Antisense strand to SEQ ID NO: 836264
uucucugcaagggagcacc

SEQ ID NO: 836266 - RNA, 19 nt, Artificial Sequence
  Description of Artificial Sequence: Synthetic oligonucleotide
  Sense strand starting at position 515 of SEQ ID NO: 588022
cugucgguuucgucgaaga

SEQ ID NO: 836267 - RNA, 19 nt, Artificial Sequence
  Description of Artificial Sequence: Synthetic oligonucleotide
  Antisense strand to SEQ ID NO: 836266
ucuucgacgaaaccgacag

SEQ ID NO: 836268 - RNA, 19 nt, Artificial Sequence
  Description of Artificial Sequence: Synthetic oligonucleotide
  Sense strand starting at position 516 of SEQ ID NO: 588022
ugucgguuucgucgaagag

SEQ ID NO: 836269 - RNA, 19 nt, Artificial Sequence
  Description of Artificial Sequence: Synthetic oligonucleotide
  Antisense strand to SEQ ID NO: 836268
cucuucgacgaaaccgaca

SEQ ID NO: 836270 - RNA, 19 nt, Artificial Sequence
  Description of Artificial Sequence: Synthetic oligonucleotide
  Sense strand starting at position 517 of SEQ ID NO: 588022
gucgguuucgucgaagaga

SEQ ID NO: 836271 - RNA, 19 nt, Artificial Sequence
  Description of Artificial Sequence: Synthetic oligonucleotide
  Antisense strand to SEQ ID NO: 836270
ucucuucgacgaaaccgac

SEQ ID NO: 836272 - RNA, 19 nt, Artificial Sequence
  Description of Artificial Sequence: Synthetic oligonucleotide
  Sense strand starting at position 518 of SEQ ID NO: 588022
ucgguuucgucgaagagag

SEQ ID NO: 836273 - RNA, 19 nt, Artificial Sequence
  Description of Artificial Sequence: Synthetic oligonucleotide
  Antisense strand to SEQ ID NO: 836272
cucucuucgacgaaaccga

SEQ ID NO: 836274 - RNA, 19 nt, Artificial Sequence
  Description of Artificial Sequence: Synthetic oligonucleotide
  Sense strand starting at position 1346 of SEQ ID NO: 588022
ggucaaaggugucugaaac

SEQ ID NO: 836275 - RNA, 19 nt, Artificial Sequence
  Description of Artificial Sequence: Synthetic oligonucleotide
  Antisense strand to SEQ ID NO: 836274
guuucagacaccuuugacc

SEQ ID NO: 836276 - RNA, 19 nt, Artificial Sequence
  Description of Artificial Sequence: Synthetic oligonucleotide
  Sense strand starting at position 1379 of SEQ ID NO: 588022
gauacuugauuugagaucu

SEQ ID NO: 836277 - RNA, 19 nt, Artificial Sequence
  Description of Artificial Sequence: Synthetic oligonucleotide
  Antisense strand to SEQ ID NO: 836276
agaucucaaaucaaguauc

SEQ ID NO: 836278 - RNA, 19 nt, Artificial Sequence
  Description of Artificial Sequence: Synthetic oligonucleotide
  Sense strand starting at position 1487 of SEQ ID NO: 588022
uggcauccacaguaaacau

SEQ ID NO: 836279 - RNA, 19 nt, Artificial Sequence
  Description of Artificial Sequence: Synthetic oligonucleotide
  Antisense strand to SEQ ID NO: 836278
auguuuacuguggaugcca

SEQ ID NO: 836280 - RNA, 19 nt, Artificial Sequence
  Description of Artificial Sequence: Synthetic oligonucleotide
  Sense strand starting at position 1526 of SEQ ID NO: 588022
ccugcucaccucuauggaa

SEQ ID NO: 836281 - RNA, 19 nt, Artificial Sequence
  Description of Artificial Sequence: Synthetic oligonucleotide
  Antisense strand to SEQ ID NO: 836280
uuccauagaggugagcagg

SEQ ID NO: 836282 - RNA, 19 nt, Artificial Sequence
  Description of Artificial Sequence: Synthetic oligonucleotide
  Sense strand starting at position 1610 of SEQ ID NO: 588022
gagcuugcauaguacagaa

SEQ ID NO: 836283 - RNA, 19 nt, Artificial Sequence
  Description of Artificial Sequence: Synthetic oligonucleotide
  Antisense strand to SEQ ID NO: 836282
uucuguacuaugcaagcuc

SEQ ID NO: 836284 - RNA, 19 nt, Artificial Sequence
  Description of Artificial Sequence: Synthetic oligonucleotide
  Sense strand starting at position 1645 of SEQ ID NO: 588022
agaugacacguuugagagu

SEQ ID NO: 836285 - RNA, 19 nt, Artificial Sequence
  Description of Artificial Sequence: Synthetic oligonucleotide
  Antisense strand to SEQ ID NO: 836284
acucucaaacgugucaucu

SEQ ID NO: 836286 - RNA, 19 nt, Artificial Sequence
  Description of Artificial Sequence: Synthetic oligonucleotide
  Sense strand starting at position 1866 of SEQ ID NO: 588022
agaugagaguggugacuuu

SEQ ID NO: 836287 - RNA, 19 nt, Artificial Sequence
  Description of Artificial Sequence: Synthetic oligonucleotide
  Antisense strand to SEQ ID NO: 836286
aaagucaccacucucaucu

SEQ ID NO: 836288 - RNA, 19 nt, Artificial Sequence
  Description of Artificial Sequence: Synthetic oligonucleotide
  Sense strand starting at position 1919 of SEQ ID NO: 588022
cugcaucuagccgagaaga

SEQ ID NO: 836289 - RNA, 19 nt, Artificial Sequence
  Description of Artificial Sequence: Synthetic oligonucleotide
  Antisense strand to SEQ ID NO: 836288
ucuucucggcuagaugcag

SEQ ID NO: 836290 - RNA, 19 nt, Artificial Sequence
  Description of Artificial Sequence: Synthetic oligonucleotide
  Sense strand starting at position 1921 of SEQ ID NO: 588022
gcaucuagccgagaagaug

SEQ ID NO: 836291 - RNA, 19 nt, Artificial Sequence
  Description of Artificial Sequence: Synthetic oligonucleotide
  Antisense strand to SEQ ID NO: 836290
caucuucucggcuagaugc

SEQ ID NO: 836292 - RNA, 19 nt, Artificial Sequence
  Description of Artificial Sequence: Synthetic oligonucleotide
  Sense strand starting at position 1981 of SEQ ID NO: 588022
uagagugagucgucuucca

SEQ ID NO: 836293 - RNA, 19 nt, Artificial Sequence
  Description of Artificial Sequence: Synthetic oligonucleotide
  Antisense strand to SEQ ID NO: 836292
uggaagacgacucacucua

SEQ ID NO: 836294 - RNA, 19 nt, Artificial Sequence
  Description of Artificial Sequence: Synthetic oligonucleotide
  Sense strand starting at position 2751 of SEQ ID NO: 588022
augaaauacucuuguggaa

SEQ ID NO: 836295 - RNA, 19 nt, Artificial Sequence
  Description of Artificial Sequence: Synthetic oligonucleotide
  Antisense strand to SEQ ID NO: 836294
uuccacaagaguauuucau

SEQ ID NO: 836296 - RNA, 19 nt, Artificial Sequence
  Description of Artificial Sequence: Synthetic oligonucleotide
  Sense strand starting at position 2753 of SEQ ID NO: 588022
gaaauacucuuguggaagc

SEQ ID NO: 836297 - RNA, 19 nt, Artificial Sequence
  Description of Artificial Sequence: Synthetic oligonucleotide
  Antisense strand to SEQ ID NO: 836296
gcuuccacaagaguauuuc

SEQ ID NO: 836298 - RNA, 19 nt, Artificial Sequence
  Description of Artificial Sequence: Synthetic oligonucleotide
  Sense strand starting at position 2755 of SEQ ID NO: 588022
aauacucuuguggaagcua

SEQ ID NO: 836299 - RNA, 19 nt, Artificial Sequence
  Description of Artificial Sequence: Synthetic oligonucleotide
  Antisense strand to SEQ ID NO: 836298
uagcuuccacaagaguauu

SEQ ID NO: 836300 - RNA, 19 nt, Artificial Sequence
  Description of Artificial Sequence: Synthetic oligonucleotide
  Sense strand starting at position 3087 of SEQ ID NO: 588022
gggugauacuguuuccaua

SEQ ID NO: 836301 - RNA, 19 nt, Artificial Sequence
  Description of Artificial Sequence: Synthetic oligonucleotide
  Antisense strand to SEQ ID NO: 836300
uauggaaacaguaucaccc

SEQ ID NO: 836302 - RNA, 19 nt, Artificial Sequence
  Description of Artificial Sequence: Synthetic oligonucleotide
  Sense strand starting at position 3096 of SEQ ID NO: 588022
uguuuccauacguauguga

SEQ ID NO: 836303 - RNA, 19 nt, Artificial Sequence
  Description of Artificial Sequence: Synthetic oligonucleotide
  Antisense strand to SEQ ID NO: 836302
ucacauacguauggaaaca

SEQ ID NO: 836304 - RNA, 19 nt, Artificial Sequence
  Description of Artificial Sequence: Synthetic oligonucleotide
  Sense strand starting at position 3362 of SEQ ID NO: 588022
ucgauuguucauggucuga

SEQ ID NO: 836305 - RNA, 19 nt, Artificial Sequence
  Description of Artificial Sequence: Synthetic oligonucleotide
  Antisense strand to SEQ ID NO: 836304
ucagaccaugaacaaucga

SEQ ID NO: 836306 - RNA, 19 nt, Artificial Sequence
  Description of Artificial Sequence: Synthetic oligonucleotide
  Sense strand starting at position 3366 of SEQ ID NO: 588022
uuguucauggucugagaug

SEQ ID NO: 836307 - RNA, 19 nt, Artificial Sequence
  Description of Artificial Sequence: Synthetic oligonucleotide
  Antisense strand to SEQ ID NO: 836306
caucucagaccaugaacaa

SEQ ID NO: 836308 - RNA, 19 nt, Artificial Sequence
  Description of Artificial Sequence: Synthetic oligonucleotide
  Sense strand starting at position 3367 of SEQ ID NO: 588022
uguucauggucugagaugu

SEQ ID NO: 836309 - RNA, 19 nt, Artificial Sequence
  Description of Artificial Sequence: Synthetic oligonucleotide
  Antisense strand to SEQ ID NO: 836308
acaucucagaccaugaaca

SEQ ID NO: 836310 - RNA, 19 nt, Artificial Sequence
  Description of Artificial Sequence: Synthetic oligonucleotide
  Sense strand starting at position 3416 of SEQ ID NO: 588022
uggaauugcaguuaguaca

SEQ ID NO: 836311 - RNA, 19 nt, Artificial Sequence
  Description of Artificial Sequence: Synthetic oligonucleotide
  Antisense strand to SEQ ID NO: 836310
uguacuaacugcaauucca

SEQ ID NO: 836312 - RNA, 19 nt, Artificial Sequence
  Description of Artificial Sequence: Synthetic oligonucleotide
  Sense strand starting at position 3426 of SEQ ID NO: 588022
guuaguacauuuggugcaa

SEQ ID NO: 836313 - RNA, 19 nt, Artificial Sequence
  Description of Artificial Sequence: Synthetic oligonucleotide
  Antisense strand to SEQ ID NO: 836312
uugcaccaaauguacuaac

SEQ ID NO: 836314 - RNA, 19 nt, Artificial Sequence
  Description of Artificial Sequence: Synthetic oligonucleotide
  Sense strand starting at position 3650 of SEQ ID NO: 588022
gcucaugaaauucggauga

SEQ ID NO: 836315 - RNA, 19 nt, Artificial Sequence
  Description of Artificial Sequence: Synthetic oligonucleotide
  Antisense strand to SEQ ID NO: 836314
ucauccgaauuucaugagc

SEQ ID NO: 836316 - RNA, 19 nt, Artificial Sequence
  Description of Artificial Sequence: Synthetic oligonucleotide
  Sense strand starting at position 3652 of SEQ ID NO: 588022
ucaugaaauucggaugauu

SEQ ID NO: 836317 - RNA, 19 nt, Artificial Sequence
  Description of Artificial Sequence: Synthetic oligonucleotide
  Antisense strand to SEQ ID NO: 836316
aaucauccgaauuucauga

SEQ ID NO: 836318 - RNA, 19 nt, Artificial Sequence
  Description of Artificial Sequence: Synthetic oligonucleotide
  Sense strand starting at position 3868 of SEQ ID NO: 588022
aagcaugagcaaugcagau

SEQ ID NO: 836319 - RNA, 19 nt, Artificial Sequence
  Description of Artificial Sequence: Synthetic oligonucleotide
  Antisense strand to SEQ ID NO: 836318
aucugcauugcucaugcuu

SEQ ID NO: 836320 - RNA, 19 nt, Artificial Sequence
  Description of Artificial Sequence: Synthetic oligonucleotide
  Sense strand starting at position 3880 of SEQ ID NO: 588022
ugcagaugucguggcuuca

SEQ ID NO: 836321 - RNA, 19 nt, Artificial Sequence
  Description of Artificial Sequence: Synthetic oligonucleotide
  Antisense strand to SEQ ID NO: 836320
ugaagccacgacaucugca

SEQ ID NO: 836322 - RNA, 19 nt, Artificial Sequence
  Description of Artificial Sequence: Synthetic oligonucleotide
  Sense strand starting at position 44 of SEQ ID NO: 588023
aaccaugucgccugcaaua

SEQ ID NO: 836323 - RNA, 19 nt, Artificial Sequence
  Description of Artificial Sequence: Synthetic oligonucleotide
  Antisense strand to SEQ ID NO: 836322
uauugcaggcgacaugguu

SEQ ID NO: 836324 - RNA, 19 nt, Artificial Sequence
  Description of Artificial Sequence: Synthetic oligonucleotide
  Sense strand starting at position 185 of SEQ ID NO: 588023
acaugauguuucccauaug

SEQ ID NO: 836325 - RNA, 19 nt, Artificial Sequence
  Description of Artificial Sequence: Synthetic oligonucleotide
  Antisense strand to SEQ ID NO: 836324
cauaugggaaacaucaugu

SEQ ID NO: 836326 - RNA, 19 nt, Artificial Sequence
  Description of Artificial Sequence: Synthetic oligonucleotide
  Sense strand starting at position 516 of SEQ ID NO: 588023
ugucgaguucaucgaagag

SEQ ID NO: 836327 - RNA, 19 nt, Artificial Sequence
  Description of Artificial Sequence: Synthetic oligonucleotide
  Antisense strand to SEQ ID NO: 836326
cucuucgaugaacucgaca

SEQ ID NO: 836328 - RNA, 19 nt, Artificial Sequence
  Description of Artificial Sequence: Synthetic oligonucleotide
  Sense strand starting at position 520 of SEQ ID NO: 588023
gaguucaucgaagagaggu

SEQ ID NO: 836329 - RNA, 19 nt, Artificial Sequence
  Description of Artificial Sequence: Synthetic oligonucleotide
  Antisense strand to SEQ ID NO: 836328
accucucuucgaugaacuc

SEQ ID NO: 836330 - RNA, 19 nt, Artificial Sequence
  Description of Artificial Sequence: Synthetic oligonucleotide
  Sense strand starting at position 993 of SEQ ID NO: 588023
gaaguaauauccguuguga

SEQ ID NO: 836331 - RNA, 19 nt, Artificial Sequence
  Description of Artificial Sequence: Synthetic oligonucleotide
  Antisense strand to SEQ ID NO: 836330
ucacaacggauauuacuuc

SEQ ID NO: 836332 - RNA, 19 nt, Artificial Sequence
  Description of Artificial Sequence: Synthetic oligonucleotide
  Sense strand starting at position 995 of SEQ ID NO: 588023
aguaauauccguugugaca

SEQ ID NO: 836333 - RNA, 19 nt, Artificial Sequence
  Description of Artificial Sequence: Synthetic oligonucleotide
  Antisense strand to SEQ ID NO: 836332
ugucacaacggauauuacu

SEQ ID NO: 836334 - RNA, 19 nt, Artificial Sequence
  Description of Artificial Sequence: Synthetic oligonucleotide
  Sense strand starting at position 997 of SEQ ID NO: 588023
uaauauccguugugacaac

SEQ ID NO: 836335 - RNA, 19 nt, Artificial Sequence
  Description of Artificial Sequence: Synthetic oligonucleotide
  Antisense strand to SEQ ID NO: 836334
guugucacaacggauauua

SEQ ID NO: 836336 - RNA, 19 nt, Artificial Sequence
  Description of Artificial Sequence: Synthetic oligonucleotide
  Sense strand starting at position 2454 of SEQ ID NO: 588023
gcgcuugugcugggaugaa

SEQ ID NO: 836337 - RNA, 19 nt, Artificial Sequence
  Description of Artificial Sequence: Synthetic oligonucleotide
  Antisense strand to SEQ ID NO: 836336
uucaucccagcacaagcgc

SEQ ID NO: 836338 - RNA, 19 nt, Artificial Sequence
  Description of Artificial Sequence: Synthetic oligonucleotide
  Sense strand starting at position 2500 of SEQ ID NO: 588023
ucaucauccucucagcgau

SEQ ID NO: 836339 - RNA, 19 nt, Artificial Sequence
  Description of Artificial Sequence: Synthetic oligonucleotide
  Antisense strand to SEQ ID NO: 836338
aucgcugagaggaugauga

SEQ ID NO: 836340 - RNA, 19 nt, Artificial Sequence
  Description of Artificial Sequence: Synthetic oligonucleotide
  Sense strand starting at position 2686 of SEQ ID NO: 588023
agugaaauuaccggccagu

SEQ ID NO: 836341 - RNA, 19 nt, Artificial Sequence
  Description of Artificial Sequence: Synthetic oligonucleotide
  Antisense strand to SEQ ID NO: 836340
acuggccgguaauuucacu

SEQ ID NO: 836342 - RNA, 19 nt, Artificial Sequence
  Description of Artificial Sequence: Synthetic oligonucleotide
  Sense strand starting at position 2712 of SEQ ID NO: 588023
aagacaggucuuugcauga

SEQ ID NO: 836343 - RNA, 19 nt, Artificial Sequence
  Description of Artificial Sequence: Synthetic oligonucleotide
  Antisense strand to SEQ ID NO: 836342
ucaugcaaagaccugucuu

SEQ ID NO: 836344 - RNA, 19 nt, Artificial Sequence
  Description of Artificial Sequence: Synthetic oligonucleotide
  Sense strand starting at position 2716 of SEQ ID NO: 588023
caggucuuugcaugaaaug

SEQ ID NO: 836345 - RNA, 19 nt, Artificial Sequence
  Description of Artificial Sequence: Synthetic oligonucleotide
  Antisense strand to SEQ ID NO: 836344
cauuucaugcaaagaccug

SEQ ID NO: 836346 - RNA, 19 nt, Artificial Sequence
  Description of Artificial Sequence: Synthetic oligonucleotide
  Sense strand starting at position 2862 of SEQ ID NO: 588023
gagacuaauugauggcauu

SEQ ID NO: 836347 - RNA, 19 nt, Artificial Sequence
  Description of Artificial Sequence: Synthetic oligonucleotide
  Antisense strand to SEQ ID NO: 836346
aaugccaucaauuagucuc

SEQ ID NO: 836348 - RNA, 19 nt, Artificial Sequence
  Description of Artificial Sequence: Synthetic oligonucleotide
  Sense strand starting at position 3077 of SEQ ID NO: 588023
uuuccacacguaugugaua

SEQ ID NO: 836349 - RNA, 19 nt, Artificial Sequence
  Description of Artificial Sequence: Synthetic oligonucleotide
  Antisense strand to SEQ ID NO: 836348
uaucacauacguguggaaa

SEQ ID NO: 836350 - RNA, 19 nt, Artificial Sequence
  Description of Artificial Sequence: Synthetic oligonucleotide
  Sense strand starting at position 3078 of SEQ ID NO: 588023
uuccacacguaugugauaa

SEQ ID NO: 836351 - RNA, 19 nt, Artificial Sequence
  Description of Artificial Sequence: Synthetic oligonucleotide
  Antisense strand to SEQ ID NO: 836350
uuaucacauacguguggaa

SEQ ID NO: 836352 - RNA, 19 nt, Artificial Sequence
  Description of Artificial Sequence: Synthetic oligonucleotide
  Sense strand starting at position 3329 of SEQ ID NO: 588023
cgcaucgauuguucaugau

SEQ ID NO: 836353 - RNA, 19 nt, Artificial Sequence
  Description of Artificial Sequence: Synthetic oligonucleotide
  Antisense strand to SEQ ID NO: 836352
aucaugaacaaucgaugcg

SEQ ID NO: 836354 - RNA, 19 nt, Artificial Sequence
  Description of Artificial Sequence: Synthetic oligonucleotide
  Sense strand starting at position 3710 of SEQ ID NO: 588023
ccaggugugguccaucaga

SEQ ID NO: 836355 - RNA, 19 nt, Artificial Sequence
  Description of Artificial Sequence: Synthetic oligonucleotide
  Antisense strand to SEQ ID NO: 836354
ucugauggaccacaccugg

SEQ ID NO: 836356 - RNA, 19 nt, Artificial Sequence
  Description of Artificial Sequence: Synthetic oligonucleotide
  Sense strand starting at position 204 of SEQ ID NO: 588024
uggacaaauugcuuguaga

SEQ ID NO: 836357 - RNA, 19 nt, Artificial Sequence
  Description of Artificial Sequence: Synthetic oligonucleotide
  Antisense strand to SEQ ID NO: 836356
ucuacaagcaauuugucca

SEQ ID NO: 836358 - RNA, 19 nt, Artificial Sequence
  Description of Artificial Sequence: Synthetic oligonucleotide
  Sense strand starting at position 205 of SEQ ID NO: 588024
ggacaaauugcuuguagac

SEQ ID NO: 836359 - RNA, 19 nt, Artificial Sequence
  Description of Artificial Sequence: Synthetic oligonucleotide
  Antisense strand to SEQ ID NO: 836358
gucuacaagcaauuugucc

SEQ ID NO: 836360 - RNA, 19 nt, Artificial Sequence
  Description of Artificial Sequence: Synthetic oligonucleotide
  Sense strand starting at position 320 of SEQ ID NO: 588024
ccgagacccugcuugagaa

SEQ ID NO: 836361 - RNA, 19 nt, Artificial Sequence
  Description of Artificial Sequence: Synthetic oligonucleotide
  Antisense strand to SEQ ID NO: 836360
uucucaagcagggucucgg

SEQ ID NO: 836362 - RNA, 19 nt, Artificial Sequence
  Description of Artificial Sequence: Synthetic oligonucleotide
  Sense strand starting at position 321 of SEQ ID NO: 588024
cgagacccugcuugagaaa

SEQ ID NO: 836363 - RNA, 19 nt, Artificial Sequence
  Description of Artificial Sequence: Synthetic oligonucleotide
  Antisense strand to SEQ ID NO: 836362
uuucucaagcagggucucg

SEQ ID NO: 836364 - RNA, 19 nt, Artificial Sequence
  Description of Artificial Sequence: Synthetic oligonucleotide
  Sense strand starting at position 369 of SEQ ID NO: 588024
aaguaaucguaugugagga

SEQ ID NO: 836365 - RNA, 19 nt, Artificial Sequence
  Description of Artificial Sequence: Synthetic oligonucleotide
  Antisense strand to SEQ ID NO: 836364
uccucacauacgauuacuu

SEQ ID NO: 836366 - RNA, 19 nt, Artificial Sequence
  Description of Artificial Sequence: Synthetic oligonucleotide
  Sense strand starting at position 370 of SEQ ID NO: 588024
aguaaucguaugugaggaa

SEQ ID NO: 836367 - RNA, 19 nt, Artificial Sequence
  Description of Artificial Sequence: Synthetic oligonucleotide
  Antisense strand to SEQ ID NO: 836366
uuccucacauacgauuacu

SEQ ID NO: 836368 - RNA, 19 nt, Artificial Sequence
  Description of Artificial Sequence: Synthetic oligonucleotide
  Sense strand starting at position 435 of SEQ ID NO: 588024
uauggcuguaguuagagau

SEQ ID NO: 836369 - RNA, 19 nt, Artificial Sequence
  Description of Artificial Sequence: Synthetic oligonucleotide
  Antisense strand to SEQ ID NO: 836368
aucucuaacuacagccaua

SEQ ID NO: 836370 - RNA, 19 nt, Artificial Sequence
  Description of Artificial Sequence: Synthetic oligonucleotide
  Sense strand starting at position 612 of SEQ ID NO: 588024
gauggaugacacugcacau

SEQ ID NO: 836371 - RNA, 19 nt, Artificial Sequence
  Description of Artificial Sequence: Synthetic oligonucleotide
  Antisense strand to SEQ ID NO: 836370
augugcagugucauccauc

SEQ ID NO: 836372 - RNA, 19 nt, Artificial Sequence
  Description of Artificial Sequence: Synthetic oligonucleotide
  Sense strand starting at position 832 of SEQ ID NO: 588024
cuccauuucgugugaagag

SEQ ID NO: 836373 - RNA, 19 nt, Artificial Sequence
  Description of Artificial Sequence: Synthetic oligonucleotide
  Antisense strand to SEQ ID NO: 836372
cucuucacacgaaauggag

SEQ ID NO: 836374 - RNA, 19 nt, Artificial Sequence
  Description of Artificial Sequence: Synthetic oligonucleotide
  Sense strand starting at position 915 of SEQ ID NO: 588024
acaagugaaugggcucaaa

SEQ ID NO: 836375 - RNA, 19 nt, Artificial Sequence
  Description of Artificial Sequence: Synthetic oligonucleotide
  Antisense strand to SEQ ID NO: 836374
uuugagcccauucacuugu

SEQ ID NO: 836376 - RNA, 19 nt, Artificial Sequence
  Description of Artificial Sequence: Synthetic oligonucleotide
  Sense strand starting at position 927 of SEQ ID NO: 588024
gcucaaauguuaucugaaa

SEQ ID NO: 836377 - RNA, 19 nt, Artificial Sequence
  Description of Artificial Sequence: Synthetic oligonucleotide
  Antisense strand to SEQ ID NO: 836376
uuucagauaacauuugagc

SEQ ID NO: 836378 - RNA, 19 nt, Artificial Sequence
  Description of Artificial Sequence: Synthetic oligonucleotide
  Sense strand starting at position 1094 of SEQ ID NO: 588024
caguauguggcauauagga

SEQ ID NO: 836379 - RNA, 19 nt, Artificial Sequence
  Description of Artificial Sequence: Synthetic oligonucleotide
  Antisense strand to SEQ ID NO: 836378
uccuauaugccacauacug

SEQ ID NO: 836380 - RNA, 19 nt, Artificial Sequence
  Description of Artificial Sequence: Synthetic oligonucleotide
  Sense strand starting at position 1116 of SEQ ID NO: 588024
acuuaauaaagcgaguuga

SEQ ID NO: 836381 - RNA, 19 nt, Artificial Sequence
  Description of Artificial Sequence: Synthetic oligonucleotide
  Antisense strand to SEQ ID NO: 836380
ucaacucgcuuuauuaagu

SEQ ID NO: 836382 - RNA, 19 nt, Artificial Sequence
  Description of Artificial Sequence: Synthetic oligonucleotide
  Sense strand starting at position 1139 of SEQ ID NO: 588024
acaaaugugcuugggcaga

SEQ ID NO: 836383 - RNA, 19 nt, Artificial Sequence
  Description of Artificial Sequence: Synthetic oligonucleotide
  Antisense strand to SEQ ID NO: 836382
ucugcccaagcacauuugu

SEQ ID NO: 836384 - RNA, 19 nt, Artificial Sequence
  Description of Artificial Sequence: Synthetic oligonucleotide
  Sense strand starting at position 1150 of SEQ ID NO: 588024
ugggcagauuccuuaaucu

SEQ ID NO: 836385 - RNA, 19 nt, Artificial Sequence
  Description of Artificial Sequence: Synthetic oligonucleotide
  Antisense strand to SEQ ID NO: 836384
agauuaaggaaucugccca

SEQ ID NO: 836386 - RNA, 19 nt, Artificial Sequence
  Description of Artificial Sequence: Synthetic oligonucleotide
  Sense strand starting at position 1291 of SEQ ID NO: 588024
guacacuuuggauaccgaa

SEQ ID NO: 836387 - RNA, 19 nt, Artificial Sequence
  Description of Artificial Sequence: Synthetic oligonucleotide
  Antisense strand to SEQ ID NO: 836386
uucgguauccaaaguguac

SEQ ID NO: 836388 - RNA, 19 nt, Artificial Sequence
  Description of Artificial Sequence: Synthetic oligonucleotide
  Sense strand starting at position 1631 of SEQ ID NO: 588024
aaugaaggucugugagcaa

SEQ ID NO: 836389 - RNA, 19 nt, Artificial Sequence
  Description of Artificial Sequence: Synthetic oligonucleotide
  Antisense strand to SEQ ID NO: 836388
uugcucacagaccuucauu

SEQ ID NO: 836390 - RNA, 19 nt, Artificial Sequence
  Description of Artificial Sequence: Synthetic oligonucleotide
  Sense strand starting at position 2258 of SEQ ID NO: 588024
gcaagagcuucucugaaag

SEQ ID NO: 836391 - RNA, 19 nt, Artificial Sequence
  Description of Artificial Sequence: Synthetic oligonucleotide
  Antisense strand to SEQ ID NO: 836390
cuuucagagaagcucuugc

SEQ ID NO: 836392 - RNA, 19 nt, Artificial Sequence
  Description of Artificial Sequence: Synthetic oligonucleotide
  Sense strand starting at position 2268 of SEQ ID NO: 588024
cucugaaagacuggcagua

SEQ ID NO: 836393 - RNA, 19 nt, Artificial Sequence
  Description of Artificial Sequence: Synthetic oligonucleotide
  Antisense strand to SEQ ID NO: 836392
uacugccagucuuucagag

SEQ ID NO: 836394 - RNA, 19 nt, Artificial Sequence
  Description of Artificial Sequence: Synthetic oligonucleotide
  Sense strand starting at position 2273 of SEQ ID NO: 588024
aaagacuggcaguauagua

SEQ ID NO: 836395 - RNA, 19 nt, Artificial Sequence
  Description of Artificial Sequence: Synthetic oligonucleotide
  Antisense strand to SEQ ID NO: 836394
uacuauacugccagucuuu

SEQ ID NO: 836396 - RNA, 19 nt, Artificial Sequence
  Description of Artificial Sequence: Synthetic oligonucleotide
  Sense strand starting at position 2288 of SEQ ID NO: 588024
aguaguagucagugauaau

SEQ ID NO: 836397 - RNA, 19 nt, Artificial Sequence
  Description of Artificial Sequence: Synthetic oligonucleotide
  Antisense strand to SEQ ID NO: 836396
auuaucacugacuacuacu

SEQ ID NO: 836398 - RNA, 19 nt, Artificial Sequence
  Description of Artificial Sequence: Synthetic oligonucleotide
  Sense strand starting at position 2289 of SEQ ID NO: 588024
guaguagucagugauaaua

SEQ ID NO: 836399 - RNA, 19 nt, Artificial Sequence
  Description of Artificial Sequence: Synthetic oligonucleotide
  Antisense strand to SEQ ID NO: 836398
uauuaucacugacuacuac

SEQ ID NO: 836400 - RNA, 19 nt, Artificial Sequence
  Description of Artificial Sequence: Synthetic oligonucleotide
  Sense strand starting at position 2300 of SEQ ID NO: 588024
ugauaauauugagccuuaa

SEQ ID NO: 836401 - RNA, 19 nt, Artificial Sequence
  Description of Artificial Sequence: Synthetic oligonucleotide
  Antisense strand to SEQ ID NO: 836400
uuaaggcucaauauuauca

SEQ ID NO: 836402 - RNA, 19 nt, Artificial Sequence
  Description of Artificial Sequence: Synthetic oligonucleotide
  Sense strand starting at position 2312 of SEQ ID NO: 588024
gccuuaauauguuccagac

SEQ ID NO: 836403 - RNA, 19 nt, Artificial Sequence
  Description of Artificial Sequence: Synthetic oligonucleotide
  Antisense strand to SEQ ID NO: 836402
gucuggaacauauuaaggc

SEQ ID NO: 836404 - RNA, 19 nt, Artificial Sequence
  Description of Artificial Sequence: Synthetic oligonucleotide
  Sense strand starting at position 2438 of SEQ ID NO: 588024
gcugcuuucccauaaagaa

SEQ ID NO: 836405 - RNA, 19 nt, Artificial Sequence
  Description of Artificial Sequence: Synthetic oligonucleotide
  Antisense strand to SEQ ID NO: 836404
uucuuuaugggaaagcagc

SEQ ID NO: 836406 - RNA, 19 nt, Artificial Sequence
  Description of Artificial Sequence: Synthetic oligonucleotide
  Sense strand starting at position 2752 of SEQ ID NO: 588024
cgaagaaagcuggguucaa

SEQ ID NO: 836407 - RNA, 19 nt, Artificial Sequence
  Description of Artificial Sequence: Synthetic oligonucleotide
  Antisense strand to SEQ ID NO: 836406
uugaacccagcuuucuucg

SEQ ID NO: 836408 - RNA, 19 nt, Artificial Sequence
  Description of Artificial Sequence: Synthetic oligonucleotide
  Sense strand starting at position 2790 of SEQ ID NO: 588024
guuguaggucuagauaagu

SEQ ID NO: 836409 - RNA, 19 nt, Artificial Sequence
  Description of Artificial Sequence: Synthetic oligonucleotide
  Antisense strand to SEQ ID NO: 836408
acuuaucuagaccuacaac

SEQ ID NO: 836410 - RNA, 19 nt, Artificial Sequence
  Description of Artificial Sequence: Synthetic oligonucleotide
  Sense strand starting at position 2908 of SEQ ID NO: 588024
cuuggucaauuugauuaau

SEQ ID NO: 836411 - RNA, 19 nt, Artificial Sequence
  Description of Artificial Sequence: Synthetic oligonucleotide
  Antisense strand to SEQ ID NO: 836410
auuaaucaaauugaccaag

SEQ ID NO: 836412 - RNA, 19 nt, Artificial Sequence
  Description of Artificial Sequence: Synthetic oligonucleotide
  Sense strand starting at position 2914 of SEQ ID NO: 588024
caauuugauuaaugaggag

SEQ ID NO: 836413 - RNA, 19 nt, Artificial Sequence
  Description of Artificial Sequence: Synthetic oligonucleotide
  Antisense strand to SEQ ID NO: 836412
cuccucauuaaucaaauug

SEQ ID NO: 836414 - RNA, 19 nt, Artificial Sequence
  Description of Artificial Sequence: Synthetic oligonucleotide
  Sense strand starting at position 2960 of SEQ ID NO: 588024
cguggcuaacugucgagua

SEQ ID NO: 836415 - RNA, 19 nt, Artificial Sequence
  Description of Artificial Sequence: Synthetic oligonucleotide
  Antisense strand to SEQ ID NO: 836414
uacucgacaguuagccacg

SEQ ID NO: 836416 - RNA, 19 nt, Artificial Sequence
  Description of Artificial Sequence: Synthetic oligonucleotide
  Sense strand starting at position 3040 of SEQ ID NO: 588024
ccuggaaucugucccagau

SEQ ID NO: 836417 - RNA, 19 nt, Artificial Sequence
  Description of Artificial Sequence: Synthetic oligonucleotide
  Antisense strand to SEQ ID NO: 836416
aucugggacagauuccagg

SEQ ID NO: 836418 - RNA, 19 nt, Artificial Sequence
  Description of Artificial Sequence: Synthetic oligonucleotide
  Sense strand starting at position 3101 of SEQ ID NO: 588024
uuuacaacgugauugaaug

SEQ ID NO: 836419 - RNA, 19 nt, Artificial Sequence
  Description of Artificial Sequence: Synthetic oligonucleotide
  Antisense strand to SEQ ID NO: 836418
cauucaaucacguuguaaa

SEQ ID NO: 836420 - RNA, 19 nt, Artificial Sequence
  Description of Artificial Sequence: Synthetic oligonucleotide
  Sense strand starting at position 3115 of SEQ ID NO: 588024
gaaugcauuguuugcauuu

SEQ ID NO: 836421 - RNA, 19 nt, Artificial Sequence
  Description of Artificial Sequence: Synthetic oligonucleotide
  Antisense strand to SEQ ID NO: 836420
aaaugcaaacaaugcauuc

SEQ ID NO: 836422 - RNA, 19 nt, Artificial Sequence
  Description of Artificial Sequence: Synthetic oligonucleotide
  Sense strand starting at position 3182 of SEQ ID NO: 588024
aauguuagcccugaucuga

SEQ ID NO: 836423 - RNA, 19 nt, Artificial Sequence
  Description of Artificial Sequence: Synthetic oligonucleotide
  Antisense strand to SEQ ID NO: 836422
ucagaucagggcuaacauu

SEQ ID NO: 836424 - RNA, 19 nt, Artificial Sequence
  Description of Artificial Sequence: Synthetic oligonucleotide
  Sense strand starting at position 3292 of SEQ ID NO: 588024
caaggucuuugaguguaau

SEQ ID NO: 836425 - RNA, 19 nt, Artificial Sequence
  Description of Artificial Sequence: Synthetic oligonucleotide
  Antisense strand to SEQ ID NO: 836424
auuacacucaaagaccuug

SEQ ID NO: 836426 - RNA, 19 nt, Artificial Sequence
  Description of Artificial Sequence: Synthetic oligonucleotide
  Sense strand starting at position 3398 of SEQ ID NO: 588024
cgagauaccaccugagucu

SEQ ID NO: 836427 - RNA, 19 nt, Artificial Sequence
  Description of Artificial Sequence: Synthetic oligonucleotide
  Antisense strand to SEQ ID NO: 836426
agacucaggugguaucucg

SEQ ID NO: 836428 - RNA, 19 nt, Artificial Sequence
  Description of Artificial Sequence: Synthetic oligonucleotide
  Sense strand starting at position 3644 of SEQ ID NO: 588024
auggucuauaauggugauu

SEQ ID NO: 836429 - RNA, 19 nt, Artificial Sequence
  Description of Artificial Sequence: Synthetic oligonucleotide
  Antisense strand to SEQ ID NO: 836428
aaucaccauuauagaccau

SEQ ID NO: 836430 - RNA, 19 nt, Artificial Sequence
  Description of Artificial Sequence: Synthetic oligonucleotide
  Sense strand starting at position 3647 of SEQ ID NO: 588024
gucuauaauggugauuauc

SEQ ID NO: 836431 - RNA, 19 nt, Artificial Sequence
  Description of Artificial Sequence: Synthetic oligonucleotide
  Antisense strand to SEQ ID NO: 836430
gauaaucaccauuauagac

SEQ ID NO: 836432 - RNA, 19 nt, Artificial Sequence
  Description of Artificial Sequence: Synthetic oligonucleotide
  Sense strand starting at position 3649 of SEQ ID NO: 588024
cuauaauggugauuaucaa

SEQ ID NO: 836433 - RNA, 19 nt, Artificial Sequence
  Description of Artificial Sequence: Synthetic oligonucleotide
  Antisense strand to SEQ ID NO: 836432
uugauaaucaccauuauag

SEQ ID NO: 836434 - RNA, 19 nt, Artificial Sequence
  Description of Artificial Sequence: Synthetic oligonucleotide
  Sense strand starting at position 3872 of SEQ ID NO: 588024
gguccugggauaugcagaa

SEQ ID NO: 836435 - RNA, 19 nt, Artificial Sequence
  Description of Artificial Sequence: Synthetic oligonucleotide
  Antisense strand to SEQ ID NO: 836434
uucugcauaucccaggacc

SEQ ID NO: 836436 - RNA, 19 nt, Artificial Sequence
  Description of Artificial Sequence: Synthetic oligonucleotide
  Sense strand starting at position 136 of SEQ ID NO: 588025
uuagguuacucauuccaua

SEQ ID NO: 836437 - RNA, 19 nt, Artificial Sequence
  Description of Artificial Sequence: Synthetic oligonucleotide
  Antisense strand to SEQ ID NO: 836436
uauggaaugaguaaccuaa

SEQ ID NO: 836438 - RNA, 19 nt, Artificial Sequence
  Description of Artificial Sequence: Synthetic oligonucleotide
  Sense strand starting at position 340 of SEQ ID NO: 588025
ugugaaggcgauuauccau

SEQ ID NO: 836439 - RNA, 19 nt, Artificial Sequence
  Description of Artificial Sequence: Synthetic oligonucleotide
  Antisense strand to SEQ ID NO: 836438
auggauaaucgccuucaca

SEQ ID NO: 836440 - RNA, 19 nt, Artificial Sequence
  Description of Artificial Sequence: Synthetic oligonucleotide
  Sense strand starting at position 411 of SEQ ID NO: 588025
ccaguccuucuguagaaau

SEQ ID NO: 836441 - RNA, 19 nt, Artificial Sequence
  Description of Artificial Sequence: Synthetic oligonucleotide
  Antisense strand to SEQ ID NO: 836440
auuucuacagaaggacugg

SEQ ID NO: 836442 - RNA, 19 nt, Artificial Sequence
  Description of Artificial Sequence: Synthetic oligonucleotide
  Sense strand starting at position 413 of SEQ ID NO: 588025
aguccuucuguagaaauac

SEQ ID NO: 836443 - RNA, 19 nt, Artificial Sequence
  Description of Artificial Sequence: Synthetic oligonucleotide
  Antisense strand to SEQ ID NO: 836442
guauuucuacagaaggacu

SEQ ID NO: 836444 - RNA, 19 nt, Artificial Sequence
  Description of Artificial Sequence: Synthetic oligonucleotide
  Sense strand starting at position 672 of SEQ ID NO: 588025
gggauauaaugguuucuac

SEQ ID NO: 836445 - RNA, 19 nt, Artificial Sequence
  Description of Artificial Sequence: Synthetic oligonucleotide
  Antisense strand to SEQ ID NO: 836444
guagaaaccauuauauccc

SEQ ID NO: 836446 - RNA, 19 nt, Artificial Sequence
  Description of Artificial Sequence: Synthetic oligonucleotide
  Sense strand starting at position 747 of SEQ ID NO: 588025
cacuucucugcagggauga

SEQ ID NO: 836447 - RNA, 19 nt, Artificial Sequence
  Description of Artificial Sequence: Synthetic oligonucleotide
  Antisense strand to SEQ ID NO: 836446
ucaucccugcagagaagug

SEQ ID NO: 836448 - RNA, 19 nt, Artificial Sequence
  Description of Artificial Sequence: Synthetic oligonucleotide
  Sense strand starting at position 772 of SEQ ID NO: 588025
guagaaagguggcugaaua

SEQ ID NO: 836449 - RNA, 19 nt, Artificial Sequence
  Description of Artificial Sequence: Synthetic oligonucleotide
  Antisense strand to SEQ ID NO: 836448
uauucagccaccuuucuac

SEQ ID NO: 836450 - RNA, 19 nt, Artificial Sequence
  Description of Artificial Sequence: Synthetic oligonucleotide
  Sense strand starting at position 773 of SEQ ID NO: 588025
uagaaagguggcugaauaa

SEQ ID NO: 836451 - RNA, 19 nt, Artificial Sequence
  Description of Artificial Sequence: Synthetic oligonucleotide
  Antisense strand to SEQ ID NO: 836450
uuauucagccaccuuucua

SEQ ID NO: 836452 - RNA, 19 nt, Artificial Sequence
  Description of Artificial Sequence: Synthetic oligonucleotide
  Sense strand starting at position 847 of SEQ ID NO: 588025
gcacauuggcaagaccaaa

SEQ ID NO: 836453 - RNA, 19 nt, Artificial Sequence
  Description of Artificial Sequence: Synthetic oligonucleotide
  Antisense strand to SEQ ID NO: 836452
uuuggucuugccaaugugc

SEQ ID NO: 836454 - RNA, 19 nt, Artificial Sequence
  Description of Artificial Sequence: Synthetic oligonucleotide
  Sense strand starting at position 918 of SEQ ID NO: 588025
gggucacacucauugauaa

SEQ ID NO: 836455 - RNA, 19 nt, Artificial Sequence
  Description of Artificial Sequence: Synthetic oligonucleotide
  Antisense strand to SEQ ID NO: 836454
uuaucaaugagugugaccc

SEQ ID NO: 836456 - RNA, 19 nt, Artificial Sequence
  Description of Artificial Sequence: Synthetic oligonucleotide
  Sense strand starting at position 919 of SEQ ID NO: 588025
ggucacacucauugauaau

SEQ ID NO: 836457 - RNA, 19 nt, Artificial Sequence
  Description of Artificial Sequence: Synthetic oligonucleotide
  Antisense strand to SEQ ID NO: 836456
auuaucaaugagugugacc

SEQ ID NO: 836458 - RNA, 19 nt, Artificial Sequence
  Description of Artificial Sequence: Synthetic oligonucleotide
  Sense strand starting at position 1003 of SEQ ID NO: 588025
gaaagugcuguuuaagauu

SEQ ID NO: 836459 - RNA, 19 nt, Artificial Sequence
  Description of Artificial Sequence: Synthetic oligonucleotide
  Antisense strand to SEQ ID NO: 836458
aaucuuaaacagcacuuuc

SEQ ID NO: 836460 - RNA, 19 nt, Artificial Sequence
  Description of Artificial Sequence: Synthetic oligonucleotide
  Sense strand starting at position 1014 of SEQ ID NO: 588025
uuaagauucucucuuaagg

SEQ ID NO: 836461 - RNA, 19 nt, Artificial Sequence
  Description of Artificial Sequence: Synthetic oligonucleotide
  Antisense strand to SEQ ID NO: 836460
ccuuaagagagaaucuuaa

SEQ ID NO: 836462 - RNA, 19 nt, Artificial Sequence
  Description of Artificial Sequence: Synthetic oligonucleotide
  Sense strand starting at position 1161 of SEQ ID NO: 588025
gugucaugcaaauacagga

SEQ ID NO: 836463 - RNA, 19 nt, Artificial Sequence
  Description of Artificial Sequence: Synthetic oligonucleotide
  Antisense strand to SEQ ID NO: 836462
uccuguauuugcaugacac

SEQ ID NO: 836464 - RNA, 19 nt, Artificial Sequence
  Description of Artificial Sequence: Synthetic oligonucleotide
  Sense strand starting at position 1267 of SEQ ID NO: 588025
cgaacaguucgcccugguu

SEQ ID NO: 836465 - RNA, 19 nt, Artificial Sequence
  Description of Artificial Sequence: Synthetic oligonucleotide
  Antisense strand to SEQ ID NO: 836464
aaccagggcgaacuguucg

SEQ ID NO: 836466 - RNA, 19 nt, Artificial Sequence
  Description of Artificial Sequence: Synthetic oligonucleotide
  Sense strand starting at position 1338 of SEQ ID NO: 588025
gcuaauaugggcgacaaca

SEQ ID NO: 836467 - RNA, 19 nt, Artificial Sequence
  Description of Artificial Sequence: Synthetic oligonucleotide
  Antisense strand to SEQ ID NO: 836466
uguugucgcccauauuagc

SEQ ID NO: 836468 - RNA, 19 nt, Artificial Sequence
  Description of Artificial Sequence: Synthetic oligonucleotide
  Sense strand starting at position 1360 of SEQ ID NO: 588025
ugcagugauaguuggaaag

SEQ ID NO: 836469 - RNA, 19 nt, Artificial Sequence
  Description of Artificial Sequence: Synthetic oligonucleotide
  Antisense strand to SEQ ID NO: 836468
cuuuccaacuaucacugca

SEQ ID NO: 836470 - RNA, 19 nt, Artificial Sequence
  Description of Artificial Sequence: Synthetic oligonucleotide
  Sense strand starting at position 2110 of SEQ ID NO: 588025
cuaggaucuugaguccaga

SEQ ID NO: 836471 - RNA, 19 nt, Artificial Sequence
  Description of Artificial Sequence: Synthetic oligonucleotide
  Antisense strand to SEQ ID NO: 836470
ucuggacucaagauccuag

SEQ ID NO: 836472 - RNA, 19 nt, Artificial Sequence
  Description of Artificial Sequence: Synthetic oligonucleotide
  Sense strand starting at position 2490 of SEQ ID NO: 588025
guaaauaaauguccaggga

SEQ ID NO: 836473 - RNA, 19 nt, Artificial Sequence
  Description of Artificial Sequence: Synthetic oligonucleotide
  Antisense strand to SEQ ID NO: 836472
ucccuggacauuuauuuac

SEQ ID NO: 836474 - RNA, 19 nt, Artificial Sequence
  Description of Artificial Sequence: Synthetic oligonucleotide
  Sense strand starting at position 2494 of SEQ ID NO: 588025
auaaauguccagggauauu

SEQ ID NO: 836475 - RNA, 19 nt, Artificial Sequence
  Description of Artificial Sequence: Synthetic oligonucleotide
  Antisense strand to SEQ ID NO: 836474
aauaucccuggacauuuau

SEQ ID NO: 836476 - RNA, 19 nt, Artificial Sequence
  Description of Artificial Sequence: Synthetic oligonucleotide
  Sense strand starting at position 2526 of SEQ ID NO: 588025
uugaauaaauggucuaauc

SEQ ID NO: 836477 - RNA, 19 nt, Artificial Sequence
  Description of Artificial Sequence: Synthetic oligonucleotide
  Antisense strand to SEQ ID NO: 836476
gauuagaccauuuauucaa

SEQ ID NO: 836478 - RNA, 19 nt, Artificial Sequence
  Description of Artificial Sequence: Synthetic oligonucleotide
  Sense strand starting at position 2536 of SEQ ID NO: 588025
ggucuaaucuaggcuggag

SEQ ID NO: 836479 - RNA, 19 nt, Artificial Sequence
  Description of Artificial Sequence: Synthetic oligonucleotide
  Antisense strand to SEQ ID NO: 836478
cuccagccuagauuagacc

SEQ ID NO: 836480 - RNA, 19 nt, Artificial Sequence
  Description of Artificial Sequence: Synthetic oligonucleotide
  Sense strand starting at position 2631 of SEQ ID NO: 588025
uuugauuucucguuuccug

SEQ ID NO: 836481 - RNA, 19 nt, Artificial Sequence
  Description of Artificial Sequence: Synthetic oligonucleotide
  Antisense strand to SEQ ID NO: 836480
caggaaacgagaaaucaaa

SEQ ID NO: 836482 - RNA, 19 nt, Artificial Sequence
  Description of Artificial Sequence: Synthetic oligonucleotide
  Sense strand starting at position 2634 of SEQ ID NO: 588025
gauuucucguuuccugcau

SEQ ID NO: 836483 - RNA, 19 nt, Artificial Sequence
  Description of Artificial Sequence: Synthetic oligonucleotide
  Antisense strand to SEQ ID NO: 836482
augcaggaaacgagaaauc

SEQ ID NO: 836484 - RNA, 19 nt, Artificial Sequence
  Description of Artificial Sequence: Synthetic oligonucleotide
  Sense strand starting at position 2803 of SEQ ID NO: 588025
uuaauaugugucuggacag

SEQ ID NO: 836485 - RNA, 19 nt, Artificial Sequence
  Description of Artificial Sequence: Synthetic oligonucleotide
  Antisense strand to SEQ ID NO: 836484
cuguccagacacauauuaa

SEQ ID NO: 836486 - RNA, 19 nt, Artificial Sequence
  Description of Artificial Sequence: Synthetic oligonucleotide
  Sense strand starting at position 2826 of SEQ ID NO: 588025
ugcauaacacgauaucauu

SEQ ID NO: 836487 - RNA, 19 nt, Artificial Sequence
  Description of Artificial Sequence: Synthetic oligonucleotide
  Antisense strand to SEQ ID NO: 836486
aaugauaucguguuaugca

SEQ ID NO: 836488 - RNA, 19 nt, Artificial Sequence
  Description of Artificial Sequence: Synthetic oligonucleotide
  Sense strand starting at position 2886 of SEQ ID NO: 588025
ggaaaugacuugcuaaagu

SEQ ID NO: 836489 - RNA, 19 nt, Artificial Sequence
  Description of Artificial Sequence: Synthetic oligonucleotide
  Antisense strand to SEQ ID NO: 836488
acuuuagcaagucauuucc

SEQ ID NO: 836490 - RNA, 19 nt, Artificial Sequence
  Description of Artificial Sequence: Synthetic oligonucleotide
  Sense strand starting at position 2912 of SEQ ID NO: 588025
gcugauaagugaguggaua

SEQ ID NO: 836491 - RNA, 19 nt, Artificial Sequence
  Description of Artificial Sequence: Synthetic oligonucleotide
  Antisense strand to SEQ ID NO: 836490
uauccacucacuuaucagc

SEQ ID NO: 836492 - RNA, 19 nt, Artificial Sequence
  Description of Artificial Sequence: Synthetic oligonucleotide
  Sense strand starting at position 2913 of SEQ ID NO: 588025
cugauaagugaguggauag

SEQ ID NO: 836493 - RNA, 19 nt, Artificial Sequence
  Description of Artificial Sequence: Synthetic oligonucleotide
  Antisense strand to SEQ ID NO: 836492
cuauccacucacuuaucag

SEQ ID NO: 836494 - RNA, 19 nt, Artificial Sequence
  Description of Artificial Sequence: Synthetic oligonucleotide
  Sense strand starting at position 2914 of SEQ ID NO: 588025
ugauaagugaguggauaga

SEQ ID NO: 836495 - RNA, 19 nt, Artificial Sequence
  Description of Artificial Sequence: Synthetic oligonucleotide
  Antisense strand to SEQ ID NO: 836494
ucuauccacucacuuauca

SEQ ID NO: 836496 - RNA, 19 nt, Artificial Sequence
  Description of Artificial Sequence: Synthetic oligonucleotide
  Sense strand starting at position 2984 of SEQ ID NO: 588025
agguuaggccuguauuaca

SEQ ID NO: 836497 - RNA, 19 nt, Artificial Sequence
  Description of Artificial Sequence: Synthetic oligonucleotide
  Antisense strand to SEQ ID NO: 836496
uguaauacaggccuaaccu

SEQ ID NO: 836498 - RNA, 19 nt, Artificial Sequence
  Description of Artificial Sequence: Synthetic oligonucleotide
  Sense strand starting at position 3002 of SEQ ID NO: 588025
auagaauaguaacuagcau

SEQ ID NO: 836499 - RNA, 19 nt, Artificial Sequence
  Description of Artificial Sequence: Synthetic oligonucleotide
  Antisense strand to SEQ ID NO: 836498
augcuaguuacuauucuau

SEQ ID NO: 836500 - RNA, 19 nt, Artificial Sequence
  Description of Artificial Sequence: Synthetic oligonucleotide
  Sense strand starting at position 3032 of SEQ ID NO: 588025
ugccuuauaguuuacauau

SEQ ID NO: 836501 - RNA, 19 nt, Artificial Sequence
  Description of Artificial Sequence: Synthetic oligonucleotide
  Antisense strand to SEQ ID NO: 836500
auauguaaacuauaaggca

SEQ ID NO: 836502 - RNA, 19 nt, Artificial Sequence
  Description of Artificial Sequence: Synthetic oligonucleotide
  Sense strand starting at position 3174 of SEQ ID NO: 588025
aaggucaagucaccaguua

SEQ ID NO: 836503 - RNA, 19 nt, Artificial Sequence
  Description of Artificial Sequence: Synthetic oligonucleotide
  Antisense strand to SEQ ID NO: 836502
uaacuggugacuugaccuu

SEQ ID NO: 836504 - RNA, 19 nt, Artificial Sequence
  Description of Artificial Sequence: Synthetic oligonucleotide
  Sense strand starting at position 3175 of SEQ ID NO: 588025
aggucaagucaccaguuau

SEQ ID NO: 836505 - RNA, 19 nt, Artificial Sequence
  Description of Artificial Sequence: Synthetic oligonucleotide
  Antisense strand to SEQ ID NO: 836504
auaacuggugacuugaccu

SEQ ID NO: 836506 - RNA, 19 nt, Artificial Sequence
  Description of Artificial Sequence: Synthetic oligonucleotide
  Sense strand starting at position 3774 of SEQ ID NO: 588025
uuaguaucaccuuagguaa

SEQ ID NO: 836507 - RNA, 19 nt, Artificial Sequence
  Description of Artificial Sequence: Synthetic oligonucleotide
  Antisense strand to SEQ ID NO: 836506
uuaccuaaggugauacuaa

SEQ ID NO: 836508 - RNA, 19 nt, Artificial Sequence
  Description of Artificial Sequence: Synthetic oligonucleotide
  Sense strand starting at position 3831 of SEQ ID NO: 588025
cuagaaacauuagugaagu

SEQ ID NO: 836509 - RNA, 19 nt, Artificial Sequence
  Description of Artificial Sequence: Synthetic oligonucleotide
  Antisense strand to SEQ ID NO: 836508
acuucacuaauguuucuag

SEQ ID NO: 836510 - RNA, 19 nt, Artificial Sequence
  Description of Artificial Sequence: Synthetic oligonucleotide
  Sense strand starting at position 3841 of SEQ ID NO: 588025
uagugaaguccaugagauc

SEQ ID NO: 836511 - RNA, 19 nt, Artificial Sequence
  Description of Artificial Sequence: Synthetic oligonucleotide
  Antisense strand to SEQ ID NO: 836510
gaucucauggacuucacua

SEQ ID NO: 836512 - RNA, 19 nt, Artificial Sequence
  Description of Artificial Sequence: Synthetic oligonucleotide
  Sense strand starting at position 3882 of SEQ ID NO: 588025
caggaaaccgccugauuag

SEQ ID NO: 836513 - RNA, 19 nt, Artificial Sequence
  Description of Artificial Sequence: Synthetic oligonucleotide
  Antisense strand to SEQ ID NO: 836512
cuaaucaggcgguuuccug

SEQ ID NO: 836514 - RNA, 19 nt, Artificial Sequence
  Description of Artificial Sequence: Synthetic oligonucleotide
  Sense strand starting at position 3954 of SEQ ID NO: 588025
agaacuugaugcuuugaaa

SEQ ID NO: 836515 - RNA, 19 nt, Artificial Sequence
  Description of Artificial Sequence: Synthetic oligonucleotide
  Antisense strand to SEQ ID NO: 836514
uuucaaagcaucaaguucu

SEQ ID NO: 836516 - RNA, 19 nt, Artificial Sequence
  Description of Artificial Sequence: Synthetic oligonucleotide
  Sense strand starting at position 18 of SEQ ID NO: 588026
auaagaauuuaccauacga

SEQ ID NO: 836517 - RNA, 19 nt, Artificial Sequence
  Description of Artificial Sequence: Synthetic oligonucleotide
  Antisense strand to SEQ ID NO: 836516
ucguaugguaaauucuuau

SEQ ID NO: 836518 - RNA, 19 nt, Artificial Sequence
  Description of Artificial Sequence: Synthetic oligonucleotide
  Sense strand starting at position 109 of SEQ ID NO: 588026
ccagaaauaugacagauuc

SEQ ID NO: 836519 - RNA, 19 nt, Artificial Sequence
  Description of Artificial Sequence: Synthetic oligonucleotide
  Antisense strand to SEQ ID NO: 836518
gaaucugucauauuucugg

SEQ ID NO: 836520 - RNA, 19 nt, Artificial Sequence
  Description of Artificial Sequence: Synthetic oligonucleotide
  Sense strand starting at position 156 of SEQ ID NO: 588026
uaguguaaacucugaaguu

SEQ ID NO: 836521 - RNA, 19 nt, Artificial Sequence
  Description of Artificial Sequence: Synthetic oligonucleotide
  Antisense strand to SEQ ID NO: 836520
aacuucagaguuuacacua

SEQ ID NO: 836522 - RNA, 19 nt, Artificial Sequence
  Description of Artificial Sequence: Synthetic oligonucleotide
  Sense strand starting at position 244 of SEQ ID NO: 588026
cugguaauaugacccucau

SEQ ID NO: 836523 - RNA, 19 nt, Artificial Sequence
  Description of Artificial Sequence: Synthetic oligonucleotide
  Antisense strand to SEQ ID NO: 836522
augagggucauauuaccag

SEQ ID NO: 836524 - RNA, 19 nt, Artificial Sequence
  Description of Artificial Sequence: Synthetic oligonucleotide
  Sense strand starting at position 413 of SEQ ID NO: 588026
gccauuagcccauauguca

SEQ ID NO: 836525 - RNA, 19 nt, Artificial Sequence
  Description of Artificial Sequence: Synthetic oligonucleotide
  Antisense strand to SEQ ID NO: 836524
ugacauaugggcuaauggc

SEQ ID NO: 836526 - RNA, 19 nt, Artificial Sequence
  Description of Artificial Sequence: Synthetic oligonucleotide
  Sense strand starting at position 463 of SEQ ID NO: 588026
auugcuacgccugaaugau

SEQ ID NO: 836527 - RNA, 19 nt, Artificial Sequence
  Description of Artificial Sequence: Synthetic oligonucleotide
  Antisense strand to SEQ ID NO: 836526
aucauucaggcguagcaau

SEQ ID NO: 836528 - RNA, 19 nt, Artificial Sequence
  Description of Artificial Sequence: Synthetic oligonucleotide
  Sense strand starting at position 718 of SEQ ID NO: 588026
uguacugacucauuccaua

SEQ ID NO: 836529 - RNA, 19 nt, Artificial Sequence
  Description of Artificial Sequence: Synthetic oligonucleotide
  Antisense strand to SEQ ID NO: 836528
uauggaaugagucaguaca

SEQ ID NO: 836530 - RNA, 19 nt, Artificial Sequence
  Description of Artificial Sequence: Synthetic oligonucleotide
  Sense strand starting at position 772 of SEQ ID NO: 588026
ucacuuacagaacgauuau

SEQ ID NO: 836531 - RNA, 19 nt, Artificial Sequence
  Description of Artificial Sequence: Synthetic oligonucleotide
  Antisense strand to SEQ ID NO: 836530
auaaucguucuguaaguga

SEQ ID NO: 836532 - RNA, 19 nt, Artificial Sequence
  Description of Artificial Sequence: Synthetic oligonucleotide
  Sense strand starting at position 809 of SEQ ID NO: 588026
guacuaaagugaucaauuc

SEQ ID NO: 836533 - RNA, 19 nt, Artificial Sequence
  Description of Artificial Sequence: Synthetic oligonucleotide
  Antisense strand to SEQ ID NO: 836532
gaauugaucacuuuaguac

SEQ ID NO: 836534 - RNA, 19 nt, Artificial Sequence
  Description of Artificial Sequence: Synthetic oligonucleotide
  Sense strand starting at position 880 of SEQ ID NO: 588026
aacugauguugauauuugu

SEQ ID NO: 836535 - RNA, 19 nt, Artificial Sequence
  Description of Artificial Sequence: Synthetic oligonucleotide
  Antisense strand to SEQ ID NO: 836534
acaaauaucaacaucaguu

SEQ ID NO: 836536 - RNA, 19 nt, Artificial Sequence
  Description of Artificial Sequence: Synthetic oligonucleotide
  Sense strand starting at position 936 of SEQ ID NO: 588026
uauagaaaugcaggcagua

SEQ ID NO: 836537 - RNA, 19 nt, Artificial Sequence
  Description of Artificial Sequence: Synthetic oligonucleotide
  Antisense strand to SEQ ID NO: 836536
uacugccugcauuucuaua

SEQ ID NO: 836538 - RNA, 19 nt, Artificial Sequence
  Description of Artificial Sequence: Synthetic oligonucleotide
  Sense strand starting at position 945 of SEQ ID NO: 588026
gcaggcaguauauauugaa

SEQ ID NO: 836539 - RNA, 19 nt, Artificial Sequence
  Description of Artificial Sequence: Synthetic oligonucleotide
  Antisense strand to SEQ ID NO: 836538
uucaauauauacugccugc

SEQ ID NO: 836540 - RNA, 19 nt, Artificial Sequence
  Description of Artificial Sequence: Synthetic oligonucleotide
  Sense strand starting at position 1040 of SEQ ID NO: 588026
uauauacgucuagggacua

SEQ ID NO: 836541 - RNA, 19 nt, Artificial Sequence
  Description of Artificial Sequence: Synthetic oligonucleotide
  Antisense strand to SEQ ID NO: 836540
uagucccuagacguauaua

SEQ ID NO: 836542 - RNA, 19 nt, Artificial Sequence
  Description of Artificial Sequence: Synthetic oligonucleotide
  Sense strand starting at position 1051 of SEQ ID NO: 588026
agggacuauuuacaauauu

SEQ ID NO: 836543 - RNA, 19 nt, Artificial Sequence
  Description of Artificial Sequence: Synthetic oligonucleotide
  Antisense strand to SEQ ID NO: 836542
aauauuguaaauagucccu

SEQ ID NO: 836544 - RNA, 19 nt, Artificial Sequence
  Description of Artificial Sequence: Synthetic oligonucleotide
  Sense strand starting at position 1130 of SEQ ID NO: 588026
gcugguuuaguauacuaac

SEQ ID NO: 836545 - RNA, 19 nt, Artificial Sequence
  Description of Artificial Sequence: Synthetic oligonucleotide
  Antisense strand to SEQ ID NO: 836544
guuaguauacuaaaccagc

SEQ ID NO: 836546 - RNA, 19 nt, Artificial Sequence
  Description of Artificial Sequence: Synthetic oligonucleotide
  Sense strand starting at position 1201 of SEQ ID NO: 588026
ugggaaaugcacugcuagu

SEQ ID NO: 836547 - RNA, 19 nt, Artificial Sequence
  Description of Artificial Sequence: Synthetic oligonucleotide
  Antisense strand to SEQ ID NO: 836546
acuagcagugcauuuccca

SEQ ID NO: 836548 - RNA, 19 nt, Artificial Sequence
  Description of Artificial Sequence: Synthetic oligonucleotide
  Sense strand starting at position 1212 of SEQ ID NO: 588026
cugcuaguaugaucaagca

SEQ ID NO: 836549 - RNA, 19 nt, Artificial Sequence
  Description of Artificial Sequence: Synthetic oligonucleotide
  Antisense strand to SEQ ID NO: 836548
ugcuugaucauacuagcag

SEQ ID NO: 836550 - RNA, 19 nt, Artificial Sequence
  Description of Artificial Sequence: Synthetic oligonucleotide
  Sense strand starting at position 1254 of SEQ ID NO: 588026
cauguuccucgagaguaaa

SEQ ID NO: 836551 - RNA, 19 nt, Artificial Sequence
  Description of Artificial Sequence: Synthetic oligonucleotide
  Antisense strand to SEQ ID NO: 836550
uuuacucucgaggaacaug

SEQ ID NO: 836552 - RNA, 19 nt, Artificial Sequence
  Description of Artificial Sequence: Synthetic oligonucleotide
  Sense strand starting at position 1366 of SEQ ID NO: 588026
ggcguuaagccgguugcua

SEQ ID NO: 836553 - RNA, 19 nt, Artificial Sequence
  Description of Artificial Sequence: Synthetic oligonucleotide
  Antisense strand to SEQ ID NO: 836552
uagcaaccggcuuaacgcc

SEQ ID NO: 836554 - RNA, 19 nt, Artificial Sequence
  Description of Artificial Sequence: Synthetic oligonucleotide
  Sense strand starting at position 1379 of SEQ ID NO: 588026
uugcuacugcuuuacaaag

SEQ ID NO: 836555 - RNA, 19 nt, Artificial Sequence
  Description of Artificial Sequence: Synthetic oligonucleotide
  Antisense strand to SEQ ID NO: 836554
cuuuguaaagcaguagcaa

SEQ ID NO: 836556 - RNA, 19 nt, Artificial Sequence
  Description of Artificial Sequence: Synthetic oligonucleotide
  Sense strand starting at position 2146 of SEQ ID NO: 588026
acucauucucgcgagaaug

SEQ ID NO: 836557 - RNA, 19 nt, Artificial Sequence
  Description of Artificial Sequence: Synthetic oligonucleotide
  Antisense strand to SEQ ID NO: 836556
cauucucgcgagaaugagu

SEQ ID NO: 836558 - RNA, 19 nt, Artificial Sequence
  Description of Artificial Sequence: Synthetic oligonucleotide
  Sense strand starting at position 2168 of SEQ ID NO: 588026
gagguugcuaguuaacugu

SEQ ID NO: 836559 - RNA, 19 nt, Artificial Sequence
  Description of Artificial Sequence: Synthetic oligonucleotide
  Antisense strand to SEQ ID NO: 836558
acaguuaacuagcaaccuc

SEQ ID NO: 836560 - RNA, 19 nt, Artificial Sequence
  Description of Artificial Sequence: Synthetic oligonucleotide
  Sense strand starting at position 2407 of SEQ ID NO: 588026
cgggaaucucccuauguuu

SEQ ID NO: 836561 - RNA, 19 nt, Artificial Sequence
  Description of Artificial Sequence: Synthetic oligonucleotide
  Antisense strand to SEQ ID NO: 836560
aaacauagggagauucccg

SEQ ID NO: 836562 - RNA, 19 nt, Artificial Sequence
  Description of Artificial Sequence: Synthetic oligonucleotide
  Sense strand starting at position 2551 of SEQ ID NO: 588026
ucaagagugucacucuuag

SEQ ID NO: 836563 - RNA, 19 nt, Artificial Sequence
  Description of Artificial Sequence: Synthetic oligonucleotide
  Antisense strand to SEQ ID NO: 836562
cuaagagugacacucuuga

SEQ ID NO: 836564 - RNA, 19 nt, Artificial Sequence
  Description of Artificial Sequence: Synthetic oligonucleotide
  Sense strand starting at position 2574 of SEQ ID NO: 588026
ucucgucuuaaggaugaga

SEQ ID NO: 836565 - RNA, 19 nt, Artificial Sequence
  Description of Artificial Sequence: Synthetic oligonucleotide
  Antisense strand to SEQ ID NO: 836564
ucucauccuuaagacgaga

SEQ ID NO: 836566 - RNA, 19 nt, Artificial Sequence
  Description of Artificial Sequence: Synthetic oligonucleotide
  Sense strand starting at position 2576 of SEQ ID NO: 588026
ucgucuuaaggaugagaau

SEQ ID NO: 836567 - RNA, 19 nt, Artificial Sequence
  Description of Artificial Sequence: Synthetic oligonucleotide
  Antisense strand to SEQ ID NO: 836566
auucucauccuuaagacga

SEQ ID NO: 836568 - RNA, 19 nt, Artificial Sequence
  Description of Artificial Sequence: Synthetic oligonucleotide
  Sense strand starting at position 2579 of SEQ ID NO: 588026
ucuuaaggaugagaauaca

SEQ ID NO: 836569 - RNA, 19 nt, Artificial Sequence
  Description of Artificial Sequence: Synthetic oligonucleotide
  Antisense strand to SEQ ID NO: 836568
uguauucucauccuuaaga

SEQ ID NO: 836570 - RNA, 19 nt, Artificial Sequence
  Description of Artificial Sequence: Synthetic oligonucleotide
  Sense strand starting at position 2608 of SEQ ID NO: 588026
gggaguaagugauugauuc

SEQ ID NO: 836571 - RNA, 19 nt, Artificial Sequence
  Description of Artificial Sequence: Synthetic oligonucleotide
  Antisense strand to SEQ ID NO: 836570
gaaucaaucacuuacuccc

SEQ ID NO: 836572 - RNA, 19 nt, Artificial Sequence
  Description of Artificial Sequence: Synthetic oligonucleotide
  Sense strand starting at position 2609 of SEQ ID NO: 588026
ggaguaagugauugauuca

SEQ ID NO: 836573 - RNA, 19 nt, Artificial Sequence
  Description of Artificial Sequence: Synthetic oligonucleotide
  Antisense strand to SEQ ID NO: 836572
ugaaucaaucacuuacucc

SEQ ID NO: 836574 - RNA, 19 nt, Artificial Sequence
  Description of Artificial Sequence: Synthetic oligonucleotide
  Sense strand starting at position 2685 of SEQ ID NO: 588026
aaagcucuucuguagagga

SEQ ID NO: 836575 - RNA, 19 nt, Artificial Sequence
  Description of Artificial Sequence: Synthetic oligonucleotide
  Antisense strand to SEQ ID NO: 836574
uccucuacagaagagcuuu

SEQ ID NO: 836576 - RNA, 19 nt, Artificial Sequence
  Description of Artificial Sequence: Synthetic oligonucleotide
  Sense strand starting at position 2802 of SEQ ID NO: 588026
gaccguugaggauguucau

SEQ ID NO: 836577 - RNA, 19 nt, Artificial Sequence
  Description of Artificial Sequence: Synthetic oligonucleotide
  Antisense strand to SEQ ID NO: 836576
augaacauccucaacgguc

SEQ ID NO: 836578 - RNA, 19 nt, Artificial Sequence
  Description of Artificial Sequence: Synthetic oligonucleotide
  Sense strand starting at position 2805 of SEQ ID NO: 588026
cguugaggauguucauaug

SEQ ID NO: 836579 - RNA, 19 nt, Artificial Sequence
  Description of Artificial Sequence: Synthetic oligonucleotide
  Antisense strand to SEQ ID NO: 836578
cauaugaacauccucaacg

SEQ ID NO: 836580 - RNA, 19 nt, Artificial Sequence
  Description of Artificial Sequence: Synthetic oligonucleotide
  Sense strand starting at position 2974 of SEQ ID NO: 588026
guguguaauuugccucucu

SEQ ID NO: 836581 - RNA, 19 nt, Artificial Sequence
  Description of Artificial Sequence: Synthetic oligonucleotide
  Antisense strand to SEQ ID NO: 836580
agagaggcaaauuacacac

SEQ ID NO: 836582 - RNA, 19 nt, Artificial Sequence
  Description of Artificial Sequence: Synthetic oligonucleotide
  Sense strand starting at position 2975 of SEQ ID NO: 588026
uguguaauuugccucucuu

SEQ ID NO: 836583 - RNA, 19 nt, Artificial Sequence
  Description of Artificial Sequence: Synthetic oligonucleotide
  Antisense strand to SEQ ID NO: 836582
aagagaggcaaauuacaca

SEQ ID NO: 836584 - RNA, 19 nt, Artificial Sequence
  Description of Artificial Sequence: Synthetic oligonucleotide
  Sense strand starting at position 3092 of SEQ ID NO: 588026
agugaacugcucuagguua

SEQ ID NO: 836585 - RNA, 19 nt, Artificial Sequence
  Description of Artificial Sequence: Synthetic oligonucleotide
  Antisense strand to SEQ ID NO: 836584
uaaccuagagcaguucacu

SEQ ID NO: 836586 - RNA, 19 nt, Artificial Sequence
  Description of Artificial Sequence: Synthetic oligonucleotide
  Sense strand starting at position 3094 of SEQ ID NO: 588026
ugaacugcucuagguuaaa

SEQ ID NO: 836587 - RNA, 19 nt, Artificial Sequence
  Description of Artificial Sequence: Synthetic oligonucleotide
  Antisense strand to SEQ ID NO: 836586
uuuaaccuagagcaguuca

SEQ ID NO: 836588 - RNA, 19 nt, Artificial Sequence
  Description of Artificial Sequence: Synthetic oligonucleotide
  Sense strand starting at position 3111 of SEQ ID NO: 588026
aaggaagcagccuguaauc

SEQ ID NO: 836589 - RNA, 19 nt, Artificial Sequence
  Description of Artificial Sequence: Synthetic oligonucleotide
  Antisense strand to SEQ ID NO: 836588
gauuacaggcugcuuccuu

SEQ ID NO: 836590 - RNA, 19 nt, Artificial Sequence
  Description of Artificial Sequence: Synthetic oligonucleotide
  Sense strand starting at position 3428 of SEQ ID NO: 588026
agcaaugugugauccuaaa

SEQ ID NO: 836591 - RNA, 19 nt, Artificial Sequence
  Description of Artificial Sequence: Synthetic oligonucleotide
  Antisense strand to SEQ ID NO: 836590
uuuaggaucacacauugcu

SEQ ID NO: 836592 - RNA, 19 nt, Artificial Sequence
  Description of Artificial Sequence: Synthetic oligonucleotide
  Sense strand starting at position 3482 of SEQ ID NO: 588026
gcuacugaggaacguuauu

SEQ ID NO: 836593 - RNA, 19 nt, Artificial Sequence
  Description of Artificial Sequence: Synthetic oligonucleotide
  Antisense strand to SEQ ID NO: 836592
aauaacguuccucaguagc

SEQ ID NO: 836594 - RNA, 19 nt, Artificial Sequence
  Description of Artificial Sequence: Synthetic oligonucleotide
  Sense strand starting at position 3528 of SEQ ID NO: 588026
aguagauuaguguggcaac

SEQ ID NO: 836595 - RNA, 19 nt, Artificial Sequence
  Description of Artificial Sequence: Synthetic oligonucleotide
  Antisense strand to SEQ ID NO: 836594
guugccacacuaaucuacu

SEQ ID NO: 836596 - RNA, 19 nt, Artificial Sequence
  Description of Artificial Sequence: Synthetic oligonucleotide
  Sense strand starting at position 55 of SEQ ID NO: 588027
agcuguuacacuugggauu

SEQ ID NO: 836597 - RNA, 19 nt, Artificial Sequence
  Description of Artificial Sequence: Synthetic oligonucleotide
  Antisense strand to SEQ ID NO: 836596
aaucccaaguguaacagcu

SEQ ID NO: 836598 - RNA, 19 nt, Artificial Sequence
  Description of Artificial Sequence: Synthetic oligonucleotide
  Sense strand starting at position 161 of SEQ ID NO: 588027
gaguauuauuucuuagugc

SEQ ID NO: 836599 - RNA, 19 nt, Artificial Sequence
  Description of Artificial Sequence: Synthetic oligonucleotide
  Antisense strand to SEQ ID NO: 836598
gcacuaagaaauaauacuc

SEQ ID NO: 836600 - RNA, 19 nt, Artificial Sequence
  Description of Artificial Sequence: Synthetic oligonucleotide
  Sense strand starting at position 176 of SEQ ID NO: 588027
gugcuaagucuagauugac

SEQ ID NO: 836601 - RNA, 19 nt, Artificial Sequence
  Description of Artificial Sequence: Synthetic oligonucleotide
  Antisense strand to SEQ ID NO: 836600
gucaaucuagacuuagcac

SEQ ID NO: 836602 - RNA, 19 nt, Artificial Sequence
  Description of Artificial Sequence: Synthetic oligonucleotide
  Sense strand starting at position 179 of SEQ ID NO: 588027
cuaagucuagauugacuua

SEQ ID NO: 836603 - RNA, 19 nt, Artificial Sequence
  Description of Artificial Sequence: Synthetic oligonucleotide
  Antisense strand to SEQ ID NO: 836602
uaagucaaucuagacuuag

SEQ ID NO: 836604 - RNA, 19 nt, Artificial Sequence
  Description of Artificial Sequence: Synthetic oligonucleotide
  Sense strand starting at position 182 of SEQ ID NO: 588027
agucuagauugacuuaaua

SEQ ID NO: 836605 - RNA, 19 nt, Artificial Sequence
  Description of Artificial Sequence: Synthetic oligonucleotide
  Antisense strand to SEQ ID NO: 836604
uauuaagucaaucuagacu

SEQ ID NO: 836606 - RNA, 19 nt, Artificial Sequence
  Description of Artificial Sequence: Synthetic oligonucleotide
  Sense strand starting at position 217 of SEQ ID NO: 588027
ggcuguggacuauaacuaa

SEQ ID NO: 836607 - RNA, 19 nt, Artificial Sequence
  Description of Artificial Sequence: Synthetic oligonucleotide
  Antisense strand to SEQ ID NO: 836606
uuaguuauaguccacagcc

SEQ ID NO: 836608 - RNA, 19 nt, Artificial Sequence
  Description of Artificial Sequence: Synthetic oligonucleotide
  Sense strand starting at position 338 of SEQ ID NO: 588027
agaauuucuuggcauguua

SEQ ID NO: 836609 - RNA, 19 nt, Artificial Sequence
  Description of Artificial Sequence: Synthetic oligonucleotide
  Antisense strand to SEQ ID NO: 836608
uaacaugccaagaaauucu

SEQ ID NO: 836610 - RNA, 19 nt, Artificial Sequence
  Description of Artificial Sequence: Synthetic oligonucleotide
  Sense strand starting at position 345 of SEQ ID NO: 588027
cuuggcauguuacuaauaa

SEQ ID NO: 836611 - RNA, 19 nt, Artificial Sequence
  Description of Artificial Sequence: Synthetic oligonucleotide
  Antisense strand to SEQ ID NO: 836610
uuauuaguaacaugccaag

SEQ ID NO: 836612 - RNA, 19 nt, Artificial Sequence
  Description of Artificial Sequence: Synthetic oligonucleotide
  Sense strand starting at position 381 of SEQ ID NO: 588027
augaauaugugaucuuuga

SEQ ID NO: 836613 - RNA, 19 nt, Artificial Sequence
  Description of Artificial Sequence: Synthetic oligonucleotide
  Antisense strand to SEQ ID NO: 836612
ucaaagaucacauauucau

SEQ ID NO: 836614 - RNA, 19 nt, Artificial Sequence
  Description of Artificial Sequence: Synthetic oligonucleotide
  Sense strand starting at position 385 of SEQ ID NO: 588027
auaugugaucuuugaaguu

SEQ ID NO: 836615 - RNA, 19 nt, Artificial Sequence
  Description of Artificial Sequence: Synthetic oligonucleotide
  Antisense strand to SEQ ID NO: 836614
aacuucaaagaucacauau

SEQ ID NO: 836616 - RNA, 19 nt, Artificial Sequence
  Description of Artificial Sequence: Synthetic oligonucleotide
  Sense strand starting at position 508 of SEQ ID NO: 588027
ugaggaugccgugggaaau

SEQ ID NO: 836617 - RNA, 19 nt, Artificial Sequence
  Description of Artificial Sequence: Synthetic oligonucleotide
  Antisense strand to SEQ ID NO: 836616
auuucccacggcauccuca

SEQ ID NO: 836618 - RNA, 19 nt, Artificial Sequence
  Description of Artificial Sequence: Synthetic oligonucleotide
  Sense strand starting at position 525 of SEQ ID NO: 588027
augucaucuuuccucauga

SEQ ID NO: 836619 - RNA, 19 nt, Artificial Sequence
  Description of Artificial Sequence: Synthetic oligonucleotide
  Antisense strand to SEQ ID NO: 836618
ucaugaggaaagaugacau

SEQ ID NO: 836620 - RNA, 19 nt, Artificial Sequence
  Description of Artificial Sequence: Synthetic oligonucleotide
  Sense strand starting at position 526 of SEQ ID NO: 588027
ugucaucuuuccucaugau

SEQ ID NO: 836621 - RNA, 19 nt, Artificial Sequence
  Description of Artificial Sequence: Synthetic oligonucleotide
  Antisense strand to SEQ ID NO: 836620
aucaugaggaaagaugaca

SEQ ID NO: 836622 - RNA, 19 nt, Artificial Sequence
  Description of Artificial Sequence: Synthetic oligonucleotide
  Sense strand starting at position 527 of SEQ ID NO: 588027
gucaucuuuccucaugauc

SEQ ID NO: 836623 - RNA, 19 nt, Artificial Sequence
  Description of Artificial Sequence: Synthetic oligonucleotide
  Antisense strand to SEQ ID NO: 836622
gaucaugaggaaagaugac

SEQ ID NO: 836624 - RNA, 19 nt, Artificial Sequence
  Description of Artificial Sequence: Synthetic oligonucleotide
  Sense strand starting at position 764 of SEQ ID NO: 588027
gaaaucgucuuucugucaa

SEQ ID NO: 836625 - RNA, 19 nt, Artificial Sequence
  Description of Artificial Sequence: Synthetic oligonucleotide
  Antisense strand to SEQ ID NO: 836624
uugacagaaagacgauuuc

SEQ ID NO: 836626 - RNA, 19 nt, Artificial Sequence
  Description of Artificial Sequence: Synthetic oligonucleotide
  Sense strand starting at position 766 of SEQ ID NO: 588027
aaucgucuuucugucaaag

SEQ ID NO: 836627 - RNA, 19 nt, Artificial Sequence
  Description of Artificial Sequence: Synthetic oligonucleotide
  Antisense strand to SEQ ID NO: 836626
cuuugacagaaagacgauu

SEQ ID NO: 836628 - RNA, 19 nt, Artificial Sequence
  Description of Artificial Sequence: Synthetic oligonucleotide
  Sense strand starting at position 1660 of SEQ ID NO: 588027
cugcgacuuccucacaagu

SEQ ID NO: 836629 - RNA, 19 nt, Artificial Sequence
  Description of Artificial Sequence: Synthetic oligonucleotide
  Antisense strand to SEQ ID NO: 836628
acuugugaggaagucgcag

SEQ ID NO: 836630 - RNA, 19 nt, Artificial Sequence
  Description of Artificial Sequence: Synthetic oligonucleotide
  Sense strand starting at position 1841 of SEQ ID NO: 588027
cggaucugccaccauagaa

SEQ ID NO: 836631 - RNA, 19 nt, Artificial Sequence
  Description of Artificial Sequence: Synthetic oligonucleotide
  Antisense strand to SEQ ID NO: 836630
uucuaugguggcagauccg

SEQ ID NO: 836632 - RNA, 19 nt, Artificial Sequence
  Description of Artificial Sequence: Synthetic oligonucleotide
  Sense strand starting at position 2104 of SEQ ID NO: 588027
cgcgucuucgugaaggaga

SEQ ID NO: 836633 - RNA, 19 nt, Artificial Sequence
  Description of Artificial Sequence: Synthetic oligonucleotide
  Antisense strand to SEQ ID NO: 836632
ucuccuucacgaagacgcg

SEQ ID NO: 836634 - RNA, 19 nt, Artificial Sequence
  Description of Artificial Sequence: Synthetic oligonucleotide
  Sense strand starting at position 2121 of SEQ ID NO: 588027
gaacucuugcguucugcua

SEQ ID NO: 836635 - RNA, 19 nt, Artificial Sequence
  Description of Artificial Sequence: Synthetic oligonucleotide
  Antisense strand to SEQ ID NO: 836634
uagcagaacgcaagaguuc

SEQ ID NO: 836636 - RNA, 19 nt, Artificial Sequence
  Description of Artificial Sequence: Synthetic oligonucleotide
  Sense strand starting at position 2177 of SEQ ID NO: 588027
agcucuaggaggugucuaa

SEQ ID NO: 836637 - RNA, 19 nt, Artificial Sequence
  Description of Artificial Sequence: Synthetic oligonucleotide
  Antisense strand to SEQ ID NO: 836636
uuagacaccuccuagagcu

SEQ ID NO: 836638 - RNA, 19 nt, Artificial Sequence
  Description of Artificial Sequence: Synthetic oligonucleotide
  Sense strand starting at position 2337 of SEQ ID NO: 588027
gucgcugguucgaugcaga

SEQ ID NO: 836639 - RNA, 19 nt, Artificial Sequence
  Description of Artificial Sequence: Synthetic oligonucleotide
  Antisense strand to SEQ ID NO: 836638
ucugcaucgaaccagcgac

SEQ ID NO: 836640 - RNA, 19 nt, Artificial Sequence
  Description of Artificial Sequence: Synthetic oligonucleotide
  Sense strand starting at position 2344 of SEQ ID NO: 588027
guucgaugcagaggaagaa

SEQ ID NO: 836641 - RNA, 19 nt, Artificial Sequence
  Description of Artificial Sequence: Synthetic oligonucleotide
  Antisense strand to SEQ ID NO: 836640
uucuuccucugcaucgaac

SEQ ID NO: 836642 - RNA, 19 nt, Artificial Sequence
  Description of Artificial Sequence: Synthetic oligonucleotide
  Sense strand starting at position 2491 of SEQ ID NO: 588027
gagcgaaauaagugacaga

SEQ ID NO: 836643 - RNA, 19 nt, Artificial Sequence
  Description of Artificial Sequence: Synthetic oligonucleotide
  Antisense strand to SEQ ID NO: 836642
ucugucacuuauuucgcuc

SEQ ID NO: 836644 - RNA, 19 nt, Artificial Sequence
  Description of Artificial Sequence: Synthetic oligonucleotide
  Sense strand starting at position 2494 of SEQ ID NO: 588027
cgaaauaagugacagauuu

SEQ ID NO: 836645 - RNA, 19 nt, Artificial Sequence
  Description of Artificial Sequence: Synthetic oligonucleotide
  Antisense strand to SEQ ID NO: 836644
aaaucugucacuuauuucg

SEQ ID NO: 836646 - RNA, 19 nt, Artificial Sequence
  Description of Artificial Sequence: Synthetic oligonucleotide
  Sense strand starting at position 2605 of SEQ ID NO: 588027
uggccaaacguguagacaa

SEQ ID NO: 836647 - RNA, 19 nt, Artificial Sequence
  Description of Artificial Sequence: Synthetic oligonucleotide
  Antisense strand to SEQ ID NO: 836646
uugucuacacguuuggcca

SEQ ID NO: 836648 - RNA, 19 nt, Artificial Sequence
  Description of Artificial Sequence: Synthetic oligonucleotide
  Sense strand starting at position 2735 of SEQ ID NO: 588027
gcagucugacgugggauuu

SEQ ID NO: 836649 - RNA, 19 nt, Artificial Sequence
  Description of Artificial Sequence: Synthetic oligonucleotide
  Antisense strand to SEQ ID NO: 836648
aaaucccacgucagacugc

SEQ ID NO: 836650 - RNA, 19 nt, Artificial Sequence
  Description of Artificial Sequence: Synthetic oligonucleotide
  Sense strand starting at position 2862 of SEQ ID NO: 588027
uuuauuaggcuguaaugag

SEQ ID NO: 836651 - RNA, 19 nt, Artificial Sequence
  Description of Artificial Sequence: Synthetic oligonucleotide
  Antisense strand to SEQ ID NO: 836650
cucauuacagccuaauaaa

SEQ ID NO: 836652 - RNA, 19 nt, Artificial Sequence
  Description of Artificial Sequence: Synthetic oligonucleotide
  Sense strand starting at position 2866 of SEQ ID NO: 588027
uuaggcuguaaugaguaua

SEQ ID NO: 836653 - RNA, 19 nt, Artificial Sequence
  Description of Artificial Sequence: Synthetic oligonucleotide
  Antisense strand to SEQ ID NO: 836652
uauacucauuacagccuaa

SEQ ID NO: 836654 - RNA, 19 nt, Artificial Sequence
  Description of Artificial Sequence: Synthetic oligonucleotide
  Sense strand starting at position 2897 of SEQ ID NO: 588027
uccguauaauagcuuacaa

SEQ ID NO: 836655 - RNA, 19 nt, Artificial Sequence
  Description of Artificial Sequence: Synthetic oligonucleotide
  Antisense strand to SEQ ID NO: 836654
uuguaagcuauuauacgga

SEQ ID NO: 836656 - RNA, 19 nt, Artificial Sequence
  Description of Artificial Sequence: Synthetic oligonucleotide
  Sense strand starting at position 3002 of SEQ ID NO: 588027
ugcccagauugucuuauuu

SEQ ID NO: 836657 - RNA, 19 nt, Artificial Sequence
  Description of Artificial Sequence: Synthetic oligonucleotide
  Antisense strand to SEQ ID NO: 836656
aaauaagacaaucugggca

SEQ ID NO: 836658 - RNA, 19 nt, Artificial Sequence
  Description of Artificial Sequence: Synthetic oligonucleotide
  Sense strand starting at position 3020 of SEQ ID NO: 588027
uuugguuaucgcugaagaa

SEQ ID NO: 836659 - RNA, 19 nt, Artificial Sequence
  Description of Artificial Sequence: Synthetic oligonucleotide
  Antisense strand to SEQ ID NO: 836658
uucuucagcgauaaccaaa

SEQ ID NO: 836660 - RNA, 19 nt, Artificial Sequence
  Description of Artificial Sequence: Synthetic oligonucleotide
  Sense strand starting at position 3021 of SEQ ID NO: 588027
uugguuaucgcugaagaaa

SEQ ID NO: 836661 - RNA, 19 nt, Artificial Sequence
  Description of Artificial Sequence: Synthetic oligonucleotide
  Antisense strand to SEQ ID NO: 836660
uuucuucagcgauaaccaa

SEQ ID NO: 836662 - RNA, 19 nt, Artificial Sequence
  Description of Artificial Sequence: Synthetic oligonucleotide
  Sense strand starting at position 3490 of SEQ ID NO: 588027
ugaggaugccaagguguuu

SEQ ID NO: 836663 - RNA, 19 nt, Artificial Sequence
  Description of Artificial Sequence: Synthetic oligonucleotide
  Antisense strand to SEQ ID NO: 836662
aaacaccuuggcauccuca

SEQ ID NO: 836664 - RNA, 19 nt, Artificial Sequence
  Description of Artificial Sequence: Synthetic oligonucleotide
  Sense strand starting at position 3499 of SEQ ID NO: 588027
caagguguuuagguuuauu

SEQ ID NO: 836665 - RNA, 19 nt, Artificial Sequence
  Description of Artificial Sequence: Synthetic oligonucleotide
  Antisense strand to SEQ ID NO: 836664
aauaaaccuaaacaccuug

SEQ ID NO: 836666 - RNA, 19 nt, Artificial Sequence
  Description of Artificial Sequence: Synthetic oligonucleotide
  Sense strand starting at position 3698 of SEQ ID NO: 588027
aggucaaagccaugacuua

SEQ ID NO: 836667 - RNA, 19 nt, Artificial Sequence
  Description of Artificial Sequence: Synthetic oligonucleotide
  Antisense strand to SEQ ID NO: 836666
uaagucauggcuuugaccu

SEQ ID NO: 836668 - RNA, 19 nt, Artificial Sequence
  Description of Artificial Sequence: Synthetic oligonucleotide
  Sense strand starting at position 3825 of SEQ ID NO: 588027
uucuucuguggugaucuau

SEQ ID NO: 836669 - RNA, 19 nt, Artificial Sequence
  Description of Artificial Sequence: Synthetic oligonucleotide
  Antisense strand to SEQ ID NO: 836668
auagaucaccacagaagaa

SEQ ID NO: 836670 - RNA, 19 nt, Artificial Sequence
  Description of Artificial Sequence: Synthetic oligonucleotide
  Sense strand starting at position 3887 of SEQ ID NO: 588027
guagaaaugugacuaagau

SEQ ID NO: 836671 - RNA, 19 nt, Artificial Sequence
  Description of Artificial Sequence: Synthetic oligonucleotide
  Antisense strand to SEQ ID NO: 836670
aucuuagucacauuucuac

SEQ ID NO: 836672 - RNA, 19 nt, Artificial Sequence
  Description of Artificial Sequence: Synthetic oligonucleotide
  Sense strand starting at position 3893 of SEQ ID NO: 588027
augugacuaagauguuuga

SEQ ID NO: 836673 - RNA, 19 nt, Artificial Sequence
  Description of Artificial Sequence: Synthetic oligonucleotide
  Antisense strand to SEQ ID NO: 836672
ucaaacaucuuagucacau

SEQ ID NO: 836674 - RNA, 19 nt, Artificial Sequence
  Description of Artificial Sequence: Synthetic oligonucleotide
  Sense strand starting at position 3896 of SEQ ID NO: 588027
ugacuaagauguuugaaca

SEQ ID NO: 836675 - RNA, 19 nt, Artificial Sequence
  Description of Artificial Sequence: Synthetic oligonucleotide
  Antisense strand to SEQ ID NO: 836674
uguucaaacaucuuaguca

SEQ ID NO: 836676 - RNA, 19 nt, Artificial Sequence
  Description of Artificial Sequence: Synthetic oligonucleotide
  Sense strand starting at position 159 of SEQ ID NO: 588028
gccaguucugucuggaggu

SEQ ID NO: 836677 - RNA, 19 nt, Artificial Sequence
  Description of Artificial Sequence: Synthetic oligonucleotide
  Antisense strand to SEQ ID NO: 836676
accuccagacagaacuggc

SEQ ID NO: 836678 - RNA, 19 nt, Artificial Sequence
  Description of Artificial Sequence: Synthetic oligonucleotide
  Sense strand starting at position 160 of SEQ ID NO: 588028
ccaguucugucuggagguu

SEQ ID NO: 836679 - RNA, 19 nt, Artificial Sequence
  Description of Artificial Sequence: Synthetic oligonucleotide
  Antisense strand to SEQ ID NO: 836678
aaccuccagacagaacugg

SEQ ID NO: 836680 - RNA, 19 nt, Artificial Sequence
  Description of Artificial Sequence: Synthetic oligonucleotide
  Sense strand starting at position 161 of SEQ ID NO: 588028
caguucugucuggagguuu

SEQ ID NO: 836681 - RNA, 19 nt, Artificial Sequence
  Description of Artificial Sequence: Synthetic oligonucleotide
  Antisense strand to SEQ ID NO: 836680
aaaccuccagacagaacug

SEQ ID NO: 836682 - RNA, 19 nt, Artificial Sequence
  Description of Artificial Sequence: Synthetic oligonucleotide
  Sense strand starting at position 191 of SEQ ID NO: 588028
gugcuccugcaaugaacua

SEQ ID NO: 836683 - RNA, 19 nt, Artificial Sequence
  Description of Artificial Sequence: Synthetic oligonucleotide
  Antisense strand to SEQ ID NO: 836682
uaguucauugcaggagcac

SEQ ID NO: 836684 - RNA, 19 nt, Artificial Sequence
  Description of Artificial Sequence: Synthetic oligonucleotide
  Sense strand starting at position 600 of SEQ ID NO: 588028
guggcauacgguuguaauc

SEQ ID NO: 836685 - RNA, 19 nt, Artificial Sequence
  Description of Artificial Sequence: Synthetic oligonucleotide
  Antisense strand to SEQ ID NO: 836684
gauuacaaccguaugccac

SEQ ID NO: 836686 - RNA, 19 nt, Artificial Sequence
  Description of Artificial Sequence: Synthetic oligonucleotide
  Sense strand starting at position 833 of SEQ ID NO: 588028
gcucaauaauggugaacac

SEQ ID NO: 836687 - RNA, 19 nt, Artificial Sequence
  Description of Artificial Sequence: Synthetic oligonucleotide
  Antisense strand to SEQ ID NO: 836686
guguucaccauuauugagc

SEQ ID NO: 836688 - RNA, 19 nt, Artificial Sequence
  Description of Artificial Sequence: Synthetic oligonucleotide
  Sense strand starting at position 1035 of SEQ ID NO: 588028
gccuuuaaguaggcaugaa

SEQ ID NO: 836689 - RNA, 19 nt, Artificial Sequence
  Description of Artificial Sequence: Synthetic oligonucleotide
  Antisense strand to SEQ ID NO: 836688
uucaugccuacuuaaaggc

SEQ ID NO: 836690 - RNA, 19 nt, Artificial Sequence
  Description of Artificial Sequence: Synthetic oligonucleotide
  Sense strand starting at position 1077 of SEQ ID NO: 588028
ggugcagcuucucgaaaga

SEQ ID NO: 836691 - RNA, 19 nt, Artificial Sequence
  Description of Artificial Sequence: Synthetic oligonucleotide
  Antisense strand to SEQ ID NO: 836690
ucuuucgagaagcugcacc

SEQ ID NO: 836692 - RNA, 19 nt, Artificial Sequence
  Description of Artificial Sequence: Synthetic oligonucleotide
  Sense strand starting at position 1141 of SEQ ID NO: 588028
gcgagcuguggagaaacaa

SEQ ID NO: 836693 - RNA, 19 nt, Artificial Sequence
  Description of Artificial Sequence: Synthetic oligonucleotide
  Antisense strand to SEQ ID NO: 836692
uuguuucuccacagcucgc

SEQ ID NO: 836694 - RNA, 19 nt, Artificial Sequence
  Description of Artificial Sequence: Synthetic oligonucleotide
  Sense strand starting at position 1215 of SEQ ID NO: 588028
gacguucucucuuugaaag

SEQ ID NO: 836695 - RNA, 19 nt, Artificial Sequence
  Description of Artificial Sequence: Synthetic oligonucleotide
  Antisense strand to SEQ ID NO: 836694
cuuucaaagagagaacguc

SEQ ID NO: 836696 - RNA, 19 nt, Artificial Sequence
  Description of Artificial Sequence: Synthetic oligonucleotide
  Sense strand starting at position 1216 of SEQ ID NO: 588028
acguucucucuuugaaagu

SEQ ID NO: 836697 - RNA, 19 nt, Artificial Sequence
  Description of Artificial Sequence: Synthetic oligonucleotide
  Antisense strand to SEQ ID NO: 836696
acuuucaaagagagaacgu

SEQ ID NO: 836698 - RNA, 19 nt, Artificial Sequence
  Description of Artificial Sequence: Synthetic oligonucleotide
  Sense strand starting at position 1217 of SEQ ID NO: 588028
cguucucucuuugaaagug

SEQ ID NO: 836699 - RNA, 19 nt, Artificial Sequence
  Description of Artificial Sequence: Synthetic oligonucleotide
  Antisense strand to SEQ ID NO: 836698
cacuuucaaagagagaacg

SEQ ID NO: 836700 - RNA, 19 nt, Artificial Sequence
  Description of Artificial Sequence: Synthetic oligonucleotide
  Sense strand starting at position 1241 of SEQ ID NO: 588028
gucagauccgccgagggau

SEQ ID NO: 836701 - RNA, 19 nt, Artificial Sequence
  Description of Artificial Sequence: Synthetic oligonucleotide
  Antisense strand to SEQ ID NO: 836700
aucccucggcggaucugac

SEQ ID NO: 836702 - RNA, 19 nt, Artificial Sequence
  Description of Artificial Sequence: Synthetic oligonucleotide
  Sense strand starting at position 1553 of SEQ ID NO: 588028
uagggaacgucugggucaa

SEQ ID NO: 836703 - RNA, 19 nt, Artificial Sequence
  Description of Artificial Sequence: Synthetic oligonucleotide
  Antisense strand to SEQ ID NO: 836702
uugacccagacguucccua

SEQ ID NO: 836704 - RNA, 19 nt, Artificial Sequence
  Description of Artificial Sequence: Synthetic oligonucleotide
  Sense strand starting at position 2722 of SEQ ID NO: 588028
gcggcuaucuugucccaca

SEQ ID NO: 836705 - RNA, 19 nt, Artificial Sequence
  Description of Artificial Sequence: Synthetic oligonucleotide
  Antisense strand to SEQ ID NO: 836704
ugugggacaagauagccgc

SEQ ID NO: 836706 - RNA, 19 nt, Artificial Sequence
  Description of Artificial Sequence: Synthetic oligonucleotide
  Sense strand starting at position 2987 of SEQ ID NO: 588028
cuucuuuaccucugacagu

SEQ ID NO: 836707 - RNA, 19 nt, Artificial Sequence
  Description of Artificial Sequence: Synthetic oligonucleotide
  Antisense strand to SEQ ID NO: 836706
acugucagagguaaagaag

SEQ ID NO: 836708 - RNA, 19 nt, Artificial Sequence
  Description of Artificial Sequence: Synthetic oligonucleotide
  Sense strand starting at position 3064 of SEQ ID NO: 588028
uggaucugcuugcaaaucu

SEQ ID NO: 836709 - RNA, 19 nt, Artificial Sequence
  Description of Artificial Sequence: Synthetic oligonucleotide
  Antisense strand to SEQ ID NO: 836708
agauuugcaagcagaucca

SEQ ID NO: 836710 - RNA, 19 nt, Artificial Sequence
  Description of Artificial Sequence: Synthetic oligonucleotide
  Sense strand starting at position 3113 of SEQ ID NO: 588028
acacuaagcucaggaauuc

SEQ ID NO: 836711 - RNA, 19 nt, Artificial Sequence
  Description of Artificial Sequence: Synthetic oligonucleotide
  Antisense strand to SEQ ID NO: 836710
gaauuccugagcuuagugu

SEQ ID NO: 836712 - RNA, 19 nt, Artificial Sequence
  Description of Artificial Sequence: Synthetic oligonucleotide
  Sense strand starting at position 3369 of SEQ ID NO: 588028
gguugucuuccagacagcu

SEQ ID NO: 836713 - RNA, 19 nt, Artificial Sequence
  Description of Artificial Sequence: Synthetic oligonucleotide
  Antisense strand to SEQ ID NO: 836712
agcugucuggaagacaacc

SEQ ID NO: 836714 - RNA, 19 nt, Artificial Sequence
  Description of Artificial Sequence: Synthetic oligonucleotide
  Sense strand starting at position 3403 of SEQ ID NO: 588028
ccugauguggcucaagaga

SEQ ID NO: 836715 - RNA, 19 nt, Artificial Sequence
  Description of Artificial Sequence: Synthetic oligonucleotide
  Antisense strand to SEQ ID NO: 836714
ucucuugagccacaucagg

SEQ ID NO: 836716 - RNA, 19 nt, Artificial Sequence
  Description of Artificial Sequence: Synthetic oligonucleotide
  Sense strand starting at position 3451 of SEQ ID NO: 588028
gcaggguugugucagagga

SEQ ID NO: 836717 - RNA, 19 nt, Artificial Sequence
  Description of Artificial Sequence: Synthetic oligonucleotide
  Antisense strand to SEQ ID NO: 836716
uccucugacacaacccugc

SEQ ID NO: 836718 - RNA, 19 nt, Artificial Sequence
  Description of Artificial Sequence: Synthetic oligonucleotide
  Sense strand starting at position 3549 of SEQ ID NO: 588028
gaagaaagucccuguggaa

SEQ ID NO: 836719 - RNA, 19 nt, Artificial Sequence
  Description of Artificial Sequence: Synthetic oligonucleotide
  Antisense strand to SEQ ID NO: 836718
uuccacagggacuuucuuc

SEQ ID NO: 836720 - RNA, 19 nt, Artificial Sequence
  Description of Artificial Sequence: Synthetic oligonucleotide
  Sense strand starting at position 3568 of SEQ ID NO: 588028
cagggucuugccuaccaua

SEQ ID NO: 836721 - RNA, 19 nt, Artificial Sequence
  Description of Artificial Sequence: Synthetic oligonucleotide
  Antisense strand to SEQ ID NO: 836720
uaugguaggcaagacccug

SEQ ID NO: 836722 - RNA, 19 nt, Artificial Sequence
  Description of Artificial Sequence: Synthetic oligonucleotide
  Sense strand starting at position 3581 of SEQ ID NO: 588028
accauagucugcucugaag

SEQ ID NO: 836723 - RNA, 19 nt, Artificial Sequence
  Description of Artificial Sequence: Synthetic oligonucleotide
  Antisense strand to SEQ ID NO: 836722
cuucagagcagacuauggu

SEQ ID NO: 836724 - RNA, 19 nt, Artificial Sequence
  Description of Artificial Sequence: Synthetic oligonucleotide
  Sense strand starting at position 3583 of SEQ ID NO: 588028
cauagucugcucugaaggu

SEQ ID NO: 836725 - RNA, 19 nt, Artificial Sequence
  Description of Artificial Sequence: Synthetic oligonucleotide
  Antisense strand to SEQ ID NO: 836724
accuucagagcagacuaug

SEQ ID NO: 836726 - RNA, 19 nt, Artificial Sequence
  Description of Artificial Sequence: Synthetic oligonucleotide
  Sense strand starting at position 3596 of SEQ ID NO: 588028
gaagguuggguuggagaga

SEQ ID NO: 836727 - RNA, 19 nt, Artificial Sequence
  Description of Artificial Sequence: Synthetic oligonucleotide
  Antisense strand to SEQ ID NO: 836726
ucucuccaacccaaccuuc

SEQ ID NO: 836728 - RNA, 19 nt, Artificial Sequence
  Description of Artificial Sequence: Synthetic oligonucleotide
  Sense strand starting at position 3937 of SEQ ID NO: 588028
gauccagugagaugaguga

SEQ ID NO: 836729 - RNA, 19 nt, Artificial Sequence
  Description of Artificial Sequence: Synthetic oligonucleotide
  Antisense strand to SEQ ID NO: 836728
ucacucaucucacuggauc

SEQ ID NO: 836730 - RNA, 19 nt, Artificial Sequence
  Description of Artificial Sequence: Synthetic oligonucleotide
  Sense strand starting at position 3967 of SEQ ID NO: 588028
agagacaucugagauaaca

SEQ ID NO: 836731 - RNA, 19 nt, Artificial Sequence
  Description of Artificial Sequence: Synthetic oligonucleotide
  Antisense strand to SEQ ID NO: 836730
uguuaucucagaugucucu

SEQ ID NO: 836732 - RNA, 19 nt, Artificial Sequence
  Description of Artificial Sequence: Synthetic oligonucleotide
  Sense strand starting at position 252 of SEQ ID NO: 588029
auucgauauuaucugagga

SEQ ID NO: 836733 - RNA, 19 nt, Artificial Sequence
  Description of Artificial Sequence: Synthetic oligonucleotide
  Antisense strand to SEQ ID NO: 836732
uccucagauaauaucgaau

SEQ ID NO: 836734 - RNA, 19 nt, Artificial Sequence
  Description of Artificial Sequence: Synthetic oligonucleotide
  Sense strand starting at position 253 of SEQ ID NO: 588029
uucgauauuaucugaggau

SEQ ID NO: 836735 - RNA, 19 nt, Artificial Sequence
  Description of Artificial Sequence: Synthetic oligonucleotide
  Antisense strand to SEQ ID NO: 836734
auccucagauaauaucgaa

SEQ ID NO: 836736 - RNA, 19 nt, Artificial Sequence
  Description of Artificial Sequence: Synthetic oligonucleotide
  Sense strand starting at position 515 of SEQ ID NO: 588029
ggaggaugauugcuugaau

SEQ ID NO: 836737 - RNA, 19 nt, Artificial Sequence
  Description of Artificial Sequence: Synthetic oligonucleotide
  Antisense strand to SEQ ID NO: 836736
auucaagcaaucauccucc

SEQ ID NO: 836738 - RNA, 19 nt, Artificial Sequence
  Description of Artificial Sequence: Synthetic oligonucleotide
  Sense strand starting at position 516 of SEQ ID NO: 588029
gaggaugauugcuugaauc

SEQ ID NO: 836739 - RNA, 19 nt, Artificial Sequence
  Description of Artificial Sequence: Synthetic oligonucleotide
  Antisense strand to SEQ ID NO: 836738
gauucaagcaaucauccuc

SEQ ID NO: 836740 - RNA, 19 nt, Artificial Sequence
  Description of Artificial Sequence: Synthetic oligonucleotide
  Sense strand starting at position 644 of SEQ ID NO: 588029
uuaacaauguugucaucuu

SEQ ID NO: 836741 - RNA, 19 nt, Artificial Sequence
  Description of Artificial Sequence: Synthetic oligonucleotide
  Antisense strand to SEQ ID NO: 836740
aagaugacaacauuguuaa

SEQ ID NO: 836742 - RNA, 19 nt, Artificial Sequence
  Description of Artificial Sequence: Synthetic oligonucleotide
  Sense strand starting at position 919 of SEQ ID NO: 588029
ggacaagacuaugaaagaa

SEQ ID NO: 836743 - RNA, 19 nt, Artificial Sequence
  Description of Artificial Sequence: Synthetic oligonucleotide
  Antisense strand to SEQ ID NO: 836742
uucuuucauagucuugucc

SEQ ID NO: 836744 - RNA, 19 nt, Artificial Sequence
  Description of Artificial Sequence: Synthetic oligonucleotide
  Sense strand starting at position 973 of SEQ ID NO: 588029
gggagagacugcuccaaca

SEQ ID NO: 836745 - RNA, 19 nt, Artificial Sequence
  Description of Artificial Sequence: Synthetic oligonucleotide
  Antisense strand to SEQ ID NO: 836744
uguuggagcagucucuccc

SEQ ID NO: 836746 - RNA, 19 nt, Artificial Sequence
  Description of Artificial Sequence: Synthetic oligonucleotide
  Sense strand starting at position 1013 of SEQ ID NO: 588029
gaagacugacuacgugaua

SEQ ID NO: 836747 - RNA, 19 nt, Artificial Sequence
  Description of Artificial Sequence: Synthetic oligonucleotide
  Antisense strand to SEQ ID NO: 836746
uaucacguagucagucuuc

SEQ ID NO: 836748 - RNA, 19 nt, Artificial Sequence
  Description of Artificial Sequence: Synthetic oligonucleotide
  Sense strand starting at position 1014 of SEQ ID NO: 588029
aagacugacuacgugauaa

SEQ ID NO: 836749 - RNA, 19 nt, Artificial Sequence
  Description of Artificial Sequence: Synthetic oligonucleotide
  Antisense strand to SEQ ID NO: 836748
uuaucacguagucagucuu

SEQ ID NO: 836750 - RNA, 19 nt, Artificial Sequence
  Description of Artificial Sequence: Synthetic oligonucleotide
  Sense strand starting at position 1016 of SEQ ID NO: 588029
gacugacuacgugauaagu

SEQ ID NO: 836751 - RNA, 19 nt, Artificial Sequence
  Description of Artificial Sequence: Synthetic oligonucleotide
  Antisense strand to SEQ ID NO: 836750
acuuaucacguagucaguc

SEQ ID NO: 836752 - RNA, 19 nt, Artificial Sequence
  Description of Artificial Sequence: Synthetic oligonucleotide
  Sense strand starting at position 1033 of SEQ ID NO: 588029
gugacucucagacgagaag

SEQ ID NO: 836753 - RNA, 19 nt, Artificial Sequence
  Description of Artificial Sequence: Synthetic oligonucleotide
  Antisense strand to SEQ ID NO: 836752
cuucucgucugagagucac

SEQ ID NO: 836754 - RNA, 19 nt, Artificial Sequence
  Description of Artificial Sequence: Synthetic oligonucleotide
  Sense strand starting at position 1115 of SEQ ID NO: 588029
cuuugugaaaccuggagau

SEQ ID NO: 836755 - RNA, 19 nt, Artificial Sequence
  Description of Artificial Sequence: Synthetic oligonucleotide
  Antisense strand to SEQ ID NO: 836754
aucuccagguuucacaaag

SEQ ID NO: 836756 - RNA, 19 nt, Artificial Sequence
  Description of Artificial Sequence: Synthetic oligonucleotide
  Sense strand starting at position 1190 of SEQ ID NO: 588029
gggaaagaucaguggcgaa

SEQ ID NO: 836757 - RNA, 19 nt, Artificial Sequence
  Description of Artificial Sequence: Synthetic oligonucleotide
  Antisense strand to SEQ ID NO: 836756
uucgccacugaucuuuccc

SEQ ID NO: 836758 - RNA, 19 nt, Artificial Sequence
  Description of Artificial Sequence: Synthetic oligonucleotide
  Sense strand starting at position 1386 of SEQ ID NO: 588029
gcgugugacccacaaccaa

SEQ ID NO: 836759 - RNA, 19 nt, Artificial Sequence
  Description of Artificial Sequence: Synthetic oligonucleotide
  Antisense strand to SEQ ID NO: 836758
uugguugugggucacacgc

SEQ ID NO: 836760 - RNA, 19 nt, Artificial Sequence
  Description of Artificial Sequence: Synthetic oligonucleotide
  Sense strand starting at position 2160 of SEQ ID NO: 588029
cgccgagugcugucucuau

SEQ ID NO: 836761 - RNA, 19 nt, Artificial Sequence
  Description of Artificial Sequence: Synthetic oligonucleotide
  Antisense strand to SEQ ID NO: 836760
auagagacagcacucggcg

SEQ ID NO: 836762 - RNA, 19 nt, Artificial Sequence
  Description of Artificial Sequence: Synthetic oligonucleotide
  Sense strand starting at position 2568 of SEQ ID NO: 588029
cgcuuugccagggaagaga

SEQ ID NO: 836763 - RNA, 19 nt, Artificial Sequence
  Description of Artificial Sequence: Synthetic oligonucleotide
  Antisense strand to SEQ ID NO: 836762
ucucuucccuggcaaagcg

SEQ ID NO: 836764 - RNA, 19 nt, Artificial Sequence
  Description of Artificial Sequence: Synthetic oligonucleotide
  Sense strand starting at position 2583 of SEQ ID NO: 588029
gagaguuaucuauggcuug

SEQ ID NO: 836765 - RNA, 19 nt, Artificial Sequence
  Description of Artificial Sequence: Synthetic oligonucleotide
  Antisense strand to SEQ ID NO: 836764
caagccauagauaacucuc

SEQ ID NO: 836766 - RNA, 19 nt, Artificial Sequence
  Description of Artificial Sequence: Synthetic oligonucleotide
  Sense strand starting at position 2586 of SEQ ID NO: 588029
aguuaucuauggcuugaau

SEQ ID NO: 836767 - RNA, 19 nt, Artificial Sequence
  Description of Artificial Sequence: Synthetic oligonucleotide
  Antisense strand to SEQ ID NO: 836766
auucaagccauagauaacu

SEQ ID NO: 836768 - RNA, 19 nt, Artificial Sequence
  Description of Artificial Sequence: Synthetic oligonucleotide
  Sense strand starting at position 2588 of SEQ ID NO: 588029
uuaucuauggcuugaauac

SEQ ID NO: 836769 - RNA, 19 nt, Artificial Sequence
  Description of Artificial Sequence: Synthetic oligonucleotide
  Antisense strand to SEQ ID NO: 836768
guauucaagccauagauaa

SEQ ID NO: 836770 - RNA, 19 nt, Artificial Sequence
  Description of Artificial Sequence: Synthetic oligonucleotide
  Sense strand starting at position 2647 of SEQ ID NO: 588029
ggagaugcuuucuccagua

SEQ ID NO: 836771 - RNA, 19 nt, Artificial Sequence
  Description of Artificial Sequence: Synthetic oligonucleotide
  Antisense strand to SEQ ID NO: 836770
uacuggagaaagcaucucc

SEQ ID NO: 836772 - RNA, 19 nt, Artificial Sequence
  Description of Artificial Sequence: Synthetic oligonucleotide
  Sense strand starting at position 2649 of SEQ ID NO: 588029
agaugcuuucuccaguaau

SEQ ID NO: 836773 - RNA, 19 nt, Artificial Sequence
  Description of Artificial Sequence: Synthetic oligonucleotide
  Antisense strand to SEQ ID NO: 836772
auuacuggagaaagcaucu

SEQ ID NO: 836774 - RNA, 19 nt, Artificial Sequence
  Description of Artificial Sequence: Synthetic oligonucleotide
  Sense strand starting at position 2652 of SEQ ID NO: 588029
ugcuuucuccaguaaugag

SEQ ID NO: 836775 - RNA, 19 nt, Artificial Sequence
  Description of Artificial Sequence: Synthetic oligonucleotide
  Antisense strand to SEQ ID NO: 836774
cucauuacuggagaaagca

SEQ ID NO: 836776 - RNA, 19 nt, Artificial Sequence
  Description of Artificial Sequence: Synthetic oligonucleotide
  Sense strand starting at position 2842 of SEQ ID NO: 588029
uaguuucucuacuuggaga

SEQ ID NO: 836777 - RNA, 19 nt, Artificial Sequence
  Description of Artificial Sequence: Synthetic oligonucleotide
  Antisense strand to SEQ ID NO: 836776
ucuccaaguagagaaacua

SEQ ID NO: 836778 - RNA, 19 nt, Artificial Sequence
  Description of Artificial Sequence: Synthetic oligonucleotide
  Sense strand starting at position 2844 of SEQ ID NO: 588029
guuucucuacuuggagaau

SEQ ID NO: 836779 - RNA, 19 nt, Artificial Sequence
  Description of Artificial Sequence: Synthetic oligonucleotide
  Antisense strand to SEQ ID NO: 836778
auucuccaaguagagaaac

SEQ ID NO: 836780 - RNA, 19 nt, Artificial Sequence
  Description of Artificial Sequence: Synthetic oligonucleotide
  Sense strand starting at position 2994 of SEQ ID NO: 588029
caggaacucuguuuauaga

SEQ ID NO: 836781 - RNA, 19 nt, Artificial Sequence
  Description of Artificial Sequence: Synthetic oligonucleotide
  Antisense strand to SEQ ID NO: 836780
ucuauaaacagaguuccug

SEQ ID NO: 836782 - RNA, 19 nt, Artificial Sequence
  Description of Artificial Sequence: Synthetic oligonucleotide
  Sense strand starting at position 3022 of SEQ ID NO: 588029
ugacaucuaucuuugguaa

SEQ ID NO: 836783 - RNA, 19 nt, Artificial Sequence
  Description of Artificial Sequence: Synthetic oligonucleotide
  Antisense strand to SEQ ID NO: 836782
uuaccaaagauagauguca

SEQ ID NO: 836784 - RNA, 19 nt, Artificial Sequence
  Description of Artificial Sequence: Synthetic oligonucleotide
  Sense strand starting at position 3044 of SEQ ID NO: 588029
ugcaauaugcucuaaguuu

SEQ ID NO: 836785 - RNA, 19 nt, Artificial Sequence
  Description of Artificial Sequence: Synthetic oligonucleotide
  Antisense strand to SEQ ID NO: 836784
aaacuuagagcauauugca

SEQ ID NO: 836786 - RNA, 19 nt, Artificial Sequence
  Description of Artificial Sequence: Synthetic oligonucleotide
  Sense strand starting at position 3166 of SEQ ID NO: 588029
ccucuagucuaguuagaau

SEQ ID NO: 836787 - RNA, 19 nt, Artificial Sequence
  Description of Artificial Sequence: Synthetic oligonucleotide
  Antisense strand to SEQ ID NO: 836786
auucuaacuagacuagagg

SEQ ID NO: 836788 - RNA, 19 nt, Artificial Sequence
  Description of Artificial Sequence: Synthetic oligonucleotide
  Sense strand starting at position 3179 of SEQ ID NO: 588029
uagaauaaacgccgguaaa

SEQ ID NO: 836789 - RNA, 19 nt, Artificial Sequence
  Description of Artificial Sequence: Synthetic oligonucleotide
  Antisense strand to SEQ ID NO: 836788
uuuaccggcguuuauucua

SEQ ID NO: 836790 - RNA, 19 nt, Artificial Sequence
  Description of Artificial Sequence: Synthetic oligonucleotide
  Sense strand starting at position 3182 of SEQ ID NO: 588029
aauaaacgccgguaaagua

SEQ ID NO: 836791 - RNA, 19 nt, Artificial Sequence
  Description of Artificial Sequence: Synthetic oligonucleotide
  Antisense strand to SEQ ID NO: 836790
uacuuuaccggcguuuauu

SEQ ID NO: 836792 - RNA, 19 nt, Artificial Sequence
  Description of Artificial Sequence: Synthetic oligonucleotide
  Sense strand starting at position 3205 of SEQ ID NO: 588029
uuguuaucaagucggauuu

SEQ ID NO: 836793 - RNA, 19 nt, Artificial Sequence
  Description of Artificial Sequence: Synthetic oligonucleotide
  Antisense strand to SEQ ID NO: 836792
aaauccgacuugauaacaa

SEQ ID NO: 836794 - RNA, 19 nt, Artificial Sequence
  Description of Artificial Sequence: Synthetic oligonucleotide
  Sense strand starting at position 3321 of SEQ ID NO: 588029
cuggaaauggauggcuuua

SEQ ID NO: 836795 - RNA, 19 nt, Artificial Sequence
  Description of Artificial Sequence: Synthetic oligonucleotide
  Antisense strand to SEQ ID NO: 836794
uaaagccauccauuuccag

SEQ ID NO: 836796 - RNA, 19 nt, Artificial Sequence
  Description of Artificial Sequence: Synthetic oligonucleotide
  Sense strand starting at position 3323 of SEQ ID NO: 588029
ggaaauggauggcuuuaua

SEQ ID NO: 836797 - RNA, 19 nt, Artificial Sequence
  Description of Artificial Sequence: Synthetic oligonucleotide
  Antisense strand to SEQ ID NO: 836796
uauaaagccauccauuucc

SEQ ID NO: 836798 - RNA, 19 nt, Artificial Sequence
  Description of Artificial Sequence: Synthetic oligonucleotide
  Sense strand starting at position 3350 of SEQ ID NO: 588029
ugcagaguaguugaacuca

SEQ ID NO: 836799 - RNA, 19 nt, Artificial Sequence
  Description of Artificial Sequence: Synthetic oligonucleotide
  Antisense strand to SEQ ID NO: 836798
ugaguucaacuacucugca

SEQ ID NO: 836800 - RNA, 19 nt, Artificial Sequence
  Description of Artificial Sequence: Synthetic oligonucleotide
  Sense strand starting at position 3450 of SEQ ID NO: 588029
ccaggaaaucuguacugua

SEQ ID NO: 836801 - RNA, 19 nt, Artificial Sequence
  Description of Artificial Sequence: Synthetic oligonucleotide
  Antisense strand to SEQ ID NO: 836800
uacaguacagauuuccugg

SEQ ID NO: 836802 - RNA, 19 nt, Artificial Sequence
  Description of Artificial Sequence: Synthetic oligonucleotide
  Sense strand starting at position 3568 of SEQ ID NO: 588029
uagguuccugcuggaucaa

SEQ ID NO: 836803 - RNA, 19 nt, Artificial Sequence
  Description of Artificial Sequence: Synthetic oligonucleotide
  Antisense strand to SEQ ID NO: 836802
uugauccagcaggaaccua

SEQ ID NO: 836804 - RNA, 19 nt, Artificial Sequence
  Description of Artificial Sequence: Synthetic oligonucleotide
  Sense strand starting at position 3569 of SEQ ID NO: 588029
agguuccugcuggaucaau

SEQ ID NO: 836805 - RNA, 19 nt, Artificial Sequence
  Description of Artificial Sequence: Synthetic oligonucleotide
  Antisense strand to SEQ ID NO: 836804
auugauccagcaggaaccu

SEQ ID NO: 836806 - RNA, 19 nt, Artificial Sequence
  Description of Artificial Sequence: Synthetic oligonucleotide
  Sense strand starting at position 3579 of SEQ ID NO: 588029
uggaucaauuauucuguga

SEQ ID NO: 836807 - RNA, 19 nt, Artificial Sequence
  Description of Artificial Sequence: Synthetic oligonucleotide
  Antisense strand to SEQ ID NO: 836806
ucacagaauaauugaucca

SEQ ID NO: 836808 - RNA, 19 nt, Artificial Sequence
  Description of Artificial Sequence: Synthetic oligonucleotide
  Sense strand starting at position 3747 of SEQ ID NO: 588029
gcggcaacuguagaucaua

SEQ ID NO: 836809 - RNA, 19 nt, Artificial Sequence
  Description of Artificial Sequence: Synthetic oligonucleotide
  Antisense strand to SEQ ID NO: 836808
uaugaucuacaguugccgc

SEQ ID NO: 836810 - RNA, 19 nt, Artificial Sequence
  Description of Artificial Sequence: Synthetic oligonucleotide
  Sense strand starting at position 3755 of SEQ ID NO: 588029
uguagaucauagccaaaga

SEQ ID NO: 836811 - RNA, 19 nt, Artificial Sequence
  Description of Artificial Sequence: Synthetic oligonucleotide
  Antisense strand to SEQ ID NO: 836810
ucuuuggcuaugaucuaca

SEQ ID NO: 836812 - RNA, 19 nt, Artificial Sequence
  Description of Artificial Sequence: Synthetic oligonucleotide
  Sense strand starting at position 590 of SEQ ID NO: 588030
agggauccaugagggaauu

SEQ ID NO: 836813 - RNA, 19 nt, Artificial Sequence
  Description of Artificial Sequence: Synthetic oligonucleotide
  Antisense strand to SEQ ID NO: 836812
aauucccucauggaucccu

SEQ ID NO: 836814 - RNA, 19 nt, Artificial Sequence
  Description of Artificial Sequence: Synthetic oligonucleotide
  Sense strand starting at position 644 of SEQ ID NO: 588030
agaaguaugccacauacuc

SEQ ID NO: 836815 - RNA, 19 nt, Artificial Sequence
  Description of Artificial Sequence: Synthetic oligonucleotide
  Antisense strand to SEQ ID NO: 836814
gaguauguggcauacuucu

SEQ ID NO: 836816 - RNA, 19 nt, Artificial Sequence
  Description of Artificial Sequence: Synthetic oligonucleotide
  Sense strand starting at position 770 of SEQ ID NO: 588030
guaguuaagaugcaugaac

SEQ ID NO: 836817 - RNA, 19 nt, Artificial Sequence
  Description of Artificial Sequence: Synthetic oligonucleotide
  Antisense strand to SEQ ID NO: 836816
guucaugcaucuuaacuac

SEQ ID NO: 836818 - RNA, 19 nt, Artificial Sequence
  Description of Artificial Sequence: Synthetic oligonucleotide
  Sense strand starting at position 772 of SEQ ID NO: 588030
aguuaagaugcaugaacuu

SEQ ID NO: 836819 - RNA, 19 nt, Artificial Sequence
  Description of Artificial Sequence: Synthetic oligonucleotide
  Antisense strand to SEQ ID NO: 836818
aaguucaugcaucuuaacu

SEQ ID NO: 836820 - RNA, 19 nt, Artificial Sequence
  Description of Artificial Sequence: Synthetic oligonucleotide
  Sense strand starting at position 826 of SEQ ID NO: 588030
acuugcuagaugugugauu

SEQ ID NO: 836821 - RNA, 19 nt, Artificial Sequence
  Description of Artificial Sequence: Synthetic oligonucleotide
  Antisense strand to SEQ ID NO: 836820
aaucacacaucuagcaagu

SEQ ID NO: 836822 - RNA, 19 nt, Artificial Sequence
  Description of Artificial Sequence: Synthetic oligonucleotide
  Sense strand starting at position 827 of SEQ ID NO: 588030
cuugcuagaugugugauuu

SEQ ID NO: 836823 - RNA, 19 nt, Artificial Sequence
  Description of Artificial Sequence: Synthetic oligonucleotide
  Antisense strand to SEQ ID NO: 836822
aaaucacacaucuagcaag

SEQ ID NO: 836824 - RNA, 19 nt, Artificial Sequence
  Description of Artificial Sequence: Synthetic oligonucleotide
  Sense strand starting at position 828 of SEQ ID NO: 588030
uugcuagaugugugauuug

SEQ ID NO: 836825 - RNA, 19 nt, Artificial Sequence
  Description of Artificial Sequence: Synthetic oligonucleotide
  Antisense strand to SEQ ID NO: 836824
caaaucacacaucuagcaa

SEQ ID NO: 836826 - RNA, 19 nt, Artificial Sequence
  Description of Artificial Sequence: Synthetic oligonucleotide
  Sense strand starting at position 1003 of SEQ ID NO: 588030
ugguuuagugaccagcaga

SEQ ID NO: 836827 - RNA, 19 nt, Artificial Sequence
  Description of Artificial Sequence: Synthetic oligonucleotide
  Antisense strand to SEQ ID NO: 836826
ucugcuggucacuaaacca

SEQ ID NO: 836828 - RNA, 19 nt, Artificial Sequence
  Description of Artificial Sequence: Synthetic oligonucleotide
  Sense strand starting at position 1037 of SEQ ID NO: 588030
uuuagauagcacugagguu

SEQ ID NO: 836829 - RNA, 19 nt, Artificial Sequence
  Description of Artificial Sequence: Synthetic oligonucleotide
  Antisense strand to SEQ ID NO: 836828
aaccucagugcuaucuaaa

SEQ ID NO: 836830 - RNA, 19 nt, Artificial Sequence
  Description of Artificial Sequence: Synthetic oligonucleotide
  Sense strand starting at position 1038 of SEQ ID NO: 588030
uuagauagcacugagguuu

SEQ ID NO: 836831 - RNA, 19 nt, Artificial Sequence
  Description of Artificial Sequence: Synthetic oligonucleotide
  Antisense strand to SEQ ID NO: 836830
aaaccucagugcuaucuaa

SEQ ID NO: 836832 - RNA, 19 nt, Artificial Sequence
  Description of Artificial Sequence: Synthetic oligonucleotide
  Sense strand starting at position 1049 of SEQ ID NO: 588030
ugagguuuccuguacaagg

SEQ ID NO: 836833 - RNA, 19 nt, Artificial Sequence
  Description of Artificial Sequence: Synthetic oligonucleotide
  Antisense strand to SEQ ID NO: 836832
ccuuguacaggaaaccuca

SEQ ID NO: 836834 - RNA, 19 nt, Artificial Sequence
  Description of Artificial Sequence: Synthetic oligonucleotide
  Sense strand starting at position 1186 of SEQ ID NO: 588030
gccagacccugacuguaaa

SEQ ID NO: 836835 - RNA, 19 nt, Artificial Sequence
  Description of Artificial Sequence: Synthetic oligonucleotide
  Antisense strand to SEQ ID NO: 836834
uuuacagucagggucuggc

SEQ ID NO: 836836 - RNA, 19 nt, Artificial Sequence
  Description of Artificial Sequence: Synthetic oligonucleotide
  Sense strand starting at position 1307 of SEQ ID NO: 588030
cucuuacgguuauugugau

SEQ ID NO: 836837 - RNA, 19 nt, Artificial Sequence
  Description of Artificial Sequence: Synthetic oligonucleotide
  Antisense strand to SEQ ID NO: 836836
aucacaauaaccguaagag

SEQ ID NO: 836838 - RNA, 19 nt, Artificial Sequence
  Description of Artificial Sequence: Synthetic oligonucleotide
  Sense strand starting at position 1317 of SEQ ID NO: 588030
uauugugaugcucagugau

SEQ ID NO: 836839 - RNA, 19 nt, Artificial Sequence
  Description of Artificial Sequence: Synthetic oligonucleotide
  Antisense strand to SEQ ID NO: 836838
aucacugagcaucacaaua

SEQ ID NO: 836840 - RNA, 19 nt, Artificial Sequence
  Description of Artificial Sequence: Synthetic oligonucleotide
  Sense strand starting at position 1319 of SEQ ID NO: 588030
uugugaugcucagugauuu

SEQ ID NO: 836841 - RNA, 19 nt, Artificial Sequence
  Description of Artificial Sequence: Synthetic oligonucleotide
  Antisense strand to SEQ ID NO: 836840
aaaucacugagcaucacaa

SEQ ID NO: 836842 - RNA, 19 nt, Artificial Sequence
  Description of Artificial Sequence: Synthetic oligonucleotide
  Sense strand starting at position 1320 of SEQ ID NO: 588030
ugugaugcucagugauuua

SEQ ID NO: 836843 - RNA, 19 nt, Artificial Sequence
  Description of Artificial Sequence: Synthetic oligonucleotide
  Antisense strand to SEQ ID NO: 836842
uaaaucacugagcaucaca

SEQ ID NO: 836844 - RNA, 19 nt, Artificial Sequence
  Description of Artificial Sequence: Synthetic oligonucleotide
  Sense strand starting at position 1323 of SEQ ID NO: 588030
gaugcucagugauuuaguu

SEQ ID NO: 836845 - RNA, 19 nt, Artificial Sequence
  Description of Artificial Sequence: Synthetic oligonucleotide
  Antisense strand to SEQ ID NO: 836844
aacuaaaucacugagcauc

SEQ ID NO: 836846 - RNA, 19 nt, Artificial Sequence
  Description of Artificial Sequence: Synthetic oligonucleotide
  Sense strand starting at position 1374 of SEQ ID NO: 588030
uagcaagugcuguaugaaa

SEQ ID NO: 836847 - RNA, 19 nt, Artificial Sequence
  Description of Artificial Sequence: Synthetic oligonucleotide
  Antisense strand to SEQ ID NO: 836846
uuucauacagcacuugcua

SEQ ID NO: 836848 - RNA, 19 nt, Artificial Sequence
  Description of Artificial Sequence: Synthetic oligonucleotide
  Sense strand starting at position 1516 of SEQ ID NO: 588030
cagagaucugcugagcaaa

SEQ ID NO: 836849 - RNA, 19 nt, Artificial Sequence
  Description of Artificial Sequence: Synthetic oligonucleotide
  Antisense strand to SEQ ID NO: 836848
uuugcucagcagaucucug

SEQ ID NO: 836850 - RNA, 19 nt, Artificial Sequence
  Description of Artificial Sequence: Synthetic oligonucleotide
  Sense strand starting at position 1518 of SEQ ID NO: 588030
gagaucugcugagcaaauc

SEQ ID NO: 836851 - RNA, 19 nt, Artificial Sequence
  Description of Artificial Sequence: Synthetic oligonucleotide
  Antisense strand to SEQ ID NO: 836850
gauuugcucagcagaucuc

SEQ ID NO: 836852 - RNA, 19 nt, Artificial Sequence
  Description of Artificial Sequence: Synthetic oligonucleotide
  Sense strand starting at position 1578 of SEQ ID NO: 588030
uaugauuccggacgaauuc

SEQ ID NO: 836853 - RNA, 19 nt, Artificial Sequence
  Description of Artificial Sequence: Synthetic oligonucleotide
  Antisense strand to SEQ ID NO: 836852
gaauucguccggaaucaua

SEQ ID NO: 836854 - RNA, 19 nt, Artificial Sequence
  Description of Artificial Sequence: Synthetic oligonucleotide
  Sense strand starting at position 2323 of SEQ ID NO: 588030
cccggugagcuuugggaga

SEQ ID NO: 836855 - RNA, 19 nt, Artificial Sequence
  Description of Artificial Sequence: Synthetic oligonucleotide
  Antisense strand to SEQ ID NO: 836854
ucucccaaagcucaccggg

SEQ ID NO: 836856 - RNA, 19 nt, Artificial Sequence
  Description of Artificial Sequence: Synthetic oligonucleotide
  Sense strand starting at position 2375 of SEQ ID NO: 588030
uagguuugggcuuggaguu

SEQ ID NO: 836857 - RNA, 19 nt, Artificial Sequence
  Description of Artificial Sequence: Synthetic oligonucleotide
  Antisense strand to SEQ ID NO: 836856
aacuccaagcccaaaccua

SEQ ID NO: 836858 - RNA, 19 nt, Artificial Sequence
  Description of Artificial Sequence: Synthetic oligonucleotide
  Sense strand starting at position 2567 of SEQ ID NO: 588030
aguggagguuaauuccaau

SEQ ID NO: 836859 - RNA, 19 nt, Artificial Sequence
  Description of Artificial Sequence: Synthetic oligonucleotide
  Antisense strand to SEQ ID NO: 836858
auuggaauuaaccuccacu

SEQ ID NO: 836860 - RNA, 19 nt, Artificial Sequence
  Description of Artificial Sequence: Synthetic oligonucleotide
  Sense strand starting at position 2660 of SEQ ID NO: 588030
uuggaaggccuguagcuau

SEQ ID NO: 836861 - RNA, 19 nt, Artificial Sequence
  Description of Artificial Sequence: Synthetic oligonucleotide
  Antisense strand to SEQ ID NO: 836860
auagcuacaggccuuccaa

SEQ ID NO: 836862 - RNA, 19 nt, Artificial Sequence
  Description of Artificial Sequence: Synthetic oligonucleotide
  Sense strand starting at position 3126 of SEQ ID NO: 588030
uaguguuuaucucugguga

SEQ ID NO: 836863 - RNA, 19 nt, Artificial Sequence
  Description of Artificial Sequence: Synthetic oligonucleotide
  Antisense strand to SEQ ID NO: 836862
ucaccagagauaaacacua

SEQ ID NO: 836864 - RNA, 19 nt, Artificial Sequence
  Description of Artificial Sequence: Synthetic oligonucleotide
  Sense strand starting at position 3127 of SEQ ID NO: 588030
aguguuuaucucuggugaa

SEQ ID NO: 836865 - RNA, 19 nt, Artificial Sequence
  Description of Artificial Sequence: Synthetic oligonucleotide
  Antisense strand to SEQ ID NO: 836864
uucaccagagauaaacacu

SEQ ID NO: 836866 - RNA, 19 nt, Artificial Sequence
  Description of Artificial Sequence: Synthetic oligonucleotide
  Sense strand starting at position 3209 of SEQ ID NO: 588030
uguuuauauuugcaaugag

SEQ ID NO: 836867 - RNA, 19 nt, Artificial Sequence
  Description of Artificial Sequence: Synthetic oligonucleotide
  Antisense strand to SEQ ID NO: 836866
cucauugcaaauauaaaca

SEQ ID NO: 836868 - RNA, 19 nt, Artificial Sequence
  Description of Artificial Sequence: Synthetic oligonucleotide
  Sense strand starting at position 3319 of SEQ ID NO: 588030
agucucaaagcugauaaau

SEQ ID NO: 836869 - RNA, 19 nt, Artificial Sequence
  Description of Artificial Sequence: Synthetic oligonucleotide
  Antisense strand to SEQ ID NO: 836868
auuuaucagcuuugagacu

SEQ ID NO: 836870 - RNA, 19 nt, Artificial Sequence
  Description of Artificial Sequence: Synthetic oligonucleotide
  Sense strand starting at position 3453 of SEQ ID NO: 588030
ccuuuaaagugagugggaa

SEQ ID NO: 836871 - RNA, 19 nt, Artificial Sequence
  Description of Artificial Sequence: Synthetic oligonucleotide
  Antisense strand to SEQ ID NO: 836870
uucccacucacuuuaaagg

SEQ ID NO: 836872 - RNA, 19 nt, Artificial Sequence
  Description of Artificial Sequence: Synthetic oligonucleotide
  Sense strand starting at position 3454 of SEQ ID NO: 588030
cuuuaaagugagugggaaa

SEQ ID NO: 836873 - RNA, 19 nt, Artificial Sequence
  Description of Artificial Sequence: Synthetic oligonucleotide
  Antisense strand to SEQ ID NO: 836872
uuucccacucacuuuaaag

SEQ ID NO: 836874 - RNA, 19 nt, Artificial Sequence
  Description of Artificial Sequence: Synthetic oligonucleotide
  Sense strand starting at position 3562 of SEQ ID NO: 588030
agcaucauauauuaaggaa

SEQ ID NO: 836875 - RNA, 19 nt, Artificial Sequence
  Description of Artificial Sequence: Synthetic oligonucleotide
  Antisense strand to SEQ ID NO: 836874
uuccuuaauauaugaugcu

SEQ ID NO: 836876 - RNA, 19 nt, Artificial Sequence
  Description of Artificial Sequence: Synthetic oligonucleotide
  Sense strand starting at position 3598 of SEQ ID NO: 588030
gacaaauggugagagaauu

SEQ ID NO: 836877 - RNA, 19 nt, Artificial Sequence
  Description of Artificial Sequence: Synthetic oligonucleotide
  Antisense strand to SEQ ID NO: 836876
aauucucucaccauuuguc

SEQ ID NO: 836878 - RNA, 19 nt, Artificial Sequence
  Description of Artificial Sequence: Synthetic oligonucleotide
  Sense strand starting at position 3702 of SEQ ID NO: 588030
cucguuaaagcauaaauca

SEQ ID NO: 836879 - RNA, 19 nt, Artificial Sequence
  Description of Artificial Sequence: Synthetic oligonucleotide
  Antisense strand to SEQ ID NO: 836878
ugauuuaugcuuuaacgag

SEQ ID NO: 836880 - RNA, 19 nt, Artificial Sequence
  Description of Artificial Sequence: Synthetic oligonucleotide
  Sense strand starting at position 3782 of SEQ ID NO: 588030
gcaacaaagcacgaugaau

SEQ ID NO: 836881 - RNA, 19 nt, Artificial Sequence
  Description of Artificial Sequence: Synthetic oligonucleotide
  Antisense strand to SEQ ID NO: 836880
auucaucgugcuuuguugc

SEQ ID NO: 836882 - RNA, 19 nt, Artificial Sequence
  Description of Artificial Sequence: Synthetic oligonucleotide
  Sense strand starting at position 3799 of SEQ ID NO: 588030
auggaaugguaccucacaa

SEQ ID NO: 836883 - RNA, 19 nt, Artificial Sequence
  Description of Artificial Sequence: Synthetic oligonucleotide
  Antisense strand to SEQ ID NO: 836882
uugugagguaccauuccau

SEQ ID NO: 836884 - RNA, 19 nt, Artificial Sequence
  Description of Artificial Sequence: Synthetic oligonucleotide
  Sense strand starting at position 3875 of SEQ ID NO: 588030
agguguaguggugagaaca

SEQ ID NO: 836885 - RNA, 19 nt, Artificial Sequence
  Description of Artificial Sequence: Synthetic oligonucleotide
  Antisense strand to SEQ ID NO: 836884
uguucucaccacuacaccu

SEQ ID NO: 836886 - RNA, 19 nt, Artificial Sequence
  Description of Artificial Sequence: Synthetic oligonucleotide
  Sense strand starting at position 3885 of SEQ ID NO: 588030
gugagaacauccuugugga

SEQ ID NO: 836887 - RNA, 19 nt, Artificial Sequence
  Description of Artificial Sequence: Synthetic oligonucleotide
  Antisense strand to SEQ ID NO: 836886
uccacaaggauguucucac

SEQ ID NO: 836888 - RNA, 19 nt, Artificial Sequence
  Description of Artificial Sequence: Synthetic oligonucleotide
  Sense strand starting at position 3886 of SEQ ID NO: 588030
ugagaacauccuuguggag

SEQ ID NO: 836889 - RNA, 19 nt, Artificial Sequence
  Description of Artificial Sequence: Synthetic oligonucleotide
  Antisense strand to SEQ ID NO: 836888
cuccacaaggauguucuca

SEQ ID NO: 836890 - RNA, 19 nt, Artificial Sequence
  Description of Artificial Sequence: Synthetic oligonucleotide
  Sense strand starting at position 3950 of SEQ ID NO: 588030
cagguuuagccuggcaaua

SEQ ID NO: 836891 - RNA, 19 nt, Artificial Sequence
  Description of Artificial Sequence: Synthetic oligonucleotide
  Antisense strand to SEQ ID NO: 836890
uauugccaggcuaaaccug

SEQ ID NO: 836892 - RNA, 19 nt, Artificial Sequence
  Description of Artificial Sequence: Synthetic oligonucleotide
  Sense strand starting at position 40 of SEQ ID NO: 588031
acagcaagccgauaaucua

SEQ ID NO: 836893 - RNA, 19 nt, Artificial Sequence
  Description of Artificial Sequence: Synthetic oligonucleotide
  Antisense strand to SEQ ID NO: 836892
uagauuaucggcuugcugu

SEQ ID NO: 836894 - RNA, 19 nt, Artificial Sequence
  Description of Artificial Sequence: Synthetic oligonucleotide
  Sense strand starting at position 229 of SEQ ID NO: 588031
ucacgaucauguuugauau

SEQ ID NO: 836895 - RNA, 19 nt, Artificial Sequence
  Description of Artificial Sequence: Synthetic oligonucleotide
  Antisense strand to SEQ ID NO: 836894
auaucaaacaugaucguga

SEQ ID NO: 836896 - RNA, 19 nt, Artificial Sequence
  Description of Artificial Sequence: Synthetic oligonucleotide
  Sense strand starting at position 230 of SEQ ID NO: 588031
cacgaucauguuugauaug

SEQ ID NO: 836897 - RNA, 19 nt, Artificial Sequence
  Description of Artificial Sequence: Synthetic oligonucleotide
  Antisense strand to SEQ ID NO: 836896
cauaucaaacaugaucgug

SEQ ID NO: 836898 - RNA, 19 nt, Artificial Sequence
  Description of Artificial Sequence: Synthetic oligonucleotide
  Sense strand starting at position 237 of SEQ ID NO: 588031
auguuugauauguaagcgu

SEQ ID NO: 836899 - RNA, 19 nt, Artificial Sequence
  Description of Artificial Sequence: Synthetic oligonucleotide
  Antisense strand to SEQ ID NO: 836898
acgcuuacauaucaaacau

SEQ ID NO: 836900 - RNA, 19 nt, Artificial Sequence
  Description of Artificial Sequence: Synthetic oligonucleotide
  Sense strand starting at position 241 of SEQ ID NO: 588031
uugauauguaagcguagua

SEQ ID NO: 836901 - RNA, 19 nt, Artificial Sequence
  Description of Artificial Sequence: Synthetic oligonucleotide
  Antisense strand to SEQ ID NO: 836900
uacuacgcuuacauaucaa

SEQ ID NO: 836902 - RNA, 19 nt, Artificial Sequence
  Description of Artificial Sequence: Synthetic oligonucleotide
  Sense strand starting at position 305 of SEQ ID NO: 588031
ggguuaaauuuacacugca

SEQ ID NO: 836903 - RNA, 19 nt, Artificial Sequence
  Description of Artificial Sequence: Synthetic oligonucleotide
  Antisense strand to SEQ ID NO: 836902
ugcaguguaaauuuaaccc

SEQ ID NO: 836904 - RNA, 19 nt, Artificial Sequence
  Description of Artificial Sequence: Synthetic oligonucleotide
  Sense strand starting at position 416 of SEQ ID NO: 588031
uccuuuggcgguuaugaau

SEQ ID NO: 836905 - RNA, 19 nt, Artificial Sequence
  Description of Artificial Sequence: Synthetic oligonucleotide
  Antisense strand to SEQ ID NO: 836904
auucauaaccgccaaagga

SEQ ID NO: 836906 - RNA, 19 nt, Artificial Sequence
  Description of Artificial Sequence: Synthetic oligonucleotide
  Sense strand starting at position 490 of SEQ ID NO: 588031
gggcuaacagucugaauug

SEQ ID NO: 836907 - RNA, 19 nt, Artificial Sequence
  Description of Artificial Sequence: Synthetic oligonucleotide
  Antisense strand to SEQ ID NO: 836906
caauucagacuguuagccc

SEQ ID NO: 836908 - RNA, 19 nt, Artificial Sequence
  Description of Artificial Sequence: Synthetic oligonucleotide
  Sense strand starting at position 565 of SEQ ID NO: 588031
gugccuuggcagcaaacau

SEQ ID NO: 836909 - RNA, 19 nt, Artificial Sequence
  Description of Artificial Sequence: Synthetic oligonucleotide
  Antisense strand to SEQ ID NO: 836908
auguuugcugccaaggcac

SEQ ID NO: 836910 - RNA, 19 nt, Artificial Sequence
  Description of Artificial Sequence: Synthetic oligonucleotide
  Sense strand starting at position 767 of SEQ ID NO: 588031
auucucuagccuugaaaga

SEQ ID NO: 836911 - RNA, 19 nt, Artificial Sequence
  Description of Artificial Sequence: Synthetic oligonucleotide
  Antisense strand to SEQ ID NO: 836910
ucuuucaaggcuagagaau

SEQ ID NO: 836912 - RNA, 19 nt, Artificial Sequence
  Description of Artificial Sequence: Synthetic oligonucleotide
  Sense strand starting at position 768 of SEQ ID NO: 588031
uucucuagccuugaaagaa

SEQ ID NO: 836913 - RNA, 19 nt, Artificial Sequence
  Description of Artificial Sequence: Synthetic oligonucleotide
  Antisense strand to SEQ ID NO: 836912
uucuuucaaggcuagagaa

SEQ ID NO: 836914 - RNA, 19 nt, Artificial Sequence
  Description of Artificial Sequence: Synthetic oligonucleotide
  Sense strand starting at position 932 of SEQ ID NO: 588031
ccaauccugucuuccaguu

SEQ ID NO: 836915 - RNA, 19 nt, Artificial Sequence
  Description of Artificial Sequence: Synthetic oligonucleotide
  Antisense strand to SEQ ID NO: 836914
aacuggaagacaggauugg

SEQ ID NO: 836916 - RNA, 19 nt, Artificial Sequence
  Description of Artificial Sequence: Synthetic oligonucleotide
  Sense strand starting at position 1147 of SEQ ID NO: 588031
ccaggucuguaaucuccau

SEQ ID NO: 836917 - RNA, 19 nt, Artificial Sequence
  Description of Artificial Sequence: Synthetic oligonucleotide
  Antisense strand to SEQ ID NO: 836916
auggagauuacagaccugg

SEQ ID NO: 836918 - RNA, 19 nt, Artificial Sequence
  Description of Artificial Sequence: Synthetic oligonucleotide
  Sense strand starting at position 1151 of SEQ ID NO: 588031
gucuguaaucuccaugcaa

SEQ ID NO: 836919 - RNA, 19 nt, Artificial Sequence
  Description of Artificial Sequence: Synthetic oligonucleotide
  Antisense strand to SEQ ID NO: 836918
uugcauggagauuacagac

SEQ ID NO: 836920 - RNA, 19 nt, Artificial Sequence
  Description of Artificial Sequence: Synthetic oligonucleotide
  Sense strand starting at position 1648 of SEQ ID NO: 588031
cgagcuaggccgcaugaaa

SEQ ID NO: 836921 - RNA, 19 nt, Artificial Sequence
  Description of Artificial Sequence: Synthetic oligonucleotide
  Antisense strand to SEQ ID NO: 836920
uuucaugcggccuagcucg

SEQ ID NO: 836922 - RNA, 19 nt, Artificial Sequence
  Description of Artificial Sequence: Synthetic oligonucleotide
  Sense strand starting at position 2399 of SEQ ID NO: 588031
cuagcucuuaaggguuaga

SEQ ID NO: 836923 - RNA, 19 nt, Artificial Sequence
  Description of Artificial Sequence: Synthetic oligonucleotide
  Antisense strand to SEQ ID NO: 836922
ucuaacccuuaagagcuag

SEQ ID NO: 836924 - RNA, 19 nt, Artificial Sequence
  Description of Artificial Sequence: Synthetic oligonucleotide
  Sense strand starting at position 2885 of SEQ ID NO: 588031
ggacauuuguccuagaggg

SEQ ID NO: 836925 - RNA, 19 nt, Artificial Sequence
  Description of Artificial Sequence: Synthetic oligonucleotide
  Antisense strand to SEQ ID NO: 836924
cccucuaggacaaaugucc

SEQ ID NO: 836926 - RNA, 19 nt, Artificial Sequence
  Description of Artificial Sequence: Synthetic oligonucleotide
  Sense strand starting at position 2932 of SEQ ID NO: 588031
ggaggcaacucuccgucau

SEQ ID NO: 836927 - RNA, 19 nt, Artificial Sequence
  Description of Artificial Sequence: Synthetic oligonucleotide
  Antisense strand to SEQ ID NO: 836926
augacggagaguugccucc

SEQ ID NO: 836928 - RNA, 19 nt, Artificial Sequence
  Description of Artificial Sequence: Synthetic oligonucleotide
  Sense strand starting at position 3140 of SEQ ID NO: 588031
aaccgauacucuguucuga

SEQ ID NO: 836929 - RNA, 19 nt, Artificial Sequence
  Description of Artificial Sequence: Synthetic oligonucleotide
  Antisense strand to SEQ ID NO: 836928
ucagaacagaguaucgguu

SEQ ID NO: 836930 - RNA, 19 nt, Artificial Sequence
  Description of Artificial Sequence: Synthetic oligonucleotide
  Sense strand starting at position 3142 of SEQ ID NO: 588031
ccgauacucuguucugaga

SEQ ID NO: 836931 - RNA, 19 nt, Artificial Sequence
  Description of Artificial Sequence: Synthetic oligonucleotide
  Antisense strand to SEQ ID NO: 836930
ucucagaacagaguaucgg

SEQ ID NO: 836932 - RNA, 19 nt, Artificial Sequence
  Description of Artificial Sequence: Synthetic oligonucleotide
  Sense strand starting at position 3183 of SEQ ID NO: 588031
cgucauacucuguagacgu

SEQ ID NO: 836933 - RNA, 19 nt, Artificial Sequence
  Description of Artificial Sequence: Synthetic oligonucleotide
  Antisense strand to SEQ ID NO: 836932
acgucuacagaguaugacg

SEQ ID NO: 836934 - RNA, 19 nt, Artificial Sequence
  Description of Artificial Sequence: Synthetic oligonucleotide
  Sense strand starting at position 3185 of SEQ ID NO: 588031
ucauacucuguagacguua

SEQ ID NO: 836935 - RNA, 19 nt, Artificial Sequence
  Description of Artificial Sequence: Synthetic oligonucleotide
  Antisense strand to SEQ ID NO: 836934
uaacgucuacagaguauga

SEQ ID NO: 836936 - RNA, 19 nt, Artificial Sequence
  Description of Artificial Sequence: Synthetic oligonucleotide
  Sense strand starting at position 3200 of SEQ ID NO: 588031
guuauagugcuggaugucu

SEQ ID NO: 836937 - RNA, 19 nt, Artificial Sequence
  Description of Artificial Sequence: Synthetic oligonucleotide
  Antisense strand to SEQ ID NO: 836936
agacauccagcacuauaac

SEQ ID NO: 836938 - RNA, 19 nt, Artificial Sequence
  Description of Artificial Sequence: Synthetic oligonucleotide
  Sense strand starting at position 3208 of SEQ ID NO: 588031
gcuggaugucuuugguacu

SEQ ID NO: 836939 - RNA, 19 nt, Artificial Sequence
  Description of Artificial Sequence: Synthetic oligonucleotide
  Antisense strand to SEQ ID NO: 836938
aguaccaaagacauccagc

SEQ ID NO: 836940 - RNA, 19 nt, Artificial Sequence
  Description of Artificial Sequence: Synthetic oligonucleotide
  Sense strand starting at position 3219 of SEQ ID NO: 588031
uugguacuauuacaagaaa

SEQ ID NO: 836941 - RNA, 19 nt, Artificial Sequence
  Description of Artificial Sequence: Synthetic oligonucleotide
  Antisense strand to SEQ ID NO: 836940
uuucuuguaauaguaccaa

SEQ ID NO: 836942 - RNA, 19 nt, Artificial Sequence
  Description of Artificial Sequence: Synthetic oligonucleotide
  Sense strand starting at position 3335 of SEQ ID NO: 588031
acguaacccgguuaauacu

SEQ ID NO: 836943 - RNA, 19 nt, Artificial Sequence
  Description of Artificial Sequence: Synthetic oligonucleotide
  Antisense strand to SEQ ID NO: 836942
aguauuaaccggguuacgu

SEQ ID NO: 836944 - RNA, 19 nt, Artificial Sequence
  Description of Artificial Sequence: Synthetic oligonucleotide
  Sense strand starting at position 3343 of SEQ ID NO: 588031
cgguuaauacuagauacug

SEQ ID NO: 836945 - RNA, 19 nt, Artificial Sequence
  Description of Artificial Sequence: Synthetic oligonucleotide
  Antisense strand to SEQ ID NO: 836944
caguaucuaguauuaaccg

SEQ ID NO: 836946 - RNA, 19 nt, Artificial Sequence
  Description of Artificial Sequence: Synthetic oligonucleotide
  Sense strand starting at position 3351 of SEQ ID NO: 588031
acuagauacugagaauuau

SEQ ID NO: 836947 - RNA, 19 nt, Artificial Sequence
  Description of Artificial Sequence: Synthetic oligonucleotide
  Antisense strand to SEQ ID NO: 836946
auaauucucaguaucuagu

SEQ ID NO: 836948 - RNA, 19 nt, Artificial Sequence
  Description of Artificial Sequence: Synthetic oligonucleotide
  Sense strand starting at position 3360 of SEQ ID NO: 588031
ugagaauuaucaguauugg

SEQ ID NO: 836949 - RNA, 19 nt, Artificial Sequence
  Description of Artificial Sequence: Synthetic oligonucleotide
  Antisense strand to SEQ ID NO: 836948
ccaauacugauaauucuca

SEQ ID NO: 836950 - RNA, 19 nt, Artificial Sequence
  Description of Artificial Sequence: Synthetic oligonucleotide
  Sense strand starting at position 3361 of SEQ ID NO: 588031
gagaauuaucaguauuggc

SEQ ID NO: 836951 - RNA, 19 nt, Artificial Sequence
  Description of Artificial Sequence: Synthetic oligonucleotide
  Antisense strand to SEQ ID NO: 836950
gccaauacugauaauucuc

SEQ ID NO: 836952 - RNA, 19 nt, Artificial Sequence
  Description of Artificial Sequence: Synthetic oligonucleotide
  Sense strand starting at position 3641 of SEQ ID NO: 588031
cagagaggcuaugucucaa

SEQ ID NO: 836953 - RNA, 19 nt, Artificial Sequence
  Description of Artificial Sequence: Synthetic oligonucleotide
  Antisense strand to SEQ ID NO: 836952
uugagacauagccucucug

SEQ ID NO: 836954 - RNA, 19 nt, Artificial Sequence
  Description of Artificial Sequence: Synthetic oligonucleotide
  Sense strand starting at position 3703 of SEQ ID NO: 588031
uuaaacguaugcuuuaagu

SEQ ID NO: 836955 - RNA, 19 nt, Artificial Sequence
  Description of Artificial Sequence: Synthetic oligonucleotide
  Antisense strand to SEQ ID NO: 836954
acuuaaagcauacguuuaa

SEQ ID NO: 836956 - RNA, 19 nt, Artificial Sequence
  Description of Artificial Sequence: Synthetic oligonucleotide
  Sense strand starting at position 3705 of SEQ ID NO: 588031
aaacguaugcuuuaaguag

SEQ ID NO: 836957 - RNA, 19 nt, Artificial Sequence
  Description of Artificial Sequence: Synthetic oligonucleotide
  Antisense strand to SEQ ID NO: 836956
cuacuuaaagcauacguuu

SEQ ID NO: 836958 - RNA, 19 nt, Artificial Sequence
  Description of Artificial Sequence: Synthetic oligonucleotide
  Sense strand starting at position 3839 of SEQ ID NO: 588031
agggauuaaauuggucuuu

SEQ ID NO: 836959 - RNA, 19 nt, Artificial Sequence
  Description of Artificial Sequence: Synthetic oligonucleotide
  Antisense strand to SEQ ID NO: 836958
aaagaccaauuuaaucccu

SEQ ID NO: 836960 - RNA, 19 nt, Artificial Sequence
  Description of Artificial Sequence: Synthetic oligonucleotide
  Sense strand starting at position 3912 of SEQ ID NO: 588031
cuuccuugcuuuguugaua

SEQ ID NO: 836961 - RNA, 19 nt, Artificial Sequence
  Description of Artificial Sequence: Synthetic oligonucleotide
  Antisense strand to SEQ ID NO: 836960
uaucaacaaagcaaggaag

SEQ ID NO: 836962 - RNA, 19 nt, Artificial Sequence
  Description of Artificial Sequence: Synthetic oligonucleotide
  Sense strand starting at position 3913 of SEQ ID NO: 588031
uuccuugcuuuguugauaa

SEQ ID NO: 836963 - RNA, 19 nt, Artificial Sequence
  Description of Artificial Sequence: Synthetic oligonucleotide
  Antisense strand to SEQ ID NO: 836962
uuaucaacaaagcaaggaa

SEQ ID NO: 836964 - RNA, 19 nt, Artificial Sequence
  Description of Artificial Sequence: Synthetic oligonucleotide
  Sense strand starting at position 3915 of SEQ ID NO: 588031
ccuugcuuuguugauaaac

SEQ ID NO: 836965 - RNA, 19 nt, Artificial Sequence
  Description of Artificial Sequence: Synthetic oligonucleotide
  Antisense strand to SEQ ID NO: 836964
guuuaucaacaaagcaagg

SEQ ID NO: 836966 - RNA, 19 nt, Artificial Sequence
  Description of Artificial Sequence: Synthetic oligonucleotide
  Sense strand starting at position 3955 of SEQ ID NO: 588031
ggguuucucccuugaggag

SEQ ID NO: 836967 - RNA, 19 nt, Artificial Sequence
  Description of Artificial Sequence: Synthetic oligonucleotide
  Antisense strand to SEQ ID NO: 836966
cuccucaagggagaaaccc

SEQ ID NO: 836968 - RNA, 19 nt, Artificial Sequence
  Description of Artificial Sequence: Synthetic oligonucleotide
  Sense strand starting at position 3956 of SEQ ID NO: 588031
gguuucucccuugaggaga

SEQ ID NO: 836969 - RNA, 19 nt, Artificial Sequence
  Description of Artificial Sequence: Synthetic oligonucleotide
  Antisense strand to SEQ ID NO: 836968
ucuccucaagggagaaacc

SEQ ID NO: 836970 - RNA, 19 nt, Artificial Sequence
  Description of Artificial Sequence: Synthetic oligonucleotide
  Sense strand starting at position 3969 of SEQ ID NO: 588031
aggagaaucuaguaaauug

SEQ ID NO: 836971 - RNA, 19 nt, Artificial Sequence
  Description of Artificial Sequence: Synthetic oligonucleotide
  Antisense strand to SEQ ID NO: 836970
caauuuacuagauucuccu

SEQ ID NO: 836972 - RNA, 19 nt, Artificial Sequence
  Description of Artificial Sequence: Synthetic oligonucleotide
  Sense strand starting at position 237 of SEQ ID NO: 588032
uccagaguacuuggacuca

SEQ ID NO: 836973 - RNA, 19 nt, Artificial Sequence
  Description of Artificial Sequence: Synthetic oligonucleotide
  Antisense strand to SEQ ID NO: 836972
ugaguccaaguacucugga

SEQ ID NO: 836974 - RNA, 19 nt, Artificial Sequence
  Description of Artificial Sequence: Synthetic oligonucleotide
  Sense strand starting at position 248 of SEQ ID NO: 588032
uggacucaugcuuaaaccu

SEQ ID NO: 836975 - RNA, 19 nt, Artificial Sequence
  Description of Artificial Sequence: Synthetic oligonucleotide
  Antisense strand to SEQ ID NO: 836974
agguuuaagcaugagucca

SEQ ID NO: 836976 - RNA, 19 nt, Artificial Sequence
  Description of Artificial Sequence: Synthetic oligonucleotide
  Sense strand starting at position 397 of SEQ ID NO: 588032
cgaaauaaacagcgacuua

SEQ ID NO: 836977 - RNA, 19 nt, Artificial Sequence
  Description of Artificial Sequence: Synthetic oligonucleotide
  Antisense strand to SEQ ID NO: 836976
uaagucgcuguuuauuucg

SEQ ID NO: 836978 - RNA, 19 nt, Artificial Sequence
  Description of Artificial Sequence: Synthetic oligonucleotide
  Sense strand starting at position 456 of SEQ ID NO: 588032
cuaaguaggaaugguuaga

SEQ ID NO: 836979 - RNA, 19 nt, Artificial Sequence
  Description of Artificial Sequence: Synthetic oligonucleotide
  Antisense strand to SEQ ID NO: 836978
ucuaaccauuccuacuuag

SEQ ID NO: 836980 - RNA, 19 nt, Artificial Sequence
  Description of Artificial Sequence: Synthetic oligonucleotide
  Sense strand starting at position 530 of SEQ ID NO: 588032
cugggcaaguccuuuacuu

SEQ ID NO: 836981 - RNA, 19 nt, Artificial Sequence
  Description of Artificial Sequence: Synthetic oligonucleotide
  Antisense strand to SEQ ID NO: 836980
aaguaaaggacuugcccag

SEQ ID NO: 836982 - RNA, 19 nt, Artificial Sequence
  Description of Artificial Sequence: Synthetic oligonucleotide
  Sense strand starting at position 585 of SEQ ID NO: 588032
gcugauaacuuucugguaa

SEQ ID NO: 836983 - RNA, 19 nt, Artificial Sequence
  Description of Artificial Sequence: Synthetic oligonucleotide
  Antisense strand to SEQ ID NO: 836982
uuaccagaaaguuaucagc

SEQ ID NO: 836984 - RNA, 19 nt, Artificial Sequence
  Description of Artificial Sequence: Synthetic oligonucleotide
  Sense strand starting at position 597 of SEQ ID NO: 588032
cugguaaggugguucugaa

SEQ ID NO: 836985 - RNA, 19 nt, Artificial Sequence
  Description of Artificial Sequence: Synthetic oligonucleotide
  Antisense strand to SEQ ID NO: 836984
uucagaaccaccuuaccag

SEQ ID NO: 836986 - RNA, 19 nt, Artificial Sequence
  Description of Artificial Sequence: Synthetic oligonucleotide
  Sense strand starting at position 699 of SEQ ID NO: 588032
gaggcauugagaggaauuc

SEQ ID NO: 836987 - RNA, 19 nt, Artificial Sequence
  Description of Artificial Sequence: Synthetic oligonucleotide
  Antisense strand to SEQ ID NO: 836986
gaauuccucucaaugccuc

SEQ ID NO: 836988 - RNA, 19 nt, Artificial Sequence
  Description of Artificial Sequence: Synthetic oligonucleotide
  Sense strand starting at position 773 of SEQ ID NO: 588032
agaccuagagucugauucu

SEQ ID NO: 836989 - RNA, 19 nt, Artificial Sequence
  Description of Artificial Sequence: Synthetic oligonucleotide
  Antisense strand to SEQ ID NO: 836988
agaaucagacucuaggucu

SEQ ID NO: 836990 - RNA, 19 nt, Artificial Sequence
  Description of Artificial Sequence: Synthetic oligonucleotide
  Sense strand starting at position 786 of SEQ ID NO: 588032
gauucuggcaagugguuua

SEQ ID NO: 836991 - RNA, 19 nt, Artificial Sequence
  Description of Artificial Sequence: Synthetic oligonucleotide
  Antisense strand to SEQ ID NO: 836990
uaaaccacuugccagaauc

SEQ ID NO: 836992 - RNA, 19 nt, Artificial Sequence
  Description of Artificial Sequence: Synthetic oligonucleotide
  Sense strand starting at position 855 of SEQ ID NO: 588032
ggaagccaucagugucauu

SEQ ID NO: 836993 - RNA, 19 nt, Artificial Sequence
  Description of Artificial Sequence: Synthetic oligonucleotide
  Antisense strand to SEQ ID NO: 836992
aaugacacugauggcuucc

SEQ ID NO: 836994 - RNA, 19 nt, Artificial Sequence
  Description of Artificial Sequence: Synthetic oligonucleotide
  Sense strand starting at position 1049 of SEQ ID NO: 588032
gcucuacacggucacauau

SEQ ID NO: 836995 - RNA, 19 nt, Artificial Sequence
  Description of Artificial Sequence: Synthetic oligonucleotide
  Antisense strand to SEQ ID NO: 836994
auaugugaccguguagagc

SEQ ID NO: 836996 - RNA, 19 nt, Artificial Sequence
  Description of Artificial Sequence: Synthetic oligonucleotide
  Sense strand starting at position 1283 of SEQ ID NO: 588032
agcacuguuugcucaauaa

SEQ ID NO: 836997 - RNA, 19 nt, Artificial Sequence
  Description of Artificial Sequence: Synthetic oligonucleotide
  Antisense strand to SEQ ID NO: 836996
uuauugagcaaacagugcu

SEQ ID NO: 836998 - RNA, 19 nt, Artificial Sequence
  Description of Artificial Sequence: Synthetic oligonucleotide
  Sense strand starting at position 1287 of SEQ ID NO: 588032
cuguuugcucaauaaggag

SEQ ID NO: 836999 - RNA, 19 nt, Artificial Sequence
  Description of Artificial Sequence: Synthetic oligonucleotide
  Antisense strand to SEQ ID NO: 836998
cuccuuauugagcaaacag

SEQ ID NO: 837000 - RNA, 19 nt, Artificial Sequence
  Description of Artificial Sequence: Synthetic oligonucleotide
  Sense strand starting at position 2212 of SEQ ID NO: 588032
cacacuagggugugaaauu

SEQ ID NO: 837001 - RNA, 19 nt, Artificial Sequence
  Description of Artificial Sequence: Synthetic oligonucleotide
  Antisense strand to SEQ ID NO: 837000
aauuucacacccuagugug

SEQ ID NO: 837002 - RNA, 19 nt, Artificial Sequence
  Description of Artificial Sequence: Synthetic oligonucleotide
  Sense strand starting at position 2302 of SEQ ID NO: 588032
caggauguccgaggagaua

SEQ ID NO: 837003 - RNA, 19 nt, Artificial Sequence
  Description of Artificial Sequence: Synthetic oligonucleotide
  Antisense strand to SEQ ID NO: 837002
uaucuccucggacauccug

SEQ ID NO: 837004 - RNA, 19 nt, Artificial Sequence
  Description of Artificial Sequence: Synthetic oligonucleotide
  Sense strand starting at position 2356 of SEQ ID NO: 588032
gagggcucccagugggaaa

SEQ ID NO: 837005 - RNA, 19 nt, Artificial Sequence
  Description of Artificial Sequence: Synthetic oligonucleotide
  Antisense strand to SEQ ID NO: 837004
uuucccacugggagcccuc

SEQ ID NO: 837006 - RNA, 19 nt, Artificial Sequence
  Description of Artificial Sequence: Synthetic oligonucleotide
  Sense strand starting at position 2948 of SEQ ID NO: 588032
cucugcucauuggucagaa

SEQ ID NO: 837007 - RNA, 19 nt, Artificial Sequence
  Description of Artificial Sequence: Synthetic oligonucleotide
  Antisense strand to SEQ ID NO: 837006
uucugaccaaugagcagag

SEQ ID NO: 837008 - RNA, 19 nt, Artificial Sequence
  Description of Artificial Sequence: Synthetic oligonucleotide
  Sense strand starting at position 3066 of SEQ ID NO: 588032
gagucucuuccuugggcaa

SEQ ID NO: 837009 - RNA, 19 nt, Artificial Sequence
  Description of Artificial Sequence: Synthetic oligonucleotide
  Antisense strand to SEQ ID NO: 837008
uugcccaaggaagagacuc

SEQ ID NO: 837010 - RNA, 19 nt, Artificial Sequence
  Description of Artificial Sequence: Synthetic oligonucleotide
  Sense strand starting at position 3069 of SEQ ID NO: 588032
ucucuuccuugggcaagaa

SEQ ID NO: 837011 - RNA, 19 nt, Artificial Sequence
  Description of Artificial Sequence: Synthetic oligonucleotide
  Antisense strand to SEQ ID NO: 837010
uucuugcccaaggaagaga

SEQ ID NO: 837012 - RNA, 19 nt, Artificial Sequence
  Description of Artificial Sequence: Synthetic oligonucleotide
  Sense strand starting at position 3070 of SEQ ID NO: 588032
cucuuccuugggcaagaaa

SEQ ID NO: 837013 - RNA, 19 nt, Artificial Sequence
  Description of Artificial Sequence: Synthetic oligonucleotide
  Antisense strand to SEQ ID NO: 837012
uuucuugcccaaggaagag

SEQ ID NO: 837014 - RNA, 19 nt, Artificial Sequence
  Description of Artificial Sequence: Synthetic oligonucleotide
  Sense strand starting at position 3221 of SEQ ID NO: 588032
uugaacuagcgucauguau

SEQ ID NO: 837015 - RNA, 19 nt, Artificial Sequence
  Description of Artificial Sequence: Synthetic oligonucleotide
  Antisense strand to SEQ ID NO: 837014
auacaugacgcuaguucaa

SEQ ID NO: 837016 - RNA, 19 nt, Artificial Sequence
  Description of Artificial Sequence: Synthetic oligonucleotide
  Sense strand starting at position 3225 of SEQ ID NO: 588032
acuagcgucauguauagau

SEQ ID NO: 837017 - RNA, 19 nt, Artificial Sequence
  Description of Artificial Sequence: Synthetic oligonucleotide
  Antisense strand to SEQ ID NO: 837016
aucuauacaugacgcuagu

SEQ ID NO: 837018 - RNA, 19 nt, Artificial Sequence
  Description of Artificial Sequence: Synthetic oligonucleotide
  Sense strand starting at position 3227 of SEQ ID NO: 588032
uagcgucauguauagauca

SEQ ID NO: 837019 - RNA, 19 nt, Artificial Sequence
  Description of Artificial Sequence: Synthetic oligonucleotide
  Antisense strand to SEQ ID NO: 837018
ugaucuauacaugacgcua

SEQ ID NO: 837020 - RNA, 19 nt, Artificial Sequence
  Description of Artificial Sequence: Synthetic oligonucleotide
  Sense strand starting at position 3229 of SEQ ID NO: 588032
gcgucauguauagaucauc

SEQ ID NO: 837021 - RNA, 19 nt, Artificial Sequence
  Description of Artificial Sequence: Synthetic oligonucleotide
  Antisense strand to SEQ ID NO: 837020
gaugaucuauacaugacgc

SEQ ID NO: 837022 - RNA, 19 nt, Artificial Sequence
  Description of Artificial Sequence: Synthetic oligonucleotide
  Sense strand starting at position 3550 of SEQ ID NO: 588032
gcuuguguucauggaagag

SEQ ID NO: 837023 - RNA, 19 nt, Artificial Sequence
  Description of Artificial Sequence: Synthetic oligonucleotide
  Antisense strand to SEQ ID NO: 837022
cucuuccaugaacacaagc

SEQ ID NO: 837024 - RNA, 19 nt, Artificial Sequence
  Description of Artificial Sequence: Synthetic oligonucleotide
  Sense strand starting at position 3554 of SEQ ID NO: 588032
guguucauggaagagguuu

SEQ ID NO: 837025 - RNA, 19 nt, Artificial Sequence
  Description of Artificial Sequence: Synthetic oligonucleotide
  Antisense strand to SEQ ID NO: 837024
aaaccucuuccaugaacac

SEQ ID NO: 837026 - RNA, 19 nt, Artificial Sequence
  Description of Artificial Sequence: Synthetic oligonucleotide
  Sense strand starting at position 3565 of SEQ ID NO: 588032
agagguuuaugaucccuau

SEQ ID NO: 837027 - RNA, 19 nt, Artificial Sequence
  Description of Artificial Sequence: Synthetic oligonucleotide
  Antisense strand to SEQ ID NO: 837026
auagggaucauaaaccucu

SEQ ID NO: 837028 - RNA, 19 nt, Artificial Sequence
  Description of Artificial Sequence: Synthetic oligonucleotide
  Sense strand starting at position 3568 of SEQ ID NO: 588032
gguuuaugaucccuauaga

SEQ ID NO: 837029 - RNA, 19 nt, Artificial Sequence
  Description of Artificial Sequence: Synthetic oligonucleotide
  Antisense strand to SEQ ID NO: 837028
ucuauagggaucauaaacc

SEQ ID NO: 837030 - RNA, 19 nt, Artificial Sequence
  Description of Artificial Sequence: Synthetic oligonucleotide
  Sense strand starting at position 3569 of SEQ ID NO: 588032
guuuaugaucccuauagac

SEQ ID NO: 837031 - RNA, 19 nt, Artificial Sequence
  Description of Artificial Sequence: Synthetic oligonucleotide
  Antisense strand to SEQ ID NO: 837030
gucuauagggaucauaaac

SEQ ID NO: 837032 - RNA, 19 nt, Artificial Sequence
  Description of Artificial Sequence: Synthetic oligonucleotide
  Sense strand starting at position 3598 of SEQ ID NO: 588032
aagagauggugcucaugau

SEQ ID NO: 837033 - RNA, 19 nt, Artificial Sequence
  Description of Artificial Sequence: Synthetic oligonucleotide
  Antisense strand to SEQ ID NO: 837032
aucaugagcaccaucucuu

SEQ ID NO: 837034 - RNA, 19 nt, Artificial Sequence
  Description of Artificial Sequence: Synthetic oligonucleotide
  Sense strand starting at position 3599 of SEQ ID NO: 588032
agagauggugcucaugauu

SEQ ID NO: 837035 - RNA, 19 nt, Artificial Sequence
  Description of Artificial Sequence: Synthetic oligonucleotide
  Antisense strand to SEQ ID NO: 837034
aaucaugagcaccaucucu

SEQ ID NO: 837036 - RNA, 19 nt, Artificial Sequence
  Description of Artificial Sequence: Synthetic oligonucleotide
  Sense strand starting at position 3639 of SEQ ID NO: 588032
augugccucugauccaauu

SEQ ID NO: 837037 - RNA, 19 nt, Artificial Sequence
  Description of Artificial Sequence: Synthetic oligonucleotide
  Antisense strand to SEQ ID NO: 837036
aauuggaucagaggcacau

SEQ ID NO: 837038 - RNA, 19 nt, Artificial Sequence
  Description of Artificial Sequence: Synthetic oligonucleotide
  Sense strand starting at position 3683 of SEQ ID NO: 588032
cugcuagggucuucuagaa

SEQ ID NO: 837039 - RNA, 19 nt, Artificial Sequence
  Description of Artificial Sequence: Synthetic oligonucleotide
  Antisense strand to SEQ ID NO: 837038
uucuagaagacccuagcag

SEQ ID NO: 837040 - RNA, 19 nt, Artificial Sequence
  Description of Artificial Sequence: Synthetic oligonucleotide
  Sense strand starting at position 3703 of SEQ ID NO: 588032
agauucccuuccucaggaa

SEQ ID NO: 837041 - RNA, 19 nt, Artificial Sequence
  Description of Artificial Sequence: Synthetic oligonucleotide
  Antisense strand to SEQ ID NO: 837040
uuccugaggaagggaaucu

SEQ ID NO: 837042 - RNA, 19 nt, Artificial Sequence
  Description of Artificial Sequence: Synthetic oligonucleotide
  Sense strand starting at position 3759 of SEQ ID NO: 588032
ugcaaaugugaugguugga

SEQ ID NO: 837043 - RNA, 19 nt, Artificial Sequence
  Description of Artificial Sequence: Synthetic oligonucleotide
  Antisense strand to SEQ ID NO: 837042
uccaaccaucacauuugca

SEQ ID NO: 837044 - RNA, 19 nt, Artificial Sequence
  Description of Artificial Sequence: Synthetic oligonucleotide
  Sense strand starting at position 3796 of SEQ ID NO: 588032
gguauaugaggcugagaau

SEQ ID NO: 837045 - RNA, 19 nt, Artificial Sequence
  Description of Artificial Sequence: Synthetic oligonucleotide
  Antisense strand to SEQ ID NO: 837044
auucucagccucauauacc

SEQ ID NO: 837046 - RNA, 19 nt, Artificial Sequence
  Description of Artificial Sequence: Synthetic oligonucleotide
  Sense strand starting at position 3799 of SEQ ID NO: 588032
auaugaggcugagaauaaa

SEQ ID NO: 837047 - RNA, 19 nt, Artificial Sequence
  Description of Artificial Sequence: Synthetic oligonucleotide
  Antisense strand to SEQ ID NO: 837046
uuuauucucagccucauau

SEQ ID NO: 837048 - RNA, 19 nt, Artificial Sequence
  Description of Artificial Sequence: Synthetic oligonucleotide
  Sense strand starting at position 3946 of SEQ ID NO: 588032
aacuguaguuagucugaau

SEQ ID NO: 837049 - RNA, 19 nt, Artificial Sequence
  Description of Artificial Sequence: Synthetic oligonucleotide
  Antisense strand to SEQ ID NO: 837048
auucagacuaacuacaguu

SEQ ID NO: 837050 - RNA, 19 nt, Artificial Sequence
  Description of Artificial Sequence: Synthetic oligonucleotide
  Sense strand starting at position 3978 of SEQ ID NO: 588032
agucaaguuguauacuaau

SEQ ID NO: 837051 - RNA, 19 nt, Artificial Sequence
  Description of Artificial Sequence: Synthetic oligonucleotide
  Antisense strand to SEQ ID NO: 837050
auuaguauacaacuugacu

SEQ ID NO: 837052 - RNA, 19 nt, Artificial Sequence
  Description of Artificial Sequence: Synthetic oligonucleotide
  Sense strand starting at position 94 of SEQ ID NO: 588033
gagagauguuugucuguuu

SEQ ID NO: 837053 - RNA, 19 nt, Artificial Sequence
  Description of Artificial Sequence: Synthetic oligonucleotide
  Antisense strand to SEQ ID NO: 837052
aaacagacaaacaucucuc

SEQ ID NO: 837054 - RNA, 19 nt, Artificial Sequence
  Description of Artificial Sequence: Synthetic oligonucleotide
  Sense strand starting at position 297 of SEQ ID NO: 588033
cccggucugagcuggauaa

SEQ ID NO: 837055 - RNA, 19 nt, Artificial Sequence
  Description of Artificial Sequence: Synthetic oligonucleotide
  Antisense strand to SEQ ID NO: 837054
uuauccagcucagaccggg

SEQ ID NO: 837056 - RNA, 19 nt, Artificial Sequence
  Description of Artificial Sequence: Synthetic oligonucleotide
  Sense strand starting at position 298 of SEQ ID NO: 588033
ccggucugagcuggauaau

SEQ ID NO: 837057 - RNA, 19 nt, Artificial Sequence
  Description of Artificial Sequence: Synthetic oligonucleotide
  Antisense strand to SEQ ID NO: 837056
auuauccagcucagaccgg

SEQ ID NO: 837058 - RNA, 19 nt, Artificial Sequence
  Description of Artificial Sequence: Synthetic oligonucleotide
  Sense strand starting at position 299 of SEQ ID NO: 588033
cggucugagcuggauaauu

SEQ ID NO: 837059 - RNA, 19 nt, Artificial Sequence
  Description of Artificial Sequence: Synthetic oligonucleotide
  Antisense strand to SEQ ID NO: 837058
aauuauccagcucagaccg

SEQ ID NO: 837060 - RNA, 19 nt, Artificial Sequence
  Description of Artificial Sequence: Synthetic oligonucleotide
  Sense strand starting at position 301 of SEQ ID NO: 588033
gucugagcuggauaauuau

SEQ ID NO: 837061 - RNA, 19 nt, Artificial Sequence
  Description of Artificial Sequence: Synthetic oligonucleotide
  Antisense strand to SEQ ID NO: 837060
auaauuauccagcucagac

SEQ ID NO: 837062 - RNA, 19 nt, Artificial Sequence
  Description of Artificial Sequence: Synthetic oligonucleotide
  Sense strand starting at position 307 of SEQ ID NO: 588033
gcuggauaauuaucucuua

SEQ ID NO: 837063 - RNA, 19 nt, Artificial Sequence
  Description of Artificial Sequence: Synthetic oligonucleotide
  Antisense strand to SEQ ID NO: 837062
uaagagauaauuauccagc

SEQ ID NO: 837064 - RNA, 19 nt, Artificial Sequence
  Description of Artificial Sequence: Synthetic oligonucleotide
  Sense strand starting at position 377 of SEQ ID NO: 588033
ccauaugcuggacacgaua

SEQ ID NO: 837065 - RNA, 19 nt, Artificial Sequence
  Description of Artificial Sequence: Synthetic oligonucleotide
  Antisense strand to SEQ ID NO: 837064
uaucguguccagcauaugg

SEQ ID NO: 837066 - RNA, 19 nt, Artificial Sequence
  Description of Artificial Sequence: Synthetic oligonucleotide
  Sense strand starting at position 396 of SEQ ID NO: 588033
acucauacccuaugaguua

SEQ ID NO: 837067 - RNA, 19 nt, Artificial Sequence
  Description of Artificial Sequence: Synthetic oligonucleotide
  Antisense strand to SEQ ID NO: 837066
uaacucauaggguaugagu

SEQ ID NO: 837068 - RNA, 19 nt, Artificial Sequence
  Description of Artificial Sequence: Synthetic oligonucleotide
  Sense strand starting at position 434 of SEQ ID NO: 588033
aagcaaugguaucucugua

SEQ ID NO: 837069 - RNA, 19 nt, Artificial Sequence
  Description of Artificial Sequence: Synthetic oligonucleotide
  Antisense strand to SEQ ID NO: 837068
uacagagauaccauugcuu

SEQ ID NO: 837070 - RNA, 19 nt, Artificial Sequence
  Description of Artificial Sequence: Synthetic oligonucleotide
  Sense strand starting at position 439 of SEQ ID NO: 588033
augguaucucuguaaacca

SEQ ID NO: 837071 - RNA, 19 nt, Artificial Sequence
  Description of Artificial Sequence: Synthetic oligonucleotide
  Antisense strand to SEQ ID NO: 837070
ugguuuacagagauaccau

SEQ ID NO: 837072 - RNA, 19 nt, Artificial Sequence
  Description of Artificial Sequence: Synthetic oligonucleotide
  Sense strand starting at position 517 of SEQ ID NO: 588033
gcuuguaaccaaggcugaa

SEQ ID NO: 837073 - RNA, 19 nt, Artificial Sequence
  Description of Artificial Sequence: Synthetic oligonucleotide
  Antisense strand to SEQ ID NO: 837072
uucagccuugguuacaagc

SEQ ID NO: 837074 - RNA, 19 nt, Artificial Sequence
  Description of Artificial Sequence: Synthetic oligonucleotide
  Sense strand starting at position 737 of SEQ ID NO: 588033
ccugaaguacuccgacuua

SEQ ID NO: 837075 - RNA, 19 nt, Artificial Sequence
  Description of Artificial Sequence: Synthetic oligonucleotide
  Antisense strand to SEQ ID NO: 837074
uaagucggaguacuucagg

SEQ ID NO: 837076 - RNA, 19 nt, Artificial Sequence
  Description of Artificial Sequence: Synthetic oligonucleotide
  Sense strand starting at position 940 of SEQ ID NO: 588033
cagguuauuucccucgacu

SEQ ID NO: 837077 - RNA, 19 nt, Artificial Sequence
  Description of Artificial Sequence: Synthetic oligonucleotide
  Antisense strand to SEQ ID NO: 837076
agucgagggaaauaaccug

SEQ ID NO: 837078 - RNA, 19 nt, Artificial Sequence
  Description of Artificial Sequence: Synthetic oligonucleotide
  Sense strand starting at position 942 of SEQ ID NO: 588033
gguuauuucccucgacuuu

SEQ ID NO: 837079 - RNA, 19 nt, Artificial Sequence
  Description of Artificial Sequence: Synthetic oligonucleotide
  Antisense strand to SEQ ID NO: 837078
aaagucgagggaaauaacc

SEQ ID NO: 837080 - RNA, 19 nt, Artificial Sequence
  Description of Artificial Sequence: Synthetic oligonucleotide
  Sense strand starting at position 995 of SEQ ID NO: 588033
uaauaaaggccguacuaga

SEQ ID NO: 837081 - RNA, 19 nt, Artificial Sequence
  Description of Artificial Sequence: Synthetic oligonucleotide
  Antisense strand to SEQ ID NO: 837080
ucuaguacggccuuuauua

SEQ ID NO: 837082 - RNA, 19 nt, Artificial Sequence
  Description of Artificial Sequence: Synthetic oligonucleotide
  Sense strand starting at position 2166 of SEQ ID NO: 588033
gcggugauggcagagauga

SEQ ID NO: 837083 - RNA, 19 nt, Artificial Sequence
  Description of Artificial Sequence: Synthetic oligonucleotide
  Antisense strand to SEQ ID NO: 837082
ucaucucugccaucaccgc

SEQ ID NO: 837084 - RNA, 19 nt, Artificial Sequence
  Description of Artificial Sequence: Synthetic oligonucleotide
  Sense strand starting at position 2414 of SEQ ID NO: 588033
cugcgauuguucucaacac

SEQ ID NO: 837085 - RNA, 19 nt, Artificial Sequence
  Description of Artificial Sequence: Synthetic oligonucleotide
  Antisense strand to SEQ ID NO: 837084
guguugagaacaaucgcag

SEQ ID NO: 837086 - RNA, 19 nt, Artificial Sequence
  Description of Artificial Sequence: Synthetic oligonucleotide
  Sense strand starting at position 2464 of SEQ ID NO: 588033
guuacuugcagcugaagau

SEQ ID NO: 837087 - RNA, 19 nt, Artificial Sequence
  Description of Artificial Sequence: Synthetic oligonucleotide
  Antisense strand to SEQ ID NO: 837086
aucuucagcugcaaguaac

SEQ ID NO: 837088 - RNA, 19 nt, Artificial Sequence
  Description of Artificial Sequence: Synthetic oligonucleotide
  Sense strand starting at position 2969 of SEQ ID NO: 588033
cgaagagcauccucacagu

SEQ ID NO: 837089 - RNA, 19 nt, Artificial Sequence
  Description of Artificial Sequence: Synthetic oligonucleotide
  Antisense strand to SEQ ID NO: 837088
acugugaggaugcucuucg

SEQ ID NO: 837090 - RNA, 19 nt, Artificial Sequence
  Description of Artificial Sequence: Synthetic oligonucleotide
  Sense strand starting at position 3011 of SEQ ID NO: 588033
gagggacaauaggaaauau

SEQ ID NO: 837091 - RNA, 19 nt, Artificial Sequence
  Description of Artificial Sequence: Synthetic oligonucleotide
  Antisense strand to SEQ ID NO: 837090
auauuuccuauugucccuc

SEQ ID NO: 837092 - RNA, 19 nt, Artificial Sequence
  Description of Artificial Sequence: Synthetic oligonucleotide
  Sense strand starting at position 3057 of SEQ ID NO: 588033
ggucgcuuccuacggauua

SEQ ID NO: 837093 - RNA, 19 nt, Artificial Sequence
  Description of Artificial Sequence: Synthetic oligonucleotide
  Antisense strand to SEQ ID NO: 837092
uaauccguaggaagcgacc

SEQ ID NO: 837094 - RNA, 19 nt, Artificial Sequence
  Description of Artificial Sequence: Synthetic oligonucleotide
  Sense strand starting at position 3059 of SEQ ID NO: 588033
ucgcuuccuacggauuaga

SEQ ID NO: 837095 - RNA, 19 nt, Artificial Sequence
  Description of Artificial Sequence: Synthetic oligonucleotide
  Antisense strand to SEQ ID NO: 837094
ucuaauccguaggaagcga

SEQ ID NO: 837096 - RNA, 19 nt, Artificial Sequence
  Description of Artificial Sequence: Synthetic oligonucleotide
  Sense strand starting at position 3096 of SEQ ID NO: 588033
acuggcaugauagguuauu

SEQ ID NO: 837097 - RNA, 19 nt, Artificial Sequence
  Description of Artificial Sequence: Synthetic oligonucleotide
  Antisense strand to SEQ ID NO: 837096
aauaaccuaucaugccagu

SEQ ID NO: 837098 - RNA, 19 nt, Artificial Sequence
  Description of Artificial Sequence: Synthetic oligonucleotide
  Sense strand starting at position 3161 of SEQ ID NO: 588033
aggaaugauugaguuucgu

SEQ ID NO: 837099 - RNA, 19 nt, Artificial Sequence
  Description of Artificial Sequence: Synthetic oligonucleotide
  Antisense strand to SEQ ID NO: 837098
acgaaacucaaucauuccu

SEQ ID NO: 837100 - RNA, 19 nt, Artificial Sequence
  Description of Artificial Sequence: Synthetic oligonucleotide
  Sense strand starting at position 3187 of SEQ ID NO: 588033
ugguucagcugauugaaga

SEQ ID NO: 837101 - RNA, 19 nt, Artificial Sequence
  Description of Artificial Sequence: Synthetic oligonucleotide
  Antisense strand to SEQ ID NO: 837100
ucuucaaucagcugaacca

SEQ ID NO: 837102 - RNA, 19 nt, Artificial Sequence
  Description of Artificial Sequence: Synthetic oligonucleotide
  Sense strand starting at position 3197 of SEQ ID NO: 588033
gauugaagacuauggcgaa

SEQ ID NO: 837103 - RNA, 19 nt, Artificial Sequence
  Description of Artificial Sequence: Synthetic oligonucleotide
  Antisense strand to SEQ ID NO: 837102
uucgccauagucuucaauc

SEQ ID NO: 837104 - RNA, 19 nt, Artificial Sequence
  Description of Artificial Sequence: Synthetic oligonucleotide
  Sense strand starting at position 3271 of SEQ ID NO: 588033
ggacuucuuucagagugga

SEQ ID NO: 837105 - RNA, 19 nt, Artificial Sequence
  Description of Artificial Sequence: Synthetic oligonucleotide
  Antisense strand to SEQ ID NO: 837104
uccacucugaaagaagucc

SEQ ID NO: 837106 - RNA, 19 nt, Artificial Sequence
  Description of Artificial Sequence: Synthetic oligonucleotide
  Sense strand starting at position 3308 of SEQ ID NO: 588033
ugaugugggcucuaauaaa

SEQ ID NO: 837107 - RNA, 19 nt, Artificial Sequence
  Description of Artificial Sequence: Synthetic oligonucleotide
  Antisense strand to SEQ ID NO: 837106
uuuauuagagcccacauca

SEQ ID NO: 837108 - RNA, 19 nt, Artificial Sequence
  Description of Artificial Sequence: Synthetic oligonucleotide
  Sense strand starting at position 3506 of SEQ ID NO: 588033
acaagaaugccucgacuag

SEQ ID NO: 837109 - RNA, 19 nt, Artificial Sequence
  Description of Artificial Sequence: Synthetic oligonucleotide
  Antisense strand to SEQ ID NO: 837108
cuagucgaggcauucuugu

SEQ ID NO: 837110 - RNA, 19 nt, Artificial Sequence
  Description of Artificial Sequence: Synthetic oligonucleotide
  Sense strand starting at position 3507 of SEQ ID NO: 588033
caagaaugccucgacuaga

SEQ ID NO: 837111 - RNA, 19 nt, Artificial Sequence
  Description of Artificial Sequence: Synthetic oligonucleotide
  Antisense strand to SEQ ID NO: 837110
ucuagucgaggcauucuug

SEQ ID NO: 837112 - RNA, 19 nt, Artificial Sequence
  Description of Artificial Sequence: Synthetic oligonucleotide
  Sense strand starting at position 3515 of SEQ ID NO: 588033
ccucgacuagagugaaauu

SEQ ID NO: 837113 - RNA, 19 nt, Artificial Sequence
  Description of Artificial Sequence: Synthetic oligonucleotide
  Antisense strand to SEQ ID NO: 837112
aauuucacucuagucgagg

SEQ ID NO: 837114 - RNA, 19 nt, Artificial Sequence
  Description of Artificial Sequence: Synthetic oligonucleotide
  Sense strand starting at position 3584 of SEQ ID NO: 588033
ccauuauccuuugaagaag

SEQ ID NO: 837115 - RNA, 19 nt, Artificial Sequence
  Description of Artificial Sequence: Synthetic oligonucleotide
  Antisense strand to SEQ ID NO: 837114
cuucuucaaaggauaaugg

SEQ ID NO: 837116 - RNA, 19 nt, Artificial Sequence
  Description of Artificial Sequence: Synthetic oligonucleotide
  Sense strand starting at position 3587 of SEQ ID NO: 588033
uuauccuuugaagaaguuu

SEQ ID NO: 837117 - RNA, 19 nt, Artificial Sequence
  Description of Artificial Sequence: Synthetic oligonucleotide
  Antisense strand to SEQ ID NO: 837116
aaacuucuucaaaggauaa

SEQ ID NO: 837118 - RNA, 19 nt, Artificial Sequence
  Description of Artificial Sequence: Synthetic oligonucleotide
  Sense strand starting at position 3658 of SEQ ID NO: 588033
caggaagucugauucucau

SEQ ID NO: 837119 - RNA, 19 nt, Artificial Sequence
  Description of Artificial Sequence: Synthetic oligonucleotide
  Antisense strand to SEQ ID NO: 837118
augagaaucagacuuccug

SEQ ID NO: 837120 - RNA, 19 nt, Artificial Sequence
  Description of Artificial Sequence: Synthetic oligonucleotide
  Sense strand starting at position 3661 of SEQ ID NO: 588033
gaagucugauucucauguu

SEQ ID NO: 837121 - RNA, 19 nt, Artificial Sequence
  Description of Artificial Sequence: Synthetic oligonucleotide
  Antisense strand to SEQ ID NO: 837120
aacaugagaaucagacuuc

SEQ ID NO: 837122 - RNA, 19 nt, Artificial Sequence
  Description of Artificial Sequence: Synthetic oligonucleotide
  Sense strand starting at position 3753 of SEQ ID NO: 588033
acugcuccagacuauugaa

SEQ ID NO: 837123 - RNA, 19 nt, Artificial Sequence
  Description of Artificial Sequence: Synthetic oligonucleotide
  Antisense strand to SEQ ID NO: 837122
uucaauagucuggagcagu

SEQ ID NO: 837124 - RNA, 19 nt, Artificial Sequence
  Description of Artificial Sequence: Synthetic oligonucleotide
  Sense strand starting at position 3763 of SEQ ID NO: 588033
acuauugaaguaugcaaau

SEQ ID NO: 837125 - RNA, 19 nt, Artificial Sequence
  Description of Artificial Sequence: Synthetic oligonucleotide
  Antisense strand to SEQ ID NO: 837124
auuugcauacuucaauagu

SEQ ID NO: 837126 - RNA, 19 nt, Artificial Sequence
  Description of Artificial Sequence: Synthetic oligonucleotide
  Sense strand starting at position 3873 of SEQ ID NO: 588033
uaaauagaagugugacuuu

SEQ ID NO: 837127 - RNA, 19 nt, Artificial Sequence
  Description of Artificial Sequence: Synthetic oligonucleotide
  Antisense strand to SEQ ID NO: 837126
aaagucacacuucuauuua

SEQ ID NO: 837128 - RNA, 19 nt, Artificial Sequence
  Description of Artificial Sequence: Synthetic oligonucleotide
  Sense strand starting at position 3965 of SEQ ID NO: 588033
gaaauugaccuccgguaua

SEQ ID NO: 837129 - RNA, 19 nt, Artificial Sequence
  Description of Artificial Sequence: Synthetic oligonucleotide
  Antisense strand to SEQ ID NO: 837128
uauaccggaggucaauuuc

SEQ ID NO: 837130 - RNA, 19 nt, Artificial Sequence
  Description of Artificial Sequence: Synthetic oligonucleotide
  Sense strand starting at position 3968 of SEQ ID NO: 588033
auugaccuccgguauauau

SEQ ID NO: 837131 - RNA, 19 nt, Artificial Sequence
  Description of Artificial Sequence: Synthetic oligonucleotide
  Antisense strand to SEQ ID NO: 837130
auauauaccggaggucaau

SEQ ID NO: 837132 - RNA, 19 nt, Artificial Sequence
  Description of Artificial Sequence: Synthetic oligonucleotide
  Sense strand starting at position 1 of SEQ ID NO: 588034
agagauaccucucugcuag

SEQ ID NO: 837133 - RNA, 19 nt, Artificial Sequence
  Description of Artificial Sequence: Synthetic oligonucleotide
  Antisense strand to SEQ ID NO: 837132
cuagcagagagguaucucu

SEQ ID NO: 837134 - RNA, 19 nt, Artificial Sequence
  Description of Artificial Sequence: Synthetic oligonucleotide
  Sense strand starting at position 143 of SEQ ID NO: 588034
cuuugaaguugacuucuga

SEQ ID NO: 837135 - RNA, 19 nt, Artificial Sequence
  Description of Artificial Sequence: Synthetic oligonucleotide
  Antisense strand to SEQ ID NO: 837134
ucagaagucaacuucaaag

SEQ ID NO: 837136 - RNA, 19 nt, Artificial Sequence
  Description of Artificial Sequence: Synthetic oligonucleotide
  Sense strand starting at position 171 of SEQ ID NO: 588034
gguaccauuuaugaaacuu

SEQ ID NO: 837137 - RNA, 19 nt, Artificial Sequence
  Description of Artificial Sequence: Synthetic oligonucleotide
  Antisense strand to SEQ ID NO: 837136
aaguuucauaaaugguacc

SEQ ID NO: 837138 - RNA, 19 nt, Artificial Sequence
  Description of Artificial Sequence: Synthetic oligonucleotide
  Sense strand starting at position 210 of SEQ ID NO: 588034
ggcauuuguguauagcacu

SEQ ID NO: 837139 - RNA, 19 nt, Artificial Sequence
  Description of Artificial Sequence: Synthetic oligonucleotide
  Antisense strand to SEQ ID NO: 837138
agugcuauacacaaaugcc

SEQ ID NO: 837140 - RNA, 19 nt, Artificial Sequence
  Description of Artificial Sequence: Synthetic oligonucleotide
  Sense strand starting at position 227 of SEQ ID NO: 588034
cuaucuaccuaauuagugu

SEQ ID NO: 837141 - RNA, 19 nt, Artificial Sequence
  Description of Artificial Sequence: Synthetic oligonucleotide
  Antisense strand to SEQ ID NO: 837140
acacuaauuagguagauag

SEQ ID NO: 837142 - RNA, 19 nt, Artificial Sequence
  Description of Artificial Sequence: Synthetic oligonucleotide
  Sense strand starting at position 305 of SEQ ID NO: 588034
ugcaguaaaugcuuaacaa

SEQ ID NO: 837143 - RNA, 19 nt, Artificial Sequence
  Description of Artificial Sequence: Synthetic oligonucleotide
  Antisense strand to SEQ ID NO: 837142
uuguuaagcauuuacugca

SEQ ID NO: 837144 - RNA, 19 nt, Artificial Sequence
  Description of Artificial Sequence: Synthetic oligonucleotide
  Sense strand starting at position 306 of SEQ ID NO: 588034
gcaguaaaugcuuaacaac

SEQ ID NO: 837145 - RNA, 19 nt, Artificial Sequence
  Description of Artificial Sequence: Synthetic oligonucleotide
  Antisense strand to SEQ ID NO: 837144
guuguuaagcauuuacugc

SEQ ID NO: 837146 - RNA, 19 nt, Artificial Sequence
  Description of Artificial Sequence: Synthetic oligonucleotide
  Sense strand starting at position 407 of SEQ ID NO: 588034
ugcgacauccuguauuaug

SEQ ID NO: 837147 - RNA, 19 nt, Artificial Sequence
  Description of Artificial Sequence: Synthetic oligonucleotide
  Antisense strand to SEQ ID NO: 837146
cauaauacaggaugucgca

SEQ ID NO: 837148 - RNA, 19 nt, Artificial Sequence
  Description of Artificial Sequence: Synthetic oligonucleotide
  Sense strand starting at position 514 of SEQ ID NO: 588034
uugauaagcuaugucccaa

SEQ ID NO: 837149 - RNA, 19 nt, Artificial Sequence
  Description of Artificial Sequence: Synthetic oligonucleotide
  Antisense strand to SEQ ID NO: 837148
uugggacauagcuuaucaa

SEQ ID NO: 837150 - RNA, 19 nt, Artificial Sequence
  Description of Artificial Sequence: Synthetic oligonucleotide
  Sense strand starting at position 656 of SEQ ID NO: 588034
uuacuacuugauggcuaaa

SEQ ID NO: 837151 - RNA, 19 nt, Artificial Sequence
  Description of Artificial Sequence: Synthetic oligonucleotide
  Antisense strand to SEQ ID NO: 837150
uuuagccaucaaguaguaa

SEQ ID NO: 837152 - RNA, 19 nt, Artificial Sequence
  Description of Artificial Sequence: Synthetic oligonucleotide
  Sense strand starting at position 1061 of SEQ ID NO: 588034
acacuacucuucuuuggua

SEQ ID NO: 837153 - RNA, 19 nt, Artificial Sequence
  Description of Artificial Sequence: Synthetic oligonucleotide
  Antisense strand to SEQ ID NO: 837152
uaccaaagaagaguagugu

SEQ ID NO: 837154 - RNA, 19 nt, Artificial Sequence
  Description of Artificial Sequence: Synthetic oligonucleotide
  Sense strand starting at position 1143 of SEQ ID NO: 588034
ugugaacaagacugaucau

SEQ ID NO: 837155 - RNA, 19 nt, Artificial Sequence
  Description of Artificial Sequence: Synthetic oligonucleotide
  Antisense strand to SEQ ID NO: 837154
augaucagucuuguucaca

SEQ ID NO: 837156 - RNA, 19 nt, Artificial Sequence
  Description of Artificial Sequence: Synthetic oligonucleotide
  Sense strand starting at position 1459 of SEQ ID NO: 588034
gggcaaugaguccauguau

SEQ ID NO: 837157 - RNA, 19 nt, Artificial Sequence
  Description of Artificial Sequence: Synthetic oligonucleotide
  Antisense strand to SEQ ID NO: 837156
auacauggacucauugccc

SEQ ID NO: 837158 - RNA, 19 nt, Artificial Sequence
  Description of Artificial Sequence: Synthetic oligonucleotide
  Sense strand starting at position 1467 of SEQ ID NO: 588034
aguccauguauuuguguuu

SEQ ID NO: 837159 - RNA, 19 nt, Artificial Sequence
  Description of Artificial Sequence: Synthetic oligonucleotide
  Antisense strand to SEQ ID NO: 837158
aaacacaaauacauggacu

SEQ ID NO: 837160 - RNA, 19 nt, Artificial Sequence
  Description of Artificial Sequence: Synthetic oligonucleotide
  Sense strand starting at position 2479 of SEQ ID NO: 588034
aaaguaggcuguccauaaa

SEQ ID NO: 837161 - RNA, 19 nt, Artificial Sequence
  Description of Artificial Sequence: Synthetic oligonucleotide
  Antisense strand to SEQ ID NO: 837160
uuuauggacagccuacuuu

SEQ ID NO: 837162 - RNA, 19 nt, Artificial Sequence
  Description of Artificial Sequence: Synthetic oligonucleotide
  Sense strand starting at position 2482 of SEQ ID NO: 588034
guaggcuguccauaaauac

SEQ ID NO: 837163 - RNA, 19 nt, Artificial Sequence
  Description of Artificial Sequence: Synthetic oligonucleotide
  Antisense strand to SEQ ID NO: 837162
guauuuauggacagccuac

SEQ ID NO: 837164 - RNA, 19 nt, Artificial Sequence
  Description of Artificial Sequence: Synthetic oligonucleotide
  Sense strand starting at position 2513 of SEQ ID NO: 588034
cugggugaccucgaacaca

SEQ ID NO: 837165 - RNA, 19 nt, Artificial Sequence
  Description of Artificial Sequence: Synthetic oligonucleotide
  Antisense strand to SEQ ID NO: 837164
uguguucgaggucacccag

SEQ ID NO: 837166 - RNA, 19 nt, Artificial Sequence
  Description of Artificial Sequence: Synthetic oligonucleotide
  Sense strand starting at position 2521 of SEQ ID NO: 588034
ccucgaacacauugcaaga

SEQ ID NO: 837167 - RNA, 19 nt, Artificial Sequence
  Description of Artificial Sequence: Synthetic oligonucleotide
  Antisense strand to SEQ ID NO: 837166
ucuugcaauguguucgagg

SEQ ID NO: 837168 - RNA, 19 nt, Artificial Sequence
  Description of Artificial Sequence: Synthetic oligonucleotide
  Sense strand starting at position 2550 of SEQ ID NO: 588034
gcauuuagccauuggucau

SEQ ID NO: 837169 - RNA, 19 nt, Artificial Sequence
  Description of Artificial Sequence: Synthetic oligonucleotide
  Antisense strand to SEQ ID NO: 837168
augaccaauggcuaaaugc

SEQ ID NO: 837170 - RNA, 19 nt, Artificial Sequence
  Description of Artificial Sequence: Synthetic oligonucleotide
  Sense strand starting at position 2561 of SEQ ID NO: 588034
uuggucauacccgaagacu

SEQ ID NO: 837171 - RNA, 19 nt, Artificial Sequence
  Description of Artificial Sequence: Synthetic oligonucleotide
  Antisense strand to SEQ ID NO: 837170
agucuucggguaugaccaa

SEQ ID NO: 837172 - RNA, 19 nt, Artificial Sequence
  Description of Artificial Sequence: Synthetic oligonucleotide
  Sense strand starting at position 2644 of SEQ ID NO: 588034
acaucagcccggugauaaa

SEQ ID NO: 837173 - RNA, 19 nt, Artificial Sequence
  Description of Artificial Sequence: Synthetic oligonucleotide
  Antisense strand to SEQ ID NO: 837172
uuuaucaccgggcugaugu

SEQ ID NO: 837174 - RNA, 19 nt, Artificial Sequence
  Description of Artificial Sequence: Synthetic oligonucleotide
  Sense strand starting at position 2666 of SEQ ID NO: 588034
gauacuuauugaccgagua

SEQ ID NO: 837175 - RNA, 19 nt, Artificial Sequence
  Description of Artificial Sequence: Synthetic oligonucleotide
  Antisense strand to SEQ ID NO: 837174
uacucggucaauaaguauc

SEQ ID NO: 837176 - RNA, 19 nt, Artificial Sequence
  Description of Artificial Sequence: Synthetic oligonucleotide
  Sense strand starting at position 2667 of SEQ ID NO: 588034
auacuuauugaccgaguau

SEQ ID NO: 837177 - RNA, 19 nt, Artificial Sequence
  Description of Artificial Sequence: Synthetic oligonucleotide
  Antisense strand to SEQ ID NO: 837176
auacucggucaauaaguau

SEQ ID NO: 837178 - RNA, 19 nt, Artificial Sequence
  Description of Artificial Sequence: Synthetic oligonucleotide
  Sense strand starting at position 2939 of SEQ ID NO: 588034
agauuauaucuacguccac

SEQ ID NO: 837179 - RNA, 19 nt, Artificial Sequence
  Description of Artificial Sequence: Synthetic oligonucleotide
  Antisense strand to SEQ ID NO: 837178
guggacguagauauaaucu

SEQ ID NO: 837180 - RNA, 19 nt, Artificial Sequence
  Description of Artificial Sequence: Synthetic oligonucleotide
  Sense strand starting at position 3178 of SEQ ID NO: 588034
uugaaagaacuguguacca

SEQ ID NO: 837181 - RNA, 19 nt, Artificial Sequence
  Description of Artificial Sequence: Synthetic oligonucleotide
  Antisense strand to SEQ ID NO: 837180
ugguacacaguucuuucaa

SEQ ID NO: 837182 - RNA, 19 nt, Artificial Sequence
  Description of Artificial Sequence: Synthetic oligonucleotide
  Sense strand starting at position 3239 of SEQ ID NO: 588034
aguaucucuugacugaaca

SEQ ID NO: 837183 - RNA, 19 nt, Artificial Sequence
  Description of Artificial Sequence: Synthetic oligonucleotide
  Antisense strand to SEQ ID NO: 837182
uguucagucaagagauacu

SEQ ID NO: 837184 - RNA, 19 nt, Artificial Sequence
  Description of Artificial Sequence: Synthetic oligonucleotide
  Sense strand starting at position 3240 of SEQ ID NO: 588034
guaucucuugacugaacaa

SEQ ID NO: 837185 - RNA, 19 nt, Artificial Sequence
  Description of Artificial Sequence: Synthetic oligonucleotide
  Antisense strand to SEQ ID NO: 837184
uuguucagucaagagauac

SEQ ID NO: 837186 - RNA, 19 nt, Artificial Sequence
  Description of Artificial Sequence: Synthetic oligonucleotide
  Sense strand starting at position 3311 of SEQ ID NO: 588034
uugaaauuggugcacauua

SEQ ID NO: 837187 - RNA, 19 nt, Artificial Sequence
  Description of Artificial Sequence: Synthetic oligonucleotide
  Antisense strand to SEQ ID NO: 837186
uaaugugcaccaauuucaa

SEQ ID NO: 837188 - RNA, 19 nt, Artificial Sequence
  Description of Artificial Sequence: Synthetic oligonucleotide
  Sense strand starting at position 3313 of SEQ ID NO: 588034
gaaauuggugcacauuaua

SEQ ID NO: 837189 - RNA, 19 nt, Artificial Sequence
  Description of Artificial Sequence: Synthetic oligonucleotide
  Antisense strand to SEQ ID NO: 837188
uauaaugugcaccaauuuc

SEQ ID NO: 837190 - RNA, 19 nt, Artificial Sequence
  Description of Artificial Sequence: Synthetic oligonucleotide
  Sense strand starting at position 3399 of SEQ ID NO: 588034
cggagcucuccugacaaag

SEQ ID NO: 837191 - RNA, 19 nt, Artificial Sequence
  Description of Artificial Sequence: Synthetic oligonucleotide
  Antisense strand to SEQ ID NO: 837190
cuuugucaggagagcuccg

SEQ ID NO: 837192 - RNA, 19 nt, Artificial Sequence
  Description of Artificial Sequence: Synthetic oligonucleotide
  Sense strand starting at position 3493 of SEQ ID NO: 588034
cccauaugugcccacucau

SEQ ID NO: 837193 - RNA, 19 nt, Artificial Sequence
  Description of Artificial Sequence: Synthetic oligonucleotide
  Antisense strand to SEQ ID NO: 837192
augagugggcacauauggg

SEQ ID NO: 837194 - RNA, 19 nt, Artificial Sequence
  Description of Artificial Sequence: Synthetic oligonucleotide
  Sense strand starting at position 3582 of SEQ ID NO: 588034
gcaauaaugugcuuacaaa

SEQ ID NO: 837195 - RNA, 19 nt, Artificial Sequence
  Description of Artificial Sequence: Synthetic oligonucleotide
  Antisense strand to SEQ ID NO: 837194
uuuguaagcacauuauugc

SEQ ID NO: 837196 - RNA, 19 nt, Artificial Sequence
  Description of Artificial Sequence: Synthetic oligonucleotide
  Sense strand starting at position 3596 of SEQ ID NO: 588034
acaaacacguccucagaaa

SEQ ID NO: 837197 - RNA, 19 nt, Artificial Sequence
  Description of Artificial Sequence: Synthetic oligonucleotide
  Antisense strand to SEQ ID NO: 837196
uuucugaggacguguuugu

SEQ ID NO: 837198 - RNA, 19 nt, Artificial Sequence
  Description of Artificial Sequence: Synthetic oligonucleotide
  Sense strand starting at position 3607 of SEQ ID NO: 588034
cucagaaauuccguaggua

SEQ ID NO: 837199 - RNA, 19 nt, Artificial Sequence
  Description of Artificial Sequence: Synthetic oligonucleotide
  Antisense strand to SEQ ID NO: 837198
uaccuacggaauuucugag

SEQ ID NO: 837200 - RNA, 19 nt, Artificial Sequence
  Description of Artificial Sequence: Synthetic oligonucleotide
  Sense strand starting at position 3608 of SEQ ID NO: 588034
ucagaaauuccguagguau

SEQ ID NO: 837201 - RNA, 19 nt, Artificial Sequence
  Description of Artificial Sequence: Synthetic oligonucleotide
  Antisense strand to SEQ ID NO: 837200
auaccuacggaauuucuga

SEQ ID NO: 837202 - RNA, 19 nt, Artificial Sequence
  Description of Artificial Sequence: Synthetic oligonucleotide
  Sense strand starting at position 3610 of SEQ ID NO: 588034
agaaauuccguagguauuc

SEQ ID NO: 837203 - RNA, 19 nt, Artificial Sequence
  Description of Artificial Sequence: Synthetic oligonucleotide
  Antisense strand to SEQ ID NO: 837202
gaauaccuacggaauuucu

SEQ ID NO: 837204 - RNA, 19 nt, Artificial Sequence
  Description of Artificial Sequence: Synthetic oligonucleotide
  Sense strand starting at position 3641 of SEQ ID NO: 588034
cuggacuccuucuccagaa

SEQ ID NO: 837205 - RNA, 19 nt, Artificial Sequence
  Description of Artificial Sequence: Synthetic oligonucleotide
  Antisense strand to SEQ ID NO: 837204
uucuggagaaggaguccag

SEQ ID NO: 837206 - RNA, 19 nt, Artificial Sequence
  Description of Artificial Sequence: Synthetic oligonucleotide
  Sense strand starting at position 3642 of SEQ ID NO: 588034
uggacuccuucuccagaau

SEQ ID NO: 837207 - RNA, 19 nt, Artificial Sequence
  Description of Artificial Sequence: Synthetic oligonucleotide
  Antisense strand to SEQ ID NO: 837206
auucuggagaaggagucca

SEQ ID NO: 837208 - RNA, 19 nt, Artificial Sequence
  Description of Artificial Sequence: Synthetic oligonucleotide
  Sense strand starting at position 3922 of SEQ ID NO: 588034
ugaaacauauuggcaacua

SEQ ID NO: 837209 - RNA, 19 nt, Artificial Sequence
  Description of Artificial Sequence: Synthetic oligonucleotide
  Antisense strand to SEQ ID NO: 837208
uaguugccaauauguuuca

SEQ ID NO: 837210 - RNA, 19 nt, Artificial Sequence
  Description of Artificial Sequence: Synthetic oligonucleotide
  Sense strand starting at position 3951 of SEQ ID NO: 588034
agagcauaggcucagguau

SEQ ID NO: 837211 - RNA, 19 nt, Artificial Sequence
  Description of Artificial Sequence: Synthetic oligonucleotide
  Antisense strand to SEQ ID NO: 837210
auaccugagccuaugcucu

SEQ ID NO: 837212 - RNA, 19 nt, Artificial Sequence
  Description of Artificial Sequence: Synthetic oligonucleotide
  Sense strand starting at position 43 of SEQ ID NO: 588035
cacagaguguagucccaua

SEQ ID NO: 837213 - RNA, 19 nt, Artificial Sequence
  Description of Artificial Sequence: Synthetic oligonucleotide
  Antisense strand to SEQ ID NO: 837212
uaugggacuacacucugug

SEQ ID NO: 837214 - RNA, 19 nt, Artificial Sequence
  Description of Artificial Sequence: Synthetic oligonucleotide
  Sense strand starting at position 48 of SEQ ID NO: 588035
aguguagucccauauuggu

SEQ ID NO: 837215 - RNA, 19 nt, Artificial Sequence
  Description of Artificial Sequence: Synthetic oligonucleotide
  Antisense strand to SEQ ID NO: 837214
accaauaugggacuacacu

SEQ ID NO: 837216 - RNA, 19 nt, Artificial Sequence
  Description of Artificial Sequence: Synthetic oligonucleotide
  Sense strand starting at position 65 of SEQ ID NO: 588035
guguacuuucuaggaauug

SEQ ID NO: 837217 - RNA, 19 nt, Artificial Sequence
  Description of Artificial Sequence: Synthetic oligonucleotide
  Antisense strand to SEQ ID NO: 837216
caauuccuagaaaguacac

SEQ ID NO: 837218 - RNA, 19 nt, Artificial Sequence
  Description of Artificial Sequence: Synthetic oligonucleotide
  Sense strand starting at position 82 of SEQ ID NO: 588035
uguccucauuucgcuuaua

SEQ ID NO: 837219 - RNA, 19 nt, Artificial Sequence
  Description of Artificial Sequence: Synthetic oligonucleotide
  Antisense strand to SEQ ID NO: 837218
uauaagcgaaaugaggaca

SEQ ID NO: 837220 - RNA, 19 nt, Artificial Sequence
  Description of Artificial Sequence: Synthetic oligonucleotide
  Sense strand starting at position 231 of SEQ ID NO: 588035
aagaauguauuccugagca

SEQ ID NO: 837221 - RNA, 19 nt, Artificial Sequence
  Description of Artificial Sequence: Synthetic oligonucleotide
  Antisense strand to SEQ ID NO: 837220
ugcucaggaauacauucuu

SEQ ID NO: 837222 - RNA, 19 nt, Artificial Sequence
  Description of Artificial Sequence: Synthetic oligonucleotide
  Sense strand starting at position 233 of SEQ ID NO: 588035
gaauguauuccugagcaua

SEQ ID NO: 837223 - RNA, 19 nt, Artificial Sequence
  Description of Artificial Sequence: Synthetic oligonucleotide
  Antisense strand to SEQ ID NO: 837222
uaugcucaggaauacauuc

SEQ ID NO: 837224 - RNA, 19 nt, Artificial Sequence
  Description of Artificial Sequence: Synthetic oligonucleotide
  Sense strand starting at position 235 of SEQ ID NO: 588035
auguauuccugagcauacu

SEQ ID NO: 837225 - RNA, 19 nt, Artificial Sequence
  Description of Artificial Sequence: Synthetic oligonucleotide
  Antisense strand to SEQ ID NO: 837224
aguaugcucaggaauacau

SEQ ID NO: 837226 - RNA, 19 nt, Artificial Sequence
  Description of Artificial Sequence: Synthetic oligonucleotide
  Sense strand starting at position 236 of SEQ ID NO: 588035
uguauuccugagcauacua

SEQ ID NO: 837227 - RNA, 19 nt, Artificial Sequence
  Description of Artificial Sequence: Synthetic oligonucleotide
  Antisense strand to SEQ ID NO: 837226
uaguaugcucaggaauaca

SEQ ID NO: 837228 - RNA, 19 nt, Artificial Sequence
  Description of Artificial Sequence: Synthetic oligonucleotide
  Sense strand starting at position 324 of SEQ ID NO: 588035
uguauuccaguuuauaacu

SEQ ID NO: 837229 - RNA, 19 nt, Artificial Sequence
  Description of Artificial Sequence: Synthetic oligonucleotide
  Antisense strand to SEQ ID NO: 837228
aguuauaaacuggaauaca

SEQ ID NO: 837230 - RNA, 19 nt, Artificial Sequence
  Description of Artificial Sequence: Synthetic oligonucleotide
  Sense strand starting at position 329 of SEQ ID NO: 588035
uccaguuuauaacugaagu

SEQ ID NO: 837231 - RNA, 19 nt, Artificial Sequence
  Description of Artificial Sequence: Synthetic oligonucleotide
  Antisense strand to SEQ ID NO: 837230
acuucaguuauaaacugga

SEQ ID NO: 837232 - RNA, 19 nt, Artificial Sequence
  Description of Artificial Sequence: Synthetic oligonucleotide
  Sense strand starting at position 342 of SEQ ID NO: 588035
ugaagugaucccuguguaa

SEQ ID NO: 837233 - RNA, 19 nt, Artificial Sequence
  Description of Artificial Sequence: Synthetic oligonucleotide
  Antisense strand to SEQ ID NO: 837232
uuacacagggaucacuuca

SEQ ID NO: 837234 - RNA, 19 nt, Artificial Sequence
  Description of Artificial Sequence: Synthetic oligonucleotide
  Sense strand starting at position 447 of SEQ ID NO: 588035
uuuccaaaggcuuguaauu

SEQ ID NO: 837235 - RNA, 19 nt, Artificial Sequence
  Description of Artificial Sequence: Synthetic oligonucleotide
  Antisense strand to SEQ ID NO: 837234
aauuacaagccuuuggaaa

SEQ ID NO: 837236 - RNA, 19 nt, Artificial Sequence
  Description of Artificial Sequence: Synthetic oligonucleotide
  Sense strand starting at position 472 of SEQ ID NO: 588035
gaaauuagauauggagaua

SEQ ID NO: 837237 - RNA, 19 nt, Artificial Sequence
  Description of Artificial Sequence: Synthetic oligonucleotide
  Antisense strand to SEQ ID NO: 837236
uaucuccauaucuaauuuc

SEQ ID NO: 837238 - RNA, 19 nt, Artificial Sequence
  Description of Artificial Sequence: Synthetic oligonucleotide
  Sense strand starting at position 624 of SEQ ID NO: 588035
uaggaucuuuacuuugagu

SEQ ID NO: 837239 - RNA, 19 nt, Artificial Sequence
  Description of Artificial Sequence: Synthetic oligonucleotide
  Antisense strand to SEQ ID NO: 837238
acucaaaguaaagauccua

SEQ ID NO: 837240 - RNA, 19 nt, Artificial Sequence
  Description of Artificial Sequence: Synthetic oligonucleotide
  Sense strand starting at position 630 of SEQ ID NO: 588035
cuuuacuuugaguaaagca

SEQ ID NO: 837241 - RNA, 19 nt, Artificial Sequence
  Description of Artificial Sequence: Synthetic oligonucleotide
  Antisense strand to SEQ ID NO: 837240
ugcuuuacucaaaguaaag

SEQ ID NO: 837242 - RNA, 19 nt, Artificial Sequence
  Description of Artificial Sequence: Synthetic oligonucleotide
  Sense strand starting at position 646 of SEQ ID NO: 588035
gcacuucuccagcagugau

SEQ ID NO: 837243 - RNA, 19 nt, Artificial Sequence
  Description of Artificial Sequence: Synthetic oligonucleotide
  Antisense strand to SEQ ID NO: 837242
aucacugcuggagaagugc

SEQ ID NO: 837244 - RNA, 19 nt, Artificial Sequence
  Description of Artificial Sequence: Synthetic oligonucleotide
  Sense strand starting at position 649 of SEQ ID NO: 588035
cuucuccagcagugaucau

SEQ ID NO: 837245 - RNA, 19 nt, Artificial Sequence
  Description of Artificial Sequence: Synthetic oligonucleotide
  Antisense strand to SEQ ID NO: 837244
augaucacugcuggagaag

SEQ ID NO: 837246 - RNA, 19 nt, Artificial Sequence
  Description of Artificial Sequence: Synthetic oligonucleotide
  Sense strand starting at position 653 of SEQ ID NO: 588035
uccagcagugaucauuaau

SEQ ID NO: 837247 - RNA, 19 nt, Artificial Sequence
  Description of Artificial Sequence: Synthetic oligonucleotide
  Antisense strand to SEQ ID NO: 837246
auuaaugaucacugcugga

SEQ ID NO: 837248 - RNA, 19 nt, Artificial Sequence
  Description of Artificial Sequence: Synthetic oligonucleotide
  Sense strand starting at position 656 of SEQ ID NO: 588035
agcagugaucauuaauaug

SEQ ID NO: 837249 - RNA, 19 nt, Artificial Sequence
  Description of Artificial Sequence: Synthetic oligonucleotide
  Antisense strand to SEQ ID NO: 837248
cauauuaaugaucacugcu

SEQ ID NO: 837250 - RNA, 19 nt, Artificial Sequence
  Description of Artificial Sequence: Synthetic oligonucleotide
  Sense strand starting at position 662 of SEQ ID NO: 588035
gaucauuaauaugugggua

SEQ ID NO: 837251 - RNA, 19 nt, Artificial Sequence
  Description of Artificial Sequence: Synthetic oligonucleotide
  Antisense strand to SEQ ID NO: 837250
uacccacauauuaaugauc

SEQ ID NO: 837252 - RNA, 19 nt, Artificial Sequence
  Description of Artificial Sequence: Synthetic oligonucleotide
  Sense strand starting at position 665 of SEQ ID NO: 588035
cauuaauauguggguacuu

SEQ ID NO: 837253 - RNA, 19 nt, Artificial Sequence
  Description of Artificial Sequence: Synthetic oligonucleotide
  Antisense strand to SEQ ID NO: 837252
aaguacccacauauuaaug

SEQ ID NO: 837254 - RNA, 19 nt, Artificial Sequence
  Description of Artificial Sequence: Synthetic oligonucleotide
  Sense strand starting at position 666 of SEQ ID NO: 588035
auuaauauguggguacuuu

SEQ ID NO: 837255 - RNA, 19 nt, Artificial Sequence
  Description of Artificial Sequence: Synthetic oligonucleotide
  Antisense strand to SEQ ID NO: 837254
aaaguacccacauauuaau

SEQ ID NO: 837256 - RNA, 19 nt, Artificial Sequence
  Description of Artificial Sequence: Synthetic oligonucleotide
  Sense strand starting at position 985 of SEQ ID NO: 588035
cuagacugagauugcaaau

SEQ ID NO: 837257 - RNA, 19 nt, Artificial Sequence
  Description of Artificial Sequence: Synthetic oligonucleotide
  Antisense strand to SEQ ID NO: 837256
auuugcaaucucagucuag

SEQ ID NO: 837258 - RNA, 19 nt, Artificial Sequence
  Description of Artificial Sequence: Synthetic oligonucleotide
  Sense strand starting at position 1080 of SEQ ID NO: 588035
ccugaaagauuuccgugca

SEQ ID NO: 837259 - RNA, 19 nt, Artificial Sequence
  Description of Artificial Sequence: Synthetic oligonucleotide
  Antisense strand to SEQ ID NO: 837258
ugcacggaaaucuuucagg

SEQ ID NO: 837260 - RNA, 19 nt, Artificial Sequence
  Description of Artificial Sequence: Synthetic oligonucleotide
  Sense strand starting at position 3468 of SEQ ID NO: 588035
uuaaaucugugaucggagu

SEQ ID NO: 837261 - RNA, 19 nt, Artificial Sequence
  Description of Artificial Sequence: Synthetic oligonucleotide
  Antisense strand to SEQ ID NO: 837260
acuccgaucacagauuuaa

SEQ ID NO: 837262 - RNA, 19 nt, Artificial Sequence
  Description of Artificial Sequence: Synthetic oligonucleotide
  Sense strand starting at position 3470 of SEQ ID NO: 588035
aaaucugugaucggaguga

SEQ ID NO: 837263 - RNA, 19 nt, Artificial Sequence
  Description of Artificial Sequence: Synthetic oligonucleotide
  Antisense strand to SEQ ID NO: 837262
ucacuccgaucacagauuu

SEQ ID NO: 837264 - RNA, 19 nt, Artificial Sequence
  Description of Artificial Sequence: Synthetic oligonucleotide
  Sense strand starting at position 3474 of SEQ ID NO: 588035
cugugaucggagugauuca

SEQ ID NO: 837265 - RNA, 19 nt, Artificial Sequence
  Description of Artificial Sequence: Synthetic oligonucleotide
  Antisense strand to SEQ ID NO: 837264
ugaaucacuccgaucacag

SEQ ID NO: 837266 - RNA, 19 nt, Artificial Sequence
  Description of Artificial Sequence: Synthetic oligonucleotide
  Sense strand starting at position 3581 of SEQ ID NO: 588035
agcuuugauuugucucacu

SEQ ID NO: 837267 - RNA, 19 nt, Artificial Sequence
  Description of Artificial Sequence: Synthetic oligonucleotide
  Antisense strand to SEQ ID NO: 837266
agugagacaaaucaaagcu

SEQ ID NO: 837268 - RNA, 19 nt, Artificial Sequence
  Description of Artificial Sequence: Synthetic oligonucleotide
  Sense strand starting at position 3584 of SEQ ID NO: 588035
uuugauuugucucacuuag

SEQ ID NO: 837269 - RNA, 19 nt, Artificial Sequence
  Description of Artificial Sequence: Synthetic oligonucleotide
  Antisense strand to SEQ ID NO: 837268
cuaagugagacaaaucaaa

SEQ ID NO: 837270 - RNA, 19 nt, Artificial Sequence
  Description of Artificial Sequence: Synthetic oligonucleotide
  Sense strand starting at position 3586 of SEQ ID NO: 588035
ugauuugucucacuuagcu

SEQ ID NO: 837271 - RNA, 19 nt, Artificial Sequence
  Description of Artificial Sequence: Synthetic oligonucleotide
  Antisense strand to SEQ ID NO: 837270
agcuaagugagacaaauca

SEQ ID NO: 837272 - RNA, 19 nt, Artificial Sequence
  Description of Artificial Sequence: Synthetic oligonucleotide
  Sense strand starting at position 3622 of SEQ ID NO: 588035
uagagaguguaauucuuaa

SEQ ID NO: 837273 - RNA, 19 nt, Artificial Sequence
  Description of Artificial Sequence: Synthetic oligonucleotide
  Antisense strand to SEQ ID NO: 837272
uuaagaauuacacucucua

SEQ ID NO: 837274 - RNA, 19 nt, Artificial Sequence
  Description of Artificial Sequence: Synthetic oligonucleotide
  Sense strand starting at position 3641 of SEQ ID NO: 588035
auuauacugugacucacau

SEQ ID NO: 837275 - RNA, 19 nt, Artificial Sequence
  Description of Artificial Sequence: Synthetic oligonucleotide
  Antisense strand to SEQ ID NO: 837274
augugagucacaguauaau

SEQ ID NO: 837276 - RNA, 19 nt, Artificial Sequence
  Description of Artificial Sequence: Synthetic oligonucleotide
  Sense strand starting at position 3656 of SEQ ID NO: 588035
acauacuugggagguaagu

SEQ ID NO: 837277 - RNA, 19 nt, Artificial Sequence
  Description of Artificial Sequence: Synthetic oligonucleotide
  Antisense strand to SEQ ID NO: 837276
acuuaccucccaaguaugu

SEQ ID NO: 837278 - RNA, 19 nt, Artificial Sequence
  Description of Artificial Sequence: Synthetic oligonucleotide
  Sense strand starting at position 3708 of SEQ ID NO: 588035
ccaguuggaucuucuaaau

SEQ ID NO: 837279 - RNA, 19 nt, Artificial Sequence
  Description of Artificial Sequence: Synthetic oligonucleotide
  Antisense strand to SEQ ID NO: 837278
auuuagaagauccaacugg

SEQ ID NO: 837280 - RNA, 19 nt, Artificial Sequence
  Description of Artificial Sequence: Synthetic oligonucleotide
  Sense strand starting at position 3784 of SEQ ID NO: 588035
gugaguucgaacuaguaca

SEQ ID NO: 837281 - RNA, 19 nt, Artificial Sequence
  Description of Artificial Sequence: Synthetic oligonucleotide
  Antisense strand to SEQ ID NO: 837280
uguacuaguucgaacucac

SEQ ID NO: 837282 - RNA, 19 nt, Artificial Sequence
  Description of Artificial Sequence: Synthetic oligonucleotide
  Sense strand starting at position 3819 of SEQ ID NO: 588035
gaguaacauuaugaaauag

SEQ ID NO: 837283 - RNA, 19 nt, Artificial Sequence
  Description of Artificial Sequence: Synthetic oligonucleotide
  Antisense strand to SEQ ID NO: 837282
cuauuucauaauguuacuc

SEQ ID NO: 837284 - RNA, 19 nt, Artificial Sequence
  Description of Artificial Sequence: Synthetic oligonucleotide
  Sense strand starting at position 3843 of SEQ ID NO: 588035
cacggauuucucugcacgu

SEQ ID NO: 837285 - RNA, 19 nt, Artificial Sequence
  Description of Artificial Sequence: Synthetic oligonucleotide
  Antisense strand to SEQ ID NO: 837284
acgugcagagaaauccgug

SEQ ID NO: 837286 - RNA, 19 nt, Artificial Sequence
  Description of Artificial Sequence: Synthetic oligonucleotide
  Sense strand starting at position 3847 of SEQ ID NO: 588035
gauuucucugcacguggaa

SEQ ID NO: 837287 - RNA, 19 nt, Artificial Sequence
  Description of Artificial Sequence: Synthetic oligonucleotide
  Antisense strand to SEQ ID NO: 837286
uuccacgugcagagaaauc

SEQ ID NO: 837288 - RNA, 19 nt, Artificial Sequence
  Description of Artificial Sequence: Synthetic oligonucleotide
  Sense strand starting at position 3877 of SEQ ID NO: 588035
acgcauugugugcuacgua

SEQ ID NO: 837289 - RNA, 19 nt, Artificial Sequence
  Description of Artificial Sequence: Synthetic oligonucleotide
  Antisense strand to SEQ ID NO: 837288
uacguagcacacaaugcgu

SEQ ID NO: 837290 - RNA, 19 nt, Artificial Sequence
  Description of Artificial Sequence: Synthetic oligonucleotide
  Sense strand starting at position 3899 of SEQ ID NO: 588035
agggcugugucaucaccaa

SEQ ID NO: 837291 - RNA, 19 nt, Artificial Sequence
  Description of Artificial Sequence: Synthetic oligonucleotide
  Antisense strand to SEQ ID NO: 837290
uuggugaugacacagcccu

SEQ ID NO: 837292 - RNA, 19 nt, Artificial Sequence
  Description of Artificial Sequence: Synthetic oligonucleotide
  Sense strand starting at position 118 of SEQ ID NO: 588036
cagcaagagucuccuagga

SEQ ID NO: 837293 - RNA, 19 nt, Artificial Sequence
  Description of Artificial Sequence: Synthetic oligonucleotide
  Antisense strand to SEQ ID NO: 837292
uccuaggagacucuugcug

SEQ ID NO: 837294 - RNA, 19 nt, Artificial Sequence
  Description of Artificial Sequence: Synthetic oligonucleotide
  Sense strand starting at position 206 of SEQ ID NO: 588036
uccagagcuguugggcaau

SEQ ID NO: 837295 - RNA, 19 nt, Artificial Sequence
  Description of Artificial Sequence: Synthetic oligonucleotide
  Antisense strand to SEQ ID NO: 837294
auugcccaacagcucugga

SEQ ID NO: 837296 - RNA, 19 nt, Artificial Sequence
  Description of Artificial Sequence: Synthetic oligonucleotide
  Sense strand starting at position 208 of SEQ ID NO: 588036
cagagcuguugggcaauau

SEQ ID NO: 837297 - RNA, 19 nt, Artificial Sequence
  Description of Artificial Sequence: Synthetic oligonucleotide
  Antisense strand to SEQ ID NO: 837296
auauugcccaacagcucug

SEQ ID NO: 837298 - RNA, 19 nt, Artificial Sequence
  Description of Artificial Sequence: Synthetic oligonucleotide
  Sense strand starting at position 209 of SEQ ID NO: 588036
agagcuguugggcaauaua

SEQ ID NO: 837299 - RNA, 19 nt, Artificial Sequence
  Description of Artificial Sequence: Synthetic oligonucleotide
  Antisense strand to SEQ ID NO: 837298
uauauugcccaacagcucu

SEQ ID NO: 837300 - RNA, 19 nt, Artificial Sequence
  Description of Artificial Sequence: Synthetic oligonucleotide
  Sense strand starting at position 219 of SEQ ID NO: 588036
ggcaauauacgacaugugu

SEQ ID NO: 837301 - RNA, 19 nt, Artificial Sequence
  Description of Artificial Sequence: Synthetic oligonucleotide
  Antisense strand to SEQ ID NO: 837300
acacaugucguauauugcc

SEQ ID NO: 837302 - RNA, 19 nt, Artificial Sequence
  Description of Artificial Sequence: Synthetic oligonucleotide
  Sense strand starting at position 251 of SEQ ID NO: 588036
ucuugugcauccucgagaa

SEQ ID NO: 837303 - RNA, 19 nt, Artificial Sequence
  Description of Artificial Sequence: Synthetic oligonucleotide
  Antisense strand to SEQ ID NO: 837302
uucucgaggaugcacaaga

SEQ ID NO: 837304 - RNA, 19 nt, Artificial Sequence
  Description of Artificial Sequence: Synthetic oligonucleotide
  Sense strand starting at position 255 of SEQ ID NO: 588036
gugcauccucgagaacgau

SEQ ID NO: 837305 - RNA, 19 nt, Artificial Sequence
  Description of Artificial Sequence: Synthetic oligonucleotide
  Antisense strand to SEQ ID NO: 837304
aucguucucgaggaugcac

SEQ ID NO: 837306 - RNA, 19 nt, Artificial Sequence
  Description of Artificial Sequence: Synthetic oligonucleotide
  Sense strand starting at position 592 of SEQ ID NO: 588036
guucuaaguggaugaauga

SEQ ID NO: 837307 - RNA, 19 nt, Artificial Sequence
  Description of Artificial Sequence: Synthetic oligonucleotide
  Antisense strand to SEQ ID NO: 837306
ucauucauccacuuagaac

SEQ ID NO: 837308 - RNA, 19 nt, Artificial Sequence
  Description of Artificial Sequence: Synthetic oligonucleotide
  Sense strand starting at position 1040 of SEQ ID NO: 588036
agggacucugcccgggaaa

SEQ ID NO: 837309 - RNA, 19 nt, Artificial Sequence
  Description of Artificial Sequence: Synthetic oligonucleotide
  Antisense strand to SEQ ID NO: 837308
uuucccgggcagagucccu

SEQ ID NO: 837310 - RNA, 19 nt, Artificial Sequence
  Description of Artificial Sequence: Synthetic oligonucleotide
  Sense strand starting at position 1425 of SEQ ID NO: 588036
aaagcuugugauggaagga

SEQ ID NO: 837311 - RNA, 19 nt, Artificial Sequence
  Description of Artificial Sequence: Synthetic oligonucleotide
  Antisense strand to SEQ ID NO: 837310
uccuuccaucacaagcuuu

SEQ ID NO: 837312 - RNA, 19 nt, Artificial Sequence
  Description of Artificial Sequence: Synthetic oligonucleotide
  Sense strand starting at position 1958 of SEQ ID NO: 588036
ccguuaggcgcgaauugua

SEQ ID NO: 837313 - RNA, 19 nt, Artificial Sequence
  Description of Artificial Sequence: Synthetic oligonucleotide
  Antisense strand to SEQ ID NO: 837312
uacaauucgcgccuaacgg

SEQ ID NO: 837314 - RNA, 19 nt, Artificial Sequence
  Description of Artificial Sequence: Synthetic oligonucleotide
  Sense strand starting at position 1968 of SEQ ID NO: 588036
cgaauuguaugucugguuu

SEQ ID NO: 837315 - RNA, 19 nt, Artificial Sequence
  Description of Artificial Sequence: Synthetic oligonucleotide
  Antisense strand to SEQ ID NO: 837314
aaaccagacauacaauucg

SEQ ID NO: 837316 - RNA, 19 nt, Artificial Sequence
  Description of Artificial Sequence: Synthetic oligonucleotide
  Sense strand starting at position 1972 of SEQ ID NO: 588036
uuguaugucugguuuauuc

SEQ ID NO: 837317 - RNA, 19 nt, Artificial Sequence
  Description of Artificial Sequence: Synthetic oligonucleotide
  Antisense strand to SEQ ID NO: 837316
gaauaaaccagacauacaa

SEQ ID NO: 837318 - RNA, 19 nt, Artificial Sequence
  Description of Artificial Sequence: Synthetic oligonucleotide
  Sense strand starting at position 1974 of SEQ ID NO: 588036
guaugucugguuuauucgu

SEQ ID NO: 837319 - RNA, 19 nt, Artificial Sequence
  Description of Artificial Sequence: Synthetic oligonucleotide
  Antisense strand to SEQ ID NO: 837318
acgaauaaaccagacauac

SEQ ID NO: 837320 - RNA, 19 nt, Artificial Sequence
  Description of Artificial Sequence: Synthetic oligonucleotide
  Sense strand starting at position 2125 of SEQ ID NO: 588036
cccuguaaccgccaggaaa

SEQ ID NO: 837321 - RNA, 19 nt, Artificial Sequence
  Description of Artificial Sequence: Synthetic oligonucleotide
  Antisense strand to SEQ ID NO: 837320
uuuccuggcgguuacaggg

SEQ ID NO: 837322 - RNA, 19 nt, Artificial Sequence
  Description of Artificial Sequence: Synthetic oligonucleotide
  Sense strand starting at position 2245 of SEQ ID NO: 588036
ggaggaauacuguguuuga

SEQ ID NO: 837323 - RNA, 19 nt, Artificial Sequence
  Description of Artificial Sequence: Synthetic oligonucleotide
  Antisense strand to SEQ ID NO: 837322
ucaaacacaguauuccucc

SEQ ID NO: 837324 - RNA, 19 nt, Artificial Sequence
  Description of Artificial Sequence: Synthetic oligonucleotide
  Sense strand starting at position 2246 of SEQ ID NO: 588036
gaggaauacuguguuugag

SEQ ID NO: 837325 - RNA, 19 nt, Artificial Sequence
  Description of Artificial Sequence: Synthetic oligonucleotide
  Antisense strand to SEQ ID NO: 837324
cucaaacacaguauuccuc

SEQ ID NO: 837326 - RNA, 19 nt, Artificial Sequence
  Description of Artificial Sequence: Synthetic oligonucleotide
  Sense strand starting at position 2252 of SEQ ID NO: 588036
uacuguguuugaguaaaua

SEQ ID NO: 837327 - RNA, 19 nt, Artificial Sequence
  Description of Artificial Sequence: Synthetic oligonucleotide
  Antisense strand to SEQ ID NO: 837326
uauuuacucaaacacagua

SEQ ID NO: 837328 - RNA, 19 nt, Artificial Sequence
  Description of Artificial Sequence: Synthetic oligonucleotide
  Sense strand starting at position 2262 of SEQ ID NO: 588036
gaguaaauauauguagagu

SEQ ID NO: 837329 - RNA, 19 nt, Artificial Sequence
  Description of Artificial Sequence: Synthetic oligonucleotide
  Antisense strand to SEQ ID NO: 837328
acucuacauauauuuacuc

SEQ ID NO: 837330 - RNA, 19 nt, Artificial Sequence
  Description of Artificial Sequence: Synthetic oligonucleotide
  Sense strand starting at position 2276 of SEQ ID NO: 588036
agaguuggguuagaaucau

SEQ ID NO: 837331 - RNA, 19 nt, Artificial Sequence
  Description of Artificial Sequence: Synthetic oligonucleotide
  Antisense strand to SEQ ID NO: 837330
augauucuaacccaacucu

SEQ ID NO: 837332 - RNA, 19 nt, Artificial Sequence
  Description of Artificial Sequence: Synthetic oligonucleotide
  Sense strand starting at position 2282 of SEQ ID NO: 588036
ggguuagaaucauugauug

SEQ ID NO: 837333 - RNA, 19 nt, Artificial Sequence
  Description of Artificial Sequence: Synthetic oligonucleotide
  Antisense strand to SEQ ID NO: 837332
caaucaaugauucuaaccc

SEQ ID NO: 837334 - RNA, 19 nt, Artificial Sequence
  Description of Artificial Sequence: Synthetic oligonucleotide
  Sense strand starting at position 2318 of SEQ ID NO: 588036
acaguucuguguccagaaa

SEQ ID NO: 837335 - RNA, 19 nt, Artificial Sequence
  Description of Artificial Sequence: Synthetic oligonucleotide
  Antisense strand to SEQ ID NO: 837334
uuucuggacacagaacugu

SEQ ID NO: 837336 - RNA, 19 nt, Artificial Sequence
  Description of Artificial Sequence: Synthetic oligonucleotide
  Sense strand starting at position 2796 of SEQ ID NO: 588036
gggccaaguugauccacau

SEQ ID NO: 837337 - RNA, 19 nt, Artificial Sequence
  Description of Artificial Sequence: Synthetic oligonucleotide
  Antisense strand to SEQ ID NO: 837336
auguggaucaacuuggccc

SEQ ID NO: 837338 - RNA, 19 nt, Artificial Sequence
  Description of Artificial Sequence: Synthetic oligonucleotide
  Sense strand starting at position 2845 of SEQ ID NO: 588036
ggaauuuggucagauaugg

SEQ ID NO: 837339 - RNA, 19 nt, Artificial Sequence
  Description of Artificial Sequence: Synthetic oligonucleotide
  Antisense strand to SEQ ID NO: 837338
ccauaucugaccaaauucc

SEQ ID NO: 837340 - RNA, 19 nt, Artificial Sequence
  Description of Artificial Sequence: Synthetic oligonucleotide
  Sense strand starting at position 2853 of SEQ ID NO: 588036
gucagauauggaggguauu

SEQ ID NO: 837341 - RNA, 19 nt, Artificial Sequence
  Description of Artificial Sequence: Synthetic oligonucleotide
  Antisense strand to SEQ ID NO: 837340
aauacccuccauaucugac

SEQ ID NO: 837342 - RNA, 19 nt, Artificial Sequence
  Description of Artificial Sequence: Synthetic oligonucleotide
  Sense strand starting at position 2895 of SEQ ID NO: 588036
ggauuaaacugacuuagca

SEQ ID NO: 837343 - RNA, 19 nt, Artificial Sequence
  Description of Artificial Sequence: Synthetic oligonucleotide
  Antisense strand to SEQ ID NO: 837342
ugcuaagucaguuuaaucc

SEQ ID NO: 837344 - RNA, 19 nt, Artificial Sequence
  Description of Artificial Sequence: Synthetic oligonucleotide
  Sense strand starting at position 3001 of SEQ ID NO: 588036
uccagagucugaucaggga

SEQ ID NO: 837345 - RNA, 19 nt, Artificial Sequence
  Description of Artificial Sequence: Synthetic oligonucleotide
  Antisense strand to SEQ ID NO: 837344
ucccugaucagacucugga

SEQ ID NO: 837346 - RNA, 19 nt, Artificial Sequence
  Description of Artificial Sequence: Synthetic oligonucleotide
  Sense strand starting at position 3016 of SEQ ID NO: 588036
gggagacauucuuugucau

SEQ ID NO: 837347 - RNA, 19 nt, Artificial Sequence
  Description of Artificial Sequence: Synthetic oligonucleotide
  Antisense strand to SEQ ID NO: 837346
augacaaagaaugucuccc

SEQ ID NO: 837348 - RNA, 19 nt, Artificial Sequence
  Description of Artificial Sequence: Synthetic oligonucleotide
  Sense strand starting at position 3017 of SEQ ID NO: 588036
ggagacauucuuugucauu

SEQ ID NO: 837349 - RNA, 19 nt, Artificial Sequence
  Description of Artificial Sequence: Synthetic oligonucleotide
  Antisense strand to SEQ ID NO: 837348
aaugacaaagaaugucucc

SEQ ID NO: 837350 - RNA, 19 nt, Artificial Sequence
  Description of Artificial Sequence: Synthetic oligonucleotide
  Sense strand starting at position 3053 of SEQ ID NO: 588036
auuguaauaggcuguucuu

SEQ ID NO: 837351 - RNA, 19 nt, Artificial Sequence
  Description of Artificial Sequence: Synthetic oligonucleotide
  Antisense strand to SEQ ID NO: 837350
aagaacagccuauuacaau

SEQ ID NO: 837352 - RNA, 19 nt, Artificial Sequence
  Description of Artificial Sequence: Synthetic oligonucleotide
  Sense strand starting at position 3056 of SEQ ID NO: 588036
guaauaggcuguucuugua

SEQ ID NO: 837353 - RNA, 19 nt, Artificial Sequence
  Description of Artificial Sequence: Synthetic oligonucleotide
  Antisense strand to SEQ ID NO: 837352
uacaagaacagccuauuac

SEQ ID NO: 837354 - RNA, 19 nt, Artificial Sequence
  Description of Artificial Sequence: Synthetic oligonucleotide
  Sense strand starting at position 3063 of SEQ ID NO: 588036
gcuguucuuguaugacuau

SEQ ID NO: 837355 - RNA, 19 nt, Artificial Sequence
  Description of Artificial Sequence: Synthetic oligonucleotide
  Antisense strand to SEQ ID NO: 837354
auagucauacaagaacagc

SEQ ID NO: 837356 - RNA, 19 nt, Artificial Sequence
  Description of Artificial Sequence: Synthetic oligonucleotide
  Sense strand starting at position 3066 of SEQ ID NO: 588036
guucuuguaugacuauaaa

SEQ ID NO: 837357 - RNA, 19 nt, Artificial Sequence
  Description of Artificial Sequence: Synthetic oligonucleotide
  Antisense strand to SEQ ID NO: 837356
uuuauagucauacaagaac

SEQ ID NO: 837358 - RNA, 19 nt, Artificial Sequence
  Description of Artificial Sequence: Synthetic oligonucleotide
  Sense strand starting at position 3195 of SEQ ID NO: 588036
uugggagcuuaugcucaua

SEQ ID NO: 837359 - RNA, 19 nt, Artificial Sequence
  Description of Artificial Sequence: Synthetic oligonucleotide
  Antisense strand to SEQ ID NO: 837358
uaugagcauaagcucccaa

SEQ ID NO: 837360 - RNA, 19 nt, Artificial Sequence
  Description of Artificial Sequence: Synthetic oligonucleotide
  Sense strand starting at position 3197 of SEQ ID NO: 588036
gggagcuuaugcucauaac

SEQ ID NO: 837361 - RNA, 19 nt, Artificial Sequence
  Description of Artificial Sequence: Synthetic oligonucleotide
  Antisense strand to SEQ ID NO: 837360
guuaugagcauaagcuccc

SEQ ID NO: 837362 - RNA, 19 nt, Artificial Sequence
  Description of Artificial Sequence: Synthetic oligonucleotide
  Sense strand starting at position 3235 of SEQ ID NO: 588036
ggcacaucccauggcgaaa

SEQ ID NO: 837363 - RNA, 19 nt, Artificial Sequence
  Description of Artificial Sequence: Synthetic oligonucleotide
  Antisense strand to SEQ ID NO: 837362
uuucgccaugggaugugcc

SEQ ID NO: 837364 - RNA, 19 nt, Artificial Sequence
  Description of Artificial Sequence: Synthetic oligonucleotide
  Sense strand starting at position 3616 of SEQ ID NO: 588036
ugaauaguccagugagugu

SEQ ID NO: 837365 - RNA, 19 nt, Artificial Sequence
  Description of Artificial Sequence: Synthetic oligonucleotide
  Antisense strand to SEQ ID NO: 837364
acacucacuggacuauuca

SEQ ID NO: 837366 - RNA, 19 nt, Artificial Sequence
  Description of Artificial Sequence: Synthetic oligonucleotide
  Sense strand starting at position 3620 of SEQ ID NO: 588036
uaguccagugaguguuaga

SEQ ID NO: 837367 - RNA, 19 nt, Artificial Sequence
  Description of Artificial Sequence: Synthetic oligonucleotide
  Antisense strand to SEQ ID NO: 837366
ucuaacacucacuggacua

SEQ ID NO: 837368 - RNA, 19 nt, Artificial Sequence
  Description of Artificial Sequence: Synthetic oligonucleotide
  Sense strand starting at position 3627 of SEQ ID NO: 588036
gugaguguuagagaaauua

SEQ ID NO: 837369 - RNA, 19 nt, Artificial Sequence
  Description of Artificial Sequence: Synthetic oligonucleotide
  Antisense strand to SEQ ID NO: 837368
uaauuucucuaacacucac

SEQ ID NO: 837370 - RNA, 19 nt, Artificial Sequence
  Description of Artificial Sequence: Synthetic oligonucleotide
  Sense strand starting at position 3643 of SEQ ID NO: 588036
uuaaacugguagucaaaga

SEQ ID NO: 837371 - RNA, 19 nt, Artificial Sequence
  Description of Artificial Sequence: Synthetic oligonucleotide
  Antisense strand to SEQ ID NO: 837370
ucuuugacuaccaguuuaa

SEQ ID NO: 837372 - RNA, 19 nt, Artificial Sequence
  Description of Artificial Sequence: Synthetic oligonucleotide
  Sense strand starting at position 30 of SEQ ID NO: 588037
ucagcuaaccuggguauau

SEQ ID NO: 837373 - RNA, 19 nt, Artificial Sequence
  Description of Artificial Sequence: Synthetic oligonucleotide
  Antisense strand to SEQ ID NO: 837372
auauacccagguuagcuga

SEQ ID NO: 837374 - RNA, 19 nt, Artificial Sequence
  Description of Artificial Sequence: Synthetic oligonucleotide
  Sense strand starting at position 43 of SEQ ID NO: 588037
guauaucuguuaccugaac

SEQ ID NO: 837375 - RNA, 19 nt, Artificial Sequence
  Description of Artificial Sequence: Synthetic oligonucleotide
  Antisense strand to SEQ ID NO: 837374
guucagguaacagauauac

SEQ ID NO: 837376 - RNA, 19 nt, Artificial Sequence
  Description of Artificial Sequence: Synthetic oligonucleotide
  Sense strand starting at position 81 of SEQ ID NO: 588037
ccuacuaagcuuggaguca

SEQ ID NO: 837377 - RNA, 19 nt, Artificial Sequence
  Description of Artificial Sequence: Synthetic oligonucleotide
  Antisense strand to SEQ ID NO: 837376
ugacuccaagcuuaguagg

SEQ ID NO: 837378 - RNA, 19 nt, Artificial Sequence
  Description of Artificial Sequence: Synthetic oligonucleotide
  Sense strand starting at position 148 of SEQ ID NO: 588037
gcuugucccuguguaauuu

SEQ ID NO: 837379 - RNA, 19 nt, Artificial Sequence
  Description of Artificial Sequence: Synthetic oligonucleotide
  Antisense strand to SEQ ID NO: 837378
aaauuacacagggacaagc

SEQ ID NO: 837380 - RNA, 19 nt, Artificial Sequence
  Description of Artificial Sequence: Synthetic oligonucleotide
  Sense strand starting at position 152 of SEQ ID NO: 588037
gucccuguguaauuuaucu

SEQ ID NO: 837381 - RNA, 19 nt, Artificial Sequence
  Description of Artificial Sequence: Synthetic oligonucleotide
  Antisense strand to SEQ ID NO: 837380
agauaaauuacacagggac

SEQ ID NO: 837382 - RNA, 19 nt, Artificial Sequence
  Description of Artificial Sequence: Synthetic oligonucleotide
  Sense strand starting at position 260 of SEQ ID NO: 588037
gauguacccaggugugaau

SEQ ID NO: 837383 - RNA, 19 nt, Artificial Sequence
  Description of Artificial Sequence: Synthetic oligonucleotide
  Antisense strand to SEQ ID NO: 837382
auucacaccuggguacauc

SEQ ID NO: 837384 - RNA, 19 nt, Artificial Sequence
  Description of Artificial Sequence: Synthetic oligonucleotide
  Sense strand starting at position 269 of SEQ ID NO: 588037
aggugugaauggguucauu

SEQ ID NO: 837385 - RNA, 19 nt, Artificial Sequence
  Description of Artificial Sequence: Synthetic oligonucleotide
  Antisense strand to SEQ ID NO: 837384
aaugaacccauucacaccu

SEQ ID NO: 837386 - RNA, 19 nt, Artificial Sequence
  Description of Artificial Sequence: Synthetic oligonucleotide
  Sense strand starting at position 346 of SEQ ID NO: 588037
gugguuugugagggacuga

SEQ ID NO: 837387 - RNA, 19 nt, Artificial Sequence
  Description of Artificial Sequence: Synthetic oligonucleotide
  Antisense strand to SEQ ID NO: 837386
ucagucccucacaaaccac

SEQ ID NO: 837388 - RNA, 19 nt, Artificial Sequence
  Description of Artificial Sequence: Synthetic oligonucleotide
  Sense strand starting at position 409 of SEQ ID NO: 588037
caagcuugcgucuugugua

SEQ ID NO: 837389 - RNA, 19 nt, Artificial Sequence
  Description of Artificial Sequence: Synthetic oligonucleotide
  Antisense strand to SEQ ID NO: 837388
uacacaagacgcaagcuug

SEQ ID NO: 837390 - RNA, 19 nt, Artificial Sequence
  Description of Artificial Sequence: Synthetic oligonucleotide
  Sense strand starting at position 564 of SEQ ID NO: 588037
uuuaccugucgcuaagaaa

SEQ ID NO: 837391 - RNA, 19 nt, Artificial Sequence
  Description of Artificial Sequence: Synthetic oligonucleotide
  Antisense strand to SEQ ID NO: 837390
uuucuuagcgacagguaaa

SEQ ID NO: 837392 - RNA, 19 nt, Artificial Sequence
  Description of Artificial Sequence: Synthetic oligonucleotide
  Sense strand starting at position 589 of SEQ ID NO: 588037
cgucuaauccagcaaacca

SEQ ID NO: 837393 - RNA, 19 nt, Artificial Sequence
  Description of Artificial Sequence: Synthetic oligonucleotide
  Antisense strand to SEQ ID NO: 837392
ugguuugcuggauuagacg

SEQ ID NO: 837394 - RNA, 19 nt, Artificial Sequence
  Description of Artificial Sequence: Synthetic oligonucleotide
  Sense strand starting at position 784 of SEQ ID NO: 588037
gaggaugucucaccuggga

SEQ ID NO: 837395 - RNA, 19 nt, Artificial Sequence
  Description of Artificial Sequence: Synthetic oligonucleotide
  Antisense strand to SEQ ID NO: 837394
ucccaggugagacauccuc

SEQ ID NO: 837396 - RNA, 19 nt, Artificial Sequence
  Description of Artificial Sequence: Synthetic oligonucleotide
  Sense strand starting at position 786 of SEQ ID NO: 588037
ggaugucucaccugggaac

SEQ ID NO: 837397 - RNA, 19 nt, Artificial Sequence
  Description of Artificial Sequence: Synthetic oligonucleotide
  Antisense strand to SEQ ID NO: 837396
guucccaggugagacaucc

SEQ ID NO: 837398 - RNA, 19 nt, Artificial Sequence
  Description of Artificial Sequence: Synthetic oligonucleotide
  Sense strand starting at position 787 of SEQ ID NO: 588037
gaugucucaccugggaaca

SEQ ID NO: 837399 - RNA, 19 nt, Artificial Sequence
  Description of Artificial Sequence: Synthetic oligonucleotide
  Antisense strand to SEQ ID NO: 837398
uguucccaggugagacauc

SEQ ID NO: 837400 - RNA, 19 nt, Artificial Sequence
  Description of Artificial Sequence: Synthetic oligonucleotide
  Sense strand starting at position 788 of SEQ ID NO: 588037
augucucaccugggaacaa

SEQ ID NO: 837401 - RNA, 19 nt, Artificial Sequence
  Description of Artificial Sequence: Synthetic oligonucleotide
  Antisense strand to SEQ ID NO: 837400
uuguucccaggugagacau

SEQ ID NO: 837402 - RNA, 19 nt, Artificial Sequence
  Description of Artificial Sequence: Synthetic oligonucleotide
  Sense strand starting at position 1406 of SEQ ID NO: 588037
ccguguaguccugcacgaa

SEQ ID NO: 837403 - RNA, 19 nt, Artificial Sequence
  Description of Artificial Sequence: Synthetic oligonucleotide
  Antisense strand to SEQ ID NO: 837402
uucgugcaggacuacacgg

SEQ ID NO: 837404 - RNA, 19 nt, Artificial Sequence
  Description of Artificial Sequence: Synthetic oligonucleotide
  Sense strand starting at position 2439 of SEQ ID NO: 588037
gcuuuccuccuggagaaac

SEQ ID NO: 837405 - RNA, 19 nt, Artificial Sequence
  Description of Artificial Sequence: Synthetic oligonucleotide
  Antisense strand to SEQ ID NO: 837404
guuucuccaggaggaaagc

SEQ ID NO: 837406 - RNA, 19 nt, Artificial Sequence
  Description of Artificial Sequence: Synthetic oligonucleotide
  Sense strand starting at position 2560 of SEQ ID NO: 588037
ggaugaccucauuguguag

SEQ ID NO: 837407 - RNA, 19 nt, Artificial Sequence
  Description of Artificial Sequence: Synthetic oligonucleotide
  Antisense strand to SEQ ID NO: 837406
cuacacaaugaggucaucc

SEQ ID NO: 837408 - RNA, 19 nt, Artificial Sequence
  Description of Artificial Sequence: Synthetic oligonucleotide
  Sense strand starting at position 2567 of SEQ ID NO: 588037
cucauuguguaguuagaca

SEQ ID NO: 837409 - RNA, 19 nt, Artificial Sequence
  Description of Artificial Sequence: Synthetic oligonucleotide
  Antisense strand to SEQ ID NO: 837408
ugucuaacuacacaaugag

SEQ ID NO: 837410 - RNA, 19 nt, Artificial Sequence
  Description of Artificial Sequence: Synthetic oligonucleotide
  Sense strand starting at position 2805 of SEQ ID NO: 588037
guaauaaaguuuccaucau

SEQ ID NO: 837411 - RNA, 19 nt, Artificial Sequence
  Description of Artificial Sequence: Synthetic oligonucleotide
  Antisense strand to SEQ ID NO: 837410
augauggaaacuuuauuac

SEQ ID NO: 837412 - RNA, 19 nt, Artificial Sequence
  Description of Artificial Sequence: Synthetic oligonucleotide
  Sense strand starting at position 2870 of SEQ ID NO: 588037
uugggucuuacauguugga

SEQ ID NO: 837413 - RNA, 19 nt, Artificial Sequence
  Description of Artificial Sequence: Synthetic oligonucleotide
  Antisense strand to SEQ ID NO: 837412
uccaacauguaagacccaa

SEQ ID NO: 837414 - RNA, 19 nt, Artificial Sequence
  Description of Artificial Sequence: Synthetic oligonucleotide
  Sense strand starting at position 2903 of SEQ ID NO: 588037
ggcauauugugaccuugaa

SEQ ID NO: 837415 - RNA, 19 nt, Artificial Sequence
  Description of Artificial Sequence: Synthetic oligonucleotide
  Antisense strand to SEQ ID NO: 837414
uucaaggucacaauaugcc

SEQ ID NO: 837416 - RNA, 19 nt, Artificial Sequence
  Description of Artificial Sequence: Synthetic oligonucleotide
  Sense strand starting at position 3021 of SEQ ID NO: 588037
gggcuuaaccuguaucaau

SEQ ID NO: 837417 - RNA, 19 nt, Artificial Sequence
  Description of Artificial Sequence: Synthetic oligonucleotide
  Antisense strand to SEQ ID NO: 837416
auugauacagguuaagccc

SEQ ID NO: 837418 - RNA, 19 nt, Artificial Sequence
  Description of Artificial Sequence: Synthetic oligonucleotide
  Sense strand starting at position 3107 of SEQ ID NO: 588037
ggguaaacauugcuuuaaa

SEQ ID NO: 837419 - RNA, 19 nt, Artificial Sequence
  Description of Artificial Sequence: Synthetic oligonucleotide
  Antisense strand to SEQ ID NO: 837418
uuuaaagcaauguuuaccc

SEQ ID NO: 837420 - RNA, 19 nt, Artificial Sequence
  Description of Artificial Sequence: Synthetic oligonucleotide
  Sense strand starting at position 3108 of SEQ ID NO: 588037
gguaaacauugcuuuaaau

SEQ ID NO: 837421 - RNA, 19 nt, Artificial Sequence
  Description of Artificial Sequence: Synthetic oligonucleotide
  Antisense strand to SEQ ID NO: 837420
auuuaaagcaauguuuacc

SEQ ID NO: 837422 - RNA, 19 nt, Artificial Sequence
  Description of Artificial Sequence: Synthetic oligonucleotide
  Sense strand starting at position 3148 of SEQ ID NO: 588037
gugcuauaucauuaaagua

SEQ ID NO: 837423 - RNA, 19 nt, Artificial Sequence
  Description of Artificial Sequence: Synthetic oligonucleotide
  Antisense strand to SEQ ID NO: 837422
uacuuuaaugauauagcac

SEQ ID NO: 837424 - RNA, 19 nt, Artificial Sequence
  Description of Artificial Sequence: Synthetic oligonucleotide
  Sense strand starting at position 3227 of SEQ ID NO: 588037
ggauuugaauuacaaugau

SEQ ID NO: 837425 - RNA, 19 nt, Artificial Sequence
  Description of Artificial Sequence: Synthetic oligonucleotide
  Antisense strand to SEQ ID NO: 837424
aucauuguaauucaaaucc

SEQ ID NO: 837426 - RNA, 19 nt, Artificial Sequence
  Description of Artificial Sequence: Synthetic oligonucleotide
  Sense strand starting at position 3241 of SEQ ID NO: 588037
augaucuuccagugaaagu

SEQ ID NO: 837427 - RNA, 19 nt, Artificial Sequence
  Description of Artificial Sequence: Synthetic oligonucleotide
  Antisense strand to SEQ ID NO: 837426
acuuucacuggaagaucau

SEQ ID NO: 837428 - RNA, 19 nt, Artificial Sequence
  Description of Artificial Sequence: Synthetic oligonucleotide
  Sense strand starting at position 3303 of SEQ ID NO: 588037
acaguuguuccugaucaga

SEQ ID NO: 837429 - RNA, 19 nt, Artificial Sequence
  Description of Artificial Sequence: Synthetic oligonucleotide
  Antisense strand to SEQ ID NO: 837428
ucugaucaggaacaacugu

SEQ ID NO: 837430 - RNA, 19 nt, Artificial Sequence
  Description of Artificial Sequence: Synthetic oligonucleotide
  Sense strand starting at position 3305 of SEQ ID NO: 588037
aguuguuccugaucagaug

SEQ ID NO: 837431 - RNA, 19 nt, Artificial Sequence
  Description of Artificial Sequence: Synthetic oligonucleotide
  Antisense strand to SEQ ID NO: 837430
caucugaucaggaacaacu

SEQ ID NO: 837432 - RNA, 19 nt, Artificial Sequence
  Description of Artificial Sequence: Synthetic oligonucleotide
  Sense strand starting at position 3306 of SEQ ID NO: 588037
guuguuccugaucagauga

SEQ ID NO: 837433 - RNA, 19 nt, Artificial Sequence
  Description of Artificial Sequence: Synthetic oligonucleotide
  Antisense strand to SEQ ID NO: 837432
ucaucugaucaggaacaac

SEQ ID NO: 837434 - RNA, 19 nt, Artificial Sequence
  Description of Artificial Sequence: Synthetic oligonucleotide
  Sense strand starting at position 3459 of SEQ ID NO: 588037
gccaauaacugucuuuaga

SEQ ID NO: 837435 - RNA, 19 nt, Artificial Sequence
  Description of Artificial Sequence: Synthetic oligonucleotide
  Antisense strand to SEQ ID NO: 837434
ucuaaagacaguuauuggc

SEQ ID NO: 837436 - RNA, 19 nt, Artificial Sequence
  Description of Artificial Sequence: Synthetic oligonucleotide
  Sense strand starting at position 3467 of SEQ ID NO: 588037
cugucuuuagaauguuaag

SEQ ID NO: 837437 - RNA, 19 nt, Artificial Sequence
  Description of Artificial Sequence: Synthetic oligonucleotide
  Antisense strand to SEQ ID NO: 837436
cuuaacauucuaaagacag

SEQ ID NO: 837438 - RNA, 19 nt, Artificial Sequence
  Description of Artificial Sequence: Synthetic oligonucleotide
  Sense strand starting at position 3518 of SEQ ID NO: 588037
gguucuauggcagaaaggu

SEQ ID NO: 837439 - RNA, 19 nt, Artificial Sequence
  Description of Artificial Sequence: Synthetic oligonucleotide
  Antisense strand to SEQ ID NO: 837438
accuuucugccauagaacc

SEQ ID NO: 837440 - RNA, 19 nt, Artificial Sequence
  Description of Artificial Sequence: Synthetic oligonucleotide
  Sense strand starting at position 3652 of SEQ ID NO: 588037
uauauaugccagugugaaa

SEQ ID NO: 837441 - RNA, 19 nt, Artificial Sequence
  Description of Artificial Sequence: Synthetic oligonucleotide
  Antisense strand to SEQ ID NO: 837440
uuucacacuggcauauaua

SEQ ID NO: 837442 - RNA, 19 nt, Artificial Sequence
  Description of Artificial Sequence: Synthetic oligonucleotide
  Sense strand starting at position 3768 of SEQ ID NO: 588037
auauaacuguauccaugua

SEQ ID NO: 837443 - RNA, 19 nt, Artificial Sequence
  Description of Artificial Sequence: Synthetic oligonucleotide
  Antisense strand to SEQ ID NO: 837442
uacauggauacaguuauau

SEQ ID NO: 837444 - RNA, 19 nt, Artificial Sequence
  Description of Artificial Sequence: Synthetic oligonucleotide
  Sense strand starting at position 3806 of SEQ ID NO: 588037
ccucauacucccuauggua

SEQ ID NO: 837445 - RNA, 19 nt, Artificial Sequence
  Description of Artificial Sequence: Synthetic oligonucleotide
  Antisense strand to SEQ ID NO: 837444
uaccauagggaguaugagg

SEQ ID NO: 837446 - RNA, 19 nt, Artificial Sequence
  Description of Artificial Sequence: Synthetic oligonucleotide
  Sense strand starting at position 3901 of SEQ ID NO: 588037
ucugcauauagaugggauu

SEQ ID NO: 837447 - RNA, 19 nt, Artificial Sequence
  Description of Artificial Sequence: Synthetic oligonucleotide
  Antisense strand to SEQ ID NO: 837446
aaucccaucuauaugcaga

SEQ ID NO: 837448 - RNA, 19 nt, Artificial Sequence
  Description of Artificial Sequence: Synthetic oligonucleotide
  Sense strand starting at position 3927 of SEQ ID NO: 588037
uuugcugaauuugaaugaa

SEQ ID NO: 837449 - RNA, 19 nt, Artificial Sequence
  Description of Artificial Sequence: Synthetic oligonucleotide
  Antisense strand to SEQ ID NO: 837448
uucauucaaauucagcaaa

SEQ ID NO: 837450 - RNA, 19 nt, Artificial Sequence
  Description of Artificial Sequence: Synthetic oligonucleotide
  Sense strand starting at position 3974 of SEQ ID NO: 588037
uaggauugcccagguauga

SEQ ID NO: 837451 - RNA, 19 nt, Artificial Sequence
  Description of Artificial Sequence: Synthetic oligonucleotide
  Antisense strand to SEQ ID NO: 837450
ucauaccugggcaauccua

SEQ ID NO: 837452 - RNA, 19 nt, Artificial Sequence
  Description of Artificial Sequence: Synthetic oligonucleotide
  Sense strand starting at position 382 of SEQ ID NO: 588038
ucaggaaucugguccagaa

SEQ ID NO: 837453 - RNA, 19 nt, Artificial Sequence
  Description of Artificial Sequence: Synthetic oligonucleotide
  Antisense strand to SEQ ID NO: 837452
uucuggaccagauuccuga

SEQ ID NO: 837454 - RNA, 19 nt, Artificial Sequence
  Description of Artificial Sequence: Synthetic oligonucleotide
  Sense strand starting at position 493 of SEQ ID NO: 588038
auuaauugauggcuaucau

SEQ ID NO: 837455 - RNA, 19 nt, Artificial Sequence
  Description of Artificial Sequence: Synthetic oligonucleotide
  Antisense strand to SEQ ID NO: 837454
augauagccaucaauuaau

SEQ ID NO: 837456 - RNA, 19 nt, Artificial Sequence
  Description of Artificial Sequence: Synthetic oligonucleotide
  Sense strand starting at position 494 of SEQ ID NO: 588038
uuaauugauggcuaucaua

SEQ ID NO: 837457 - RNA, 19 nt, Artificial Sequence
  Description of Artificial Sequence: Synthetic oligonucleotide
  Antisense strand to SEQ ID NO: 837456
uaugauagccaucaauuaa

SEQ ID NO: 837458 - RNA, 19 nt, Artificial Sequence
  Description of Artificial Sequence: Synthetic oligonucleotide
  Sense strand starting at position 528 of SEQ ID NO: 588038
auugaaaugccugauguag

SEQ ID NO: 837459 - RNA, 19 nt, Artificial Sequence
  Description of Artificial Sequence: Synthetic oligonucleotide
  Antisense strand to SEQ ID NO: 837458
cuacaucaggcauuucaau

SEQ ID NO: 837460 - RNA, 19 nt, Artificial Sequence
  Description of Artificial Sequence: Synthetic oligonucleotide
  Sense strand starting at position 661 of SEQ ID NO: 588038
aaaguacaacugugugaaa

SEQ ID NO: 837461 - RNA, 19 nt, Artificial Sequence
  Description of Artificial Sequence: Synthetic oligonucleotide
  Antisense strand to SEQ ID NO: 837460
uuucacacaguuguacuuu

SEQ ID NO: 837462 - RNA, 19 nt, Artificial Sequence
  Description of Artificial Sequence: Synthetic oligonucleotide
  Sense strand starting at position 663 of SEQ ID NO: 588038
aguacaacugugugaaaca

SEQ ID NO: 837463 - RNA, 19 nt, Artificial Sequence
  Description of Artificial Sequence: Synthetic oligonucleotide
  Antisense strand to SEQ ID NO: 837462
uguuucacacaguuguacu

SEQ ID NO: 837464 - RNA, 19 nt, Artificial Sequence
  Description of Artificial Sequence: Synthetic oligonucleotide
  Sense strand starting at position 822 of SEQ ID NO: 588038
ugugucaauuucucaccuu

SEQ ID NO: 837465 - RNA, 19 nt, Artificial Sequence
  Description of Artificial Sequence: Synthetic oligonucleotide
  Antisense strand to SEQ ID NO: 837464
aaggugagaaauugacaca

SEQ ID NO: 837466 - RNA, 19 nt, Artificial Sequence
  Description of Artificial Sequence: Synthetic oligonucleotide
  Sense strand starting at position 874 of SEQ ID NO: 588038
ggauauguucuacaucucu

SEQ ID NO: 837467 - RNA, 19 nt, Artificial Sequence
  Description of Artificial Sequence: Synthetic oligonucleotide
  Antisense strand to SEQ ID NO: 837466
agagauguagaacauaucc

SEQ ID NO: 837468 - RNA, 19 nt, Artificial Sequence
  Description of Artificial Sequence: Synthetic oligonucleotide
  Sense strand starting at position 914 of SEQ ID NO: 588038
auugucauaacucgaugga

SEQ ID NO: 837469 - RNA, 19 nt, Artificial Sequence
  Description of Artificial Sequence: Synthetic oligonucleotide
  Antisense strand to SEQ ID NO: 837468
uccaucgaguuaugacaau

SEQ ID NO: 837470 - RNA, 19 nt, Artificial Sequence
  Description of Artificial Sequence: Synthetic oligonucleotide
  Sense strand starting at position 915 of SEQ ID NO: 588038
uugucauaacucgauggaa

SEQ ID NO: 837471 - RNA, 19 nt, Artificial Sequence
  Description of Artificial Sequence: Synthetic oligonucleotide
  Antisense strand to SEQ ID NO: 837470
uuccaucgaguuaugacaa

SEQ ID NO: 837472 - RNA, 19 nt, Artificial Sequence
  Description of Artificial Sequence: Synthetic oligonucleotide
  Sense strand starting at position 917 of SEQ ID NO: 588038
gucauaacucgauggaacu

SEQ ID NO: 837473 - RNA, 19 nt, Artificial Sequence
  Description of Artificial Sequence: Synthetic oligonucleotide
  Antisense strand to SEQ ID NO: 837472
aguuccaucgaguuaugac

SEQ ID NO: 837474 - RNA, 19 nt, Artificial Sequence
  Description of Artificial Sequence: Synthetic oligonucleotide
  Sense strand starting at position 992 of SEQ ID NO: 588038
ggaagcuguaguuaacacu

SEQ ID NO: 837475 - RNA, 19 nt, Artificial Sequence
  Description of Artificial Sequence: Synthetic oligonucleotide
  Antisense strand to SEQ ID NO: 837474
aguguuaacuacagcuucc

SEQ ID NO: 837476 - RNA, 19 nt, Artificial Sequence
  Description of Artificial Sequence: Synthetic oligonucleotide
  Sense strand starting at position 998 of SEQ ID NO: 588038
uguaguuaacacuggauag

SEQ ID NO: 837477 - RNA, 19 nt, Artificial Sequence
  Description of Artificial Sequence: Synthetic oligonucleotide
  Antisense strand to SEQ ID NO: 837476
cuauccaguguuaacuaca

SEQ ID NO: 837478 - RNA, 19 nt, Artificial Sequence
  Description of Artificial Sequence: Synthetic oligonucleotide
  Sense strand starting at position 1017 of SEQ ID NO: 588038
uuaauacuuggcugauaag

SEQ ID NO: 837479 - RNA, 19 nt, Artificial Sequence
  Description of Artificial Sequence: Synthetic oligonucleotide
  Antisense strand to SEQ ID NO: 837478
cuuaucagccaaguauuaa

SEQ ID NO: 837480 - RNA, 19 nt, Artificial Sequence
  Description of Artificial Sequence: Synthetic oligonucleotide
  Sense strand starting at position 1035 of SEQ ID NO: 588038
gaaaccgacuuguuacaga

SEQ ID NO: 837481 - RNA, 19 nt, Artificial Sequence
  Description of Artificial Sequence: Synthetic oligonucleotide
  Antisense strand to SEQ ID NO: 837480
ucuguaacaagucgguuuc

SEQ ID NO: 837482 - RNA, 19 nt, Artificial Sequence
  Description of Artificial Sequence: Synthetic oligonucleotide
  Sense strand starting at position 1168 of SEQ ID NO: 588038
gggacaaguguuagugcga

SEQ ID NO: 837483 - RNA, 19 nt, Artificial Sequence
  Description of Artificial Sequence: Synthetic oligonucleotide
  Antisense strand to SEQ ID NO: 837482
ucgcacuaacacuuguccc

SEQ ID NO: 837484 - RNA, 19 nt, Artificial Sequence
  Description of Artificial Sequence: Synthetic oligonucleotide
  Sense strand starting at position 1294 of SEQ ID NO: 588038
gaggauuaagggcguuaag

SEQ ID NO: 837485 - RNA, 19 nt, Artificial Sequence
  Description of Artificial Sequence: Synthetic oligonucleotide
  Antisense strand to SEQ ID NO: 837484
cuuaacgcccuuaauccuc

SEQ ID NO: 837486 - RNA, 19 nt, Artificial Sequence
  Description of Artificial Sequence: Synthetic oligonucleotide
  Sense strand starting at position 2013 of SEQ ID NO: 588038
cgucacgugaccucuaguu

SEQ ID NO: 837487 - RNA, 19 nt, Artificial Sequence
  Description of Artificial Sequence: Synthetic oligonucleotide
  Antisense strand to SEQ ID NO: 837486
aacuagaggucacgugacg

SEQ ID NO: 837488 - RNA, 19 nt, Artificial Sequence
  Description of Artificial Sequence: Synthetic oligonucleotide
  Sense strand starting at position 2201 of SEQ ID NO: 588038
ggaguauccagauaggcga

SEQ ID NO: 837489 - RNA, 19 nt, Artificial Sequence
  Description of Artificial Sequence: Synthetic oligonucleotide
  Antisense strand to SEQ ID NO: 837488
ucgccuaucuggauacucc

SEQ ID NO: 837490 - RNA, 19 nt, Artificial Sequence
  Description of Artificial Sequence: Synthetic oligonucleotide
  Sense strand starting at position 2633 of SEQ ID NO: 588038
ccgauuuacuguucuugau

SEQ ID NO: 837491 - RNA, 19 nt, Artificial Sequence
  Description of Artificial Sequence: Synthetic oligonucleotide
  Antisense strand to SEQ ID NO: 837490
aucaagaacaguaaaucgg

SEQ ID NO: 837492 - RNA, 19 nt, Artificial Sequence
  Description of Artificial Sequence: Synthetic oligonucleotide
  Sense strand starting at position 2662 of SEQ ID NO: 588038
cagggugugcguguuuaaa

SEQ ID NO: 837493 - RNA, 19 nt, Artificial Sequence
  Description of Artificial Sequence: Synthetic oligonucleotide
  Antisense strand to SEQ ID NO: 837492
uuuaaacacgcacacccug

SEQ ID NO: 837494 - RNA, 19 nt, Artificial Sequence
  Description of Artificial Sequence: Synthetic oligonucleotide
  Sense strand starting at position 2710 of SEQ ID NO: 588038
caagaaagcguuuacuuug

SEQ ID NO: 837495 - RNA, 19 nt, Artificial Sequence
  Description of Artificial Sequence: Synthetic oligonucleotide
  Antisense strand to SEQ ID NO: 837494
caaaguaaacgcuuucuug

SEQ ID NO: 837496 - RNA, 19 nt, Artificial Sequence
  Description of Artificial Sequence: Synthetic oligonucleotide
  Sense strand starting at position 2935 of SEQ ID NO: 588038
guuugaguuuaauuugcag

SEQ ID NO: 837497 - RNA, 19 nt, Artificial Sequence
  Description of Artificial Sequence: Synthetic oligonucleotide
  Antisense strand to SEQ ID NO: 837496
cugcaaauuaaacucaaac

SEQ ID NO: 837498 - RNA, 19 nt, Artificial Sequence
  Description of Artificial Sequence: Synthetic oligonucleotide
  Sense strand starting at position 2968 of SEQ ID NO: 588038
cuguauuucuaagaagaua

SEQ ID NO: 837499 - RNA, 19 nt, Artificial Sequence
  Description of Artificial Sequence: Synthetic oligonucleotide
  Antisense strand to SEQ ID NO: 837498
uaucuucuuagaaauacag

SEQ ID NO: 837500 - RNA, 19 nt, Artificial Sequence
  Description of Artificial Sequence: Synthetic oligonucleotide
  Sense strand starting at position 3118 of SEQ ID NO: 588038
guuucucuugagcauagaa

SEQ ID NO: 837501 - RNA, 19 nt, Artificial Sequence
  Description of Artificial Sequence: Synthetic oligonucleotide
  Antisense strand to SEQ ID NO: 837500
uucuaugcucaagagaaac

SEQ ID NO: 837502 - RNA, 19 nt, Artificial Sequence
  Description of Artificial Sequence: Synthetic oligonucleotide
  Sense strand starting at position 3120 of SEQ ID NO: 588038
uucucuugagcauagaauu

SEQ ID NO: 837503 - RNA, 19 nt, Artificial Sequence
  Description of Artificial Sequence: Synthetic oligonucleotide
  Antisense strand to SEQ ID NO: 837502
aauucuaugcucaagagaa

SEQ ID NO: 837504 - RNA, 19 nt, Artificial Sequence
  Description of Artificial Sequence: Synthetic oligonucleotide
  Sense strand starting at position 3142 of SEQ ID NO: 588038
uugugcagucaagacauaa

SEQ ID NO: 837505 - RNA, 19 nt, Artificial Sequence
  Description of Artificial Sequence: Synthetic oligonucleotide
  Antisense strand to SEQ ID NO: 837504
uuaugucuugacugcacaa

SEQ ID NO: 837506 - RNA, 19 nt, Artificial Sequence
  Description of Artificial Sequence: Synthetic oligonucleotide
  Sense strand starting at position 3330 of SEQ ID NO: 588038
gggucagguaguuaccaaa

SEQ ID NO: 837507 - RNA, 19 nt, Artificial Sequence
  Description of Artificial Sequence: Synthetic oligonucleotide
  Antisense strand to SEQ ID NO: 837506
uuugguaacuaccugaccc

SEQ ID NO: 837508 - RNA, 19 nt, Artificial Sequence
  Description of Artificial Sequence: Synthetic oligonucleotide
  Sense strand starting at position 3399 of SEQ ID NO: 588038
augccagaucucuagggua

SEQ ID NO: 837509 - RNA, 19 nt, Artificial Sequence
  Description of Artificial Sequence: Synthetic oligonucleotide
  Antisense strand to SEQ ID NO: 837508
uacccuagagaucuggcau

SEQ ID NO: 837510 - RNA, 19 nt, Artificial Sequence
  Description of Artificial Sequence: Synthetic oligonucleotide
  Sense strand starting at position 3512 of SEQ ID NO: 588038
agaugcauauuaucagaau

SEQ ID NO: 837511 - RNA, 19 nt, Artificial Sequence
  Description of Artificial Sequence: Synthetic oligonucleotide
  Antisense strand to SEQ ID NO: 837510
auucugauaauaugcaucu

SEQ ID NO: 837512 - RNA, 19 nt, Artificial Sequence
  Description of Artificial Sequence: Synthetic oligonucleotide
  Sense strand starting at position 3525 of SEQ ID NO: 588038
cagaauuacccuggaaagu

SEQ ID NO: 837513 - RNA, 19 nt, Artificial Sequence
  Description of Artificial Sequence: Synthetic oligonucleotide
  Antisense strand to SEQ ID NO: 837512
acuuuccaggguaauucug

SEQ ID NO: 837514 - RNA, 19 nt, Artificial Sequence
  Description of Artificial Sequence: Synthetic oligonucleotide
  Sense strand starting at position 3534 of SEQ ID NO: 588038
ccuggaaagucucuuagaa

SEQ ID NO: 837515 - RNA, 19 nt, Artificial Sequence
  Description of Artificial Sequence: Synthetic oligonucleotide
  Antisense strand to SEQ ID NO: 837514
uucuaagagacuuuccagg

SEQ ID NO: 837516 - RNA, 19 nt, Artificial Sequence
  Description of Artificial Sequence: Synthetic oligonucleotide
  Sense strand starting at position 3556 of SEQ ID NO: 588038
caccauguuggagaucagu

SEQ ID NO: 837517 - RNA, 19 nt, Artificial Sequence
  Description of Artificial Sequence: Synthetic oligonucleotide
  Antisense strand to SEQ ID NO: 837516
acugaucuccaacauggug

SEQ ID NO: 837518 - RNA, 19 nt, Artificial Sequence
  Description of Artificial Sequence: Synthetic oligonucleotide
  Sense strand starting at position 3559 of SEQ ID NO: 588038
cauguuggagaucagugua

SEQ ID NO: 837519 - RNA, 19 nt, Artificial Sequence
  Description of Artificial Sequence: Synthetic oligonucleotide
  Antisense strand to SEQ ID NO: 837518
uacacugaucuccaacaug

SEQ ID NO: 837520 - RNA, 19 nt, Artificial Sequence
  Description of Artificial Sequence: Synthetic oligonucleotide
  Sense strand starting at position 3564 of SEQ ID NO: 588038
uggagaucaguguauuguc

SEQ ID NO: 837521 - RNA, 19 nt, Artificial Sequence
  Description of Artificial Sequence: Synthetic oligonucleotide
  Antisense strand to SEQ ID NO: 837520
gacaauacacugaucucca

SEQ ID NO: 837522 - RNA, 19 nt, Artificial Sequence
  Description of Artificial Sequence: Synthetic oligonucleotide
  Sense strand starting at position 3621 of SEQ ID NO: 588038
gaaacagauggcugauucu

SEQ ID NO: 837523 - RNA, 19 nt, Artificial Sequence
  Description of Artificial Sequence: Synthetic oligonucleotide
  Antisense strand to SEQ ID NO: 837522
agaaucagccaucuguuuc

SEQ ID NO: 837524 - RNA, 19 nt, Artificial Sequence
  Description of Artificial Sequence: Synthetic oligonucleotide
  Sense strand starting at position 3788 of SEQ ID NO: 588038
gauuuauagucucucgucu

SEQ ID NO: 837525 - RNA, 19 nt, Artificial Sequence
  Description of Artificial Sequence: Synthetic oligonucleotide
  Antisense strand to SEQ ID NO: 837524
agacgagagacuauaaauc

SEQ ID NO: 837526 - RNA, 19 nt, Artificial Sequence
  Description of Artificial Sequence: Synthetic oligonucleotide
  Sense strand starting at position 3846 of SEQ ID NO: 588038
uggaauggccaguggaauu

SEQ ID NO: 837527 - RNA, 19 nt, Artificial Sequence
  Description of Artificial Sequence: Synthetic oligonucleotide
  Antisense strand to SEQ ID NO: 837526
aauuccacuggccauucca

SEQ ID NO: 837528 - RNA, 19 nt, Artificial Sequence
  Description of Artificial Sequence: Synthetic oligonucleotide
  Sense strand starting at position 3923 of SEQ ID NO: 588038
gcuagaaauaaguguagau

SEQ ID NO: 837529 - RNA, 19 nt, Artificial Sequence
  Description of Artificial Sequence: Synthetic oligonucleotide
  Antisense strand to SEQ ID NO: 837528
aucuacacuuauuucuagc

SEQ ID NO: 837530 - RNA, 19 nt, Artificial Sequence
  Description of Artificial Sequence: Synthetic oligonucleotide
  Sense strand starting at position 3979 of SEQ ID NO: 588038
guggcuagaaguuaauauu

SEQ ID NO: 837531 - RNA, 19 nt, Artificial Sequence
  Description of Artificial Sequence: Synthetic oligonucleotide
  Antisense strand to SEQ ID NO: 837530
aauauuaacuucuagccac

SEQ ID NO: 837532 - RNA, 19 nt, Artificial Sequence
  Description of Artificial Sequence: Synthetic oligonucleotide
  Sense strand starting at position 464 of SEQ ID NO: 588039
ucaggaaucugguccagaa

SEQ ID NO: 837533 - RNA, 19 nt, Artificial Sequence
  Description of Artificial Sequence: Synthetic oligonucleotide
  Antisense strand to SEQ ID NO: 837532
uucuggaccagauuccuga

SEQ ID NO: 837534 - RNA, 19 nt, Artificial Sequence
  Description of Artificial Sequence: Synthetic oligonucleotide
  Sense strand starting at position 514 of SEQ ID NO: 588039
cugacuuuccagcagaguu

SEQ ID NO: 837535 - RNA, 19 nt, Artificial Sequence
  Description of Artificial Sequence: Synthetic oligonucleotide
  Antisense strand to SEQ ID NO: 837534
aacucugcuggaaagucag

SEQ ID NO: 837536 - RNA, 19 nt, Artificial Sequence
  Description of Artificial Sequence: Synthetic oligonucleotide
  Sense strand starting at position 575 of SEQ ID NO: 588039
auuaauugauggcuaucau

SEQ ID NO: 837537 - RNA, 19 nt, Artificial Sequence
  Description of Artificial Sequence: Synthetic oligonucleotide
  Antisense strand to SEQ ID NO: 837536
augauagccaucaauuaau

SEQ ID NO: 837538 - RNA, 19 nt, Artificial Sequence
  Description of Artificial Sequence: Synthetic oligonucleotide
  Sense strand starting at position 576 of SEQ ID NO: 588039
uuaauugauggcuaucaua

SEQ ID NO: 837539 - RNA, 19 nt, Artificial Sequence
  Description of Artificial Sequence: Synthetic oligonucleotide
  Antisense strand to SEQ ID NO: 837538
uaugauagccaucaauuaa

SEQ ID NO: 837540 - RNA, 19 nt, Artificial Sequence
  Description of Artificial Sequence: Synthetic oligonucleotide
  Sense strand starting at position 610 of SEQ ID NO: 588039
auugaaaugccugauguag

SEQ ID NO: 837541 - RNA, 19 nt, Artificial Sequence
  Description of Artificial Sequence: Synthetic oligonucleotide
  Antisense strand to SEQ ID NO: 837540
cuacaucaggcauuucaau

SEQ ID NO: 837542 - RNA, 19 nt, Artificial Sequence
  Description of Artificial Sequence: Synthetic oligonucleotide
  Sense strand starting at position 743 of SEQ ID NO: 588039
aaaguacaacugugugaaa

SEQ ID NO: 837543 - RNA, 19 nt, Artificial Sequence
  Description of Artificial Sequence: Synthetic oligonucleotide
  Antisense strand to SEQ ID NO: 837542
uuucacacaguuguacuuu

SEQ ID NO: 837544 - RNA, 19 nt, Artificial Sequence
  Description of Artificial Sequence: Synthetic oligonucleotide
  Sense strand starting at position 745 of SEQ ID NO: 588039
aguacaacugugugaaaca

SEQ ID NO: 837545 - RNA, 19 nt, Artificial Sequence
  Description of Artificial Sequence: Synthetic oligonucleotide
  Antisense strand to SEQ ID NO: 837544
uguuucacacaguuguacu

SEQ ID NO: 837546 - RNA, 19 nt, Artificial Sequence
  Description of Artificial Sequence: Synthetic oligonucleotide
  Sense strand starting at position 904 of SEQ ID NO: 588039
ugugucaauuucucaccuu

SEQ ID NO: 837547 - RNA, 19 nt, Artificial Sequence
  Description of Artificial Sequence: Synthetic oligonucleotide
  Antisense strand to SEQ ID NO: 837546
aaggugagaaauugacaca

SEQ ID NO: 837548 - RNA, 19 nt, Artificial Sequence
  Description of Artificial Sequence: Synthetic oligonucleotide
  Sense strand starting at position 956 of SEQ ID NO: 588039
ggauauguucuacaucucu

SEQ ID NO: 837549 - RNA, 19 nt, Artificial Sequence
  Description of Artificial Sequence: Synthetic oligonucleotide
  Antisense strand to SEQ ID NO: 837548
agagauguagaacauaucc

SEQ ID NO: 837550 - RNA, 19 nt, Artificial Sequence
  Description of Artificial Sequence: Synthetic oligonucleotide
  Sense strand starting at position 996 of SEQ ID NO: 588039
auugucauaacucgaugga

SEQ ID NO: 837551 - RNA, 19 nt, Artificial Sequence
  Description of Artificial Sequence: Synthetic oligonucleotide
  Antisense strand to SEQ ID NO: 837550
uccaucgaguuaugacaau

SEQ ID NO: 837552 - RNA, 19 nt, Artificial Sequence
  Description of Artificial Sequence: Synthetic oligonucleotide
  Sense strand starting at position 997 of SEQ ID NO: 588039
uugucauaacucgauggaa

SEQ ID NO: 837553 - RNA, 19 nt, Artificial Sequence
  Description of Artificial Sequence: Synthetic oligonucleotide
  Antisense strand to SEQ ID NO: 837552
uuccaucgaguuaugacaa

SEQ ID NO: 837554 - RNA, 19 nt, Artificial Sequence
  Description of Artificial Sequence: Synthetic oligonucleotide
  Sense strand starting at position 999 of SEQ ID NO: 588039
gucauaacucgauggaacu

SEQ ID NO: 837555 - RNA, 19 nt, Artificial Sequence
  Description of Artificial Sequence: Synthetic oligonucleotide
  Antisense strand to SEQ ID NO: 837554
aguuccaucgaguuaugac

SEQ ID NO: 837556 - RNA, 19 nt, Artificial Sequence
  Description of Artificial Sequence: Synthetic oligonucleotide
  Sense strand starting at position 1074 of SEQ ID NO: 588039
ggaagcuguaguuaacacu

SEQ ID NO: 837557 - RNA, 19 nt, Artificial Sequence
  Description of Artificial Sequence: Synthetic oligonucleotide
  Antisense strand to SEQ ID NO: 837556
aguguuaacuacagcuucc

SEQ ID NO: 837558 - RNA, 19 nt, Artificial Sequence
  Description of Artificial Sequence: Synthetic oligonucleotide
  Sense strand starting at position 1080 of SEQ ID NO: 588039
uguaguuaacacuggauag

SEQ ID NO: 837559 - RNA, 19 nt, Artificial Sequence
  Description of Artificial Sequence: Synthetic oligonucleotide
  Antisense strand to SEQ ID NO: 837558
cuauccaguguuaacuaca

SEQ ID NO: 837560 - RNA, 19 nt, Artificial Sequence
  Description of Artificial Sequence: Synthetic oligonucleotide
  Sense strand starting at position 1099 of SEQ ID NO: 588039
uuaauacuuggcugauaag

SEQ ID NO: 837561 - RNA, 19 nt, Artificial Sequence
  Description of Artificial Sequence: Synthetic oligonucleotide
  Antisense strand to SEQ ID NO: 837560
cuuaucagccaaguauuaa

SEQ ID NO: 837562 - RNA, 19 nt, Artificial Sequence
  Description of Artificial Sequence: Synthetic oligonucleotide
  Sense strand starting at position 1117 of SEQ ID NO: 588039
gaaaccgacuuguuacaga

SEQ ID NO: 837563 - RNA, 19 nt, Artificial Sequence
  Description of Artificial Sequence: Synthetic oligonucleotide
  Antisense strand to SEQ ID NO: 837562
ucuguaacaagucgguuuc

SEQ ID NO: 837564 - RNA, 19 nt, Artificial Sequence
  Description of Artificial Sequence: Synthetic oligonucleotide
  Sense strand starting at position 1250 of SEQ ID NO: 588039
gggacaaguguuagugcga

SEQ ID NO: 837565 - RNA, 19 nt, Artificial Sequence
  Description of Artificial Sequence: Synthetic oligonucleotide
  Antisense strand to SEQ ID NO: 837564
ucgcacuaacacuuguccc

SEQ ID NO: 837566 - RNA, 19 nt, Artificial Sequence
  Description of Artificial Sequence: Synthetic oligonucleotide
  Sense strand starting at position 1376 of SEQ ID NO: 588039
gaggauuaagggcguuaag

SEQ ID NO: 837567 - RNA, 19 nt, Artificial Sequence
  Description of Artificial Sequence: Synthetic oligonucleotide
  Antisense strand to SEQ ID NO: 837566
cuuaacgcccuuaauccuc

SEQ ID NO: 837568 - RNA, 19 nt, Artificial Sequence
  Description of Artificial Sequence: Synthetic oligonucleotide
  Sense strand starting at position 2095 of SEQ ID NO: 588039
cgucacgugaccucuaguu

SEQ ID NO: 837569 - RNA, 19 nt, Artificial Sequence
  Description of Artificial Sequence: Synthetic oligonucleotide
  Antisense strand to SEQ ID NO: 837568
aacuagaggucacgugacg

SEQ ID NO: 837570 - RNA, 19 nt, Artificial Sequence
  Description of Artificial Sequence: Synthetic oligonucleotide
  Sense strand starting at position 2283 of SEQ ID NO: 588039
ggaguauccagauaggcga

SEQ ID NO: 837571 - RNA, 19 nt, Artificial Sequence
  Description of Artificial Sequence: Synthetic oligonucleotide
  Antisense strand to SEQ ID NO: 837570
ucgccuaucuggauacucc

SEQ ID NO: 837572 - RNA, 19 nt, Artificial Sequence
  Description of Artificial Sequence: Synthetic oligonucleotide
  Sense strand starting at position 2651 of SEQ ID NO: 588039
ucucuaauuuagggagaaa

SEQ ID NO: 837573 - RNA, 19 nt, Artificial Sequence
  Description of Artificial Sequence: Synthetic oligonucleotide
  Antisense strand to SEQ ID NO: 837572
uuucucccuaaauuagaga

SEQ ID NO: 837574 - RNA, 19 nt, Artificial Sequence
  Description of Artificial Sequence: Synthetic oligonucleotide
  Sense strand starting at position 2715 of SEQ ID NO: 588039
ccgauuuacuguucuugau

SEQ ID NO: 837575 - RNA, 19 nt, Artificial Sequence
  Description of Artificial Sequence: Synthetic oligonucleotide
  Antisense strand to SEQ ID NO: 837574
aucaagaacaguaaaucgg

SEQ ID NO: 837576 - RNA, 19 nt, Artificial Sequence
  Description of Artificial Sequence: Synthetic oligonucleotide
  Sense strand starting at position 2744 of SEQ ID NO: 588039
cagggugugcguguuuaaa

SEQ ID NO: 837577 - RNA, 19 nt, Artificial Sequence
  Description of Artificial Sequence: Synthetic oligonucleotide
  Antisense strand to SEQ ID NO: 837576
uuuaaacacgcacacccug

SEQ ID NO: 837578 - RNA, 19 nt, Artificial Sequence
  Description of Artificial Sequence: Synthetic oligonucleotide
  Sense strand starting at position 2792 of SEQ ID NO: 588039
caagaaagcguuuacuuug

SEQ ID NO: 837579 - RNA, 19 nt, Artificial Sequence
  Description of Artificial Sequence: Synthetic oligonucleotide
  Antisense strand to SEQ ID NO: 837578
caaaguaaacgcuuucuug

SEQ ID NO: 837580 - RNA, 19 nt, Artificial Sequence
  Description of Artificial Sequence: Synthetic oligonucleotide
  Sense strand starting at position 3017 of SEQ ID NO: 588039
guuugaguuuaauuugcag

SEQ ID NO: 837581 - RNA, 19 nt, Artificial Sequence
  Description of Artificial Sequence: Synthetic oligonucleotide
  Antisense strand to SEQ ID NO: 837580
cugcaaauuaaacucaaac

SEQ ID NO: 837582 - RNA, 19 nt, Artificial Sequence
  Description of Artificial Sequence: Synthetic oligonucleotide
  Sense strand starting at position 3050 of SEQ ID NO: 588039
cuguauuucuaagaagaua

SEQ ID NO: 837583 - RNA, 19 nt, Artificial Sequence
  Description of Artificial Sequence: Synthetic oligonucleotide
  Antisense strand to SEQ ID NO: 837582
uaucuucuuagaaauacag

SEQ ID NO: 837584 - RNA, 19 nt, Artificial Sequence
  Description of Artificial Sequence: Synthetic oligonucleotide
  Sense strand starting at position 3200 of SEQ ID NO: 588039
guuucucuugagcauagaa

SEQ ID NO: 837585 - RNA, 19 nt, Artificial Sequence
  Description of Artificial Sequence: Synthetic oligonucleotide
  Antisense strand to SEQ ID NO: 837584
uucuaugcucaagagaaac

SEQ ID NO: 837586 - RNA, 19 nt, Artificial Sequence
  Description of Artificial Sequence: Synthetic oligonucleotide
  Sense strand starting at position 3202 of SEQ ID NO: 588039
uucucuugagcauagaauu

SEQ ID NO: 837587 - RNA, 19 nt, Artificial Sequence
  Description of Artificial Sequence: Synthetic oligonucleotide
  Antisense strand to SEQ ID NO: 837586
aauucuaugcucaagagaa

SEQ ID NO: 837588 - RNA, 19 nt, Artificial Sequence
  Description of Artificial Sequence: Synthetic oligonucleotide
  Sense strand starting at position 3224 of SEQ ID NO: 588039
uugugcagucaagacauaa

SEQ ID NO: 837589 - RNA, 19 nt, Artificial Sequence
  Description of Artificial Sequence: Synthetic oligonucleotide
  Antisense strand to SEQ ID NO: 837588
uuaugucuugacugcacaa

SEQ ID NO: 837590 - RNA, 19 nt, Artificial Sequence
  Description of Artificial Sequence: Synthetic oligonucleotide
  Sense strand starting at position 3412 of SEQ ID NO: 588039
gggucagguaguuaccaaa

SEQ ID NO: 837591 - RNA, 19 nt, Artificial Sequence
  Description of Artificial Sequence: Synthetic oligonucleotide
  Antisense strand to SEQ ID NO: 837590
uuugguaacuaccugaccc

SEQ ID NO: 837592 - RNA, 19 nt, Artificial Sequence
  Description of Artificial Sequence: Synthetic oligonucleotide
  Sense strand starting at position 3481 of SEQ ID NO: 588039
augccagaucucuagggua

SEQ ID NO: 837593 - RNA, 19 nt, Artificial Sequence
  Description of Artificial Sequence: Synthetic oligonucleotide
  Antisense strand to SEQ ID NO: 837592
uacccuagagaucuggcau

SEQ ID NO: 837594 - RNA, 19 nt, Artificial Sequence
  Description of Artificial Sequence: Synthetic oligonucleotide
  Sense strand starting at position 3594 of SEQ ID NO: 588039
agaugcauauuaucagaau

SEQ ID NO: 837595 - RNA, 19 nt, Artificial Sequence
  Description of Artificial Sequence: Synthetic oligonucleotide
  Antisense strand to SEQ ID NO: 837594
auucugauaauaugcaucu

SEQ ID NO: 837596 - RNA, 19 nt, Artificial Sequence
  Description of Artificial Sequence: Synthetic oligonucleotide
  Sense strand starting at position 3607 of SEQ ID NO: 588039
cagaauuacccuggaaagu

SEQ ID NO: 837597 - RNA, 19 nt, Artificial Sequence
  Description of Artificial Sequence: Synthetic oligonucleotide
  Antisense strand to SEQ ID NO: 837596
acuuuccaggguaauucug

SEQ ID NO: 837598 - RNA, 19 nt, Artificial Sequence
  Description of Artificial Sequence: Synthetic oligonucleotide
  Sense strand starting at position 3616 of SEQ ID NO: 588039
ccuggaaagucucuuagaa

SEQ ID NO: 837599 - RNA, 19 nt, Artificial Sequence
  Description of Artificial Sequence: Synthetic oligonucleotide
  Antisense strand to SEQ ID NO: 837598
uucuaagagacuuuccagg

SEQ ID NO: 837600 - RNA, 19 nt, Artificial Sequence
  Description of Artificial Sequence: Synthetic oligonucleotide
  Sense strand starting at position 3638 of SEQ ID NO: 588039
caccauguuggagaucagu

SEQ ID NO: 837601 - RNA, 19 nt, Artificial Sequence
  Description of Artificial Sequence: Synthetic oligonucleotide
  Antisense strand to SEQ ID NO: 837600
acugaucuccaacauggug

SEQ ID NO: 837602 - RNA, 19 nt, Artificial Sequence
  Description of Artificial Sequence: Synthetic oligonucleotide
  Sense strand starting at position 3641 of SEQ ID NO: 588039
cauguuggagaucagugua

SEQ ID NO: 837603 - RNA, 19 nt, Artificial Sequence
  Description of Artificial Sequence: Synthetic oligonucleotide
  Antisense strand to SEQ ID NO: 837602
uacacugaucuccaacaug

SEQ ID NO: 837604 - RNA, 19 nt, Artificial Sequence
  Description of Artificial Sequence: Synthetic oligonucleotide
  Sense strand starting at position 3646 of SEQ ID NO: 588039
uggagaucaguguauuguc

SEQ ID NO: 837605 - RNA, 19 nt, Artificial Sequence
  Description of Artificial Sequence: Synthetic oligonucleotide
  Antisense strand to SEQ ID NO: 837604
gacaauacacugaucucca

SEQ ID NO: 837606 - RNA, 19 nt, Artificial Sequence
  Description of Artificial Sequence: Synthetic oligonucleotide
  Sense strand starting at position 3703 of SEQ ID NO: 588039
gaaacagauggcugauucu

SEQ ID NO: 837607 - RNA, 19 nt, Artificial Sequence
  Description of Artificial Sequence: Synthetic oligonucleotide
  Antisense strand to SEQ ID NO: 837606
agaaucagccaucuguuuc

SEQ ID NO: 837608 - RNA, 19 nt, Artificial Sequence
  Description of Artificial Sequence: Synthetic oligonucleotide
  Sense strand starting at position 3870 of SEQ ID NO: 588039
gauuuauagucucucgucu

SEQ ID NO: 837609 - RNA, 19 nt, Artificial Sequence
  Description of Artificial Sequence: Synthetic oligonucleotide
  Antisense strand to SEQ ID NO: 837608
agacgagagacuauaaauc

SEQ ID NO: 837610 - RNA, 19 nt, Artificial Sequence
  Description of Artificial Sequence: Synthetic oligonucleotide
  Sense strand starting at position 3928 of SEQ ID NO: 588039
uggaauggccaguggaauu

SEQ ID NO: 837611 - RNA, 19 nt, Artificial Sequence
  Description of Artificial Sequence: Synthetic oligonucleotide
  Antisense strand to SEQ ID NO: 837610
aauuccacuggccauucca

SEQ ID NO: 837612 - RNA, 19 nt, Artificial Sequence
  Description of Artificial Sequence: Synthetic oligonucleotide
  Sense strand starting at position 55 of SEQ ID NO: 588040
cgacaaaugcugugaagau

SEQ ID NO: 837613 - RNA, 19 nt, Artificial Sequence
  Description of Artificial Sequence: Synthetic oligonucleotide
  Antisense strand to SEQ ID NO: 837612
aucuucacagcauuugucg

SEQ ID NO: 837614 - RNA, 19 nt, Artificial Sequence
  Description of Artificial Sequence: Synthetic oligonucleotide
  Sense strand starting at position 64 of SEQ ID NO: 588040
cugugaagauugcuuugau

SEQ ID NO: 837615 - RNA, 19 nt, Artificial Sequence
  Description of Artificial Sequence: Synthetic oligonucleotide
  Antisense strand to SEQ ID NO: 837614
aucaaagcaaucuucacag

SEQ ID NO: 837616 - RNA, 19 nt, Artificial Sequence
  Description of Artificial Sequence: Synthetic oligonucleotide
  Sense strand starting at position 65 of SEQ ID NO: 588040
ugugaagauugcuuugaug

SEQ ID NO: 837617 - RNA, 19 nt, Artificial Sequence
  Description of Artificial Sequence: Synthetic oligonucleotide
  Antisense strand to SEQ ID NO: 837616
caucaaagcaaucuucaca

SEQ ID NO: 837618 - RNA, 19 nt, Artificial Sequence
  Description of Artificial Sequence: Synthetic oligonucleotide
  Sense strand starting at position 67 of SEQ ID NO: 588040
ugaagauugcuuugaugca

SEQ ID NO: 837619 - RNA, 19 nt, Artificial Sequence
  Description of Artificial Sequence: Synthetic oligonucleotide
  Antisense strand to SEQ ID NO: 837618
ugcaucaaagcaaucuuca

SEQ ID NO: 837620 - RNA, 19 nt, Artificial Sequence
  Description of Artificial Sequence: Synthetic oligonucleotide
  Sense strand starting at position 167 of SEQ ID NO: 588040
agcaaauagcacgauguau

SEQ ID NO: 837621 - RNA, 19 nt, Artificial Sequence
  Description of Artificial Sequence: Synthetic oligonucleotide
  Antisense strand to SEQ ID NO: 837620
auacaucgugcuauuugcu

SEQ ID NO: 837622 - RNA, 19 nt, Artificial Sequence
  Description of Artificial Sequence: Synthetic oligonucleotide
  Sense strand starting at position 169 of SEQ ID NO: 588040
caaauagcacgauguauau

SEQ ID NO: 837623 - RNA, 19 nt, Artificial Sequence
  Description of Artificial Sequence: Synthetic oligonucleotide
  Antisense strand to SEQ ID NO: 837622
auauacaucgugcuauuug

SEQ ID NO: 837624 - RNA, 19 nt, Artificial Sequence
  Description of Artificial Sequence: Synthetic oligonucleotide
  Sense strand starting at position 254 of SEQ ID NO: 588040
guucuagaaugcucauaga

SEQ ID NO: 837625 - RNA, 19 nt, Artificial Sequence
  Description of Artificial Sequence: Synthetic oligonucleotide
  Antisense strand to SEQ ID NO: 837624
ucuaugagcauucuagaac

SEQ ID NO: 837626 - RNA, 19 nt, Artificial Sequence
  Description of Artificial Sequence: Synthetic oligonucleotide
  Sense strand starting at position 469 of SEQ ID NO: 588040
cuuagaaaugacugcuaua

SEQ ID NO: 837627 - RNA, 19 nt, Artificial Sequence
  Description of Artificial Sequence: Synthetic oligonucleotide
  Antisense strand to SEQ ID NO: 837626
uauagcagucauuucuaag

SEQ ID NO: 837628 - RNA, 19 nt, Artificial Sequence
  Description of Artificial Sequence: Synthetic oligonucleotide
  Sense strand starting at position 571 of SEQ ID NO: 588040
agguacuggcuuugaaaca

SEQ ID NO: 837629 - RNA, 19 nt, Artificial Sequence
  Description of Artificial Sequence: Synthetic oligonucleotide
  Antisense strand to SEQ ID NO: 837628
uguuucaaagccaguaccu

SEQ ID NO: 837630 - RNA, 19 nt, Artificial Sequence
  Description of Artificial Sequence: Synthetic oligonucleotide
  Sense strand starting at position 678 of SEQ ID NO: 588040
acugaucucuggccugaaa

SEQ ID NO: 837631 - RNA, 19 nt, Artificial Sequence
  Description of Artificial Sequence: Synthetic oligonucleotide
  Antisense strand to SEQ ID NO: 837630
uuucaggccagagaucagu

SEQ ID NO: 837632 - RNA, 19 nt, Artificial Sequence
  Description of Artificial Sequence: Synthetic oligonucleotide
  Sense strand starting at position 755 of SEQ ID NO: 588040
cagauucuuguagacguau

SEQ ID NO: 837633 - RNA, 19 nt, Artificial Sequence
  Description of Artificial Sequence: Synthetic oligonucleotide
  Antisense strand to SEQ ID NO: 837632
auacgucuacaagaaucug

SEQ ID NO: 837634 - RNA, 19 nt, Artificial Sequence
  Description of Artificial Sequence: Synthetic oligonucleotide
  Sense strand starting at position 768 of SEQ ID NO: 588040
acguauuaagaaugagauc

SEQ ID NO: 837635 - RNA, 19 nt, Artificial Sequence
  Description of Artificial Sequence: Synthetic oligonucleotide
  Antisense strand to SEQ ID NO: 837634
gaucucauucuuaauacgu

SEQ ID NO: 837636 - RNA, 19 nt, Artificial Sequence
  Description of Artificial Sequence: Synthetic oligonucleotide
  Sense strand starting at position 874 of SEQ ID NO: 588040
ugcacuugguuaccuagaa

SEQ ID NO: 837637 - RNA, 19 nt, Artificial Sequence
  Description of Artificial Sequence: Synthetic oligonucleotide
  Antisense strand to SEQ ID NO: 837636
uucuagguaaccaagugca

SEQ ID NO: 837638 - RNA, 19 nt, Artificial Sequence
  Description of Artificial Sequence: Synthetic oligonucleotide
  Sense strand starting at position 875 of SEQ ID NO: 588040
gcacuugguuaccuagaaa

SEQ ID NO: 837639 - RNA, 19 nt, Artificial Sequence
  Description of Artificial Sequence: Synthetic oligonucleotide
  Antisense strand to SEQ ID NO: 837638
uuucuagguaaccaagugc

SEQ ID NO: 837640 - RNA, 19 nt, Artificial Sequence
  Description of Artificial Sequence: Synthetic oligonucleotide
  Sense strand starting at position 912 of SEQ ID NO: 588040
auggaugugcaucaauaac

SEQ ID NO: 837641 - RNA, 19 nt, Artificial Sequence
  Description of Artificial Sequence: Synthetic oligonucleotide
  Antisense strand to SEQ ID NO: 837640
guuauugaugcacauccau

SEQ ID NO: 837642 - RNA, 19 nt, Artificial Sequence
  Description of Artificial Sequence: Synthetic oligonucleotide
  Sense strand starting at position 941 of SEQ ID NO: 588040
auaucagaucucuggcaca

SEQ ID NO: 837643 - RNA, 19 nt, Artificial Sequence
  Description of Artificial Sequence: Synthetic oligonucleotide
  Antisense strand to SEQ ID NO: 837642
ugugccagagaucugauau

SEQ ID NO: 837644 - RNA, 19 nt, Artificial Sequence
  Description of Artificial Sequence: Synthetic oligonucleotide
  Sense strand starting at position 972 of SEQ ID NO: 588040
uuuaucuaguuugcaagaa

SEQ ID NO: 837645 - RNA, 19 nt, Artificial Sequence
  Description of Artificial Sequence: Synthetic oligonucleotide
  Antisense strand to SEQ ID NO: 837644
uucuugcaaacuagauaaa

SEQ ID NO: 837646 - RNA, 19 nt, Artificial Sequence
  Description of Artificial Sequence: Synthetic oligonucleotide
  Sense strand starting at position 976 of SEQ ID NO: 588040
ucuaguuugcaagaaauua

SEQ ID NO: 837647 - RNA, 19 nt, Artificial Sequence
  Description of Artificial Sequence: Synthetic oligonucleotide
  Antisense strand to SEQ ID NO: 837646
uaauuucuugcaaacuaga

SEQ ID NO: 837648 - RNA, 19 nt, Artificial Sequence
  Description of Artificial Sequence: Synthetic oligonucleotide
  Sense strand starting at position 1103 of SEQ ID NO: 588040
gcucuugagccggaucaag

SEQ ID NO: 837649 - RNA, 19 nt, Artificial Sequence
  Description of Artificial Sequence: Synthetic oligonucleotide
  Antisense strand to SEQ ID NO: 837648
cuugauccggcucaagagc

SEQ ID NO: 837650 - RNA, 19 nt, Artificial Sequence
  Description of Artificial Sequence: Synthetic oligonucleotide
  Sense strand starting at position 1308 of SEQ ID NO: 588040
uacgauuuggagugucgga

SEQ ID NO: 837651 - RNA, 19 nt, Artificial Sequence
  Description of Artificial Sequence: Synthetic oligonucleotide
  Antisense strand to SEQ ID NO: 837650
uccgacacuccaaaucgua

SEQ ID NO: 837652 - RNA, 19 nt, Artificial Sequence
  Description of Artificial Sequence: Synthetic oligonucleotide
  Sense strand starting at position 1431 of SEQ ID NO: 588040
agguuuaucagcgcgaggu

SEQ ID NO: 837653 - RNA, 19 nt, Artificial Sequence
  Description of Artificial Sequence: Synthetic oligonucleotide
  Antisense strand to SEQ ID NO: 837652
accucgcgcugauaaaccu

SEQ ID NO: 837654 - RNA, 19 nt, Artificial Sequence
  Description of Artificial Sequence: Synthetic oligonucleotide
  Sense strand starting at position 1457 of SEQ ID NO: 588040
uuguuaucugcugagggau

SEQ ID NO: 837655 - RNA, 19 nt, Artificial Sequence
  Description of Artificial Sequence: Synthetic oligonucleotide
  Antisense strand to SEQ ID NO: 837654
aucccucagcagauaacaa

SEQ ID NO: 837656 - RNA, 19 nt, Artificial Sequence
  Description of Artificial Sequence: Synthetic oligonucleotide
  Sense strand starting at position 2197 of SEQ ID NO: 588040
ggaacaaagcuuuguuuac

SEQ ID NO: 837657 - RNA, 19 nt, Artificial Sequence
  Description of Artificial Sequence: Synthetic oligonucleotide
  Antisense strand to SEQ ID NO: 837656
guaaacaaagcuuuguucc

SEQ ID NO: 837658 - RNA, 19 nt, Artificial Sequence
  Description of Artificial Sequence: Synthetic oligonucleotide
  Sense strand starting at position 2472 of SEQ ID NO: 588040
cgagauuccuuacuuucca

SEQ ID NO: 837659 - RNA, 19 nt, Artificial Sequence
  Description of Artificial Sequence: Synthetic oligonucleotide
  Antisense strand to SEQ ID NO: 837658
uggaaaguaaggaaucucg

SEQ ID NO: 837660 - RNA, 19 nt, Artificial Sequence
  Description of Artificial Sequence: Synthetic oligonucleotide
  Sense strand starting at position 2619 of SEQ ID NO: 588040
ccuuucguccuugauaaac

SEQ ID NO: 837661 - RNA, 19 nt, Artificial Sequence
  Description of Artificial Sequence: Synthetic oligonucleotide
  Antisense strand to SEQ ID NO: 837660
guuuaucaaggacgaaagg

SEQ ID NO: 837662 - RNA, 19 nt, Artificial Sequence
  Description of Artificial Sequence: Synthetic oligonucleotide
  Sense strand starting at position 2691 of SEQ ID NO: 588040
aguucuggcuucccaaaga

SEQ ID NO: 837663 - RNA, 19 nt, Artificial Sequence
  Description of Artificial Sequence: Synthetic oligonucleotide
  Antisense strand to SEQ ID NO: 837662
ucuuugggaagccagaacu

SEQ ID NO: 837664 - RNA, 19 nt, Artificial Sequence
  Description of Artificial Sequence: Synthetic oligonucleotide
  Sense strand starting at position 2829 of SEQ ID NO: 588040
ccaucucucugggucagau

SEQ ID NO: 837665 - RNA, 19 nt, Artificial Sequence
  Description of Artificial Sequence: Synthetic oligonucleotide
  Antisense strand to SEQ ID NO: 837664
aucugacccagagagaugg

SEQ ID NO: 837666 - RNA, 19 nt, Artificial Sequence
  Description of Artificial Sequence: Synthetic oligonucleotide
  Sense strand starting at position 2880 of SEQ ID NO: 588040
agucuuccucacuaggaau

SEQ ID NO: 837667 - RNA, 19 nt, Artificial Sequence
  Description of Artificial Sequence: Synthetic oligonucleotide
  Antisense strand to SEQ ID NO: 837666
auuccuagugaggaagacu

SEQ ID NO: 837668 - RNA, 19 nt, Artificial Sequence
  Description of Artificial Sequence: Synthetic oligonucleotide
  Sense strand starting at position 2892 of SEQ ID NO: 588040
uaggaauuaucuguuagau

SEQ ID NO: 837669 - RNA, 19 nt, Artificial Sequence
  Description of Artificial Sequence: Synthetic oligonucleotide
  Antisense strand to SEQ ID NO: 837668
aucuaacagauaauuccua

SEQ ID NO: 837670 - RNA, 19 nt, Artificial Sequence
  Description of Artificial Sequence: Synthetic oligonucleotide
  Sense strand starting at position 2968 of SEQ ID NO: 588040
guuagaucauagcuggauu

SEQ ID NO: 837671 - RNA, 19 nt, Artificial Sequence
  Description of Artificial Sequence: Synthetic oligonucleotide
  Antisense strand to SEQ ID NO: 837670
aauccagcuaugaucuaac

SEQ ID NO: 837672 - RNA, 19 nt, Artificial Sequence
  Description of Artificial Sequence: Synthetic oligonucleotide
  Sense strand starting at position 2985 of SEQ ID NO: 588040
uucugagagcacugauugu

SEQ ID NO: 837673 - RNA, 19 nt, Artificial Sequence
  Description of Artificial Sequence: Synthetic oligonucleotide
  Antisense strand to SEQ ID NO: 837672
acaaucagugcucucagaa

SEQ ID NO: 837674 - RNA, 19 nt, Artificial Sequence
  Description of Artificial Sequence: Synthetic oligonucleotide
  Sense strand starting at position 2989 of SEQ ID NO: 588040
gagagcacugauuguuuga

SEQ ID NO: 837675 - RNA, 19 nt, Artificial Sequence
  Description of Artificial Sequence: Synthetic oligonucleotide
  Antisense strand to SEQ ID NO: 837674
ucaaacaaucagugcucuc

SEQ ID NO: 837676 - RNA, 19 nt, Artificial Sequence
  Description of Artificial Sequence: Synthetic oligonucleotide
  Sense strand starting at position 2991 of SEQ ID NO: 588040
gagcacugauuguuugaag

SEQ ID NO: 837677 - RNA, 19 nt, Artificial Sequence
  Description of Artificial Sequence: Synthetic oligonucleotide
  Antisense strand to SEQ ID NO: 837676
cuucaaacaaucagugcuc

SEQ ID NO: 837678 - RNA, 19 nt, Artificial Sequence
  Description of Artificial Sequence: Synthetic oligonucleotide
  Sense strand starting at position 3191 of SEQ ID NO: 588040
ggguucuguaugcaaauua

SEQ ID NO: 837679 - RNA, 19 nt, Artificial Sequence
  Description of Artificial Sequence: Synthetic oligonucleotide
  Antisense strand to SEQ ID NO: 837678
uaauuugcauacagaaccc

SEQ ID NO: 837680 - RNA, 19 nt, Artificial Sequence
  Description of Artificial Sequence: Synthetic oligonucleotide
  Sense strand starting at position 3411 of SEQ ID NO: 588040
ggcaucgggcaaugaaaua

SEQ ID NO: 837681 - RNA, 19 nt, Artificial Sequence
  Description of Artificial Sequence: Synthetic oligonucleotide
  Antisense strand to SEQ ID NO: 837680
uauuucauugcccgaugcc

SEQ ID NO: 837682 - RNA, 19 nt, Artificial Sequence
  Description of Artificial Sequence: Synthetic oligonucleotide
  Sense strand starting at position 3439 of SEQ ID NO: 588040
ucacaauugcaauggaaau

SEQ ID NO: 837683 - RNA, 19 nt, Artificial Sequence
  Description of Artificial Sequence: Synthetic oligonucleotide
  Antisense strand to SEQ ID NO: 837682
auuuccauugcaauuguga

SEQ ID NO: 837684 - RNA, 19 nt, Artificial Sequence
  Description of Artificial Sequence: Synthetic oligonucleotide
  Sense strand starting at position 3450 of SEQ ID NO: 588040
auggaaauucuuuggauuc

SEQ ID NO: 837685 - RNA, 19 nt, Artificial Sequence
  Description of Artificial Sequence: Synthetic oligonucleotide
  Antisense strand to SEQ ID NO: 837684
gaauccaaagaauuuccau

SEQ ID NO: 837686 - RNA, 19 nt, Artificial Sequence
  Description of Artificial Sequence: Synthetic oligonucleotide
  Sense strand starting at position 3637 of SEQ ID NO: 588040
aggaguugguucuucaagu

SEQ ID NO: 837687 - RNA, 19 nt, Artificial Sequence
  Description of Artificial Sequence: Synthetic oligonucleotide
  Antisense strand to SEQ ID NO: 837686
acuugaagaaccaacuccu

SEQ ID NO: 837688 - RNA, 19 nt, Artificial Sequence
  Description of Artificial Sequence: Synthetic oligonucleotide
  Sense strand starting at position 3749 of SEQ ID NO: 588040
uguuaacaccuugguccaa

SEQ ID NO: 837689 - RNA, 19 nt, Artificial Sequence
  Description of Artificial Sequence: Synthetic oligonucleotide
  Antisense strand to SEQ ID NO: 837688
uuggaccaagguguuaaca

SEQ ID NO: 837690 - RNA, 19 nt, Artificial Sequence
  Description of Artificial Sequence: Synthetic oligonucleotide
  Sense strand starting at position 3795 of SEQ ID NO: 588040
gguaauagauuccuaauua

SEQ ID NO: 837691 - RNA, 19 nt, Artificial Sequence
  Description of Artificial Sequence: Synthetic oligonucleotide
  Antisense strand to SEQ ID NO: 837690
uaauuaggaaucuauuacc

SEQ ID NO: 837692 - RNA, 19 nt, Artificial Sequence
  Description of Artificial Sequence: Synthetic oligonucleotide
  Sense strand starting at position 111 of SEQ ID NO: 588041
auguaacugguauguacaa

SEQ ID NO: 837693 - RNA, 19 nt, Artificial Sequence
  Description of Artificial Sequence: Synthetic oligonucleotide
  Antisense strand to SEQ ID NO: 837692
uuguacauaccaguuacau

SEQ ID NO: 837694 - RNA, 19 nt, Artificial Sequence
  Description of Artificial Sequence: Synthetic oligonucleotide
  Sense strand starting at position 112 of SEQ ID NO: 588041
uguaacugguauguacaaa

SEQ ID NO: 837695 - RNA, 19 nt, Artificial Sequence
  Description of Artificial Sequence: Synthetic oligonucleotide
  Antisense strand to SEQ ID NO: 837694
uuuguacauaccaguuaca

SEQ ID NO: 837696 - RNA, 19 nt, Artificial Sequence
  Description of Artificial Sequence: Synthetic oligonucleotide
  Sense strand starting at position 271 of SEQ ID NO: 588041
uuucuaacacuguguuacu

SEQ ID NO: 837697 - RNA, 19 nt, Artificial Sequence
  Description of Artificial Sequence: Synthetic oligonucleotide
  Antisense strand to SEQ ID NO: 837696
aguaacacaguguuagaaa

SEQ ID NO: 837698 - RNA, 19 nt, Artificial Sequence
  Description of Artificial Sequence: Synthetic oligonucleotide
  Sense strand starting at position 373 of SEQ ID NO: 588041
gcacuaucccaagaaagca

SEQ ID NO: 837699 - RNA, 19 nt, Artificial Sequence
  Description of Artificial Sequence: Synthetic oligonucleotide
  Antisense strand to SEQ ID NO: 837698
ugcuuucuugggauagugc

SEQ ID NO: 837700 - RNA, 19 nt, Artificial Sequence
  Description of Artificial Sequence: Synthetic oligonucleotide
  Sense strand starting at position 722 of SEQ ID NO: 588041
cauuaaugugauggaauac

SEQ ID NO: 837701 - RNA, 19 nt, Artificial Sequence
  Description of Artificial Sequence: Synthetic oligonucleotide
  Antisense strand to SEQ ID NO: 837700
guauuccaucacauuaaug

SEQ ID NO: 837702 - RNA, 19 nt, Artificial Sequence
  Description of Artificial Sequence: Synthetic oligonucleotide
  Sense strand starting at position 760 of SEQ ID NO: 588041
caguguaauccagacaugu

SEQ ID NO: 837703 - RNA, 19 nt, Artificial Sequence
  Description of Artificial Sequence: Synthetic oligonucleotide
  Antisense strand to SEQ ID NO: 837702
acaugucuggauuacacug

SEQ ID NO: 837704 - RNA, 19 nt, Artificial Sequence
  Description of Artificial Sequence: Synthetic oligonucleotide
  Sense strand starting at position 762 of SEQ ID NO: 588041
guguaauccagacauguca

SEQ ID NO: 837705 - RNA, 19 nt, Artificial Sequence
  Description of Artificial Sequence: Synthetic oligonucleotide
  Antisense strand to SEQ ID NO: 837704
ugacaugucuggauuacac

SEQ ID NO: 837706 - RNA, 19 nt, Artificial Sequence
  Description of Artificial Sequence: Synthetic oligonucleotide
  Sense strand starting at position 990 of SEQ ID NO: 588041
auagaacuuggcuaccuua

SEQ ID NO: 837707 - RNA, 19 nt, Artificial Sequence
  Description of Artificial Sequence: Synthetic oligonucleotide
  Antisense strand to SEQ ID NO: 837706
uaagguagccaaguucuau

SEQ ID NO: 837708 - RNA, 19 nt, Artificial Sequence
  Description of Artificial Sequence: Synthetic oligonucleotide
  Sense strand starting at position 1001 of SEQ ID NO: 588041
cuaccuuagccaugaugaa

SEQ ID NO: 837709 - RNA, 19 nt, Artificial Sequence
  Description of Artificial Sequence: Synthetic oligonucleotide
  Antisense strand to SEQ ID NO: 837708
uucaucauggcuaagguag

SEQ ID NO: 837710 - RNA, 19 nt, Artificial Sequence
  Description of Artificial Sequence: Synthetic oligonucleotide
  Sense strand starting at position 1005 of SEQ ID NO: 588041
cuuagccaugaugaauauu

SEQ ID NO: 837711 - RNA, 19 nt, Artificial Sequence
  Description of Artificial Sequence: Synthetic oligonucleotide
  Antisense strand to SEQ ID NO: 837710
aauauucaucauggcuaag

SEQ ID NO: 837712 - RNA, 19 nt, Artificial Sequence
  Description of Artificial Sequence: Synthetic oligonucleotide
  Sense strand starting at position 1101 of SEQ ID NO: 588041
aggcaacauugagcaauaa

SEQ ID NO: 837713 - RNA, 19 nt, Artificial Sequence
  Description of Artificial Sequence: Synthetic oligonucleotide
  Antisense strand to SEQ ID NO: 837712
uuauugcucaauguugccu

SEQ ID NO: 837714 - RNA, 19 nt, Artificial Sequence
  Description of Artificial Sequence: Synthetic oligonucleotide
  Sense strand starting at position 1178 of SEQ ID NO: 588041
agacgaaagaugcgguaaa

SEQ ID NO: 837715 - RNA, 19 nt, Artificial Sequence
  Description of Artificial Sequence: Synthetic oligonucleotide
  Antisense strand to SEQ ID NO: 837714
uuuaccgcaucuuucgucu

SEQ ID NO: 837716 - RNA, 19 nt, Artificial Sequence
  Description of Artificial Sequence: Synthetic oligonucleotide
  Sense strand starting at position 2490 of SEQ ID NO: 588041
aguugugguacucaaacuu

SEQ ID NO: 837717 - RNA, 19 nt, Artificial Sequence
  Description of Artificial Sequence: Synthetic oligonucleotide
  Antisense strand to SEQ ID NO: 837716
aaguuugaguaccacaacu

SEQ ID NO: 837718 - RNA, 19 nt, Artificial Sequence
  Description of Artificial Sequence: Synthetic oligonucleotide
  Sense strand starting at position 2568 of SEQ ID NO: 588041
ccguaaucucuggagucag

SEQ ID NO: 837719 - RNA, 19 nt, Artificial Sequence
  Description of Artificial Sequence: Synthetic oligonucleotide
  Antisense strand to SEQ ID NO: 837718
cugacuccagagauuacgg

SEQ ID NO: 837720 - RNA, 19 nt, Artificial Sequence
  Description of Artificial Sequence: Synthetic oligonucleotide
  Sense strand starting at position 2643 of SEQ ID NO: 588041
ugaauaaaguugccuagga

SEQ ID NO: 837721 - RNA, 19 nt, Artificial Sequence
  Description of Artificial Sequence: Synthetic oligonucleotide
  Antisense strand to SEQ ID NO: 837720
uccuaggcaacuuuauuca

SEQ ID NO: 837722 - RNA, 19 nt, Artificial Sequence
  Description of Artificial Sequence: Synthetic oligonucleotide
  Sense strand starting at position 2644 of SEQ ID NO: 588041
gaauaaaguugccuaggau

SEQ ID NO: 837723 - RNA, 19 nt, Artificial Sequence
  Description of Artificial Sequence: Synthetic oligonucleotide
  Antisense strand to SEQ ID NO: 837722
auccuaggcaacuuuauuc

SEQ ID NO: 837724 - RNA, 19 nt, Artificial Sequence
  Description of Artificial Sequence: Synthetic oligonucleotide
  Sense strand starting at position 2647 of SEQ ID NO: 588041
uaaaguugccuaggauacu

SEQ ID NO: 837725 - RNA, 19 nt, Artificial Sequence
  Description of Artificial Sequence: Synthetic oligonucleotide
  Antisense strand to SEQ ID NO: 837724
aguauccuaggcaacuuua

SEQ ID NO: 837726 - RNA, 19 nt, Artificial Sequence
  Description of Artificial Sequence: Synthetic oligonucleotide
  Sense strand starting at position 2653 of SEQ ID NO: 588041
ugccuaggauacuuaagua

SEQ ID NO: 837727 - RNA, 19 nt, Artificial Sequence
  Description of Artificial Sequence: Synthetic oligonucleotide
  Antisense strand to SEQ ID NO: 837726
uacuuaaguauccuaggca

SEQ ID NO: 837728 - RNA, 19 nt, Artificial Sequence
  Description of Artificial Sequence: Synthetic oligonucleotide
  Sense strand starting at position 2657 of SEQ ID NO: 588041
uaggauacuuaaguauagu

SEQ ID NO: 837729 - RNA, 19 nt, Artificial Sequence
  Description of Artificial Sequence: Synthetic oligonucleotide
  Antisense strand to SEQ ID NO: 837728
acuauacuuaaguauccua

SEQ ID NO: 837730 - RNA, 19 nt, Artificial Sequence
  Description of Artificial Sequence: Synthetic oligonucleotide
  Sense strand starting at position 2663 of SEQ ID NO: 588041
acuuaaguauaguugcaga

SEQ ID NO: 837731 - RNA, 19 nt, Artificial Sequence
  Description of Artificial Sequence: Synthetic oligonucleotide
  Antisense strand to SEQ ID NO: 837730
ucugcaacuauacuuaagu

SEQ ID NO: 837732 - RNA, 19 nt, Artificial Sequence
  Description of Artificial Sequence: Synthetic oligonucleotide
  Sense strand starting at position 2806 of SEQ ID NO: 588041
ggcaaagauuccuugucuc

SEQ ID NO: 837733 - RNA, 19 nt, Artificial Sequence
  Description of Artificial Sequence: Synthetic oligonucleotide
  Antisense strand to SEQ ID NO: 837732
gagacaaggaaucuuugcc

SEQ ID NO: 837734 - RNA, 19 nt, Artificial Sequence
  Description of Artificial Sequence: Synthetic oligonucleotide
  Sense strand starting at position 2898 of SEQ ID NO: 588041
agugaucauuuagaaagua

SEQ ID NO: 837735 - RNA, 19 nt, Artificial Sequence
  Description of Artificial Sequence: Synthetic oligonucleotide
  Antisense strand to SEQ ID NO: 837734
uacuuucuaaaugaucacu

SEQ ID NO: 837736 - RNA, 19 nt, Artificial Sequence
  Description of Artificial Sequence: Synthetic oligonucleotide
  Sense strand starting at position 2954 of SEQ ID NO: 588041
gugcaacaguaucuuagaa

SEQ ID NO: 837737 - RNA, 19 nt, Artificial Sequence
  Description of Artificial Sequence: Synthetic oligonucleotide
  Antisense strand to SEQ ID NO: 837736
uucuaagauacuguugcac

SEQ ID NO: 837738 - RNA, 19 nt, Artificial Sequence
  Description of Artificial Sequence: Synthetic oligonucleotide
  Sense strand starting at position 3033 of SEQ ID NO: 588041
uuaaguucugguuagacag

SEQ ID NO: 837739 - RNA, 19 nt, Artificial Sequence
  Description of Artificial Sequence: Synthetic oligonucleotide
  Antisense strand to SEQ ID NO: 837738
cugucuaaccagaacuuaa

SEQ ID NO: 837740 - RNA, 19 nt, Artificial Sequence
  Description of Artificial Sequence: Synthetic oligonucleotide
  Sense strand starting at position 3205 of SEQ ID NO: 588041
ugcuaugagccaggaacuu

SEQ ID NO: 837741 - RNA, 19 nt, Artificial Sequence
  Description of Artificial Sequence: Synthetic oligonucleotide
  Antisense strand to SEQ ID NO: 837740
aaguuccuggcucauagca

SEQ ID NO: 837742 - RNA, 19 nt, Artificial Sequence
  Description of Artificial Sequence: Synthetic oligonucleotide
  Sense strand starting at position 3266 of SEQ ID NO: 588041
gucuuugauccuuaguauc

SEQ ID NO: 837743 - RNA, 19 nt, Artificial Sequence
  Description of Artificial Sequence: Synthetic oligonucleotide
  Antisense strand to SEQ ID NO: 837742
gauacuaaggaucaaagac

SEQ ID NO: 837744 - RNA, 19 nt, Artificial Sequence
  Description of Artificial Sequence: Synthetic oligonucleotide
  Sense strand starting at position 3268 of SEQ ID NO: 588041
cuuugauccuuaguaucau

SEQ ID NO: 837745 - RNA, 19 nt, Artificial Sequence
  Description of Artificial Sequence: Synthetic oligonucleotide
  Antisense strand to SEQ ID NO: 837744
augauacuaaggaucaaag

SEQ ID NO: 837746 - RNA, 19 nt, Artificial Sequence
  Description of Artificial Sequence: Synthetic oligonucleotide
  Sense strand starting at position 3277 of SEQ ID NO: 588041
uuaguaucauggcuuugga

SEQ ID NO: 837747 - RNA, 19 nt, Artificial Sequence
  Description of Artificial Sequence: Synthetic oligonucleotide
  Antisense strand to SEQ ID NO: 837746
uccaaagccaugauacuaa

SEQ ID NO: 837748 - RNA, 19 nt, Artificial Sequence
  Description of Artificial Sequence: Synthetic oligonucleotide
  Sense strand starting at position 3309 of SEQ ID NO: 588041
gaauuuaaauucuagugga

SEQ ID NO: 837749 - RNA, 19 nt, Artificial Sequence
  Description of Artificial Sequence: Synthetic oligonucleotide
  Antisense strand to SEQ ID NO: 837748
uccacuagaauuuaaauuc

SEQ ID NO: 837750 - RNA, 19 nt, Artificial Sequence
  Description of Artificial Sequence: Synthetic oligonucleotide
  Sense strand starting at position 3326 of SEQ ID NO: 588041
gagcaagaauuaguguuau

SEQ ID NO: 837751 - RNA, 19 nt, Artificial Sequence
  Description of Artificial Sequence: Synthetic oligonucleotide
  Antisense strand to SEQ ID NO: 837750
auaacacuaauucuugcuc

SEQ ID NO: 837752 - RNA, 19 nt, Artificial Sequence
  Description of Artificial Sequence: Synthetic oligonucleotide
  Sense strand starting at position 3340 of SEQ ID NO: 588041
guuauaaucuugguaaagg

SEQ ID NO: 837753 - RNA, 19 nt, Artificial Sequence
  Description of Artificial Sequence: Synthetic oligonucleotide
  Antisense strand to SEQ ID NO: 837752
ccuuuaccaagauuauaac

SEQ ID NO: 837754 - RNA, 19 nt, Artificial Sequence
  Description of Artificial Sequence: Synthetic oligonucleotide
  Sense strand starting at position 3411 of SEQ ID NO: 588041
uguacaguuccugacacaa

SEQ ID NO: 837755 - RNA, 19 nt, Artificial Sequence
  Description of Artificial Sequence: Synthetic oligonucleotide
  Antisense strand to SEQ ID NO: 837754
uugugucaggaacuguaca

SEQ ID NO: 837756 - RNA, 19 nt, Artificial Sequence
  Description of Artificial Sequence: Synthetic oligonucleotide
  Sense strand starting at position 3442 of SEQ ID NO: 588041
agcaaauuguggcuauaua

SEQ ID NO: 837757 - RNA, 19 nt, Artificial Sequence
  Description of Artificial Sequence: Synthetic oligonucleotide
  Antisense strand to SEQ ID NO: 837756
uauauagccacaauuugcu

SEQ ID NO: 837758 - RNA, 19 nt, Artificial Sequence
  Description of Artificial Sequence: Synthetic oligonucleotide
  Sense strand starting at position 3443 of SEQ ID NO: 588041
gcaaauuguggcuauauac

SEQ ID NO: 837759 - RNA, 19 nt, Artificial Sequence
  Description of Artificial Sequence: Synthetic oligonucleotide
  Antisense strand to SEQ ID NO: 837758
guauauagccacaauuugc

SEQ ID NO: 837760 - RNA, 19 nt, Artificial Sequence
  Description of Artificial Sequence: Synthetic oligonucleotide
  Sense strand starting at position 3451 of SEQ ID NO: 588041
uggcuauauacagguaaug

SEQ ID NO: 837761 - RNA, 19 nt, Artificial Sequence
  Description of Artificial Sequence: Synthetic oligonucleotide
  Antisense strand to SEQ ID NO: 837760
cauuaccuguauauagcca

SEQ ID NO: 837762 - RNA, 19 nt, Artificial Sequence
  Description of Artificial Sequence: Synthetic oligonucleotide
  Sense strand starting at position 3495 of SEQ ID NO: 588041
cggaaauaguaaucgcuua

SEQ ID NO: 837763 - RNA, 19 nt, Artificial Sequence
  Description of Artificial Sequence: Synthetic oligonucleotide
  Antisense strand to SEQ ID NO: 837762
uaagcgauuacuauuuccg

SEQ ID NO: 837764 - RNA, 19 nt, Artificial Sequence
  Description of Artificial Sequence: Synthetic oligonucleotide
  Sense strand starting at position 3496 of SEQ ID NO: 588041
ggaaauaguaaucgcuuac

SEQ ID NO: 837765 - RNA, 19 nt, Artificial Sequence
  Description of Artificial Sequence: Synthetic oligonucleotide
  Antisense strand to SEQ ID NO: 837764
guaagcgauuacuauuucc

SEQ ID NO: 837766 - RNA, 19 nt, Artificial Sequence
  Description of Artificial Sequence: Synthetic oligonucleotide
  Sense strand starting at position 3621 of SEQ ID NO: 588041
acagcuagucacuaugaga

SEQ ID NO: 837767 - RNA, 19 nt, Artificial Sequence
  Description of Artificial Sequence: Synthetic oligonucleotide
  Antisense strand to SEQ ID NO: 837766
ucucauagugacuagcugu

SEQ ID NO: 837768 - RNA, 19 nt, Artificial Sequence
  Description of Artificial Sequence: Synthetic oligonucleotide
  Sense strand starting at position 3650 of SEQ ID NO: 588041
gaacucaagcagugugacu

SEQ ID NO: 837769 - RNA, 19 nt, Artificial Sequence
  Description of Artificial Sequence: Synthetic oligonucleotide
  Antisense strand to SEQ ID NO: 837768
agucacacugcuugaguuc

SEQ ID NO: 837770 - RNA, 19 nt, Artificial Sequence
  Description of Artificial Sequence: Synthetic oligonucleotide
  Sense strand starting at position 3950 of SEQ ID NO: 588041
ggguuaaauuguguuuaaa

SEQ ID NO: 837771 - RNA, 19 nt, Artificial Sequence
  Description of Artificial Sequence: Synthetic oligonucleotide
  Antisense strand to SEQ ID NO: 837770
uuuaaacacaauuuaaccc

SEQ ID NO: 837772 - RNA, 19 nt, Artificial Sequence
  Description of Artificial Sequence: Synthetic oligonucleotide
  Sense strand starting at position 9 of SEQ ID NO: 588042
gcaaacaguggauguauua

SEQ ID NO: 837773 - RNA, 19 nt, Artificial Sequence
  Description of Artificial Sequence: Synthetic oligonucleotide
  Antisense strand to SEQ ID NO: 837772
uaauacauccacuguuugc

SEQ ID NO: 837774 - RNA, 19 nt, Artificial Sequence
  Description of Artificial Sequence: Synthetic oligonucleotide
  Sense strand starting at position 18 of SEQ ID NO: 588042
ggauguauuaugcaguuua

SEQ ID NO: 837775 - RNA, 19 nt, Artificial Sequence
  Description of Artificial Sequence: Synthetic oligonucleotide
  Antisense strand to SEQ ID NO: 837774
uaaacugcauaauacaucc

SEQ ID NO: 837776 - RNA, 19 nt, Artificial Sequence
  Description of Artificial Sequence: Synthetic oligonucleotide
  Sense strand starting at position 182 of SEQ ID NO: 588042
uuguguacuuaccuuaaag

SEQ ID NO: 837777 - RNA, 19 nt, Artificial Sequence
  Description of Artificial Sequence: Synthetic oligonucleotide
  Antisense strand to SEQ ID NO: 837776
cuuuaagguaaguacacaa

SEQ ID NO: 837778 - RNA, 19 nt, Artificial Sequence
  Description of Artificial Sequence: Synthetic oligonucleotide
  Sense strand starting at position 193 of SEQ ID NO: 588042
ccuuaaagcggguaacaua

SEQ ID NO: 837779 - RNA, 19 nt, Artificial Sequence
  Description of Artificial Sequence: Synthetic oligonucleotide
  Antisense strand to SEQ ID NO: 837778
uauguuacccgcuuuaagg

SEQ ID NO: 837780 - RNA, 19 nt, Artificial Sequence
  Description of Artificial Sequence: Synthetic oligonucleotide
  Sense strand starting at position 310 of SEQ ID NO: 588042
ucuccaagucuacauaguu

SEQ ID NO: 837781 - RNA, 19 nt, Artificial Sequence
  Description of Artificial Sequence: Synthetic oligonucleotide
  Antisense strand to SEQ ID NO: 837780
aacuauguagacuuggaga

SEQ ID NO: 837782 - RNA, 19 nt, Artificial Sequence
  Description of Artificial Sequence: Synthetic oligonucleotide
  Sense strand starting at position 326 of SEQ ID NO: 588042
guuccuaauggguagacua

SEQ ID NO: 837783 - RNA, 19 nt, Artificial Sequence
  Description of Artificial Sequence: Synthetic oligonucleotide
  Antisense strand to SEQ ID NO: 837782
uagucuacccauuaggaac

SEQ ID NO: 837784 - RNA, 19 nt, Artificial Sequence
  Description of Artificial Sequence: Synthetic oligonucleotide
  Sense strand starting at position 433 of SEQ ID NO: 588042
ucagguuuaugcuuacaac

SEQ ID NO: 837785 - RNA, 19 nt, Artificial Sequence
  Description of Artificial Sequence: Synthetic oligonucleotide
  Antisense strand to SEQ ID NO: 837784
guuguaagcauaaaccuga

SEQ ID NO: 837786 - RNA, 19 nt, Artificial Sequence
  Description of Artificial Sequence: Synthetic oligonucleotide
  Sense strand starting at position 561 of SEQ ID NO: 588042
auguaacugguauguacaa

SEQ ID NO: 837787 - RNA, 19 nt, Artificial Sequence
  Description of Artificial Sequence: Synthetic oligonucleotide
  Antisense strand to SEQ ID NO: 837786
uuguacauaccaguuacau

SEQ ID NO: 837788 - RNA, 19 nt, Artificial Sequence
  Description of Artificial Sequence: Synthetic oligonucleotide
  Sense strand starting at position 562 of SEQ ID NO: 588042
uguaacugguauguacaaa

SEQ ID NO: 837789 - RNA, 19 nt, Artificial Sequence
  Description of Artificial Sequence: Synthetic oligonucleotide
  Antisense strand to SEQ ID NO: 837788
uuuguacauaccaguuaca

SEQ ID NO: 837790 - RNA, 19 nt, Artificial Sequence
  Description of Artificial Sequence: Synthetic oligonucleotide
  Sense strand starting at position 823 of SEQ ID NO: 588042
gcacuaucccaagaaagca

SEQ ID NO: 837791 - RNA, 19 nt, Artificial Sequence
  Description of Artificial Sequence: Synthetic oligonucleotide
  Antisense strand to SEQ ID NO: 837790
ugcuuucuugggauagugc

SEQ ID NO: 837792 - RNA, 19 nt, Artificial Sequence
  Description of Artificial Sequence: Synthetic oligonucleotide
  Sense strand starting at position 1172 of SEQ ID NO: 588042
cauuaaugugauggaauac

SEQ ID NO: 837793 - RNA, 19 nt, Artificial Sequence
  Description of Artificial Sequence: Synthetic oligonucleotide
  Antisense strand to SEQ ID NO: 837792
guauuccaucacauuaaug

SEQ ID NO: 837794 - RNA, 19 nt, Artificial Sequence
  Description of Artificial Sequence: Synthetic oligonucleotide
  Sense strand starting at position 1210 of SEQ ID NO: 588042
caguguaauccagacaugu

SEQ ID NO: 837795 - RNA, 19 nt, Artificial Sequence
  Description of Artificial Sequence: Synthetic oligonucleotide
  Antisense strand to SEQ ID NO: 837794
acaugucuggauuacacug

SEQ ID NO: 837796 - RNA, 19 nt, Artificial Sequence
  Description of Artificial Sequence: Synthetic oligonucleotide
  Sense strand starting at position 1212 of SEQ ID NO: 588042
guguaauccagacauguca

SEQ ID NO: 837797 - RNA, 19 nt, Artificial Sequence
  Description of Artificial Sequence: Synthetic oligonucleotide
  Antisense strand to SEQ ID NO: 837796
ugacaugucuggauuacac

SEQ ID NO: 837798 - RNA, 19 nt, Artificial Sequence
  Description of Artificial Sequence: Synthetic oligonucleotide
  Sense strand starting at position 1440 of SEQ ID NO: 588042
auagaacuuggcuaccuua

SEQ ID NO: 837799 - RNA, 19 nt, Artificial Sequence
  Description of Artificial Sequence: Synthetic oligonucleotide
  Antisense strand to SEQ ID NO: 837798
uaagguagccaaguucuau

SEQ ID NO: 837800 - RNA, 19 nt, Artificial Sequence
  Description of Artificial Sequence: Synthetic oligonucleotide
  Sense strand starting at position 1451 of SEQ ID NO: 588042
cuaccuuagccaugaugaa

SEQ ID NO: 837801 - RNA, 19 nt, Artificial Sequence
  Description of Artificial Sequence: Synthetic oligonucleotide
  Antisense strand to SEQ ID NO: 837800
uucaucauggcuaagguag

SEQ ID NO: 837802 - RNA, 19 nt, Artificial Sequence
  Description of Artificial Sequence: Synthetic oligonucleotide
  Sense strand starting at position 1455 of SEQ ID NO: 588042
cuuagccaugaugaauauu

SEQ ID NO: 837803 - RNA, 19 nt, Artificial Sequence
  Description of Artificial Sequence: Synthetic oligonucleotide
  Antisense strand to SEQ ID NO: 837802
aauauucaucauggcuaag

SEQ ID NO: 837804 - RNA, 19 nt, Artificial Sequence
  Description of Artificial Sequence: Synthetic oligonucleotide
  Sense strand starting at position 1551 of SEQ ID NO: 588042
aggcaacauugagcaauaa

SEQ ID NO: 837805 - RNA, 19 nt, Artificial Sequence
  Description of Artificial Sequence: Synthetic oligonucleotide
  Antisense strand to SEQ ID NO: 837804
uuauugcucaauguugccu

SEQ ID NO: 837806 - RNA, 19 nt, Artificial Sequence
  Description of Artificial Sequence: Synthetic oligonucleotide
  Sense strand starting at position 1628 of SEQ ID NO: 588042
agacgaaagaugcgguaaa

SEQ ID NO: 837807 - RNA, 19 nt, Artificial Sequence
  Description of Artificial Sequence: Synthetic oligonucleotide
  Antisense strand to SEQ ID NO: 837806
uuuaccgcaucuuucgucu

SEQ ID NO: 837808 - RNA, 19 nt, Artificial Sequence
  Description of Artificial Sequence: Synthetic oligonucleotide
  Sense strand starting at position 2940 of SEQ ID NO: 588042
aguugugguacucaaacuu

SEQ ID NO: 837809 - RNA, 19 nt, Artificial Sequence
  Description of Artificial Sequence: Synthetic oligonucleotide
  Antisense strand to SEQ ID NO: 837808
aaguuugaguaccacaacu

SEQ ID NO: 837810 - RNA, 19 nt, Artificial Sequence
  Description of Artificial Sequence: Synthetic oligonucleotide
  Sense strand starting at position 3018 of SEQ ID NO: 588042
ccguaaucucuggagucag

SEQ ID NO: 837811 - RNA, 19 nt, Artificial Sequence
  Description of Artificial Sequence: Synthetic oligonucleotide
  Antisense strand to SEQ ID NO: 837810
cugacuccagagauuacgg

SEQ ID NO: 837812 - RNA, 19 nt, Artificial Sequence
  Description of Artificial Sequence: Synthetic oligonucleotide
  Sense strand starting at position 3093 of SEQ ID NO: 588042
ugaauaaaguugccuagga

SEQ ID NO: 837813 - RNA, 19 nt, Artificial Sequence
  Description of Artificial Sequence: Synthetic oligonucleotide
  Antisense strand to SEQ ID NO: 837812
uccuaggcaacuuuauuca

SEQ ID NO: 837814 - RNA, 19 nt, Artificial Sequence
  Description of Artificial Sequence: Synthetic oligonucleotide
  Sense strand starting at position 3094 of SEQ ID NO: 588042
gaauaaaguugccuaggau

SEQ ID NO: 837815 - RNA, 19 nt, Artificial Sequence
  Description of Artificial Sequence: Synthetic oligonucleotide
  Antisense strand to SEQ ID NO: 837814
auccuaggcaacuuuauuc

SEQ ID NO: 837816 - RNA, 19 nt, Artificial Sequence
  Description of Artificial Sequence: Synthetic oligonucleotide
  Sense strand starting at position 3097 of SEQ ID NO: 588042
uaaaguugccuaggauacu

SEQ ID NO: 837817 - RNA, 19 nt, Artificial Sequence
  Description of Artificial Sequence: Synthetic oligonucleotide
  Antisense strand to SEQ ID NO: 837816
aguauccuaggcaacuuua

SEQ ID NO: 837818 - RNA, 19 nt, Artificial Sequence
  Description of Artificial Sequence: Synthetic oligonucleotide
  Sense strand starting at position 3103 of SEQ ID NO: 588042
ugccuaggauacuuaagua

SEQ ID NO: 837819 - RNA, 19 nt, Artificial Sequence
  Description of Artificial Sequence: Synthetic oligonucleotide
  Antisense strand to SEQ ID NO: 837818
uacuuaaguauccuaggca

SEQ ID NO: 837820 - RNA, 19 nt, Artificial Sequence
  Description of Artificial Sequence: Synthetic oligonucleotide
  Sense strand starting at position 3107 of SEQ ID NO: 588042
uaggauacuuaaguauagu

SEQ ID NO: 837821 - RNA, 19 nt, Artificial Sequence
  Description of Artificial Sequence: Synthetic oligonucleotide
  Antisense strand to SEQ ID NO: 837820
acuauacuuaaguauccua

SEQ ID NO: 837822 - RNA, 19 nt, Artificial Sequence
  Description of Artificial Sequence: Synthetic oligonucleotide
  Sense strand starting at position 3113 of SEQ ID NO: 588042
acuuaaguauaguugcaga

SEQ ID NO: 837823 - RNA, 19 nt, Artificial Sequence
  Description of Artificial Sequence: Synthetic oligonucleotide
  Antisense strand to SEQ ID NO: 837822
ucugcaacuauacuuaagu

SEQ ID NO: 837824 - RNA, 19 nt, Artificial Sequence
  Description of Artificial Sequence: Synthetic oligonucleotide
  Sense strand starting at position 3348 of SEQ ID NO: 588042
agugaucauuuagaaagua

SEQ ID NO: 837825 - RNA, 19 nt, Artificial Sequence
  Description of Artificial Sequence: Synthetic oligonucleotide
  Antisense strand to SEQ ID NO: 837824
uacuuucuaaaugaucacu

SEQ ID NO: 837826 - RNA, 19 nt, Artificial Sequence
  Description of Artificial Sequence: Synthetic oligonucleotide
  Sense strand starting at position 3404 of SEQ ID NO: 588042
gugcaacaguaucuuagaa

SEQ ID NO: 837827 - RNA, 19 nt, Artificial Sequence
  Description of Artificial Sequence: Synthetic oligonucleotide
  Antisense strand to SEQ ID NO: 837826
uucuaagauacuguugcac

SEQ ID NO: 837828 - RNA, 19 nt, Artificial Sequence
  Description of Artificial Sequence: Synthetic oligonucleotide
  Sense strand starting at position 3483 of SEQ ID NO: 588042
uuaaguucugguuagacag

SEQ ID NO: 837829 - RNA, 19 nt, Artificial Sequence
  Description of Artificial Sequence: Synthetic oligonucleotide
  Antisense strand to SEQ ID NO: 837828
cugucuaaccagaacuuaa

SEQ ID NO: 837830 - RNA, 19 nt, Artificial Sequence
  Description of Artificial Sequence: Synthetic oligonucleotide
  Sense strand starting at position 3655 of SEQ ID NO: 588042
ugcuaugagccaggaacuu

SEQ ID NO: 837831 - RNA, 19 nt, Artificial Sequence
  Description of Artificial Sequence: Synthetic oligonucleotide
  Antisense strand to SEQ ID NO: 837830
aaguuccuggcucauagca

SEQ ID NO: 837832 - RNA, 19 nt, Artificial Sequence
  Description of Artificial Sequence: Synthetic oligonucleotide
  Sense strand starting at position 3716 of SEQ ID NO: 588042
gucuuugauccuuaguauc

SEQ ID NO: 837833 - RNA, 19 nt, Artificial Sequence
  Description of Artificial Sequence: Synthetic oligonucleotide
  Antisense strand to SEQ ID NO: 837832
gauacuaaggaucaaagac

SEQ ID NO: 837834 - RNA, 19 nt, Artificial Sequence
  Description of Artificial Sequence: Synthetic oligonucleotide
  Sense strand starting at position 3718 of SEQ ID NO: 588042
cuuugauccuuaguaucau

SEQ ID NO: 837835 - RNA, 19 nt, Artificial Sequence
  Description of Artificial Sequence: Synthetic oligonucleotide
  Antisense strand to SEQ ID NO: 837834
augauacuaaggaucaaag

SEQ ID NO: 837836 - RNA, 19 nt, Artificial Sequence
  Description of Artificial Sequence: Synthetic oligonucleotide
  Sense strand starting at position 3727 of SEQ ID NO: 588042
uuaguaucauggcuuugga

SEQ ID NO: 837837 - RNA, 19 nt, Artificial Sequence
  Description of Artificial Sequence: Synthetic oligonucleotide
  Antisense strand to SEQ ID NO: 837836
uccaaagccaugauacuaa

SEQ ID NO: 837838 - RNA, 19 nt, Artificial Sequence
  Description of Artificial Sequence: Synthetic oligonucleotide
  Sense strand starting at position 3759 of SEQ ID NO: 588042
gaauuuaaauucuagugga

SEQ ID NO: 837839 - RNA, 19 nt, Artificial Sequence
  Description of Artificial Sequence: Synthetic oligonucleotide
  Antisense strand to SEQ ID NO: 837838
uccacuagaauuuaaauuc

SEQ ID NO: 837840 - RNA, 19 nt, Artificial Sequence
  Description of Artificial Sequence: Synthetic oligonucleotide
  Sense strand starting at position 3776 of SEQ ID NO: 588042
gagcaagaauuaguguuau

SEQ ID NO: 837841 - RNA, 19 nt, Artificial Sequence
  Description of Artificial Sequence: Synthetic oligonucleotide
  Antisense strand to SEQ ID NO: 837840
auaacacuaauucuugcuc

SEQ ID NO: 837842 - RNA, 19 nt, Artificial Sequence
  Description of Artificial Sequence: Synthetic oligonucleotide
  Sense strand starting at position 3790 of SEQ ID NO: 588042
guuauaaucuugguaaagg

SEQ ID NO: 837843 - RNA, 19 nt, Artificial Sequence
  Description of Artificial Sequence: Synthetic oligonucleotide
  Antisense strand to SEQ ID NO: 837842
ccuuuaccaagauuauaac

SEQ ID NO: 837844 - RNA, 19 nt, Artificial Sequence
  Description of Artificial Sequence: Synthetic oligonucleotide
  Sense strand starting at position 3861 of SEQ ID NO: 588042
uguacaguuccugacacaa

SEQ ID NO: 837845 - RNA, 19 nt, Artificial Sequence
  Description of Artificial Sequence: Synthetic oligonucleotide
  Antisense strand to SEQ ID NO: 837844
uugugucaggaacuguaca

SEQ ID NO: 837846 - RNA, 19 nt, Artificial Sequence
  Description of Artificial Sequence: Synthetic oligonucleotide
  Sense strand starting at position 3893 of SEQ ID NO: 588042
gcaaauuguggcuauauac

SEQ ID NO: 837847 - RNA, 19 nt, Artificial Sequence
  Description of Artificial Sequence: Synthetic oligonucleotide
  Antisense strand to SEQ ID NO: 837846
guauauagccacaauuugc

SEQ ID NO: 837848 - RNA, 19 nt, Artificial Sequence
  Description of Artificial Sequence: Synthetic oligonucleotide
  Sense strand starting at position 3901 of SEQ ID NO: 588042
uggcuauauacagguaaug

SEQ ID NO: 837849 - RNA, 19 nt, Artificial Sequence
  Description of Artificial Sequence: Synthetic oligonucleotide
  Antisense strand to SEQ ID NO: 837848
cauuaccuguauauagcca

SEQ ID NO: 837850 - RNA, 19 nt, Artificial Sequence
  Description of Artificial Sequence: Synthetic oligonucleotide
  Sense strand starting at position 3946 of SEQ ID NO: 588042
ggaaauaguaaucgcuuac

SEQ ID NO: 837851 - RNA, 19 nt, Artificial Sequence
  Description of Artificial Sequence: Synthetic oligonucleotide
  Antisense strand to SEQ ID NO: 837850
guaagcgauuacuauuucc

SEQ ID NO: 837852 - RNA, 19 nt, Artificial Sequence
  Description of Artificial Sequence: Synthetic oligonucleotide
  Sense strand starting at position 57 of SEQ ID NO: 588043
ucagguuuaugcuuacaac

SEQ ID NO: 837853 - RNA, 19 nt, Artificial Sequence
  Description of Artificial Sequence: Synthetic oligonucleotide
  Antisense strand to SEQ ID NO: 837852
guuguaagcauaaaccuga

SEQ ID NO: 837854 - RNA, 19 nt, Artificial Sequence
  Description of Artificial Sequence: Synthetic oligonucleotide
  Sense strand starting at position 185 of SEQ ID NO: 588043
auguaacugguauguacaa

SEQ ID NO: 837855 - RNA, 19 nt, Artificial Sequence
  Description of Artificial Sequence: Synthetic oligonucleotide
  Antisense strand to SEQ ID NO: 837854
uuguacauaccaguuacau

SEQ ID NO: 837856 - RNA, 19 nt, Artificial Sequence
  Description of Artificial Sequence: Synthetic oligonucleotide
  Sense strand starting at position 186 of SEQ ID NO: 588043
uguaacugguauguacaaa

SEQ ID NO: 837857 - RNA, 19 nt, Artificial Sequence
  Description of Artificial Sequence: Synthetic oligonucleotide
  Antisense strand to SEQ ID NO: 837856
uuuguacauaccaguuaca

SEQ ID NO: 837858 - RNA, 19 nt, Artificial Sequence
  Description of Artificial Sequence: Synthetic oligonucleotide
  Sense strand starting at position 345 of SEQ ID NO: 588043
uuucuaacacuguguuacu

SEQ ID NO: 837859 - RNA, 19 nt, Artificial Sequence
  Description of Artificial Sequence: Synthetic oligonucleotide
  Antisense strand to SEQ ID NO: 837858
aguaacacaguguuagaaa

SEQ ID NO: 837860 - RNA, 19 nt, Artificial Sequence
  Description of Artificial Sequence: Synthetic oligonucleotide
  Sense strand starting at position 447 of SEQ ID NO: 588043
gcacuaucccaagaaagca

SEQ ID NO: 837861 - RNA, 19 nt, Artificial Sequence
  Description of Artificial Sequence: Synthetic oligonucleotide
  Antisense strand to SEQ ID NO: 837860
ugcuuucuugggauagugc

SEQ ID NO: 837862 - RNA, 19 nt, Artificial Sequence
  Description of Artificial Sequence: Synthetic oligonucleotide
  Sense strand starting at position 796 of SEQ ID NO: 588043
cauuaaugugauggaauac

SEQ ID NO: 837863 - RNA, 19 nt, Artificial Sequence
  Description of Artificial Sequence: Synthetic oligonucleotide
  Antisense strand to SEQ ID NO: 837862
guauuccaucacauuaaug

SEQ ID NO: 837864 - RNA, 19 nt, Artificial Sequence
  Description of Artificial Sequence: Synthetic oligonucleotide
  Sense strand starting at position 834 of SEQ ID NO: 588043
caguguaauccagacaugu

SEQ ID NO: 837865 - RNA, 19 nt, Artificial Sequence
  Description of Artificial Sequence: Synthetic oligonucleotide
  Antisense strand to SEQ ID NO: 837864
acaugucuggauuacacug

SEQ ID NO: 837866 - RNA, 19 nt, Artificial Sequence
  Description of Artificial Sequence: Synthetic oligonucleotide
  Sense strand starting at position 836 of SEQ ID NO: 588043
guguaauccagacauguca

SEQ ID NO: 837867 - RNA, 19 nt, Artificial Sequence
  Description of Artificial Sequence: Synthetic oligonucleotide
  Antisense strand to SEQ ID NO: 837866
ugacaugucuggauuacac

SEQ ID NO: 837868 - RNA, 19 nt, Artificial Sequence
  Description of Artificial Sequence: Synthetic oligonucleotide
  Sense strand starting at position 1064 of SEQ ID NO: 588043
auagaacuuggcuaccuua

SEQ ID NO: 837869 - RNA, 19 nt, Artificial Sequence
  Description of Artificial Sequence: Synthetic oligonucleotide
  Antisense strand to SEQ ID NO: 837868
uaagguagccaaguucuau

SEQ ID NO: 837870 - RNA, 19 nt, Artificial Sequence
  Description of Artificial Sequence: Synthetic oligonucleotide
  Sense strand starting at position 1075 of SEQ ID NO: 588043
cuaccuuagccaugaugaa

SEQ ID NO: 837871 - RNA, 19 nt, Artificial Sequence
  Description of Artificial Sequence: Synthetic oligonucleotide
  Antisense strand to SEQ ID NO: 837870
uucaucauggcuaagguag

SEQ ID NO: 837872 - RNA, 19 nt, Artificial Sequence
  Description of Artificial Sequence: Synthetic oligonucleotide
  Sense strand starting at position 1079 of SEQ ID NO: 588043
cuuagccaugaugaauauu

SEQ ID NO: 837873 - RNA, 19 nt, Artificial Sequence
  Description of Artificial Sequence: Synthetic oligonucleotide
  Antisense strand to SEQ ID NO: 837872
aauauucaucauggcuaag

SEQ ID NO: 837874 - RNA, 19 nt, Artificial Sequence
  Description of Artificial Sequence: Synthetic oligonucleotide
  Sense strand starting at position 1175 of SEQ ID NO: 588043
aggcaacauugagcaauaa

SEQ ID NO: 837875 - RNA, 19 nt, Artificial Sequence
  Description of Artificial Sequence: Synthetic oligonucleotide
  Antisense strand to SEQ ID NO: 837874
uuauugcucaauguugccu

SEQ ID NO: 837876 - RNA, 19 nt, Artificial Sequence
  Description of Artificial Sequence: Synthetic oligonucleotide
  Sense strand starting at position 1252 of SEQ ID NO: 588043
agacgaaagaugcgguaaa

SEQ ID NO: 837877 - RNA, 19 nt, Artificial Sequence
  Description of Artificial Sequence: Synthetic oligonucleotide
  Antisense strand to SEQ ID NO: 837876
uuuaccgcaucuuucgucu

SEQ ID NO: 837878 - RNA, 19 nt, Artificial Sequence
  Description of Artificial Sequence: Synthetic oligonucleotide
  Sense strand starting at position 2564 of SEQ ID NO: 588043
aguugugguacucaaacuu

SEQ ID NO: 837879 - RNA, 19 nt, Artificial Sequence
  Description of Artificial Sequence: Synthetic oligonucleotide
  Antisense strand to SEQ ID NO: 837878
aaguuugaguaccacaacu

SEQ ID NO: 837880 - RNA, 19 nt, Artificial Sequence
  Description of Artificial Sequence: Synthetic oligonucleotide
  Sense strand starting at position 2642 of SEQ ID NO: 588043
ccguaaucucuggagucag

SEQ ID NO: 837881 - RNA, 19 nt, Artificial Sequence
  Description of Artificial Sequence: Synthetic oligonucleotide
  Antisense strand to SEQ ID NO: 837880
cugacuccagagauuacgg

SEQ ID NO: 837882 - RNA, 19 nt, Artificial Sequence
  Description of Artificial Sequence: Synthetic oligonucleotide
  Sense strand starting at position 2717 of SEQ ID NO: 588043
ugaauaaaguugccuagga

SEQ ID NO: 837883 - RNA, 19 nt, Artificial Sequence
  Description of Artificial Sequence: Synthetic oligonucleotide
  Antisense strand to SEQ ID NO: 837882
uccuaggcaacuuuauuca

SEQ ID NO: 837884 - RNA, 19 nt, Artificial Sequence
  Description of Artificial Sequence: Synthetic oligonucleotide
  Sense strand starting at position 2718 of SEQ ID NO: 588043
gaauaaaguugccuaggau

SEQ ID NO: 837885 - RNA, 19 nt, Artificial Sequence
  Description of Artificial Sequence: Synthetic oligonucleotide
  Antisense strand to SEQ ID NO: 837884
auccuaggcaacuuuauuc

SEQ ID NO: 837886 - RNA, 19 nt, Artificial Sequence
  Description of Artificial Sequence: Synthetic oligonucleotide
  Sense strand starting at position 2721 of SEQ ID NO: 588043
uaaaguugccuaggauacu

SEQ ID NO: 837887 - RNA, 19 nt, Artificial Sequence
  Description of Artificial Sequence: Synthetic oligonucleotide
  Antisense strand to SEQ ID NO: 837886
aguauccuaggcaacuuua

SEQ ID NO: 837888 - RNA, 19 nt, Artificial Sequence
  Description of Artificial Sequence: Synthetic oligonucleotide
  Sense strand starting at position 2727 of SEQ ID NO: 588043
ugccuaggauacuuaagua

SEQ ID NO: 837889 - RNA, 19 nt, Artificial Sequence
  Description of Artificial Sequence: Synthetic oligonucleotide
  Antisense strand to SEQ ID NO: 837888
uacuuaaguauccuaggca

SEQ ID NO: 837890 - RNA, 19 nt, Artificial Sequence
  Description of Artificial Sequence: Synthetic oligonucleotide
  Sense strand starting at position 2731 of SEQ ID NO: 588043
uaggauacuuaaguauagu

SEQ ID NO: 837891 - RNA, 19 nt, Artificial Sequence
  Description of Artificial Sequence: Synthetic oligonucleotide
  Antisense strand to SEQ ID NO: 837890
acuauacuuaaguauccua

SEQ ID NO: 837892 - RNA, 19 nt, Artificial Sequence
  Description of Artificial Sequence: Synthetic oligonucleotide
  Sense strand starting at position 2737 of SEQ ID NO: 588043
acuuaaguauaguugcaga

SEQ ID NO: 837893 - RNA, 19 nt, Artificial Sequence
  Description of Artificial Sequence: Synthetic oligonucleotide
  Antisense strand to SEQ ID NO: 837892
ucugcaacuauacuuaagu

SEQ ID NO: 837894 - RNA, 19 nt, Artificial Sequence
  Description of Artificial Sequence: Synthetic oligonucleotide
  Sense strand starting at position 2880 of SEQ ID NO: 588043
ggcaaagauuccuugucuc

SEQ ID NO: 837895 - RNA, 19 nt, Artificial Sequence
  Description of Artificial Sequence: Synthetic oligonucleotide
  Antisense strand to SEQ ID NO: 837894
gagacaaggaaucuuugcc

SEQ ID NO: 837896 - RNA, 19 nt, Artificial Sequence
  Description of Artificial Sequence: Synthetic oligonucleotide
  Sense strand starting at position 2972 of SEQ ID NO: 588043
agugaucauuuagaaagua

SEQ ID NO: 837897 - RNA, 19 nt, Artificial Sequence
  Description of Artificial Sequence: Synthetic oligonucleotide
  Antisense strand to SEQ ID NO: 837896
uacuuucuaaaugaucacu

SEQ ID NO: 837898 - RNA, 19 nt, Artificial Sequence
  Description of Artificial Sequence: Synthetic oligonucleotide
  Sense strand starting at position 3028 of SEQ ID NO: 588043
gugcaacaguaucuuagaa

SEQ ID NO: 837899 - RNA, 19 nt, Artificial Sequence
  Description of Artificial Sequence: Synthetic oligonucleotide
  Antisense strand to SEQ ID NO: 837898
uucuaagauacuguugcac

SEQ ID NO: 837900 - RNA, 19 nt, Artificial Sequence
  Description of Artificial Sequence: Synthetic oligonucleotide
  Sense strand starting at position 3107 of SEQ ID NO: 588043
uuaaguucugguuagacag

SEQ ID NO: 837901 - RNA, 19 nt, Artificial Sequence
  Description of Artificial Sequence: Synthetic oligonucleotide
  Antisense strand to SEQ ID NO: 837900
cugucuaaccagaacuuaa

SEQ ID NO: 837902 - RNA, 19 nt, Artificial Sequence
  Description of Artificial Sequence: Synthetic oligonucleotide
  Sense strand starting at position 3279 of SEQ ID NO: 588043
ugcuaugagccaggaacuu

SEQ ID NO: 837903 - RNA, 19 nt, Artificial Sequence
  Description of Artificial Sequence: Synthetic oligonucleotide
  Antisense strand to SEQ ID NO: 837902
aaguuccuggcucauagca

SEQ ID NO: 837904 - RNA, 19 nt, Artificial Sequence
  Description of Artificial Sequence: Synthetic oligonucleotide
  Sense strand starting at position 3340 of SEQ ID NO: 588043
gucuuugauccuuaguauc

SEQ ID NO: 837905 - RNA, 19 nt, Artificial Sequence
  Description of Artificial Sequence: Synthetic oligonucleotide
  Antisense strand to SEQ ID NO: 837904
gauacuaaggaucaaagac

SEQ ID NO: 837906 - RNA, 19 nt, Artificial Sequence
  Description of Artificial Sequence: Synthetic oligonucleotide
  Sense strand starting at position 3342 of SEQ ID NO: 588043
cuuugauccuuaguaucau

SEQ ID NO: 837907 - RNA, 19 nt, Artificial Sequence
  Description of Artificial Sequence: Synthetic oligonucleotide
  Antisense strand to SEQ ID NO: 837906
augauacuaaggaucaaag

SEQ ID NO: 837908 - RNA, 19 nt, Artificial Sequence
  Description of Artificial Sequence: Synthetic oligonucleotide
  Sense strand starting at position 3351 of SEQ ID NO: 588043
uuaguaucauggcuuugga

SEQ ID NO: 837909 - RNA, 19 nt, Artificial Sequence
  Description of Artificial Sequence: Synthetic oligonucleotide
  Antisense strand to SEQ ID NO: 837908
uccaaagccaugauacuaa

SEQ ID NO: 837910 - RNA, 19 nt, Artificial Sequence
  Description of Artificial Sequence: Synthetic oligonucleotide
  Sense strand starting at position 3383 of SEQ ID NO: 588043
gaauuuaaauucuagugga

SEQ ID NO: 837911 - RNA, 19 nt, Artificial Sequence
  Description of Artificial Sequence: Synthetic oligonucleotide
  Antisense strand to SEQ ID NO: 837910
uccacuagaauuuaaauuc

SEQ ID NO: 837912 - RNA, 19 nt, Artificial Sequence
  Description of Artificial Sequence: Synthetic oligonucleotide
  Sense strand starting at position 3400 of SEQ ID NO: 588043
gagcaagaauuaguguuau

SEQ ID NO: 837913 - RNA, 19 nt, Artificial Sequence
  Description of Artificial Sequence: Synthetic oligonucleotide
  Antisense strand to SEQ ID NO: 837912
auaacacuaauucuugcuc

SEQ ID NO: 837914 - RNA, 19 nt, Artificial Sequence
  Description of Artificial Sequence: Synthetic oligonucleotide
  Sense strand starting at position 3414 of SEQ ID NO: 588043
guuauaaucuugguaaagg

SEQ ID NO: 837915 - RNA, 19 nt, Artificial Sequence
  Description of Artificial Sequence: Synthetic oligonucleotide
  Antisense strand to SEQ ID NO: 837914
ccuuuaccaagauuauaac

SEQ ID NO: 837916 - RNA, 19 nt, Artificial Sequence
  Description of Artificial Sequence: Synthetic oligonucleotide
  Sense strand starting at position 3485 of SEQ ID NO: 588043
uguacaguuccugacacaa

SEQ ID NO: 837917 - RNA, 19 nt, Artificial Sequence
  Description of Artificial Sequence: Synthetic oligonucleotide
  Antisense strand to SEQ ID NO: 837916
uugugucaggaacuguaca

SEQ ID NO: 837918 - RNA, 19 nt, Artificial Sequence
  Description of Artificial Sequence: Synthetic oligonucleotide
  Sense strand starting at position 3516 of SEQ ID NO: 588043
agcaaauuguggcuauaua

SEQ ID NO: 837919 - RNA, 19 nt, Artificial Sequence
  Description of Artificial Sequence: Synthetic oligonucleotide
  Antisense strand to SEQ ID NO: 837918
uauauagccacaauuugcu

SEQ ID NO: 837920 - RNA, 19 nt, Artificial Sequence
  Description of Artificial Sequence: Synthetic oligonucleotide
  Sense strand starting at position 3517 of SEQ ID NO: 588043
gcaaauuguggcuauauac

SEQ ID NO: 837921 - RNA, 19 nt, Artificial Sequence
  Description of Artificial Sequence: Synthetic oligonucleotide
  Antisense strand to SEQ ID NO: 837920
guauauagccacaauuugc

SEQ ID NO: 837922 - RNA, 19 nt, Artificial Sequence
  Description of Artificial Sequence: Synthetic oligonucleotide
  Sense strand starting at position 3525 of SEQ ID NO: 588043
uggcuauauacagguaaug

SEQ ID NO: 837923 - RNA, 19 nt, Artificial Sequence
  Description of Artificial Sequence: Synthetic oligonucleotide
  Antisense strand to SEQ ID NO: 837922
cauuaccuguauauagcca

SEQ ID NO: 837924 - RNA, 19 nt, Artificial Sequence
  Description of Artificial Sequence: Synthetic oligonucleotide
  Sense strand starting at position 3569 of SEQ ID NO: 588043
cggaaauaguaaucgcuua

SEQ ID NO: 837925 - RNA, 19 nt, Artificial Sequence
  Description of Artificial Sequence: Synthetic oligonucleotide
  Antisense strand to SEQ ID NO: 837924
uaagcgauuacuauuuccg

SEQ ID NO: 837926 - RNA, 19 nt, Artificial Sequence
  Description of Artificial Sequence: Synthetic oligonucleotide
  Sense strand starting at position 3570 of SEQ ID NO: 588043
ggaaauaguaaucgcuuac

SEQ ID NO: 837927 - RNA, 19 nt, Artificial Sequence
  Description of Artificial Sequence: Synthetic oligonucleotide
  Antisense strand to SEQ ID NO: 837926
guaagcgauuacuauuucc

SEQ ID NO: 837928 - RNA, 19 nt, Artificial Sequence
  Description of Artificial Sequence: Synthetic oligonucleotide
  Sense strand starting at position 3695 of SEQ ID NO: 588043
acagcuagucacuaugaga

SEQ ID NO: 837929 - RNA, 19 nt, Artificial Sequence
  Description of Artificial Sequence: Synthetic oligonucleotide
  Antisense strand to SEQ ID NO: 837928
ucucauagugacuagcugu

SEQ ID NO: 837930 - RNA, 19 nt, Artificial Sequence
  Description of Artificial Sequence: Synthetic oligonucleotide
  Sense strand starting at position 3724 of SEQ ID NO: 588043
gaacucaagcagugugacu

SEQ ID NO: 837931 - RNA, 19 nt, Artificial Sequence
  Description of Artificial Sequence: Synthetic oligonucleotide
  Antisense strand to SEQ ID NO: 837930
agucacacugcuugaguuc

SEQ ID NO: 837932 - RNA, 19 nt, Artificial Sequence
  Description of Artificial Sequence: Synthetic oligonucleotide
  Sense strand starting at position 1675 of SEQ ID NO: 588044
cggcauugugaucaggacu

SEQ ID NO: 837933 - RNA, 19 nt, Artificial Sequence
  Description of Artificial Sequence: Synthetic oligonucleotide
  Antisense strand to SEQ ID NO: 837932
aguccugaucacaaugccg

SEQ ID NO: 837934 - RNA, 19 nt, Artificial Sequence
  Description of Artificial Sequence: Synthetic oligonucleotide
  Sense strand starting at position 1924 of SEQ ID NO: 588044
cugaguguggcugagugau

SEQ ID NO: 837935 - RNA, 19 nt, Artificial Sequence
  Description of Artificial Sequence: Synthetic oligonucleotide
  Antisense strand to SEQ ID NO: 837934
aucacucagccacacucag

SEQ ID NO: 837936 - RNA, 19 nt, Artificial Sequence
  Description of Artificial Sequence: Synthetic oligonucleotide
  Sense strand starting at position 2153 of SEQ ID NO: 588044
cagccuugacccggagaca

SEQ ID NO: 837937 - RNA, 19 nt, Artificial Sequence
  Description of Artificial Sequence: Synthetic oligonucleotide
  Antisense strand to SEQ ID NO: 837936
ugucuccgggucaaggcug

SEQ ID NO: 837938 - RNA, 19 nt, Artificial Sequence
  Description of Artificial Sequence: Synthetic oligonucleotide
  Sense strand starting at position 2511 of SEQ ID NO: 588044
auguguucgggcuaagaaa

SEQ ID NO: 837939 - RNA, 19 nt, Artificial Sequence
  Description of Artificial Sequence: Synthetic oligonucleotide
  Antisense strand to SEQ ID NO: 837938
uuucuuagcccgaacacau

SEQ ID NO: 837940 - RNA, 19 nt, Artificial Sequence
  Description of Artificial Sequence: Synthetic oligonucleotide
  Sense strand starting at position 2528 of SEQ ID NO: 588044
aaagauuagugcuuggaug

SEQ ID NO: 837941 - RNA, 19 nt, Artificial Sequence
  Description of Artificial Sequence: Synthetic oligonucleotide
  Antisense strand to SEQ ID NO: 837940
cauccaagcacuaaucuuu

SEQ ID NO: 837942 - RNA, 19 nt, Artificial Sequence
  Description of Artificial Sequence: Synthetic oligonucleotide
  Sense strand starting at position 2529 of SEQ ID NO: 588044
aagauuagugcuuggauga

SEQ ID NO: 837943 - RNA, 19 nt, Artificial Sequence
  Description of Artificial Sequence: Synthetic oligonucleotide
  Antisense strand to SEQ ID NO: 837942
ucauccaagcacuaaucuu

SEQ ID NO: 837944 - RNA, 19 nt, Artificial Sequence
  Description of Artificial Sequence: Synthetic oligonucleotide
  Sense strand starting at position 2530 of SEQ ID NO: 588044
agauuagugcuuggaugac

SEQ ID NO: 837945 - RNA, 19 nt, Artificial Sequence
  Description of Artificial Sequence: Synthetic oligonucleotide
  Antisense strand to SEQ ID NO: 837944
gucauccaagcacuaaucu

SEQ ID NO: 837946 - RNA, 19 nt, Artificial Sequence
  Description of Artificial Sequence: Synthetic oligonucleotide
  Sense strand starting at position 2582 of SEQ ID NO: 588044
uacgguuagcaaugagaga

SEQ ID NO: 837947 - RNA, 19 nt, Artificial Sequence
  Description of Artificial Sequence: Synthetic oligonucleotide
  Antisense strand to SEQ ID NO: 837946
ucucucauugcuaaccgua

SEQ ID NO: 837948 - RNA, 19 nt, Artificial Sequence
  Description of Artificial Sequence: Synthetic oligonucleotide
  Sense strand starting at position 2648 of SEQ ID NO: 588044
uccaacguaucuuuauuga

SEQ ID NO: 837949 - RNA, 19 nt, Artificial Sequence
  Description of Artificial Sequence: Synthetic oligonucleotide
  Antisense strand to SEQ ID NO: 837948
ucaauaaagauacguugga

SEQ ID NO: 837950 - RNA, 19 nt, Artificial Sequence
  Description of Artificial Sequence: Synthetic oligonucleotide
  Sense strand starting at position 2653 of SEQ ID NO: 588044
cguaucuuuauugagcuga

SEQ ID NO: 837951 - RNA, 19 nt, Artificial Sequence
  Description of Artificial Sequence: Synthetic oligonucleotide
  Antisense strand to SEQ ID NO: 837950
ucagcucaauaaagauacg

SEQ ID NO: 837952 - RNA, 19 nt, Artificial Sequence
  Description of Artificial Sequence: Synthetic oligonucleotide
  Sense strand starting at position 2658 of SEQ ID NO: 588044
cuuuauugagcugaccaga

SEQ ID NO: 837953 - RNA, 19 nt, Artificial Sequence
  Description of Artificial Sequence: Synthetic oligonucleotide
  Antisense strand to SEQ ID NO: 837952
ucuggucagcucaauaaag

SEQ ID NO: 837954 - RNA, 19 nt, Artificial Sequence
  Description of Artificial Sequence: Synthetic oligonucleotide
  Sense strand starting at position 2723 of SEQ ID NO: 588044
guagacacgaaaugauuga

SEQ ID NO: 837955 - RNA, 19 nt, Artificial Sequence
  Description of Artificial Sequence: Synthetic oligonucleotide
  Antisense strand to SEQ ID NO: 837954
ucaaucauuucgugucuac

SEQ ID NO: 837956 - RNA, 19 nt, Artificial Sequence
  Description of Artificial Sequence: Synthetic oligonucleotide
  Sense strand starting at position 2788 of SEQ ID NO: 588044
ccacaaggcugcucuacaa

SEQ ID NO: 837957 - RNA, 19 nt, Artificial Sequence
  Description of Artificial Sequence: Synthetic oligonucleotide
  Antisense strand to SEQ ID NO: 837956
uuguagagcagccuugugg

SEQ ID NO: 837958 - RNA, 19 nt, Artificial Sequence
  Description of Artificial Sequence: Synthetic oligonucleotide
  Sense strand starting at position 2820 of SEQ ID NO: 588044
ugacaugacagcuggcauu

SEQ ID NO: 837959 - RNA, 19 nt, Artificial Sequence
  Description of Artificial Sequence: Synthetic oligonucleotide
  Antisense strand to SEQ ID NO: 837958
aaugccagcugucauguca

SEQ ID NO: 837960 - RNA, 19 nt, Artificial Sequence
  Description of Artificial Sequence: Synthetic oligonucleotide
  Sense strand starting at position 2855 of SEQ ID NO: 588044
gaaagaggguuuccaguga

SEQ ID NO: 837961 - RNA, 19 nt, Artificial Sequence
  Description of Artificial Sequence: Synthetic oligonucleotide
  Antisense strand to SEQ ID NO: 837960
ucacuggaaacccucuuuc

SEQ ID NO: 837962 - RNA, 19 nt, Artificial Sequence
  Description of Artificial Sequence: Synthetic oligonucleotide
  Sense strand starting at position 2859 of SEQ ID NO: 588044
gaggguuuccagugaccag

SEQ ID NO: 837963 - RNA, 19 nt, Artificial Sequence
  Description of Artificial Sequence: Synthetic oligonucleotide
  Antisense strand to SEQ ID NO: 837962
cuggucacuggaaacccuc

SEQ ID NO: 837964 - RNA, 19 nt, Artificial Sequence
  Description of Artificial Sequence: Synthetic oligonucleotide
  Sense strand starting at position 2860 of SEQ ID NO: 588044
aggguuuccagugaccagu

SEQ ID NO: 837965 - RNA, 19 nt, Artificial Sequence
  Description of Artificial Sequence: Synthetic oligonucleotide
  Antisense strand to SEQ ID NO: 837964
acuggucacuggaaacccu

SEQ ID NO: 837966 - RNA, 19 nt, Artificial Sequence
  Description of Artificial Sequence: Synthetic oligonucleotide
  Sense strand starting at position 2862 of SEQ ID NO: 588044
gguuuccagugaccaguua

SEQ ID NO: 837967 - RNA, 19 nt, Artificial Sequence
  Description of Artificial Sequence: Synthetic oligonucleotide
  Antisense strand to SEQ ID NO: 837966
uaacuggucacuggaaacc

SEQ ID NO: 837968 - RNA, 19 nt, Artificial Sequence
  Description of Artificial Sequence: Synthetic oligonucleotide
  Sense strand starting at position 2863 of SEQ ID NO: 588044
guuuccagugaccaguuau

SEQ ID NO: 837969 - RNA, 19 nt, Artificial Sequence
  Description of Artificial Sequence: Synthetic oligonucleotide
  Antisense strand to SEQ ID NO: 837968
auaacuggucacuggaaac

SEQ ID NO: 837970 - RNA, 19 nt, Artificial Sequence
  Description of Artificial Sequence: Synthetic oligonucleotide
  Sense strand starting at position 3078 of SEQ ID NO: 588044
uuucguaggcaccagaaau

SEQ ID NO: 837971 - RNA, 19 nt, Artificial Sequence
  Description of Artificial Sequence: Synthetic oligonucleotide
  Antisense strand to SEQ ID NO: 837970
auuucuggugccuacgaaa

SEQ ID NO: 837972 - RNA, 19 nt, Artificial Sequence
  Description of Artificial Sequence: Synthetic oligonucleotide
  Sense strand starting at position 3134 of SEQ ID NO: 588044
ggaaauugauguuucuuua

SEQ ID NO: 837973 - RNA, 19 nt, Artificial Sequence
  Description of Artificial Sequence: Synthetic oligonucleotide
  Antisense strand to SEQ ID NO: 837972
uaaagaaacaucaauuucc

SEQ ID NO: 837974 - RNA, 19 nt, Artificial Sequence
  Description of Artificial Sequence: Synthetic oligonucleotide
  Sense strand starting at position 3161 of SEQ ID NO: 588044
aauauaugucuauguagag

SEQ ID NO: 837975 - RNA, 19 nt, Artificial Sequence
  Description of Artificial Sequence: Synthetic oligonucleotide
  Antisense strand to SEQ ID NO: 837974
cucuacauagacauauauu

SEQ ID NO: 837976 - RNA, 19 nt, Artificial Sequence
  Description of Artificial Sequence: Synthetic oligonucleotide
  Sense strand starting at position 3162 of SEQ ID NO: 588044
auauaugucuauguagagu

SEQ ID NO: 837977 - RNA, 19 nt, Artificial Sequence
  Description of Artificial Sequence: Synthetic oligonucleotide
  Antisense strand to SEQ ID NO: 837976
acucuacauagacauauau

SEQ ID NO: 837978 - RNA, 19 nt, Artificial Sequence
  Description of Artificial Sequence: Synthetic oligonucleotide
  Sense strand starting at position 3165 of SEQ ID NO: 588044
uaugucuauguagaguaua

SEQ ID NO: 837979 - RNA, 19 nt, Artificial Sequence
  Description of Artificial Sequence: Synthetic oligonucleotide
  Antisense strand to SEQ ID NO: 837978
uauacucuacauagacaua

SEQ ID NO: 837980 - RNA, 19 nt, Artificial Sequence
  Description of Artificial Sequence: Synthetic oligonucleotide
  Sense strand starting at position 3339 of SEQ ID NO: 588044
gugucugcacaauaaagau

SEQ ID NO: 837981 - RNA, 19 nt, Artificial Sequence
  Description of Artificial Sequence: Synthetic oligonucleotide
  Antisense strand to SEQ ID NO: 837980
aucuuuauugugcagacac

SEQ ID NO: 837982 - RNA, 19 nt, Artificial Sequence
  Description of Artificial Sequence: Synthetic oligonucleotide
  Sense strand starting at position 3388 of SEQ ID NO: 588044
uuaugaaagcccugaggaa

SEQ ID NO: 837983 - RNA, 19 nt, Artificial Sequence
  Description of Artificial Sequence: Synthetic oligonucleotide
  Antisense strand to SEQ ID NO: 837982
uuccucagggcuuucauaa

SEQ ID NO: 837984 - RNA, 19 nt, Artificial Sequence
  Description of Artificial Sequence: Synthetic oligonucleotide
  Sense strand starting at position 3425 of SEQ ID NO: 588044
aggaauaaccuguggcaua

SEQ ID NO: 837985 - RNA, 19 nt, Artificial Sequence
  Description of Artificial Sequence: Synthetic oligonucleotide
  Antisense strand to SEQ ID NO: 837984
uaugccacagguuauuccu

SEQ ID NO: 837986 - RNA, 19 nt, Artificial Sequence
  Description of Artificial Sequence: Synthetic oligonucleotide
  Sense strand starting at position 3464 of SEQ ID NO: 588044
cuaugaacccugggaacuu

SEQ ID NO: 837987 - RNA, 19 nt, Artificial Sequence
  Description of Artificial Sequence: Synthetic oligonucleotide
  Antisense strand to SEQ ID NO: 837986
aaguucccaggguucauag

SEQ ID NO: 837988 - RNA, 19 nt, Artificial Sequence
  Description of Artificial Sequence: Synthetic oligonucleotide
  Sense strand starting at position 3473 of SEQ ID NO: 588044
cugggaacuuugcuggaga

SEQ ID NO: 837989 - RNA, 19 nt, Artificial Sequence
  Description of Artificial Sequence: Synthetic oligonucleotide
  Antisense strand to SEQ ID NO: 837988
ucuccagcaaaguucccag

SEQ ID NO: 837990 - RNA, 19 nt, Artificial Sequence
  Description of Artificial Sequence: Synthetic oligonucleotide
  Sense strand starting at position 3475 of SEQ ID NO: 588044
gggaacuuugcuggagacu

SEQ ID NO: 837991 - RNA, 19 nt, Artificial Sequence
  Description of Artificial Sequence: Synthetic oligonucleotide
  Antisense strand to SEQ ID NO: 837990
agucuccagcaaaguuccc

SEQ ID NO: 837992 - RNA, 19 nt, Artificial Sequence
  Description of Artificial Sequence: Synthetic oligonucleotide
  Sense strand starting at position 3476 of SEQ ID NO: 588044
ggaacuuugcuggagacuu

SEQ ID NO: 837993 - RNA, 19 nt, Artificial Sequence
  Description of Artificial Sequence: Synthetic oligonucleotide
  Antisense strand to SEQ ID NO: 837992
aagucuccagcaaaguucc

SEQ ID NO: 837994 - RNA, 19 nt, Artificial Sequence
  Description of Artificial Sequence: Synthetic oligonucleotide
  Sense strand starting at position 3617 of SEQ ID NO: 588044
ucaggugaugcugaggauu

SEQ ID NO: 837995 - RNA, 19 nt, Artificial Sequence
  Description of Artificial Sequence: Synthetic oligonucleotide
  Antisense strand to SEQ ID NO: 837994
aauccucagcaucaccuga

SEQ ID NO: 837996 - RNA, 19 nt, Artificial Sequence
  Description of Artificial Sequence: Synthetic oligonucleotide
  Sense strand starting at position 3665 of SEQ ID NO: 588044
agaguaaccuagcuauuau

SEQ ID NO: 837997 - RNA, 19 nt, Artificial Sequence
  Description of Artificial Sequence: Synthetic oligonucleotide
  Antisense strand to SEQ ID NO: 837996
auaauagcuagguuacucu

SEQ ID NO: 837998 - RNA, 19 nt, Artificial Sequence
  Description of Artificial Sequence: Synthetic oligonucleotide
  Sense strand starting at position 3703 of SEQ ID NO: 588044
ucugauugauaucucuagu

SEQ ID NO: 837999 - RNA, 19 nt, Artificial Sequence
  Description of Artificial Sequence: Synthetic oligonucleotide
  Antisense strand to SEQ ID NO: 837998
acuagagauaucaaucaga

SEQ ID NO: 838000 - RNA, 19 nt, Artificial Sequence
  Description of Artificial Sequence: Synthetic oligonucleotide
  Sense strand starting at position 3706 of SEQ ID NO: 588044
gauugauaucucuaguguu

SEQ ID NO: 838001 - RNA, 19 nt, Artificial Sequence
  Description of Artificial Sequence: Synthetic oligonucleotide
  Antisense strand to SEQ ID NO: 838000
aacacuagagauaucaauc

SEQ ID NO: 838002 - RNA, 19 nt, Artificial Sequence
  Description of Artificial Sequence: Synthetic oligonucleotide
  Sense strand starting at position 3824 of SEQ ID NO: 588044
agaaaugccuauuuguguu

SEQ ID NO: 838003 - RNA, 19 nt, Artificial Sequence
  Description of Artificial Sequence: Synthetic oligonucleotide
  Antisense strand to SEQ ID NO: 838002
aacacaaauaggcauuucu

SEQ ID NO: 838004 - RNA, 19 nt, Artificial Sequence
  Description of Artificial Sequence: Synthetic oligonucleotide
  Sense strand starting at position 3830 of SEQ ID NO: 588044
gccuauuuguguuucuuag

SEQ ID NO: 838005 - RNA, 19 nt, Artificial Sequence
  Description of Artificial Sequence: Synthetic oligonucleotide
  Antisense strand to SEQ ID NO: 838004
cuaagaaacacaaauaggc

SEQ ID NO: 838006 - RNA, 19 nt, Artificial Sequence
  Description of Artificial Sequence: Synthetic oligonucleotide
  Sense strand starting at position 3841 of SEQ ID NO: 588044
uuucuuagugcugagacau

SEQ ID NO: 838007 - RNA, 19 nt, Artificial Sequence
  Description of Artificial Sequence: Synthetic oligonucleotide
  Antisense strand to SEQ ID NO: 838006
augucucagcacuaagaaa

SEQ ID NO: 838008 - RNA, 19 nt, Artificial Sequence
  Description of Artificial Sequence: Synthetic oligonucleotide
  Sense strand starting at position 3847 of SEQ ID NO: 588044
agugcugagacaugaguga

SEQ ID NO: 838009 - RNA, 19 nt, Artificial Sequence
  Description of Artificial Sequence: Synthetic oligonucleotide
  Antisense strand to SEQ ID NO: 838008
ucacucaugucucagcacu

SEQ ID NO: 838010 - RNA, 19 nt, Artificial Sequence
  Description of Artificial Sequence: Synthetic oligonucleotide
  Sense strand starting at position 3860 of SEQ ID NO: 588044
gagugaugagggugaauau

SEQ ID NO: 838011 - RNA, 19 nt, Artificial Sequence
  Description of Artificial Sequence: Synthetic oligonucleotide
  Antisense strand to SEQ ID NO: 838010
auauucacccucaucacuc

SEQ ID NO: 838012 - RNA, 19 nt, Artificial Sequence
  Description of Artificial Sequence: Synthetic oligonucleotide
  Sense strand starting at position 51 of SEQ ID NO: 588045
auaauacucuugucaagag

SEQ ID NO: 838013 - RNA, 19 nt, Artificial Sequence
  Description of Artificial Sequence: Synthetic oligonucleotide
  Antisense strand to SEQ ID NO: 838012
cucuugacaagaguauuau

SEQ ID NO: 838014 - RNA, 19 nt, Artificial Sequence
  Description of Artificial Sequence: Synthetic oligonucleotide
  Sense strand starting at position 55 of SEQ ID NO: 588045
uacucuugucaagagugau

SEQ ID NO: 838015 - RNA, 19 nt, Artificial Sequence
  Description of Artificial Sequence: Synthetic oligonucleotide
  Antisense strand to SEQ ID NO: 838014
aucacucuugacaagagua

SEQ ID NO: 838016 - RNA, 19 nt, Artificial Sequence
  Description of Artificial Sequence: Synthetic oligonucleotide
  Sense strand starting at position 58 of SEQ ID NO: 588045
ucuugucaagagugauuac

SEQ ID NO: 838017 - RNA, 19 nt, Artificial Sequence
  Description of Artificial Sequence: Synthetic oligonucleotide
  Antisense strand to SEQ ID NO: 838016
guaaucacucuugacaaga

SEQ ID NO: 838018 - RNA, 19 nt, Artificial Sequence
  Description of Artificial Sequence: Synthetic oligonucleotide
  Sense strand starting at position 61 of SEQ ID NO: 588045
ugucaagagugauuacauu

SEQ ID NO: 838019 - RNA, 19 nt, Artificial Sequence
  Description of Artificial Sequence: Synthetic oligonucleotide
  Antisense strand to SEQ ID NO: 838018
aauguaaucacucuugaca

SEQ ID NO: 838020 - RNA, 19 nt, Artificial Sequence
  Description of Artificial Sequence: Synthetic oligonucleotide
  Sense strand starting at position 214 of SEQ ID NO: 588045
ggaucaauaucugacccua

SEQ ID NO: 838021 - RNA, 19 nt, Artificial Sequence
  Description of Artificial Sequence: Synthetic oligonucleotide
  Antisense strand to SEQ ID NO: 838020
uagggucagauauugaucc

SEQ ID NO: 838022 - RNA, 19 nt, Artificial Sequence
  Description of Artificial Sequence: Synthetic oligonucleotide
  Sense strand starting at position 242 of SEQ ID NO: 588045
cucuuuaucuuguuauaug

SEQ ID NO: 838023 - RNA, 19 nt, Artificial Sequence
  Description of Artificial Sequence: Synthetic oligonucleotide
  Antisense strand to SEQ ID NO: 838022
cauauaacaagauaaagag

SEQ ID NO: 838024 - RNA, 19 nt, Artificial Sequence
  Description of Artificial Sequence: Synthetic oligonucleotide
  Sense strand starting at position 250 of SEQ ID NO: 588045
cuuguuauauguccacaug

SEQ ID NO: 838025 - RNA, 19 nt, Artificial Sequence
  Description of Artificial Sequence: Synthetic oligonucleotide
  Antisense strand to SEQ ID NO: 838024
cauguggacauauaacaag

SEQ ID NO: 838026 - RNA, 19 nt, Artificial Sequence
  Description of Artificial Sequence: Synthetic oligonucleotide
  Sense strand starting at position 253 of SEQ ID NO: 588045
guuauauguccacaugcuu

SEQ ID NO: 838027 - RNA, 19 nt, Artificial Sequence
  Description of Artificial Sequence: Synthetic oligonucleotide
  Antisense strand to SEQ ID NO: 838026
aagcauguggacauauaac

SEQ ID NO: 838028 - RNA, 19 nt, Artificial Sequence
  Description of Artificial Sequence: Synthetic oligonucleotide
  Sense strand starting at position 303 of SEQ ID NO: 588045
ucuuacugugaguacuaga

SEQ ID NO: 838029 - RNA, 19 nt, Artificial Sequence
  Description of Artificial Sequence: Synthetic oligonucleotide
  Antisense strand to SEQ ID NO: 838028
ucuaguacucacaguaaga

SEQ ID NO: 838030 - RNA, 19 nt, Artificial Sequence
  Description of Artificial Sequence: Synthetic oligonucleotide
  Sense strand starting at position 347 of SEQ ID NO: 588045
uuauaaguguuuccaaugu

SEQ ID NO: 838031 - RNA, 19 nt, Artificial Sequence
  Description of Artificial Sequence: Synthetic oligonucleotide
  Antisense strand to SEQ ID NO: 838030
acauuggaaacacuuauaa

SEQ ID NO: 838032 - RNA, 19 nt, Artificial Sequence
  Description of Artificial Sequence: Synthetic oligonucleotide
  Sense strand starting at position 362 of SEQ ID NO: 588045
augucaucgcuccaguuga

SEQ ID NO: 838033 - RNA, 19 nt, Artificial Sequence
  Description of Artificial Sequence: Synthetic oligonucleotide
  Antisense strand to SEQ ID NO: 838032
ucaacuggagcgaugacau

SEQ ID NO: 838034 - RNA, 19 nt, Artificial Sequence
  Description of Artificial Sequence: Synthetic oligonucleotide
  Sense strand starting at position 402 of SEQ ID NO: 588045
gcuucuagccaucauaaug

SEQ ID NO: 838035 - RNA, 19 nt, Artificial Sequence
  Description of Artificial Sequence: Synthetic oligonucleotide
  Antisense strand to SEQ ID NO: 838034
cauuaugauggcuagaagc

SEQ ID NO: 838036 - RNA, 19 nt, Artificial Sequence
  Description of Artificial Sequence: Synthetic oligonucleotide
  Sense strand starting at position 423 of SEQ ID NO: 588045
auuggauguuaccacucaa

SEQ ID NO: 838037 - RNA, 19 nt, Artificial Sequence
  Description of Artificial Sequence: Synthetic oligonucleotide
  Antisense strand to SEQ ID NO: 838036
uugagugguaacauccaau

SEQ ID NO: 838038 - RNA, 19 nt, Artificial Sequence
  Description of Artificial Sequence: Synthetic oligonucleotide
  Sense strand starting at position 488 of SEQ ID NO: 588045
uuuaguuuccuggaccuuu

SEQ ID NO: 838039 - RNA, 19 nt, Artificial Sequence
  Description of Artificial Sequence: Synthetic oligonucleotide
  Antisense strand to SEQ ID NO: 838038
aaagguccaggaaacuaaa

SEQ ID NO: 838040 - RNA, 19 nt, Artificial Sequence
  Description of Artificial Sequence: Synthetic oligonucleotide
  Sense strand starting at position 684 of SEQ ID NO: 588045
cuggcucccgaauauuaau

SEQ ID NO: 838041 - RNA, 19 nt, Artificial Sequence
  Description of Artificial Sequence: Synthetic oligonucleotide
  Antisense strand to SEQ ID NO: 838040
auuaauauucgggagccag

SEQ ID NO: 838042 - RNA, 19 nt, Artificial Sequence
  Description of Artificial Sequence: Synthetic oligonucleotide
  Sense strand starting at position 708 of SEQ ID NO: 588045
uuuaccuucccagggaaau

SEQ ID NO: 838043 - RNA, 19 nt, Artificial Sequence
  Description of Artificial Sequence: Synthetic oligonucleotide
  Antisense strand to SEQ ID NO: 838042
auuucccugggaagguaaa

SEQ ID NO: 838044 - RNA, 19 nt, Artificial Sequence
  Description of Artificial Sequence: Synthetic oligonucleotide
  Sense strand starting at position 709 of SEQ ID NO: 588045
uuaccuucccagggaaauc

SEQ ID NO: 838045 - RNA, 19 nt, Artificial Sequence
  Description of Artificial Sequence: Synthetic oligonucleotide
  Antisense strand to SEQ ID NO: 838044
gauuucccugggaagguaa

SEQ ID NO: 838046 - RNA, 19 nt, Artificial Sequence
  Description of Artificial Sequence: Synthetic oligonucleotide
  Sense strand starting at position 753 of SEQ ID NO: 588045
gagaacaggucgccacauu

SEQ ID NO: 838047 - RNA, 19 nt, Artificial Sequence
  Description of Artificial Sequence: Synthetic oligonucleotide
  Antisense strand to SEQ ID NO: 838046
aauguggcgaccuguucuc

SEQ ID NO: 838048 - RNA, 19 nt, Artificial Sequence
  Description of Artificial Sequence: Synthetic oligonucleotide
  Sense strand starting at position 832 of SEQ ID NO: 588045
ccuuuaugacggcauuauu

SEQ ID NO: 838049 - RNA, 19 nt, Artificial Sequence
  Description of Artificial Sequence: Synthetic oligonucleotide
  Antisense strand to SEQ ID NO: 838048
aauaaugccgucauaaagg

SEQ ID NO: 838050 - RNA, 19 nt, Artificial Sequence
  Description of Artificial Sequence: Synthetic oligonucleotide
  Sense strand starting at position 851 of SEQ ID NO: 588045
uucgucaggucucuaaauu

SEQ ID NO: 838051 - RNA, 19 nt, Artificial Sequence
  Description of Artificial Sequence: Synthetic oligonucleotide
  Antisense strand to SEQ ID NO: 838050
aauuuagagaccugacgaa

SEQ ID NO: 838052 - RNA, 19 nt, Artificial Sequence
  Description of Artificial Sequence: Synthetic oligonucleotide
  Sense strand starting at position 852 of SEQ ID NO: 588045
ucgucaggucucuaaauua

SEQ ID NO: 838053 - RNA, 19 nt, Artificial Sequence
  Description of Artificial Sequence: Synthetic oligonucleotide
  Antisense strand to SEQ ID NO: 838052
uaauuuagagaccugacga

SEQ ID NO: 838054 - RNA, 19 nt, Artificial Sequence
  Description of Artificial Sequence: Synthetic oligonucleotide
  Sense strand starting at position 880 of SEQ ID NO: 588045
cccuuaggaucucagaaac

SEQ ID NO: 838055 - RNA, 19 nt, Artificial Sequence
  Description of Artificial Sequence: Synthetic oligonucleotide
  Antisense strand to SEQ ID NO: 838054
guuucugagauccuaaggg

SEQ ID NO: 838056 - RNA, 19 nt, Artificial Sequence
  Description of Artificial Sequence: Synthetic oligonucleotide
  Sense strand starting at position 892 of SEQ ID NO: 588045
cagaaacgcucucugguua

SEQ ID NO: 838057 - RNA, 19 nt, Artificial Sequence
  Description of Artificial Sequence: Synthetic oligonucleotide
  Antisense strand to SEQ ID NO: 838056
uaaccagagagcguuucug

SEQ ID NO: 838058 - RNA, 19 nt, Artificial Sequence
  Description of Artificial Sequence: Synthetic oligonucleotide
  Sense strand starting at position 893 of SEQ ID NO: 588045
agaaacgcucucugguuau

SEQ ID NO: 838059 - RNA, 19 nt, Artificial Sequence
  Description of Artificial Sequence: Synthetic oligonucleotide
  Antisense strand to SEQ ID NO: 838058
auaaccagagagcguuucu

SEQ ID NO: 838060 - RNA, 19 nt, Artificial Sequence
  Description of Artificial Sequence: Synthetic oligonucleotide
  Sense strand starting at position 904 of SEQ ID NO: 588045
cugguuauuucugcuucua

SEQ ID NO: 838061 - RNA, 19 nt, Artificial Sequence
  Description of Artificial Sequence: Synthetic oligonucleotide
  Antisense strand to SEQ ID NO: 838060
uagaagcagaaauaaccag

SEQ ID NO: 838062 - RNA, 19 nt, Artificial Sequence
  Description of Artificial Sequence: Synthetic oligonucleotide
  Sense strand starting at position 906 of SEQ ID NO: 588045
gguuauuucugcuucuaac

SEQ ID NO: 838063 - RNA, 19 nt, Artificial Sequence
  Description of Artificial Sequence: Synthetic oligonucleotide
  Antisense strand to SEQ ID NO: 838062
guuagaagcagaaauaacc

SEQ ID NO: 838064 - RNA, 19 nt, Artificial Sequence
  Description of Artificial Sequence: Synthetic oligonucleotide
  Sense strand starting at position 962 of SEQ ID NO: 588045
caaucacuucgguacaaga

SEQ ID NO: 838065 - RNA, 19 nt, Artificial Sequence
  Description of Artificial Sequence: Synthetic oligonucleotide
  Antisense strand to SEQ ID NO: 838064
ucuuguaccgaagugauug

SEQ ID NO: 838066 - RNA, 19 nt, Artificial Sequence
  Description of Artificial Sequence: Synthetic oligonucleotide
  Sense strand starting at position 987 of SEQ ID NO: 588045
ggauaagguuucucacaca

SEQ ID NO: 838067 - RNA, 19 nt, Artificial Sequence
  Description of Artificial Sequence: Synthetic oligonucleotide
  Antisense strand to SEQ ID NO: 838066
ugugugagaaaccuuaucc

SEQ ID NO: 838068 - RNA, 19 nt, Artificial Sequence
  Description of Artificial Sequence: Synthetic oligonucleotide
  Sense strand starting at position 1066 of SEQ ID NO: 588045
acccuuaccugacuugaga

SEQ ID NO: 838069 - RNA, 19 nt, Artificial Sequence
  Description of Artificial Sequence: Synthetic oligonucleotide
  Antisense strand to SEQ ID NO: 838068
ucucaagucagguaagggu

SEQ ID NO: 838070 - RNA, 19 nt, Artificial Sequence
  Description of Artificial Sequence: Synthetic oligonucleotide
  Sense strand starting at position 1077 of SEQ ID NO: 588045
acuugagacgucgguuacu

SEQ ID NO: 838071 - RNA, 19 nt, Artificial Sequence
  Description of Artificial Sequence: Synthetic oligonucleotide
  Antisense strand to SEQ ID NO: 838070
aguaaccgacgucucaagu

SEQ ID NO: 838072 - RNA, 19 nt, Artificial Sequence
  Description of Artificial Sequence: Synthetic oligonucleotide
  Sense strand starting at position 1118 of SEQ ID NO: 588045
cggacuuuaaagugcaaau

SEQ ID NO: 838073 - RNA, 19 nt, Artificial Sequence
  Description of Artificial Sequence: Synthetic oligonucleotide
  Antisense strand to SEQ ID NO: 838072
auuugcacuuuaaaguccg

SEQ ID NO: 838074 - RNA, 19 nt, Artificial Sequence
  Description of Artificial Sequence: Synthetic oligonucleotide
  Sense strand starting at position 1214 of SEQ ID NO: 588045
cuccuuugucauggcggau

SEQ ID NO: 838075 - RNA, 19 nt, Artificial Sequence
  Description of Artificial Sequence: Synthetic oligonucleotide
  Antisense strand to SEQ ID NO: 838074
auccgccaugacaaaggag

SEQ ID NO: 838076 - RNA, 19 nt, Artificial Sequence
  Description of Artificial Sequence: Synthetic oligonucleotide
  Sense strand starting at position 1251 of SEQ ID NO: 588045
ccuacugcagaguguuaau

SEQ ID NO: 838077 - RNA, 19 nt, Artificial Sequence
  Description of Artificial Sequence: Synthetic oligonucleotide
  Antisense strand to SEQ ID NO: 838076
auuaacacucugcaguagg

SEQ ID NO: 838078 - RNA, 19 nt, Artificial Sequence
  Description of Artificial Sequence: Synthetic oligonucleotide
  Sense strand starting at position 1477 of SEQ ID NO: 588045
ccguguacagcgucucuaa

SEQ ID NO: 838079 - RNA, 19 nt, Artificial Sequence
  Description of Artificial Sequence: Synthetic oligonucleotide
  Antisense strand to SEQ ID NO: 838078
uuagagacgcuguacacgg

SEQ ID NO: 838080 - RNA, 19 nt, Artificial Sequence
  Description of Artificial Sequence: Synthetic oligonucleotide
  Sense strand starting at position 2159 of SEQ ID NO: 588045
agucauuaucucgggcgga

SEQ ID NO: 838081 - RNA, 19 nt, Artificial Sequence
  Description of Artificial Sequence: Synthetic oligonucleotide
  Antisense strand to SEQ ID NO: 838080
uccgcccgagauaaugacu

SEQ ID NO: 838082 - RNA, 19 nt, Artificial Sequence
  Description of Artificial Sequence: Synthetic oligonucleotide
  Sense strand starting at position 3267 of SEQ ID NO: 588045
ccgugcuucgcgguaguaa

SEQ ID NO: 838083 - RNA, 19 nt, Artificial Sequence
  Description of Artificial Sequence: Synthetic oligonucleotide
  Antisense strand to SEQ ID NO: 838082
uuacuaccgcgaagcacgg

SEQ ID NO: 838084 - RNA, 19 nt, Artificial Sequence
  Description of Artificial Sequence: Synthetic oligonucleotide
  Sense strand starting at position 3269 of SEQ ID NO: 588045
gugcuucgcgguaguaacu

SEQ ID NO: 838085 - RNA, 19 nt, Artificial Sequence
  Description of Artificial Sequence: Synthetic oligonucleotide
  Antisense strand to SEQ ID NO: 838084
aguuacuaccgcgaagcac

SEQ ID NO: 838086 - RNA, 19 nt, Artificial Sequence
  Description of Artificial Sequence: Synthetic oligonucleotide
  Sense strand starting at position 3336 of SEQ ID NO: 588045
cggcauugugaucaggacu

SEQ ID NO: 838087 - RNA, 19 nt, Artificial Sequence
  Description of Artificial Sequence: Synthetic oligonucleotide
  Antisense strand to SEQ ID NO: 838086
aguccugaucacaaugccg

SEQ ID NO: 838088 - RNA, 19 nt, Artificial Sequence
  Description of Artificial Sequence: Synthetic oligonucleotide
  Sense strand starting at position 3585 of SEQ ID NO: 588045
cugaguguggcugagugau

SEQ ID NO: 838089 - RNA, 19 nt, Artificial Sequence
  Description of Artificial Sequence: Synthetic oligonucleotide
  Antisense strand to SEQ ID NO: 838088
aucacucagccacacucag

SEQ ID NO: 838090 - RNA, 19 nt, Artificial Sequence
  Description of Artificial Sequence: Synthetic oligonucleotide
  Sense strand starting at position 3814 of SEQ ID NO: 588045
cagccuugacccggagaca

SEQ ID NO: 838091 - RNA, 19 nt, Artificial Sequence
  Description of Artificial Sequence: Synthetic oligonucleotide
  Antisense strand to SEQ ID NO: 838090
ugucuccgggucaaggcug

SEQ ID NO: 838092 - RNA, 19 nt, Artificial Sequence
  Description of Artificial Sequence: Synthetic oligonucleotide
  Sense strand starting at position 23 of SEQ ID NO: 588046
accaguacaucauugcaga

SEQ ID NO: 838093 - RNA, 19 nt, Artificial Sequence
  Description of Artificial Sequence: Synthetic oligonucleotide
  Antisense strand to SEQ ID NO: 838092
ucugcaaugauguacuggu

SEQ ID NO: 838094 - RNA, 19 nt, Artificial Sequence
  Description of Artificial Sequence: Synthetic oligonucleotide
  Sense strand starting at position 24 of SEQ ID NO: 588046
ccaguacaucauugcagau

SEQ ID NO: 838095 - RNA, 19 nt, Artificial Sequence
  Description of Artificial Sequence: Synthetic oligonucleotide
  Antisense strand to SEQ ID NO: 838094
aucugcaaugauguacugg

SEQ ID NO: 838096 - RNA, 19 nt, Artificial Sequence
  Description of Artificial Sequence: Synthetic oligonucleotide
  Sense strand starting at position 394 of SEQ ID NO: 588046
accugugguaaaugaguuu

SEQ ID NO: 838097 - RNA, 19 nt, Artificial Sequence
  Description of Artificial Sequence: Synthetic oligonucleotide
  Antisense strand to SEQ ID NO: 838096
aaacucauuuaccacaggu

SEQ ID NO: 838098 - RNA, 19 nt, Artificial Sequence
  Description of Artificial Sequence: Synthetic oligonucleotide
  Sense strand starting at position 426 of SEQ ID NO: 588046
ccuaacugccugugaaaga

SEQ ID NO: 838099 - RNA, 19 nt, Artificial Sequence
  Description of Artificial Sequence: Synthetic oligonucleotide
  Antisense strand to SEQ ID NO: 838098
ucuuucacaggcaguuagg

SEQ ID NO: 838100 - RNA, 19 nt, Artificial Sequence
  Description of Artificial Sequence: Synthetic oligonucleotide
  Sense strand starting at position 540 of SEQ ID NO: 588046
ccauuaacacaucagugua

SEQ ID NO: 838101 - RNA, 19 nt, Artificial Sequence
  Description of Artificial Sequence: Synthetic oligonucleotide
  Antisense strand to SEQ ID NO: 838100
uacacugauguguuaaugg

SEQ ID NO: 838102 - RNA, 19 nt, Artificial Sequence
  Description of Artificial Sequence: Synthetic oligonucleotide
  Sense strand starting at position 812 of SEQ ID NO: 588046
auaauacucuugucaagag

SEQ ID NO: 838103 - RNA, 19 nt, Artificial Sequence
  Description of Artificial Sequence: Synthetic oligonucleotide
  Antisense strand to SEQ ID NO: 838102
cucuugacaagaguauuau

SEQ ID NO: 838104 - RNA, 19 nt, Artificial Sequence
  Description of Artificial Sequence: Synthetic oligonucleotide
  Sense strand starting at position 816 of SEQ ID NO: 588046
uacucuugucaagagugau

SEQ ID NO: 838105 - RNA, 19 nt, Artificial Sequence
  Description of Artificial Sequence: Synthetic oligonucleotide
  Antisense strand to SEQ ID NO: 838104
aucacucuugacaagagua

SEQ ID NO: 838106 - RNA, 19 nt, Artificial Sequence
  Description of Artificial Sequence: Synthetic oligonucleotide
  Sense strand starting at position 819 of SEQ ID NO: 588046
ucuugucaagagugauuac

SEQ ID NO: 838107 - RNA, 19 nt, Artificial Sequence
  Description of Artificial Sequence: Synthetic oligonucleotide
  Antisense strand to SEQ ID NO: 838106
guaaucacucuugacaaga

SEQ ID NO: 838108 - RNA, 19 nt, Artificial Sequence
  Description of Artificial Sequence: Synthetic oligonucleotide
  Sense strand starting at position 822 of SEQ ID NO: 588046
ugucaagagugauuacauu

SEQ ID NO: 838109 - RNA, 19 nt, Artificial Sequence
  Description of Artificial Sequence: Synthetic oligonucleotide
  Antisense strand to SEQ ID NO: 838108
aauguaaucacucuugaca

SEQ ID NO: 838110 - RNA, 19 nt, Artificial Sequence
  Description of Artificial Sequence: Synthetic oligonucleotide
  Sense strand starting at position 975 of SEQ ID NO: 588046
ggaucaauaucugacccua

SEQ ID NO: 838111 - RNA, 19 nt, Artificial Sequence
  Description of Artificial Sequence: Synthetic oligonucleotide
  Antisense strand to SEQ ID NO: 838110
uagggucagauauugaucc

SEQ ID NO: 838112 - RNA, 19 nt, Artificial Sequence
  Description of Artificial Sequence: Synthetic oligonucleotide
  Sense strand starting at position 1003 of SEQ ID NO: 588046
cucuuuaucuuguuauaug

SEQ ID NO: 838113 - RNA, 19 nt, Artificial Sequence
  Description of Artificial Sequence: Synthetic oligonucleotide
  Antisense strand to SEQ ID NO: 838112
cauauaacaagauaaagag

SEQ ID NO: 838114 - RNA, 19 nt, Artificial Sequence
  Description of Artificial Sequence: Synthetic oligonucleotide
  Sense strand starting at position 1011 of SEQ ID NO: 588046
cuuguuauauguccacaug

SEQ ID NO: 838115 - RNA, 19 nt, Artificial Sequence
  Description of Artificial Sequence: Synthetic oligonucleotide
  Antisense strand to SEQ ID NO: 838114
cauguggacauauaacaag

SEQ ID NO: 838116 - RNA, 19 nt, Artificial Sequence
  Description of Artificial Sequence: Synthetic oligonucleotide
  Sense strand starting at position 1014 of SEQ ID NO: 588046
guuauauguccacaugcuu

SEQ ID NO: 838117 - RNA, 19 nt, Artificial Sequence
  Description of Artificial Sequence: Synthetic oligonucleotide
  Antisense strand to SEQ ID NO: 838116
aagcauguggacauauaac

SEQ ID NO: 838118 - RNA, 19 nt, Artificial Sequence
  Description of Artificial Sequence: Synthetic oligonucleotide
  Sense strand starting at position 1064 of SEQ ID NO: 588046
ucuuacugugaguacuaga

SEQ ID NO: 838119 - RNA, 19 nt, Artificial Sequence
  Description of Artificial Sequence: Synthetic oligonucleotide
  Antisense strand to SEQ ID NO: 838118
ucuaguacucacaguaaga

SEQ ID NO: 838120 - RNA, 19 nt, Artificial Sequence
  Description of Artificial Sequence: Synthetic oligonucleotide
  Sense strand starting at position 1108 of SEQ ID NO: 588046
uuauaaguguuuccaaugu

SEQ ID NO: 838121 - RNA, 19 nt, Artificial Sequence
  Description of Artificial Sequence: Synthetic oligonucleotide
  Antisense strand to SEQ ID NO: 838120
acauuggaaacacuuauaa

SEQ ID NO: 838122 - RNA, 19 nt, Artificial Sequence
  Description of Artificial Sequence: Synthetic oligonucleotide
  Sense strand starting at position 1123 of SEQ ID NO: 588046
augucaucgcuccaguuga

SEQ ID NO: 838123 - RNA, 19 nt, Artificial Sequence
  Description of Artificial Sequence: Synthetic oligonucleotide
  Antisense strand to SEQ ID NO: 838122
ucaacuggagcgaugacau

SEQ ID NO: 838124 - RNA, 19 nt, Artificial Sequence
  Description of Artificial Sequence: Synthetic oligonucleotide
  Sense strand starting at position 1163 of SEQ ID NO: 588046
gcuucuagccaucauaaug

SEQ ID NO: 838125 - RNA, 19 nt, Artificial Sequence
  Description of Artificial Sequence: Synthetic oligonucleotide
  Antisense strand to SEQ ID NO: 838124
cauuaugauggcuagaagc

SEQ ID NO: 838126 - RNA, 19 nt, Artificial Sequence
  Description of Artificial Sequence: Synthetic oligonucleotide
  Sense strand starting at position 1184 of SEQ ID NO: 588046
auuggauguuaccacucaa

SEQ ID NO: 838127 - RNA, 19 nt, Artificial Sequence
  Description of Artificial Sequence: Synthetic oligonucleotide
  Antisense strand to SEQ ID NO: 838126
uugagugguaacauccaau

SEQ ID NO: 838128 - RNA, 19 nt, Artificial Sequence
  Description of Artificial Sequence: Synthetic oligonucleotide
  Sense strand starting at position 1249 of SEQ ID NO: 588046
uuuaguuuccuggaccuuu

SEQ ID NO: 838129 - RNA, 19 nt, Artificial Sequence
  Description of Artificial Sequence: Synthetic oligonucleotide
  Antisense strand to SEQ ID NO: 838128
aaagguccaggaaacuaaa

SEQ ID NO: 838130 - RNA, 19 nt, Artificial Sequence
  Description of Artificial Sequence: Synthetic oligonucleotide
  Sense strand starting at position 1445 of SEQ ID NO: 588046
cuggcucccgaauauuaau

SEQ ID NO: 838131 - RNA, 19 nt, Artificial Sequence
  Description of Artificial Sequence: Synthetic oligonucleotide
  Antisense strand to SEQ ID NO: 838130
auuaauauucgggagccag

SEQ ID NO: 838132 - RNA, 19 nt, Artificial Sequence
  Description of Artificial Sequence: Synthetic oligonucleotide
  Sense strand starting at position 1469 of SEQ ID NO: 588046
uuuaccuucccagggaaau

SEQ ID NO: 838133 - RNA, 19 nt, Artificial Sequence
  Description of Artificial Sequence: Synthetic oligonucleotide
  Antisense strand to SEQ ID NO: 838132
auuucccugggaagguaaa

SEQ ID NO: 838134 - RNA, 19 nt, Artificial Sequence
  Description of Artificial Sequence: Synthetic oligonucleotide
  Sense strand starting at position 1470 of SEQ ID NO: 588046
uuaccuucccagggaaauc

SEQ ID NO: 838135 - RNA, 19 nt, Artificial Sequence
  Description of Artificial Sequence: Synthetic oligonucleotide
  Antisense strand to SEQ ID NO: 838134
gauuucccugggaagguaa

SEQ ID NO: 838136 - RNA, 19 nt, Artificial Sequence
  Description of Artificial Sequence: Synthetic oligonucleotide
  Sense strand starting at position 1514 of SEQ ID NO: 588046
gagaacaggucgccacauu

SEQ ID NO: 838137 - RNA, 19 nt, Artificial Sequence
  Description of Artificial Sequence: Synthetic oligonucleotide
  Antisense strand to SEQ ID NO: 838136
aauguggcgaccuguucuc

SEQ ID NO: 838138 - RNA, 19 nt, Artificial Sequence
  Description of Artificial Sequence: Synthetic oligonucleotide
  Sense strand starting at position 1593 of SEQ ID NO: 588046
ccuuuaugacggcauuauu

SEQ ID NO: 838139 - RNA, 19 nt, Artificial Sequence
  Description of Artificial Sequence: Synthetic oligonucleotide
  Antisense strand to SEQ ID NO: 838138
aauaaugccgucauaaagg

SEQ ID NO: 838140 - RNA, 19 nt, Artificial Sequence
  Description of Artificial Sequence: Synthetic oligonucleotide
  Sense strand starting at position 1612 of SEQ ID NO: 588046
uucgucaggucucuaaauu

SEQ ID NO: 838141 - RNA, 19 nt, Artificial Sequence
  Description of Artificial Sequence: Synthetic oligonucleotide
  Antisense strand to SEQ ID NO: 838140
aauuuagagaccugacgaa

SEQ ID NO: 838142 - RNA, 19 nt, Artificial Sequence
  Description of Artificial Sequence: Synthetic oligonucleotide
  Sense strand starting at position 1613 of SEQ ID NO: 588046
ucgucaggucucuaaauua

SEQ ID NO: 838143 - RNA, 19 nt, Artificial Sequence
  Description of Artificial Sequence: Synthetic oligonucleotide
  Antisense strand to SEQ ID NO: 838142
uaauuuagagaccugacga

SEQ ID NO: 838144 - RNA, 19 nt, Artificial Sequence
  Description of Artificial Sequence: Synthetic oligonucleotide
  Sense strand starting at position 1641 of SEQ ID NO: 588046
cccuuaggaucucagaaac

SEQ ID NO: 838145 - RNA, 19 nt, Artificial Sequence
  Description of Artificial Sequence: Synthetic oligonucleotide
  Antisense strand to SEQ ID NO: 838144
guuucugagauccuaaggg

SEQ ID NO: 838146 - RNA, 19 nt, Artificial Sequence
  Description of Artificial Sequence: Synthetic oligonucleotide
  Sense strand starting at position 1653 of SEQ ID NO: 588046
cagaaacgcucucugguua

SEQ ID NO: 838147 - RNA, 19 nt, Artificial Sequence
  Description of Artificial Sequence: Synthetic oligonucleotide
  Antisense strand to SEQ ID NO: 838146
uaaccagagagcguuucug

SEQ ID NO: 838148 - RNA, 19 nt, Artificial Sequence
  Description of Artificial Sequence: Synthetic oligonucleotide
  Sense strand starting at position 1654 of SEQ ID NO: 588046
agaaacgcucucugguuau

SEQ ID NO: 838149 - RNA, 19 nt, Artificial Sequence
  Description of Artificial Sequence: Synthetic oligonucleotide
  Antisense strand to SEQ ID NO: 838148
auaaccagagagcguuucu

SEQ ID NO: 838150 - RNA, 19 nt, Artificial Sequence
  Description of Artificial Sequence: Synthetic oligonucleotide
  Sense strand starting at position 1665 of SEQ ID NO: 588046
cugguuauuucugcuucua

SEQ ID NO: 838151 - RNA, 19 nt, Artificial Sequence
  Description of Artificial Sequence: Synthetic oligonucleotide
  Antisense strand to SEQ ID NO: 838150
uagaagcagaaauaaccag

SEQ ID NO: 838152 - RNA, 19 nt, Artificial Sequence
  Description of Artificial Sequence: Synthetic oligonucleotide
  Sense strand starting at position 1667 of SEQ ID NO: 588046
gguuauuucugcuucuaac

SEQ ID NO: 838153 - RNA, 19 nt, Artificial Sequence
  Description of Artificial Sequence: Synthetic oligonucleotide
  Antisense strand to SEQ ID NO: 838152
guuagaagcagaaauaacc

SEQ ID NO: 838154 - RNA, 19 nt, Artificial Sequence
  Description of Artificial Sequence: Synthetic oligonucleotide
  Sense strand starting at position 1723 of SEQ ID NO: 588046
caaucacuucgguacaaga

SEQ ID NO: 838155 - RNA, 19 nt, Artificial Sequence
  Description of Artificial Sequence: Synthetic oligonucleotide
  Antisense strand to SEQ ID NO: 838154
ucuuguaccgaagugauug

SEQ ID NO: 838156 - RNA, 19 nt, Artificial Sequence
  Description of Artificial Sequence: Synthetic oligonucleotide
  Sense strand starting at position 1748 of SEQ ID NO: 588046
ggauaagguuucucacaca

SEQ ID NO: 838157 - RNA, 19 nt, Artificial Sequence
  Description of Artificial Sequence: Synthetic oligonucleotide
  Antisense strand to SEQ ID NO: 838156
ugugugagaaaccuuaucc

SEQ ID NO: 838158 - RNA, 19 nt, Artificial Sequence
  Description of Artificial Sequence: Synthetic oligonucleotide
  Sense strand starting at position 1827 of SEQ ID NO: 588046
acccuuaccugacuugaga

SEQ ID NO: 838159 - RNA, 19 nt, Artificial Sequence
  Description of Artificial Sequence: Synthetic oligonucleotide
  Antisense strand to SEQ ID NO: 838158
ucucaagucagguaagggu

SEQ ID NO: 838160 - RNA, 19 nt, Artificial Sequence
  Description of Artificial Sequence: Synthetic oligonucleotide
  Sense strand starting at position 1838 of SEQ ID NO: 588046
acuugagacgucgguuacu

SEQ ID NO: 838161 - RNA, 19 nt, Artificial Sequence
  Description of Artificial Sequence: Synthetic oligonucleotide
  Antisense strand to SEQ ID NO: 838160
aguaaccgacgucucaagu

SEQ ID NO: 838162 - RNA, 19 nt, Artificial Sequence
  Description of Artificial Sequence: Synthetic oligonucleotide
  Sense strand starting at position 1879 of SEQ ID NO: 588046
cggacuuuaaagugcaaau

SEQ ID NO: 838163 - RNA, 19 nt, Artificial Sequence
  Description of Artificial Sequence: Synthetic oligonucleotide
  Antisense strand to SEQ ID NO: 838162
auuugcacuuuaaaguccg

SEQ ID NO: 838164 - RNA, 19 nt, Artificial Sequence
  Description of Artificial Sequence: Synthetic oligonucleotide
  Sense strand starting at position 1975 of SEQ ID NO: 588046
cuccuuugucauggcggau

SEQ ID NO: 838165 - RNA, 19 nt, Artificial Sequence
  Description of Artificial Sequence: Synthetic oligonucleotide
  Antisense strand to SEQ ID NO: 838164
auccgccaugacaaaggag

SEQ ID NO: 838166 - RNA, 19 nt, Artificial Sequence
  Description of Artificial Sequence: Synthetic oligonucleotide
  Sense strand starting at position 2012 of SEQ ID NO: 588046
ccuacugcagaguguuaau

SEQ ID NO: 838167 - RNA, 19 nt, Artificial Sequence
  Description of Artificial Sequence: Synthetic oligonucleotide
  Antisense strand to SEQ ID NO: 838166
auuaacacucugcaguagg

SEQ ID NO: 838168 - RNA, 19 nt, Artificial Sequence
  Description of Artificial Sequence: Synthetic oligonucleotide
  Sense strand starting at position 2238 of SEQ ID NO: 588046
ccguguacagcgucucuaa

SEQ ID NO: 838169 - RNA, 19 nt, Artificial Sequence
  Description of Artificial Sequence: Synthetic oligonucleotide
  Antisense strand to SEQ ID NO: 838168
uuagagacgcuguacacgg

SEQ ID NO: 838170 - RNA, 19 nt, Artificial Sequence
  Description of Artificial Sequence: Synthetic oligonucleotide
  Sense strand starting at position 2920 of SEQ ID NO: 588046
agucauuaucucgggcgga

SEQ ID NO: 838171 - RNA, 19 nt, Artificial Sequence
  Description of Artificial Sequence: Synthetic oligonucleotide
  Antisense strand to SEQ ID NO: 838170
uccgcccgagauaaugacu

SEQ ID NO: 838172 - RNA, 19 nt, Artificial Sequence
  Description of Artificial Sequence: Synthetic oligonucleotide
  Sense strand starting at position 1273 of SEQ ID NO: 588047
cggcauugugaucaggacu

SEQ ID NO: 838173 - RNA, 19 nt, Artificial Sequence
  Description of Artificial Sequence: Synthetic oligonucleotide
  Antisense strand to SEQ ID NO: 838172
aguccugaucacaaugccg

SEQ ID NO: 838174 - RNA, 19 nt, Artificial Sequence
  Description of Artificial Sequence: Synthetic oligonucleotide
  Sense strand starting at position 1751 of SEQ ID NO: 588047
cagccuugacccggagaca

SEQ ID NO: 838175 - RNA, 19 nt, Artificial Sequence
  Description of Artificial Sequence: Synthetic oligonucleotide
  Antisense strand to SEQ ID NO: 838174
ugucuccgggucaaggcug

SEQ ID NO: 838176 - RNA, 19 nt, Artificial Sequence
  Description of Artificial Sequence: Synthetic oligonucleotide
  Sense strand starting at position 2109 of SEQ ID NO: 588047
auguguucgggcuaagaaa

SEQ ID NO: 838177 - RNA, 19 nt, Artificial Sequence
  Description of Artificial Sequence: Synthetic oligonucleotide
  Antisense strand to SEQ ID NO: 838176
uuucuuagcccgaacacau

SEQ ID NO: 838178 - RNA, 19 nt, Artificial Sequence
  Description of Artificial Sequence: Synthetic oligonucleotide
  Sense strand starting at position 2126 of SEQ ID NO: 588047
aaagauuagugcuuggaug

SEQ ID NO: 838179 - RNA, 19 nt, Artificial Sequence
  Description of Artificial Sequence: Synthetic oligonucleotide
  Antisense strand to SEQ ID NO: 838178
cauccaagcacuaaucuuu

SEQ ID NO: 838180 - RNA, 19 nt, Artificial Sequence
  Description of Artificial Sequence: Synthetic oligonucleotide
  Sense strand starting at position 2127 of SEQ ID NO: 588047
aagauuagugcuuggauga

SEQ ID NO: 838181 - RNA, 19 nt, Artificial Sequence
  Description of Artificial Sequence: Synthetic oligonucleotide
  Antisense strand to SEQ ID NO: 838180
ucauccaagcacuaaucuu

SEQ ID NO: 838182 - RNA, 19 nt, Artificial Sequence
  Description of Artificial Sequence: Synthetic oligonucleotide
  Sense strand starting at position 2128 of SEQ ID NO: 588047
agauuagugcuuggaugac

SEQ ID NO: 838183 - RNA, 19 nt, Artificial Sequence
  Description of Artificial Sequence: Synthetic oligonucleotide
  Antisense strand to SEQ ID NO: 838182
gucauccaagcacuaaucu

SEQ ID NO: 838184 - RNA, 19 nt, Artificial Sequence
  Description of Artificial Sequence: Synthetic oligonucleotide
  Sense strand starting at position 2180 of SEQ ID NO: 588047
uacgguuagcaaugagaga

SEQ ID NO: 838185 - RNA, 19 nt, Artificial Sequence
  Description of Artificial Sequence: Synthetic oligonucleotide
  Antisense strand to SEQ ID NO: 838184
ucucucauugcuaaccgua

SEQ ID NO: 838186 - RNA, 19 nt, Artificial Sequence
  Description of Artificial Sequence: Synthetic oligonucleotide
  Sense strand starting at position 2251 of SEQ ID NO: 588047
cguaucuuuauugagcuga

SEQ ID NO: 838187 - RNA, 19 nt, Artificial Sequence
  Description of Artificial Sequence: Synthetic oligonucleotide
  Antisense strand to SEQ ID NO: 838186
ucagcucaauaaagauacg

SEQ ID NO: 838188 - RNA, 19 nt, Artificial Sequence
  Description of Artificial Sequence: Synthetic oligonucleotide
  Sense strand starting at position 2256 of SEQ ID NO: 588047
cuuuauugagcugaccaga

SEQ ID NO: 838189 - RNA, 19 nt, Artificial Sequence
  Description of Artificial Sequence: Synthetic oligonucleotide
  Antisense strand to SEQ ID NO: 838188
ucuggucagcucaauaaag

SEQ ID NO: 838190 - RNA, 19 nt, Artificial Sequence
  Description of Artificial Sequence: Synthetic oligonucleotide
  Sense strand starting at position 2321 of SEQ ID NO: 588047
guagacacgaaaugauuga

SEQ ID NO: 838191 - RNA, 19 nt, Artificial Sequence
  Description of Artificial Sequence: Synthetic oligonucleotide
  Antisense strand to SEQ ID NO: 838190
ucaaucauuucgugucuac

SEQ ID NO: 838192 - RNA, 19 nt, Artificial Sequence
  Description of Artificial Sequence: Synthetic oligonucleotide
  Sense strand starting at position 2386 of SEQ ID NO: 588047
ccacaaggcugcucuacaa

SEQ ID NO: 838193 - RNA, 19 nt, Artificial Sequence
  Description of Artificial Sequence: Synthetic oligonucleotide
  Antisense strand to SEQ ID NO: 838192
uuguagagcagccuugugg

SEQ ID NO: 838194 - RNA, 19 nt, Artificial Sequence
  Description of Artificial Sequence: Synthetic oligonucleotide
  Sense strand starting at position 2418 of SEQ ID NO: 588047
ugacaugacagcuggcauu

SEQ ID NO: 838195 - RNA, 19 nt, Artificial Sequence
  Description of Artificial Sequence: Synthetic oligonucleotide
  Antisense strand to SEQ ID NO: 838194
aaugccagcugucauguca

SEQ ID NO: 838196 - RNA, 19 nt, Artificial Sequence
  Description of Artificial Sequence: Synthetic oligonucleotide
  Sense strand starting at position 2453 of SEQ ID NO: 588047
gaaagaggguuuccaguga

SEQ ID NO: 838197 - RNA, 19 nt, Artificial Sequence
  Description of Artificial Sequence: Synthetic oligonucleotide
  Antisense strand to SEQ ID NO: 838196
ucacuggaaacccucuuuc

SEQ ID NO: 838198 - RNA, 19 nt, Artificial Sequence
  Description of Artificial Sequence: Synthetic oligonucleotide
  Sense strand starting at position 2457 of SEQ ID NO: 588047
gaggguuuccagugaccag

SEQ ID NO: 838199 - RNA, 19 nt, Artificial Sequence
  Description of Artificial Sequence: Synthetic oligonucleotide
  Antisense strand to SEQ ID NO: 838198
cuggucacuggaaacccuc

SEQ ID NO: 838200 - RNA, 19 nt, Artificial Sequence
  Description of Artificial Sequence: Synthetic oligonucleotide
  Sense strand starting at position 2458 of SEQ ID NO: 588047
aggguuuccagugaccagu

SEQ ID NO: 838201 - RNA, 19 nt, Artificial Sequence
  Description of Artificial Sequence: Synthetic oligonucleotide
  Antisense strand to SEQ ID NO: 838200
acuggucacuggaaacccu

SEQ ID NO: 838202 - RNA, 19 nt, Artificial Sequence
  Description of Artificial Sequence: Synthetic oligonucleotide
  Sense strand starting at position 2461 of SEQ ID NO: 588047
guuuccagugaccaguuau

SEQ ID NO: 838203 - RNA, 19 nt, Artificial Sequence
  Description of Artificial Sequence: Synthetic oligonucleotide
  Antisense strand to SEQ ID NO: 838202
auaacuggucacuggaaac

SEQ ID NO: 838204 - RNA, 19 nt, Artificial Sequence
  Description of Artificial Sequence: Synthetic oligonucleotide
  Sense strand starting at position 2676 of SEQ ID NO: 588047
uuucguaggcaccagaaau

SEQ ID NO: 838205 - RNA, 19 nt, Artificial Sequence
  Description of Artificial Sequence: Synthetic oligonucleotide
  Antisense strand to SEQ ID NO: 838204
auuucuggugccuacgaaa

SEQ ID NO: 838206 - RNA, 19 nt, Artificial Sequence
  Description of Artificial Sequence: Synthetic oligonucleotide
  Sense strand starting at position 2732 of SEQ ID NO: 588047
ggaaauugauguuucuuua

SEQ ID NO: 838207 - RNA, 19 nt, Artificial Sequence
  Description of Artificial Sequence: Synthetic oligonucleotide
  Antisense strand to SEQ ID NO: 838206
uaaagaaacaucaauuucc

SEQ ID NO: 838208 - RNA, 19 nt, Artificial Sequence
  Description of Artificial Sequence: Synthetic oligonucleotide
  Sense strand starting at position 2759 of SEQ ID NO: 588047
aauauaugucuauguagag

SEQ ID NO: 838209 - RNA, 19 nt, Artificial Sequence
  Description of Artificial Sequence: Synthetic oligonucleotide
  Antisense strand to SEQ ID NO: 838208
cucuacauagacauauauu

SEQ ID NO: 838210 - RNA, 19 nt, Artificial Sequence
  Description of Artificial Sequence: Synthetic oligonucleotide
  Sense strand starting at position 2760 of SEQ ID NO: 588047
auauaugucuauguagagu

SEQ ID NO: 838211 - RNA, 19 nt, Artificial Sequence
  Description of Artificial Sequence: Synthetic oligonucleotide
  Antisense strand to SEQ ID NO: 838210
acucuacauagacauauau

SEQ ID NO: 838212 - RNA, 19 nt, Artificial Sequence
  Description of Artificial Sequence: Synthetic oligonucleotide
  Sense strand starting at position 2763 of SEQ ID NO: 588047
uaugucuauguagaguaua

SEQ ID NO: 838213 - RNA, 19 nt, Artificial Sequence
  Description of Artificial Sequence: Synthetic oligonucleotide
  Antisense strand to SEQ ID NO: 838212
uauacucuacauagacaua

SEQ ID NO: 838214 - RNA, 19 nt, Artificial Sequence
  Description of Artificial Sequence: Synthetic oligonucleotide
  Sense strand starting at position 2937 of SEQ ID NO: 588047
gugucugcacaauaaagau

SEQ ID NO: 838215 - RNA, 19 nt, Artificial Sequence
  Description of Artificial Sequence: Synthetic oligonucleotide
  Antisense strand to SEQ ID NO: 838214
aucuuuauugugcagacac

SEQ ID NO: 838216 - RNA, 19 nt, Artificial Sequence
  Description of Artificial Sequence: Synthetic oligonucleotide
  Sense strand starting at position 2986 of SEQ ID NO: 588047
uuaugaaagcccugaggaa

SEQ ID NO: 838217 - RNA, 19 nt, Artificial Sequence
  Description of Artificial Sequence: Synthetic oligonucleotide
  Antisense strand to SEQ ID NO: 838216
uuccucagggcuuucauaa

SEQ ID NO: 838218 - RNA, 19 nt, Artificial Sequence
  Description of Artificial Sequence: Synthetic oligonucleotide
  Sense strand starting at position 3023 of SEQ ID NO: 588047
aggaauaaccuguggcaua

SEQ ID NO: 838219 - RNA, 19 nt, Artificial Sequence
  Description of Artificial Sequence: Synthetic oligonucleotide
  Antisense strand to SEQ ID NO: 838218
uaugccacagguuauuccu

SEQ ID NO: 838220 - RNA, 19 nt, Artificial Sequence
  Description of Artificial Sequence: Synthetic oligonucleotide
  Sense strand starting at position 3062 of SEQ ID NO: 588047
cuaugaacccugggaacuu

SEQ ID NO: 838221 - RNA, 19 nt, Artificial Sequence
  Description of Artificial Sequence: Synthetic oligonucleotide
  Antisense strand to SEQ ID NO: 838220
aaguucccaggguucauag

SEQ ID NO: 838222 - RNA, 19 nt, Artificial Sequence
  Description of Artificial Sequence: Synthetic oligonucleotide
  Sense strand starting at position 3071 of SEQ ID NO: 588047
cugggaacuuugcuggaga

SEQ ID NO: 838223 - RNA, 19 nt, Artificial Sequence
  Description of Artificial Sequence: Synthetic oligonucleotide
  Antisense strand to SEQ ID NO: 838222
ucuccagcaaaguucccag

SEQ ID NO: 838224 - RNA, 19 nt, Artificial Sequence
  Description of Artificial Sequence: Synthetic oligonucleotide
  Sense strand starting at position 3073 of SEQ ID NO: 588047
gggaacuuugcuggagacu

SEQ ID NO: 838225 - RNA, 19 nt, Artificial Sequence
  Description of Artificial Sequence: Synthetic oligonucleotide
  Antisense strand to SEQ ID NO: 838224
agucuccagcaaaguuccc

SEQ ID NO: 838226 - RNA, 19 nt, Artificial Sequence
  Description of Artificial Sequence: Synthetic oligonucleotide
  Sense strand starting at position 3074 of SEQ ID NO: 588047
ggaacuuugcuggagacuu

SEQ ID NO: 838227 - RNA, 19 nt, Artificial Sequence
  Description of Artificial Sequence: Synthetic oligonucleotide
  Antisense strand to SEQ ID NO: 838226
aagucuccagcaaaguucc

SEQ ID NO: 838228 - RNA, 19 nt, Artificial Sequence
  Description of Artificial Sequence: Synthetic oligonucleotide
  Sense strand starting at position 3215 of SEQ ID NO: 588047
ucaggugaugcugaggauu

SEQ ID NO: 838229 - RNA, 19 nt, Artificial Sequence
  Description of Artificial Sequence: Synthetic oligonucleotide
  Antisense strand to SEQ ID NO: 838228
aauccucagcaucaccuga

SEQ ID NO: 838230 - RNA, 19 nt, Artificial Sequence
  Description of Artificial Sequence: Synthetic oligonucleotide
  Sense strand starting at position 3263 of SEQ ID NO: 588047
agaguaaccuagcuauuau

SEQ ID NO: 838231 - RNA, 19 nt, Artificial Sequence
  Description of Artificial Sequence: Synthetic oligonucleotide
  Antisense strand to SEQ ID NO: 838230
auaauagcuagguuacucu

SEQ ID NO: 838232 - RNA, 19 nt, Artificial Sequence
  Description of Artificial Sequence: Synthetic oligonucleotide
  Sense strand starting at position 3301 of SEQ ID NO: 588047
ucugauugauaucucuagu

SEQ ID NO: 838233 - RNA, 19 nt, Artificial Sequence
  Description of Artificial Sequence: Synthetic oligonucleotide
  Antisense strand to SEQ ID NO: 838232
acuagagauaucaaucaga

SEQ ID NO: 838234 - RNA, 19 nt, Artificial Sequence
  Description of Artificial Sequence: Synthetic oligonucleotide
  Sense strand starting at position 3304 of SEQ ID NO: 588047
gauugauaucucuaguguu

SEQ ID NO: 838235 - RNA, 19 nt, Artificial Sequence
  Description of Artificial Sequence: Synthetic oligonucleotide
  Antisense strand to SEQ ID NO: 838234
aacacuagagauaucaauc

SEQ ID NO: 838236 - RNA, 19 nt, Artificial Sequence
  Description of Artificial Sequence: Synthetic oligonucleotide
  Sense strand starting at position 3422 of SEQ ID NO: 588047
agaaaugccuauuuguguu

SEQ ID NO: 838237 - RNA, 19 nt, Artificial Sequence
  Description of Artificial Sequence: Synthetic oligonucleotide
  Antisense strand to SEQ ID NO: 838236
aacacaaauaggcauuucu

SEQ ID NO: 838238 - RNA, 19 nt, Artificial Sequence
  Description of Artificial Sequence: Synthetic oligonucleotide
  Sense strand starting at position 3428 of SEQ ID NO: 588047
gccuauuuguguuucuuag

SEQ ID NO: 838239 - RNA, 19 nt, Artificial Sequence
  Description of Artificial Sequence: Synthetic oligonucleotide
  Antisense strand to SEQ ID NO: 838238
cuaagaaacacaaauaggc

SEQ ID NO: 838240 - RNA, 19 nt, Artificial Sequence
  Description of Artificial Sequence: Synthetic oligonucleotide
  Sense strand starting at position 3439 of SEQ ID NO: 588047
uuucuuagugcugagacau

SEQ ID NO: 838241 - RNA, 19 nt, Artificial Sequence
  Description of Artificial Sequence: Synthetic oligonucleotide
  Antisense strand to SEQ ID NO: 838240
augucucagcacuaagaaa

SEQ ID NO: 838242 - RNA, 19 nt, Artificial Sequence
  Description of Artificial Sequence: Synthetic oligonucleotide
  Sense strand starting at position 3445 of SEQ ID NO: 588047
agugcugagacaugaguga

SEQ ID NO: 838243 - RNA, 19 nt, Artificial Sequence
  Description of Artificial Sequence: Synthetic oligonucleotide
  Antisense strand to SEQ ID NO: 838242
ucacucaugucucagcacu

SEQ ID NO: 838244 - RNA, 19 nt, Artificial Sequence
  Description of Artificial Sequence: Synthetic oligonucleotide
  Sense strand starting at position 3458 of SEQ ID NO: 588047
gagugaugagggugaauau

SEQ ID NO: 838245 - RNA, 19 nt, Artificial Sequence
  Description of Artificial Sequence: Synthetic oligonucleotide
  Antisense strand to SEQ ID NO: 838244
auauucacccucaucacuc

SEQ ID NO: 838246 - RNA, 19 nt, Artificial Sequence
  Description of Artificial Sequence: Synthetic oligonucleotide
  Sense strand starting at position 3858 of SEQ ID NO: 588047
gaaagaguuuaagugaauu

SEQ ID NO: 838247 - RNA, 19 nt, Artificial Sequence
  Description of Artificial Sequence: Synthetic oligonucleotide
  Antisense strand to SEQ ID NO: 838246
aauucacuuaaacucuuuc

SEQ ID NO: 838248 - RNA, 19 nt, Artificial Sequence
  Description of Artificial Sequence: Synthetic oligonucleotide
  Sense strand starting at position 3914 of SEQ ID NO: 588047
aaggauggacucuguugau

SEQ ID NO: 838249 - RNA, 19 nt, Artificial Sequence
  Description of Artificial Sequence: Synthetic oligonucleotide
  Antisense strand to SEQ ID NO: 838248
aucaacagaguccauccuu

SEQ ID NO: 838250 - RNA, 19 nt, Artificial Sequence
  Description of Artificial Sequence: Synthetic oligonucleotide
  Sense strand starting at position 3932 of SEQ ID NO: 588047
ugauguggcaguuauauga

SEQ ID NO: 838251 - RNA, 19 nt, Artificial Sequence
  Description of Artificial Sequence: Synthetic oligonucleotide
  Antisense strand to SEQ ID NO: 838250
ucauauaacugccacauca

SEQ ID NO: 838252 - RNA, 19 nt, Artificial Sequence
  Description of Artificial Sequence: Synthetic oligonucleotide
  Sense strand starting at position 35 of SEQ ID NO: 588048
ccuuuaugacggcauuauu

SEQ ID NO: 838253 - RNA, 19 nt, Artificial Sequence
  Description of Artificial Sequence: Synthetic oligonucleotide
  Antisense strand to SEQ ID NO: 838252
aauaaugccgucauaaagg

SEQ ID NO: 838254 - RNA, 19 nt, Artificial Sequence
  Description of Artificial Sequence: Synthetic oligonucleotide
  Sense strand starting at position 54 of SEQ ID NO: 588048
uucgucaggucucuaaauu

SEQ ID NO: 838255 - RNA, 19 nt, Artificial Sequence
  Description of Artificial Sequence: Synthetic oligonucleotide
  Antisense strand to SEQ ID NO: 838254
aauuuagagaccugacgaa

SEQ ID NO: 838256 - RNA, 19 nt, Artificial Sequence
  Description of Artificial Sequence: Synthetic oligonucleotide
  Sense strand starting at position 55 of SEQ ID NO: 588048
ucgucaggucucuaaauua

SEQ ID NO: 838257 - RNA, 19 nt, Artificial Sequence
  Description of Artificial Sequence: Synthetic oligonucleotide
  Antisense strand to SEQ ID NO: 838256
uaauuuagagaccugacga

SEQ ID NO: 838258 - RNA, 19 nt, Artificial Sequence
  Description of Artificial Sequence: Synthetic oligonucleotide
  Sense strand starting at position 95 of SEQ ID NO: 588048
cagaaacgcucucugguua

SEQ ID NO: 838259 - RNA, 19 nt, Artificial Sequence
  Description of Artificial Sequence: Synthetic oligonucleotide
  Antisense strand to SEQ ID NO: 838258
uaaccagagagcguuucug

SEQ ID NO: 838260 - RNA, 19 nt, Artificial Sequence
  Description of Artificial Sequence: Synthetic oligonucleotide
  Sense strand starting at position 96 of SEQ ID NO: 588048
agaaacgcucucugguuau

SEQ ID NO: 838261 - RNA, 19 nt, Artificial Sequence
  Description of Artificial Sequence: Synthetic oligonucleotide
  Antisense strand to SEQ ID NO: 838260
auaaccagagagcguuucu

SEQ ID NO: 838262 - RNA, 19 nt, Artificial Sequence
  Description of Artificial Sequence: Synthetic oligonucleotide
  Sense strand starting at position 107 of SEQ ID NO: 588048
cugguuauuucugcuucua

SEQ ID NO: 838263 - RNA, 19 nt, Artificial Sequence
  Description of Artificial Sequence: Synthetic oligonucleotide
  Antisense strand to SEQ ID NO: 838262
uagaagcagaaauaaccag

SEQ ID NO: 838264 - RNA, 19 nt, Artificial Sequence
  Description of Artificial Sequence: Synthetic oligonucleotide
  Sense strand starting at position 109 of SEQ ID NO: 588048
gguuauuucugcuucuaac

SEQ ID NO: 838265 - RNA, 19 nt, Artificial Sequence
  Description of Artificial Sequence: Synthetic oligonucleotide
  Antisense strand to SEQ ID NO: 838264
guuagaagcagaaauaacc

SEQ ID NO: 838266 - RNA, 19 nt, Artificial Sequence
  Description of Artificial Sequence: Synthetic oligonucleotide
  Sense strand starting at position 165 of SEQ ID NO: 588048
caaucacuucgguacaaga

SEQ ID NO: 838267 - RNA, 19 nt, Artificial Sequence
  Description of Artificial Sequence: Synthetic oligonucleotide
  Antisense strand to SEQ ID NO: 838266
ucuuguaccgaagugauug

SEQ ID NO: 838268 - RNA, 19 nt, Artificial Sequence
  Description of Artificial Sequence: Synthetic oligonucleotide
  Sense strand starting at position 190 of SEQ ID NO: 588048
ggauaagguuucucacaca

SEQ ID NO: 838269 - RNA, 19 nt, Artificial Sequence
  Description of Artificial Sequence: Synthetic oligonucleotide
  Antisense strand to SEQ ID NO: 838268
ugugugagaaaccuuaucc

SEQ ID NO: 838270 - RNA, 19 nt, Artificial Sequence
  Description of Artificial Sequence: Synthetic oligonucleotide
  Sense strand starting at position 269 of SEQ ID NO: 588048
acccuuaccugacuugaga

SEQ ID NO: 838271 - RNA, 19 nt, Artificial Sequence
  Description of Artificial Sequence: Synthetic oligonucleotide
  Antisense strand to SEQ ID NO: 838270
ucucaagucagguaagggu

SEQ ID NO: 838272 - RNA, 19 nt, Artificial Sequence
  Description of Artificial Sequence: Synthetic oligonucleotide
  Sense strand starting at position 321 of SEQ ID NO: 588048
cggacuuuaaagugcaaau

SEQ ID NO: 838273 - RNA, 19 nt, Artificial Sequence
  Description of Artificial Sequence: Synthetic oligonucleotide
  Antisense strand to SEQ ID NO: 838272
auuugcacuuuaaaguccg

SEQ ID NO: 838274 - RNA, 19 nt, Artificial Sequence
  Description of Artificial Sequence: Synthetic oligonucleotide
  Sense strand starting at position 454 of SEQ ID NO: 588048
ccuacugcagaguguuaau

SEQ ID NO: 838275 - RNA, 19 nt, Artificial Sequence
  Description of Artificial Sequence: Synthetic oligonucleotide
  Antisense strand to SEQ ID NO: 838274
auuaacacucugcaguagg

SEQ ID NO: 838276 - RNA, 19 nt, Artificial Sequence
  Description of Artificial Sequence: Synthetic oligonucleotide
  Sense strand starting at position 680 of SEQ ID NO: 588048
ccguguacagcgucucuaa

SEQ ID NO: 838277 - RNA, 19 nt, Artificial Sequence
  Description of Artificial Sequence: Synthetic oligonucleotide
  Antisense strand to SEQ ID NO: 838276
uuagagacgcuguacacgg

SEQ ID NO: 838278 - RNA, 19 nt, Artificial Sequence
  Description of Artificial Sequence: Synthetic oligonucleotide
  Sense strand starting at position 2470 of SEQ ID NO: 588048
ccgugcuucgcgguaguaa

SEQ ID NO: 838279 - RNA, 19 nt, Artificial Sequence
  Description of Artificial Sequence: Synthetic oligonucleotide
  Antisense strand to SEQ ID NO: 838278
uuacuaccgcgaagcacgg

SEQ ID NO: 838280 - RNA, 19 nt, Artificial Sequence
  Description of Artificial Sequence: Synthetic oligonucleotide
  Sense strand starting at position 2472 of SEQ ID NO: 588048
gugcuucgcgguaguaacu

SEQ ID NO: 838281 - RNA, 19 nt, Artificial Sequence
  Description of Artificial Sequence: Synthetic oligonucleotide
  Antisense strand to SEQ ID NO: 838280
aguuacuaccgcgaagcac

SEQ ID NO: 838282 - RNA, 19 nt, Artificial Sequence
  Description of Artificial Sequence: Synthetic oligonucleotide
  Sense strand starting at position 2539 of SEQ ID NO: 588048
cggcauugugaucaggacu

SEQ ID NO: 838283 - RNA, 19 nt, Artificial Sequence
  Description of Artificial Sequence: Synthetic oligonucleotide
  Antisense strand to SEQ ID NO: 838282
aguccugaucacaaugccg

SEQ ID NO: 838284 - RNA, 19 nt, Artificial Sequence
  Description of Artificial Sequence: Synthetic oligonucleotide
  Sense strand starting at position 2788 of SEQ ID NO: 588048
cugaguguggcugagugau

SEQ ID NO: 838285 - RNA, 19 nt, Artificial Sequence
  Description of Artificial Sequence: Synthetic oligonucleotide
  Antisense strand to SEQ ID NO: 838284
aucacucagccacacucag

SEQ ID NO: 838286 - RNA, 19 nt, Artificial Sequence
  Description of Artificial Sequence: Synthetic oligonucleotide
  Sense strand starting at position 3017 of SEQ ID NO: 588048
cagccuugacccggagaca

SEQ ID NO: 838287 - RNA, 19 nt, Artificial Sequence
  Description of Artificial Sequence: Synthetic oligonucleotide
  Antisense strand to SEQ ID NO: 838286
ugucuccgggucaaggcug

SEQ ID NO: 838288 - RNA, 19 nt, Artificial Sequence
  Description of Artificial Sequence: Synthetic oligonucleotide
  Sense strand starting at position 3375 of SEQ ID NO: 588048
auguguucgggcuaagaaa

SEQ ID NO: 838289 - RNA, 19 nt, Artificial Sequence
  Description of Artificial Sequence: Synthetic oligonucleotide
  Antisense strand to SEQ ID NO: 838288
uuucuuagcccgaacacau

SEQ ID NO: 838290 - RNA, 19 nt, Artificial Sequence
  Description of Artificial Sequence: Synthetic oligonucleotide
  Sense strand starting at position 3392 of SEQ ID NO: 588048
aaagauuagugcuuggaug

SEQ ID NO: 838291 - RNA, 19 nt, Artificial Sequence
  Description of Artificial Sequence: Synthetic oligonucleotide
  Antisense strand to SEQ ID NO: 838290
cauccaagcacuaaucuuu

SEQ ID NO: 838292 - RNA, 19 nt, Artificial Sequence
  Description of Artificial Sequence: Synthetic oligonucleotide
  Sense strand starting at position 3393 of SEQ ID NO: 588048
aagauuagugcuuggauga

SEQ ID NO: 838293 - RNA, 19 nt, Artificial Sequence
  Description of Artificial Sequence: Synthetic oligonucleotide
  Antisense strand to SEQ ID NO: 838292
ucauccaagcacuaaucuu

SEQ ID NO: 838294 - RNA, 19 nt, Artificial Sequence
  Description of Artificial Sequence: Synthetic oligonucleotide
  Sense strand starting at position 3394 of SEQ ID NO: 588048
agauuagugcuuggaugac

SEQ ID NO: 838295 - RNA, 19 nt, Artificial Sequence
  Description of Artificial Sequence: Synthetic oligonucleotide
  Antisense strand to SEQ ID NO: 838294
gucauccaagcacuaaucu

SEQ ID NO: 838296 - RNA, 19 nt, Artificial Sequence
  Description of Artificial Sequence: Synthetic oligonucleotide
  Sense strand starting at position 3446 of SEQ ID NO: 588048
uacgguuagcaaugagaga

SEQ ID NO: 838297 - RNA, 19 nt, Artificial Sequence
  Description of Artificial Sequence: Synthetic oligonucleotide
  Antisense strand to SEQ ID NO: 838296
ucucucauugcuaaccgua

SEQ ID NO: 838298 - RNA, 19 nt, Artificial Sequence
  Description of Artificial Sequence: Synthetic oligonucleotide
  Sense strand starting at position 3505 of SEQ ID NO: 588048
ugauucuuccaacguaucu

SEQ ID NO: 838299 - RNA, 19 nt, Artificial Sequence
  Description of Artificial Sequence: Synthetic oligonucleotide
  Antisense strand to SEQ ID NO: 838298
agauacguuggaagaauca

SEQ ID NO: 838300 - RNA, 19 nt, Artificial Sequence
  Description of Artificial Sequence: Synthetic oligonucleotide
  Sense strand starting at position 3512 of SEQ ID NO: 588048
uccaacguaucuuuauuga

SEQ ID NO: 838301 - RNA, 19 nt, Artificial Sequence
  Description of Artificial Sequence: Synthetic oligonucleotide
  Antisense strand to SEQ ID NO: 838300
ucaauaaagauacguugga

SEQ ID NO: 838302 - RNA, 19 nt, Artificial Sequence
  Description of Artificial Sequence: Synthetic oligonucleotide
  Sense strand starting at position 3515 of SEQ ID NO: 588048
aacguaucuuuauugagcu

SEQ ID NO: 838303 - RNA, 19 nt, Artificial Sequence
  Description of Artificial Sequence: Synthetic oligonucleotide
  Antisense strand to SEQ ID NO: 838302
agcucaauaaagauacguu

SEQ ID NO: 838304 - RNA, 19 nt, Artificial Sequence
  Description of Artificial Sequence: Synthetic oligonucleotide
  Sense strand starting at position 3517 of SEQ ID NO: 588048
cguaucuuuauugagcuga

SEQ ID NO: 838305 - RNA, 19 nt, Artificial Sequence
  Description of Artificial Sequence: Synthetic oligonucleotide
  Antisense strand to SEQ ID NO: 838304
ucagcucaauaaagauacg

SEQ ID NO: 838306 - RNA, 19 nt, Artificial Sequence
  Description of Artificial Sequence: Synthetic oligonucleotide
  Sense strand starting at position 3522 of SEQ ID NO: 588048
cuuuauugagcugaccaga

SEQ ID NO: 838307 - RNA, 19 nt, Artificial Sequence
  Description of Artificial Sequence: Synthetic oligonucleotide
  Antisense strand to SEQ ID NO: 838306
ucuggucagcucaauaaag

SEQ ID NO: 838308 - RNA, 19 nt, Artificial Sequence
  Description of Artificial Sequence: Synthetic oligonucleotide
  Sense strand starting at position 3552 of SEQ ID NO: 588048
gccucauguucucuacaga

SEQ ID NO: 838309 - RNA, 19 nt, Artificial Sequence
  Description of Artificial Sequence: Synthetic oligonucleotide
  Antisense strand to SEQ ID NO: 838308
ucuguagagaacaugaggc

SEQ ID NO: 838310 - RNA, 19 nt, Artificial Sequence
  Description of Artificial Sequence: Synthetic oligonucleotide
  Sense strand starting at position 3572 of SEQ ID NO: 588048
uuuaguuucucaguaguag

SEQ ID NO: 838311 - RNA, 19 nt, Artificial Sequence
  Description of Artificial Sequence: Synthetic oligonucleotide
  Antisense strand to SEQ ID NO: 838310
cuacuacugagaaacuaaa

SEQ ID NO: 838312 - RNA, 19 nt, Artificial Sequence
  Description of Artificial Sequence: Synthetic oligonucleotide
  Sense strand starting at position 3587 of SEQ ID NO: 588048
guagacacgaaaugauuga

SEQ ID NO: 838313 - RNA, 19 nt, Artificial Sequence
  Description of Artificial Sequence: Synthetic oligonucleotide
  Antisense strand to SEQ ID NO: 838312
ucaaucauuucgugucuac

SEQ ID NO: 838314 - RNA, 19 nt, Artificial Sequence
  Description of Artificial Sequence: Synthetic oligonucleotide
  Sense strand starting at position 3652 of SEQ ID NO: 588048
ccacaaggcugcucuacaa

SEQ ID NO: 838315 - RNA, 19 nt, Artificial Sequence
  Description of Artificial Sequence: Synthetic oligonucleotide
  Antisense strand to SEQ ID NO: 838314
uuguagagcagccuugugg

SEQ ID NO: 838316 - RNA, 19 nt, Artificial Sequence
  Description of Artificial Sequence: Synthetic oligonucleotide
  Sense strand starting at position 3684 of SEQ ID NO: 588048
ugacaugacagcuggcauu

SEQ ID NO: 838317 - RNA, 19 nt, Artificial Sequence
  Description of Artificial Sequence: Synthetic oligonucleotide
  Antisense strand to SEQ ID NO: 838316
aaugccagcugucauguca

SEQ ID NO: 838318 - RNA, 19 nt, Artificial Sequence
  Description of Artificial Sequence: Synthetic oligonucleotide
  Sense strand starting at position 3719 of SEQ ID NO: 588048
gaaagaggguuuccaguga

SEQ ID NO: 838319 - RNA, 19 nt, Artificial Sequence
  Description of Artificial Sequence: Synthetic oligonucleotide
  Antisense strand to SEQ ID NO: 838318
ucacuggaaacccucuuuc

SEQ ID NO: 838320 - RNA, 19 nt, Artificial Sequence
  Description of Artificial Sequence: Synthetic oligonucleotide
  Sense strand starting at position 3723 of SEQ ID NO: 588048
gaggguuuccagugaccag

SEQ ID NO: 838321 - RNA, 19 nt, Artificial Sequence
  Description of Artificial Sequence: Synthetic oligonucleotide
  Antisense strand to SEQ ID NO: 838320
cuggucacuggaaacccuc

SEQ ID NO: 838322 - RNA, 19 nt, Artificial Sequence
  Description of Artificial Sequence: Synthetic oligonucleotide
  Sense strand starting at position 3724 of SEQ ID NO: 588048
aggguuuccagugaccagu

SEQ ID NO: 838323 - RNA, 19 nt, Artificial Sequence
  Description of Artificial Sequence: Synthetic oligonucleotide
  Antisense strand to SEQ ID NO: 838322
acuggucacuggaaacccu

SEQ ID NO: 838324 - RNA, 19 nt, Artificial Sequence
  Description of Artificial Sequence: Synthetic oligonucleotide
  Sense strand starting at position 3726 of SEQ ID NO: 588048
gguuuccagugaccaguua

SEQ ID NO: 838325 - RNA, 19 nt, Artificial Sequence
  Description of Artificial Sequence: Synthetic oligonucleotide
  Antisense strand to SEQ ID NO: 838324
uaacuggucacuggaaacc

SEQ ID NO: 838326 - RNA, 19 nt, Artificial Sequence
  Description of Artificial Sequence: Synthetic oligonucleotide
  Sense strand starting at position 3727 of SEQ ID NO: 588048
guuuccagugaccaguuau

SEQ ID NO: 838327 - RNA, 19 nt, Artificial Sequence
  Description of Artificial Sequence: Synthetic oligonucleotide
  Antisense strand to SEQ ID NO: 838326
auaacuggucacuggaaac

SEQ ID NO: 838328 - RNA, 19 nt, Artificial Sequence
  Description of Artificial Sequence: Synthetic oligonucleotide
  Sense strand starting at position 3942 of SEQ ID NO: 588048
uuucguaggcaccagaaau

SEQ ID NO: 838329 - RNA, 19 nt, Artificial Sequence
  Description of Artificial Sequence: Synthetic oligonucleotide
  Antisense strand to SEQ ID NO: 838328
auuucuggugccuacgaaa

SEQ ID NO: 838330 - RNA, 19 nt, Artificial Sequence
  Description of Artificial Sequence: Synthetic oligonucleotide
  Sense strand starting at position 3963 of SEQ ID NO: 588048
gacagaggauacuaaguua

SEQ ID NO: 838331 - RNA, 19 nt, Artificial Sequence
  Description of Artificial Sequence: Synthetic oligonucleotide
  Antisense strand to SEQ ID NO: 838330
uaacuuaguauccucuguc

SEQ ID NO: 838332 - RNA, 19 nt, Artificial Sequence
  Description of Artificial Sequence: Synthetic oligonucleotide
  Sense strand starting at position 38 of SEQ ID NO: 588049
cacuaaacgucugugagca

SEQ ID NO: 838333 - RNA, 19 nt, Artificial Sequence
  Description of Artificial Sequence: Synthetic oligonucleotide
  Antisense strand to SEQ ID NO: 838332
ugcucacagacguuuagug

SEQ ID NO: 838334 - RNA, 19 nt, Artificial Sequence
  Description of Artificial Sequence: Synthetic oligonucleotide
  Sense strand starting at position 39 of SEQ ID NO: 588049
acuaaacgucugugagcau

SEQ ID NO: 838335 - RNA, 19 nt, Artificial Sequence
  Description of Artificial Sequence: Synthetic oligonucleotide
  Antisense strand to SEQ ID NO: 838334
augcucacagacguuuagu

SEQ ID NO: 838336 - RNA, 19 nt, Artificial Sequence
  Description of Artificial Sequence: Synthetic oligonucleotide
  Sense strand starting at position 42 of SEQ ID NO: 588049
aaacgucugugagcauaga

SEQ ID NO: 838337 - RNA, 19 nt, Artificial Sequence
  Description of Artificial Sequence: Synthetic oligonucleotide
  Antisense strand to SEQ ID NO: 838336
ucuaugcucacagacguuu

SEQ ID NO: 838338 - RNA, 19 nt, Artificial Sequence
  Description of Artificial Sequence: Synthetic oligonucleotide
  Sense strand starting at position 151 of SEQ ID NO: 588049
ucaaucugauaagaaauga

SEQ ID NO: 838339 - RNA, 19 nt, Artificial Sequence
  Description of Artificial Sequence: Synthetic oligonucleotide
  Antisense strand to SEQ ID NO: 838338
ucauuucuuaucagauuga

SEQ ID NO: 838340 - RNA, 19 nt, Artificial Sequence
  Description of Artificial Sequence: Synthetic oligonucleotide
  Sense strand starting at position 191 of SEQ ID NO: 588049
cgccacgacaauugucauu

SEQ ID NO: 838341 - RNA, 19 nt, Artificial Sequence
  Description of Artificial Sequence: Synthetic oligonucleotide
  Antisense strand to SEQ ID NO: 838340
aaugacaauugucguggcg

SEQ ID NO: 838342 - RNA, 19 nt, Artificial Sequence
  Description of Artificial Sequence: Synthetic oligonucleotide
  Sense strand starting at position 196 of SEQ ID NO: 588049
cgacaauugucauuccauc

SEQ ID NO: 838343 - RNA, 19 nt, Artificial Sequence
  Description of Artificial Sequence: Synthetic oligonucleotide
  Antisense strand to SEQ ID NO: 838342
gauggaaugacaauugucg

SEQ ID NO: 838344 - RNA, 19 nt, Artificial Sequence
  Description of Artificial Sequence: Synthetic oligonucleotide
  Sense strand starting at position 2616 of SEQ ID NO: 588049
agugucuuauugcugugau

SEQ ID NO: 838345 - RNA, 19 nt, Artificial Sequence
  Description of Artificial Sequence: Synthetic oligonucleotide
  Antisense strand to SEQ ID NO: 838344
aucacagcaauaagacacu

SEQ ID NO: 838346 - RNA, 19 nt, Artificial Sequence
  Description of Artificial Sequence: Synthetic oligonucleotide
  Sense strand starting at position 2619 of SEQ ID NO: 588049
gucuuauugcugugaugaa

SEQ ID NO: 838347 - RNA, 19 nt, Artificial Sequence
  Description of Artificial Sequence: Synthetic oligonucleotide
  Antisense strand to SEQ ID NO: 838346
uucaucacagcaauaagac

SEQ ID NO: 838348 - RNA, 19 nt, Artificial Sequence
  Description of Artificial Sequence: Synthetic oligonucleotide
  Sense strand starting at position 2666 of SEQ ID NO: 588049
gugcguucacugggaagua

SEQ ID NO: 838349 - RNA, 19 nt, Artificial Sequence
  Description of Artificial Sequence: Synthetic oligonucleotide
  Antisense strand to SEQ ID NO: 838348
uacuucccagugaacgcac

SEQ ID NO: 838350 - RNA, 19 nt, Artificial Sequence
  Description of Artificial Sequence: Synthetic oligonucleotide
  Sense strand starting at position 2679 of SEQ ID NO: 588049
gaaguauugacaugggugu

SEQ ID NO: 838351 - RNA, 19 nt, Artificial Sequence
  Description of Artificial Sequence: Synthetic oligonucleotide
  Antisense strand to SEQ ID NO: 838350
acacccaugucaauacuuc

SEQ ID NO: 838352 - RNA, 19 nt, Artificial Sequence
  Description of Artificial Sequence: Synthetic oligonucleotide
  Sense strand starting at position 2681 of SEQ ID NO: 588049
aguauugacauggguguua

SEQ ID NO: 838353 - RNA, 19 nt, Artificial Sequence
  Description of Artificial Sequence: Synthetic oligonucleotide
  Antisense strand to SEQ ID NO: 838352
uaacacccaugucaauacu

SEQ ID NO: 838354 - RNA, 19 nt, Artificial Sequence
  Description of Artificial Sequence: Synthetic oligonucleotide
  Sense strand starting at position 2683 of SEQ ID NO: 588049
uauugacauggguguuaca

SEQ ID NO: 838355 - RNA, 19 nt, Artificial Sequence
  Description of Artificial Sequence: Synthetic oligonucleotide
  Antisense strand to SEQ ID NO: 838354
uguaacacccaugucaaua

SEQ ID NO: 838356 - RNA, 19 nt, Artificial Sequence
  Description of Artificial Sequence: Synthetic oligonucleotide
  Sense strand starting at position 2725 of SEQ ID NO: 588049
uccagucguguuuauacuu

SEQ ID NO: 838357 - RNA, 19 nt, Artificial Sequence
  Description of Artificial Sequence: Synthetic oligonucleotide
  Antisense strand to SEQ ID NO: 838356
aaguauaaacacgacugga

SEQ ID NO: 838358 - RNA, 19 nt, Artificial Sequence
  Description of Artificial Sequence: Synthetic oligonucleotide
  Sense strand starting at position 2730 of SEQ ID NO: 588049
ucguguuuauacuucuaca

SEQ ID NO: 838359 - RNA, 19 nt, Artificial Sequence
  Description of Artificial Sequence: Synthetic oligonucleotide
  Antisense strand to SEQ ID NO: 838358
uguagaaguauaaacacga

SEQ ID NO: 838360 - RNA, 19 nt, Artificial Sequence
  Description of Artificial Sequence: Synthetic oligonucleotide
  Sense strand starting at position 2750 of SEQ ID NO: 588049
ccaccuugugaguauuaca

SEQ ID NO: 838361 - RNA, 19 nt, Artificial Sequence
  Description of Artificial Sequence: Synthetic oligonucleotide
  Antisense strand to SEQ ID NO: 838360
uguaauacucacaaggugg

SEQ ID NO: 838362 - RNA, 19 nt, Artificial Sequence
  Description of Artificial Sequence: Synthetic oligonucleotide
  Sense strand starting at position 2758 of SEQ ID NO: 588049
ugaguauuacaguauguca

SEQ ID NO: 838363 - RNA, 19 nt, Artificial Sequence
  Description of Artificial Sequence: Synthetic oligonucleotide
  Antisense strand to SEQ ID NO: 838362
ugacauacuguaauacuca

SEQ ID NO: 838364 - RNA, 19 nt, Artificial Sequence
  Description of Artificial Sequence: Synthetic oligonucleotide
  Sense strand starting at position 2760 of SEQ ID NO: 588049
aguauuacaguaugucaua

SEQ ID NO: 838365 - RNA, 19 nt, Artificial Sequence
  Description of Artificial Sequence: Synthetic oligonucleotide
  Antisense strand to SEQ ID NO: 838364
uaugacauacuguaauacu

SEQ ID NO: 838366 - RNA, 19 nt, Artificial Sequence
  Description of Artificial Sequence: Synthetic oligonucleotide
  Sense strand starting at position 2761 of SEQ ID NO: 588049
guauuacaguaugucauaa

SEQ ID NO: 838367 - RNA, 19 nt, Artificial Sequence
  Description of Artificial Sequence: Synthetic oligonucleotide
  Antisense strand to SEQ ID NO: 838366
uuaugacauacuguaauac

SEQ ID NO: 838368 - RNA, 19 nt, Artificial Sequence
  Description of Artificial Sequence: Synthetic oligonucleotide
  Sense strand starting at position 2851 of SEQ ID NO: 588049
uccgaagauuguguguuua

SEQ ID NO: 838369 - RNA, 19 nt, Artificial Sequence
  Description of Artificial Sequence: Synthetic oligonucleotide
  Antisense strand to SEQ ID NO: 838368
uaaacacacaaucuucgga

SEQ ID NO: 838370 - RNA, 19 nt, Artificial Sequence
  Description of Artificial Sequence: Synthetic oligonucleotide
  Sense strand starting at position 2853 of SEQ ID NO: 588049
cgaagauuguguguuuaaa

SEQ ID NO: 838371 - RNA, 19 nt, Artificial Sequence
  Description of Artificial Sequence: Synthetic oligonucleotide
  Antisense strand to SEQ ID NO: 838370
uuuaaacacacaaucuucg

SEQ ID NO: 838372 - RNA, 19 nt, Artificial Sequence
  Description of Artificial Sequence: Synthetic oligonucleotide
  Sense strand starting at position 2855 of SEQ ID NO: 588049
aagauuguguguuuaaagu

SEQ ID NO: 838373 - RNA, 19 nt, Artificial Sequence
  Description of Artificial Sequence: Synthetic oligonucleotide
  Antisense strand to SEQ ID NO: 838372
acuuuaaacacacaaucuu

SEQ ID NO: 838374 - RNA, 19 nt, Artificial Sequence
  Description of Artificial Sequence: Synthetic oligonucleotide
  Sense strand starting at position 2897 of SEQ ID NO: 588049
uuucgaacuguuuacauua

SEQ ID NO: 838375 - RNA, 19 nt, Artificial Sequence
  Description of Artificial Sequence: Synthetic oligonucleotide
  Antisense strand to SEQ ID NO: 838374
uaauguaaacaguucgaaa

SEQ ID NO: 838376 - RNA, 19 nt, Artificial Sequence
  Description of Artificial Sequence: Synthetic oligonucleotide
  Sense strand starting at position 2918 of SEQ ID NO: 588049
uggacuuuagauugauucu

SEQ ID NO: 838377 - RNA, 19 nt, Artificial Sequence
  Description of Artificial Sequence: Synthetic oligonucleotide
  Antisense strand to SEQ ID NO: 838376
agaaucaaucuaaagucca

SEQ ID NO: 838378 - RNA, 19 nt, Artificial Sequence
  Description of Artificial Sequence: Synthetic oligonucleotide
  Sense strand starting at position 2927 of SEQ ID NO: 588049
gauugauucugacagaaug

SEQ ID NO: 838379 - RNA, 19 nt, Artificial Sequence
  Description of Artificial Sequence: Synthetic oligonucleotide
  Antisense strand to SEQ ID NO: 838378
cauucugucagaaucaauc

SEQ ID NO: 838380 - RNA, 19 nt, Artificial Sequence
  Description of Artificial Sequence: Synthetic oligonucleotide
  Sense strand starting at position 2963 of SEQ ID NO: 588049
cacaguuaugaucguagua

SEQ ID NO: 838381 - RNA, 19 nt, Artificial Sequence
  Description of Artificial Sequence: Synthetic oligonucleotide
  Antisense strand to SEQ ID NO: 838380
uacuacgaucauaacugug

SEQ ID NO: 838382 - RNA, 19 nt, Artificial Sequence
  Description of Artificial Sequence: Synthetic oligonucleotide
  Sense strand starting at position 3059 of SEQ ID NO: 588049
uguuaagacucaucugaca

SEQ ID NO: 838383 - RNA, 19 nt, Artificial Sequence
  Description of Artificial Sequence: Synthetic oligonucleotide
  Antisense strand to SEQ ID NO: 838382
ugucagaugagucuuaaca

SEQ ID NO: 838384 - RNA, 19 nt, Artificial Sequence
  Description of Artificial Sequence: Synthetic oligonucleotide
  Sense strand starting at position 3067 of SEQ ID NO: 588049
cucaucugacaaugugaga

SEQ ID NO: 838385 - RNA, 19 nt, Artificial Sequence
  Description of Artificial Sequence: Synthetic oligonucleotide
  Antisense strand to SEQ ID NO: 838384
ucucacauugucagaugag

SEQ ID NO: 838386 - RNA, 19 nt, Artificial Sequence
  Description of Artificial Sequence: Synthetic oligonucleotide
  Sense strand starting at position 3070 of SEQ ID NO: 588049
aucugacaaugugagaauu

SEQ ID NO: 838387 - RNA, 19 nt, Artificial Sequence
  Description of Artificial Sequence: Synthetic oligonucleotide
  Antisense strand to SEQ ID NO: 838386
aauucucacauugucagau

SEQ ID NO: 838388 - RNA, 19 nt, Artificial Sequence
  Description of Artificial Sequence: Synthetic oligonucleotide
  Sense strand starting at position 3072 of SEQ ID NO: 588049
cugacaaugugagaauuua

SEQ ID NO: 838389 - RNA, 19 nt, Artificial Sequence
  Description of Artificial Sequence: Synthetic oligonucleotide
  Antisense strand to SEQ ID NO: 838388
uaaauucucacauugucag

SEQ ID NO: 838390 - RNA, 19 nt, Artificial Sequence
  Description of Artificial Sequence: Synthetic oligonucleotide
  Sense strand starting at position 3146 of SEQ ID NO: 588049
acucuuaagcgacauaugu

SEQ ID NO: 838391 - RNA, 19 nt, Artificial Sequence
  Description of Artificial Sequence: Synthetic oligonucleotide
  Antisense strand to SEQ ID NO: 838390
acauaugucgcuuaagagu

SEQ ID NO: 838392 - RNA, 19 nt, Artificial Sequence
  Description of Artificial Sequence: Synthetic oligonucleotide
  Sense strand starting at position 3197 of SEQ ID NO: 588049
uccagauaauuguugacua

SEQ ID NO: 838393 - RNA, 19 nt, Artificial Sequence
  Description of Artificial Sequence: Synthetic oligonucleotide
  Antisense strand to SEQ ID NO: 838392
uagucaacaauuaucugga

SEQ ID NO: 838394 - RNA, 19 nt, Artificial Sequence
  Description of Artificial Sequence: Synthetic oligonucleotide
  Sense strand starting at position 3312 of SEQ ID NO: 588049
gguuauguuaaaggcuuga

SEQ ID NO: 838395 - RNA, 19 nt, Artificial Sequence
  Description of Artificial Sequence: Synthetic oligonucleotide
  Antisense strand to SEQ ID NO: 838394
ucaagccuuuaacauaacc

SEQ ID NO: 838396 - RNA, 19 nt, Artificial Sequence
  Description of Artificial Sequence: Synthetic oligonucleotide
  Sense strand starting at position 3316 of SEQ ID NO: 588049
auguuaaaggcuugaaccu

SEQ ID NO: 838397 - RNA, 19 nt, Artificial Sequence
  Description of Artificial Sequence: Synthetic oligonucleotide
  Antisense strand to SEQ ID NO: 838396
agguucaagccuuuaacau

SEQ ID NO: 838398 - RNA, 19 nt, Artificial Sequence
  Description of Artificial Sequence: Synthetic oligonucleotide
  Sense strand starting at position 3374 of SEQ ID NO: 588049
uuaugaagaacagguguua

SEQ ID NO: 838399 - RNA, 19 nt, Artificial Sequence
  Description of Artificial Sequence: Synthetic oligonucleotide
  Antisense strand to SEQ ID NO: 838398
uaacaccuguucuucauaa

SEQ ID NO: 838400 - RNA, 19 nt, Artificial Sequence
  Description of Artificial Sequence: Synthetic oligonucleotide
  Sense strand starting at position 3379 of SEQ ID NO: 588049
aagaacagguguuacaauu

SEQ ID NO: 838401 - RNA, 19 nt, Artificial Sequence
  Description of Artificial Sequence: Synthetic oligonucleotide
  Antisense strand to SEQ ID NO: 838400
aauuguaacaccuguucuu

SEQ ID NO: 838402 - RNA, 19 nt, Artificial Sequence
  Description of Artificial Sequence: Synthetic oligonucleotide
  Sense strand starting at position 3543 of SEQ ID NO: 588049
gguagugaauugucucaau

SEQ ID NO: 838403 - RNA, 19 nt, Artificial Sequence
  Description of Artificial Sequence: Synthetic oligonucleotide
  Antisense strand to SEQ ID NO: 838402
auugagacaauucacuacc

SEQ ID NO: 838404 - RNA, 19 nt, Artificial Sequence
  Description of Artificial Sequence: Synthetic oligonucleotide
  Sense strand starting at position 3793 of SEQ ID NO: 588049
guugaugagcaguguugua

SEQ ID NO: 838405 - RNA, 19 nt, Artificial Sequence
  Description of Artificial Sequence: Synthetic oligonucleotide
  Antisense strand to SEQ ID NO: 838404
uacaacacugcucaucaac

SEQ ID NO: 838406 - RNA, 19 nt, Artificial Sequence
  Description of Artificial Sequence: Synthetic oligonucleotide
  Sense strand starting at position 3800 of SEQ ID NO: 588049
agcaguguuguauaucaaa

SEQ ID NO: 838407 - RNA, 19 nt, Artificial Sequence
  Description of Artificial Sequence: Synthetic oligonucleotide
  Antisense strand to SEQ ID NO: 838406
uuugauauacaacacugcu

SEQ ID NO: 838408 - RNA, 19 nt, Artificial Sequence
  Description of Artificial Sequence: Synthetic oligonucleotide
  Sense strand starting at position 3859 of SEQ ID NO: 588049
uaauguaaagaaugacagu

SEQ ID NO: 838409 - RNA, 19 nt, Artificial Sequence
  Description of Artificial Sequence: Synthetic oligonucleotide
  Antisense strand to SEQ ID NO: 838408
acugucauucuuuacauua

SEQ ID NO: 838410 - RNA, 19 nt, Artificial Sequence
  Description of Artificial Sequence: Synthetic oligonucleotide
  Sense strand starting at position 3952 of SEQ ID NO: 588049
ugaccaagagcuugaaauu

SEQ ID NO: 838411 - RNA, 19 nt, Artificial Sequence
  Description of Artificial Sequence: Synthetic oligonucleotide
  Antisense strand to SEQ ID NO: 838410
aauuucaagcucuugguca

SEQ ID NO: 838412 - RNA, 19 nt, Artificial Sequence
  Description of Artificial Sequence: Synthetic oligonucleotide
  Sense strand starting at position 2022 of SEQ ID NO: 588050
agugucuuauugcugugau

SEQ ID NO: 838413 - RNA, 19 nt, Artificial Sequence
  Description of Artificial Sequence: Synthetic oligonucleotide
  Antisense strand to SEQ ID NO: 838412
aucacagcaauaagacacu

SEQ ID NO: 838414 - RNA, 19 nt, Artificial Sequence
  Description of Artificial Sequence: Synthetic oligonucleotide
  Sense strand starting at position 2025 of SEQ ID NO: 588050
gucuuauugcugugaugaa

SEQ ID NO: 838415 - RNA, 19 nt, Artificial Sequence
  Description of Artificial Sequence: Synthetic oligonucleotide
  Antisense strand to SEQ ID NO: 838414
uucaucacagcaauaagac

SEQ ID NO: 838416 - RNA, 19 nt, Artificial Sequence
  Description of Artificial Sequence: Synthetic oligonucleotide
  Sense strand starting at position 2072 of SEQ ID NO: 588050
gugcguucacugggaagua

SEQ ID NO: 838417 - RNA, 19 nt, Artificial Sequence
  Description of Artificial Sequence: Synthetic oligonucleotide
  Antisense strand to SEQ ID NO: 838416
uacuucccagugaacgcac

SEQ ID NO: 838418 - RNA, 19 nt, Artificial Sequence
  Description of Artificial Sequence: Synthetic oligonucleotide
  Sense strand starting at position 2085 of SEQ ID NO: 588050
gaaguauugacaugggugu

SEQ ID NO: 838419 - RNA, 19 nt, Artificial Sequence
  Description of Artificial Sequence: Synthetic oligonucleotide
  Antisense strand to SEQ ID NO: 838418
acacccaugucaauacuuc

SEQ ID NO: 838420 - RNA, 19 nt, Artificial Sequence
  Description of Artificial Sequence: Synthetic oligonucleotide
  Sense strand starting at position 2087 of SEQ ID NO: 588050
aguauugacauggguguua

SEQ ID NO: 838421 - RNA, 19 nt, Artificial Sequence
  Description of Artificial Sequence: Synthetic oligonucleotide
  Antisense strand to SEQ ID NO: 838420
uaacacccaugucaauacu

SEQ ID NO: 838422 - RNA, 19 nt, Artificial Sequence
  Description of Artificial Sequence: Synthetic oligonucleotide
  Sense strand starting at position 2089 of SEQ ID NO: 588050
uauugacauggguguuaca

SEQ ID NO: 838423 - RNA, 19 nt, Artificial Sequence
  Description of Artificial Sequence: Synthetic oligonucleotide
  Antisense strand to SEQ ID NO: 838422
uguaacacccaugucaaua

SEQ ID NO: 838424 - RNA, 19 nt, Artificial Sequence
  Description of Artificial Sequence: Synthetic oligonucleotide
  Sense strand starting at position 2131 of SEQ ID NO: 588050
uccagucguguuuauacuu

SEQ ID NO: 838425 - RNA, 19 nt, Artificial Sequence
  Description of Artificial Sequence: Synthetic oligonucleotide
  Antisense strand to SEQ ID NO: 838424
aaguauaaacacgacugga

SEQ ID NO: 838426 - RNA, 19 nt, Artificial Sequence
  Description of Artificial Sequence: Synthetic oligonucleotide
  Sense strand starting at position 2136 of SEQ ID NO: 588050
ucguguuuauacuucuaca

SEQ ID NO: 838427 - RNA, 19 nt, Artificial Sequence
  Description of Artificial Sequence: Synthetic oligonucleotide
  Antisense strand to SEQ ID NO: 838426
uguagaaguauaaacacga

SEQ ID NO: 838428 - RNA, 19 nt, Artificial Sequence
  Description of Artificial Sequence: Synthetic oligonucleotide
  Sense strand starting at position 2156 of SEQ ID NO: 588050
ccaccuugugaguauuaca

SEQ ID NO: 838429 - RNA, 19 nt, Artificial Sequence
  Description of Artificial Sequence: Synthetic oligonucleotide
  Antisense strand to SEQ ID NO: 838428
uguaauacucacaaggugg

SEQ ID NO: 838430 - RNA, 19 nt, Artificial Sequence
  Description of Artificial Sequence: Synthetic oligonucleotide
  Sense strand starting at position 2164 of SEQ ID NO: 588050
ugaguauuacaguauguca

SEQ ID NO: 838431 - RNA, 19 nt, Artificial Sequence
  Description of Artificial Sequence: Synthetic oligonucleotide
  Antisense strand to SEQ ID NO: 838430
ugacauacuguaauacuca

SEQ ID NO: 838432 - RNA, 19 nt, Artificial Sequence
  Description of Artificial Sequence: Synthetic oligonucleotide
  Sense strand starting at position 2166 of SEQ ID NO: 588050
aguauuacaguaugucaua

SEQ ID NO: 838433 - RNA, 19 nt, Artificial Sequence
  Description of Artificial Sequence: Synthetic oligonucleotide
  Antisense strand to SEQ ID NO: 838432
uaugacauacuguaauacu

SEQ ID NO: 838434 - RNA, 19 nt, Artificial Sequence
  Description of Artificial Sequence: Synthetic oligonucleotide
  Sense strand starting at position 2167 of SEQ ID NO: 588050
guauuacaguaugucauaa

SEQ ID NO: 838435 - RNA, 19 nt, Artificial Sequence
  Description of Artificial Sequence: Synthetic oligonucleotide
  Antisense strand to SEQ ID NO: 838434
uuaugacauacuguaauac

SEQ ID NO: 838436 - RNA, 19 nt, Artificial Sequence
  Description of Artificial Sequence: Synthetic oligonucleotide
  Sense strand starting at position 2257 of SEQ ID NO: 588050
uccgaagauuguguguuua

SEQ ID NO: 838437 - RNA, 19 nt, Artificial Sequence
  Description of Artificial Sequence: Synthetic oligonucleotide
  Antisense strand to SEQ ID NO: 838436
uaaacacacaaucuucgga

SEQ ID NO: 838438 - RNA, 19 nt, Artificial Sequence
  Description of Artificial Sequence: Synthetic oligonucleotide
  Sense strand starting at position 2259 of SEQ ID NO: 588050
cgaagauuguguguuuaaa

SEQ ID NO: 838439 - RNA, 19 nt, Artificial Sequence
  Description of Artificial Sequence: Synthetic oligonucleotide
  Antisense strand to SEQ ID NO: 838438
uuuaaacacacaaucuucg

SEQ ID NO: 838440 - RNA, 19 nt, Artificial Sequence
  Description of Artificial Sequence: Synthetic oligonucleotide
  Sense strand starting at position 2261 of SEQ ID NO: 588050
aagauuguguguuuaaagu

SEQ ID NO: 838441 - RNA, 19 nt, Artificial Sequence
  Description of Artificial Sequence: Synthetic oligonucleotide
  Antisense strand to SEQ ID NO: 838440
acuuuaaacacacaaucuu

SEQ ID NO: 838442 - RNA, 19 nt, Artificial Sequence
  Description of Artificial Sequence: Synthetic oligonucleotide
  Sense strand starting at position 2303 of SEQ ID NO: 588050
uuucgaacuguuuacauua

SEQ ID NO: 838443 - RNA, 19 nt, Artificial Sequence
  Description of Artificial Sequence: Synthetic oligonucleotide
  Antisense strand to SEQ ID NO: 838442
uaauguaaacaguucgaaa

SEQ ID NO: 838444 - RNA, 19 nt, Artificial Sequence
  Description of Artificial Sequence: Synthetic oligonucleotide
  Sense strand starting at position 2324 of SEQ ID NO: 588050
uggacuuuagauugauucu

SEQ ID NO: 838445 - RNA, 19 nt, Artificial Sequence
  Description of Artificial Sequence: Synthetic oligonucleotide
  Antisense strand to SEQ ID NO: 838444
agaaucaaucuaaagucca

SEQ ID NO: 838446 - RNA, 19 nt, Artificial Sequence
  Description of Artificial Sequence: Synthetic oligonucleotide
  Sense strand starting at position 2333 of SEQ ID NO: 588050
gauugauucugacagaaug

SEQ ID NO: 838447 - RNA, 19 nt, Artificial Sequence
  Description of Artificial Sequence: Synthetic oligonucleotide
  Antisense strand to SEQ ID NO: 838446
cauucugucagaaucaauc

SEQ ID NO: 838448 - RNA, 19 nt, Artificial Sequence
  Description of Artificial Sequence: Synthetic oligonucleotide
  Sense strand starting at position 2369 of SEQ ID NO: 588050
cacaguuaugaucguagua

SEQ ID NO: 838449 - RNA, 19 nt, Artificial Sequence
  Description of Artificial Sequence: Synthetic oligonucleotide
  Antisense strand to SEQ ID NO: 838448
uacuacgaucauaacugug

SEQ ID NO: 838450 - RNA, 19 nt, Artificial Sequence
  Description of Artificial Sequence: Synthetic oligonucleotide
  Sense strand starting at position 2465 of SEQ ID NO: 588050
uguuaagacucaucugaca

SEQ ID NO: 838451 - RNA, 19 nt, Artificial Sequence
  Description of Artificial Sequence: Synthetic oligonucleotide
  Antisense strand to SEQ ID NO: 838450
ugucagaugagucuuaaca

SEQ ID NO: 838452 - RNA, 19 nt, Artificial Sequence
  Description of Artificial Sequence: Synthetic oligonucleotide
  Sense strand starting at position 2473 of SEQ ID NO: 588050
cucaucugacaaugugaga

SEQ ID NO: 838453 - RNA, 19 nt, Artificial Sequence
  Description of Artificial Sequence: Synthetic oligonucleotide
  Antisense strand to SEQ ID NO: 838452
ucucacauugucagaugag

SEQ ID NO: 838454 - RNA, 19 nt, Artificial Sequence
  Description of Artificial Sequence: Synthetic oligonucleotide
  Sense strand starting at position 2476 of SEQ ID NO: 588050
aucugacaaugugagaauu

SEQ ID NO: 838455 - RNA, 19 nt, Artificial Sequence
  Description of Artificial Sequence: Synthetic oligonucleotide
  Antisense strand to SEQ ID NO: 838454
aauucucacauugucagau

SEQ ID NO: 838456 - RNA, 19 nt, Artificial Sequence
  Description of Artificial Sequence: Synthetic oligonucleotide
  Sense strand starting at position 2478 of SEQ ID NO: 588050
cugacaaugugagaauuua

SEQ ID NO: 838457 - RNA, 19 nt, Artificial Sequence
  Description of Artificial Sequence: Synthetic oligonucleotide
  Antisense strand to SEQ ID NO: 838456
uaaauucucacauugucag

SEQ ID NO: 838458 - RNA, 19 nt, Artificial Sequence
  Description of Artificial Sequence: Synthetic oligonucleotide
  Sense strand starting at position 2552 of SEQ ID NO: 588050
acucuuaagcgacauaugu

SEQ ID NO: 838459 - RNA, 19 nt, Artificial Sequence
  Description of Artificial Sequence: Synthetic oligonucleotide
  Antisense strand to SEQ ID NO: 838458
acauaugucgcuuaagagu

SEQ ID NO: 838460 - RNA, 19 nt, Artificial Sequence
  Description of Artificial Sequence: Synthetic oligonucleotide
  Sense strand starting at position 2603 of SEQ ID NO: 588050
uccagauaauuguugacua

SEQ ID NO: 838461 - RNA, 19 nt, Artificial Sequence
  Description of Artificial Sequence: Synthetic oligonucleotide
  Antisense strand to SEQ ID NO: 838460
uagucaacaauuaucugga

SEQ ID NO: 838462 - RNA, 19 nt, Artificial Sequence
  Description of Artificial Sequence: Synthetic oligonucleotide
  Sense strand starting at position 2718 of SEQ ID NO: 588050
gguuauguuaaaggcuuga

SEQ ID NO: 838463 - RNA, 19 nt, Artificial Sequence
  Description of Artificial Sequence: Synthetic oligonucleotide
  Antisense strand to SEQ ID NO: 838462
ucaagccuuuaacauaacc

SEQ ID NO: 838464 - RNA, 19 nt, Artificial Sequence
  Description of Artificial Sequence: Synthetic oligonucleotide
  Sense strand starting at position 2722 of SEQ ID NO: 588050
auguuaaaggcuugaaccu

SEQ ID NO: 838465 - RNA, 19 nt, Artificial Sequence
  Description of Artificial Sequence: Synthetic oligonucleotide
  Antisense strand to SEQ ID NO: 838464
agguucaagccuuuaacau

SEQ ID NO: 838466 - RNA, 19 nt, Artificial Sequence
  Description of Artificial Sequence: Synthetic oligonucleotide
  Sense strand starting at position 2780 of SEQ ID NO: 588050
uuaugaagaacagguguua

SEQ ID NO: 838467 - RNA, 19 nt, Artificial Sequence
  Description of Artificial Sequence: Synthetic oligonucleotide
  Antisense strand to SEQ ID NO: 838466
uaacaccuguucuucauaa

SEQ ID NO: 838468 - RNA, 19 nt, Artificial Sequence
  Description of Artificial Sequence: Synthetic oligonucleotide
  Sense strand starting at position 2785 of SEQ ID NO: 588050
aagaacagguguuacaauu

SEQ ID NO: 838469 - RNA, 19 nt, Artificial Sequence
  Description of Artificial Sequence: Synthetic oligonucleotide
  Antisense strand to SEQ ID NO: 838468
aauuguaacaccuguucuu

SEQ ID NO: 838470 - RNA, 19 nt, Artificial Sequence
  Description of Artificial Sequence: Synthetic oligonucleotide
  Sense strand starting at position 2949 of SEQ ID NO: 588050
gguagugaauugucucaau

SEQ ID NO: 838471 - RNA, 19 nt, Artificial Sequence
  Description of Artificial Sequence: Synthetic oligonucleotide
  Antisense strand to SEQ ID NO: 838470
auugagacaauucacuacc

SEQ ID NO: 838472 - RNA, 19 nt, Artificial Sequence
  Description of Artificial Sequence: Synthetic oligonucleotide
  Sense strand starting at position 3199 of SEQ ID NO: 588050
guugaugagcaguguugua

SEQ ID NO: 838473 - RNA, 19 nt, Artificial Sequence
  Description of Artificial Sequence: Synthetic oligonucleotide
  Antisense strand to SEQ ID NO: 838472
uacaacacugcucaucaac

SEQ ID NO: 838474 - RNA, 19 nt, Artificial Sequence
  Description of Artificial Sequence: Synthetic oligonucleotide
  Sense strand starting at position 3206 of SEQ ID NO: 588050
agcaguguuguauaucaaa

SEQ ID NO: 838475 - RNA, 19 nt, Artificial Sequence
  Description of Artificial Sequence: Synthetic oligonucleotide
  Antisense strand to SEQ ID NO: 838474
uuugauauacaacacugcu

SEQ ID NO: 838476 - RNA, 19 nt, Artificial Sequence
  Description of Artificial Sequence: Synthetic oligonucleotide
  Sense strand starting at position 3265 of SEQ ID NO: 588050
uaauguaaagaaugacagu

SEQ ID NO: 838477 - RNA, 19 nt, Artificial Sequence
  Description of Artificial Sequence: Synthetic oligonucleotide
  Antisense strand to SEQ ID NO: 838476
acugucauucuuuacauua

SEQ ID NO: 838478 - RNA, 19 nt, Artificial Sequence
  Description of Artificial Sequence: Synthetic oligonucleotide
  Sense strand starting at position 3358 of SEQ ID NO: 588050
ugaccaagagcuugaaauu

SEQ ID NO: 838479 - RNA, 19 nt, Artificial Sequence
  Description of Artificial Sequence: Synthetic oligonucleotide
  Antisense strand to SEQ ID NO: 838478
aauuucaagcucuugguca

SEQ ID NO: 838480 - RNA, 19 nt, Artificial Sequence
  Description of Artificial Sequence: Synthetic oligonucleotide
  Sense strand starting at position 3473 of SEQ ID NO: 588050
gacaguggagucugaucuu

SEQ ID NO: 838481 - RNA, 19 nt, Artificial Sequence
  Description of Artificial Sequence: Synthetic oligonucleotide
  Antisense strand to SEQ ID NO: 838480
aagaucagacuccacuguc

SEQ ID NO: 838482 - RNA, 19 nt, Artificial Sequence
  Description of Artificial Sequence: Synthetic oligonucleotide
  Sense strand starting at position 3476 of SEQ ID NO: 588050
aguggagucugaucuugac

SEQ ID NO: 838483 - RNA, 19 nt, Artificial Sequence
  Description of Artificial Sequence: Synthetic oligonucleotide
  Antisense strand to SEQ ID NO: 838482
gucaagaucagacuccacu

SEQ ID NO: 838484 - RNA, 19 nt, Artificial Sequence
  Description of Artificial Sequence: Synthetic oligonucleotide
  Sense strand starting at position 3515 of SEQ ID NO: 588050
auaagagaacucugccaag

SEQ ID NO: 838485 - RNA, 19 nt, Artificial Sequence
  Description of Artificial Sequence: Synthetic oligonucleotide
  Antisense strand to SEQ ID NO: 838484
cuuggcagaguucucuuau

SEQ ID NO: 838486 - RNA, 19 nt, Artificial Sequence
  Description of Artificial Sequence: Synthetic oligonucleotide
  Sense strand starting at position 3559 of SEQ ID NO: 588050
auggaagaaugccauaaua

SEQ ID NO: 838487 - RNA, 19 nt, Artificial Sequence
  Description of Artificial Sequence: Synthetic oligonucleotide
  Antisense strand to SEQ ID NO: 838486
uauuauggcauucuuccau

SEQ ID NO: 838488 - RNA, 19 nt, Artificial Sequence
  Description of Artificial Sequence: Synthetic oligonucleotide
  Sense strand starting at position 3707 of SEQ ID NO: 588050
uuacuuaucuaggaucaag

SEQ ID NO: 838489 - RNA, 19 nt, Artificial Sequence
  Description of Artificial Sequence: Synthetic oligonucleotide
  Antisense strand to SEQ ID NO: 838488
cuugauccuagauaaguaa

SEQ ID NO: 838490 - RNA, 19 nt, Artificial Sequence
  Description of Artificial Sequence: Synthetic oligonucleotide
  Sense strand starting at position 3718 of SEQ ID NO: 588050
ggaucaaggugaugggaaa

SEQ ID NO: 838491 - RNA, 19 nt, Artificial Sequence
  Description of Artificial Sequence: Synthetic oligonucleotide
  Antisense strand to SEQ ID NO: 838490
uuucccaucaccuugaucc

SEQ ID NO: 838492 - RNA, 19 nt, Artificial Sequence
  Description of Artificial Sequence: Synthetic oligonucleotide
  Sense strand starting at position 309 of SEQ ID NO: 588051
guucgaugagaguaaagcu

SEQ ID NO: 838493 - RNA, 19 nt, Artificial Sequence
  Description of Artificial Sequence: Synthetic oligonucleotide
  Antisense strand to SEQ ID NO: 838492
agcuuuacucucaucgaac

SEQ ID NO: 838494 - RNA, 19 nt, Artificial Sequence
  Description of Artificial Sequence: Synthetic oligonucleotide
  Sense strand starting at position 418 of SEQ ID NO: 588051
cuuugugucagacauuguu

SEQ ID NO: 838495 - RNA, 19 nt, Artificial Sequence
  Description of Artificial Sequence: Synthetic oligonucleotide
  Antisense strand to SEQ ID NO: 838494
aacaaugucugacacaaag

SEQ ID NO: 838496 - RNA, 19 nt, Artificial Sequence
  Description of Artificial Sequence: Synthetic oligonucleotide
  Sense strand starting at position 441 of SEQ ID NO: 588051
gugccuaggauacauaagu

SEQ ID NO: 838497 - RNA, 19 nt, Artificial Sequence
  Description of Artificial Sequence: Synthetic oligonucleotide
  Antisense strand to SEQ ID NO: 838496
acuuauguauccuaggcac

SEQ ID NO: 838498 - RNA, 19 nt, Artificial Sequence
  Description of Artificial Sequence: Synthetic oligonucleotide
  Sense strand starting at position 468 of SEQ ID NO: 588051
agaugaugaucuuugucuu

SEQ ID NO: 838499 - RNA, 19 nt, Artificial Sequence
  Description of Artificial Sequence: Synthetic oligonucleotide
  Antisense strand to SEQ ID NO: 838498
aagacaaagaucaucaucu

SEQ ID NO: 838500 - RNA, 19 nt, Artificial Sequence
  Description of Artificial Sequence: Synthetic oligonucleotide
  Sense strand starting at position 469 of SEQ ID NO: 588051
gaugaugaucuuugucuua

SEQ ID NO: 838501 - RNA, 19 nt, Artificial Sequence
  Description of Artificial Sequence: Synthetic oligonucleotide
  Antisense strand to SEQ ID NO: 838500
uaagacaaagaucaucauc

SEQ ID NO: 838502 - RNA, 19 nt, Artificial Sequence
  Description of Artificial Sequence: Synthetic oligonucleotide
  Sense strand starting at position 471 of SEQ ID NO: 588051
ugaugaucuuugucuuaau

SEQ ID NO: 838503 - RNA, 19 nt, Artificial Sequence
  Description of Artificial Sequence: Synthetic oligonucleotide
  Antisense strand to SEQ ID NO: 838502
auuaagacaaagaucauca

SEQ ID NO: 838504 - RNA, 19 nt, Artificial Sequence
  Description of Artificial Sequence: Synthetic oligonucleotide
  Sense strand starting at position 779 of SEQ ID NO: 588051
agaaucauuuaucagagca

SEQ ID NO: 838505 - RNA, 19 nt, Artificial Sequence
  Description of Artificial Sequence: Synthetic oligonucleotide
  Antisense strand to SEQ ID NO: 838504
ugcucugauaaaugauucu

SEQ ID NO: 838506 - RNA, 19 nt, Artificial Sequence
  Description of Artificial Sequence: Synthetic oligonucleotide
  Sense strand starting at position 966 of SEQ ID NO: 588051
ccaacugaauccguguaaa

SEQ ID NO: 838507 - RNA, 19 nt, Artificial Sequence
  Description of Artificial Sequence: Synthetic oligonucleotide
  Antisense strand to SEQ ID NO: 838506
uuuacacggauucaguugg

SEQ ID NO: 838508 - RNA, 19 nt, Artificial Sequence
  Description of Artificial Sequence: Synthetic oligonucleotide
  Sense strand starting at position 969 of SEQ ID NO: 588051
acugaauccguguaaacua

SEQ ID NO: 838509 - RNA, 19 nt, Artificial Sequence
  Description of Artificial Sequence: Synthetic oligonucleotide
  Antisense strand to SEQ ID NO: 838508
uaguuuacacggauucagu

SEQ ID NO: 838510 - RNA, 19 nt, Artificial Sequence
  Description of Artificial Sequence: Synthetic oligonucleotide
  Sense strand starting at position 1210 of SEQ ID NO: 588051
uggagucaugguuacagua

SEQ ID NO: 838511 - RNA, 19 nt, Artificial Sequence
  Description of Artificial Sequence: Synthetic oligonucleotide
  Antisense strand to SEQ ID NO: 838510
uacuguaaccaugacucca

SEQ ID NO: 838512 - RNA, 19 nt, Artificial Sequence
  Description of Artificial Sequence: Synthetic oligonucleotide
  Sense strand starting at position 1284 of SEQ ID NO: 588051
gugaauaagucaucaaauc

SEQ ID NO: 838513 - RNA, 19 nt, Artificial Sequence
  Description of Artificial Sequence: Synthetic oligonucleotide
  Antisense strand to SEQ ID NO: 838512
gauuugaugacuuauucac

SEQ ID NO: 838514 - RNA, 19 nt, Artificial Sequence
  Description of Artificial Sequence: Synthetic oligonucleotide
  Sense strand starting at position 1294 of SEQ ID NO: 588051
caucaaauccuccggguaa

SEQ ID NO: 838515 - RNA, 19 nt, Artificial Sequence
  Description of Artificial Sequence: Synthetic oligonucleotide
  Antisense strand to SEQ ID NO: 838514
uuacccggaggauuugaug

SEQ ID NO: 838516 - RNA, 19 nt, Artificial Sequence
  Description of Artificial Sequence: Synthetic oligonucleotide
  Sense strand starting at position 1296 of SEQ ID NO: 588051
ucaaauccuccggguaauc

SEQ ID NO: 838517 - RNA, 19 nt, Artificial Sequence
  Description of Artificial Sequence: Synthetic oligonucleotide
  Antisense strand to SEQ ID NO: 838516
gauuacccggaggauuuga

SEQ ID NO: 838518 - RNA, 19 nt, Artificial Sequence
  Description of Artificial Sequence: Synthetic oligonucleotide
  Sense strand starting at position 1298 of SEQ ID NO: 588051
aaauccuccggguaaucua

SEQ ID NO: 838519 - RNA, 19 nt, Artificial Sequence
  Description of Artificial Sequence: Synthetic oligonucleotide
  Antisense strand to SEQ ID NO: 838518
uagauuacccggaggauuu

SEQ ID NO: 838520 - RNA, 19 nt, Artificial Sequence
  Description of Artificial Sequence: Synthetic oligonucleotide
  Sense strand starting at position 1339 of SEQ ID NO: 588051
cagugacacuuccuuagga

SEQ ID NO: 838521 - RNA, 19 nt, Artificial Sequence
  Description of Artificial Sequence: Synthetic oligonucleotide
  Antisense strand to SEQ ID NO: 838520
uccuaaggaagugucacug

SEQ ID NO: 838522 - RNA, 19 nt, Artificial Sequence
  Description of Artificial Sequence: Synthetic oligonucleotide
  Sense strand starting at position 1364 of SEQ ID NO: 588051
cugacaucccuccgacaga

SEQ ID NO: 838523 - RNA, 19 nt, Artificial Sequence
  Description of Artificial Sequence: Synthetic oligonucleotide
  Antisense strand to SEQ ID NO: 838522
ucugucggagggaugucag

SEQ ID NO: 838524 - RNA, 19 nt, Artificial Sequence
  Description of Artificial Sequence: Synthetic oligonucleotide
  Sense strand starting at position 1381 of SEQ ID NO: 588051
gaagaugcugucgaaaugu

SEQ ID NO: 838525 - RNA, 19 nt, Artificial Sequence
  Description of Artificial Sequence: Synthetic oligonucleotide
  Antisense strand to SEQ ID NO: 838524
acauuucgacagcaucuuc

SEQ ID NO: 838526 - RNA, 19 nt, Artificial Sequence
  Description of Artificial Sequence: Synthetic oligonucleotide
  Sense strand starting at position 2111 of SEQ ID NO: 588051
ccggguuacucuccaggga

SEQ ID NO: 838527 - RNA, 19 nt, Artificial Sequence
  Description of Artificial Sequence: Synthetic oligonucleotide
  Antisense strand to SEQ ID NO: 838526
ucccuggagaguaacccgg

SEQ ID NO: 838528 - RNA, 19 nt, Artificial Sequence
  Description of Artificial Sequence: Synthetic oligonucleotide
  Sense strand starting at position 2390 of SEQ ID NO: 588051
augacuugaccucagcgua

SEQ ID NO: 838529 - RNA, 19 nt, Artificial Sequence
  Description of Artificial Sequence: Synthetic oligonucleotide
  Antisense strand to SEQ ID NO: 838528
uacgcugaggucaagucau

SEQ ID NO: 838530 - RNA, 19 nt, Artificial Sequence
  Description of Artificial Sequence: Synthetic oligonucleotide
  Sense strand starting at position 2534 of SEQ ID NO: 588051
ccaugaaagcuugggccaa

SEQ ID NO: 838531 - RNA, 19 nt, Artificial Sequence
  Description of Artificial Sequence: Synthetic oligonucleotide
  Antisense strand to SEQ ID NO: 838530
uuggcccaagcuuucaugg

SEQ ID NO: 838532 - RNA, 19 nt, Artificial Sequence
  Description of Artificial Sequence: Synthetic oligonucleotide
  Sense strand starting at position 2872 of SEQ ID NO: 588051
gcguaucuacuggcaaguu

SEQ ID NO: 838533 - RNA, 19 nt, Artificial Sequence
  Description of Artificial Sequence: Synthetic oligonucleotide
  Antisense strand to SEQ ID NO: 838532
aacuugccaguagauacgc

SEQ ID NO: 838534 - RNA, 19 nt, Artificial Sequence
  Description of Artificial Sequence: Synthetic oligonucleotide
  Sense strand starting at position 2884 of SEQ ID NO: 588051
gcaaguuaccaguauuaau

SEQ ID NO: 838535 - RNA, 19 nt, Artificial Sequence
  Description of Artificial Sequence: Synthetic oligonucleotide
  Antisense strand to SEQ ID NO: 838534
auuaauacugguaacuugc

SEQ ID NO: 838536 - RNA, 19 nt, Artificial Sequence
  Description of Artificial Sequence: Synthetic oligonucleotide
  Sense strand starting at position 2901 of SEQ ID NO: 588051
auguguuguccauaacaaa

SEQ ID NO: 838537 - RNA, 19 nt, Artificial Sequence
  Description of Artificial Sequence: Synthetic oligonucleotide
  Antisense strand to SEQ ID NO: 838536
uuuguuauggacaacacau

SEQ ID NO: 838538 - RNA, 19 nt, Artificial Sequence
  Description of Artificial Sequence: Synthetic oligonucleotide
  Sense strand starting at position 2916 of SEQ ID NO: 588051
caaaccucggauuaauguu

SEQ ID NO: 838539 - RNA, 19 nt, Artificial Sequence
  Description of Artificial Sequence: Synthetic oligonucleotide
  Antisense strand to SEQ ID NO: 838538
aacauuaauccgagguuug

SEQ ID NO: 838540 - RNA, 19 nt, Artificial Sequence
  Description of Artificial Sequence: Synthetic oligonucleotide
  Sense strand starting at position 3036 of SEQ ID NO: 588051
acaugaagguauguuuaaa

SEQ ID NO: 838541 - RNA, 19 nt, Artificial Sequence
  Description of Artificial Sequence: Synthetic oligonucleotide
  Antisense strand to SEQ ID NO: 838540
uuuaaacauaccuucaugu

SEQ ID NO: 838542 - RNA, 19 nt, Artificial Sequence
  Description of Artificial Sequence: Synthetic oligonucleotide
  Sense strand starting at position 3087 of SEQ ID NO: 588051
cugagaaggugcuccaagu

SEQ ID NO: 838543 - RNA, 19 nt, Artificial Sequence
  Description of Artificial Sequence: Synthetic oligonucleotide
  Antisense strand to SEQ ID NO: 838542
acuuggagcaccuucucag

SEQ ID NO: 838544 - RNA, 19 nt, Artificial Sequence
  Description of Artificial Sequence: Synthetic oligonucleotide
  Sense strand starting at position 3103 of SEQ ID NO: 588051
agugcauuugaauguggua

SEQ ID NO: 838545 - RNA, 19 nt, Artificial Sequence
  Description of Artificial Sequence: Synthetic oligonucleotide
  Antisense strand to SEQ ID NO: 838544
uaccacauucaaaugcacu

SEQ ID NO: 838546 - RNA, 19 nt, Artificial Sequence
  Description of Artificial Sequence: Synthetic oligonucleotide
  Sense strand starting at position 3260 of SEQ ID NO: 588051
gcaauaagcuacucuagac

SEQ ID NO: 838547 - RNA, 19 nt, Artificial Sequence
  Description of Artificial Sequence: Synthetic oligonucleotide
  Antisense strand to SEQ ID NO: 838546
gucuagaguagcuuauugc

SEQ ID NO: 838548 - RNA, 19 nt, Artificial Sequence
  Description of Artificial Sequence: Synthetic oligonucleotide
  Sense strand starting at position 3460 of SEQ ID NO: 588051
gaauauugaguuggcugau

SEQ ID NO: 838549 - RNA, 19 nt, Artificial Sequence
  Description of Artificial Sequence: Synthetic oligonucleotide
  Antisense strand to SEQ ID NO: 838548
aucagccaacucaauauuc

SEQ ID NO: 838550 - RNA, 19 nt, Artificial Sequence
  Description of Artificial Sequence: Synthetic oligonucleotide
  Sense strand starting at position 3461 of SEQ ID NO: 588051
aauauugaguuggcugaua

SEQ ID NO: 838551 - RNA, 19 nt, Artificial Sequence
  Description of Artificial Sequence: Synthetic oligonucleotide
  Antisense strand to SEQ ID NO: 838550
uaucagccaacucaauauu

SEQ ID NO: 838552 - RNA, 19 nt, Artificial Sequence
  Description of Artificial Sequence: Synthetic oligonucleotide
  Sense strand starting at position 3473 of SEQ ID NO: 588051
gcugauaccuuauucgaca

SEQ ID NO: 838553 - RNA, 19 nt, Artificial Sequence
  Description of Artificial Sequence: Synthetic oligonucleotide
  Antisense strand to SEQ ID NO: 838552
ugucgaauaagguaucagc

SEQ ID NO: 838554 - RNA, 19 nt, Artificial Sequence
  Description of Artificial Sequence: Synthetic oligonucleotide
  Sense strand starting at position 3474 of SEQ ID NO: 588051
cugauaccuuauucgacau

SEQ ID NO: 838555 - RNA, 19 nt, Artificial Sequence
  Description of Artificial Sequence: Synthetic oligonucleotide
  Antisense strand to SEQ ID NO: 838554
augucgaauaagguaucag

SEQ ID NO: 838556 - RNA, 19 nt, Artificial Sequence
  Description of Artificial Sequence: Synthetic oligonucleotide
  Sense strand starting at position 3653 of SEQ ID NO: 588051
gaugucucagagcaauuaa

SEQ ID NO: 838557 - RNA, 19 nt, Artificial Sequence
  Description of Artificial Sequence: Synthetic oligonucleotide
  Antisense strand to SEQ ID NO: 838556
uuaauugcucugagacauc

SEQ ID NO: 838558 - RNA, 19 nt, Artificial Sequence
  Description of Artificial Sequence: Synthetic oligonucleotide
  Sense strand starting at position 3688 of SEQ ID NO: 588051
guauuauuaguggauggua

SEQ ID NO: 838559 - RNA, 19 nt, Artificial Sequence
  Description of Artificial Sequence: Synthetic oligonucleotide
  Antisense strand to SEQ ID NO: 838558
uaccauccacuaauaauac

SEQ ID NO: 838560 - RNA, 19 nt, Artificial Sequence
  Description of Artificial Sequence: Synthetic oligonucleotide
  Sense strand starting at position 3690 of SEQ ID NO: 588051
auuauuaguggaugguaga

SEQ ID NO: 838561 - RNA, 19 nt, Artificial Sequence
  Description of Artificial Sequence: Synthetic oligonucleotide
  Antisense strand to SEQ ID NO: 838560
ucuaccauccacuaauaau

SEQ ID NO: 838562 - RNA, 19 nt, Artificial Sequence
  Description of Artificial Sequence: Synthetic oligonucleotide
  Sense strand starting at position 3717 of SEQ ID NO: 588051
acacucuugucuguuaaau

SEQ ID NO: 838563 - RNA, 19 nt, Artificial Sequence
  Description of Artificial Sequence: Synthetic oligonucleotide
  Antisense strand to SEQ ID NO: 838562
auuuaacagacaagagugu

SEQ ID NO: 838564 - RNA, 19 nt, Artificial Sequence
  Description of Artificial Sequence: Synthetic oligonucleotide
  Sense strand starting at position 3735 of SEQ ID NO: 588051
uucuaaagccuauggugau

SEQ ID NO: 838565 - RNA, 19 nt, Artificial Sequence
  Description of Artificial Sequence: Synthetic oligonucleotide
  Antisense strand to SEQ ID NO: 838564
aucaccauaggcuuuagaa

SEQ ID NO: 838566 - RNA, 19 nt, Artificial Sequence
  Description of Artificial Sequence: Synthetic oligonucleotide
  Sense strand starting at position 3822 of SEQ ID NO: 588051
gcguucagacauguuguuu

SEQ ID NO: 838567 - RNA, 19 nt, Artificial Sequence
  Description of Artificial Sequence: Synthetic oligonucleotide
  Antisense strand to SEQ ID NO: 838566
aaacaacaugucugaacgc

SEQ ID NO: 838568 - RNA, 19 nt, Artificial Sequence
  Description of Artificial Sequence: Synthetic oligonucleotide
  Sense strand starting at position 3826 of SEQ ID NO: 588051
ucagacauguuguuuaaca

SEQ ID NO: 838569 - RNA, 19 nt, Artificial Sequence
  Description of Artificial Sequence: Synthetic oligonucleotide
  Antisense strand to SEQ ID NO: 838568
uguuaaacaacaugucuga

SEQ ID NO: 838570 - RNA, 19 nt, Artificial Sequence
  Description of Artificial Sequence: Synthetic oligonucleotide
  Sense strand starting at position 3828 of SEQ ID NO: 588051
agacauguuguuuaacaua

SEQ ID NO: 838571 - RNA, 19 nt, Artificial Sequence
  Description of Artificial Sequence: Synthetic oligonucleotide
  Antisense strand to SEQ ID NO: 838570
uauguuaaacaacaugucu

SEQ ID NO: 838572 - RNA, 19 nt, Artificial Sequence
  Description of Artificial Sequence: Synthetic oligonucleotide
  Sense strand starting at position 124 of SEQ ID NO: 588052
aaaugaaccguguggugua

SEQ ID NO: 838573 - RNA, 19 nt, Artificial Sequence
  Description of Artificial Sequence: Synthetic oligonucleotide
  Antisense strand to SEQ ID NO: 838572
uacaccacacgguucauuu

SEQ ID NO: 838574 - RNA, 19 nt, Artificial Sequence
  Description of Artificial Sequence: Synthetic oligonucleotide
  Sense strand starting at position 147 of SEQ ID NO: 588052
gccuuauuugcuggucuac

SEQ ID NO: 838575 - RNA, 19 nt, Artificial Sequence
  Description of Artificial Sequence: Synthetic oligonucleotide
  Antisense strand to SEQ ID NO: 838574
guagaccagcaaauaaggc

SEQ ID NO: 838576 - RNA, 19 nt, Artificial Sequence
  Description of Artificial Sequence: Synthetic oligonucleotide
  Sense strand starting at position 174 of SEQ ID NO: 588052
cagucauuugcugagacgu

SEQ ID NO: 838577 - RNA, 19 nt, Artificial Sequence
  Description of Artificial Sequence: Synthetic oligonucleotide
  Antisense strand to SEQ ID NO: 838576
acgucucagcaaaugacug

SEQ ID NO: 838578 - RNA, 19 nt, Artificial Sequence
  Description of Artificial Sequence: Synthetic oligonucleotide
  Sense strand starting at position 176 of SEQ ID NO: 588052
gucauuugcugagacgugu

SEQ ID NO: 838579 - RNA, 19 nt, Artificial Sequence
  Description of Artificial Sequence: Synthetic oligonucleotide
  Antisense strand to SEQ ID NO: 838578
acacgucucagcaaaugac

SEQ ID NO: 838580 - RNA, 19 nt, Artificial Sequence
  Description of Artificial Sequence: Synthetic oligonucleotide
  Sense strand starting at position 189 of SEQ ID NO: 588052
acgugucacucagucugaa

SEQ ID NO: 838581 - RNA, 19 nt, Artificial Sequence
  Description of Artificial Sequence: Synthetic oligonucleotide
  Antisense strand to SEQ ID NO: 838580
uucagacugagugacacgu

SEQ ID NO: 838582 - RNA, 19 nt, Artificial Sequence
  Description of Artificial Sequence: Synthetic oligonucleotide
  Sense strand starting at position 193 of SEQ ID NO: 588052
gucacucagucugaagaga

SEQ ID NO: 838583 - RNA, 19 nt, Artificial Sequence
  Description of Artificial Sequence: Synthetic oligonucleotide
  Antisense strand to SEQ ID NO: 838582
ucucuucagacugagugac

SEQ ID NO: 838584 - RNA, 19 nt, Artificial Sequence
  Description of Artificial Sequence: Synthetic oligonucleotide
  Sense strand starting at position 204 of SEQ ID NO: 588052
ugaagagaaucgcaaugau

SEQ ID NO: 838585 - RNA, 19 nt, Artificial Sequence
  Description of Artificial Sequence: Synthetic oligonucleotide
  Antisense strand to SEQ ID NO: 838584
aucauugcgauucucuuca

SEQ ID NO: 838586 - RNA, 19 nt, Artificial Sequence
  Description of Artificial Sequence: Synthetic oligonucleotide
  Sense strand starting at position 295 of SEQ ID NO: 588052
gagucacuccacugagugu

SEQ ID NO: 838587 - RNA, 19 nt, Artificial Sequence
  Description of Artificial Sequence: Synthetic oligonucleotide
  Antisense strand to SEQ ID NO: 838586
acacucaguggagugacuc

SEQ ID NO: 838588 - RNA, 19 nt, Artificial Sequence
  Description of Artificial Sequence: Synthetic oligonucleotide
  Sense strand starting at position 377 of SEQ ID NO: 588052
aggccauugcucugccaga

SEQ ID NO: 838589 - RNA, 19 nt, Artificial Sequence
  Description of Artificial Sequence: Synthetic oligonucleotide
  Antisense strand to SEQ ID NO: 838588
ucuggcagagcaauggccu

SEQ ID NO: 838590 - RNA, 19 nt, Artificial Sequence
  Description of Artificial Sequence: Synthetic oligonucleotide
  Sense strand starting at position 378 of SEQ ID NO: 588052
ggccauugcucugccagau

SEQ ID NO: 838591 - RNA, 19 nt, Artificial Sequence
  Description of Artificial Sequence: Synthetic oligonucleotide
  Antisense strand to SEQ ID NO: 838590
aucuggcagagcaauggcc

SEQ ID NO: 838592 - RNA, 19 nt, Artificial Sequence
  Description of Artificial Sequence: Synthetic oligonucleotide
  Sense strand starting at position 476 of SEQ ID NO: 588052
ccaaauaagucccuggaua

SEQ ID NO: 838593 - RNA, 19 nt, Artificial Sequence
  Description of Artificial Sequence: Synthetic oligonucleotide
  Antisense strand to SEQ ID NO: 838592
uauccagggacuuauuugg

SEQ ID NO: 838594 - RNA, 19 nt, Artificial Sequence
  Description of Artificial Sequence: Synthetic oligonucleotide
  Sense strand starting at position 477 of SEQ ID NO: 588052
caaauaagucccuggauag

SEQ ID NO: 838595 - RNA, 19 nt, Artificial Sequence
  Description of Artificial Sequence: Synthetic oligonucleotide
  Antisense strand to SEQ ID NO: 838594
cuauccagggacuuauuug

SEQ ID NO: 838596 - RNA, 19 nt, Artificial Sequence
  Description of Artificial Sequence: Synthetic oligonucleotide
  Sense strand starting at position 716 of SEQ ID NO: 588052
aagucuucccuuugugaga

SEQ ID NO: 838597 - RNA, 19 nt, Artificial Sequence
  Description of Artificial Sequence: Synthetic oligonucleotide
  Antisense strand to SEQ ID NO: 838596
ucucacaaagggaagacuu

SEQ ID NO: 838598 - RNA, 19 nt, Artificial Sequence
  Description of Artificial Sequence: Synthetic oligonucleotide
  Sense strand starting at position 1558 of SEQ ID NO: 588052
gccgaaaugagccaugaac

SEQ ID NO: 838599 - RNA, 19 nt, Artificial Sequence
  Description of Artificial Sequence: Synthetic oligonucleotide
  Antisense strand to SEQ ID NO: 838598
guucauggcucauuucggc

SEQ ID NO: 838600 - RNA, 19 nt, Artificial Sequence
  Description of Artificial Sequence: Synthetic oligonucleotide
  Sense strand starting at position 1560 of SEQ ID NO: 588052
cgaaaugagccaugaacua

SEQ ID NO: 838601 - RNA, 19 nt, Artificial Sequence
  Description of Artificial Sequence: Synthetic oligonucleotide
  Antisense strand to SEQ ID NO: 838600
uaguucauggcucauuucg

SEQ ID NO: 838602 - RNA, 19 nt, Artificial Sequence
  Description of Artificial Sequence: Synthetic oligonucleotide
  Sense strand starting at position 1719 of SEQ ID NO: 588052
gcaccacucccucgacaaa

SEQ ID NO: 838603 - RNA, 19 nt, Artificial Sequence
  Description of Artificial Sequence: Synthetic oligonucleotide
  Antisense strand to SEQ ID NO: 838602
uuugucgagggaguggugc

SEQ ID NO: 838604 - RNA, 19 nt, Artificial Sequence
  Description of Artificial Sequence: Synthetic oligonucleotide
  Sense strand starting at position 1936 of SEQ ID NO: 588052
gcggaucugccgccguaau

SEQ ID NO: 838605 - RNA, 19 nt, Artificial Sequence
  Description of Artificial Sequence: Synthetic oligonucleotide
  Antisense strand to SEQ ID NO: 838604
auuacggcggcagauccgc

SEQ ID NO: 838606 - RNA, 19 nt, Artificial Sequence
  Description of Artificial Sequence: Synthetic oligonucleotide
  Sense strand starting at position 1938 of SEQ ID NO: 588052
ggaucugccgccguaauau

SEQ ID NO: 838607 - RNA, 19 nt, Artificial Sequence
  Description of Artificial Sequence: Synthetic oligonucleotide
  Antisense strand to SEQ ID NO: 838606
auauuacggcggcagaucc

SEQ ID NO: 838608 - RNA, 19 nt, Artificial Sequence
  Description of Artificial Sequence: Synthetic oligonucleotide
  Sense strand starting at position 2487 of SEQ ID NO: 588052
agagcaagguucccuggau

SEQ ID NO: 838609 - RNA, 19 nt, Artificial Sequence
  Description of Artificial Sequence: Synthetic oligonucleotide
  Antisense strand to SEQ ID NO: 838608
auccagggaaccuugcucu

SEQ ID NO: 838610 - RNA, 19 nt, Artificial Sequence
  Description of Artificial Sequence: Synthetic oligonucleotide
  Sense strand starting at position 2488 of SEQ ID NO: 588052
gagcaagguucccuggaua

SEQ ID NO: 838611 - RNA, 19 nt, Artificial Sequence
  Description of Artificial Sequence: Synthetic oligonucleotide
  Antisense strand to SEQ ID NO: 838610
uauccagggaaccuugcuc

SEQ ID NO: 838612 - RNA, 19 nt, Artificial Sequence
  Description of Artificial Sequence: Synthetic oligonucleotide
  Sense strand starting at position 2499 of SEQ ID NO: 588052
ccuggauagacauguugaa

SEQ ID NO: 838613 - RNA, 19 nt, Artificial Sequence
  Description of Artificial Sequence: Synthetic oligonucleotide
  Antisense strand to SEQ ID NO: 838612
uucaacaugucuauccagg

SEQ ID NO: 838614 - RNA, 19 nt, Artificial Sequence
  Description of Artificial Sequence: Synthetic oligonucleotide
  Sense strand starting at position 2538 of SEQ ID NO: 588052
uuuaguucgucauuggaaa

SEQ ID NO: 838615 - RNA, 19 nt, Artificial Sequence
  Description of Artificial Sequence: Synthetic oligonucleotide
  Antisense strand to SEQ ID NO: 838614
uuuccaaugacgaacuaaa

SEQ ID NO: 838616 - RNA, 19 nt, Artificial Sequence
  Description of Artificial Sequence: Synthetic oligonucleotide
  Sense strand starting at position 2539 of SEQ ID NO: 588052
uuaguucgucauuggaaac

SEQ ID NO: 838617 - RNA, 19 nt, Artificial Sequence
  Description of Artificial Sequence: Synthetic oligonucleotide
  Antisense strand to SEQ ID NO: 838616
guuuccaaugacgaacuaa

SEQ ID NO: 838618 - RNA, 19 nt, Artificial Sequence
  Description of Artificial Sequence: Synthetic oligonucleotide
  Sense strand starting at position 2648 of SEQ ID NO: 588052
aguagaacuaccggauaug

SEQ ID NO: 838619 - RNA, 19 nt, Artificial Sequence
  Description of Artificial Sequence: Synthetic oligonucleotide
  Antisense strand to SEQ ID NO: 838618
cauauccgguaguucuacu

SEQ ID NO: 838620 - RNA, 19 nt, Artificial Sequence
  Description of Artificial Sequence: Synthetic oligonucleotide
  Sense strand starting at position 2682 of SEQ ID NO: 588052
cgacaccugucaucccauu

SEQ ID NO: 838621 - RNA, 19 nt, Artificial Sequence
  Description of Artificial Sequence: Synthetic oligonucleotide
  Antisense strand to SEQ ID NO: 838620
aaugggaugacaggugucg

SEQ ID NO: 838622 - RNA, 19 nt, Artificial Sequence
  Description of Artificial Sequence: Synthetic oligonucleotide
  Sense strand starting at position 2829 of SEQ ID NO: 588052
cugggcuucccugguagaa

SEQ ID NO: 838623 - RNA, 19 nt, Artificial Sequence
  Description of Artificial Sequence: Synthetic oligonucleotide
  Antisense strand to SEQ ID NO: 838622
uucuaccagggaagcccag

SEQ ID NO: 838624 - RNA, 19 nt, Artificial Sequence
  Description of Artificial Sequence: Synthetic oligonucleotide
  Sense strand starting at position 2883 of SEQ ID NO: 588052
aagguaggguagucaagau

SEQ ID NO: 838625 - RNA, 19 nt, Artificial Sequence
  Description of Artificial Sequence: Synthetic oligonucleotide
  Antisense strand to SEQ ID NO: 838624
aucuugacuacccuaccuu

SEQ ID NO: 838626 - RNA, 19 nt, Artificial Sequence
  Description of Artificial Sequence: Synthetic oligonucleotide
  Sense strand starting at position 2931 of SEQ ID NO: 588052
guggcaaucugccuuucua

SEQ ID NO: 838627 - RNA, 19 nt, Artificial Sequence
  Description of Artificial Sequence: Synthetic oligonucleotide
  Antisense strand to SEQ ID NO: 838626
uagaaaggcagauugccac

SEQ ID NO: 838628 - RNA, 19 nt, Artificial Sequence
  Description of Artificial Sequence: Synthetic oligonucleotide
  Sense strand starting at position 2938 of SEQ ID NO: 588052
ucugccuuucuaggagaaa

SEQ ID NO: 838629 - RNA, 19 nt, Artificial Sequence
  Description of Artificial Sequence: Synthetic oligonucleotide
  Antisense strand to SEQ ID NO: 838628
uuucuccuagaaaggcaga

SEQ ID NO: 838630 - RNA, 19 nt, Artificial Sequence
  Description of Artificial Sequence: Synthetic oligonucleotide
  Sense strand starting at position 3495 of SEQ ID NO: 588052
aggaaauucuaacacagga

SEQ ID NO: 838631 - RNA, 19 nt, Artificial Sequence
  Description of Artificial Sequence: Synthetic oligonucleotide
  Antisense strand to SEQ ID NO: 838630
uccuguguuagaauuuccu

SEQ ID NO: 838632 - RNA, 19 nt, Artificial Sequence
  Description of Artificial Sequence: Synthetic oligonucleotide
  Sense strand starting at position 3569 of SEQ ID NO: 588052
aaagacaaaucuuguguga

SEQ ID NO: 838633 - RNA, 19 nt, Artificial Sequence
  Description of Artificial Sequence: Synthetic oligonucleotide
  Antisense strand to SEQ ID NO: 838632
ucacacaagauuugucuuu

SEQ ID NO: 838634 - RNA, 19 nt, Artificial Sequence
  Description of Artificial Sequence: Synthetic oligonucleotide
  Sense strand starting at position 3644 of SEQ ID NO: 588052
aguuucaguggcugggaua

SEQ ID NO: 838635 - RNA, 19 nt, Artificial Sequence
  Description of Artificial Sequence: Synthetic oligonucleotide
  Antisense strand to SEQ ID NO: 838634
uaucccagccacugaaacu

SEQ ID NO: 838636 - RNA, 19 nt, Artificial Sequence
  Description of Artificial Sequence: Synthetic oligonucleotide
  Sense strand starting at position 3645 of SEQ ID NO: 588052
guuucaguggcugggauaa

SEQ ID NO: 838637 - RNA, 19 nt, Artificial Sequence
  Description of Artificial Sequence: Synthetic oligonucleotide
  Antisense strand to SEQ ID NO: 838636
uuaucccagccacugaaac

SEQ ID NO: 838638 - RNA, 19 nt, Artificial Sequence
  Description of Artificial Sequence: Synthetic oligonucleotide
  Sense strand starting at position 3672 of SEQ ID NO: 588052
ggagaaauguugcuuaaug

SEQ ID NO: 838639 - RNA, 19 nt, Artificial Sequence
  Description of Artificial Sequence: Synthetic oligonucleotide
  Antisense strand to SEQ ID NO: 838638
cauuaagcaacauuucucc

SEQ ID NO: 838640 - RNA, 19 nt, Artificial Sequence
  Description of Artificial Sequence: Synthetic oligonucleotide
  Sense strand starting at position 3673 of SEQ ID NO: 588052
gagaaauguugcuuaaugg

SEQ ID NO: 838641 - RNA, 19 nt, Artificial Sequence
  Description of Artificial Sequence: Synthetic oligonucleotide
  Antisense strand to SEQ ID NO: 838640
ccauuaagcaacauuucuc

SEQ ID NO: 838642 - RNA, 19 nt, Artificial Sequence
  Description of Artificial Sequence: Synthetic oligonucleotide
  Sense strand starting at position 3683 of SEQ ID NO: 588052
gcuuaauggguguaggcuu

SEQ ID NO: 838643 - RNA, 19 nt, Artificial Sequence
  Description of Artificial Sequence: Synthetic oligonucleotide
  Antisense strand to SEQ ID NO: 838642
aagccuacacccauuaagc

SEQ ID NO: 838644 - RNA, 19 nt, Artificial Sequence
  Description of Artificial Sequence: Synthetic oligonucleotide
  Sense strand starting at position 3695 of SEQ ID NO: 588052
uaggcuuucuguuuggagu

SEQ ID NO: 838645 - RNA, 19 nt, Artificial Sequence
  Description of Artificial Sequence: Synthetic oligonucleotide
  Antisense strand to SEQ ID NO: 838644
acuccaaacagaaagccua

SEQ ID NO: 838646 - RNA, 19 nt, Artificial Sequence
  Description of Artificial Sequence: Synthetic oligonucleotide
  Sense strand starting at position 3728 of SEQ ID NO: 588052
ggaaguaguggugaugguu

SEQ ID NO: 838647 - RNA, 19 nt, Artificial Sequence
  Description of Artificial Sequence: Synthetic oligonucleotide
  Antisense strand to SEQ ID NO: 838646
aaccaucaccacuacuucc

SEQ ID NO: 838648 - RNA, 19 nt, Artificial Sequence
  Description of Artificial Sequence: Synthetic oligonucleotide
  Sense strand starting at position 3731 of SEQ ID NO: 588052
aguaguggugaugguuaca

SEQ ID NO: 838649 - RNA, 19 nt, Artificial Sequence
  Description of Artificial Sequence: Synthetic oligonucleotide
  Antisense strand to SEQ ID NO: 838648
uguaaccaucaccacuacu

SEQ ID NO: 838650 - RNA, 19 nt, Artificial Sequence
  Description of Artificial Sequence: Synthetic oligonucleotide
  Sense strand starting at position 3761 of SEQ ID NO: 588052
cgguaauaaugccacugaa

SEQ ID NO: 838651 - RNA, 19 nt, Artificial Sequence
  Description of Artificial Sequence: Synthetic oligonucleotide
  Antisense strand to SEQ ID NO: 838650
uucaguggcauuauuaccg

SEQ ID NO: 838652 - RNA, 19 nt, Artificial Sequence
  Description of Artificial Sequence: Synthetic oligonucleotide
  Sense strand starting at position 62 of SEQ ID NO: 588053
agucuaucucaauaaggca

SEQ ID NO: 838653 - RNA, 19 nt, Artificial Sequence
  Description of Artificial Sequence: Synthetic oligonucleotide
  Antisense strand to SEQ ID NO: 838652
ugccuuauugagauagacu

SEQ ID NO: 838654 - RNA, 19 nt, Artificial Sequence
  Description of Artificial Sequence: Synthetic oligonucleotide
  Sense strand starting at position 118 of SEQ ID NO: 588053
acacguccuuuccuauaua

SEQ ID NO: 838655 - RNA, 19 nt, Artificial Sequence
  Description of Artificial Sequence: Synthetic oligonucleotide
  Antisense strand to SEQ ID NO: 838654
uauauaggaaaggacgugu

SEQ ID NO: 838656 - RNA, 19 nt, Artificial Sequence
  Description of Artificial Sequence: Synthetic oligonucleotide
  Sense strand starting at position 167 of SEQ ID NO: 588053
augcauccucaugauaaug

SEQ ID NO: 838657 - RNA, 19 nt, Artificial Sequence
  Description of Artificial Sequence: Synthetic oligonucleotide
  Antisense strand to SEQ ID NO: 838656
cauuaucaugaggaugcau

SEQ ID NO: 838658 - RNA, 19 nt, Artificial Sequence
  Description of Artificial Sequence: Synthetic oligonucleotide
  Sense strand starting at position 175 of SEQ ID NO: 588053
ucaugauaaugccuguaca

SEQ ID NO: 838659 - RNA, 19 nt, Artificial Sequence
  Description of Artificial Sequence: Synthetic oligonucleotide
  Antisense strand to SEQ ID NO: 838658
uguacaggcauuaucauga

SEQ ID NO: 838660 - RNA, 19 nt, Artificial Sequence
  Description of Artificial Sequence: Synthetic oligonucleotide
  Sense strand starting at position 176 of SEQ ID NO: 588053
caugauaaugccuguacag

SEQ ID NO: 838661 - RNA, 19 nt, Artificial Sequence
  Description of Artificial Sequence: Synthetic oligonucleotide
  Antisense strand to SEQ ID NO: 838660
cuguacaggcauuaucaug

SEQ ID NO: 838662 - RNA, 19 nt, Artificial Sequence
  Description of Artificial Sequence: Synthetic oligonucleotide
  Sense strand starting at position 303 of SEQ ID NO: 588053
agucucgguucucuuacaa

SEQ ID NO: 838663 - RNA, 19 nt, Artificial Sequence
  Description of Artificial Sequence: Synthetic oligonucleotide
  Antisense strand to SEQ ID NO: 838662
uuguaagagaaccgagacu

SEQ ID NO: 838664 - RNA, 19 nt, Artificial Sequence
  Description of Artificial Sequence: Synthetic oligonucleotide
  Sense strand starting at position 788 of SEQ ID NO: 588053
cuucgcucucuggauguaa

SEQ ID NO: 838665 - RNA, 19 nt, Artificial Sequence
  Description of Artificial Sequence: Synthetic oligonucleotide
  Antisense strand to SEQ ID NO: 838664
uuacauccagagagcgaag

SEQ ID NO: 838666 - RNA, 19 nt, Artificial Sequence
  Description of Artificial Sequence: Synthetic oligonucleotide
  Sense strand starting at position 854 of SEQ ID NO: 588053
ccuaaauuaugguuuagug

SEQ ID NO: 838667 - RNA, 19 nt, Artificial Sequence
  Description of Artificial Sequence: Synthetic oligonucleotide
  Antisense strand to SEQ ID NO: 838666
cacuaaaccauaauuuagg

SEQ ID NO: 838668 - RNA, 19 nt, Artificial Sequence
  Description of Artificial Sequence: Synthetic oligonucleotide
  Sense strand starting at position 1258 of SEQ ID NO: 588053
ccaccuuaacccgagaguu

SEQ ID NO: 838669 - RNA, 19 nt, Artificial Sequence
  Description of Artificial Sequence: Synthetic oligonucleotide
  Antisense strand to SEQ ID NO: 838668
aacucucggguuaaggugg

SEQ ID NO: 838670 - RNA, 19 nt, Artificial Sequence
  Description of Artificial Sequence: Synthetic oligonucleotide
  Sense strand starting at position 2480 of SEQ ID NO: 588053
caaguucuuugcucugaga

SEQ ID NO: 838671 - RNA, 19 nt, Artificial Sequence
  Description of Artificial Sequence: Synthetic oligonucleotide
  Antisense strand to SEQ ID NO: 838670
ucucagagcaaagaacuug

SEQ ID NO: 838672 - RNA, 19 nt, Artificial Sequence
  Description of Artificial Sequence: Synthetic oligonucleotide
  Sense strand starting at position 2482 of SEQ ID NO: 588053
aguucuuugcucugagaau

SEQ ID NO: 838673 - RNA, 19 nt, Artificial Sequence
  Description of Artificial Sequence: Synthetic oligonucleotide
  Antisense strand to SEQ ID NO: 838672
auucucagagcaaagaacu

SEQ ID NO: 838674 - RNA, 19 nt, Artificial Sequence
  Description of Artificial Sequence: Synthetic oligonucleotide
  Sense strand starting at position 2488 of SEQ ID NO: 588053
uugcucugagaauguugau

SEQ ID NO: 838675 - RNA, 19 nt, Artificial Sequence
  Description of Artificial Sequence: Synthetic oligonucleotide
  Antisense strand to SEQ ID NO: 838674
aucaacauucucagagcaa

SEQ ID NO: 838676 - RNA, 19 nt, Artificial Sequence
  Description of Artificial Sequence: Synthetic oligonucleotide
  Sense strand starting at position 2497 of SEQ ID NO: 588053
gaauguugaugcuuuggau

SEQ ID NO: 838677 - RNA, 19 nt, Artificial Sequence
  Description of Artificial Sequence: Synthetic oligonucleotide
  Antisense strand to SEQ ID NO: 838676
auccaaagcaucaacauuc

SEQ ID NO: 838678 - RNA, 19 nt, Artificial Sequence
  Description of Artificial Sequence: Synthetic oligonucleotide
  Sense strand starting at position 2831 of SEQ ID NO: 588053
guguaaauuaugugcauca

SEQ ID NO: 838679 - RNA, 19 nt, Artificial Sequence
  Description of Artificial Sequence: Synthetic oligonucleotide
  Antisense strand to SEQ ID NO: 838678
ugaugcacauaauuuacac

SEQ ID NO: 838680 - RNA, 19 nt, Artificial Sequence
  Description of Artificial Sequence: Synthetic oligonucleotide
  Sense strand starting at position 2833 of SEQ ID NO: 588053
guaaauuaugugcaucacu

SEQ ID NO: 838681 - RNA, 19 nt, Artificial Sequence
  Description of Artificial Sequence: Synthetic oligonucleotide
  Antisense strand to SEQ ID NO: 838680
agugaugcacauaauuuac

SEQ ID NO: 838682 - RNA, 19 nt, Artificial Sequence
  Description of Artificial Sequence: Synthetic oligonucleotide
  Sense strand starting at position 2838 of SEQ ID NO: 588053
uuaugugcaucacuacuau

SEQ ID NO: 838683 - RNA, 19 nt, Artificial Sequence
  Description of Artificial Sequence: Synthetic oligonucleotide
  Antisense strand to SEQ ID NO: 838682
auaguagugaugcacauaa

SEQ ID NO: 838684 - RNA, 19 nt, Artificial Sequence
  Description of Artificial Sequence: Synthetic oligonucleotide
  Sense strand starting at position 2993 of SEQ ID NO: 588053
gaaauuuagcucugguguc

SEQ ID NO: 838685 - RNA, 19 nt, Artificial Sequence
  Description of Artificial Sequence: Synthetic oligonucleotide
  Antisense strand to SEQ ID NO: 838684
gacaccagagcuaaauuuc

SEQ ID NO: 838686 - RNA, 19 nt, Artificial Sequence
  Description of Artificial Sequence: Synthetic oligonucleotide
  Sense strand starting at position 3019 of SEQ ID NO: 588053
aucuuucugugacuggauu

SEQ ID NO: 838687 - RNA, 19 nt, Artificial Sequence
  Description of Artificial Sequence: Synthetic oligonucleotide
  Antisense strand to SEQ ID NO: 838686
aauccagucacagaaagau

SEQ ID NO: 838688 - RNA, 19 nt, Artificial Sequence
  Description of Artificial Sequence: Synthetic oligonucleotide
  Sense strand starting at position 3137 of SEQ ID NO: 588053
caaguuucugugggacuuu

SEQ ID NO: 838689 - RNA, 19 nt, Artificial Sequence
  Description of Artificial Sequence: Synthetic oligonucleotide
  Antisense strand to SEQ ID NO: 838688
aaagucccacagaaacuug

SEQ ID NO: 838690 - RNA, 19 nt, Artificial Sequence
  Description of Artificial Sequence: Synthetic oligonucleotide
  Sense strand starting at position 3173 of SEQ ID NO: 588053
gacauauuaugucccagug

SEQ ID NO: 838691 - RNA, 19 nt, Artificial Sequence
  Description of Artificial Sequence: Synthetic oligonucleotide
  Antisense strand to SEQ ID NO: 838690
cacugggacauaauauguc

SEQ ID NO: 838692 - RNA, 19 nt, Artificial Sequence
  Description of Artificial Sequence: Synthetic oligonucleotide
  Sense strand starting at position 3216 of SEQ ID NO: 588053
uuuauauucucuguggaua

SEQ ID NO: 838693 - RNA, 19 nt, Artificial Sequence
  Description of Artificial Sequence: Synthetic oligonucleotide
  Antisense strand to SEQ ID NO: 838692
uauccacagagaauauaaa

SEQ ID NO: 838694 - RNA, 19 nt, Artificial Sequence
  Description of Artificial Sequence: Synthetic oligonucleotide
  Sense strand starting at position 3217 of SEQ ID NO: 588053
uuauauucucuguggauau

SEQ ID NO: 838695 - RNA, 19 nt, Artificial Sequence
  Description of Artificial Sequence: Synthetic oligonucleotide
  Antisense strand to SEQ ID NO: 838694
auauccacagagaauauaa

SEQ ID NO: 838696 - RNA, 19 nt, Artificial Sequence
  Description of Artificial Sequence: Synthetic oligonucleotide
  Sense strand starting at position 3228 of SEQ ID NO: 588053
guggauauucuguauauua

SEQ ID NO: 838697 - RNA, 19 nt, Artificial Sequence
  Description of Artificial Sequence: Synthetic oligonucleotide
  Antisense strand to SEQ ID NO: 838696
uaauauacagaauauccac

SEQ ID NO: 838698 - RNA, 19 nt, Artificial Sequence
  Description of Artificial Sequence: Synthetic oligonucleotide
  Sense strand starting at position 3348 of SEQ ID NO: 588053
uccuccugggacugaaaua

SEQ ID NO: 838699 - RNA, 19 nt, Artificial Sequence
  Description of Artificial Sequence: Synthetic oligonucleotide
  Antisense strand to SEQ ID NO: 838698
uauuucagucccaggagga

SEQ ID NO: 838700 - RNA, 19 nt, Artificial Sequence
  Description of Artificial Sequence: Synthetic oligonucleotide
  Sense strand starting at position 3379 of SEQ ID NO: 588053
gaagcaaaucagugacuga

SEQ ID NO: 838701 - RNA, 19 nt, Artificial Sequence
  Description of Artificial Sequence: Synthetic oligonucleotide
  Antisense strand to SEQ ID NO: 838700
ucagucacugauuugcuuc

SEQ ID NO: 838702 - RNA, 19 nt, Artificial Sequence
  Description of Artificial Sequence: Synthetic oligonucleotide
  Sense strand starting at position 3473 of SEQ ID NO: 588053
aauagugccucuguagauc

SEQ ID NO: 838703 - RNA, 19 nt, Artificial Sequence
  Description of Artificial Sequence: Synthetic oligonucleotide
  Antisense strand to SEQ ID NO: 838702
gaucuacagaggcacuauu

SEQ ID NO: 838704 - RNA, 19 nt, Artificial Sequence
  Description of Artificial Sequence: Synthetic oligonucleotide
  Sense strand starting at position 3539 of SEQ ID NO: 588053
gggucuugaaaucggaaau

SEQ ID NO: 838705 - RNA, 19 nt, Artificial Sequence
  Description of Artificial Sequence: Synthetic oligonucleotide
  Antisense strand to SEQ ID NO: 838704
auuuccgauuucaagaccc

SEQ ID NO: 838706 - RNA, 19 nt, Artificial Sequence
  Description of Artificial Sequence: Synthetic oligonucleotide
  Sense strand starting at position 3540 of SEQ ID NO: 588053
ggucuugaaaucggaaaug

SEQ ID NO: 838707 - RNA, 19 nt, Artificial Sequence
  Description of Artificial Sequence: Synthetic oligonucleotide
  Antisense strand to SEQ ID NO: 838706
cauuuccgauuucaagacc

SEQ ID NO: 838708 - RNA, 19 nt, Artificial Sequence
  Description of Artificial Sequence: Synthetic oligonucleotide
  Sense strand starting at position 3613 of SEQ ID NO: 588053
gugucauaucuuugaagga

SEQ ID NO: 838709 - RNA, 19 nt, Artificial Sequence
  Description of Artificial Sequence: Synthetic oligonucleotide
  Antisense strand to SEQ ID NO: 838708
uccuucaaagauaugacac

SEQ ID NO: 838710 - RNA, 19 nt, Artificial Sequence
  Description of Artificial Sequence: Synthetic oligonucleotide
  Sense strand starting at position 3652 of SEQ ID NO: 588053
cuaagauguuguuuaauug

SEQ ID NO: 838711 - RNA, 19 nt, Artificial Sequence
  Description of Artificial Sequence: Synthetic oligonucleotide
  Antisense strand to SEQ ID NO: 838710
caauuaaacaacaucuuag

SEQ ID NO: 838712 - RNA, 19 nt, Artificial Sequence
  Description of Artificial Sequence: Synthetic oligonucleotide
  Sense strand starting at position 3826 of SEQ ID NO: 588053
caggauugaucucugcgua

SEQ ID NO: 838713 - RNA, 19 nt, Artificial Sequence
  Description of Artificial Sequence: Synthetic oligonucleotide
  Antisense strand to SEQ ID NO: 838712
uacgcagagaucaauccug

SEQ ID NO: 838714 - RNA, 19 nt, Artificial Sequence
  Description of Artificial Sequence: Synthetic oligonucleotide
  Sense strand starting at position 3827 of SEQ ID NO: 588053
aggauugaucucugcguag

SEQ ID NO: 838715 - RNA, 19 nt, Artificial Sequence
  Description of Artificial Sequence: Synthetic oligonucleotide
  Antisense strand to SEQ ID NO: 838714
cuacgcagagaucaauccu

SEQ ID NO: 838716 - RNA, 19 nt, Artificial Sequence
  Description of Artificial Sequence: Synthetic oligonucleotide
  Sense strand starting at position 3838 of SEQ ID NO: 588053
cugcguagucucuaauuag

SEQ ID NO: 838717 - RNA, 19 nt, Artificial Sequence
  Description of Artificial Sequence: Synthetic oligonucleotide
  Antisense strand to SEQ ID NO: 838716
cuaauuagagacuacgcag

SEQ ID NO: 838718 - RNA, 19 nt, Artificial Sequence
  Description of Artificial Sequence: Synthetic oligonucleotide
  Sense strand starting at position 3870 of SEQ ID NO: 588053
gcacaaauguaagcucuuu

SEQ ID NO: 838719 - RNA, 19 nt, Artificial Sequence
  Description of Artificial Sequence: Synthetic oligonucleotide
  Antisense strand to SEQ ID NO: 838718
aaagagcuuacauuugugc

SEQ ID NO: 838720 - RNA, 19 nt, Artificial Sequence
  Description of Artificial Sequence: Synthetic oligonucleotide
  Sense strand starting at position 3875 of SEQ ID NO: 588053
aauguaagcucuuugguga

SEQ ID NO: 838721 - RNA, 19 nt, Artificial Sequence
  Description of Artificial Sequence: Synthetic oligonucleotide
  Antisense strand to SEQ ID NO: 838720
ucaccaaagagcuuacauu

SEQ ID NO: 838722 - RNA, 19 nt, Artificial Sequence
  Description of Artificial Sequence: Synthetic oligonucleotide
  Sense strand starting at position 3893 of SEQ ID NO: 588053
aguagccaaucucuagaua

SEQ ID NO: 838723 - RNA, 19 nt, Artificial Sequence
  Description of Artificial Sequence: Synthetic oligonucleotide
  Antisense strand to SEQ ID NO: 838722
uaucuagagauuggcuacu

SEQ ID NO: 838724 - RNA, 19 nt, Artificial Sequence
  Description of Artificial Sequence: Synthetic oligonucleotide
  Sense strand starting at position 3904 of SEQ ID NO: 588053
ucuagauacuagucuuuga

SEQ ID NO: 838725 - RNA, 19 nt, Artificial Sequence
  Description of Artificial Sequence: Synthetic oligonucleotide
  Antisense strand to SEQ ID NO: 838724
ucaaagacuaguaucuaga

SEQ ID NO: 838726 - RNA, 19 nt, Artificial Sequence
  Description of Artificial Sequence: Synthetic oligonucleotide
  Sense strand starting at position 3907 of SEQ ID NO: 588053
agauacuagucuuugauga

SEQ ID NO: 838727 - RNA, 19 nt, Artificial Sequence
  Description of Artificial Sequence: Synthetic oligonucleotide
  Antisense strand to SEQ ID NO: 838726
ucaucaaagacuaguaucu

SEQ ID NO: 838728 - RNA, 19 nt, Artificial Sequence
  Description of Artificial Sequence: Synthetic oligonucleotide
  Sense strand starting at position 3908 of SEQ ID NO: 588053
gauacuagucuuugaugag

SEQ ID NO: 838729 - RNA, 19 nt, Artificial Sequence
  Description of Artificial Sequence: Synthetic oligonucleotide
  Antisense strand to SEQ ID NO: 838728
cucaucaaagacuaguauc

SEQ ID NO: 838730 - RNA, 19 nt, Artificial Sequence
  Description of Artificial Sequence: Synthetic oligonucleotide
  Sense strand starting at position 3956 of SEQ ID NO: 588053
uagagagccuuugauuuau

SEQ ID NO: 838731 - RNA, 19 nt, Artificial Sequence
  Description of Artificial Sequence: Synthetic oligonucleotide
  Antisense strand to SEQ ID NO: 838730
auaaaucaaaggcucucua

SEQ ID NO: 838732 - RNA, 19 nt, Artificial Sequence
  Description of Artificial Sequence: Synthetic oligonucleotide
  Sense strand starting at position 251 of SEQ ID NO: 588054
gguggagaugcuuaauauu

SEQ ID NO: 838733 - RNA, 19 nt, Artificial Sequence
  Description of Artificial Sequence: Synthetic oligonucleotide
  Antisense strand to SEQ ID NO: 838732
aauauuaagcaucuccacc

SEQ ID NO: 838734 - RNA, 19 nt, Artificial Sequence
  Description of Artificial Sequence: Synthetic oligonucleotide
  Sense strand starting at position 394 of SEQ ID NO: 588054
aggauauacacuugacgua

SEQ ID NO: 838735 - RNA, 19 nt, Artificial Sequence
  Description of Artificial Sequence: Synthetic oligonucleotide
  Antisense strand to SEQ ID NO: 838734
uacgucaaguguauauccu

SEQ ID NO: 838736 - RNA, 19 nt, Artificial Sequence
  Description of Artificial Sequence: Synthetic oligonucleotide
  Sense strand starting at position 513 of SEQ ID NO: 588054
cuaugucaugaauggcaua

SEQ ID NO: 838737 - RNA, 19 nt, Artificial Sequence
  Description of Artificial Sequence: Synthetic oligonucleotide
  Antisense strand to SEQ ID NO: 838736
uaugccauucaugacauag

SEQ ID NO: 838738 - RNA, 19 nt, Artificial Sequence
  Description of Artificial Sequence: Synthetic oligonucleotide
  Sense strand starting at position 527 of SEQ ID NO: 588054
gcauauaauguguauugga

SEQ ID NO: 838739 - RNA, 19 nt, Artificial Sequence
  Description of Artificial Sequence: Synthetic oligonucleotide
  Antisense strand to SEQ ID NO: 838738
uccaauacacauuauaugc

SEQ ID NO: 838740 - RNA, 19 nt, Artificial Sequence
  Description of Artificial Sequence: Synthetic oligonucleotide
  Sense strand starting at position 692 of SEQ ID NO: 588054
ccuagaagggauuguguca

SEQ ID NO: 838741 - RNA, 19 nt, Artificial Sequence
  Description of Artificial Sequence: Synthetic oligonucleotide
  Antisense strand to SEQ ID NO: 838740
ugacacaaucccuucuagg

SEQ ID NO: 838742 - RNA, 19 nt, Artificial Sequence
  Description of Artificial Sequence: Synthetic oligonucleotide
  Sense strand starting at position 721 of SEQ ID NO: 588054
cacgcauucccacaguaga

SEQ ID NO: 838743 - RNA, 19 nt, Artificial Sequence
  Description of Artificial Sequence: Synthetic oligonucleotide
  Antisense strand to SEQ ID NO: 838742
ucuacugugggaaugcgug

SEQ ID NO: 838744 - RNA, 19 nt, Artificial Sequence
  Description of Artificial Sequence: Synthetic oligonucleotide
  Sense strand starting at position 724 of SEQ ID NO: 588054
gcauucccacaguagaaau

SEQ ID NO: 838745 - RNA, 19 nt, Artificial Sequence
  Description of Artificial Sequence: Synthetic oligonucleotide
  Antisense strand to SEQ ID NO: 838744
auuucuacugugggaaugc

SEQ ID NO: 838746 - RNA, 19 nt, Artificial Sequence
  Description of Artificial Sequence: Synthetic oligonucleotide
  Sense strand starting at position 776 of SEQ ID NO: 588054
gcuaaaucucaagagucuu

SEQ ID NO: 838747 - RNA, 19 nt, Artificial Sequence
  Description of Artificial Sequence: Synthetic oligonucleotide
  Antisense strand to SEQ ID NO: 838746
aagacucuugagauuuagc

SEQ ID NO: 838748 - RNA, 19 nt, Artificial Sequence
  Description of Artificial Sequence: Synthetic oligonucleotide
  Sense strand starting at position 782 of SEQ ID NO: 588054
ucucaagagucuuugacac

SEQ ID NO: 838749 - RNA, 19 nt, Artificial Sequence
  Description of Artificial Sequence: Synthetic oligonucleotide
  Antisense strand to SEQ ID NO: 838748
gugucaaagacucuugaga

SEQ ID NO: 838750 - RNA, 19 nt, Artificial Sequence
  Description of Artificial Sequence: Synthetic oligonucleotide
  Sense strand starting at position 817 of SEQ ID NO: 588054
gauaccaaugacugaaguu

SEQ ID NO: 838751 - RNA, 19 nt, Artificial Sequence
  Description of Artificial Sequence: Synthetic oligonucleotide
  Antisense strand to SEQ ID NO: 838750
aacuucagucauugguauc

SEQ ID NO: 838752 - RNA, 19 nt, Artificial Sequence
  Description of Artificial Sequence: Synthetic oligonucleotide
  Sense strand starting at position 872 of SEQ ID NO: 588054
gugugugaaaccuaguaac

SEQ ID NO: 838753 - RNA, 19 nt, Artificial Sequence
  Description of Artificial Sequence: Synthetic oligonucleotide
  Antisense strand to SEQ ID NO: 838752
guuacuagguuucacacac

SEQ ID NO: 838754 - RNA, 19 nt, Artificial Sequence
  Description of Artificial Sequence: Synthetic oligonucleotide
  Sense strand starting at position 967 of SEQ ID NO: 588054
gccacaucaccuuggacua

SEQ ID NO: 838755 - RNA, 19 nt, Artificial Sequence
  Description of Artificial Sequence: Synthetic oligonucleotide
  Antisense strand to SEQ ID NO: 838754
uaguccaaggugauguggc

SEQ ID NO: 838756 - RNA, 19 nt, Artificial Sequence
  Description of Artificial Sequence: Synthetic oligonucleotide
  Sense strand starting at position 974 of SEQ ID NO: 588054
caccuuggacuagguauau

SEQ ID NO: 838757 - RNA, 19 nt, Artificial Sequence
  Description of Artificial Sequence: Synthetic oligonucleotide
  Antisense strand to SEQ ID NO: 838756
auauaccuaguccaaggug

SEQ ID NO: 838758 - RNA, 19 nt, Artificial Sequence
  Description of Artificial Sequence: Synthetic oligonucleotide
  Sense strand starting at position 1231 of SEQ ID NO: 588054
ucaggaugccuuugagaau

SEQ ID NO: 838759 - RNA, 19 nt, Artificial Sequence
  Description of Artificial Sequence: Synthetic oligonucleotide
  Antisense strand to SEQ ID NO: 838758
auucucaaaggcauccuga

SEQ ID NO: 838760 - RNA, 19 nt, Artificial Sequence
  Description of Artificial Sequence: Synthetic oligonucleotide
  Sense strand starting at position 1334 of SEQ ID NO: 588054
cugacagcuacguaacaga

SEQ ID NO: 838761 - RNA, 19 nt, Artificial Sequence
  Description of Artificial Sequence: Synthetic oligonucleotide
  Antisense strand to SEQ ID NO: 838760
ucuguuacguagcugucag

SEQ ID NO: 838762 - RNA, 19 nt, Artificial Sequence
  Description of Artificial Sequence: Synthetic oligonucleotide
  Sense strand starting at position 2109 of SEQ ID NO: 588054
cgauuuguccuaggugcau

SEQ ID NO: 838763 - RNA, 19 nt, Artificial Sequence
  Description of Artificial Sequence: Synthetic oligonucleotide
  Antisense strand to SEQ ID NO: 838762
augcaccuaggacaaaucg

SEQ ID NO: 838764 - RNA, 19 nt, Artificial Sequence
  Description of Artificial Sequence: Synthetic oligonucleotide
  Sense strand starting at position 2121 of SEQ ID NO: 588054
ggugcauucgccgugacca

SEQ ID NO: 838765 - RNA, 19 nt, Artificial Sequence
  Description of Artificial Sequence: Synthetic oligonucleotide
  Antisense strand to SEQ ID NO: 838764
uggucacggcgaaugcacc

SEQ ID NO: 838766 - RNA, 19 nt, Artificial Sequence
  Description of Artificial Sequence: Synthetic oligonucleotide
  Sense strand starting at position 2162 of SEQ ID NO: 588054
uguucuucucggagcggaa

SEQ ID NO: 838767 - RNA, 19 nt, Artificial Sequence
  Description of Artificial Sequence: Synthetic oligonucleotide
  Antisense strand to SEQ ID NO: 838766
uuccgcuccgagaagaaca

SEQ ID NO: 838768 - RNA, 19 nt, Artificial Sequence
  Description of Artificial Sequence: Synthetic oligonucleotide
  Sense strand starting at position 2187 of SEQ ID NO: 588054
ucgccuaguccuuaaagaa

SEQ ID NO: 838769 - RNA, 19 nt, Artificial Sequence
  Description of Artificial Sequence: Synthetic oligonucleotide
  Antisense strand to SEQ ID NO: 838768
uucuuuaaggacuaggcga

SEQ ID NO: 838770 - RNA, 19 nt, Artificial Sequence
  Description of Artificial Sequence: Synthetic oligonucleotide
  Sense strand starting at position 2729 of SEQ ID NO: 588054
guguuacuugauuauguag

SEQ ID NO: 838771 - RNA, 19 nt, Artificial Sequence
  Description of Artificial Sequence: Synthetic oligonucleotide
  Antisense strand to SEQ ID NO: 838770
cuacauaaucaaguaacac

SEQ ID NO: 838772 - RNA, 19 nt, Artificial Sequence
  Description of Artificial Sequence: Synthetic oligonucleotide
  Sense strand starting at position 2738 of SEQ ID NO: 588054
gauuauguaguguaacaua

SEQ ID NO: 838773 - RNA, 19 nt, Artificial Sequence
  Description of Artificial Sequence: Synthetic oligonucleotide
  Antisense strand to SEQ ID NO: 838772
uauguuacacuacauaauc

SEQ ID NO: 838774 - RNA, 19 nt, Artificial Sequence
  Description of Artificial Sequence: Synthetic oligonucleotide
  Sense strand starting at position 2956 of SEQ ID NO: 588054
gggauuccacugggaugua

SEQ ID NO: 838775 - RNA, 19 nt, Artificial Sequence
  Description of Artificial Sequence: Synthetic oligonucleotide
  Antisense strand to SEQ ID NO: 838774
uacaucccaguggaauccc

SEQ ID NO: 838776 - RNA, 19 nt, Artificial Sequence
  Description of Artificial Sequence: Synthetic oligonucleotide
  Sense strand starting at position 3038 of SEQ ID NO: 588054
gguacauaugaaugccauu

SEQ ID NO: 838777 - RNA, 19 nt, Artificial Sequence
  Description of Artificial Sequence: Synthetic oligonucleotide
  Antisense strand to SEQ ID NO: 838776
aauggcauucauauguacc

SEQ ID NO: 838778 - RNA, 19 nt, Artificial Sequence
  Description of Artificial Sequence: Synthetic oligonucleotide
  Sense strand starting at position 3145 of SEQ ID NO: 588054
ccuauauaccuuuggagau

SEQ ID NO: 838779 - RNA, 19 nt, Artificial Sequence
  Description of Artificial Sequence: Synthetic oligonucleotide
  Antisense strand to SEQ ID NO: 838778
aucuccaaagguauauagg

SEQ ID NO: 838780 - RNA, 19 nt, Artificial Sequence
  Description of Artificial Sequence: Synthetic oligonucleotide
  Sense strand starting at position 3228 of SEQ ID NO: 588054
gcauuugcucuugagccaa

SEQ ID NO: 838781 - RNA, 19 nt, Artificial Sequence
  Description of Artificial Sequence: Synthetic oligonucleotide
  Antisense strand to SEQ ID NO: 838780
uuggcucaagagcaaaugc

SEQ ID NO: 838782 - RNA, 19 nt, Artificial Sequence
  Description of Artificial Sequence: Synthetic oligonucleotide
  Sense strand starting at position 3266 of SEQ ID NO: 588054
ucagaauugcuugagucuc

SEQ ID NO: 838783 - RNA, 19 nt, Artificial Sequence
  Description of Artificial Sequence: Synthetic oligonucleotide
  Antisense strand to SEQ ID NO: 838782
gagacucaagcaauucuga

SEQ ID NO: 838784 - RNA, 19 nt, Artificial Sequence
  Description of Artificial Sequence: Synthetic oligonucleotide
  Sense strand starting at position 3367 of SEQ ID NO: 588054
acauuaaaugauuggcuca

SEQ ID NO: 838785 - RNA, 19 nt, Artificial Sequence
  Description of Artificial Sequence: Synthetic oligonucleotide
  Antisense strand to SEQ ID NO: 838784
ugagccaaucauuuaaugu

SEQ ID NO: 838786 - RNA, 19 nt, Artificial Sequence
  Description of Artificial Sequence: Synthetic oligonucleotide
  Sense strand starting at position 3369 of SEQ ID NO: 588054
auuaaaugauuggcucaca

SEQ ID NO: 838787 - RNA, 19 nt, Artificial Sequence
  Description of Artificial Sequence: Synthetic oligonucleotide
  Antisense strand to SEQ ID NO: 838786
ugugagccaaucauuuaau

SEQ ID NO: 838788 - RNA, 19 nt, Artificial Sequence
  Description of Artificial Sequence: Synthetic oligonucleotide
  Sense strand starting at position 3370 of SEQ ID NO: 588054
uuaaaugauuggcucacau

SEQ ID NO: 838789 - RNA, 19 nt, Artificial Sequence
  Description of Artificial Sequence: Synthetic oligonucleotide
  Antisense strand to SEQ ID NO: 838788
augugagccaaucauuuaa

SEQ ID NO: 838790 - RNA, 19 nt, Artificial Sequence
  Description of Artificial Sequence: Synthetic oligonucleotide
  Sense strand starting at position 3381 of SEQ ID NO: 588054
gcucacauuaguggaugaa

SEQ ID NO: 838791 - RNA, 19 nt, Artificial Sequence
  Description of Artificial Sequence: Synthetic oligonucleotide
  Antisense strand to SEQ ID NO: 838790
uucauccacuaaugugagc

SEQ ID NO: 838792 - RNA, 19 nt, Artificial Sequence
  Description of Artificial Sequence: Synthetic oligonucleotide
  Sense strand starting at position 3473 of SEQ ID NO: 588054
uauguuuaaguugaucaga

SEQ ID NO: 838793 - RNA, 19 nt, Artificial Sequence
  Description of Artificial Sequence: Synthetic oligonucleotide
  Antisense strand to SEQ ID NO: 838792
ucugaucaacuuaaacaua

SEQ ID NO: 838794 - RNA, 19 nt, Artificial Sequence
  Description of Artificial Sequence: Synthetic oligonucleotide
  Sense strand starting at position 3475 of SEQ ID NO: 588054
uguuuaaguugaucagauc

SEQ ID NO: 838795 - RNA, 19 nt, Artificial Sequence
  Description of Artificial Sequence: Synthetic oligonucleotide
  Antisense strand to SEQ ID NO: 838794
gaucugaucaacuuaaaca

SEQ ID NO: 838796 - RNA, 19 nt, Artificial Sequence
  Description of Artificial Sequence: Synthetic oligonucleotide
  Sense strand starting at position 3476 of SEQ ID NO: 588054
guuuaaguugaucagauca

SEQ ID NO: 838797 - RNA, 19 nt, Artificial Sequence
  Description of Artificial Sequence: Synthetic oligonucleotide
  Antisense strand to SEQ ID NO: 838796
ugaucugaucaacuuaaac

SEQ ID NO: 838798 - RNA, 19 nt, Artificial Sequence
  Description of Artificial Sequence: Synthetic oligonucleotide
  Sense strand starting at position 3499 of SEQ ID NO: 588054
auaacagguuuccuggaau

SEQ ID NO: 838799 - RNA, 19 nt, Artificial Sequence
  Description of Artificial Sequence: Synthetic oligonucleotide
  Antisense strand to SEQ ID NO: 838798
auuccaggaaaccuguuau

SEQ ID NO: 838800 - RNA, 19 nt, Artificial Sequence
  Description of Artificial Sequence: Synthetic oligonucleotide
  Sense strand starting at position 3531 of SEQ ID NO: 588054
uggaauguucuagauaggu

SEQ ID NO: 838801 - RNA, 19 nt, Artificial Sequence
  Description of Artificial Sequence: Synthetic oligonucleotide
  Antisense strand to SEQ ID NO: 838800
accuaucuagaacauucca

SEQ ID NO: 838802 - RNA, 19 nt, Artificial Sequence
  Description of Artificial Sequence: Synthetic oligonucleotide
  Sense strand starting at position 3601 of SEQ ID NO: 588054
ucaguuauuggacaccuca

SEQ ID NO: 838803 - RNA, 19 nt, Artificial Sequence
  Description of Artificial Sequence: Synthetic oligonucleotide
  Antisense strand to SEQ ID NO: 838802
ugagguguccaauaacuga

SEQ ID NO: 838804 - RNA, 19 nt, Artificial Sequence
  Description of Artificial Sequence: Synthetic oligonucleotide
  Sense strand starting at position 3624 of SEQ ID NO: 588054
acaucagaugauuagcgua

SEQ ID NO: 838805 - RNA, 19 nt, Artificial Sequence
  Description of Artificial Sequence: Synthetic oligonucleotide
  Antisense strand to SEQ ID NO: 838804
uacgcuaaucaucugaugu

SEQ ID NO: 838806 - RNA, 19 nt, Artificial Sequence
  Description of Artificial Sequence: Synthetic oligonucleotide
  Sense strand starting at position 3822 of SEQ ID NO: 588054
auucucagcccugagaaca

SEQ ID NO: 838807 - RNA, 19 nt, Artificial Sequence
  Description of Artificial Sequence: Synthetic oligonucleotide
  Antisense strand to SEQ ID NO: 838806
uguucucagggcugagaau

SEQ ID NO: 838808 - RNA, 19 nt, Artificial Sequence
  Description of Artificial Sequence: Synthetic oligonucleotide
  Sense strand starting at position 3864 of SEQ ID NO: 588054
uuuccaacugucugauaga

SEQ ID NO: 838809 - RNA, 19 nt, Artificial Sequence
  Description of Artificial Sequence: Synthetic oligonucleotide
  Antisense strand to SEQ ID NO: 838808
ucuaucagacaguuggaaa

SEQ ID NO: 838810 - RNA, 19 nt, Artificial Sequence
  Description of Artificial Sequence: Synthetic oligonucleotide
  Sense strand starting at position 3928 of SEQ ID NO: 588054
gggauaauuuccuaccaua

SEQ ID NO: 838811 - RNA, 19 nt, Artificial Sequence
  Description of Artificial Sequence: Synthetic oligonucleotide
  Antisense strand to SEQ ID NO: 838810
uaugguaggaaauuauccc

SEQ ID NO: 838812 - RNA, 19 nt, Artificial Sequence
  Description of Artificial Sequence: Synthetic oligonucleotide
  Sense strand starting at position 120 of SEQ ID NO: 588055
ccagaagcuccagauccau

SEQ ID NO: 838813 - RNA, 19 nt, Artificial Sequence
  Description of Artificial Sequence: Synthetic oligonucleotide
  Antisense strand to SEQ ID NO: 838812
auggaucuggagcuucugg

SEQ ID NO: 838814 - RNA, 19 nt, Artificial Sequence
  Description of Artificial Sequence: Synthetic oligonucleotide
  Sense strand starting at position 126 of SEQ ID NO: 588055
gcuccagauccauggucuu

SEQ ID NO: 838815 - RNA, 19 nt, Artificial Sequence
  Description of Artificial Sequence: Synthetic oligonucleotide
  Antisense strand to SEQ ID NO: 838814
aagaccauggaucuggagc

SEQ ID NO: 838816 - RNA, 19 nt, Artificial Sequence
  Description of Artificial Sequence: Synthetic oligonucleotide
  Sense strand starting at position 247 of SEQ ID NO: 588055
agccuuucucccuagaaga

SEQ ID NO: 838817 - RNA, 19 nt, Artificial Sequence
  Description of Artificial Sequence: Synthetic oligonucleotide
  Antisense strand to SEQ ID NO: 838816
ucuucuagggagaaaggcu

SEQ ID NO: 838818 - RNA, 19 nt, Artificial Sequence
  Description of Artificial Sequence: Synthetic oligonucleotide
  Sense strand starting at position 258 of SEQ ID NO: 588055
cuagaagacauucggagua

SEQ ID NO: 838819 - RNA, 19 nt, Artificial Sequence
  Description of Artificial Sequence: Synthetic oligonucleotide
  Antisense strand to SEQ ID NO: 838818
uacuccgaaugucuucuag

SEQ ID NO: 838820 - RNA, 19 nt, Artificial Sequence
  Description of Artificial Sequence: Synthetic oligonucleotide
  Sense strand starting at position 260 of SEQ ID NO: 588055
agaagacauucggaguauu

SEQ ID NO: 838821 - RNA, 19 nt, Artificial Sequence
  Description of Artificial Sequence: Synthetic oligonucleotide
  Antisense strand to SEQ ID NO: 838820
aauacuccgaaugucuucu

SEQ ID NO: 838822 - RNA, 19 nt, Artificial Sequence
  Description of Artificial Sequence: Synthetic oligonucleotide
  Sense strand starting at position 307 of SEQ ID NO: 588055
cguaguuaucacuauaacu

SEQ ID NO: 838823 - RNA, 19 nt, Artificial Sequence
  Description of Artificial Sequence: Synthetic oligonucleotide
  Antisense strand to SEQ ID NO: 838822
aguuauagugauaacuacg

SEQ ID NO: 838824 - RNA, 19 nt, Artificial Sequence
  Description of Artificial Sequence: Synthetic oligonucleotide
  Sense strand starting at position 450 of SEQ ID NO: 588055
ggaggauucucaugcccac

SEQ ID NO: 838825 - RNA, 19 nt, Artificial Sequence
  Description of Artificial Sequence: Synthetic oligonucleotide
  Antisense strand to SEQ ID NO: 838824
gugggcaugagaauccucc

SEQ ID NO: 838826 - RNA, 19 nt, Artificial Sequence
  Description of Artificial Sequence: Synthetic oligonucleotide
  Sense strand starting at position 671 of SEQ ID NO: 588055
cgcagacgcucugagaagu

SEQ ID NO: 838827 - RNA, 19 nt, Artificial Sequence
  Description of Artificial Sequence: Synthetic oligonucleotide
  Antisense strand to SEQ ID NO: 838826
acuucucagagcgucugcg

SEQ ID NO: 838828 - RNA, 19 nt, Artificial Sequence
  Description of Artificial Sequence: Synthetic oligonucleotide
  Sense strand starting at position 723 of SEQ ID NO: 588055
uggccaugcucuugagcaa

SEQ ID NO: 838829 - RNA, 19 nt, Artificial Sequence
  Description of Artificial Sequence: Synthetic oligonucleotide
  Antisense strand to SEQ ID NO: 838828
uugcucaagagcauggcca

SEQ ID NO: 838830 - RNA, 19 nt, Artificial Sequence
  Description of Artificial Sequence: Synthetic oligonucleotide
  Sense strand starting at position 724 of SEQ ID NO: 588055
ggccaugcucuugagcaaa

SEQ ID NO: 838831 - RNA, 19 nt, Artificial Sequence
  Description of Artificial Sequence: Synthetic oligonucleotide
  Antisense strand to SEQ ID NO: 838830
uuugcucaagagcauggcc

SEQ ID NO: 838832 - RNA, 19 nt, Artificial Sequence
  Description of Artificial Sequence: Synthetic oligonucleotide
  Sense strand starting at position 763 of SEQ ID NO: 588055
ccaucuuugucucugaaag

SEQ ID NO: 838833 - RNA, 19 nt, Artificial Sequence
  Description of Artificial Sequence: Synthetic oligonucleotide
  Antisense strand to SEQ ID NO: 838832
cuuucagagacaaagaugg

SEQ ID NO: 838834 - RNA, 19 nt, Artificial Sequence
  Description of Artificial Sequence: Synthetic oligonucleotide
  Sense strand starting at position 764 of SEQ ID NO: 588055
caucuuugucucugaaagg

SEQ ID NO: 838835 - RNA, 19 nt, Artificial Sequence
  Description of Artificial Sequence: Synthetic oligonucleotide
  Antisense strand to SEQ ID NO: 838834
ccuuucagagacaaagaug

SEQ ID NO: 838836 - RNA, 19 nt, Artificial Sequence
  Description of Artificial Sequence: Synthetic oligonucleotide
  Sense strand starting at position 890 of SEQ ID NO: 588055
cggccaucuuaaccaagau

SEQ ID NO: 838837 - RNA, 19 nt, Artificial Sequence
  Description of Artificial Sequence: Synthetic oligonucleotide
  Antisense strand to SEQ ID NO: 838836
aucuugguuaagauggccg

SEQ ID NO: 838838 - RNA, 19 nt, Artificial Sequence
  Description of Artificial Sequence: Synthetic oligonucleotide
  Sense strand starting at position 926 of SEQ ID NO: 588055
cugggccaucucuaacaaa

SEQ ID NO: 838839 - RNA, 19 nt, Artificial Sequence
  Description of Artificial Sequence: Synthetic oligonucleotide
  Antisense strand to SEQ ID NO: 838838
uuuguuagagauggcccag

SEQ ID NO: 838840 - RNA, 19 nt, Artificial Sequence
  Description of Artificial Sequence: Synthetic oligonucleotide
  Sense strand starting at position 1090 of SEQ ID NO: 588055
aagccugggucaucucuaa

SEQ ID NO: 838841 - RNA, 19 nt, Artificial Sequence
  Description of Artificial Sequence: Synthetic oligonucleotide
  Antisense strand to SEQ ID NO: 838840
uuagagaugacccaggcuu

SEQ ID NO: 838842 - RNA, 19 nt, Artificial Sequence
  Description of Artificial Sequence: Synthetic oligonucleotide
  Sense strand starting at position 1097 of SEQ ID NO: 588055
ggucaucucuaacaaaggu

SEQ ID NO: 838843 - RNA, 19 nt, Artificial Sequence
  Description of Artificial Sequence: Synthetic oligonucleotide
  Antisense strand to SEQ ID NO: 838842
accuuuguuagagaugacc

SEQ ID NO: 838844 - RNA, 19 nt, Artificial Sequence
  Description of Artificial Sequence: Synthetic oligonucleotide
  Sense strand starting at position 1215 of SEQ ID NO: 588055
cucggccaucucuaacaaa

SEQ ID NO: 838845 - RNA, 19 nt, Artificial Sequence
  Description of Artificial Sequence: Synthetic oligonucleotide
  Antisense strand to SEQ ID NO: 838844
uuuguuagagauggccgag

SEQ ID NO: 838846 - RNA, 19 nt, Artificial Sequence
  Description of Artificial Sequence: Synthetic oligonucleotide
  Sense strand starting at position 1255 of SEQ ID NO: 588055
cugacugcgucucuaauca

SEQ ID NO: 838847 - RNA, 19 nt, Artificial Sequence
  Description of Artificial Sequence: Synthetic oligonucleotide
  Antisense strand to SEQ ID NO: 838846
ugauuagagacgcagucag

SEQ ID NO: 838848 - RNA, 19 nt, Artificial Sequence
  Description of Artificial Sequence: Synthetic oligonucleotide
  Sense strand starting at position 1259 of SEQ ID NO: 588055
cugcgucucuaaucaagga

SEQ ID NO: 838849 - RNA, 19 nt, Artificial Sequence
  Description of Artificial Sequence: Synthetic oligonucleotide
  Antisense strand to SEQ ID NO: 838848
uccuugauuagagacgcag

SEQ ID NO: 838850 - RNA, 19 nt, Artificial Sequence
  Description of Artificial Sequence: Synthetic oligonucleotide
  Sense strand starting at position 1461 of SEQ ID NO: 588055
ccaggucuuuaaccaagga

SEQ ID NO: 838851 - RNA, 19 nt, Artificial Sequence
  Description of Artificial Sequence: Synthetic oligonucleotide
  Antisense strand to SEQ ID NO: 838850
uccuugguuaaagaccugg

SEQ ID NO: 838852 - RNA, 19 nt, Artificial Sequence
  Description of Artificial Sequence: Synthetic oligonucleotide
  Sense strand starting at position 1465 of SEQ ID NO: 588055
gucuuuaaccaaggaggca

SEQ ID NO: 838853 - RNA, 19 nt, Artificial Sequence
  Description of Artificial Sequence: Synthetic oligonucleotide
  Antisense strand to SEQ ID NO: 838852
ugccuccuugguuaaagac

SEQ ID NO: 838854 - RNA, 19 nt, Artificial Sequence
  Description of Artificial Sequence: Synthetic oligonucleotide
  Sense strand starting at position 1753 of SEQ ID NO: 588055
cagcguuccugccaggagu

SEQ ID NO: 838855 - RNA, 19 nt, Artificial Sequence
  Description of Artificial Sequence: Synthetic oligonucleotide
  Antisense strand to SEQ ID NO: 838854
acuccuggcaggaacgcug

SEQ ID NO: 838856 - RNA, 19 nt, Artificial Sequence
  Description of Artificial Sequence: Synthetic oligonucleotide
  Sense strand starting at position 1851 of SEQ ID NO: 588055
aaacucgcaucgggagaau

SEQ ID NO: 838857 - RNA, 19 nt, Artificial Sequence
  Description of Artificial Sequence: Synthetic oligonucleotide
  Antisense strand to SEQ ID NO: 838856
auucucccgaugcgaguuu

SEQ ID NO: 838858 - RNA, 19 nt, Artificial Sequence
  Description of Artificial Sequence: Synthetic oligonucleotide
  Sense strand starting at position 1860 of SEQ ID NO: 588055
ucgggagaauuaccucgua

SEQ ID NO: 838859 - RNA, 19 nt, Artificial Sequence
  Description of Artificial Sequence: Synthetic oligonucleotide
  Antisense strand to SEQ ID NO: 838858
uacgagguaauucucccga

SEQ ID NO: 838860 - RNA, 19 nt, Artificial Sequence
  Description of Artificial Sequence: Synthetic oligonucleotide
  Sense strand starting at position 1863 of SEQ ID NO: 588055
ggagaauuaccucguaaac

SEQ ID NO: 838861 - RNA, 19 nt, Artificial Sequence
  Description of Artificial Sequence: Synthetic oligonucleotide
  Antisense strand to SEQ ID NO: 838860
guuuacgagguaauucucc

SEQ ID NO: 838862 - RNA, 19 nt, Artificial Sequence
  Description of Artificial Sequence: Synthetic oligonucleotide
  Sense strand starting at position 1865 of SEQ ID NO: 588055
agaauuaccucguaaaccu

SEQ ID NO: 838863 - RNA, 19 nt, Artificial Sequence
  Description of Artificial Sequence: Synthetic oligonucleotide
  Antisense strand to SEQ ID NO: 838862
agguuuacgagguaauucu

SEQ ID NO: 838864 - RNA, 19 nt, Artificial Sequence
  Description of Artificial Sequence: Synthetic oligonucleotide
  Sense strand starting at position 2008 of SEQ ID NO: 588055
gcccuaccauccuaguuau

SEQ ID NO: 838865 - RNA, 19 nt, Artificial Sequence
  Description of Artificial Sequence: Synthetic oligonucleotide
  Antisense strand to SEQ ID NO: 838864
auaacuaggaugguagggc

SEQ ID NO: 838866 - RNA, 19 nt, Artificial Sequence
  Description of Artificial Sequence: Synthetic oligonucleotide
  Sense strand starting at position 2048 of SEQ ID NO: 588055
cgcgcuucucuccaauaca

SEQ ID NO: 838867 - RNA, 19 nt, Artificial Sequence
  Description of Artificial Sequence: Synthetic oligonucleotide
  Antisense strand to SEQ ID NO: 838866
uguauuggagagaagcgcg

SEQ ID NO: 838868 - RNA, 19 nt, Artificial Sequence
  Description of Artificial Sequence: Synthetic oligonucleotide
  Sense strand starting at position 2112 of SEQ ID NO: 588055
ggcucugauuggcccagaa

SEQ ID NO: 838869 - RNA, 19 nt, Artificial Sequence
  Description of Artificial Sequence: Synthetic oligonucleotide
  Antisense strand to SEQ ID NO: 838868
uucugggccaaucagagcc

SEQ ID NO: 838870 - RNA, 19 nt, Artificial Sequence
  Description of Artificial Sequence: Synthetic oligonucleotide
  Sense strand starting at position 2114 of SEQ ID NO: 588055
cucugauuggcccagaaug

SEQ ID NO: 838871 - RNA, 19 nt, Artificial Sequence
  Description of Artificial Sequence: Synthetic oligonucleotide
  Antisense strand to SEQ ID NO: 838870
cauucugggccaaucagag

SEQ ID NO: 838872 - RNA, 19 nt, Artificial Sequence
  Description of Artificial Sequence: Synthetic oligonucleotide
  Sense strand starting at position 2286 of SEQ ID NO: 588055
aaacuuggacucuacguau

SEQ ID NO: 838873 - RNA, 19 nt, Artificial Sequence
  Description of Artificial Sequence: Synthetic oligonucleotide
  Antisense strand to SEQ ID NO: 838872
auacguagaguccaaguuu

SEQ ID NO: 838874 - RNA, 19 nt, Artificial Sequence
  Description of Artificial Sequence: Synthetic oligonucleotide
  Sense strand starting at position 2332 of SEQ ID NO: 588055
gcugccaucagucaggaaa

SEQ ID NO: 838875 - RNA, 19 nt, Artificial Sequence
  Description of Artificial Sequence: Synthetic oligonucleotide
  Antisense strand to SEQ ID NO: 838874
uuuccugacugauggcagc

SEQ ID NO: 838876 - RNA, 19 nt, Artificial Sequence
  Description of Artificial Sequence: Synthetic oligonucleotide
  Sense strand starting at position 2334 of SEQ ID NO: 588055
ugccaucagucaggaaacu

SEQ ID NO: 838877 - RNA, 19 nt, Artificial Sequence
  Description of Artificial Sequence: Synthetic oligonucleotide
  Antisense strand to SEQ ID NO: 838876
aguuuccugacugauggca

SEQ ID NO: 838878 - RNA, 19 nt, Artificial Sequence
  Description of Artificial Sequence: Synthetic oligonucleotide
  Sense strand starting at position 2335 of SEQ ID NO: 588055
gccaucagucaggaaacua

SEQ ID NO: 838879 - RNA, 19 nt, Artificial Sequence
  Description of Artificial Sequence: Synthetic oligonucleotide
  Antisense strand to SEQ ID NO: 838878
uaguuuccugacugauggc

SEQ ID NO: 838880 - RNA, 19 nt, Artificial Sequence
  Description of Artificial Sequence: Synthetic oligonucleotide
  Sense strand starting at position 2512 of SEQ ID NO: 588055
gccacaucuggcuaauugu

SEQ ID NO: 838881 - RNA, 19 nt, Artificial Sequence
  Description of Artificial Sequence: Synthetic oligonucleotide
  Antisense strand to SEQ ID NO: 838880
acaauuagccagauguggc

SEQ ID NO: 838882 - RNA, 19 nt, Artificial Sequence
  Description of Artificial Sequence: Synthetic oligonucleotide
  Sense strand starting at position 3336 of SEQ ID NO: 588055
uuaacaugcucagugcuga

SEQ ID NO: 838883 - RNA, 19 nt, Artificial Sequence
  Description of Artificial Sequence: Synthetic oligonucleotide
  Antisense strand to SEQ ID NO: 838882
ucagcacugagcauguuaa

SEQ ID NO: 838884 - RNA, 19 nt, Artificial Sequence
  Description of Artificial Sequence: Synthetic oligonucleotide
  Sense strand starting at position 3340 of SEQ ID NO: 588055
caugcucagugcugagcaa

SEQ ID NO: 838885 - RNA, 19 nt, Artificial Sequence
  Description of Artificial Sequence: Synthetic oligonucleotide
  Antisense strand to SEQ ID NO: 838884
uugcucagcacugagcaug

SEQ ID NO: 838886 - RNA, 19 nt, Artificial Sequence
  Description of Artificial Sequence: Synthetic oligonucleotide
  Sense strand starting at position 3702 of SEQ ID NO: 588055
agcugagugagcugagauc

SEQ ID NO: 838887 - RNA, 19 nt, Artificial Sequence
  Description of Artificial Sequence: Synthetic oligonucleotide
  Antisense strand to SEQ ID NO: 838886
gaucucagcucacucagcu

SEQ ID NO: 838888 - RNA, 19 nt, Artificial Sequence
  Description of Artificial Sequence: Synthetic oligonucleotide
  Sense strand starting at position 3902 of SEQ ID NO: 588055
ccaguagucuugcuaaaga

SEQ ID NO: 838889 - RNA, 19 nt, Artificial Sequence
  Description of Artificial Sequence: Synthetic oligonucleotide
  Antisense strand to SEQ ID NO: 838888
ucuuuagcaagacuacugg

SEQ ID NO: 838890 - RNA, 19 nt, Artificial Sequence
  Description of Artificial Sequence: Synthetic oligonucleotide
  Sense strand starting at position 3913 of SEQ ID NO: 588055
gcuaaagaauucugaacua

SEQ ID NO: 838891 - RNA, 19 nt, Artificial Sequence
  Description of Artificial Sequence: Synthetic oligonucleotide
  Antisense strand to SEQ ID NO: 838890
uaguucagaauucuuuagc

SEQ ID NO: 838892 - RNA, 19 nt, Artificial Sequence
  Description of Artificial Sequence: Synthetic oligonucleotide
  Sense strand starting at position 29 of SEQ ID NO: 588056
uuucuuucugaguguuaac

SEQ ID NO: 838893 - RNA, 19 nt, Artificial Sequence
  Description of Artificial Sequence: Synthetic oligonucleotide
  Antisense strand to SEQ ID NO: 838892
guuaacacucagaaagaaa

SEQ ID NO: 838894 - RNA, 19 nt, Artificial Sequence
  Description of Artificial Sequence: Synthetic oligonucleotide
  Sense strand starting at position 46 of SEQ ID NO: 588056
acagcaucgucuuuacagu

SEQ ID NO: 838895 - RNA, 19 nt, Artificial Sequence
  Description of Artificial Sequence: Synthetic oligonucleotide
  Antisense strand to SEQ ID NO: 838894
acuguaaagacgaugcugu

SEQ ID NO: 838896 - RNA, 19 nt, Artificial Sequence
  Description of Artificial Sequence: Synthetic oligonucleotide
  Sense strand starting at position 47 of SEQ ID NO: 588056
cagcaucgucuuuacaguu

SEQ ID NO: 838897 - RNA, 19 nt, Artificial Sequence
  Description of Artificial Sequence: Synthetic oligonucleotide
  Antisense strand to SEQ ID NO: 838896
aacuguaaagacgaugcug

SEQ ID NO: 838898 - RNA, 19 nt, Artificial Sequence
  Description of Artificial Sequence: Synthetic oligonucleotide
  Sense strand starting at position 620 of SEQ ID NO: 588056
cgggucuccugacccaaua

SEQ ID NO: 838899 - RNA, 19 nt, Artificial Sequence
  Description of Artificial Sequence: Synthetic oligonucleotide
  Antisense strand to SEQ ID NO: 838898
uauugggucaggagacccg

SEQ ID NO: 838900 - RNA, 19 nt, Artificial Sequence
  Description of Artificial Sequence: Synthetic oligonucleotide
  Sense strand starting at position 875 of SEQ ID NO: 588056
acugguaggcucggaagau

SEQ ID NO: 838901 - RNA, 19 nt, Artificial Sequence
  Description of Artificial Sequence: Synthetic oligonucleotide
  Antisense strand to SEQ ID NO: 838900
aucuuccgagccuaccagu

SEQ ID NO: 838902 - RNA, 19 nt, Artificial Sequence
  Description of Artificial Sequence: Synthetic oligonucleotide
  Sense strand starting at position 1033 of SEQ ID NO: 588056
ugagccaagcccuauucua

SEQ ID NO: 838903 - RNA, 19 nt, Artificial Sequence
  Description of Artificial Sequence: Synthetic oligonucleotide
  Antisense strand to SEQ ID NO: 838902
uagaauagggcuuggcuca

SEQ ID NO: 838904 - RNA, 19 nt, Artificial Sequence
  Description of Artificial Sequence: Synthetic oligonucleotide
  Sense strand starting at position 1154 of SEQ ID NO: 588056
guguaaaguugaccucucu

SEQ ID NO: 838905 - RNA, 19 nt, Artificial Sequence
  Description of Artificial Sequence: Synthetic oligonucleotide
  Antisense strand to SEQ ID NO: 838904
agagaggucaacuuuacac

SEQ ID NO: 838906 - RNA, 19 nt, Artificial Sequence
  Description of Artificial Sequence: Synthetic oligonucleotide
  Sense strand starting at position 1160 of SEQ ID NO: 588056
aguugaccucucugaacuu

SEQ ID NO: 838907 - RNA, 19 nt, Artificial Sequence
  Description of Artificial Sequence: Synthetic oligonucleotide
  Antisense strand to SEQ ID NO: 838906
aaguucagagaggucaacu

SEQ ID NO: 838908 - RNA, 19 nt, Artificial Sequence
  Description of Artificial Sequence: Synthetic oligonucleotide
  Sense strand starting at position 1208 of SEQ ID NO: 588056
uagaguucucaagagagcu

SEQ ID NO: 838909 - RNA, 19 nt, Artificial Sequence
  Description of Artificial Sequence: Synthetic oligonucleotide
  Antisense strand to SEQ ID NO: 838908
agcucucuugagaacucua

SEQ ID NO: 838910 - RNA, 19 nt, Artificial Sequence
  Description of Artificial Sequence: Synthetic oligonucleotide
  Sense strand starting at position 1243 of SEQ ID NO: 588056
uaagucagugcccaaaugu

SEQ ID NO: 838911 - RNA, 19 nt, Artificial Sequence
  Description of Artificial Sequence: Synthetic oligonucleotide
  Antisense strand to SEQ ID NO: 838910
acauuugggcacugacuua

SEQ ID NO: 838912 - RNA, 19 nt, Artificial Sequence
  Description of Artificial Sequence: Synthetic oligonucleotide
  Sense strand starting at position 1270 of SEQ ID NO: 588056
gugguaauuacaggugaag

SEQ ID NO: 838913 - RNA, 19 nt, Artificial Sequence
  Description of Artificial Sequence: Synthetic oligonucleotide
  Antisense strand to SEQ ID NO: 838912
cuucaccuguaauuaccac

SEQ ID NO: 838914 - RNA, 19 nt, Artificial Sequence
  Description of Artificial Sequence: Synthetic oligonucleotide
  Sense strand starting at position 1272 of SEQ ID NO: 588056
gguaauuacaggugaagga

SEQ ID NO: 838915 - RNA, 19 nt, Artificial Sequence
  Description of Artificial Sequence: Synthetic oligonucleotide
  Antisense strand to SEQ ID NO: 838914
uccuucaccuguaauuacc

SEQ ID NO: 838916 - RNA, 19 nt, Artificial Sequence
  Description of Artificial Sequence: Synthetic oligonucleotide
  Sense strand starting at position 1319 of SEQ ID NO: 588056
ccgggugucaaguggaaga

SEQ ID NO: 838917 - RNA, 19 nt, Artificial Sequence
  Description of Artificial Sequence: Synthetic oligonucleotide
  Antisense strand to SEQ ID NO: 838916
ucuuccacuugacacccgg

SEQ ID NO: 838918 - RNA, 19 nt, Artificial Sequence
  Description of Artificial Sequence: Synthetic oligonucleotide
  Sense strand starting at position 1385 of SEQ ID NO: 588056
guacucauuucgccaagga

SEQ ID NO: 838919 - RNA, 19 nt, Artificial Sequence
  Description of Artificial Sequence: Synthetic oligonucleotide
  Antisense strand to SEQ ID NO: 838918
uccuuggcgaaaugaguac

SEQ ID NO: 838920 - RNA, 19 nt, Artificial Sequence
  Description of Artificial Sequence: Synthetic oligonucleotide
  Sense strand starting at position 1519 of SEQ ID NO: 588056
cacccauugccguggaaac

SEQ ID NO: 838921 - RNA, 19 nt, Artificial Sequence
  Description of Artificial Sequence: Synthetic oligonucleotide
  Antisense strand to SEQ ID NO: 838920
guuuccacggcaaugggug

SEQ ID NO: 838922 - RNA, 19 nt, Artificial Sequence
  Description of Artificial Sequence: Synthetic oligonucleotide
  Sense strand starting at position 1954 of SEQ ID NO: 588056
gcgaaucugcggcauccaa

SEQ ID NO: 838923 - RNA, 19 nt, Artificial Sequence
  Description of Artificial Sequence: Synthetic oligonucleotide
  Antisense strand to SEQ ID NO: 838922
uuggaugccgcagauucgc

SEQ ID NO: 838924 - RNA, 19 nt, Artificial Sequence
  Description of Artificial Sequence: Synthetic oligonucleotide
  Sense strand starting at position 2373 of SEQ ID NO: 588056
aguuuacugauguguccau

SEQ ID NO: 838925 - RNA, 19 nt, Artificial Sequence
  Description of Artificial Sequence: Synthetic oligonucleotide
  Antisense strand to SEQ ID NO: 838924
auggacacaucaguaaacu

SEQ ID NO: 838926 - RNA, 19 nt, Artificial Sequence
  Description of Artificial Sequence: Synthetic oligonucleotide
  Sense strand starting at position 2648 of SEQ ID NO: 588056
guggaaauuuaaugacuuu

SEQ ID NO: 838927 - RNA, 19 nt, Artificial Sequence
  Description of Artificial Sequence: Synthetic oligonucleotide
  Antisense strand to SEQ ID NO: 838926
aaagucauuaaauuuccac

SEQ ID NO: 838928 - RNA, 19 nt, Artificial Sequence
  Description of Artificial Sequence: Synthetic oligonucleotide
  Sense strand starting at position 2687 of SEQ ID NO: 588056
gguguuuagcuccaacacu

SEQ ID NO: 838929 - RNA, 19 nt, Artificial Sequence
  Description of Artificial Sequence: Synthetic oligonucleotide
  Antisense strand to SEQ ID NO: 838928
aguguuggagcuaaacacc

SEQ ID NO: 838930 - RNA, 19 nt, Artificial Sequence
  Description of Artificial Sequence: Synthetic oligonucleotide
  Sense strand starting at position 2707 of SEQ ID NO: 588056
uaguccucggcucaaauga

SEQ ID NO: 838931 - RNA, 19 nt, Artificial Sequence
  Description of Artificial Sequence: Synthetic oligonucleotide
  Antisense strand to SEQ ID NO: 838930
ucauuugagccgaggacua

SEQ ID NO: 838932 - RNA, 19 nt, Artificial Sequence
  Description of Artificial Sequence: Synthetic oligonucleotide
  Sense strand starting at position 2873 of SEQ ID NO: 588056
caaacugagccugacaguu

SEQ ID NO: 838933 - RNA, 19 nt, Artificial Sequence
  Description of Artificial Sequence: Synthetic oligonucleotide
  Antisense strand to SEQ ID NO: 838932
aacugucaggcucaguuug

SEQ ID NO: 838934 - RNA, 19 nt, Artificial Sequence
  Description of Artificial Sequence: Synthetic oligonucleotide
  Sense strand starting at position 2902 of SEQ ID NO: 588056
ugaguaaugaguugaugug

SEQ ID NO: 838935 - RNA, 19 nt, Artificial Sequence
  Description of Artificial Sequence: Synthetic oligonucleotide
  Antisense strand to SEQ ID NO: 838934
cacaucaacucauuacuca

SEQ ID NO: 838936 - RNA, 19 nt, Artificial Sequence
  Description of Artificial Sequence: Synthetic oligonucleotide
  Sense strand starting at position 2914 of SEQ ID NO: 588056
ugaugugguccauguucua

SEQ ID NO: 838937 - RNA, 19 nt, Artificial Sequence
  Description of Artificial Sequence: Synthetic oligonucleotide
  Antisense strand to SEQ ID NO: 838936
uagaacauggaccacauca

SEQ ID NO: 838938 - RNA, 19 nt, Artificial Sequence
  Description of Artificial Sequence: Synthetic oligonucleotide
  Sense strand starting at position 3190 of SEQ ID NO: 588056
uuugguugcugcucaacau

SEQ ID NO: 838939 - RNA, 19 nt, Artificial Sequence
  Description of Artificial Sequence: Synthetic oligonucleotide
  Antisense strand to SEQ ID NO: 838938
auguugagcagcaaccaaa

SEQ ID NO: 838940 - RNA, 19 nt, Artificial Sequence
  Description of Artificial Sequence: Synthetic oligonucleotide
  Sense strand starting at position 3194 of SEQ ID NO: 588056
guugcugcucaacaugaaa

SEQ ID NO: 838941 - RNA, 19 nt, Artificial Sequence
  Description of Artificial Sequence: Synthetic oligonucleotide
  Antisense strand to SEQ ID NO: 838940
uuucauguugagcagcaac

SEQ ID NO: 838942 - RNA, 19 nt, Artificial Sequence
  Description of Artificial Sequence: Synthetic oligonucleotide
  Sense strand starting at position 3283 of SEQ ID NO: 588056
ccacuucucuguuugcaca

SEQ ID NO: 838943 - RNA, 19 nt, Artificial Sequence
  Description of Artificial Sequence: Synthetic oligonucleotide
  Antisense strand to SEQ ID NO: 838942
ugugcaaacagagaagugg

SEQ ID NO: 838944 - RNA, 19 nt, Artificial Sequence
  Description of Artificial Sequence: Synthetic oligonucleotide
  Sense strand starting at position 3372 of SEQ ID NO: 588056
ccuguugcauagucauauu

SEQ ID NO: 838945 - RNA, 19 nt, Artificial Sequence
  Description of Artificial Sequence: Synthetic oligonucleotide
  Antisense strand to SEQ ID NO: 838944
aauaugacuaugcaacagg

SEQ ID NO: 838946 - RNA, 19 nt, Artificial Sequence
  Description of Artificial Sequence: Synthetic oligonucleotide
  Sense strand starting at position 3459 of SEQ ID NO: 588056
caggaugacucaucugauu

SEQ ID NO: 838947 - RNA, 19 nt, Artificial Sequence
  Description of Artificial Sequence: Synthetic oligonucleotide
  Antisense strand to SEQ ID NO: 838946
aaucagaugagucauccug

SEQ ID NO: 838948 - RNA, 19 nt, Artificial Sequence
  Description of Artificial Sequence: Synthetic oligonucleotide
  Sense strand starting at position 3471 of SEQ ID NO: 588056
ucugauuucucaggagacu

SEQ ID NO: 838949 - RNA, 19 nt, Artificial Sequence
  Description of Artificial Sequence: Synthetic oligonucleotide
  Antisense strand to SEQ ID NO: 838948
agucuccugagaaaucaga

SEQ ID NO: 838950 - RNA, 19 nt, Artificial Sequence
  Description of Artificial Sequence: Synthetic oligonucleotide
  Sense strand starting at position 3505 of SEQ ID NO: 588056
aacccuguucuugggaaau

SEQ ID NO: 838951 - RNA, 19 nt, Artificial Sequence
  Description of Artificial Sequence: Synthetic oligonucleotide
  Antisense strand to SEQ ID NO: 838950
auuucccaagaacaggguu

SEQ ID NO: 838952 - RNA, 19 nt, Artificial Sequence
  Description of Artificial Sequence: Synthetic oligonucleotide
  Sense strand starting at position 3547 of SEQ ID NO: 588056
aguuguccagucuguuaaa

SEQ ID NO: 838953 - RNA, 19 nt, Artificial Sequence
  Description of Artificial Sequence: Synthetic oligonucleotide
  Antisense strand to SEQ ID NO: 838952
uuuaacagacuggacaacu

SEQ ID NO: 838954 - RNA, 19 nt, Artificial Sequence
  Description of Artificial Sequence: Synthetic oligonucleotide
  Sense strand starting at position 3548 of SEQ ID NO: 588056
guuguccagucuguuaaau

SEQ ID NO: 838955 - RNA, 19 nt, Artificial Sequence
  Description of Artificial Sequence: Synthetic oligonucleotide
  Antisense strand to SEQ ID NO: 838954
auuuaacagacuggacaac

SEQ ID NO: 838956 - RNA, 19 nt, Artificial Sequence
  Description of Artificial Sequence: Synthetic oligonucleotide
  Sense strand starting at position 3606 of SEQ ID NO: 588056
ccucgcaaucuggaagguu

SEQ ID NO: 838957 - RNA, 19 nt, Artificial Sequence
  Description of Artificial Sequence: Synthetic oligonucleotide
  Antisense strand to SEQ ID NO: 838956
aaccuuccagauugcgagg

SEQ ID NO: 838958 - RNA, 19 nt, Artificial Sequence
  Description of Artificial Sequence: Synthetic oligonucleotide
  Sense strand starting at position 3618 of SEQ ID NO: 588056
gaagguuaaguugggcaau

SEQ ID NO: 838959 - RNA, 19 nt, Artificial Sequence
  Description of Artificial Sequence: Synthetic oligonucleotide
  Antisense strand to SEQ ID NO: 838958
auugcccaacuuaaccuuc

SEQ ID NO: 838960 - RNA, 19 nt, Artificial Sequence
  Description of Artificial Sequence: Synthetic oligonucleotide
  Sense strand starting at position 3620 of SEQ ID NO: 588056
agguuaaguugggcaauau

SEQ ID NO: 838961 - RNA, 19 nt, Artificial Sequence
  Description of Artificial Sequence: Synthetic oligonucleotide
  Antisense strand to SEQ ID NO: 838960
auauugcccaacuuaaccu

SEQ ID NO: 838962 - RNA, 19 nt, Artificial Sequence
  Description of Artificial Sequence: Synthetic oligonucleotide
  Sense strand starting at position 3624 of SEQ ID NO: 588056
uaaguugggcaauaugauu

SEQ ID NO: 838963 - RNA, 19 nt, Artificial Sequence
  Description of Artificial Sequence: Synthetic oligonucleotide
  Antisense strand to SEQ ID NO: 838962
aaucauauugcccaacuua

SEQ ID NO: 838964 - RNA, 19 nt, Artificial Sequence
  Description of Artificial Sequence: Synthetic oligonucleotide
  Sense strand starting at position 3629 of SEQ ID NO: 588056
ugggcaauaugauuauugu

SEQ ID NO: 838965 - RNA, 19 nt, Artificial Sequence
  Description of Artificial Sequence: Synthetic oligonucleotide
  Antisense strand to SEQ ID NO: 838964
acaauaaucauauugccca

SEQ ID NO: 838966 - RNA, 19 nt, Artificial Sequence
  Description of Artificial Sequence: Synthetic oligonucleotide
  Sense strand starting at position 3672 of SEQ ID NO: 588056
uguucagaguggucaaaug

SEQ ID NO: 838967 - RNA, 19 nt, Artificial Sequence
  Description of Artificial Sequence: Synthetic oligonucleotide
  Antisense strand to SEQ ID NO: 838966
cauuugaccacucugaaca

SEQ ID NO: 838968 - RNA, 19 nt, Artificial Sequence
  Description of Artificial Sequence: Synthetic oligonucleotide
  Sense strand starting at position 3684 of SEQ ID NO: 588056
ucaaauggcuuucugagau

SEQ ID NO: 838969 - RNA, 19 nt, Artificial Sequence
  Description of Artificial Sequence: Synthetic oligonucleotide
  Antisense strand to SEQ ID NO: 838968
aucucagaaagccauuuga

SEQ ID NO: 838970 - RNA, 19 nt, Artificial Sequence
  Description of Artificial Sequence: Synthetic oligonucleotide
  Sense strand starting at position 3868 of SEQ ID NO: 588056
cguccuccaccacaagaua

SEQ ID NO: 838971 - RNA, 19 nt, Artificial Sequence
  Description of Artificial Sequence: Synthetic oligonucleotide
  Antisense strand to SEQ ID NO: 838970
uaucuugugguggaggacg

SEQ ID NO: 838972 - RNA, 19 nt, Artificial Sequence
  Description of Artificial Sequence: Synthetic oligonucleotide
  Sense strand starting at position 50 of SEQ ID NO: 588057
ccguguuugcgaucugaac

SEQ ID NO: 838973 - RNA, 19 nt, Artificial Sequence
  Description of Artificial Sequence: Synthetic oligonucleotide
  Antisense strand to SEQ ID NO: 838972
guucagaucgcaaacacgg

SEQ ID NO: 838974 - RNA, 19 nt, Artificial Sequence
  Description of Artificial Sequence: Synthetic oligonucleotide
  Sense strand starting at position 285 of SEQ ID NO: 588057
agggaaccuucuguaacuu

SEQ ID NO: 838975 - RNA, 19 nt, Artificial Sequence
  Description of Artificial Sequence: Synthetic oligonucleotide
  Antisense strand to SEQ ID NO: 838974
aaguuacagaagguucccu

SEQ ID NO: 838976 - RNA, 19 nt, Artificial Sequence
  Description of Artificial Sequence: Synthetic oligonucleotide
  Sense strand starting at position 327 of SEQ ID NO: 588057
acaauuccaugagagauuu

SEQ ID NO: 838977 - RNA, 19 nt, Artificial Sequence
  Description of Artificial Sequence: Synthetic oligonucleotide
  Antisense strand to SEQ ID NO: 838976
aaaucucucauggaauugu

SEQ ID NO: 838978 - RNA, 19 nt, Artificial Sequence
  Description of Artificial Sequence: Synthetic oligonucleotide
  Sense strand starting at position 468 of SEQ ID NO: 588057
gcacuugaugcuuggagaa

SEQ ID NO: 838979 - RNA, 19 nt, Artificial Sequence
  Description of Artificial Sequence: Synthetic oligonucleotide
  Antisense strand to SEQ ID NO: 838978
uucuccaagcaucaagugc

SEQ ID NO: 838980 - RNA, 19 nt, Artificial Sequence
  Description of Artificial Sequence: Synthetic oligonucleotide
  Sense strand starting at position 536 of SEQ ID NO: 588057
cgaagaaugaaucgguucu

SEQ ID NO: 838981 - RNA, 19 nt, Artificial Sequence
  Description of Artificial Sequence: Synthetic oligonucleotide
  Antisense strand to SEQ ID NO: 838980
agaaccgauucauucuucg

SEQ ID NO: 838982 - RNA, 19 nt, Artificial Sequence
  Description of Artificial Sequence: Synthetic oligonucleotide
  Sense strand starting at position 538 of SEQ ID NO: 588057
aagaaugaaucgguucuca

SEQ ID NO: 838983 - RNA, 19 nt, Artificial Sequence
  Description of Artificial Sequence: Synthetic oligonucleotide
  Antisense strand to SEQ ID NO: 838982
ugagaaccgauucauucuu

SEQ ID NO: 838984 - RNA, 19 nt, Artificial Sequence
  Description of Artificial Sequence: Synthetic oligonucleotide
  Sense strand starting at position 1567 of SEQ ID NO: 588057
aucaaagauugugcaagau

SEQ ID NO: 838985 - RNA, 19 nt, Artificial Sequence
  Description of Artificial Sequence: Synthetic oligonucleotide
  Antisense strand to SEQ ID NO: 838984
aucuugcacaaucuuugau

SEQ ID NO: 838986 - RNA, 19 nt, Artificial Sequence
  Description of Artificial Sequence: Synthetic oligonucleotide
  Sense strand starting at position 1579 of SEQ ID NO: 588057
gcaagaucaggcuggaaag

SEQ ID NO: 838987 - RNA, 19 nt, Artificial Sequence
  Description of Artificial Sequence: Synthetic oligonucleotide
  Antisense strand to SEQ ID NO: 838986
cuuuccagccugaucuugc

SEQ ID NO: 838988 - RNA, 19 nt, Artificial Sequence
  Description of Artificial Sequence: Synthetic oligonucleotide
  Sense strand starting at position 2035 of SEQ ID NO: 588057
gucuauucccgauaugcac

SEQ ID NO: 838989 - RNA, 19 nt, Artificial Sequence
  Description of Artificial Sequence: Synthetic oligonucleotide
  Antisense strand to SEQ ID NO: 838988
gugcauaucgggaauagac

SEQ ID NO: 838990 - RNA, 19 nt, Artificial Sequence
  Description of Artificial Sequence: Synthetic oligonucleotide
  Sense strand starting at position 2044 of SEQ ID NO: 588057
cgauaugcacucugggaau

SEQ ID NO: 838991 - RNA, 19 nt, Artificial Sequence
  Description of Artificial Sequence: Synthetic oligonucleotide
  Antisense strand to SEQ ID NO: 838990
auucccagagugcauaucg

SEQ ID NO: 838992 - RNA, 19 nt, Artificial Sequence
  Description of Artificial Sequence: Synthetic oligonucleotide
  Sense strand starting at position 2046 of SEQ ID NO: 588057
auaugcacucugggaauga

SEQ ID NO: 838993 - RNA, 19 nt, Artificial Sequence
  Description of Artificial Sequence: Synthetic oligonucleotide
  Antisense strand to SEQ ID NO: 838992
ucauucccagagugcauau

SEQ ID NO: 838994 - RNA, 19 nt, Artificial Sequence
  Description of Artificial Sequence: Synthetic oligonucleotide
  Sense strand starting at position 2109 of SEQ ID NO: 588057
gguguaauuagugagguga

SEQ ID NO: 838995 - RNA, 19 nt, Artificial Sequence
  Description of Artificial Sequence: Synthetic oligonucleotide
  Antisense strand to SEQ ID NO: 838994
ucaccucacuaauuacacc

SEQ ID NO: 838996 - RNA, 19 nt, Artificial Sequence
  Description of Artificial Sequence: Synthetic oligonucleotide
  Sense strand starting at position 2404 of SEQ ID NO: 588057
cuuuaaccauucgagauuu

SEQ ID NO: 838997 - RNA, 19 nt, Artificial Sequence
  Description of Artificial Sequence: Synthetic oligonucleotide
  Antisense strand to SEQ ID NO: 838996
aaaucucgaaugguuaaag

SEQ ID NO: 838998 - RNA, 19 nt, Artificial Sequence
  Description of Artificial Sequence: Synthetic oligonucleotide
  Sense strand starting at position 2438 of SEQ ID NO: 588057
gaggcaaaguaauuauuau

SEQ ID NO: 838999 - RNA, 19 nt, Artificial Sequence
  Description of Artificial Sequence: Synthetic oligonucleotide
  Antisense strand to SEQ ID NO: 838998
auaauaauuacuuugccuc

SEQ ID NO: 839000 - RNA, 19 nt, Artificial Sequence
  Description of Artificial Sequence: Synthetic oligonucleotide
  Sense strand starting at position 2446 of SEQ ID NO: 588057
guaauuauuaucggaccag

SEQ ID NO: 839001 - RNA, 19 nt, Artificial Sequence
  Description of Artificial Sequence: Synthetic oligonucleotide
  Antisense strand to SEQ ID NO: 839000
cugguccgauaauaauuac

SEQ ID NO: 839002 - RNA, 19 nt, Artificial Sequence
  Description of Artificial Sequence: Synthetic oligonucleotide
  Sense strand starting at position 2465 of SEQ ID NO: 588057
agauuuguuuacuagggag

SEQ ID NO: 839003 - RNA, 19 nt, Artificial Sequence
  Description of Artificial Sequence: Synthetic oligonucleotide
  Antisense strand to SEQ ID NO: 839002
cucccuaguaaacaaaucu

SEQ ID NO: 839004 - RNA, 19 nt, Artificial Sequence
  Description of Artificial Sequence: Synthetic oligonucleotide
  Sense strand starting at position 2533 of SEQ ID NO: 588057
guuuauucugcugugcaca

SEQ ID NO: 839005 - RNA, 19 nt, Artificial Sequence
  Description of Artificial Sequence: Synthetic oligonucleotide
  Antisense strand to SEQ ID NO: 839004
ugugcacagcagaauaaac

SEQ ID NO: 839006 - RNA, 19 nt, Artificial Sequence
  Description of Artificial Sequence: Synthetic oligonucleotide
  Sense strand starting at position 2538 of SEQ ID NO: 588057
uucugcugugcacaugaau

SEQ ID NO: 839007 - RNA, 19 nt, Artificial Sequence
  Description of Artificial Sequence: Synthetic oligonucleotide
  Antisense strand to SEQ ID NO: 839006
auucaugugcacagcagaa

SEQ ID NO: 839008 - RNA, 19 nt, Artificial Sequence
  Description of Artificial Sequence: Synthetic oligonucleotide
  Sense strand starting at position 2714 of SEQ ID NO: 588057
cuuguauacgcaggagaga

SEQ ID NO: 839009 - RNA, 19 nt, Artificial Sequence
  Description of Artificial Sequence: Synthetic oligonucleotide
  Antisense strand to SEQ ID NO: 839008
ucucuccugcguauacaag

SEQ ID NO: 839010 - RNA, 19 nt, Artificial Sequence
  Description of Artificial Sequence: Synthetic oligonucleotide
  Sense strand starting at position 2750 of SEQ ID NO: 588057
gauggaagcgguuagucaa

SEQ ID NO: 839011 - RNA, 19 nt, Artificial Sequence
  Description of Artificial Sequence: Synthetic oligonucleotide
  Antisense strand to SEQ ID NO: 839010
uugacuaaccgcuuccauc

SEQ ID NO: 839012 - RNA, 19 nt, Artificial Sequence
  Description of Artificial Sequence: Synthetic oligonucleotide
  Sense strand starting at position 2753 of SEQ ID NO: 588057
ggaagcgguuagucaaaga

SEQ ID NO: 839013 - RNA, 19 nt, Artificial Sequence
  Description of Artificial Sequence: Synthetic oligonucleotide
  Antisense strand to SEQ ID NO: 839012
ucuuugacuaaccgcuucc

SEQ ID NO: 839014 - RNA, 19 nt, Artificial Sequence
  Description of Artificial Sequence: Synthetic oligonucleotide
  Sense strand starting at position 2788 of SEQ ID NO: 588057
auaagugacgguugcaaga

SEQ ID NO: 839015 - RNA, 19 nt, Artificial Sequence
  Description of Artificial Sequence: Synthetic oligonucleotide
  Antisense strand to SEQ ID NO: 839014
ucuugcaaccgucacuuau

SEQ ID NO: 839016 - RNA, 19 nt, Artificial Sequence
  Description of Artificial Sequence: Synthetic oligonucleotide
  Sense strand starting at position 2827 of SEQ ID NO: 588057
aguucuagccuuuauguaa

SEQ ID NO: 839017 - RNA, 19 nt, Artificial Sequence
  Description of Artificial Sequence: Synthetic oligonucleotide
  Antisense strand to SEQ ID NO: 839016
uuacauaaaggcuagaacu

SEQ ID NO: 839018 - RNA, 19 nt, Artificial Sequence
  Description of Artificial Sequence: Synthetic oligonucleotide
  Sense strand starting at position 2862 of SEQ ID NO: 588057
aucagaauugcauaaguuc

SEQ ID NO: 839019 - RNA, 19 nt, Artificial Sequence
  Description of Artificial Sequence: Synthetic oligonucleotide
  Antisense strand to SEQ ID NO: 839018
gaacuuaugcaauucugau

SEQ ID NO: 839020 - RNA, 19 nt, Artificial Sequence
  Description of Artificial Sequence: Synthetic oligonucleotide
  Sense strand starting at position 2938 of SEQ ID NO: 588057
ugaguuaucuuucuugaag

SEQ ID NO: 839021 - RNA, 19 nt, Artificial Sequence
  Description of Artificial Sequence: Synthetic oligonucleotide
  Antisense strand to SEQ ID NO: 839020
cuucaagaaagauaacuca

SEQ ID NO: 839022 - RNA, 19 nt, Artificial Sequence
  Description of Artificial Sequence: Synthetic oligonucleotide
  Sense strand starting at position 2939 of SEQ ID NO: 588057
gaguuaucuuucuugaagc

SEQ ID NO: 839023 - RNA, 19 nt, Artificial Sequence
  Description of Artificial Sequence: Synthetic oligonucleotide
  Antisense strand to SEQ ID NO: 839022
gcuucaagaaagauaacuc

SEQ ID NO: 839024 - RNA, 19 nt, Artificial Sequence
  Description of Artificial Sequence: Synthetic oligonucleotide
  Sense strand starting at position 2955 of SEQ ID NO: 588057
agcacauuaugaugaauuu

SEQ ID NO: 839025 - RNA, 19 nt, Artificial Sequence
  Description of Artificial Sequence: Synthetic oligonucleotide
  Antisense strand to SEQ ID NO: 839024
aaauucaucauaaugugcu

SEQ ID NO: 839026 - RNA, 19 nt, Artificial Sequence
  Description of Artificial Sequence: Synthetic oligonucleotide
  Sense strand starting at position 3089 of SEQ ID NO: 588057
ugugaauaugagugacacu

SEQ ID NO: 839027 - RNA, 19 nt, Artificial Sequence
  Description of Artificial Sequence: Synthetic oligonucleotide
  Antisense strand to SEQ ID NO: 839026
agugucacucauauucaca

SEQ ID NO: 839028 - RNA, 19 nt, Artificial Sequence
  Description of Artificial Sequence: Synthetic oligonucleotide
  Sense strand starting at position 3161 of SEQ ID NO: 588057
ccuacugaauuuggaauau

SEQ ID NO: 839029 - RNA, 19 nt, Artificial Sequence
  Description of Artificial Sequence: Synthetic oligonucleotide
  Antisense strand to SEQ ID NO: 839028
auauuccaaauucaguagg

SEQ ID NO: 839030 - RNA, 19 nt, Artificial Sequence
  Description of Artificial Sequence: Synthetic oligonucleotide
  Sense strand starting at position 3267 of SEQ ID NO: 588057
ugcacuucgcacuacuaua

SEQ ID NO: 839031 - RNA, 19 nt, Artificial Sequence
  Description of Artificial Sequence: Synthetic oligonucleotide
  Antisense strand to SEQ ID NO: 839030
uauaguagugcgaagugca

SEQ ID NO: 839032 - RNA, 19 nt, Artificial Sequence
  Description of Artificial Sequence: Synthetic oligonucleotide
  Sense strand starting at position 3418 of SEQ ID NO: 588057
gugucagcugccuuugagu

SEQ ID NO: 839033 - RNA, 19 nt, Artificial Sequence
  Description of Artificial Sequence: Synthetic oligonucleotide
  Antisense strand to SEQ ID NO: 839032
acucaaaggcagcugacac

SEQ ID NO: 839034 - RNA, 19 nt, Artificial Sequence
  Description of Artificial Sequence: Synthetic oligonucleotide
  Sense strand starting at position 3436 of SEQ ID NO: 588057
uugacaggccuuugaaguu

SEQ ID NO: 839035 - RNA, 19 nt, Artificial Sequence
  Description of Artificial Sequence: Synthetic oligonucleotide
  Antisense strand to SEQ ID NO: 839034
aacuucaaaggccugucaa

SEQ ID NO: 839036 - RNA, 19 nt, Artificial Sequence
  Description of Artificial Sequence: Synthetic oligonucleotide
  Sense strand starting at position 3525 of SEQ ID NO: 588057
aaagauuuaucgcacaagu

SEQ ID NO: 839037 - RNA, 19 nt, Artificial Sequence
  Description of Artificial Sequence: Synthetic oligonucleotide
  Antisense strand to SEQ ID NO: 839036
acuugugcgauaaaucuuu

SEQ ID NO: 839038 - RNA, 19 nt, Artificial Sequence
  Description of Artificial Sequence: Synthetic oligonucleotide
  Sense strand starting at position 3570 of SEQ ID NO: 588057
ugcaucuuuccaggccaaa

SEQ ID NO: 839039 - RNA, 19 nt, Artificial Sequence
  Description of Artificial Sequence: Synthetic oligonucleotide
  Antisense strand to SEQ ID NO: 839038
uuuggccuggaaagaugca

SEQ ID NO: 839040 - RNA, 19 nt, Artificial Sequence
  Description of Artificial Sequence: Synthetic oligonucleotide
  Sense strand starting at position 3593 of SEQ ID NO: 588057
uugcauuaucagggaacgu

SEQ ID NO: 839041 - RNA, 19 nt, Artificial Sequence
  Description of Artificial Sequence: Synthetic oligonucleotide
  Antisense strand to SEQ ID NO: 839040
acguucccugauaaugcaa

SEQ ID NO: 839042 - RNA, 19 nt, Artificial Sequence
  Description of Artificial Sequence: Synthetic oligonucleotide
  Sense strand starting at position 3594 of SEQ ID NO: 588057
ugcauuaucagggaacguu

SEQ ID NO: 839043 - RNA, 19 nt, Artificial Sequence
  Description of Artificial Sequence: Synthetic oligonucleotide
  Antisense strand to SEQ ID NO: 839042
aacguucccugauaaugca

SEQ ID NO: 839044 - RNA, 19 nt, Artificial Sequence
  Description of Artificial Sequence: Synthetic oligonucleotide
  Sense strand starting at position 3879 of SEQ ID NO: 588057
acuaaauguuaacagaaag

SEQ ID NO: 839045 - RNA, 19 nt, Artificial Sequence
  Description of Artificial Sequence: Synthetic oligonucleotide
  Antisense strand to SEQ ID NO: 839044
cuuucuguuaacauuuagu

SEQ ID NO: 839046 - RNA, 19 nt, Artificial Sequence
  Description of Artificial Sequence: Synthetic oligonucleotide
  Sense strand starting at position 3932 of SEQ ID NO: 588057
uuuaaacuucuuugggaag

SEQ ID NO: 839047 - RNA, 19 nt, Artificial Sequence
  Description of Artificial Sequence: Synthetic oligonucleotide
  Antisense strand to SEQ ID NO: 839046
cuucccaaagaaguuuaaa

SEQ ID NO: 839048 - RNA, 19 nt, Artificial Sequence
  Description of Artificial Sequence: Synthetic oligonucleotide
  Sense strand starting at position 3947 of SEQ ID NO: 588057
gaagaaauuuguugaaagu

SEQ ID NO: 839049 - RNA, 19 nt, Artificial Sequence
  Description of Artificial Sequence: Synthetic oligonucleotide
  Antisense strand to SEQ ID NO: 839048
acuuucaacaaauuucuuc

SEQ ID NO: 839050 - RNA, 19 nt, Artificial Sequence
  Description of Artificial Sequence: Synthetic oligonucleotide
  Sense strand starting at position 3964 of SEQ ID NO: 588057
guggaaagcuuucuaacau

SEQ ID NO: 839051 - RNA, 19 nt, Artificial Sequence
  Description of Artificial Sequence: Synthetic oligonucleotide
  Antisense strand to SEQ ID NO: 839050
auguuagaaagcuuuccac

SEQ ID NO: 839052 - RNA, 19 nt, Artificial Sequence
  Description of Artificial Sequence: Synthetic oligonucleotide
  Sense strand starting at position 487 of SEQ ID NO: 588058
gcagucuccuuaugcgaca

SEQ ID NO: 839053 - RNA, 19 nt, Artificial Sequence
  Description of Artificial Sequence: Synthetic oligonucleotide
  Antisense strand to SEQ ID NO: 839052
ugucgcauaaggagacugc

SEQ ID NO: 839054 - RNA, 19 nt, Artificial Sequence
  Description of Artificial Sequence: Synthetic oligonucleotide
  Sense strand starting at position 517 of SEQ ID NO: 588058
aggcgaggaucguaucuuu

SEQ ID NO: 839055 - RNA, 19 nt, Artificial Sequence
  Description of Artificial Sequence: Synthetic oligonucleotide
  Antisense strand to SEQ ID NO: 839054
aaagauacgauccucgccu

SEQ ID NO: 839056 - RNA, 19 nt, Artificial Sequence
  Description of Artificial Sequence: Synthetic oligonucleotide
  Sense strand starting at position 1040 of SEQ ID NO: 588058
cggauuggaccauagcgau

SEQ ID NO: 839057 - RNA, 19 nt, Artificial Sequence
  Description of Artificial Sequence: Synthetic oligonucleotide
  Antisense strand to SEQ ID NO: 839056
aucgcuaugguccaauccg

SEQ ID NO: 839058 - RNA, 19 nt, Artificial Sequence
  Description of Artificial Sequence: Synthetic oligonucleotide
  Sense strand starting at position 2495 of SEQ ID NO: 588058
cugggagacuugucccuga

SEQ ID NO: 839059 - RNA, 19 nt, Artificial Sequence
  Description of Artificial Sequence: Synthetic oligonucleotide
  Antisense strand to SEQ ID NO: 839058
ucagggacaagucucccag

SEQ ID NO: 839060 - RNA, 19 nt, Artificial Sequence
  Description of Artificial Sequence: Synthetic oligonucleotide
  Sense strand starting at position 2498 of SEQ ID NO: 588058
ggagacuugucccugagga

SEQ ID NO: 839061 - RNA, 19 nt, Artificial Sequence
  Description of Artificial Sequence: Synthetic oligonucleotide
  Antisense strand to SEQ ID NO: 839060
uccucagggacaagucucc

SEQ ID NO: 839062 - RNA, 19 nt, Artificial Sequence
  Description of Artificial Sequence: Synthetic oligonucleotide
  Sense strand starting at position 2499 of SEQ ID NO: 588058
gagacuugucccugaggac

SEQ ID NO: 839063 - RNA, 19 nt, Artificial Sequence
  Description of Artificial Sequence: Synthetic oligonucleotide
  Antisense strand to SEQ ID NO: 839062
guccucagggacaagucuc

SEQ ID NO: 839064 - RNA, 19 nt, Artificial Sequence
  Description of Artificial Sequence: Synthetic oligonucleotide
  Sense strand starting at position 2871 of SEQ ID NO: 588058
gcguguuaguucccuacgu

SEQ ID NO: 839065 - RNA, 19 nt, Artificial Sequence
  Description of Artificial Sequence: Synthetic oligonucleotide
  Antisense strand to SEQ ID NO: 839064
acguagggaacuaacacgc

SEQ ID NO: 839066 - RNA, 19 nt, Artificial Sequence
  Description of Artificial Sequence: Synthetic oligonucleotide
  Sense strand starting at position 2872 of SEQ ID NO: 588058
cguguuaguucccuacgua

SEQ ID NO: 839067 - RNA, 19 nt, Artificial Sequence
  Description of Artificial Sequence: Synthetic oligonucleotide
  Antisense strand to SEQ ID NO: 839066
uacguagggaacuaacacg

SEQ ID NO: 839068 - RNA, 19 nt, Artificial Sequence
  Description of Artificial Sequence: Synthetic oligonucleotide
  Sense strand starting at position 2873 of SEQ ID NO: 588058
guguuaguucccuacguac

SEQ ID NO: 839069 - RNA, 19 nt, Artificial Sequence
  Description of Artificial Sequence: Synthetic oligonucleotide
  Antisense strand to SEQ ID NO: 839068
guacguagggaacuaacac

SEQ ID NO: 839070 - RNA, 19 nt, Artificial Sequence
  Description of Artificial Sequence: Synthetic oligonucleotide
  Sense strand starting at position 2891 of SEQ ID NO: 588058
ccgcaaauuggguguccua

SEQ ID NO: 839071 - RNA, 19 nt, Artificial Sequence
  Description of Artificial Sequence: Synthetic oligonucleotide
  Antisense strand to SEQ ID NO: 839070
uaggacacccaauuugcgg

SEQ ID NO: 839072 - RNA, 19 nt, Artificial Sequence
  Description of Artificial Sequence: Synthetic oligonucleotide
  Sense strand starting at position 2912 of SEQ ID NO: 588058
acgacauccgccuauuauc

SEQ ID NO: 839073 - RNA, 19 nt, Artificial Sequence
  Description of Artificial Sequence: Synthetic oligonucleotide
  Antisense strand to SEQ ID NO: 839072
gauaauaggcggaugucgu

SEQ ID NO: 839074 - RNA, 19 nt, Artificial Sequence
  Description of Artificial Sequence: Synthetic oligonucleotide
  Sense strand starting at position 2920 of SEQ ID NO: 588058
cgccuauuaucucaaggcu

SEQ ID NO: 839075 - RNA, 19 nt, Artificial Sequence
  Description of Artificial Sequence: Synthetic oligonucleotide
  Antisense strand to SEQ ID NO: 839074
agccuugagauaauaggcg

SEQ ID NO: 839076 - RNA, 19 nt, Artificial Sequence
  Description of Artificial Sequence: Synthetic oligonucleotide
  Sense strand starting at position 2934 of SEQ ID NO: 588058
aggcuucugugggccagaa

SEQ ID NO: 839077 - RNA, 19 nt, Artificial Sequence
  Description of Artificial Sequence: Synthetic oligonucleotide
  Antisense strand to SEQ ID NO: 839076
uucuggcccacagaagccu

SEQ ID NO: 839078 - RNA, 19 nt, Artificial Sequence
  Description of Artificial Sequence: Synthetic oligonucleotide
  Sense strand starting at position 3037 of SEQ ID NO: 588058
ucaugcgauugcuggcaga

SEQ ID NO: 839079 - RNA, 19 nt, Artificial Sequence
  Description of Artificial Sequence: Synthetic oligonucleotide
  Antisense strand to SEQ ID NO: 839078
ucugccagcaaucgcauga

SEQ ID NO: 839080 - RNA, 19 nt, Artificial Sequence
  Description of Artificial Sequence: Synthetic oligonucleotide
  Sense strand starting at position 3040 of SEQ ID NO: 588058
ugcgauugcuggcagaagu

SEQ ID NO: 839081 - RNA, 19 nt, Artificial Sequence
  Description of Artificial Sequence: Synthetic oligonucleotide
  Antisense strand to SEQ ID NO: 839080
acuucugccagcaaucgca

SEQ ID NO: 839082 - RNA, 19 nt, Artificial Sequence
  Description of Artificial Sequence: Synthetic oligonucleotide
  Sense strand starting at position 3041 of SEQ ID NO: 588058
gcgauugcuggcagaaguc

SEQ ID NO: 839083 - RNA, 19 nt, Artificial Sequence
  Description of Artificial Sequence: Synthetic oligonucleotide
  Antisense strand to SEQ ID NO: 839082
gacuucugccagcaaucgc

SEQ ID NO: 839084 - RNA, 19 nt, Artificial Sequence
  Description of Artificial Sequence: Synthetic oligonucleotide
  Sense strand starting at position 3201 of SEQ ID NO: 588058
gauggaguccuguggaaca

SEQ ID NO: 839085 - RNA, 19 nt, Artificial Sequence
  Description of Artificial Sequence: Synthetic oligonucleotide
  Antisense strand to SEQ ID NO: 839084
uguuccacaggacuccauc

SEQ ID NO: 839086 - RNA, 19 nt, Artificial Sequence
  Description of Artificial Sequence: Synthetic oligonucleotide
  Sense strand starting at position 3221 of SEQ ID NO: 588058
aaccuaauugugggugaca

SEQ ID NO: 839087 - RNA, 19 nt, Artificial Sequence
  Description of Artificial Sequence: Synthetic oligonucleotide
  Antisense strand to SEQ ID NO: 839086
ugucacccacaauuagguu

SEQ ID NO: 839088 - RNA, 19 nt, Artificial Sequence
  Description of Artificial Sequence: Synthetic oligonucleotide
  Sense strand starting at position 3222 of SEQ ID NO: 588058
accuaauugugggugacau

SEQ ID NO: 839089 - RNA, 19 nt, Artificial Sequence
  Description of Artificial Sequence: Synthetic oligonucleotide
  Antisense strand to SEQ ID NO: 839088
augucacccacaauuaggu

SEQ ID NO: 839090 - RNA, 19 nt, Artificial Sequence
  Description of Artificial Sequence: Synthetic oligonucleotide
  Sense strand starting at position 3223 of SEQ ID NO: 588058
ccuaauugugggugacaug

SEQ ID NO: 839091 - RNA, 19 nt, Artificial Sequence
  Description of Artificial Sequence: Synthetic oligonucleotide
  Antisense strand to SEQ ID NO: 839090
caugucacccacaauuagg

SEQ ID NO: 839092 - RNA, 19 nt, Artificial Sequence
  Description of Artificial Sequence: Synthetic oligonucleotide
  Sense strand starting at position 3325 of SEQ ID NO: 588058
uggcacaucuccuuaggau

SEQ ID NO: 839093 - RNA, 19 nt, Artificial Sequence
  Description of Artificial Sequence: Synthetic oligonucleotide
  Antisense strand to SEQ ID NO: 839092
auccuaaggagaugugcca

SEQ ID NO: 839094 - RNA, 19 nt, Artificial Sequence
  Description of Artificial Sequence: Synthetic oligonucleotide
  Sense strand starting at position 3326 of SEQ ID NO: 588058
ggcacaucuccuuaggaua

SEQ ID NO: 839095 - RNA, 19 nt, Artificial Sequence
  Description of Artificial Sequence: Synthetic oligonucleotide
  Antisense strand to SEQ ID NO: 839094
uauccuaaggagaugugcc

SEQ ID NO: 839096 - RNA, 19 nt, Artificial Sequence
  Description of Artificial Sequence: Synthetic oligonucleotide
  Sense strand starting at position 3337 of SEQ ID NO: 588058
uuaggauaucugcagcauu

SEQ ID NO: 839097 - RNA, 19 nt, Artificial Sequence
  Description of Artificial Sequence: Synthetic oligonucleotide
  Antisense strand to SEQ ID NO: 839096
aaugcugcagauauccuaa

SEQ ID NO: 839098 - RNA, 19 nt, Artificial Sequence
  Description of Artificial Sequence: Synthetic oligonucleotide
  Sense strand starting at position 66 of SEQ ID NO: 588059
uguuuagaugaaugugacu

SEQ ID NO: 839099 - RNA, 19 nt, Artificial Sequence
  Description of Artificial Sequence: Synthetic oligonucleotide
  Antisense strand to SEQ ID NO: 839098
agucacauucaucuaaaca

SEQ ID NO: 839100 - RNA, 19 nt, Artificial Sequence
  Description of Artificial Sequence: Synthetic oligonucleotide
  Sense strand starting at position 71 of SEQ ID NO: 588059
agaugaaugugacucaguu

SEQ ID NO: 839101 - RNA, 19 nt, Artificial Sequence
  Description of Artificial Sequence: Synthetic oligonucleotide
  Antisense strand to SEQ ID NO: 839100
aacugagucacauucaucu

SEQ ID NO: 839102 - RNA, 19 nt, Artificial Sequence
  Description of Artificial Sequence: Synthetic oligonucleotide
  Sense strand starting at position 594 of SEQ ID NO: 588059
gcagucuccuuaugcgaca

SEQ ID NO: 839103 - RNA, 19 nt, Artificial Sequence
  Description of Artificial Sequence: Synthetic oligonucleotide
  Antisense strand to SEQ ID NO: 839102
ugucgcauaaggagacugc

SEQ ID NO: 839104 - RNA, 19 nt, Artificial Sequence
  Description of Artificial Sequence: Synthetic oligonucleotide
  Sense strand starting at position 624 of SEQ ID NO: 588059
aggcgaggaucguaucuuu

SEQ ID NO: 839105 - RNA, 19 nt, Artificial Sequence
  Description of Artificial Sequence: Synthetic oligonucleotide
  Antisense strand to SEQ ID NO: 839104
aaagauacgauccucgccu

SEQ ID NO: 839106 - RNA, 19 nt, Artificial Sequence
  Description of Artificial Sequence: Synthetic oligonucleotide
  Sense strand starting at position 1147 of SEQ ID NO: 588059
cggauuggaccauagcgau

SEQ ID NO: 839107 - RNA, 19 nt, Artificial Sequence
  Description of Artificial Sequence: Synthetic oligonucleotide
  Antisense strand to SEQ ID NO: 839106
aucgcuaugguccaauccg

SEQ ID NO: 839108 - RNA, 19 nt, Artificial Sequence
  Description of Artificial Sequence: Synthetic oligonucleotide
  Sense strand starting at position 2602 of SEQ ID NO: 588059
cugggagacuugucccuga

SEQ ID NO: 839109 - RNA, 19 nt, Artificial Sequence
  Description of Artificial Sequence: Synthetic oligonucleotide
  Antisense strand to SEQ ID NO: 839108
ucagggacaagucucccag

SEQ ID NO: 839110 - RNA, 19 nt, Artificial Sequence
  Description of Artificial Sequence: Synthetic oligonucleotide
  Sense strand starting at position 2605 of SEQ ID NO: 588059
ggagacuugucccugagga

SEQ ID NO: 839111 - RNA, 19 nt, Artificial Sequence
  Description of Artificial Sequence: Synthetic oligonucleotide
  Antisense strand to SEQ ID NO: 839110
uccucagggacaagucucc

SEQ ID NO: 839112 - RNA, 19 nt, Artificial Sequence
  Description of Artificial Sequence: Synthetic oligonucleotide
  Sense strand starting at position 2606 of SEQ ID NO: 588059
gagacuugucccugaggac

SEQ ID NO: 839113 - RNA, 19 nt, Artificial Sequence
  Description of Artificial Sequence: Synthetic oligonucleotide
  Antisense strand to SEQ ID NO: 839112
guccucagggacaagucuc

SEQ ID NO: 839114 - RNA, 19 nt, Artificial Sequence
  Description of Artificial Sequence: Synthetic oligonucleotide
  Sense strand starting at position 2978 of SEQ ID NO: 588059
gcguguuaguucccuacgu

SEQ ID NO: 839115 - RNA, 19 nt, Artificial Sequence
  Description of Artificial Sequence: Synthetic oligonucleotide
  Antisense strand to SEQ ID NO: 839114
acguagggaacuaacacgc

SEQ ID NO: 839116 - RNA, 19 nt, Artificial Sequence
  Description of Artificial Sequence: Synthetic oligonucleotide
  Sense strand starting at position 2979 of SEQ ID NO: 588059
cguguuaguucccuacgua

SEQ ID NO: 839117 - RNA, 19 nt, Artificial Sequence
  Description of Artificial Sequence: Synthetic oligonucleotide
  Antisense strand to SEQ ID NO: 839116
uacguagggaacuaacacg

SEQ ID NO: 839118 - RNA, 19 nt, Artificial Sequence
  Description of Artificial Sequence: Synthetic oligonucleotide
  Sense strand starting at position 2980 of SEQ ID NO: 588059
guguuaguucccuacguac

SEQ ID NO: 839119 - RNA, 19 nt, Artificial Sequence
  Description of Artificial Sequence: Synthetic oligonucleotide
  Antisense strand to SEQ ID NO: 839118
guacguagggaacuaacac

SEQ ID NO: 839120 - RNA, 19 nt, Artificial Sequence
  Description of Artificial Sequence: Synthetic oligonucleotide
  Sense strand starting at position 2998 of SEQ ID NO: 588059
ccgcaaauuggguguccua

SEQ ID NO: 839121 - RNA, 19 nt, Artificial Sequence
  Description of Artificial Sequence: Synthetic oligonucleotide
  Antisense strand to SEQ ID NO: 839120
uaggacacccaauuugcgg

SEQ ID NO: 839122 - RNA, 19 nt, Artificial Sequence
  Description of Artificial Sequence: Synthetic oligonucleotide
  Sense strand starting at position 3019 of SEQ ID NO: 588059
acgacauccgccuauuauc

SEQ ID NO: 839123 - RNA, 19 nt, Artificial Sequence
  Description of Artificial Sequence: Synthetic oligonucleotide
  Antisense strand to SEQ ID NO: 839122
gauaauaggcggaugucgu

SEQ ID NO: 839124 - RNA, 19 nt, Artificial Sequence
  Description of Artificial Sequence: Synthetic oligonucleotide
  Sense strand starting at position 3027 of SEQ ID NO: 588059
cgccuauuaucucaaggcu

SEQ ID NO: 839125 - RNA, 19 nt, Artificial Sequence
  Description of Artificial Sequence: Synthetic oligonucleotide
  Antisense strand to SEQ ID NO: 839124
agccuugagauaauaggcg

SEQ ID NO: 839126 - RNA, 19 nt, Artificial Sequence
  Description of Artificial Sequence: Synthetic oligonucleotide
  Sense strand starting at position 3041 of SEQ ID NO: 588059
aggcuucugugggccagaa

SEQ ID NO: 839127 - RNA, 19 nt, Artificial Sequence
  Description of Artificial Sequence: Synthetic oligonucleotide
  Antisense strand to SEQ ID NO: 839126
uucuggcccacagaagccu

SEQ ID NO: 839128 - RNA, 19 nt, Artificial Sequence
  Description of Artificial Sequence: Synthetic oligonucleotide
  Sense strand starting at position 3144 of SEQ ID NO: 588059
ucaugcgauugcuggcaga

SEQ ID NO: 839129 - RNA, 19 nt, Artificial Sequence
  Description of Artificial Sequence: Synthetic oligonucleotide
  Antisense strand to SEQ ID NO: 839128
ucugccagcaaucgcauga

SEQ ID NO: 839130 - RNA, 19 nt, Artificial Sequence
  Description of Artificial Sequence: Synthetic oligonucleotide
  Sense strand starting at position 3147 of SEQ ID NO: 588059
ugcgauugcuggcagaagu

SEQ ID NO: 839131 - RNA, 19 nt, Artificial Sequence
  Description of Artificial Sequence: Synthetic oligonucleotide
  Antisense strand to SEQ ID NO: 839130
acuucugccagcaaucgca

SEQ ID NO: 839132 - RNA, 19 nt, Artificial Sequence
  Description of Artificial Sequence: Synthetic oligonucleotide
  Sense strand starting at position 3148 of SEQ ID NO: 588059
gcgauugcuggcagaaguc

SEQ ID NO: 839133 - RNA, 19 nt, Artificial Sequence
  Description of Artificial Sequence: Synthetic oligonucleotide
  Antisense strand to SEQ ID NO: 839132
gacuucugccagcaaucgc

SEQ ID NO: 839134 - RNA, 19 nt, Artificial Sequence
  Description of Artificial Sequence: Synthetic oligonucleotide
  Sense strand starting at position 3308 of SEQ ID NO: 588059
gauggaguccuguggaaca

SEQ ID NO: 839135 - RNA, 19 nt, Artificial Sequence
  Description of Artificial Sequence: Synthetic oligonucleotide
  Antisense strand to SEQ ID NO: 839134
uguuccacaggacuccauc

SEQ ID NO: 839136 - RNA, 19 nt, Artificial Sequence
  Description of Artificial Sequence: Synthetic oligonucleotide
  Sense strand starting at position 3328 of SEQ ID NO: 588059
aaccuaauugugggugaca

SEQ ID NO: 839137 - RNA, 19 nt, Artificial Sequence
  Description of Artificial Sequence: Synthetic oligonucleotide
  Antisense strand to SEQ ID NO: 839136
ugucacccacaauuagguu

SEQ ID NO: 839138 - RNA, 19 nt, Artificial Sequence
  Description of Artificial Sequence: Synthetic oligonucleotide
  Sense strand starting at position 3329 of SEQ ID NO: 588059
accuaauugugggugacau

SEQ ID NO: 839139 - RNA, 19 nt, Artificial Sequence
  Description of Artificial Sequence: Synthetic oligonucleotide
  Antisense strand to SEQ ID NO: 839138
augucacccacaauuaggu

SEQ ID NO: 839140 - RNA, 19 nt, Artificial Sequence
  Description of Artificial Sequence: Synthetic oligonucleotide
  Sense strand starting at position 3330 of SEQ ID NO: 588059
ccuaauugugggugacaug

SEQ ID NO: 839141 - RNA, 19 nt, Artificial Sequence
  Description of Artificial Sequence: Synthetic oligonucleotide
  Antisense strand to SEQ ID NO: 839140
caugucacccacaauuagg

SEQ ID NO: 839142 - RNA, 19 nt, Artificial Sequence
  Description of Artificial Sequence: Synthetic oligonucleotide
  Sense strand starting at position 3432 of SEQ ID NO: 588059
uggcacaucuccuuaggau

SEQ ID NO: 839143 - RNA, 19 nt, Artificial Sequence
  Description of Artificial Sequence: Synthetic oligonucleotide
  Antisense strand to SEQ ID NO: 839142
auccuaaggagaugugcca

SEQ ID NO: 839144 - RNA, 19 nt, Artificial Sequence
  Description of Artificial Sequence: Synthetic oligonucleotide
  Sense strand starting at position 3433 of SEQ ID NO: 588059
ggcacaucuccuuaggaua

SEQ ID NO: 839145 - RNA, 19 nt, Artificial Sequence
  Description of Artificial Sequence: Synthetic oligonucleotide
  Antisense strand to SEQ ID NO: 839144
uauccuaaggagaugugcc

SEQ ID NO: 839146 - RNA, 19 nt, Artificial Sequence
  Description of Artificial Sequence: Synthetic oligonucleotide
  Sense strand starting at position 3444 of SEQ ID NO: 588059
uuaggauaucugcagcauu

SEQ ID NO: 839147 - RNA, 19 nt, Artificial Sequence
  Description of Artificial Sequence: Synthetic oligonucleotide
  Antisense strand to SEQ ID NO: 839146
aaugcugcagauauccuaa

SEQ ID NO: 839148 - RNA, 19 nt, Artificial Sequence
  Description of Artificial Sequence: Synthetic oligonucleotide
  Sense strand starting at position 114 of SEQ ID NO: 588060
agaguagcaucagcaauua

SEQ ID NO: 839149 - RNA, 19 nt, Artificial Sequence
  Description of Artificial Sequence: Synthetic oligonucleotide
  Antisense strand to SEQ ID NO: 839148
uaauugcugaugcuacucu

SEQ ID NO: 839150 - RNA, 19 nt, Artificial Sequence
  Description of Artificial Sequence: Synthetic oligonucleotide
  Sense strand starting at position 240 of SEQ ID NO: 588060
ggucuugugccauacaauc

SEQ ID NO: 839151 - RNA, 19 nt, Artificial Sequence
  Description of Artificial Sequence: Synthetic oligonucleotide
  Antisense strand to SEQ ID NO: 839150
gauuguauggcacaagacc

SEQ ID NO: 839152 - RNA, 19 nt, Artificial Sequence
  Description of Artificial Sequence: Synthetic oligonucleotide
  Sense strand starting at position 289 of SEQ ID NO: 588060
aggugacagccaugaacua

SEQ ID NO: 839153 - RNA, 19 nt, Artificial Sequence
  Description of Artificial Sequence: Synthetic oligonucleotide
  Antisense strand to SEQ ID NO: 839152
uaguucauggcugucaccu

SEQ ID NO: 839154 - RNA, 19 nt, Artificial Sequence
  Description of Artificial Sequence: Synthetic oligonucleotide
  Sense strand starting at position 397 of SEQ ID NO: 588060
cugaucaauugaguccuaa

SEQ ID NO: 839155 - RNA, 19 nt, Artificial Sequence
  Description of Artificial Sequence: Synthetic oligonucleotide
  Antisense strand to SEQ ID NO: 839154
uuaggacucaauugaucag

SEQ ID NO: 839156 - RNA, 19 nt, Artificial Sequence
  Description of Artificial Sequence: Synthetic oligonucleotide
  Sense strand starting at position 475 of SEQ ID NO: 588060
aaacgauaucgcuacuuga

SEQ ID NO: 839157 - RNA, 19 nt, Artificial Sequence
  Description of Artificial Sequence: Synthetic oligonucleotide
  Antisense strand to SEQ ID NO: 839156
ucaaguagcgauaucguuu

SEQ ID NO: 839158 - RNA, 19 nt, Artificial Sequence
  Description of Artificial Sequence: Synthetic oligonucleotide
  Sense strand starting at position 478 of SEQ ID NO: 588060
cgauaucgcuacuugauua

SEQ ID NO: 839159 - RNA, 19 nt, Artificial Sequence
  Description of Artificial Sequence: Synthetic oligonucleotide
  Antisense strand to SEQ ID NO: 839158
uaaucaaguagcgauaucg

SEQ ID NO: 839160 - RNA, 19 nt, Artificial Sequence
  Description of Artificial Sequence: Synthetic oligonucleotide
  Sense strand starting at position 544 of SEQ ID NO: 588060
guugcauagagugagaacu

SEQ ID NO: 839161 - RNA, 19 nt, Artificial Sequence
  Description of Artificial Sequence: Synthetic oligonucleotide
  Antisense strand to SEQ ID NO: 839160
aguucucacucuaugcaac

SEQ ID NO: 839162 - RNA, 19 nt, Artificial Sequence
  Description of Artificial Sequence: Synthetic oligonucleotide
  Sense strand starting at position 599 of SEQ ID NO: 588060
gaaagucauguuuaaguag

SEQ ID NO: 839163 - RNA, 19 nt, Artificial Sequence
  Description of Artificial Sequence: Synthetic oligonucleotide
  Antisense strand to SEQ ID NO: 839162
cuacuuaaacaugacuuuc

SEQ ID NO: 839164 - RNA, 19 nt, Artificial Sequence
  Description of Artificial Sequence: Synthetic oligonucleotide
  Sense strand starting at position 683 of SEQ ID NO: 588060
guugauaacuguuuauaac

SEQ ID NO: 839165 - RNA, 19 nt, Artificial Sequence
  Description of Artificial Sequence: Synthetic oligonucleotide
  Antisense strand to SEQ ID NO: 839164
guuauaaacaguuaucaac

SEQ ID NO: 839166 - RNA, 19 nt, Artificial Sequence
  Description of Artificial Sequence: Synthetic oligonucleotide
  Sense strand starting at position 784 of SEQ ID NO: 588060
gggcgaguaugguuaauaa

SEQ ID NO: 839167 - RNA, 19 nt, Artificial Sequence
  Description of Artificial Sequence: Synthetic oligonucleotide
  Antisense strand to SEQ ID NO: 839166
uuauuaaccauacucgccc

SEQ ID NO: 839168 - RNA, 19 nt, Artificial Sequence
  Description of Artificial Sequence: Synthetic oligonucleotide
  Sense strand starting at position 813 of SEQ ID NO: 588060
aagggauacuacuaaaguc

SEQ ID NO: 839169 - RNA, 19 nt, Artificial Sequence
  Description of Artificial Sequence: Synthetic oligonucleotide
  Antisense strand to SEQ ID NO: 839168
gacuuuaguaguaucccuu

SEQ ID NO: 839170 - RNA, 19 nt, Artificial Sequence
  Description of Artificial Sequence: Synthetic oligonucleotide
  Sense strand starting at position 951 of SEQ ID NO: 588060
ggccaaagcguugaagaua

SEQ ID NO: 839171 - RNA, 19 nt, Artificial Sequence
  Description of Artificial Sequence: Synthetic oligonucleotide
  Antisense strand to SEQ ID NO: 839170
uaucuucaacgcuuuggcc

SEQ ID NO: 839172 - RNA, 19 nt, Artificial Sequence
  Description of Artificial Sequence: Synthetic oligonucleotide
  Sense strand starting at position 987 of SEQ ID NO: 588060
acgcuauuggaggaauucu

SEQ ID NO: 839173 - RNA, 19 nt, Artificial Sequence
  Description of Artificial Sequence: Synthetic oligonucleotide
  Antisense strand to SEQ ID NO: 839172
agaauuccuccaauagcgu

SEQ ID NO: 839174 - RNA, 19 nt, Artificial Sequence
  Description of Artificial Sequence: Synthetic oligonucleotide
  Sense strand starting at position 1512 of SEQ ID NO: 588060
agaaguuucuacccugguu

SEQ ID NO: 839175 - RNA, 19 nt, Artificial Sequence
  Description of Artificial Sequence: Synthetic oligonucleotide
  Antisense strand to SEQ ID NO: 839174
aaccaggguagaaacuucu

SEQ ID NO: 839176 - RNA, 19 nt, Artificial Sequence
  Description of Artificial Sequence: Synthetic oligonucleotide
  Sense strand starting at position 1537 of SEQ ID NO: 588060
agugguucccaagaguagu

SEQ ID NO: 839177 - RNA, 19 nt, Artificial Sequence
  Description of Artificial Sequence: Synthetic oligonucleotide
  Antisense strand to SEQ ID NO: 839176
acuacucuugggaaccacu

SEQ ID NO: 839178 - RNA, 19 nt, Artificial Sequence
  Description of Artificial Sequence: Synthetic oligonucleotide
  Sense strand starting at position 1548 of SEQ ID NO: 588060
agaguagucccacgucaau

SEQ ID NO: 839179 - RNA, 19 nt, Artificial Sequence
  Description of Artificial Sequence: Synthetic oligonucleotide
  Antisense strand to SEQ ID NO: 839178
auugacgugggacuacucu

SEQ ID NO: 839180 - RNA, 19 nt, Artificial Sequence
  Description of Artificial Sequence: Synthetic oligonucleotide
  Sense strand starting at position 1590 of SEQ ID NO: 588060
auaauaagcgucuaaagga

SEQ ID NO: 839181 - RNA, 19 nt, Artificial Sequence
  Description of Artificial Sequence: Synthetic oligonucleotide
  Antisense strand to SEQ ID NO: 839180
uccuuuagacgcuuauuau

SEQ ID NO: 839182 - RNA, 19 nt, Artificial Sequence
  Description of Artificial Sequence: Synthetic oligonucleotide
  Sense strand starting at position 1758 of SEQ ID NO: 588060
gccgucugucugucuauga

SEQ ID NO: 839183 - RNA, 19 nt, Artificial Sequence
  Description of Artificial Sequence: Synthetic oligonucleotide
  Antisense strand to SEQ ID NO: 839182
ucauagacagacagacggc

SEQ ID NO: 839184 - RNA, 19 nt, Artificial Sequence
  Description of Artificial Sequence: Synthetic oligonucleotide
  Sense strand starting at position 2142 of SEQ ID NO: 588060
cggauucacguucggagau

SEQ ID NO: 839185 - RNA, 19 nt, Artificial Sequence
  Description of Artificial Sequence: Synthetic oligonucleotide
  Antisense strand to SEQ ID NO: 839184
aucuccgaacgugaauccg

SEQ ID NO: 839186 - RNA, 19 nt, Artificial Sequence
  Description of Artificial Sequence: Synthetic oligonucleotide
  Sense strand starting at position 2561 of SEQ ID NO: 588060
gaggauuggcugcauccaa

SEQ ID NO: 839187 - RNA, 19 nt, Artificial Sequence
  Description of Artificial Sequence: Synthetic oligonucleotide
  Antisense strand to SEQ ID NO: 839186
uuggaugcagccaauccuc

SEQ ID NO: 839188 - RNA, 19 nt, Artificial Sequence
  Description of Artificial Sequence: Synthetic oligonucleotide
  Sense strand starting at position 2720 of SEQ ID NO: 588060
gcaguugucaccgcgucaa

SEQ ID NO: 839189 - RNA, 19 nt, Artificial Sequence
  Description of Artificial Sequence: Synthetic oligonucleotide
  Antisense strand to SEQ ID NO: 839188
uugacgcggugacaacugc

SEQ ID NO: 839190 - RNA, 19 nt, Artificial Sequence
  Description of Artificial Sequence: Synthetic oligonucleotide
  Sense strand starting at position 3245 of SEQ ID NO: 588060
gagcguuagcuagcugauu

SEQ ID NO: 839191 - RNA, 19 nt, Artificial Sequence
  Description of Artificial Sequence: Synthetic oligonucleotide
  Antisense strand to SEQ ID NO: 839190
aaucagcuagcuaacgcuc

SEQ ID NO: 839192 - RNA, 19 nt, Artificial Sequence
  Description of Artificial Sequence: Synthetic oligonucleotide
  Sense strand starting at position 3370 of SEQ ID NO: 588060
agucuucugccacagggaa

SEQ ID NO: 839193 - RNA, 19 nt, Artificial Sequence
  Description of Artificial Sequence: Synthetic oligonucleotide
  Antisense strand to SEQ ID NO: 839192
uucccuguggcagaagacu

SEQ ID NO: 839194 - RNA, 19 nt, Artificial Sequence
  Description of Artificial Sequence: Synthetic oligonucleotide
  Sense strand starting at position 3455 of SEQ ID NO: 588060
auuuaaugguucuuuagcu

SEQ ID NO: 839195 - RNA, 19 nt, Artificial Sequence
  Description of Artificial Sequence: Synthetic oligonucleotide
  Antisense strand to SEQ ID NO: 839194
agcuaaagaaccauuaaau

SEQ ID NO: 839196 - RNA, 19 nt, Artificial Sequence
  Description of Artificial Sequence: Synthetic oligonucleotide
  Sense strand starting at position 3456 of SEQ ID NO: 588060
uuuaaugguucuuuagcuu

SEQ ID NO: 839197 - RNA, 19 nt, Artificial Sequence
  Description of Artificial Sequence: Synthetic oligonucleotide
  Antisense strand to SEQ ID NO: 839196
aagcuaaagaaccauuaaa

SEQ ID NO: 839198 - RNA, 19 nt, Artificial Sequence
  Description of Artificial Sequence: Synthetic oligonucleotide
  Sense strand starting at position 3460 of SEQ ID NO: 588060
augguucuuuagcuucuaa

SEQ ID NO: 839199 - RNA, 19 nt, Artificial Sequence
  Description of Artificial Sequence: Synthetic oligonucleotide
  Antisense strand to SEQ ID NO: 839198
uuagaagcuaaagaaccau

SEQ ID NO: 839200 - RNA, 19 nt, Artificial Sequence
  Description of Artificial Sequence: Synthetic oligonucleotide
  Sense strand starting at position 3586 of SEQ ID NO: 588060
aguuaaacuguaugagguu

SEQ ID NO: 839201 - RNA, 19 nt, Artificial Sequence
  Description of Artificial Sequence: Synthetic oligonucleotide
  Antisense strand to SEQ ID NO: 839200
aaccucauacaguuuaacu

SEQ ID NO: 839202 - RNA, 19 nt, Artificial Sequence
  Description of Artificial Sequence: Synthetic oligonucleotide
  Sense strand starting at position 3592 of SEQ ID NO: 588060
acuguaugagguuagcuua

SEQ ID NO: 839203 - RNA, 19 nt, Artificial Sequence
  Description of Artificial Sequence: Synthetic oligonucleotide
  Antisense strand to SEQ ID NO: 839202
uaagcuaaccucauacagu

SEQ ID NO: 839204 - RNA, 19 nt, Artificial Sequence
  Description of Artificial Sequence: Synthetic oligonucleotide
  Sense strand starting at position 3595 of SEQ ID NO: 588060
guaugagguuagcuuauuu

SEQ ID NO: 839205 - RNA, 19 nt, Artificial Sequence
  Description of Artificial Sequence: Synthetic oligonucleotide
  Antisense strand to SEQ ID NO: 839204
aaauaagcuaaccucauac

SEQ ID NO: 839206 - RNA, 19 nt, Artificial Sequence
  Description of Artificial Sequence: Synthetic oligonucleotide
  Sense strand starting at position 3625 of SEQ ID NO: 588060
cauauacgguaaguauuaa

SEQ ID NO: 839207 - RNA, 19 nt, Artificial Sequence
  Description of Artificial Sequence: Synthetic oligonucleotide
  Antisense strand to SEQ ID NO: 839206
uuaauacuuaccguauaug

SEQ ID NO: 839208 - RNA, 19 nt, Artificial Sequence
  Description of Artificial Sequence: Synthetic oligonucleotide
  Sense strand starting at position 3691 of SEQ ID NO: 588060
gggacuagcugcuuuaugu

SEQ ID NO: 839209 - RNA, 19 nt, Artificial Sequence
  Description of Artificial Sequence: Synthetic oligonucleotide
  Antisense strand to SEQ ID NO: 839208
acauaaagcagcuaguccc

SEQ ID NO: 839210 - RNA, 19 nt, Artificial Sequence
  Description of Artificial Sequence: Synthetic oligonucleotide
  Sense strand starting at position 3783 of SEQ ID NO: 588060
gguugugaaguggaccauu

SEQ ID NO: 839211 - RNA, 19 nt, Artificial Sequence
  Description of Artificial Sequence: Synthetic oligonucleotide
  Antisense strand to SEQ ID NO: 839210
aaugguccacuucacaacc

SEQ ID NO: 839212 - RNA, 19 nt, Artificial Sequence
  Description of Artificial Sequence: Synthetic oligonucleotide
  Sense strand starting at position 3823 of SEQ ID NO: 588060
guuugcuugguugacuauu

SEQ ID NO: 839213 - RNA, 19 nt, Artificial Sequence
  Description of Artificial Sequence: Synthetic oligonucleotide
  Antisense strand to SEQ ID NO: 839212
aauagucaaccaagcaaac

SEQ ID NO: 839214 - RNA, 19 nt, Artificial Sequence
  Description of Artificial Sequence: Synthetic oligonucleotide
  Sense strand starting at position 3825 of SEQ ID NO: 588060
uugcuugguugacuauuau

SEQ ID NO: 839215 - RNA, 19 nt, Artificial Sequence
  Description of Artificial Sequence: Synthetic oligonucleotide
  Antisense strand to SEQ ID NO: 839214
auaauagucaaccaagcaa

SEQ ID NO: 839216 - RNA, 19 nt, Artificial Sequence
  Description of Artificial Sequence: Synthetic oligonucleotide
  Sense strand starting at position 3844 of SEQ ID NO: 588060
uugugugaaccacaccaaa

SEQ ID NO: 839217 - RNA, 19 nt, Artificial Sequence
  Description of Artificial Sequence: Synthetic oligonucleotide
  Antisense strand to SEQ ID NO: 839216
uuuggugugguucacacaa

SEQ ID NO: 839218 - RNA, 19 nt, Artificial Sequence
  Description of Artificial Sequence: Synthetic oligonucleotide
  Sense strand starting at position 3901 of SEQ ID NO: 588060
ugggcugauugagcauaau

SEQ ID NO: 839219 - RNA, 19 nt, Artificial Sequence
  Description of Artificial Sequence: Synthetic oligonucleotide
  Antisense strand to SEQ ID NO: 839218
auuaugcucaaucagccca

SEQ ID NO: 839220 - RNA, 19 nt, Artificial Sequence
  Description of Artificial Sequence: Synthetic oligonucleotide
  Sense strand starting at position 3904 of SEQ ID NO: 588060
gcugauugagcauaaugca

SEQ ID NO: 839221 - RNA, 19 nt, Artificial Sequence
  Description of Artificial Sequence: Synthetic oligonucleotide
  Antisense strand to SEQ ID NO: 839220
ugcauuaugcucaaucagc

SEQ ID NO: 839222 - RNA, 19 nt, Artificial Sequence
  Description of Artificial Sequence: Synthetic oligonucleotide
  Sense strand starting at position 3921 of SEQ ID NO: 588060
caagaugcucaguguguaa

SEQ ID NO: 839223 - RNA, 19 nt, Artificial Sequence
  Description of Artificial Sequence: Synthetic oligonucleotide
  Antisense strand to SEQ ID NO: 839222
uuacacacugagcaucuug

SEQ ID NO: 839224 - RNA, 19 nt, Artificial Sequence
  Description of Artificial Sequence: Synthetic oligonucleotide
  Sense strand starting at position 3923 of SEQ ID NO: 588060
agaugcucaguguguaaga

SEQ ID NO: 839225 - RNA, 19 nt, Artificial Sequence
  Description of Artificial Sequence: Synthetic oligonucleotide
  Antisense strand to SEQ ID NO: 839224
ucuuacacacugagcaucu

SEQ ID NO: 839226 - RNA, 19 nt, Artificial Sequence
  Description of Artificial Sequence: Synthetic oligonucleotide
  Sense strand starting at position 3979 of SEQ ID NO: 588060
caucuucuggaagguguaa

SEQ ID NO: 839227 - RNA, 19 nt, Artificial Sequence
  Description of Artificial Sequence: Synthetic oligonucleotide
  Antisense strand to SEQ ID NO: 839226
uuacaccuuccagaagaug

SEQ ID NO: 839228 - RNA, 19 nt, Artificial Sequence
  Description of Artificial Sequence: Synthetic oligonucleotide
  Sense strand starting at position 12 of SEQ ID NO: 588061
gagucagaauugcuacuuu

SEQ ID NO: 839229 - RNA, 19 nt, Artificial Sequence
  Description of Artificial Sequence: Synthetic oligonucleotide
  Antisense strand to SEQ ID NO: 839228
aaaguagcaauucugacuc

SEQ ID NO: 839230 - RNA, 19 nt, Artificial Sequence
  Description of Artificial Sequence: Synthetic oligonucleotide
  Sense strand starting at position 238 of SEQ ID NO: 588061
gcucuuauauauguauaca

SEQ ID NO: 839231 - RNA, 19 nt, Artificial Sequence
  Description of Artificial Sequence: Synthetic oligonucleotide
  Antisense strand to SEQ ID NO: 839230
uguauacauauauaagagc

SEQ ID NO: 839232 - RNA, 19 nt, Artificial Sequence
  Description of Artificial Sequence: Synthetic oligonucleotide
  Sense strand starting at position 327 of SEQ ID NO: 588061
ccgugaaccgcuguauauu

SEQ ID NO: 839233 - RNA, 19 nt, Artificial Sequence
  Description of Artificial Sequence: Synthetic oligonucleotide
  Antisense strand to SEQ ID NO: 839232
aauauacagcgguucacgg

SEQ ID NO: 839234 - RNA, 19 nt, Artificial Sequence
  Description of Artificial Sequence: Synthetic oligonucleotide
  Sense strand starting at position 328 of SEQ ID NO: 588061
cgugaaccgcuguauauuu

SEQ ID NO: 839235 - RNA, 19 nt, Artificial Sequence
  Description of Artificial Sequence: Synthetic oligonucleotide
  Antisense strand to SEQ ID NO: 839234
aaauauacagcgguucacg

SEQ ID NO: 839236 - RNA, 19 nt, Artificial Sequence
  Description of Artificial Sequence: Synthetic oligonucleotide
  Sense strand starting at position 394 of SEQ ID NO: 588061
agaacugcuuaaguuacau

SEQ ID NO: 839237 - RNA, 19 nt, Artificial Sequence
  Description of Artificial Sequence: Synthetic oligonucleotide
  Antisense strand to SEQ ID NO: 839236
auguaacuuaagcaguucu

SEQ ID NO: 839238 - RNA, 19 nt, Artificial Sequence
  Description of Artificial Sequence: Synthetic oligonucleotide
  Sense strand starting at position 471 of SEQ ID NO: 588061
auauuagcucuucgcauuu

SEQ ID NO: 839239 - RNA, 19 nt, Artificial Sequence
  Description of Artificial Sequence: Synthetic oligonucleotide
  Antisense strand to SEQ ID NO: 839238
aaaugcgaagagcuaauau

SEQ ID NO: 839240 - RNA, 19 nt, Artificial Sequence
  Description of Artificial Sequence: Synthetic oligonucleotide
  Sense strand starting at position 543 of SEQ ID NO: 588061
ugcucuguccgauaucuuc

SEQ ID NO: 839241 - RNA, 19 nt, Artificial Sequence
  Description of Artificial Sequence: Synthetic oligonucleotide
  Antisense strand to SEQ ID NO: 839240
gaagauaucggacagagca

SEQ ID NO: 839242 - RNA, 19 nt, Artificial Sequence
  Description of Artificial Sequence: Synthetic oligonucleotide
  Sense strand starting at position 550 of SEQ ID NO: 588061
uccgauaucuucccuguau

SEQ ID NO: 839243 - RNA, 19 nt, Artificial Sequence
  Description of Artificial Sequence: Synthetic oligonucleotide
  Antisense strand to SEQ ID NO: 839242
auacagggaagauaucgga

SEQ ID NO: 839244 - RNA, 19 nt, Artificial Sequence
  Description of Artificial Sequence: Synthetic oligonucleotide
  Sense strand starting at position 551 of SEQ ID NO: 588061
ccgauaucuucccuguauu

SEQ ID NO: 839245 - RNA, 19 nt, Artificial Sequence
  Description of Artificial Sequence: Synthetic oligonucleotide
  Antisense strand to SEQ ID NO: 839244
aauacagggaagauaucgg

SEQ ID NO: 839246 - RNA, 19 nt, Artificial Sequence
  Description of Artificial Sequence: Synthetic oligonucleotide
  Sense strand starting at position 552 of SEQ ID NO: 588061
cgauaucuucccuguauuc

SEQ ID NO: 839247 - RNA, 19 nt, Artificial Sequence
  Description of Artificial Sequence: Synthetic oligonucleotide
  Antisense strand to SEQ ID NO: 839246
gaauacagggaagauaucg

SEQ ID NO: 839248 - RNA, 19 nt, Artificial Sequence
  Description of Artificial Sequence: Synthetic oligonucleotide
  Sense strand starting at position 581 of SEQ ID NO: 588061
aucccuagucucuguucua

SEQ ID NO: 839249 - RNA, 19 nt, Artificial Sequence
  Description of Artificial Sequence: Synthetic oligonucleotide
  Antisense strand to SEQ ID NO: 839248
uagaacagagacuagggau

SEQ ID NO: 839250 - RNA, 19 nt, Artificial Sequence
  Description of Artificial Sequence: Synthetic oligonucleotide
  Sense strand starting at position 582 of SEQ ID NO: 588061
ucccuagucucuguucuaa

SEQ ID NO: 839251 - RNA, 19 nt, Artificial Sequence
  Description of Artificial Sequence: Synthetic oligonucleotide
  Antisense strand to SEQ ID NO: 839250
uuagaacagagacuaggga

SEQ ID NO: 839252 - RNA, 19 nt, Artificial Sequence
  Description of Artificial Sequence: Synthetic oligonucleotide
  Sense strand starting at position 702 of SEQ ID NO: 588061
augcucuuuccuuacaguu

SEQ ID NO: 839253 - RNA, 19 nt, Artificial Sequence
  Description of Artificial Sequence: Synthetic oligonucleotide
  Antisense strand to SEQ ID NO: 839252
aacuguaaggaaagagcau

SEQ ID NO: 839254 - RNA, 19 nt, Artificial Sequence
  Description of Artificial Sequence: Synthetic oligonucleotide
  Sense strand starting at position 780 of SEQ ID NO: 588061
ccuccaacuuugguguaaa

SEQ ID NO: 839255 - RNA, 19 nt, Artificial Sequence
  Description of Artificial Sequence: Synthetic oligonucleotide
  Antisense strand to SEQ ID NO: 839254
uuuacaccaaaguuggagg

SEQ ID NO: 839256 - RNA, 19 nt, Artificial Sequence
  Description of Artificial Sequence: Synthetic oligonucleotide
  Sense strand starting at position 783 of SEQ ID NO: 588061
ccaacuuugguguaaauau

SEQ ID NO: 839257 - RNA, 19 nt, Artificial Sequence
  Description of Artificial Sequence: Synthetic oligonucleotide
  Antisense strand to SEQ ID NO: 839256
auauuuacaccaaaguugg

SEQ ID NO: 839258 - RNA, 19 nt, Artificial Sequence
  Description of Artificial Sequence: Synthetic oligonucleotide
  Sense strand starting at position 844 of SEQ ID NO: 588061
agaccuuguuccucucaca

SEQ ID NO: 839259 - RNA, 19 nt, Artificial Sequence
  Description of Artificial Sequence: Synthetic oligonucleotide
  Antisense strand to SEQ ID NO: 839258
ugugagaggaacaaggucu

SEQ ID NO: 839260 - RNA, 19 nt, Artificial Sequence
  Description of Artificial Sequence: Synthetic oligonucleotide
  Sense strand starting at position 892 of SEQ ID NO: 588061
gagguauuaguagauuguu

SEQ ID NO: 839261 - RNA, 19 nt, Artificial Sequence
  Description of Artificial Sequence: Synthetic oligonucleotide
  Antisense strand to SEQ ID NO: 839260
aacaaucuacuaauaccuc

SEQ ID NO: 839262 - RNA, 19 nt, Artificial Sequence
  Description of Artificial Sequence: Synthetic oligonucleotide
  Sense strand starting at position 919 of SEQ ID NO: 588061
gcccuaaggcuuggaggau

SEQ ID NO: 839263 - RNA, 19 nt, Artificial Sequence
  Description of Artificial Sequence: Synthetic oligonucleotide
  Antisense strand to SEQ ID NO: 839262
auccuccaagccuuagggc

SEQ ID NO: 839264 - RNA, 19 nt, Artificial Sequence
  Description of Artificial Sequence: Synthetic oligonucleotide
  Sense strand starting at position 931 of SEQ ID NO: 588061
ggaggauucccauggguca

SEQ ID NO: 839265 - RNA, 19 nt, Artificial Sequence
  Description of Artificial Sequence: Synthetic oligonucleotide
  Antisense strand to SEQ ID NO: 839264
ugacccaugggaauccucc

SEQ ID NO: 839266 - RNA, 19 nt, Artificial Sequence
  Description of Artificial Sequence: Synthetic oligonucleotide
  Sense strand starting at position 1020 of SEQ ID NO: 588061
aucguaauaugguucuuaa

SEQ ID NO: 839267 - RNA, 19 nt, Artificial Sequence
  Description of Artificial Sequence: Synthetic oligonucleotide
  Antisense strand to SEQ ID NO: 839266
uuaagaaccauauuacgau

SEQ ID NO: 839268 - RNA, 19 nt, Artificial Sequence
  Description of Artificial Sequence: Synthetic oligonucleotide
  Sense strand starting at position 1023 of SEQ ID NO: 588061
guaauaugguucuuaagga

SEQ ID NO: 839269 - RNA, 19 nt, Artificial Sequence
  Description of Artificial Sequence: Synthetic oligonucleotide
  Antisense strand to SEQ ID NO: 839268
uccuuaagaaccauauuac

SEQ ID NO: 839270 - RNA, 19 nt, Artificial Sequence
  Description of Artificial Sequence: Synthetic oligonucleotide
  Sense strand starting at position 1119 of SEQ ID NO: 588061
gguaaagacuucuccugaa

SEQ ID NO: 839271 - RNA, 19 nt, Artificial Sequence
  Description of Artificial Sequence: Synthetic oligonucleotide
  Antisense strand to SEQ ID NO: 839270
uucaggagaagucuuuacc

SEQ ID NO: 839272 - RNA, 19 nt, Artificial Sequence
  Description of Artificial Sequence: Synthetic oligonucleotide
  Sense strand starting at position 1181 of SEQ ID NO: 588061
gcaagagaaucucuccuua

SEQ ID NO: 839273 - RNA, 19 nt, Artificial Sequence
  Description of Artificial Sequence: Synthetic oligonucleotide
  Antisense strand to SEQ ID NO: 839272
uaaggagagauucucuugc

SEQ ID NO: 839274 - RNA, 19 nt, Artificial Sequence
  Description of Artificial Sequence: Synthetic oligonucleotide
  Sense strand starting at position 1195 of SEQ ID NO: 588061
ccuuacucucagggagacu

SEQ ID NO: 839275 - RNA, 19 nt, Artificial Sequence
  Description of Artificial Sequence: Synthetic oligonucleotide
  Antisense strand to SEQ ID NO: 839274
agucucccugagaguaagg

SEQ ID NO: 839276 - RNA, 19 nt, Artificial Sequence
  Description of Artificial Sequence: Synthetic oligonucleotide
  Sense strand starting at position 1383 of SEQ ID NO: 588061
cugagauguucccuccaga

SEQ ID NO: 839277 - RNA, 19 nt, Artificial Sequence
  Description of Artificial Sequence: Synthetic oligonucleotide
  Antisense strand to SEQ ID NO: 839276
ucuggagggaacaucucag

SEQ ID NO: 839278 - RNA, 19 nt, Artificial Sequence
  Description of Artificial Sequence: Synthetic oligonucleotide
  Sense strand starting at position 2314 of SEQ ID NO: 588061
uccuaaugucacugcugga

SEQ ID NO: 839279 - RNA, 19 nt, Artificial Sequence
  Description of Artificial Sequence: Synthetic oligonucleotide
  Antisense strand to SEQ ID NO: 839278
uccagcagugacauuagga

SEQ ID NO: 839280 - RNA, 19 nt, Artificial Sequence
  Description of Artificial Sequence: Synthetic oligonucleotide
  Sense strand starting at position 2331 of SEQ ID NO: 588061
gaucgugagagguaagcau

SEQ ID NO: 839281 - RNA, 19 nt, Artificial Sequence
  Description of Artificial Sequence: Synthetic oligonucleotide
  Antisense strand to SEQ ID NO: 839280
augcuuaccucucacgauc

SEQ ID NO: 839282 - RNA, 19 nt, Artificial Sequence
  Description of Artificial Sequence: Synthetic oligonucleotide
  Sense strand starting at position 2957 of SEQ ID NO: 588061
uccgcugagccacaguaau

SEQ ID NO: 839283 - RNA, 19 nt, Artificial Sequence
  Description of Artificial Sequence: Synthetic oligonucleotide
  Antisense strand to SEQ ID NO: 839282
auuacuguggcucagcgga

SEQ ID NO: 839284 - RNA, 19 nt, Artificial Sequence
  Description of Artificial Sequence: Synthetic oligonucleotide
  Sense strand starting at position 2995 of SEQ ID NO: 588061
uccgcugagccacauuaau

SEQ ID NO: 839285 - RNA, 19 nt, Artificial Sequence
  Description of Artificial Sequence: Synthetic oligonucleotide
  Antisense strand to SEQ ID NO: 839284
auuaauguggcucagcgga

SEQ ID NO: 839286 - RNA, 19 nt, Artificial Sequence
  Description of Artificial Sequence: Synthetic oligonucleotide
  Sense strand starting at position 3348 of SEQ ID NO: 588061
cguggaaucugaucguuga

SEQ ID NO: 839287 - RNA, 19 nt, Artificial Sequence
  Description of Artificial Sequence: Synthetic oligonucleotide
  Antisense strand to SEQ ID NO: 839286
ucaacgaucagauuccacg

SEQ ID NO: 839288 - RNA, 19 nt, Artificial Sequence
  Description of Artificial Sequence: Synthetic oligonucleotide
  Sense strand starting at position 3349 of SEQ ID NO: 588061
guggaaucugaucguugaa

SEQ ID NO: 839289 - RNA, 19 nt, Artificial Sequence
  Description of Artificial Sequence: Synthetic oligonucleotide
  Antisense strand to SEQ ID NO: 839288
uucaacgaucagauuccac

SEQ ID NO: 839290 - RNA, 19 nt, Artificial Sequence
  Description of Artificial Sequence: Synthetic oligonucleotide
  Sense strand starting at position 3351 of SEQ ID NO: 588061
ggaaucugaucguugaaau

SEQ ID NO: 839291 - RNA, 19 nt, Artificial Sequence
  Description of Artificial Sequence: Synthetic oligonucleotide
  Antisense strand to SEQ ID NO: 839290
auuucaacgaucagauucc

SEQ ID NO: 839292 - RNA, 19 nt, Artificial Sequence
  Description of Artificial Sequence: Synthetic oligonucleotide
  Sense strand starting at position 3352 of SEQ ID NO: 588061
gaaucugaucguugaaauc

SEQ ID NO: 839293 - RNA, 19 nt, Artificial Sequence
  Description of Artificial Sequence: Synthetic oligonucleotide
  Antisense strand to SEQ ID NO: 839292
gauuucaacgaucagauuc

SEQ ID NO: 839294 - RNA, 19 nt, Artificial Sequence
  Description of Artificial Sequence: Synthetic oligonucleotide
  Sense strand starting at position 3358 of SEQ ID NO: 588061
gaucguugaaaucaguguu

SEQ ID NO: 839295 - RNA, 19 nt, Artificial Sequence
  Description of Artificial Sequence: Synthetic oligonucleotide
  Antisense strand to SEQ ID NO: 839294
aacacugauuucaacgauc

SEQ ID NO: 839296 - RNA, 19 nt, Artificial Sequence
  Description of Artificial Sequence: Synthetic oligonucleotide
  Sense strand starting at position 3361 of SEQ ID NO: 588061
cguugaaaucaguguucua

SEQ ID NO: 839297 - RNA, 19 nt, Artificial Sequence
  Description of Artificial Sequence: Synthetic oligonucleotide
  Antisense strand to SEQ ID NO: 839296
uagaacacugauuucaacg

SEQ ID NO: 839298 - RNA, 19 nt, Artificial Sequence
  Description of Artificial Sequence: Synthetic oligonucleotide
  Sense strand starting at position 3364 of SEQ ID NO: 588061
ugaaaucaguguucuacaa

SEQ ID NO: 839299 - RNA, 19 nt, Artificial Sequence
  Description of Artificial Sequence: Synthetic oligonucleotide
  Antisense strand to SEQ ID NO: 839298
uuguagaacacugauuuca

SEQ ID NO: 839300 - RNA, 19 nt, Artificial Sequence
  Description of Artificial Sequence: Synthetic oligonucleotide
  Sense strand starting at position 3368 of SEQ ID NO: 588061
aucaguguucuacaauauu

SEQ ID NO: 839301 - RNA, 19 nt, Artificial Sequence
  Description of Artificial Sequence: Synthetic oligonucleotide
  Antisense strand to SEQ ID NO: 839300
aauauuguagaacacugau

SEQ ID NO: 839302 - RNA, 19 nt, Artificial Sequence
  Description of Artificial Sequence: Synthetic oligonucleotide
  Sense strand starting at position 3371 of SEQ ID NO: 588061
aguguucuacaauauucuu

SEQ ID NO: 839303 - RNA, 19 nt, Artificial Sequence
  Description of Artificial Sequence: Synthetic oligonucleotide
  Antisense strand to SEQ ID NO: 839302
aagaauauuguagaacacu

SEQ ID NO: 839304 - RNA, 19 nt, Artificial Sequence
  Description of Artificial Sequence: Synthetic oligonucleotide
  Sense strand starting at position 3515 of SEQ ID NO: 588061
uuuacucuucuggaguuaa

SEQ ID NO: 839305 - RNA, 19 nt, Artificial Sequence
  Description of Artificial Sequence: Synthetic oligonucleotide
  Antisense strand to SEQ ID NO: 839304
uuaacuccagaagaguaaa

SEQ ID NO: 839306 - RNA, 19 nt, Artificial Sequence
  Description of Artificial Sequence: Synthetic oligonucleotide
  Sense strand starting at position 3772 of SEQ ID NO: 588061
accucuuuagaccgaggaa

SEQ ID NO: 839307 - RNA, 19 nt, Artificial Sequence
  Description of Artificial Sequence: Synthetic oligonucleotide
  Antisense strand to SEQ ID NO: 839306
uuccucggucuaaagaggu

SEQ ID NO: 839308 - RNA, 19 nt, Artificial Sequence
  Description of Artificial Sequence: Synthetic oligonucleotide
  Sense strand starting at position 12 of SEQ ID NO: 588062
gagucagaauugcuacuuu

SEQ ID NO: 839309 - RNA, 19 nt, Artificial Sequence
  Description of Artificial Sequence: Synthetic oligonucleotide
  Antisense strand to SEQ ID NO: 839308
aaaguagcaauucugacuc

SEQ ID NO: 839310 - RNA, 19 nt, Artificial Sequence
  Description of Artificial Sequence: Synthetic oligonucleotide
  Sense strand starting at position 238 of SEQ ID NO: 588062
gcucuuauauauguauaca

SEQ ID NO: 839311 - RNA, 19 nt, Artificial Sequence
  Description of Artificial Sequence: Synthetic oligonucleotide
  Antisense strand to SEQ ID NO: 839310
uguauacauauauaagagc

SEQ ID NO: 839312 - RNA, 19 nt, Artificial Sequence
  Description of Artificial Sequence: Synthetic oligonucleotide
  Sense strand starting at position 327 of SEQ ID NO: 588062
ccgugaaccgcuguauauu

SEQ ID NO: 839313 - RNA, 19 nt, Artificial Sequence
  Description of Artificial Sequence: Synthetic oligonucleotide
  Antisense strand to SEQ ID NO: 839312
aauauacagcgguucacgg

SEQ ID NO: 839314 - RNA, 19 nt, Artificial Sequence
  Description of Artificial Sequence: Synthetic oligonucleotide
  Sense strand starting at position 328 of SEQ ID NO: 588062
cgugaaccgcuguauauuu

SEQ ID NO: 839315 - RNA, 19 nt, Artificial Sequence
  Description of Artificial Sequence: Synthetic oligonucleotide
  Antisense strand to SEQ ID NO: 839314
aaauauacagcgguucacg

SEQ ID NO: 839316 - RNA, 19 nt, Artificial Sequence
  Description of Artificial Sequence: Synthetic oligonucleotide
  Sense strand starting at position 394 of SEQ ID NO: 588062
agaacugcuuaaguuacau

SEQ ID NO: 839317 - RNA, 19 nt, Artificial Sequence
  Description of Artificial Sequence: Synthetic oligonucleotide
  Antisense strand to SEQ ID NO: 839316
auguaacuuaagcaguucu

SEQ ID NO: 839318 - RNA, 19 nt, Artificial Sequence
  Description of Artificial Sequence: Synthetic oligonucleotide
  Sense strand starting at position 471 of SEQ ID NO: 588062
auauuagcucuucgcauuu

SEQ ID NO: 839319 - RNA, 19 nt, Artificial Sequence
  Description of Artificial Sequence: Synthetic oligonucleotide
  Antisense strand to SEQ ID NO: 839318
aaaugcgaagagcuaauau

SEQ ID NO: 839320 - RNA, 19 nt, Artificial Sequence
  Description of Artificial Sequence: Synthetic oligonucleotide
  Sense strand starting at position 543 of SEQ ID NO: 588062
ugcucuguccgauaucuuc

SEQ ID NO: 839321 - RNA, 19 nt, Artificial Sequence
  Description of Artificial Sequence: Synthetic oligonucleotide
  Antisense strand to SEQ ID NO: 839320
gaagauaucggacagagca

SEQ ID NO: 839322 - RNA, 19 nt, Artificial Sequence
  Description of Artificial Sequence: Synthetic oligonucleotide
  Sense strand starting at position 550 of SEQ ID NO: 588062
uccgauaucuucccuguau

SEQ ID NO: 839323 - RNA, 19 nt, Artificial Sequence
  Description of Artificial Sequence: Synthetic oligonucleotide
  Antisense strand to SEQ ID NO: 839322
auacagggaagauaucgga

SEQ ID NO: 839324 - RNA, 19 nt, Artificial Sequence
  Description of Artificial Sequence: Synthetic oligonucleotide
  Sense strand starting at position 551 of SEQ ID NO: 588062
ccgauaucuucccuguauu

SEQ ID NO: 839325 - RNA, 19 nt, Artificial Sequence
  Description of Artificial Sequence: Synthetic oligonucleotide
  Antisense strand to SEQ ID NO: 839324
aauacagggaagauaucgg

SEQ ID NO: 839326 - RNA, 19 nt, Artificial Sequence
  Description of Artificial Sequence: Synthetic oligonucleotide
  Sense strand starting at position 552 of SEQ ID NO: 588062
cgauaucuucccuguauuc

SEQ ID NO: 839327 - RNA, 19 nt, Artificial Sequence
  Description of Artificial Sequence: Synthetic oligonucleotide
  Antisense strand to SEQ ID NO: 839326
gaauacagggaagauaucg

SEQ ID NO: 839328 - RNA, 19 nt, Artificial Sequence
  Description of Artificial Sequence: Synthetic oligonucleotide
  Sense strand starting at position 581 of SEQ ID NO: 588062
aucccuagucucuguucua

SEQ ID NO: 839329 - RNA, 19 nt, Artificial Sequence
  Description of Artificial Sequence: Synthetic oligonucleotide
  Antisense strand to SEQ ID NO: 839328
uagaacagagacuagggau

SEQ ID NO: 839330 - RNA, 19 nt, Artificial Sequence
  Description of Artificial Sequence: Synthetic oligonucleotide
  Sense strand starting at position 582 of SEQ ID NO: 588062
ucccuagucucuguucuaa

SEQ ID NO: 839331 - RNA, 19 nt, Artificial Sequence
  Description of Artificial Sequence: Synthetic oligonucleotide
  Antisense strand to SEQ ID NO: 839330
uuagaacagagacuaggga

SEQ ID NO: 839332 - RNA, 19 nt, Artificial Sequence
  Description of Artificial Sequence: Synthetic oligonucleotide
  Sense strand starting at position 702 of SEQ ID NO: 588062
augcucuuuccuuacaguu

SEQ ID NO: 839333 - RNA, 19 nt, Artificial Sequence
  Description of Artificial Sequence: Synthetic oligonucleotide
  Antisense strand to SEQ ID NO: 839332
aacuguaaggaaagagcau

SEQ ID NO: 839334 - RNA, 19 nt, Artificial Sequence
  Description of Artificial Sequence: Synthetic oligonucleotide
  Sense strand starting at position 780 of SEQ ID NO: 588062
ccuccaacuuugguguaaa

SEQ ID NO: 839335 - RNA, 19 nt, Artificial Sequence
  Description of Artificial Sequence: Synthetic oligonucleotide
  Antisense strand to SEQ ID NO: 839334
uuuacaccaaaguuggagg

SEQ ID NO: 839336 - RNA, 19 nt, Artificial Sequence
  Description of Artificial Sequence: Synthetic oligonucleotide
  Sense strand starting at position 783 of SEQ ID NO: 588062
ccaacuuugguguaaauau

SEQ ID NO: 839337 - RNA, 19 nt, Artificial Sequence
  Description of Artificial Sequence: Synthetic oligonucleotide
  Antisense strand to SEQ ID NO: 839336
auauuuacaccaaaguugg

SEQ ID NO: 839338 - RNA, 19 nt, Artificial Sequence
  Description of Artificial Sequence: Synthetic oligonucleotide
  Sense strand starting at position 844 of SEQ ID NO: 588062
agaccuuguuccucucaca

SEQ ID NO: 839339 - RNA, 19 nt, Artificial Sequence
  Description of Artificial Sequence: Synthetic oligonucleotide
  Antisense strand to SEQ ID NO: 839338
ugugagaggaacaaggucu

SEQ ID NO: 839340 - RNA, 19 nt, Artificial Sequence
  Description of Artificial Sequence: Synthetic oligonucleotide
  Sense strand starting at position 892 of SEQ ID NO: 588062
gagguauuaguagauuguu

SEQ ID NO: 839341 - RNA, 19 nt, Artificial Sequence
  Description of Artificial Sequence: Synthetic oligonucleotide
  Antisense strand to SEQ ID NO: 839340
aacaaucuacuaauaccuc

SEQ ID NO: 839342 - RNA, 19 nt, Artificial Sequence
  Description of Artificial Sequence: Synthetic oligonucleotide
  Sense strand starting at position 919 of SEQ ID NO: 588062
gcccuaaggcuuggaggau

SEQ ID NO: 839343 - RNA, 19 nt, Artificial Sequence
  Description of Artificial Sequence: Synthetic oligonucleotide
  Antisense strand to SEQ ID NO: 839342
auccuccaagccuuagggc

SEQ ID NO: 839344 - RNA, 19 nt, Artificial Sequence
  Description of Artificial Sequence: Synthetic oligonucleotide
  Sense strand starting at position 931 of SEQ ID NO: 588062
ggaggauucccauggguca

SEQ ID NO: 839345 - RNA, 19 nt, Artificial Sequence
  Description of Artificial Sequence: Synthetic oligonucleotide
  Antisense strand to SEQ ID NO: 839344
ugacccaugggaauccucc

SEQ ID NO: 839346 - RNA, 19 nt, Artificial Sequence
  Description of Artificial Sequence: Synthetic oligonucleotide
  Sense strand starting at position 1020 of SEQ ID NO: 588062
aucguaauaugguucuuaa

SEQ ID NO: 839347 - RNA, 19 nt, Artificial Sequence
  Description of Artificial Sequence: Synthetic oligonucleotide
  Antisense strand to SEQ ID NO: 839346
uuaagaaccauauuacgau

SEQ ID NO: 839348 - RNA, 19 nt, Artificial Sequence
  Description of Artificial Sequence: Synthetic oligonucleotide
  Sense strand starting at position 1023 of SEQ ID NO: 588062
guaauaugguucuuaagga

SEQ ID NO: 839349 - RNA, 19 nt, Artificial Sequence
  Description of Artificial Sequence: Synthetic oligonucleotide
  Antisense strand to SEQ ID NO: 839348
uccuuaagaaccauauuac

SEQ ID NO: 839350 - RNA, 19 nt, Artificial Sequence
  Description of Artificial Sequence: Synthetic oligonucleotide
  Sense strand starting at position 1119 of SEQ ID NO: 588062
gguaaagacuucuccugaa

SEQ ID NO: 839351 - RNA, 19 nt, Artificial Sequence
  Description of Artificial Sequence: Synthetic oligonucleotide
  Antisense strand to SEQ ID NO: 839350
uucaggagaagucuuuacc

SEQ ID NO: 839352 - RNA, 19 nt, Artificial Sequence
  Description of Artificial Sequence: Synthetic oligonucleotide
  Sense strand starting at position 1181 of SEQ ID NO: 588062
gcaagagaaucucuccuua

SEQ ID NO: 839353 - RNA, 19 nt, Artificial Sequence
  Description of Artificial Sequence: Synthetic oligonucleotide
  Antisense strand to SEQ ID NO: 839352
uaaggagagauucucuugc

SEQ ID NO: 839354 - RNA, 19 nt, Artificial Sequence
  Description of Artificial Sequence: Synthetic oligonucleotide
  Sense strand starting at position 1195 of SEQ ID NO: 588062
ccuuacucucagggagacu

SEQ ID NO: 839355 - RNA, 19 nt, Artificial Sequence
  Description of Artificial Sequence: Synthetic oligonucleotide
  Antisense strand to SEQ ID NO: 839354
agucucccugagaguaagg

SEQ ID NO: 839356 - RNA, 19 nt, Artificial Sequence
  Description of Artificial Sequence: Synthetic oligonucleotide
  Sense strand starting at position 1383 of SEQ ID NO: 588062
cugagauguucccuccaga

SEQ ID NO: 839357 - RNA, 19 nt, Artificial Sequence
  Description of Artificial Sequence: Synthetic oligonucleotide
  Antisense strand to SEQ ID NO: 839356
ucuggagggaacaucucag

SEQ ID NO: 839358 - RNA, 19 nt, Artificial Sequence
  Description of Artificial Sequence: Synthetic oligonucleotide
  Sense strand starting at position 2314 of SEQ ID NO: 588062
uccuaaugucacugcugga

SEQ ID NO: 839359 - RNA, 19 nt, Artificial Sequence
  Description of Artificial Sequence: Synthetic oligonucleotide
  Antisense strand to SEQ ID NO: 839358
uccagcagugacauuagga

SEQ ID NO: 839360 - RNA, 19 nt, Artificial Sequence
  Description of Artificial Sequence: Synthetic oligonucleotide
  Sense strand starting at position 2331 of SEQ ID NO: 588062
gaucgugagagguaagcau

SEQ ID NO: 839361 - RNA, 19 nt, Artificial Sequence
  Description of Artificial Sequence: Synthetic oligonucleotide
  Antisense strand to SEQ ID NO: 839360
augcuuaccucucacgauc

SEQ ID NO: 839362 - RNA, 19 nt, Artificial Sequence
  Description of Artificial Sequence: Synthetic oligonucleotide
  Sense strand starting at position 2957 of SEQ ID NO: 588062
uccgcugagccacaguaau

SEQ ID NO: 839363 - RNA, 19 nt, Artificial Sequence
  Description of Artificial Sequence: Synthetic oligonucleotide
  Antisense strand to SEQ ID NO: 839362
auuacuguggcucagcgga

SEQ ID NO: 839364 - RNA, 19 nt, Artificial Sequence
  Description of Artificial Sequence: Synthetic oligonucleotide
  Sense strand starting at position 2995 of SEQ ID NO: 588062
uccgcugagccacauuaau

SEQ ID NO: 839365 - RNA, 19 nt, Artificial Sequence
  Description of Artificial Sequence: Synthetic oligonucleotide
  Antisense strand to SEQ ID NO: 839364
auuaauguggcucagcgga

SEQ ID NO: 839366 - RNA, 19 nt, Artificial Sequence
  Description of Artificial Sequence: Synthetic oligonucleotide
  Sense strand starting at position 3348 of SEQ ID NO: 588062
cguggaaucugaucguuga

SEQ ID NO: 839367 - RNA, 19 nt, Artificial Sequence
  Description of Artificial Sequence: Synthetic oligonucleotide
  Antisense strand to SEQ ID NO: 839366
ucaacgaucagauuccacg

SEQ ID NO: 839368 - RNA, 19 nt, Artificial Sequence
  Description of Artificial Sequence: Synthetic oligonucleotide
  Sense strand starting at position 3349 of SEQ ID NO: 588062
guggaaucugaucguugaa

SEQ ID NO: 839369 - RNA, 19 nt, Artificial Sequence
  Description of Artificial Sequence: Synthetic oligonucleotide
  Antisense strand to SEQ ID NO: 839368
uucaacgaucagauuccac

SEQ ID NO: 839370 - RNA, 19 nt, Artificial Sequence
  Description of Artificial Sequence: Synthetic oligonucleotide
  Sense strand starting at position 3351 of SEQ ID NO: 588062
ggaaucugaucguugaaau

SEQ ID NO: 839371 - RNA, 19 nt, Artificial Sequence
  Description of Artificial Sequence: Synthetic oligonucleotide
  Antisense strand to SEQ ID NO: 839370
auuucaacgaucagauucc

SEQ ID NO: 839372 - RNA, 19 nt, Artificial Sequence
  Description of Artificial Sequence: Synthetic oligonucleotide
  Sense strand starting at position 3352 of SEQ ID NO: 588062
gaaucugaucguugaaauc

SEQ ID NO: 839373 - RNA, 19 nt, Artificial Sequence
  Description of Artificial Sequence: Synthetic oligonucleotide
  Antisense strand to SEQ ID NO: 839372
gauuucaacgaucagauuc

SEQ ID NO: 839374 - RNA, 19 nt, Artificial Sequence
  Description of Artificial Sequence: Synthetic oligonucleotide
  Sense strand starting at position 3358 of SEQ ID NO: 588062
gaucguugaaaucaguguu

SEQ ID NO: 839375 - RNA, 19 nt, Artificial Sequence
  Description of Artificial Sequence: Synthetic oligonucleotide
  Antisense strand to SEQ ID NO: 839374
aacacugauuucaacgauc

SEQ ID NO: 839376 - RNA, 19 nt, Artificial Sequence
  Description of Artificial Sequence: Synthetic oligonucleotide
  Sense strand starting at position 3361 of SEQ ID NO: 588062
cguugaaaucaguguucua

SEQ ID NO: 839377 - RNA, 19 nt, Artificial Sequence
  Description of Artificial Sequence: Synthetic oligonucleotide
  Antisense strand to SEQ ID NO: 839376
uagaacacugauuucaacg

SEQ ID NO: 839378 - RNA, 19 nt, Artificial Sequence
  Description of Artificial Sequence: Synthetic oligonucleotide
  Sense strand starting at position 3364 of SEQ ID NO: 588062
ugaaaucaguguucuacaa

SEQ ID NO: 839379 - RNA, 19 nt, Artificial Sequence
  Description of Artificial Sequence: Synthetic oligonucleotide
  Antisense strand to SEQ ID NO: 839378
uuguagaacacugauuuca

SEQ ID NO: 839380 - RNA, 19 nt, Artificial Sequence
  Description of Artificial Sequence: Synthetic oligonucleotide
  Sense strand starting at position 3368 of SEQ ID NO: 588062
aucaguguucuacaauauu

SEQ ID NO: 839381 - RNA, 19 nt, Artificial Sequence
  Description of Artificial Sequence: Synthetic oligonucleotide
  Antisense strand to SEQ ID NO: 839380
aauauuguagaacacugau

SEQ ID NO: 839382 - RNA, 19 nt, Artificial Sequence
  Description of Artificial Sequence: Synthetic oligonucleotide
  Sense strand starting at position 3371 of SEQ ID NO: 588062
aguguucuacaauauucuu

SEQ ID NO: 839383 - RNA, 19 nt, Artificial Sequence
  Description of Artificial Sequence: Synthetic oligonucleotide
  Antisense strand to SEQ ID NO: 839382
aagaauauuguagaacacu

SEQ ID NO: 839384 - RNA, 19 nt, Artificial Sequence
  Description of Artificial Sequence: Synthetic oligonucleotide
  Sense strand starting at position 3515 of SEQ ID NO: 588062
uuuacucuucuggaguuaa

SEQ ID NO: 839385 - RNA, 19 nt, Artificial Sequence
  Description of Artificial Sequence: Synthetic oligonucleotide
  Antisense strand to SEQ ID NO: 839384
uuaacuccagaagaguaaa

SEQ ID NO: 839386 - RNA, 19 nt, Artificial Sequence
  Description of Artificial Sequence: Synthetic oligonucleotide
  Sense strand starting at position 3772 of SEQ ID NO: 588062
accucuuuagaccgaggaa

SEQ ID NO: 839387 - RNA, 19 nt, Artificial Sequence
  Description of Artificial Sequence: Synthetic oligonucleotide
  Antisense strand to SEQ ID NO: 839386
uuccucggucuaaagaggu

SEQ ID NO: 839388 - RNA, 19 nt, Artificial Sequence
  Description of Artificial Sequence: Synthetic oligonucleotide
  Sense strand starting at position 4 of SEQ ID NO: 588063
ugacauuacugcccuggga

SEQ ID NO: 839389 - RNA, 19 nt, Artificial Sequence
  Description of Artificial Sequence: Synthetic oligonucleotide
  Antisense strand to SEQ ID NO: 839388
ucccagggcaguaauguca

SEQ ID NO: 839390 - RNA, 19 nt, Artificial Sequence
  Description of Artificial Sequence: Synthetic oligonucleotide
  Sense strand starting at position 6 of SEQ ID NO: 588063
acauuacugcccugggagu

SEQ ID NO: 839391 - RNA, 19 nt, Artificial Sequence
  Description of Artificial Sequence: Synthetic oligonucleotide
  Antisense strand to SEQ ID NO: 839390
acucccagggcaguaaugu

SEQ ID NO: 839392 - RNA, 19 nt, Artificial Sequence
  Description of Artificial Sequence: Synthetic oligonucleotide
  Sense strand starting at position 17 of SEQ ID NO: 588063
cugggagugaacugcuuaa

SEQ ID NO: 839393 - RNA, 19 nt, Artificial Sequence
  Description of Artificial Sequence: Synthetic oligonucleotide
  Antisense strand to SEQ ID NO: 839392
uuaagcaguucacucccag

SEQ ID NO: 839394 - RNA, 19 nt, Artificial Sequence
  Description of Artificial Sequence: Synthetic oligonucleotide
  Sense strand starting at position 21 of SEQ ID NO: 588063
gagugaacugcuuaaacuc

SEQ ID NO: 839395 - RNA, 19 nt, Artificial Sequence
  Description of Artificial Sequence: Synthetic oligonucleotide
  Antisense strand to SEQ ID NO: 839394
gaguuuaagcaguucacuc

SEQ ID NO: 839396 - RNA, 19 nt, Artificial Sequence
  Description of Artificial Sequence: Synthetic oligonucleotide
  Sense strand starting at position 191 of SEQ ID NO: 588063
gugggaggucugggcaauu

SEQ ID NO: 839397 - RNA, 19 nt, Artificial Sequence
  Description of Artificial Sequence: Synthetic oligonucleotide
  Antisense strand to SEQ ID NO: 839396
aauugcccagaccucccac

SEQ ID NO: 839398 - RNA, 19 nt, Artificial Sequence
  Description of Artificial Sequence: Synthetic oligonucleotide
  Sense strand starting at position 266 of SEQ ID NO: 588063
cugccugagaccuggagau

SEQ ID NO: 839399 - RNA, 19 nt, Artificial Sequence
  Description of Artificial Sequence: Synthetic oligonucleotide
  Antisense strand to SEQ ID NO: 839398
aucuccaggucucaggcag

SEQ ID NO: 839400 - RNA, 19 nt, Artificial Sequence
  Description of Artificial Sequence: Synthetic oligonucleotide
  Sense strand starting at position 268 of SEQ ID NO: 588063
gccugagaccuggagaucu

SEQ ID NO: 839401 - RNA, 19 nt, Artificial Sequence
  Description of Artificial Sequence: Synthetic oligonucleotide
  Antisense strand to SEQ ID NO: 839400
agaucuccaggucucaggc

SEQ ID NO: 839402 - RNA, 19 nt, Artificial Sequence
  Description of Artificial Sequence: Synthetic oligonucleotide
  Sense strand starting at position 280 of SEQ ID NO: 588063
gagaucugguaacuuaaca

SEQ ID NO: 839403 - RNA, 19 nt, Artificial Sequence
  Description of Artificial Sequence: Synthetic oligonucleotide
  Antisense strand to SEQ ID NO: 839402
uguuaaguuaccagaucuc

SEQ ID NO: 839404 - RNA, 19 nt, Artificial Sequence
  Description of Artificial Sequence: Synthetic oligonucleotide
  Sense strand starting at position 327 of SEQ ID NO: 588063
ggaagaacuccagggccua

SEQ ID NO: 839405 - RNA, 19 nt, Artificial Sequence
  Description of Artificial Sequence: Synthetic oligonucleotide
  Antisense strand to SEQ ID NO: 839404
uaggcccuggaguucuucc

SEQ ID NO: 839406 - RNA, 19 nt, Artificial Sequence
  Description of Artificial Sequence: Synthetic oligonucleotide
  Sense strand starting at position 485 of SEQ ID NO: 588063
gagaccuacuggcuuugaa

SEQ ID NO: 839407 - RNA, 19 nt, Artificial Sequence
  Description of Artificial Sequence: Synthetic oligonucleotide
  Antisense strand to SEQ ID NO: 839406
uucaaagccaguaggucuc

SEQ ID NO: 839408 - RNA, 19 nt, Artificial Sequence
  Description of Artificial Sequence: Synthetic oligonucleotide
  Sense strand starting at position 542 of SEQ ID NO: 588063
uggcuuccucaucaaguuu

SEQ ID NO: 839409 - RNA, 19 nt, Artificial Sequence
  Description of Artificial Sequence: Synthetic oligonucleotide
  Antisense strand to SEQ ID NO: 839408
aaacuugaugaggaagcca

SEQ ID NO: 839410 - RNA, 19 nt, Artificial Sequence
  Description of Artificial Sequence: Synthetic oligonucleotide
  Sense strand starting at position 654 of SEQ ID NO: 588063
cugugaugccugcugguuu

SEQ ID NO: 839411 - RNA, 19 nt, Artificial Sequence
  Description of Artificial Sequence: Synthetic oligonucleotide
  Antisense strand to SEQ ID NO: 839410
aaaccagcaggcaucacag

SEQ ID NO: 839412 - RNA, 19 nt, Artificial Sequence
  Description of Artificial Sequence: Synthetic oligonucleotide
  Sense strand starting at position 1280 of SEQ ID NO: 588063
gggagacggccacgaaaua

SEQ ID NO: 839413 - RNA, 19 nt, Artificial Sequence
  Description of Artificial Sequence: Synthetic oligonucleotide
  Antisense strand to SEQ ID NO: 839412
uauuucguggccgucuccc

SEQ ID NO: 839414 - RNA, 19 nt, Artificial Sequence
  Description of Artificial Sequence: Synthetic oligonucleotide
  Sense strand starting at position 1360 of SEQ ID NO: 588063
guggcuuaugucgacauag

SEQ ID NO: 839415 - RNA, 19 nt, Artificial Sequence
  Description of Artificial Sequence: Synthetic oligonucleotide
  Antisense strand to SEQ ID NO: 839414
cuaugucgacauaagccac

SEQ ID NO: 839416 - RNA, 19 nt, Artificial Sequence
  Description of Artificial Sequence: Synthetic oligonucleotide
  Sense strand starting at position 1378 of SEQ ID NO: 588063
gggaaacguagacauguuu

SEQ ID NO: 839417 - RNA, 19 nt, Artificial Sequence
  Description of Artificial Sequence: Synthetic oligonucleotide
  Antisense strand to SEQ ID NO: 839416
aaacaugucuacguuuccc

SEQ ID NO: 839418 - RNA, 19 nt, Artificial Sequence
  Description of Artificial Sequence: Synthetic oligonucleotide
  Sense strand starting at position 2002 of SEQ ID NO: 588063
cccacaugaucuguaacgu

SEQ ID NO: 839419 - RNA, 19 nt, Artificial Sequence
  Description of Artificial Sequence: Synthetic oligonucleotide
  Antisense strand to SEQ ID NO: 839418
acguuacagaucauguggg

SEQ ID NO: 839420 - RNA, 19 nt, Artificial Sequence
  Description of Artificial Sequence: Synthetic oligonucleotide
  Sense strand starting at position 2021 of SEQ ID NO: 588063
cagcaugcguauuugcaua

SEQ ID NO: 839421 - RNA, 19 nt, Artificial Sequence
  Description of Artificial Sequence: Synthetic oligonucleotide
  Antisense strand to SEQ ID NO: 839420
uaugcaaauacgcaugcug

SEQ ID NO: 839422 - RNA, 19 nt, Artificial Sequence
  Description of Artificial Sequence: Synthetic oligonucleotide
  Sense strand starting at position 2026 of SEQ ID NO: 588063
ugcguauuugcauacgaua

SEQ ID NO: 839423 - RNA, 19 nt, Artificial Sequence
  Description of Artificial Sequence: Synthetic oligonucleotide
  Antisense strand to SEQ ID NO: 839422
uaucguaugcaaauacgca

SEQ ID NO: 839424 - RNA, 19 nt, Artificial Sequence
  Description of Artificial Sequence: Synthetic oligonucleotide
  Sense strand starting at position 2243 of SEQ ID NO: 588063
uggaauuucugcgagaaga

SEQ ID NO: 839425 - RNA, 19 nt, Artificial Sequence
  Description of Artificial Sequence: Synthetic oligonucleotide
  Antisense strand to SEQ ID NO: 839424
ucuucucgcagaaauucca

SEQ ID NO: 839426 - RNA, 19 nt, Artificial Sequence
  Description of Artificial Sequence: Synthetic oligonucleotide
  Sense strand starting at position 2272 of SEQ ID NO: 588063
gcgcgagcgagaucauuga

SEQ ID NO: 839427 - RNA, 19 nt, Artificial Sequence
  Description of Artificial Sequence: Synthetic oligonucleotide
  Antisense strand to SEQ ID NO: 839426
ucaaugaucucgcucgcgc

SEQ ID NO: 839428 - RNA, 19 nt, Artificial Sequence
  Description of Artificial Sequence: Synthetic oligonucleotide
  Sense strand starting at position 2276 of SEQ ID NO: 588063
gagcgagaucauugaauau

SEQ ID NO: 839429 - RNA, 19 nt, Artificial Sequence
  Description of Artificial Sequence: Synthetic oligonucleotide
  Antisense strand to SEQ ID NO: 839428
auauucaaugaucucgcuc

SEQ ID NO: 839430 - RNA, 19 nt, Artificial Sequence
  Description of Artificial Sequence: Synthetic oligonucleotide
  Sense strand starting at position 2547 of SEQ ID NO: 588063
cggcuucaggcucaggaaa

SEQ ID NO: 839431 - RNA, 19 nt, Artificial Sequence
  Description of Artificial Sequence: Synthetic oligonucleotide
  Antisense strand to SEQ ID NO: 839430
uuuccugagccugaagccg

SEQ ID NO: 839432 - RNA, 19 nt, Artificial Sequence
  Description of Artificial Sequence: Synthetic oligonucleotide
  Sense strand starting at position 2585 of SEQ ID NO: 588063
aacuauguugagcgagaca

SEQ ID NO: 839433 - RNA, 19 nt, Artificial Sequence
  Description of Artificial Sequence: Synthetic oligonucleotide
  Antisense strand to SEQ ID NO: 839432
ugucucgcucaacauaguu

SEQ ID NO: 839434 - RNA, 19 nt, Artificial Sequence
  Description of Artificial Sequence: Synthetic oligonucleotide
  Sense strand starting at position 2588 of SEQ ID NO: 588063
uauguugagcgagacacau

SEQ ID NO: 839435 - RNA, 19 nt, Artificial Sequence
  Description of Artificial Sequence: Synthetic oligonucleotide
  Antisense strand to SEQ ID NO: 839434
augugucucgcucaacaua

SEQ ID NO: 839436 - RNA, 19 nt, Artificial Sequence
  Description of Artificial Sequence: Synthetic oligonucleotide
  Sense strand starting at position 2608 of SEQ ID NO: 588063
uuacucccggaaugauaau

SEQ ID NO: 839437 - RNA, 19 nt, Artificial Sequence
  Description of Artificial Sequence: Synthetic oligonucleotide
  Antisense strand to SEQ ID NO: 839436
auuaucauuccgggaguaa

SEQ ID NO: 839438 - RNA, 19 nt, Artificial Sequence
  Description of Artificial Sequence: Synthetic oligonucleotide
  Sense strand starting at position 2617 of SEQ ID NO: 588063
gaaugauaaugagaaggcu

SEQ ID NO: 839439 - RNA, 19 nt, Artificial Sequence
  Description of Artificial Sequence: Synthetic oligonucleotide
  Antisense strand to SEQ ID NO: 839438
agccuucucauuaucauuc

SEQ ID NO: 839440 - RNA, 19 nt, Artificial Sequence
  Description of Artificial Sequence: Synthetic oligonucleotide
  Sense strand starting at position 2732 of SEQ ID NO: 588063
aggucugaggcugguuaaa

SEQ ID NO: 839441 - RNA, 19 nt, Artificial Sequence
  Description of Artificial Sequence: Synthetic oligonucleotide
  Antisense strand to SEQ ID NO: 839440
uuuaaccagccucagaccu

SEQ ID NO: 839442 - RNA, 19 nt, Artificial Sequence
  Description of Artificial Sequence: Synthetic oligonucleotide
  Sense strand starting at position 2734 of SEQ ID NO: 588063
gucugaggcugguuaaaga

SEQ ID NO: 839443 - RNA, 19 nt, Artificial Sequence
  Description of Artificial Sequence: Synthetic oligonucleotide
  Antisense strand to SEQ ID NO: 839442
ucuuuaaccagccucagac

SEQ ID NO: 839444 - RNA, 19 nt, Artificial Sequence
  Description of Artificial Sequence: Synthetic oligonucleotide
  Sense strand starting at position 2806 of SEQ ID NO: 588063
cgacuuaaacucugguaga

SEQ ID NO: 839445 - RNA, 19 nt, Artificial Sequence
  Description of Artificial Sequence: Synthetic oligonucleotide
  Antisense strand to SEQ ID NO: 839444
ucuaccagaguuuaagucg

SEQ ID NO: 839446 - RNA, 19 nt, Artificial Sequence
  Description of Artificial Sequence: Synthetic oligonucleotide
  Sense strand starting at position 3107 of SEQ ID NO: 588063
ucgggaucuggguacacuu

SEQ ID NO: 839447 - RNA, 19 nt, Artificial Sequence
  Description of Artificial Sequence: Synthetic oligonucleotide
  Antisense strand to SEQ ID NO: 839446
aaguguacccagaucccga

SEQ ID NO: 839448 - RNA, 19 nt, Artificial Sequence
  Description of Artificial Sequence: Synthetic oligonucleotide
  Sense strand starting at position 3117 of SEQ ID NO: 588063
gguacacuucgggaucuca

SEQ ID NO: 839449 - RNA, 19 nt, Artificial Sequence
  Description of Artificial Sequence: Synthetic oligonucleotide
  Antisense strand to SEQ ID NO: 839448
ugagaucccgaaguguacc

SEQ ID NO: 839450 - RNA, 19 nt, Artificial Sequence
  Description of Artificial Sequence: Synthetic oligonucleotide
  Sense strand starting at position 3155 of SEQ ID NO: 588063
cgcgcauuccugcccagau

SEQ ID NO: 839451 - RNA, 19 nt, Artificial Sequence
  Description of Artificial Sequence: Synthetic oligonucleotide
  Antisense strand to SEQ ID NO: 839450
aucugggcaggaaugcgcg

SEQ ID NO: 839452 - RNA, 19 nt, Artificial Sequence
  Description of Artificial Sequence: Synthetic oligonucleotide
  Sense strand starting at position 3716 of SEQ ID NO: 588063
ucgguuauugcugauguag

SEQ ID NO: 839453 - RNA, 19 nt, Artificial Sequence
  Description of Artificial Sequence: Synthetic oligonucleotide
  Antisense strand to SEQ ID NO: 839452
cuacaucagcaauaaccga

SEQ ID NO: 839454 - RNA, 19 nt, Artificial Sequence
  Description of Artificial Sequence: Synthetic oligonucleotide
  Sense strand starting at position 3848 of SEQ ID NO: 588063
ucuguuaacuucuugauga

SEQ ID NO: 839455 - RNA, 19 nt, Artificial Sequence
  Description of Artificial Sequence: Synthetic oligonucleotide
  Antisense strand to SEQ ID NO: 839454
ucaucaagaaguuaacaga

SEQ ID NO: 839456 - RNA, 19 nt, Artificial Sequence
  Description of Artificial Sequence: Synthetic oligonucleotide
  Sense strand starting at position 3850 of SEQ ID NO: 588063
uguuaacuucuugaugacu

SEQ ID NO: 839457 - RNA, 19 nt, Artificial Sequence
  Description of Artificial Sequence: Synthetic oligonucleotide
  Antisense strand to SEQ ID NO: 839456
agucaucaagaaguuaaca

SEQ ID NO: 839458 - RNA, 19 nt, Artificial Sequence
  Description of Artificial Sequence: Synthetic oligonucleotide
  Sense strand starting at position 3855 of SEQ ID NO: 588063
acuucuugaugacuguaau

SEQ ID NO: 839459 - RNA, 19 nt, Artificial Sequence
  Description of Artificial Sequence: Synthetic oligonucleotide
  Antisense strand to SEQ ID NO: 839458
auuacagucaucaagaagu

SEQ ID NO: 839460 - RNA, 19 nt, Artificial Sequence
  Description of Artificial Sequence: Synthetic oligonucleotide
  Sense strand starting at position 3856 of SEQ ID NO: 588063
cuucuugaugacuguaauc

SEQ ID NO: 839461 - RNA, 19 nt, Artificial Sequence
  Description of Artificial Sequence: Synthetic oligonucleotide
  Antisense strand to SEQ ID NO: 839460
gauuacagucaucaagaag

SEQ ID NO: 839462 - RNA, 19 nt, Artificial Sequence
  Description of Artificial Sequence: Synthetic oligonucleotide
  Sense strand starting at position 3858 of SEQ ID NO: 588063
ucuugaugacuguaaucca

SEQ ID NO: 839463 - RNA, 19 nt, Artificial Sequence
  Description of Artificial Sequence: Synthetic oligonucleotide
  Antisense strand to SEQ ID NO: 839462
uggauuacagucaucaaga

SEQ ID NO: 839464 - RNA, 19 nt, Artificial Sequence
  Description of Artificial Sequence: Synthetic oligonucleotide
  Sense strand starting at position 3892 of SEQ ID NO: 588063
uucucagccucauuuggua

SEQ ID NO: 839465 - RNA, 19 nt, Artificial Sequence
  Description of Artificial Sequence: Synthetic oligonucleotide
  Antisense strand to SEQ ID NO: 839464
uaccaaaugaggcugagaa

SEQ ID NO: 839466 - RNA, 19 nt, Artificial Sequence
  Description of Artificial Sequence: Synthetic oligonucleotide
  Sense strand starting at position 3946 of SEQ ID NO: 588063
agaauuuaccgcugccuga

SEQ ID NO: 839467 - RNA, 19 nt, Artificial Sequence
  Description of Artificial Sequence: Synthetic oligonucleotide
  Antisense strand to SEQ ID NO: 839466
ucaggcagcgguaaauucu

SEQ ID NO: 839468 - RNA, 19 nt, Artificial Sequence
  Description of Artificial Sequence: Synthetic oligonucleotide
  Sense strand starting at position 79 of SEQ ID NO: 588064
ggacgacguccaugacuaa

SEQ ID NO: 839469 - RNA, 19 nt, Artificial Sequence
  Description of Artificial Sequence: Synthetic oligonucleotide
  Antisense strand to SEQ ID NO: 839468
uuagucauggacgucgucc

SEQ ID NO: 839470 - RNA, 19 nt, Artificial Sequence
  Description of Artificial Sequence: Synthetic oligonucleotide
  Sense strand starting at position 345 of SEQ ID NO: 588064
aucuguuguggugguuaaa

SEQ ID NO: 839471 - RNA, 19 nt, Artificial Sequence
  Description of Artificial Sequence: Synthetic oligonucleotide
  Antisense strand to SEQ ID NO: 839470
uuuaaccaccacaacagau

SEQ ID NO: 839472 - RNA, 19 nt, Artificial Sequence
  Description of Artificial Sequence: Synthetic oligonucleotide
  Sense strand starting at position 348 of SEQ ID NO: 588064
uguuguggugguuaaagaa

SEQ ID NO: 839473 - RNA, 19 nt, Artificial Sequence
  Description of Artificial Sequence: Synthetic oligonucleotide
  Antisense strand to SEQ ID NO: 839472
uucuuuaaccaccacaaca

SEQ ID NO: 839474 - RNA, 19 nt, Artificial Sequence
  Description of Artificial Sequence: Synthetic oligonucleotide
  Sense strand starting at position 404 of SEQ ID NO: 588064
gagaaucaagacugucauc

SEQ ID NO: 839475 - RNA, 19 nt, Artificial Sequence
  Description of Artificial Sequence: Synthetic oligonucleotide
  Antisense strand to SEQ ID NO: 839474
gaugacagucuugauucuc

SEQ ID NO: 839476 - RNA, 19 nt, Artificial Sequence
  Description of Artificial Sequence: Synthetic oligonucleotide
  Sense strand starting at position 409 of SEQ ID NO: 588064
ucaagacugucaucugcau

SEQ ID NO: 839477 - RNA, 19 nt, Artificial Sequence
  Description of Artificial Sequence: Synthetic oligonucleotide
  Antisense strand to SEQ ID NO: 839476
augcagaugacagucuuga

SEQ ID NO: 839478 - RNA, 19 nt, Artificial Sequence
  Description of Artificial Sequence: Synthetic oligonucleotide
  Sense strand starting at position 452 of SEQ ID NO: 588064
agaggugucacuggagaau

SEQ ID NO: 839479 - RNA, 19 nt, Artificial Sequence
  Description of Artificial Sequence: Synthetic oligonucleotide
  Antisense strand to SEQ ID NO: 839478
auucuccagugacaccucu

SEQ ID NO: 839480 - RNA, 19 nt, Artificial Sequence
  Description of Artificial Sequence: Synthetic oligonucleotide
  Sense strand starting at position 489 of SEQ ID NO: 588064
ucuugucaggacugggaau

SEQ ID NO: 839481 - RNA, 19 nt, Artificial Sequence
  Description of Artificial Sequence: Synthetic oligonucleotide
  Antisense strand to SEQ ID NO: 839480
auucccaguccugacaaga

SEQ ID NO: 839482 - RNA, 19 nt, Artificial Sequence
  Description of Artificial Sequence: Synthetic oligonucleotide
  Sense strand starting at position 522 of SEQ ID NO: 588064
gcggguuuaacggaaauca

SEQ ID NO: 839483 - RNA, 19 nt, Artificial Sequence
  Description of Artificial Sequence: Synthetic oligonucleotide
  Antisense strand to SEQ ID NO: 839482
ugauuuccguuaaacccgc

SEQ ID NO: 839484 - RNA, 19 nt, Artificial Sequence
  Description of Artificial Sequence: Synthetic oligonucleotide
  Sense strand starting at position 852 of SEQ ID NO: 588064
cgcgauuuagaaugcucaa

SEQ ID NO: 839485 - RNA, 19 nt, Artificial Sequence
  Description of Artificial Sequence: Synthetic oligonucleotide
  Antisense strand to SEQ ID NO: 839484
uugagcauucuaaaucgcg

SEQ ID NO: 839486 - RNA, 19 nt, Artificial Sequence
  Description of Artificial Sequence: Synthetic oligonucleotide
  Sense strand starting at position 1179 of SEQ ID NO: 588064
ccuggaaagucuuccagag

SEQ ID NO: 839487 - RNA, 19 nt, Artificial Sequence
  Description of Artificial Sequence: Synthetic oligonucleotide
  Antisense strand to SEQ ID NO: 839486
cucuggaagacuuuccagg

SEQ ID NO: 839488 - RNA, 19 nt, Artificial Sequence
  Description of Artificial Sequence: Synthetic oligonucleotide
  Sense strand starting at position 1253 of SEQ ID NO: 588064
gcgugucaccaaguuguca

SEQ ID NO: 839489 - RNA, 19 nt, Artificial Sequence
  Description of Artificial Sequence: Synthetic oligonucleotide
  Antisense strand to SEQ ID NO: 839488
ugacaacuuggugacacgc

SEQ ID NO: 839490 - RNA, 19 nt, Artificial Sequence
  Description of Artificial Sequence: Synthetic oligonucleotide
  Sense strand starting at position 1373 of SEQ ID NO: 588064
gaggcagaaguuugaggaa

SEQ ID NO: 839491 - RNA, 19 nt, Artificial Sequence
  Description of Artificial Sequence: Synthetic oligonucleotide
  Antisense strand to SEQ ID NO: 839490
uuccucaaacuucugccuc

SEQ ID NO: 839492 - RNA, 19 nt, Artificial Sequence
  Description of Artificial Sequence: Synthetic oligonucleotide
  Sense strand starting at position 1424 of SEQ ID NO: 588064
aaggcagaucaagguaaua

SEQ ID NO: 839493 - RNA, 19 nt, Artificial Sequence
  Description of Artificial Sequence: Synthetic oligonucleotide
  Antisense strand to SEQ ID NO: 839492
uauuaccuugaucugccuu

SEQ ID NO: 839494 - RNA, 19 nt, Artificial Sequence
  Description of Artificial Sequence: Synthetic oligonucleotide
  Sense strand starting at position 1641 of SEQ ID NO: 588064
gcuaauuaggaguaguaaa

SEQ ID NO: 839495 - RNA, 19 nt, Artificial Sequence
  Description of Artificial Sequence: Synthetic oligonucleotide
  Antisense strand to SEQ ID NO: 839494
uuuacuacuccuaauuagc

SEQ ID NO: 839496 - RNA, 19 nt, Artificial Sequence
  Description of Artificial Sequence: Synthetic oligonucleotide
  Sense strand starting at position 1667 of SEQ ID NO: 588064
auuucuugccagcgcagaa

SEQ ID NO: 839497 - RNA, 19 nt, Artificial Sequence
  Description of Artificial Sequence: Synthetic oligonucleotide
  Antisense strand to SEQ ID NO: 839496
uucugcgcuggcaagaaau

SEQ ID NO: 839498 - RNA, 19 nt, Artificial Sequence
  Description of Artificial Sequence: Synthetic oligonucleotide
  Sense strand starting at position 1679 of SEQ ID NO: 588064
cgcagaaguuucccaaauu

SEQ ID NO: 839499 - RNA, 19 nt, Artificial Sequence
  Description of Artificial Sequence: Synthetic oligonucleotide
  Antisense strand to SEQ ID NO: 839498
aauuugggaaacuucugcg

SEQ ID NO: 839500 - RNA, 19 nt, Artificial Sequence
  Description of Artificial Sequence: Synthetic oligonucleotide
  Sense strand starting at position 2000 of SEQ ID NO: 588064
ugugcuagcgaugcacuua

SEQ ID NO: 839501 - RNA, 19 nt, Artificial Sequence
  Description of Artificial Sequence: Synthetic oligonucleotide
  Antisense strand to SEQ ID NO: 839500
uaagugcaucgcuagcaca

SEQ ID NO: 839502 - RNA, 19 nt, Artificial Sequence
  Description of Artificial Sequence: Synthetic oligonucleotide
  Sense strand starting at position 2057 of SEQ ID NO: 588064
uugcgauuggcucuccagu

SEQ ID NO: 839503 - RNA, 19 nt, Artificial Sequence
  Description of Artificial Sequence: Synthetic oligonucleotide
  Antisense strand to SEQ ID NO: 839502
acuggagagccaaucgcaa

SEQ ID NO: 839504 - RNA, 19 nt, Artificial Sequence
  Description of Artificial Sequence: Synthetic oligonucleotide
  Sense strand starting at position 2367 of SEQ ID NO: 588064
ucagauucuugcucuagca

SEQ ID NO: 839505 - RNA, 19 nt, Artificial Sequence
  Description of Artificial Sequence: Synthetic oligonucleotide
  Antisense strand to SEQ ID NO: 839504
ugcuagagcaagaaucuga

SEQ ID NO: 839506 - RNA, 19 nt, Artificial Sequence
  Description of Artificial Sequence: Synthetic oligonucleotide
  Sense strand starting at position 2369 of SEQ ID NO: 588064
agauucuugcucuagcauu

SEQ ID NO: 839507 - RNA, 19 nt, Artificial Sequence
  Description of Artificial Sequence: Synthetic oligonucleotide
  Antisense strand to SEQ ID NO: 839506
aaugcuagagcaagaaucu

SEQ ID NO: 839508 - RNA, 19 nt, Artificial Sequence
  Description of Artificial Sequence: Synthetic oligonucleotide
  Sense strand starting at position 2620 of SEQ ID NO: 588064
ggugcauaccuggaguuua

SEQ ID NO: 839509 - RNA, 19 nt, Artificial Sequence
  Description of Artificial Sequence: Synthetic oligonucleotide
  Antisense strand to SEQ ID NO: 839508
uaaacuccagguaugcacc

SEQ ID NO: 839510 - RNA, 19 nt, Artificial Sequence
  Description of Artificial Sequence: Synthetic oligonucleotide
  Sense strand starting at position 2625 of SEQ ID NO: 588064
auaccuggaguuuaucuau

SEQ ID NO: 839511 - RNA, 19 nt, Artificial Sequence
  Description of Artificial Sequence: Synthetic oligonucleotide
  Antisense strand to SEQ ID NO: 839510
auagauaaacuccagguau

SEQ ID NO: 839512 - RNA, 19 nt, Artificial Sequence
  Description of Artificial Sequence: Synthetic oligonucleotide
  Sense strand starting at position 2628 of SEQ ID NO: 588064
ccuggaguuuaucuaucag

SEQ ID NO: 839513 - RNA, 19 nt, Artificial Sequence
  Description of Artificial Sequence: Synthetic oligonucleotide
  Antisense strand to SEQ ID NO: 839512
cugauagauaaacuccagg

SEQ ID NO: 839514 - RNA, 19 nt, Artificial Sequence
  Description of Artificial Sequence: Synthetic oligonucleotide
  Sense strand starting at position 2634 of SEQ ID NO: 588064
guuuaucuaucaguacuuu

SEQ ID NO: 839515 - RNA, 19 nt, Artificial Sequence
  Description of Artificial Sequence: Synthetic oligonucleotide
  Antisense strand to SEQ ID NO: 839514
aaaguacugauagauaaac

SEQ ID NO: 839516 - RNA, 19 nt, Artificial Sequence
  Description of Artificial Sequence: Synthetic oligonucleotide
  Sense strand starting at position 2753 of SEQ ID NO: 588064
uggaguuucucacuguucu

SEQ ID NO: 839517 - RNA, 19 nt, Artificial Sequence
  Description of Artificial Sequence: Synthetic oligonucleotide
  Antisense strand to SEQ ID NO: 839516
agaacagugagaaacucca

SEQ ID NO: 839518 - RNA, 19 nt, Artificial Sequence
  Description of Artificial Sequence: Synthetic oligonucleotide
  Sense strand starting at position 2754 of SEQ ID NO: 588064
ggaguuucucacuguucuc

SEQ ID NO: 839519 - RNA, 19 nt, Artificial Sequence
  Description of Artificial Sequence: Synthetic oligonucleotide
  Antisense strand to SEQ ID NO: 839518
gagaacagugagaaacucc

SEQ ID NO: 839520 - RNA, 19 nt, Artificial Sequence
  Description of Artificial Sequence: Synthetic oligonucleotide
  Sense strand starting at position 2784 of SEQ ID NO: 588064
cagaaagccgagcauucua

SEQ ID NO: 839521 - RNA, 19 nt, Artificial Sequence
  Description of Artificial Sequence: Synthetic oligonucleotide
  Antisense strand to SEQ ID NO: 839520
uagaaugcucggcuuucug

SEQ ID NO: 839522 - RNA, 19 nt, Artificial Sequence
  Description of Artificial Sequence: Synthetic oligonucleotide
  Sense strand starting at position 2791 of SEQ ID NO: 588064
ccgagcauucuagagugaa

SEQ ID NO: 839523 - RNA, 19 nt, Artificial Sequence
  Description of Artificial Sequence: Synthetic oligonucleotide
  Antisense strand to SEQ ID NO: 839522
uucacucuagaaugcucgg

SEQ ID NO: 839524 - RNA, 19 nt, Artificial Sequence
  Description of Artificial Sequence: Synthetic oligonucleotide
  Sense strand starting at position 2795 of SEQ ID NO: 588064
gcauucuagagugaaugau

SEQ ID NO: 839525 - RNA, 19 nt, Artificial Sequence
  Description of Artificial Sequence: Synthetic oligonucleotide
  Antisense strand to SEQ ID NO: 839524
aucauucacucuagaaugc

SEQ ID NO: 839526 - RNA, 19 nt, Artificial Sequence
  Description of Artificial Sequence: Synthetic oligonucleotide
  Sense strand starting at position 2805 of SEQ ID NO: 588064
gugaaugauucugcuggga

SEQ ID NO: 839527 - RNA, 19 nt, Artificial Sequence
  Description of Artificial Sequence: Synthetic oligonucleotide
  Antisense strand to SEQ ID NO: 839526
ucccagcagaaucauucac

SEQ ID NO: 839528 - RNA, 19 nt, Artificial Sequence
  Description of Artificial Sequence: Synthetic oligonucleotide
  Sense strand starting at position 2837 of SEQ ID NO: 588064
uuauucugacauggcuuaa

SEQ ID NO: 839529 - RNA, 19 nt, Artificial Sequence
  Description of Artificial Sequence: Synthetic oligonucleotide
  Antisense strand to SEQ ID NO: 839528
uuaagccaugucagaauaa

SEQ ID NO: 839530 - RNA, 19 nt, Artificial Sequence
  Description of Artificial Sequence: Synthetic oligonucleotide
  Sense strand starting at position 2849 of SEQ ID NO: 588064
ggcuuaaauuaaucgcuua

SEQ ID NO: 839531 - RNA, 19 nt, Artificial Sequence
  Description of Artificial Sequence: Synthetic oligonucleotide
  Antisense strand to SEQ ID NO: 839530
uaagcgauuaauuuaagcc

SEQ ID NO: 839532 - RNA, 19 nt, Artificial Sequence
  Description of Artificial Sequence: Synthetic oligonucleotide
  Sense strand starting at position 2852 of SEQ ID NO: 588064
uuaaauuaaucgcuuagac

SEQ ID NO: 839533 - RNA, 19 nt, Artificial Sequence
  Description of Artificial Sequence: Synthetic oligonucleotide
  Antisense strand to SEQ ID NO: 839532
gucuaagcgauuaauuuaa

SEQ ID NO: 839534 - RNA, 19 nt, Artificial Sequence
  Description of Artificial Sequence: Synthetic oligonucleotide
  Sense strand starting at position 3303 of SEQ ID NO: 588064
gguacauaugcguagugga

SEQ ID NO: 839535 - RNA, 19 nt, Artificial Sequence
  Description of Artificial Sequence: Synthetic oligonucleotide
  Antisense strand to SEQ ID NO: 839534
uccacuacgcauauguacc

SEQ ID NO: 839536 - RNA, 19 nt, Artificial Sequence
  Description of Artificial Sequence: Synthetic oligonucleotide
  Sense strand starting at position 3311 of SEQ ID NO: 588064
ugcguaguggaguacuauu

SEQ ID NO: 839537 - RNA, 19 nt, Artificial Sequence
  Description of Artificial Sequence: Synthetic oligonucleotide
  Antisense strand to SEQ ID NO: 839536
aauaguacuccacuacgca

SEQ ID NO: 839538 - RNA, 19 nt, Artificial Sequence
  Description of Artificial Sequence: Synthetic oligonucleotide
  Sense strand starting at position 3532 of SEQ ID NO: 588064
guggaaugguuacuaggua

SEQ ID NO: 839539 - RNA, 19 nt, Artificial Sequence
  Description of Artificial Sequence: Synthetic oligonucleotide
  Antisense strand to SEQ ID NO: 839538
uaccuaguaaccauuccac

SEQ ID NO: 839540 - RNA, 19 nt, Artificial Sequence
  Description of Artificial Sequence: Synthetic oligonucleotide
  Sense strand starting at position 3571 of SEQ ID NO: 588064
augaauaggaucugguauu

SEQ ID NO: 839541 - RNA, 19 nt, Artificial Sequence
  Description of Artificial Sequence: Synthetic oligonucleotide
  Antisense strand to SEQ ID NO: 839540
aauaccagauccuauucau

SEQ ID NO: 839542 - RNA, 19 nt, Artificial Sequence
  Description of Artificial Sequence: Synthetic oligonucleotide
  Sense strand starting at position 3572 of SEQ ID NO: 588064
ugaauaggaucugguauuu

SEQ ID NO: 839543 - RNA, 19 nt, Artificial Sequence
  Description of Artificial Sequence: Synthetic oligonucleotide
  Antisense strand to SEQ ID NO: 839542
aaauaccagauccuauuca

SEQ ID NO: 839544 - RNA, 19 nt, Artificial Sequence
  Description of Artificial Sequence: Synthetic oligonucleotide
  Sense strand starting at position 3581 of SEQ ID NO: 588064
ucugguauuugacagcaca

SEQ ID NO: 839545 - RNA, 19 nt, Artificial Sequence
  Description of Artificial Sequence: Synthetic oligonucleotide
  Antisense strand to SEQ ID NO: 839544
ugugcugucaaauaccaga

SEQ ID NO: 839546 - RNA, 19 nt, Artificial Sequence
  Description of Artificial Sequence: Synthetic oligonucleotide
  Sense strand starting at position 3595 of SEQ ID NO: 588064
gcacaacaggguuauuaca

SEQ ID NO: 839547 - RNA, 19 nt, Artificial Sequence
  Description of Artificial Sequence: Synthetic oligonucleotide
  Antisense strand to SEQ ID NO: 839546
uguaauaacccuguugugc

SEQ ID NO: 839548 - RNA, 19 nt, Artificial Sequence
  Description of Artificial Sequence: Synthetic oligonucleotide
  Sense strand starting at position 7 of SEQ ID NO: 588065
gaauuaagguuauggacgu

SEQ ID NO: 839549 - RNA, 19 nt, Artificial Sequence
  Description of Artificial Sequence: Synthetic oligonucleotide
  Antisense strand to SEQ ID NO: 839548
acguccauaaccuuaauuc

SEQ ID NO: 839550 - RNA, 19 nt, Artificial Sequence
  Description of Artificial Sequence: Synthetic oligonucleotide
  Sense strand starting at position 11 of SEQ ID NO: 588065
uaagguuauggacgugaau

SEQ ID NO: 839551 - RNA, 19 nt, Artificial Sequence
  Description of Artificial Sequence: Synthetic oligonucleotide
  Antisense strand to SEQ ID NO: 839550
auucacguccauaaccuua

SEQ ID NO: 839552 - RNA, 19 nt, Artificial Sequence
  Description of Artificial Sequence: Synthetic oligonucleotide
  Sense strand starting at position 13 of SEQ ID NO: 588065
agguuauggacgugaauua

SEQ ID NO: 839553 - RNA, 19 nt, Artificial Sequence
  Description of Artificial Sequence: Synthetic oligonucleotide
  Antisense strand to SEQ ID NO: 839552
uaauucacguccauaaccu

SEQ ID NO: 839554 - RNA, 19 nt, Artificial Sequence
  Description of Artificial Sequence: Synthetic oligonucleotide
  Sense strand starting at position 14 of SEQ ID NO: 588065
gguuauggacgugaauuac

SEQ ID NO: 839555 - RNA, 19 nt, Artificial Sequence
  Description of Artificial Sequence: Synthetic oligonucleotide
  Antisense strand to SEQ ID NO: 839554
guaauucacguccauaacc

SEQ ID NO: 839556 - RNA, 19 nt, Artificial Sequence
  Description of Artificial Sequence: Synthetic oligonucleotide
  Sense strand starting at position 23 of SEQ ID NO: 588065
cgugaauuacccuggugga

SEQ ID NO: 839557 - RNA, 19 nt, Artificial Sequence
  Description of Artificial Sequence: Synthetic oligonucleotide
  Antisense strand to SEQ ID NO: 839556
uccaccaggguaauucacg

SEQ ID NO: 839558 - RNA, 19 nt, Artificial Sequence
  Description of Artificial Sequence: Synthetic oligonucleotide
  Sense strand starting at position 24 of SEQ ID NO: 588065
gugaauuacccugguggac

SEQ ID NO: 839559 - RNA, 19 nt, Artificial Sequence
  Description of Artificial Sequence: Synthetic oligonucleotide
  Antisense strand to SEQ ID NO: 839558
guccaccaggguaauucac

SEQ ID NO: 839560 - RNA, 19 nt, Artificial Sequence
  Description of Artificial Sequence: Synthetic oligonucleotide
  Sense strand starting at position 467 of SEQ ID NO: 588065
gugcaucucugacuucuca

SEQ ID NO: 839561 - RNA, 19 nt, Artificial Sequence
  Description of Artificial Sequence: Synthetic oligonucleotide
  Antisense strand to SEQ ID NO: 839560
ugagaagucagagaugcac

SEQ ID NO: 839562 - RNA, 19 nt, Artificial Sequence
  Description of Artificial Sequence: Synthetic oligonucleotide
  Sense strand starting at position 471 of SEQ ID NO: 588065
aucucugacuucucaugga

SEQ ID NO: 839563 - RNA, 19 nt, Artificial Sequence
  Description of Artificial Sequence: Synthetic oligonucleotide
  Antisense strand to SEQ ID NO: 839562
uccaugagaagucagagau

SEQ ID NO: 839564 - RNA, 19 nt, Artificial Sequence
  Description of Artificial Sequence: Synthetic oligonucleotide
  Sense strand starting at position 474 of SEQ ID NO: 588065
ucugacuucucauggaaca

SEQ ID NO: 839565 - RNA, 19 nt, Artificial Sequence
  Description of Artificial Sequence: Synthetic oligonucleotide
  Antisense strand to SEQ ID NO: 839564
uguuccaugagaagucaga

SEQ ID NO: 839566 - RNA, 19 nt, Artificial Sequence
  Description of Artificial Sequence: Synthetic oligonucleotide
  Sense strand starting at position 795 of SEQ ID NO: 588065
caagcagaugcuugguaaa

SEQ ID NO: 839567 - RNA, 19 nt, Artificial Sequence
  Description of Artificial Sequence: Synthetic oligonucleotide
  Antisense strand to SEQ ID NO: 839566
uuuaccaagcaucugcuug

SEQ ID NO: 839568 - RNA, 19 nt, Artificial Sequence
  Description of Artificial Sequence: Synthetic oligonucleotide
  Sense strand starting at position 848 of SEQ ID NO: 588065
ggcacaaugcucugcgaua

SEQ ID NO: 839569 - RNA, 19 nt, Artificial Sequence
  Description of Artificial Sequence: Synthetic oligonucleotide
  Antisense strand to SEQ ID NO: 839568
uaucgcagagcauugugcc

SEQ ID NO: 839570 - RNA, 19 nt, Artificial Sequence
  Description of Artificial Sequence: Synthetic oligonucleotide
  Sense strand starting at position 849 of SEQ ID NO: 588065
gcacaaugcucugcgauaa

SEQ ID NO: 839571 - RNA, 19 nt, Artificial Sequence
  Description of Artificial Sequence: Synthetic oligonucleotide
  Antisense strand to SEQ ID NO: 839570
uuaucgcagagcauugugc

SEQ ID NO: 839572 - RNA, 19 nt, Artificial Sequence
  Description of Artificial Sequence: Synthetic oligonucleotide
  Sense strand starting at position 850 of SEQ ID NO: 588065
cacaaugcucugcgauaag

SEQ ID NO: 839573 - RNA, 19 nt, Artificial Sequence
  Description of Artificial Sequence: Synthetic oligonucleotide
  Antisense strand to SEQ ID NO: 839572
cuuaucgcagagcauugug

SEQ ID NO: 839574 - RNA, 19 nt, Artificial Sequence
  Description of Artificial Sequence: Synthetic oligonucleotide
  Sense strand starting at position 873 of SEQ ID NO: 588065
agggacuucugccuuggaa

SEQ ID NO: 839575 - RNA, 19 nt, Artificial Sequence
  Description of Artificial Sequence: Synthetic oligonucleotide
  Antisense strand to SEQ ID NO: 839574
uuccaaggcagaagucccu

SEQ ID NO: 839576 - RNA, 19 nt, Artificial Sequence
  Description of Artificial Sequence: Synthetic oligonucleotide
  Sense strand starting at position 875 of SEQ ID NO: 588065
ggacuucugccuuggaaag

SEQ ID NO: 839577 - RNA, 19 nt, Artificial Sequence
  Description of Artificial Sequence: Synthetic oligonucleotide
  Antisense strand to SEQ ID NO: 839576
cuuuccaaggcagaagucc

SEQ ID NO: 839578 - RNA, 19 nt, Artificial Sequence
  Description of Artificial Sequence: Synthetic oligonucleotide
  Sense strand starting at position 1142 of SEQ ID NO: 588065
gcccuauggugagagguga

SEQ ID NO: 839579 - RNA, 19 nt, Artificial Sequence
  Description of Artificial Sequence: Synthetic oligonucleotide
  Antisense strand to SEQ ID NO: 839578
ucaccucucaccauagggc

SEQ ID NO: 839580 - RNA, 19 nt, Artificial Sequence
  Description of Artificial Sequence: Synthetic oligonucleotide
  Sense strand starting at position 1273 of SEQ ID NO: 588065
uuaauuauggcacagauuc

SEQ ID NO: 839581 - RNA, 19 nt, Artificial Sequence
  Description of Artificial Sequence: Synthetic oligonucleotide
  Antisense strand to SEQ ID NO: 839580
gaaucugugccauaauuaa

SEQ ID NO: 839582 - RNA, 19 nt, Artificial Sequence
  Description of Artificial Sequence: Synthetic oligonucleotide
  Sense strand starting at position 1889 of SEQ ID NO: 588065
uggagcuucgcggaacuaa

SEQ ID NO: 839583 - RNA, 19 nt, Artificial Sequence
  Description of Artificial Sequence: Synthetic oligonucleotide
  Antisense strand to SEQ ID NO: 839582
uuaguuccgcgaagcucca

SEQ ID NO: 839584 - RNA, 19 nt, Artificial Sequence
  Description of Artificial Sequence: Synthetic oligonucleotide
  Sense strand starting at position 2205 of SEQ ID NO: 588065
augagauauacucguguag

SEQ ID NO: 839585 - RNA, 19 nt, Artificial Sequence
  Description of Artificial Sequence: Synthetic oligonucleotide
  Antisense strand to SEQ ID NO: 839584
cuacacgaguauaucucau

SEQ ID NO: 839586 - RNA, 19 nt, Artificial Sequence
  Description of Artificial Sequence: Synthetic oligonucleotide
  Sense strand starting at position 2207 of SEQ ID NO: 588065
gagauauacucguguagug

SEQ ID NO: 839587 - RNA, 19 nt, Artificial Sequence
  Description of Artificial Sequence: Synthetic oligonucleotide
  Antisense strand to SEQ ID NO: 839586
cacuacacgaguauaucuc

SEQ ID NO: 839588 - RNA, 19 nt, Artificial Sequence
  Description of Artificial Sequence: Synthetic oligonucleotide
  Sense strand starting at position 2214 of SEQ ID NO: 588065
acucguguagugggagauu

SEQ ID NO: 839589 - RNA, 19 nt, Artificial Sequence
  Description of Artificial Sequence: Synthetic oligonucleotide
  Antisense strand to SEQ ID NO: 839588
aaucucccacuacacgagu

SEQ ID NO: 839590 - RNA, 19 nt, Artificial Sequence
  Description of Artificial Sequence: Synthetic oligonucleotide
  Sense strand starting at position 2258 of SEQ ID NO: 588065
aacagacgguaguuugaua

SEQ ID NO: 839591 - RNA, 19 nt, Artificial Sequence
  Description of Artificial Sequence: Synthetic oligonucleotide
  Antisense strand to SEQ ID NO: 839590
uaucaaacuaccgucuguu

SEQ ID NO: 839592 - RNA, 19 nt, Artificial Sequence
  Description of Artificial Sequence: Synthetic oligonucleotide
  Sense strand starting at position 2318 of SEQ ID NO: 588065
aucaguaagugauuagaua

SEQ ID NO: 839593 - RNA, 19 nt, Artificial Sequence
  Description of Artificial Sequence: Synthetic oligonucleotide
  Antisense strand to SEQ ID NO: 839592
uaucuaaucacuuacugau

SEQ ID NO: 839594 - RNA, 19 nt, Artificial Sequence
  Description of Artificial Sequence: Synthetic oligonucleotide
  Sense strand starting at position 2380 of SEQ ID NO: 588065
ucgugagauugugcaugga

SEQ ID NO: 839595 - RNA, 19 nt, Artificial Sequence
  Description of Artificial Sequence: Synthetic oligonucleotide
  Antisense strand to SEQ ID NO: 839594
uccaugcacaaucucacga

SEQ ID NO: 839596 - RNA, 19 nt, Artificial Sequence
  Description of Artificial Sequence: Synthetic oligonucleotide
  Sense strand starting at position 2390 of SEQ ID NO: 588065
gugcauggaucguuucuaa

SEQ ID NO: 839597 - RNA, 19 nt, Artificial Sequence
  Description of Artificial Sequence: Synthetic oligonucleotide
  Antisense strand to SEQ ID NO: 839596
uuagaaacgauccaugcac

SEQ ID NO: 839598 - RNA, 19 nt, Artificial Sequence
  Description of Artificial Sequence: Synthetic oligonucleotide
  Sense strand starting at position 2393 of SEQ ID NO: 588065
cauggaucguuucuaauac

SEQ ID NO: 839599 - RNA, 19 nt, Artificial Sequence
  Description of Artificial Sequence: Synthetic oligonucleotide
  Antisense strand to SEQ ID NO: 839598
guauuagaaacgauccaug

SEQ ID NO: 839600 - RNA, 19 nt, Artificial Sequence
  Description of Artificial Sequence: Synthetic oligonucleotide
  Sense strand starting at position 2397 of SEQ ID NO: 588065
gaucguuucuaauacggaa

SEQ ID NO: 839601 - RNA, 19 nt, Artificial Sequence
  Description of Artificial Sequence: Synthetic oligonucleotide
  Antisense strand to SEQ ID NO: 839600
uuccguauuagaaacgauc

SEQ ID NO: 839602 - RNA, 19 nt, Artificial Sequence
  Description of Artificial Sequence: Synthetic oligonucleotide
  Sense strand starting at position 2399 of SEQ ID NO: 588065
ucguuucuaauacggaaau

SEQ ID NO: 839603 - RNA, 19 nt, Artificial Sequence
  Description of Artificial Sequence: Synthetic oligonucleotide
  Antisense strand to SEQ ID NO: 839602
auuuccguauuagaaacga

SEQ ID NO: 839604 - RNA, 19 nt, Artificial Sequence
  Description of Artificial Sequence: Synthetic oligonucleotide
  Sense strand starting at position 2412 of SEQ ID NO: 588065
ggaaaugaauuguacacuu

SEQ ID NO: 839605 - RNA, 19 nt, Artificial Sequence
  Description of Artificial Sequence: Synthetic oligonucleotide
  Antisense strand to SEQ ID NO: 839604
aaguguacaauucauuucc

SEQ ID NO: 839606 - RNA, 19 nt, Artificial Sequence
  Description of Artificial Sequence: Synthetic oligonucleotide
  Sense strand starting at position 2420 of SEQ ID NO: 588065
auuguacacuuggacauaa

SEQ ID NO: 839607 - RNA, 19 nt, Artificial Sequence
  Description of Artificial Sequence: Synthetic oligonucleotide
  Antisense strand to SEQ ID NO: 839606
uuauguccaaguguacaau

SEQ ID NO: 839608 - RNA, 19 nt, Artificial Sequence
  Description of Artificial Sequence: Synthetic oligonucleotide
  Sense strand starting at position 2688 of SEQ ID NO: 588065
acauguugcacugaugaga

SEQ ID NO: 839609 - RNA, 19 nt, Artificial Sequence
  Description of Artificial Sequence: Synthetic oligonucleotide
  Antisense strand to SEQ ID NO: 839608
ucucaucagugcaacaugu

SEQ ID NO: 839610 - RNA, 19 nt, Artificial Sequence
  Description of Artificial Sequence: Synthetic oligonucleotide
  Sense strand starting at position 2996 of SEQ ID NO: 588065
ggcccuacccuagagaucu

SEQ ID NO: 839611 - RNA, 19 nt, Artificial Sequence
  Description of Artificial Sequence: Synthetic oligonucleotide
  Antisense strand to SEQ ID NO: 839610
agaucucuaggguagggcc

SEQ ID NO: 839612 - RNA, 19 nt, Artificial Sequence
  Description of Artificial Sequence: Synthetic oligonucleotide
  Sense strand starting at position 3299 of SEQ ID NO: 588065
gcgguaugccuugaaccca

SEQ ID NO: 839613 - RNA, 19 nt, Artificial Sequence
  Description of Artificial Sequence: Synthetic oligonucleotide
  Antisense strand to SEQ ID NO: 839612
uggguucaaggcauaccgc

SEQ ID NO: 839614 - RNA, 19 nt, Artificial Sequence
  Description of Artificial Sequence: Synthetic oligonucleotide
  Sense strand starting at position 3384 of SEQ ID NO: 588065
auuguauccuucuuaugca

SEQ ID NO: 839615 - RNA, 19 nt, Artificial Sequence
  Description of Artificial Sequence: Synthetic oligonucleotide
  Antisense strand to SEQ ID NO: 839614
ugcauaagaaggauacaau

SEQ ID NO: 839616 - RNA, 19 nt, Artificial Sequence
  Description of Artificial Sequence: Synthetic oligonucleotide
  Sense strand starting at position 3385 of SEQ ID NO: 588065
uuguauccuucuuaugcau

SEQ ID NO: 839617 - RNA, 19 nt, Artificial Sequence
  Description of Artificial Sequence: Synthetic oligonucleotide
  Antisense strand to SEQ ID NO: 839616
augcauaagaaggauacaa

SEQ ID NO: 839618 - RNA, 19 nt, Artificial Sequence
  Description of Artificial Sequence: Synthetic oligonucleotide
  Sense strand starting at position 3387 of SEQ ID NO: 588065
guauccuucuuaugcauuu

SEQ ID NO: 839619 - RNA, 19 nt, Artificial Sequence
  Description of Artificial Sequence: Synthetic oligonucleotide
  Antisense strand to SEQ ID NO: 839618
aaaugcauaagaaggauac

SEQ ID NO: 839620 - RNA, 19 nt, Artificial Sequence
  Description of Artificial Sequence: Synthetic oligonucleotide
  Sense strand starting at position 3590 of SEQ ID NO: 588065
cucucuauauauguauaga

SEQ ID NO: 839621 - RNA, 19 nt, Artificial Sequence
  Description of Artificial Sequence: Synthetic oligonucleotide
  Antisense strand to SEQ ID NO: 839620
ucuauacauauauagagag

SEQ ID NO: 839622 - RNA, 19 nt, Artificial Sequence
  Description of Artificial Sequence: Synthetic oligonucleotide
  Sense strand starting at position 3830 of SEQ ID NO: 588065
aaugguauuucuugguagu

SEQ ID NO: 839623 - RNA, 19 nt, Artificial Sequence
  Description of Artificial Sequence: Synthetic oligonucleotide
  Antisense strand to SEQ ID NO: 839622
acuaccaagaaauaccauu

SEQ ID NO: 839624 - RNA, 19 nt, Artificial Sequence
  Description of Artificial Sequence: Synthetic oligonucleotide
  Sense strand starting at position 3831 of SEQ ID NO: 588065
augguauuucuugguaguu

SEQ ID NO: 839625 - RNA, 19 nt, Artificial Sequence
  Description of Artificial Sequence: Synthetic oligonucleotide
  Antisense strand to SEQ ID NO: 839624
aacuaccaagaaauaccau

SEQ ID NO: 839626 - RNA, 19 nt, Artificial Sequence
  Description of Artificial Sequence: Synthetic oligonucleotide
  Sense strand starting at position 3833 of SEQ ID NO: 588065
gguauuucuugguaguucu

SEQ ID NO: 839627 - RNA, 19 nt, Artificial Sequence
  Description of Artificial Sequence: Synthetic oligonucleotide
  Antisense strand to SEQ ID NO: 839626
agaacuaccaagaaauacc

SEQ ID NO: 839628 - RNA, 19 nt, Artificial Sequence
  Description of Artificial Sequence: Synthetic oligonucleotide
  Sense strand starting at position 158 of SEQ ID NO: 588066
uccacagaucugcagcuua

SEQ ID NO: 839629 - RNA, 19 nt, Artificial Sequence
  Description of Artificial Sequence: Synthetic oligonucleotide
  Antisense strand to SEQ ID NO: 839628
uaagcugcagaucugugga

SEQ ID NO: 839630 - RNA, 19 nt, Artificial Sequence
  Description of Artificial Sequence: Synthetic oligonucleotide
  Sense strand starting at position 163 of SEQ ID NO: 588066
agaucugcagcuuauaaau

SEQ ID NO: 839631 - RNA, 19 nt, Artificial Sequence
  Description of Artificial Sequence: Synthetic oligonucleotide
  Antisense strand to SEQ ID NO: 839630
auuuauaagcugcagaucu

SEQ ID NO: 839632 - RNA, 19 nt, Artificial Sequence
  Description of Artificial Sequence: Synthetic oligonucleotide
  Sense strand starting at position 236 of SEQ ID NO: 588066
gcaacaauuuaguauauga

SEQ ID NO: 839633 - RNA, 19 nt, Artificial Sequence
  Description of Artificial Sequence: Synthetic oligonucleotide
  Antisense strand to SEQ ID NO: 839632
ucauauacuaaauuguugc

SEQ ID NO: 839634 - RNA, 19 nt, Artificial Sequence
  Description of Artificial Sequence: Synthetic oligonucleotide
  Sense strand starting at position 277 of SEQ ID NO: 588066
ugggaagaucaaugguguu

SEQ ID NO: 839635 - RNA, 19 nt, Artificial Sequence
  Description of Artificial Sequence: Synthetic oligonucleotide
  Antisense strand to SEQ ID NO: 839634
aacaccauugaucuuccca

SEQ ID NO: 839636 - RNA, 19 nt, Artificial Sequence
  Description of Artificial Sequence: Synthetic oligonucleotide
  Sense strand starting at position 289 of SEQ ID NO: 588066
ugguguuagaaauggcuau

SEQ ID NO: 839637 - RNA, 19 nt, Artificial Sequence
  Description of Artificial Sequence: Synthetic oligonucleotide
  Antisense strand to SEQ ID NO: 839636
auagccauuucuaacacca

SEQ ID NO: 839638 - RNA, 19 nt, Artificial Sequence
  Description of Artificial Sequence: Synthetic oligonucleotide
  Sense strand starting at position 293 of SEQ ID NO: 588066
guuagaaauggcuaugauu

SEQ ID NO: 839639 - RNA, 19 nt, Artificial Sequence
  Description of Artificial Sequence: Synthetic oligonucleotide
  Antisense strand to SEQ ID NO: 839638
aaucauagccauuucuaac

SEQ ID NO: 839640 - RNA, 19 nt, Artificial Sequence
  Description of Artificial Sequence: Synthetic oligonucleotide
  Sense strand starting at position 296 of SEQ ID NO: 588066
agaaauggcuaugauuuag

SEQ ID NO: 839641 - RNA, 19 nt, Artificial Sequence
  Description of Artificial Sequence: Synthetic oligonucleotide
  Antisense strand to SEQ ID NO: 839640
cuaaaucauagccauuucu

SEQ ID NO: 839642 - RNA, 19 nt, Artificial Sequence
  Description of Artificial Sequence: Synthetic oligonucleotide
  Sense strand starting at position 302 of SEQ ID NO: 588066
ggcuaugauuuagaggaaa

SEQ ID NO: 839643 - RNA, 19 nt, Artificial Sequence
  Description of Artificial Sequence: Synthetic oligonucleotide
  Antisense strand to SEQ ID NO: 839642
uuuccucuaaaucauagcc

SEQ ID NO: 839644 - RNA, 19 nt, Artificial Sequence
  Description of Artificial Sequence: Synthetic oligonucleotide
  Sense strand starting at position 755 of SEQ ID NO: 588066
cgggaaugucaauggcaau

SEQ ID NO: 839645 - RNA, 19 nt, Artificial Sequence
  Description of Artificial Sequence: Synthetic oligonucleotide
  Antisense strand to SEQ ID NO: 839644
auugccauugacauucccg

SEQ ID NO: 839646 - RNA, 19 nt, Artificial Sequence
  Description of Artificial Sequence: Synthetic oligonucleotide
  Sense strand starting at position 756 of SEQ ID NO: 588066
gggaaugucaauggcaauc

SEQ ID NO: 839647 - RNA, 19 nt, Artificial Sequence
  Description of Artificial Sequence: Synthetic oligonucleotide
  Antisense strand to SEQ ID NO: 839646
gauugccauugacauuccc

SEQ ID NO: 839648 - RNA, 19 nt, Artificial Sequence
  Description of Artificial Sequence: Synthetic oligonucleotide
  Sense strand starting at position 900 of SEQ ID NO: 588066
ccugguguuagucaaacga

SEQ ID NO: 839649 - RNA, 19 nt, Artificial Sequence
  Description of Artificial Sequence: Synthetic oligonucleotide
  Antisense strand to SEQ ID NO: 839648
ucguuugacuaacaccagg

SEQ ID NO: 839650 - RNA, 19 nt, Artificial Sequence
  Description of Artificial Sequence: Synthetic oligonucleotide
  Sense strand starting at position 1060 of SEQ ID NO: 588066
uucugacaugccugcauua

SEQ ID NO: 839651 - RNA, 19 nt, Artificial Sequence
  Description of Artificial Sequence: Synthetic oligonucleotide
  Antisense strand to SEQ ID NO: 839650
uaaugcaggcaugucagaa

SEQ ID NO: 839652 - RNA, 19 nt, Artificial Sequence
  Description of Artificial Sequence: Synthetic oligonucleotide
  Sense strand starting at position 1062 of SEQ ID NO: 588066
cugacaugccugcauuaga

SEQ ID NO: 839653 - RNA, 19 nt, Artificial Sequence
  Description of Artificial Sequence: Synthetic oligonucleotide
  Antisense strand to SEQ ID NO: 839652
ucuaaugcaggcaugucag

SEQ ID NO: 839654 - RNA, 19 nt, Artificial Sequence
  Description of Artificial Sequence: Synthetic oligonucleotide
  Sense strand starting at position 1065 of SEQ ID NO: 588066
acaugccugcauuagaaga

SEQ ID NO: 839655 - RNA, 19 nt, Artificial Sequence
  Description of Artificial Sequence: Synthetic oligonucleotide
  Antisense strand to SEQ ID NO: 839654
ucuucuaaugcaggcaugu

SEQ ID NO: 839656 - RNA, 19 nt, Artificial Sequence
  Description of Artificial Sequence: Synthetic oligonucleotide
  Sense strand starting at position 1070 of SEQ ID NO: 588066
ccugcauuagaagaaguau

SEQ ID NO: 839657 - RNA, 19 nt, Artificial Sequence
  Description of Artificial Sequence: Synthetic oligonucleotide
  Antisense strand to SEQ ID NO: 839656
auacuucuucuaaugcagg

SEQ ID NO: 839658 - RNA, 19 nt, Artificial Sequence
  Description of Artificial Sequence: Synthetic oligonucleotide
  Sense strand starting at position 1135 of SEQ ID NO: 588066
aaauauuugcuguguugca

SEQ ID NO: 839659 - RNA, 19 nt, Artificial Sequence
  Description of Artificial Sequence: Synthetic oligonucleotide
  Antisense strand to SEQ ID NO: 839658
ugcaacacagcaaauauuu

SEQ ID NO: 839660 - RNA, 19 nt, Artificial Sequence
  Description of Artificial Sequence: Synthetic oligonucleotide
  Sense strand starting at position 1136 of SEQ ID NO: 588066
aauauuugcuguguugcaa

SEQ ID NO: 839661 - RNA, 19 nt, Artificial Sequence
  Description of Artificial Sequence: Synthetic oligonucleotide
  Antisense strand to SEQ ID NO: 839660
uugcaacacagcaaauauu

SEQ ID NO: 839662 - RNA, 19 nt, Artificial Sequence
  Description of Artificial Sequence: Synthetic oligonucleotide
  Sense strand starting at position 1182 of SEQ ID NO: 588066
gcucuaacacaguaacaga

SEQ ID NO: 839663 - RNA, 19 nt, Artificial Sequence
  Description of Artificial Sequence: Synthetic oligonucleotide
  Antisense strand to SEQ ID NO: 839662
ucuguuacuguguuagagc

SEQ ID NO: 839664 - RNA, 19 nt, Artificial Sequence
  Description of Artificial Sequence: Synthetic oligonucleotide
  Sense strand starting at position 1844 of SEQ ID NO: 588066
ggaagaguccacgauucgu

SEQ ID NO: 839665 - RNA, 19 nt, Artificial Sequence
  Description of Artificial Sequence: Synthetic oligonucleotide
  Antisense strand to SEQ ID NO: 839664
acgaaucguggacucuucc

SEQ ID NO: 839666 - RNA, 19 nt, Artificial Sequence
  Description of Artificial Sequence: Synthetic oligonucleotide
  Sense strand starting at position 1852 of SEQ ID NO: 588066
ccacgauucguguggagga

SEQ ID NO: 839667 - RNA, 19 nt, Artificial Sequence
  Description of Artificial Sequence: Synthetic oligonucleotide
  Antisense strand to SEQ ID NO: 839666
uccuccacacgaaucgugg

SEQ ID NO: 839668 - RNA, 19 nt, Artificial Sequence
  Description of Artificial Sequence: Synthetic oligonucleotide
  Sense strand starting at position 2091 of SEQ ID NO: 588066
aagcauguuuacgucauuu

SEQ ID NO: 839669 - RNA, 19 nt, Artificial Sequence
  Description of Artificial Sequence: Synthetic oligonucleotide
  Antisense strand to SEQ ID NO: 839668
aaaugacguaaacaugcuu

SEQ ID NO: 839670 - RNA, 19 nt, Artificial Sequence
  Description of Artificial Sequence: Synthetic oligonucleotide
  Sense strand starting at position 2497 of SEQ ID NO: 588066
ugcgaaugucgccuucuca

SEQ ID NO: 839671 - RNA, 19 nt, Artificial Sequence
  Description of Artificial Sequence: Synthetic oligonucleotide
  Antisense strand to SEQ ID NO: 839670
ugagaaggcgacauucgca

SEQ ID NO: 839672 - RNA, 19 nt, Artificial Sequence
  Description of Artificial Sequence: Synthetic oligonucleotide
  Sense strand starting at position 2547 of SEQ ID NO: 588066
gaaguccucuuguuugaug

SEQ ID NO: 839673 - RNA, 19 nt, Artificial Sequence
  Description of Artificial Sequence: Synthetic oligonucleotide
  Antisense strand to SEQ ID NO: 839672
caucaaacaagaggacuuc

SEQ ID NO: 839674 - RNA, 19 nt, Artificial Sequence
  Description of Artificial Sequence: Synthetic oligonucleotide
  Sense strand starting at position 2548 of SEQ ID NO: 588066
aaguccucuuguuugauga

SEQ ID NO: 839675 - RNA, 19 nt, Artificial Sequence
  Description of Artificial Sequence: Synthetic oligonucleotide
  Antisense strand to SEQ ID NO: 839674
ucaucaaacaagaggacuu

SEQ ID NO: 839676 - RNA, 19 nt, Artificial Sequence
  Description of Artificial Sequence: Synthetic oligonucleotide
  Sense strand starting at position 2562 of SEQ ID NO: 588066
gaugacuugcgugagguua

SEQ ID NO: 839677 - RNA, 19 nt, Artificial Sequence
  Description of Artificial Sequence: Synthetic oligonucleotide
  Antisense strand to SEQ ID NO: 839676
uaaccucacgcaagucauc

SEQ ID NO: 839678 - RNA, 19 nt, Artificial Sequence
  Description of Artificial Sequence: Synthetic oligonucleotide
  Sense strand starting at position 2573 of SEQ ID NO: 588066
ugagguuauuccucccacu

SEQ ID NO: 839679 - RNA, 19 nt, Artificial Sequence
  Description of Artificial Sequence: Synthetic oligonucleotide
  Antisense strand to SEQ ID NO: 839678
agugggaggaauaaccuca

SEQ ID NO: 839680 - RNA, 19 nt, Artificial Sequence
  Description of Artificial Sequence: Synthetic oligonucleotide
  Sense strand starting at position 3079 of SEQ ID NO: 588066
ggaggauguggcgauaauu

SEQ ID NO: 839681 - RNA, 19 nt, Artificial Sequence
  Description of Artificial Sequence: Synthetic oligonucleotide
  Antisense strand to SEQ ID NO: 839680
aauuaucgccacauccucc

SEQ ID NO: 839682 - RNA, 19 nt, Artificial Sequence
  Description of Artificial Sequence: Synthetic oligonucleotide
  Sense strand starting at position 3318 of SEQ ID NO: 588066
ggaggcauggcucaaaugu

SEQ ID NO: 839683 - RNA, 19 nt, Artificial Sequence
  Description of Artificial Sequence: Synthetic oligonucleotide
  Antisense strand to SEQ ID NO: 839682
acauuugagccaugccucc

SEQ ID NO: 839684 - RNA, 19 nt, Artificial Sequence
  Description of Artificial Sequence: Synthetic oligonucleotide
  Sense strand starting at position 3350 of SEQ ID NO: 588066
gggcuuaggucaaagucga

SEQ ID NO: 839685 - RNA, 19 nt, Artificial Sequence
  Description of Artificial Sequence: Synthetic oligonucleotide
  Antisense strand to SEQ ID NO: 839684
ucgacuuugaccuaagccc

SEQ ID NO: 839686 - RNA, 19 nt, Artificial Sequence
  Description of Artificial Sequence: Synthetic oligonucleotide
  Sense strand starting at position 3426 of SEQ ID NO: 588066
gggcuuuaaacuuggccau

SEQ ID NO: 839687 - RNA, 19 nt, Artificial Sequence
  Description of Artificial Sequence: Synthetic oligonucleotide
  Antisense strand to SEQ ID NO: 839686
auggccaaguuuaaagccc

SEQ ID NO: 839688 - RNA, 19 nt, Artificial Sequence
  Description of Artificial Sequence: Synthetic oligonucleotide
  Sense strand starting at position 3427 of SEQ ID NO: 588066
ggcuuuaaacuuggccauu

SEQ ID NO: 839689 - RNA, 19 nt, Artificial Sequence
  Description of Artificial Sequence: Synthetic oligonucleotide
  Antisense strand to SEQ ID NO: 839688
aauggccaaguuuaaagcc

SEQ ID NO: 839690 - RNA, 19 nt, Artificial Sequence
  Description of Artificial Sequence: Synthetic oligonucleotide
  Sense strand starting at position 3428 of SEQ ID NO: 588066
gcuuuaaacuuggccauuu

SEQ ID NO: 839691 - RNA, 19 nt, Artificial Sequence
  Description of Artificial Sequence: Synthetic oligonucleotide
  Antisense strand to SEQ ID NO: 839690
aaauggccaaguuuaaagc

SEQ ID NO: 839692 - RNA, 19 nt, Artificial Sequence
  Description of Artificial Sequence: Synthetic oligonucleotide
  Sense strand starting at position 3456 of SEQ ID NO: 588066
uguggaauggcagguuuca

SEQ ID NO: 839693 - RNA, 19 nt, Artificial Sequence
  Description of Artificial Sequence: Synthetic oligonucleotide
  Antisense strand to SEQ ID NO: 839692
ugaaaccugccauuccaca

SEQ ID NO: 839694 - RNA, 19 nt, Artificial Sequence
  Description of Artificial Sequence: Synthetic oligonucleotide
  Sense strand starting at position 3478 of SEQ ID NO: 588066
ccagaucuuccaggauaau

SEQ ID NO: 839695 - RNA, 19 nt, Artificial Sequence
  Description of Artificial Sequence: Synthetic oligonucleotide
  Antisense strand to SEQ ID NO: 839694
auuauccuggaagaucugg

SEQ ID NO: 839696 - RNA, 19 nt, Artificial Sequence
  Description of Artificial Sequence: Synthetic oligonucleotide
  Sense strand starting at position 3577 of SEQ ID NO: 588066
uugguuccgaguuaugauu

SEQ ID NO: 839697 - RNA, 19 nt, Artificial Sequence
  Description of Artificial Sequence: Synthetic oligonucleotide
  Antisense strand to SEQ ID NO: 839696
aaucauaacucggaaccaa

SEQ ID NO: 839698 - RNA, 19 nt, Artificial Sequence
  Description of Artificial Sequence: Synthetic oligonucleotide
  Sense strand starting at position 3608 of SEQ ID NO: 588066
gcauguccggguuacauga

SEQ ID NO: 839699 - RNA, 19 nt, Artificial Sequence
  Description of Artificial Sequence: Synthetic oligonucleotide
  Antisense strand to SEQ ID NO: 839698
ucauguaacccggacaugc

SEQ ID NO: 839700 - RNA, 19 nt, Artificial Sequence
  Description of Artificial Sequence: Synthetic oligonucleotide
  Sense strand starting at position 3777 of SEQ ID NO: 588066
uuggauuguccuggauugu

SEQ ID NO: 839701 - RNA, 19 nt, Artificial Sequence
  Description of Artificial Sequence: Synthetic oligonucleotide
  Antisense strand to SEQ ID NO: 839700
acaauccaggacaauccaa

SEQ ID NO: 839702 - RNA, 19 nt, Artificial Sequence
  Description of Artificial Sequence: Synthetic oligonucleotide
  Sense strand starting at position 3778 of SEQ ID NO: 588066
uggauuguccuggauuguu

SEQ ID NO: 839703 - RNA, 19 nt, Artificial Sequence
  Description of Artificial Sequence: Synthetic oligonucleotide
  Antisense strand to SEQ ID NO: 839702
aacaauccaggacaaucca

SEQ ID NO: 839704 - RNA, 19 nt, Artificial Sequence
  Description of Artificial Sequence: Synthetic oligonucleotide
  Sense strand starting at position 3799 of SEQ ID NO: 588066
agcaguugacagggaucaa

SEQ ID NO: 839705 - RNA, 19 nt, Artificial Sequence
  Description of Artificial Sequence: Synthetic oligonucleotide
  Antisense strand to SEQ ID NO: 839704
uugaucccugucaacugcu

SEQ ID NO: 839706 - RNA, 19 nt, Artificial Sequence
  Description of Artificial Sequence: Synthetic oligonucleotide
  Sense strand starting at position 3931 of SEQ ID NO: 588066
uuugcaaauguugauacau

SEQ ID NO: 839707 - RNA, 19 nt, Artificial Sequence
  Description of Artificial Sequence: Synthetic oligonucleotide
  Antisense strand to SEQ ID NO: 839706
auguaucaacauuugcaaa

SEQ ID NO: 839708 - RNA, 19 nt, Artificial Sequence
  Description of Artificial Sequence: Synthetic oligonucleotide
  Sense strand starting at position 180 of SEQ ID NO: 588067
ggagaucaacuccggcuua

SEQ ID NO: 839709 - RNA, 19 nt, Artificial Sequence
  Description of Artificial Sequence: Synthetic oligonucleotide
  Antisense strand to SEQ ID NO: 839708
uaagccggaguugaucucc

SEQ ID NO: 839710 - RNA, 19 nt, Artificial Sequence
  Description of Artificial Sequence: Synthetic oligonucleotide
  Sense strand starting at position 461 of SEQ ID NO: 588067
ugggaaauguuccuucugu

SEQ ID NO: 839711 - RNA, 19 nt, Artificial Sequence
  Description of Artificial Sequence: Synthetic oligonucleotide
  Antisense strand to SEQ ID NO: 839710
acagaaggaacauuuccca

SEQ ID NO: 839712 - RNA, 19 nt, Artificial Sequence
  Description of Artificial Sequence: Synthetic oligonucleotide
  Sense strand starting at position 462 of SEQ ID NO: 588067
gggaaauguuccuucugua

SEQ ID NO: 839713 - RNA, 19 nt, Artificial Sequence
  Description of Artificial Sequence: Synthetic oligonucleotide
  Antisense strand to SEQ ID NO: 839712
uacagaaggaacauuuccc

SEQ ID NO: 839714 - RNA, 19 nt, Artificial Sequence
  Description of Artificial Sequence: Synthetic oligonucleotide
  Sense strand starting at position 466 of SEQ ID NO: 588067
aauguuccuucuguagaga

SEQ ID NO: 839715 - RNA, 19 nt, Artificial Sequence
  Description of Artificial Sequence: Synthetic oligonucleotide
  Antisense strand to SEQ ID NO: 839714
ucucuacagaaggaacauu

SEQ ID NO: 839716 - RNA, 19 nt, Artificial Sequence
  Description of Artificial Sequence: Synthetic oligonucleotide
  Sense strand starting at position 467 of SEQ ID NO: 588067
auguuccuucuguagagau

SEQ ID NO: 839717 - RNA, 19 nt, Artificial Sequence
  Description of Artificial Sequence: Synthetic oligonucleotide
  Antisense strand to SEQ ID NO: 839716
aucucuacagaaggaacau

SEQ ID NO: 839718 - RNA, 19 nt, Artificial Sequence
  Description of Artificial Sequence: Synthetic oligonucleotide
  Sense strand starting at position 469 of SEQ ID NO: 588067
guuccuucuguagagauca

SEQ ID NO: 839719 - RNA, 19 nt, Artificial Sequence
  Description of Artificial Sequence: Synthetic oligonucleotide
  Antisense strand to SEQ ID NO: 839718
ugaucucuacagaaggaac

SEQ ID NO: 839720 - RNA, 19 nt, Artificial Sequence
  Description of Artificial Sequence: Synthetic oligonucleotide
  Sense strand starting at position 513 of SEQ ID NO: 588067
ggacccucuucuuugggau

SEQ ID NO: 839721 - RNA, 19 nt, Artificial Sequence
  Description of Artificial Sequence: Synthetic oligonucleotide
  Antisense strand to SEQ ID NO: 839720
aucccaaagaagagggucc

SEQ ID NO: 839722 - RNA, 19 nt, Artificial Sequence
  Description of Artificial Sequence: Synthetic oligonucleotide
  Sense strand starting at position 622 of SEQ ID NO: 588067
ucccauaguucuccagcau

SEQ ID NO: 839723 - RNA, 19 nt, Artificial Sequence
  Description of Artificial Sequence: Synthetic oligonucleotide
  Antisense strand to SEQ ID NO: 839722
augcuggagaacuauggga

SEQ ID NO: 839724 - RNA, 19 nt, Artificial Sequence
  Description of Artificial Sequence: Synthetic oligonucleotide
  Sense strand starting at position 728 of SEQ ID NO: 588067
cggcaucuccugcaacaaa

SEQ ID NO: 839725 - RNA, 19 nt, Artificial Sequence
  Description of Artificial Sequence: Synthetic oligonucleotide
  Antisense strand to SEQ ID NO: 839724
uuuguugcaggagaugccg

SEQ ID NO: 839726 - RNA, 19 nt, Artificial Sequence
  Description of Artificial Sequence: Synthetic oligonucleotide
  Sense strand starting at position 834 of SEQ ID NO: 588067
ugcuguggucaguaugaac

SEQ ID NO: 839727 - RNA, 19 nt, Artificial Sequence
  Description of Artificial Sequence: Synthetic oligonucleotide
  Antisense strand to SEQ ID NO: 839726
guucauacugaccacagca

SEQ ID NO: 839728 - RNA, 19 nt, Artificial Sequence
  Description of Artificial Sequence: Synthetic oligonucleotide
  Sense strand starting at position 841 of SEQ ID NO: 588067
gucaguaugaacuguguau

SEQ ID NO: 839729 - RNA, 19 nt, Artificial Sequence
  Description of Artificial Sequence: Synthetic oligonucleotide
  Antisense strand to SEQ ID NO: 839728
auacacaguucauacugac

SEQ ID NO: 839730 - RNA, 19 nt, Artificial Sequence
  Description of Artificial Sequence: Synthetic oligonucleotide
  Sense strand starting at position 843 of SEQ ID NO: 588067
caguaugaacuguguauca

SEQ ID NO: 839731 - RNA, 19 nt, Artificial Sequence
  Description of Artificial Sequence: Synthetic oligonucleotide
  Antisense strand to SEQ ID NO: 839730
ugauacacaguucauacug

SEQ ID NO: 839732 - RNA, 19 nt, Artificial Sequence
  Description of Artificial Sequence: Synthetic oligonucleotide
  Sense strand starting at position 1048 of SEQ ID NO: 588067
aguagcuucugacugggau

SEQ ID NO: 839733 - RNA, 19 nt, Artificial Sequence
  Description of Artificial Sequence: Synthetic oligonucleotide
  Antisense strand to SEQ ID NO: 839732
aucccagucagaagcuacu

SEQ ID NO: 839734 - RNA, 19 nt, Artificial Sequence
  Description of Artificial Sequence: Synthetic oligonucleotide
  Sense strand starting at position 1464 of SEQ ID NO: 588067
ugcugaaggcccuggaaau

SEQ ID NO: 839735 - RNA, 19 nt, Artificial Sequence
  Description of Artificial Sequence: Synthetic oligonucleotide
  Antisense strand to SEQ ID NO: 839734
auuuccagggccuucagca

SEQ ID NO: 839736 - RNA, 19 nt, Artificial Sequence
  Description of Artificial Sequence: Synthetic oligonucleotide
  Sense strand starting at position 2278 of SEQ ID NO: 588067
accagaaagucgcuuauga

SEQ ID NO: 839737 - RNA, 19 nt, Artificial Sequence
  Description of Artificial Sequence: Synthetic oligonucleotide
  Antisense strand to SEQ ID NO: 839736
ucauaagcgacuuucuggu

SEQ ID NO: 839738 - RNA, 19 nt, Artificial Sequence
  Description of Artificial Sequence: Synthetic oligonucleotide
  Sense strand starting at position 2280 of SEQ ID NO: 588067
cagaaagucgcuuaugaag

SEQ ID NO: 839739 - RNA, 19 nt, Artificial Sequence
  Description of Artificial Sequence: Synthetic oligonucleotide
  Antisense strand to SEQ ID NO: 839738
cuucauaagcgacuuucug

SEQ ID NO: 839740 - RNA, 19 nt, Artificial Sequence
  Description of Artificial Sequence: Synthetic oligonucleotide
  Sense strand starting at position 2286 of SEQ ID NO: 588067
gucgcuuaugaagauguua

SEQ ID NO: 839741 - RNA, 19 nt, Artificial Sequence
  Description of Artificial Sequence: Synthetic oligonucleotide
  Antisense strand to SEQ ID NO: 839740
uaacaucuucauaagcgac

SEQ ID NO: 839742 - RNA, 19 nt, Artificial Sequence
  Description of Artificial Sequence: Synthetic oligonucleotide
  Sense strand starting at position 2378 of SEQ ID NO: 588067
ccuccagucucaguucuuu

SEQ ID NO: 839743 - RNA, 19 nt, Artificial Sequence
  Description of Artificial Sequence: Synthetic oligonucleotide
  Antisense strand to SEQ ID NO: 839742
aaagaacugagacuggagg

SEQ ID NO: 839744 - RNA, 19 nt, Artificial Sequence
  Description of Artificial Sequence: Synthetic oligonucleotide
  Sense strand starting at position 2808 of SEQ ID NO: 588067
acaauaaagcaugguugaa

SEQ ID NO: 839745 - RNA, 19 nt, Artificial Sequence
  Description of Artificial Sequence: Synthetic oligonucleotide
  Antisense strand to SEQ ID NO: 839744
uucaaccaugcuuuauugu

SEQ ID NO: 839746 - RNA, 19 nt, Artificial Sequence
  Description of Artificial Sequence: Synthetic oligonucleotide
  Sense strand starting at position 2893 of SEQ ID NO: 588067
gccaucuugucacccagaa

SEQ ID NO: 839747 - RNA, 19 nt, Artificial Sequence
  Description of Artificial Sequence: Synthetic oligonucleotide
  Antisense strand to SEQ ID NO: 839746
uucugggugacaagauggc

SEQ ID NO: 839748 - RNA, 19 nt, Artificial Sequence
  Description of Artificial Sequence: Synthetic oligonucleotide
  Sense strand starting at position 2923 of SEQ ID NO: 588067
cccuguacacuguguuaga

SEQ ID NO: 839749 - RNA, 19 nt, Artificial Sequence
  Description of Artificial Sequence: Synthetic oligonucleotide
  Antisense strand to SEQ ID NO: 839748
ucuaacacaguguacaggg

SEQ ID NO: 839750 - RNA, 19 nt, Artificial Sequence
  Description of Artificial Sequence: Synthetic oligonucleotide
  Sense strand starting at position 2924 of SEQ ID NO: 588067
ccuguacacuguguuagaa

SEQ ID NO: 839751 - RNA, 19 nt, Artificial Sequence
  Description of Artificial Sequence: Synthetic oligonucleotide
  Antisense strand to SEQ ID NO: 839750
uucuaacacaguguacagg

SEQ ID NO: 839752 - RNA, 19 nt, Artificial Sequence
  Description of Artificial Sequence: Synthetic oligonucleotide
  Sense strand starting at position 2932 of SEQ ID NO: 588067
cuguguuagaaucaaggca

SEQ ID NO: 839753 - RNA, 19 nt, Artificial Sequence
  Description of Artificial Sequence: Synthetic oligonucleotide
  Antisense strand to SEQ ID NO: 839752
ugccuugauucuaacacag

SEQ ID NO: 839754 - RNA, 19 nt, Artificial Sequence
  Description of Artificial Sequence: Synthetic oligonucleotide
  Sense strand starting at position 2995 of SEQ ID NO: 588067
ugucuagaagucuaaagca

SEQ ID NO: 839755 - RNA, 19 nt, Artificial Sequence
  Description of Artificial Sequence: Synthetic oligonucleotide
  Antisense strand to SEQ ID NO: 839754
ugcuuuagacuucuagaca

SEQ ID NO: 839756 - RNA, 19 nt, Artificial Sequence
  Description of Artificial Sequence: Synthetic oligonucleotide
  Sense strand starting at position 3034 of SEQ ID NO: 588067
uuaagaagaugccuuacau

SEQ ID NO: 839757 - RNA, 19 nt, Artificial Sequence
  Description of Artificial Sequence: Synthetic oligonucleotide
  Antisense strand to SEQ ID NO: 839756
auguaaggcaucuucuuaa

SEQ ID NO: 839758 - RNA, 19 nt, Artificial Sequence
  Description of Artificial Sequence: Synthetic oligonucleotide
  Sense strand starting at position 3070 of SEQ ID NO: 588067
gggagauuguggagaauua

SEQ ID NO: 839759 - RNA, 19 nt, Artificial Sequence
  Description of Artificial Sequence: Synthetic oligonucleotide
  Antisense strand to SEQ ID NO: 839758
uaauucuccacaaucuccc

SEQ ID NO: 839760 - RNA, 19 nt, Artificial Sequence
  Description of Artificial Sequence: Synthetic oligonucleotide
  Sense strand starting at position 3079 of SEQ ID NO: 588067
uggagaauuacgcacugcu

SEQ ID NO: 839761 - RNA, 19 nt, Artificial Sequence
  Description of Artificial Sequence: Synthetic oligonucleotide
  Antisense strand to SEQ ID NO: 839760
agcagugcguaauucucca

SEQ ID NO: 839762 - RNA, 19 nt, Artificial Sequence
  Description of Artificial Sequence: Synthetic oligonucleotide
  Sense strand starting at position 3091 of SEQ ID NO: 588067
cacugcuaugcuugaggaa

SEQ ID NO: 839763 - RNA, 19 nt, Artificial Sequence
  Description of Artificial Sequence: Synthetic oligonucleotide
  Antisense strand to SEQ ID NO: 839762
uuccucaagcauagcagug

SEQ ID NO: 839764 - RNA, 19 nt, Artificial Sequence
  Description of Artificial Sequence: Synthetic oligonucleotide
  Sense strand starting at position 3134 of SEQ ID NO: 588067
ugaauuaagcuguacauaa

SEQ ID NO: 839765 - RNA, 19 nt, Artificial Sequence
  Description of Artificial Sequence: Synthetic oligonucleotide
  Antisense strand to SEQ ID NO: 839764
uuauguacagcuuaauuca

SEQ ID NO: 839766 - RNA, 19 nt, Artificial Sequence
  Description of Artificial Sequence: Synthetic oligonucleotide
  Sense strand starting at position 3179 of SEQ ID NO: 588067
aggaaucuauccuauggaa

SEQ ID NO: 839767 - RNA, 19 nt, Artificial Sequence
  Description of Artificial Sequence: Synthetic oligonucleotide
  Antisense strand to SEQ ID NO: 839766
uuccauaggauagauuccu

SEQ ID NO: 839768 - RNA, 19 nt, Artificial Sequence
  Description of Artificial Sequence: Synthetic oligonucleotide
  Sense strand starting at position 3365 of SEQ ID NO: 588067
guacacucaguugaacauu

SEQ ID NO: 839769 - RNA, 19 nt, Artificial Sequence
  Description of Artificial Sequence: Synthetic oligonucleotide
  Antisense strand to SEQ ID NO: 839768
aauguucaacugaguguac

SEQ ID NO: 839770 - RNA, 19 nt, Artificial Sequence
  Description of Artificial Sequence: Synthetic oligonucleotide
  Sense strand starting at position 3414 of SEQ ID NO: 588067
aaaguauuggcagagggua

SEQ ID NO: 839771 - RNA, 19 nt, Artificial Sequence
  Description of Artificial Sequence: Synthetic oligonucleotide
  Antisense strand to SEQ ID NO: 839770
uacccucugccaauacuuu

SEQ ID NO: 839772 - RNA, 19 nt, Artificial Sequence
  Description of Artificial Sequence: Synthetic oligonucleotide
  Sense strand starting at position 3416 of SEQ ID NO: 588067
aguauuggcagaggguaau

SEQ ID NO: 839773 - RNA, 19 nt, Artificial Sequence
  Description of Artificial Sequence: Synthetic oligonucleotide
  Antisense strand to SEQ ID NO: 839772
auuacccucugccaauacu

SEQ ID NO: 839774 - RNA, 19 nt, Artificial Sequence
  Description of Artificial Sequence: Synthetic oligonucleotide
  Sense strand starting at position 3498 of SEQ ID NO: 588067
auauauggguguuuaaguu

SEQ ID NO: 839775 - RNA, 19 nt, Artificial Sequence
  Description of Artificial Sequence: Synthetic oligonucleotide
  Antisense strand to SEQ ID NO: 839774
aacuuaaacacccauauau

SEQ ID NO: 839776 - RNA, 19 nt, Artificial Sequence
  Description of Artificial Sequence: Synthetic oligonucleotide
  Sense strand starting at position 3599 of SEQ ID NO: 588067
cuauaaauacuugggaagu

SEQ ID NO: 839777 - RNA, 19 nt, Artificial Sequence
  Description of Artificial Sequence: Synthetic oligonucleotide
  Antisense strand to SEQ ID NO: 839776
acuucccaaguauuuauag

SEQ ID NO: 839778 - RNA, 19 nt, Artificial Sequence
  Description of Artificial Sequence: Synthetic oligonucleotide
  Sense strand starting at position 3726 of SEQ ID NO: 588067
guguaaucacucugugacu

SEQ ID NO: 839779 - RNA, 19 nt, Artificial Sequence
  Description of Artificial Sequence: Synthetic oligonucleotide
  Antisense strand to SEQ ID NO: 839778
agucacagagugauuacac

SEQ ID NO: 839780 - RNA, 19 nt, Artificial Sequence
  Description of Artificial Sequence: Synthetic oligonucleotide
  Sense strand starting at position 3874 of SEQ ID NO: 588067
gcugguuugccauauuuac

SEQ ID NO: 839781 - RNA, 19 nt, Artificial Sequence
  Description of Artificial Sequence: Synthetic oligonucleotide
  Antisense strand to SEQ ID NO: 839780
guaaauauggcaaaccagc

SEQ ID NO: 839782 - RNA, 19 nt, Artificial Sequence
  Description of Artificial Sequence: Synthetic oligonucleotide
  Sense strand starting at position 3880 of SEQ ID NO: 588067
uugccauauuuacauggau

SEQ ID NO: 839783 - RNA, 19 nt, Artificial Sequence
  Description of Artificial Sequence: Synthetic oligonucleotide
  Antisense strand to SEQ ID NO: 839782
auccauguaaauauggcaa

SEQ ID NO: 839784 - RNA, 19 nt, Artificial Sequence
  Description of Artificial Sequence: Synthetic oligonucleotide
  Sense strand starting at position 3921 of SEQ ID NO: 588067
gauagagauuguuucuuuc

SEQ ID NO: 839785 - RNA, 19 nt, Artificial Sequence
  Description of Artificial Sequence: Synthetic oligonucleotide
  Antisense strand to SEQ ID NO: 839784
gaaagaaacaaucucuauc

SEQ ID NO: 839786 - RNA, 19 nt, Artificial Sequence
  Description of Artificial Sequence: Synthetic oligonucleotide
  Sense strand starting at position 3924 of SEQ ID NO: 588067
agagauuguuucuuucuuu

SEQ ID NO: 839787 - RNA, 19 nt, Artificial Sequence
  Description of Artificial Sequence: Synthetic oligonucleotide
  Antisense strand to SEQ ID NO: 839786
aaagaaagaaacaaucucu

SEQ ID NO: 839788 - RNA, 19 nt, Artificial Sequence
  Description of Artificial Sequence: Synthetic oligonucleotide
  Sense strand starting at position 4 of SEQ ID NO: 588068
acuugaaucuaggaguucu

SEQ ID NO: 839789 - RNA, 19 nt, Artificial Sequence
  Description of Artificial Sequence: Synthetic oligonucleotide
  Antisense strand to SEQ ID NO: 839788
agaacuccuagauucaagu

SEQ ID NO: 839790 - RNA, 19 nt, Artificial Sequence
  Description of Artificial Sequence: Synthetic oligonucleotide
  Sense strand starting at position 101 of SEQ ID NO: 588068
ccaccauauugccuaagga

SEQ ID NO: 839791 - RNA, 19 nt, Artificial Sequence
  Description of Artificial Sequence: Synthetic oligonucleotide
  Antisense strand to SEQ ID NO: 839790
uccuuaggcaauauggugg

SEQ ID NO: 839792 - RNA, 19 nt, Artificial Sequence
  Description of Artificial Sequence: Synthetic oligonucleotide
  Sense strand starting at position 372 of SEQ ID NO: 588068
ggcccuaccugguagaacu

SEQ ID NO: 839793 - RNA, 19 nt, Artificial Sequence
  Description of Artificial Sequence: Synthetic oligonucleotide
  Antisense strand to SEQ ID NO: 839792
aguucuaccagguagggcc

SEQ ID NO: 839794 - RNA, 19 nt, Artificial Sequence
  Description of Artificial Sequence: Synthetic oligonucleotide
  Sense strand starting at position 435 of SEQ ID NO: 588068
guacuuuauggagacucuu

SEQ ID NO: 839795 - RNA, 19 nt, Artificial Sequence
  Description of Artificial Sequence: Synthetic oligonucleotide
  Antisense strand to SEQ ID NO: 839794
aagagucuccauaaaguac

SEQ ID NO: 839796 - RNA, 19 nt, Artificial Sequence
  Description of Artificial Sequence: Synthetic oligonucleotide
  Sense strand starting at position 444 of SEQ ID NO: 588068
ggagacucuugcuaaugca

SEQ ID NO: 839797 - RNA, 19 nt, Artificial Sequence
  Description of Artificial Sequence: Synthetic oligonucleotide
  Antisense strand to SEQ ID NO: 839796
ugcauuagcaagagucucc

SEQ ID NO: 839798 - RNA, 19 nt, Artificial Sequence
  Description of Artificial Sequence: Synthetic oligonucleotide
  Sense strand starting at position 532 of SEQ ID NO: 588068
caaagucagagugguggaa

SEQ ID NO: 839799 - RNA, 19 nt, Artificial Sequence
  Description of Artificial Sequence: Synthetic oligonucleotide
  Antisense strand to SEQ ID NO: 839798
uuccaccacucugacuuug

SEQ ID NO: 839800 - RNA, 19 nt, Artificial Sequence
  Description of Artificial Sequence: Synthetic oligonucleotide
  Sense strand starting at position 536 of SEQ ID NO: 588068
gucagagugguggaaagua

SEQ ID NO: 839801 - RNA, 19 nt, Artificial Sequence
  Description of Artificial Sequence: Synthetic oligonucleotide
  Antisense strand to SEQ ID NO: 839800
uacuuuccaccacucugac

SEQ ID NO: 839802 - RNA, 19 nt, Artificial Sequence
  Description of Artificial Sequence: Synthetic oligonucleotide
  Sense strand starting at position 544 of SEQ ID NO: 588068
gguggaaaguaaugucaag

SEQ ID NO: 839803 - RNA, 19 nt, Artificial Sequence
  Description of Artificial Sequence: Synthetic oligonucleotide
  Antisense strand to SEQ ID NO: 839802
cuugacauuacuuuccacc

SEQ ID NO: 839804 - RNA, 19 nt, Artificial Sequence
  Description of Artificial Sequence: Synthetic oligonucleotide
  Sense strand starting at position 574 of SEQ ID NO: 588068
caguuauaaggcugagaaa

SEQ ID NO: 839805 - RNA, 19 nt, Artificial Sequence
  Description of Artificial Sequence: Synthetic oligonucleotide
  Antisense strand to SEQ ID NO: 839804
uuucucagccuuauaacug

SEQ ID NO: 839806 - RNA, 19 nt, Artificial Sequence
  Description of Artificial Sequence: Synthetic oligonucleotide
  Sense strand starting at position 618 of SEQ ID NO: 588068
guauaauacauagguaguu

SEQ ID NO: 839807 - RNA, 19 nt, Artificial Sequence
  Description of Artificial Sequence: Synthetic oligonucleotide
  Antisense strand to SEQ ID NO: 839806
aacuaccuauguauuauac

SEQ ID NO: 839808 - RNA, 19 nt, Artificial Sequence
  Description of Artificial Sequence: Synthetic oligonucleotide
  Sense strand starting at position 933 of SEQ ID NO: 588068
cgugcucugccauacauau

SEQ ID NO: 839809 - RNA, 19 nt, Artificial Sequence
  Description of Artificial Sequence: Synthetic oligonucleotide
  Antisense strand to SEQ ID NO: 839808
auauguauggcagagcacg

SEQ ID NO: 839810 - RNA, 19 nt, Artificial Sequence
  Description of Artificial Sequence: Synthetic oligonucleotide
  Sense strand starting at position 940 of SEQ ID NO: 588068
ugccauacauauguagauu

SEQ ID NO: 839811 - RNA, 19 nt, Artificial Sequence
  Description of Artificial Sequence: Synthetic oligonucleotide
  Antisense strand to SEQ ID NO: 839810
aaucuacauauguauggca

SEQ ID NO: 839812 - RNA, 19 nt, Artificial Sequence
  Description of Artificial Sequence: Synthetic oligonucleotide
  Sense strand starting at position 974 of SEQ ID NO: 588068
caguauuagguuuguagag

SEQ ID NO: 839813 - RNA, 19 nt, Artificial Sequence
  Description of Artificial Sequence: Synthetic oligonucleotide
  Antisense strand to SEQ ID NO: 839812
cucuacaaaccuaauacug

SEQ ID NO: 839814 - RNA, 19 nt, Artificial Sequence
  Description of Artificial Sequence: Synthetic oligonucleotide
  Sense strand starting at position 975 of SEQ ID NO: 588068
aguauuagguuuguagaga

SEQ ID NO: 839815 - RNA, 19 nt, Artificial Sequence
  Description of Artificial Sequence: Synthetic oligonucleotide
  Antisense strand to SEQ ID NO: 839814
ucucuacaaaccuaauacu

SEQ ID NO: 839816 - RNA, 19 nt, Artificial Sequence
  Description of Artificial Sequence: Synthetic oligonucleotide
  Sense strand starting at position 976 of SEQ ID NO: 588068
guauuagguuuguagagau

SEQ ID NO: 839817 - RNA, 19 nt, Artificial Sequence
  Description of Artificial Sequence: Synthetic oligonucleotide
  Antisense strand to SEQ ID NO: 839816
aucucuacaaaccuaauac

SEQ ID NO: 839818 - RNA, 19 nt, Artificial Sequence
  Description of Artificial Sequence: Synthetic oligonucleotide
  Sense strand starting at position 2301 of SEQ ID NO: 588068
cccuucgauuuacagagaa

SEQ ID NO: 839819 - RNA, 19 nt, Artificial Sequence
  Description of Artificial Sequence: Synthetic oligonucleotide
  Antisense strand to SEQ ID NO: 839818
uucucuguaaaucgaaggg

SEQ ID NO: 839820 - RNA, 19 nt, Artificial Sequence
  Description of Artificial Sequence: Synthetic oligonucleotide
  Sense strand starting at position 2354 of SEQ ID NO: 588068
gaugcuuacuggccaaaga

SEQ ID NO: 839821 - RNA, 19 nt, Artificial Sequence
  Description of Artificial Sequence: Synthetic oligonucleotide
  Antisense strand to SEQ ID NO: 839820
ucuuuggccaguaagcauc

SEQ ID NO: 839822 - RNA, 19 nt, Artificial Sequence
  Description of Artificial Sequence: Synthetic oligonucleotide
  Sense strand starting at position 2355 of SEQ ID NO: 588068
augcuuacuggccaaagaa

SEQ ID NO: 839823 - RNA, 19 nt, Artificial Sequence
  Description of Artificial Sequence: Synthetic oligonucleotide
  Antisense strand to SEQ ID NO: 839822
uucuuuggccaguaagcau

SEQ ID NO: 839824 - RNA, 19 nt, Artificial Sequence
  Description of Artificial Sequence: Synthetic oligonucleotide
  Sense strand starting at position 2371 of SEQ ID NO: 588068
gaagccugucuuggguuua

SEQ ID NO: 839825 - RNA, 19 nt, Artificial Sequence
  Description of Artificial Sequence: Synthetic oligonucleotide
  Antisense strand to SEQ ID NO: 839824
uaaacccaagacaggcuuc

SEQ ID NO: 839826 - RNA, 19 nt, Artificial Sequence
  Description of Artificial Sequence: Synthetic oligonucleotide
  Sense strand starting at position 2376 of SEQ ID NO: 588068
cugucuuggguuuaaccua

SEQ ID NO: 839827 - RNA, 19 nt, Artificial Sequence
  Description of Artificial Sequence: Synthetic oligonucleotide
  Antisense strand to SEQ ID NO: 839826
uagguuaaacccaagacag

SEQ ID NO: 839828 - RNA, 19 nt, Artificial Sequence
  Description of Artificial Sequence: Synthetic oligonucleotide
  Sense strand starting at position 2645 of SEQ ID NO: 588068
ccuggauucuuucucgaca

SEQ ID NO: 839829 - RNA, 19 nt, Artificial Sequence
  Description of Artificial Sequence: Synthetic oligonucleotide
  Antisense strand to SEQ ID NO: 839828
ugucgagaaagaauccagg

SEQ ID NO: 839830 - RNA, 19 nt, Artificial Sequence
  Description of Artificial Sequence: Synthetic oligonucleotide
  Sense strand starting at position 2646 of SEQ ID NO: 588068
cuggauucuuucucgacaa

SEQ ID NO: 839831 - RNA, 19 nt, Artificial Sequence
  Description of Artificial Sequence: Synthetic oligonucleotide
  Antisense strand to SEQ ID NO: 839830
uugucgagaaagaauccag

SEQ ID NO: 839832 - RNA, 19 nt, Artificial Sequence
  Description of Artificial Sequence: Synthetic oligonucleotide
  Sense strand starting at position 2648 of SEQ ID NO: 588068
ggauucuuucucgacaagu

SEQ ID NO: 839833 - RNA, 19 nt, Artificial Sequence
  Description of Artificial Sequence: Synthetic oligonucleotide
  Antisense strand to SEQ ID NO: 839832
acuugucgagaaagaaucc

SEQ ID NO: 839834 - RNA, 19 nt, Artificial Sequence
  Description of Artificial Sequence: Synthetic oligonucleotide
  Sense strand starting at position 2650 of SEQ ID NO: 588068
auucuuucucgacaaguca

SEQ ID NO: 839835 - RNA, 19 nt, Artificial Sequence
  Description of Artificial Sequence: Synthetic oligonucleotide
  Antisense strand to SEQ ID NO: 839834
ugacuugucgagaaagaau

SEQ ID NO: 839836 - RNA, 19 nt, Artificial Sequence
  Description of Artificial Sequence: Synthetic oligonucleotide
  Sense strand starting at position 2691 of SEQ ID NO: 588068
ugcgaaugacgagaucaaa

SEQ ID NO: 839837 - RNA, 19 nt, Artificial Sequence
  Description of Artificial Sequence: Synthetic oligonucleotide
  Antisense strand to SEQ ID NO: 839836
uuugaucucgucauucgca

SEQ ID NO: 839838 - RNA, 19 nt, Artificial Sequence
  Description of Artificial Sequence: Synthetic oligonucleotide
  Sense strand starting at position 2912 of SEQ ID NO: 588068
ggguaagguucucuagaga

SEQ ID NO: 839839 - RNA, 19 nt, Artificial Sequence
  Description of Artificial Sequence: Synthetic oligonucleotide
  Antisense strand to SEQ ID NO: 839838
ucucuagagaaccuuaccc

SEQ ID NO: 839840 - RNA, 19 nt, Artificial Sequence
  Description of Artificial Sequence: Synthetic oligonucleotide
  Sense strand starting at position 2976 of SEQ ID NO: 588068
acuugucaucccggaguga

SEQ ID NO: 839841 - RNA, 19 nt, Artificial Sequence
  Description of Artificial Sequence: Synthetic oligonucleotide
  Antisense strand to SEQ ID NO: 839840
ucacuccgggaugacaagu

SEQ ID NO: 839842 - RNA, 19 nt, Artificial Sequence
  Description of Artificial Sequence: Synthetic oligonucleotide
  Sense strand starting at position 3079 of SEQ ID NO: 588068
gcugcaguuccacaggagu

SEQ ID NO: 839843 - RNA, 19 nt, Artificial Sequence
  Description of Artificial Sequence: Synthetic oligonucleotide
  Antisense strand to SEQ ID NO: 839842
acuccuguggaacugcagc

SEQ ID NO: 839844 - RNA, 19 nt, Artificial Sequence
  Description of Artificial Sequence: Synthetic oligonucleotide
  Sense strand starting at position 3124 of SEQ ID NO: 588068
gcugcauucgcugguggaa

SEQ ID NO: 839845 - RNA, 19 nt, Artificial Sequence
  Description of Artificial Sequence: Synthetic oligonucleotide
  Antisense strand to SEQ ID NO: 839844
uuccaccagcgaaugcagc

SEQ ID NO: 839846 - RNA, 19 nt, Artificial Sequence
  Description of Artificial Sequence: Synthetic oligonucleotide
  Sense strand starting at position 3137 of SEQ ID NO: 588068
guggaacuuccucguguga

SEQ ID NO: 839847 - RNA, 19 nt, Artificial Sequence
  Description of Artificial Sequence: Synthetic oligonucleotide
  Antisense strand to SEQ ID NO: 839846
ucacacgaggaaguuccac

SEQ ID NO: 839848 - RNA, 19 nt, Artificial Sequence
  Description of Artificial Sequence: Synthetic oligonucleotide
  Sense strand starting at position 3141 of SEQ ID NO: 588068
aacuuccucgugugaaagu

SEQ ID NO: 839849 - RNA, 19 nt, Artificial Sequence
  Description of Artificial Sequence: Synthetic oligonucleotide
  Antisense strand to SEQ ID NO: 839848
acuuucacacgaggaaguu

SEQ ID NO: 839850 - RNA, 19 nt, Artificial Sequence
  Description of Artificial Sequence: Synthetic oligonucleotide
  Sense strand starting at position 3151 of SEQ ID NO: 588068
ugugaaagugcugauagga

SEQ ID NO: 839851 - RNA, 19 nt, Artificial Sequence
  Description of Artificial Sequence: Synthetic oligonucleotide
  Antisense strand to SEQ ID NO: 839850
uccuaucagcacuuucaca

SEQ ID NO: 839852 - RNA, 19 nt, Artificial Sequence
  Description of Artificial Sequence: Synthetic oligonucleotide
  Sense strand starting at position 3179 of SEQ ID NO: 588068
gggaucuccucauuggauc

SEQ ID NO: 839853 - RNA, 19 nt, Artificial Sequence
  Description of Artificial Sequence: Synthetic oligonucleotide
  Antisense strand to SEQ ID NO: 839852
gauccaaugaggagauccc

SEQ ID NO: 839854 - RNA, 19 nt, Artificial Sequence
  Description of Artificial Sequence: Synthetic oligonucleotide
  Sense strand starting at position 3180 of SEQ ID NO: 588068
ggaucuccucauuggauca

SEQ ID NO: 839855 - RNA, 19 nt, Artificial Sequence
  Description of Artificial Sequence: Synthetic oligonucleotide
  Antisense strand to SEQ ID NO: 839854
ugauccaaugaggagaucc

SEQ ID NO: 839856 - RNA, 19 nt, Artificial Sequence
  Description of Artificial Sequence: Synthetic oligonucleotide
  Sense strand starting at position 3187 of SEQ ID NO: 588068
cucauuggaucaugguuaa

SEQ ID NO: 839857 - RNA, 19 nt, Artificial Sequence
  Description of Artificial Sequence: Synthetic oligonucleotide
  Antisense strand to SEQ ID NO: 839856
uuaaccaugauccaaugag

SEQ ID NO: 839858 - RNA, 19 nt, Artificial Sequence
  Description of Artificial Sequence: Synthetic oligonucleotide
  Sense strand starting at position 3194 of SEQ ID NO: 588068
gaucaugguuaagggacaa

SEQ ID NO: 839859 - RNA, 19 nt, Artificial Sequence
  Description of Artificial Sequence: Synthetic oligonucleotide
  Antisense strand to SEQ ID NO: 839858
uugucccuuaaccaugauc

SEQ ID NO: 839860 - RNA, 19 nt, Artificial Sequence
  Description of Artificial Sequence: Synthetic oligonucleotide
  Sense strand starting at position 3209 of SEQ ID NO: 588068
acaagaugccaugggcuau

SEQ ID NO: 839861 - RNA, 19 nt, Artificial Sequence
  Description of Artificial Sequence: Synthetic oligonucleotide
  Antisense strand to SEQ ID NO: 839860
auagcccauggcaucuugu

SEQ ID NO: 839862 - RNA, 19 nt, Artificial Sequence
  Description of Artificial Sequence: Synthetic oligonucleotide
  Sense strand starting at position 3403 of SEQ ID NO: 588068
ggccaugugcuuuaaggua

SEQ ID NO: 839863 - RNA, 19 nt, Artificial Sequence
  Description of Artificial Sequence: Synthetic oligonucleotide
  Antisense strand to SEQ ID NO: 839862
uaccuuaaagcacauggcc

SEQ ID NO: 839864 - RNA, 19 nt, Artificial Sequence
  Description of Artificial Sequence: Synthetic oligonucleotide
  Sense strand starting at position 3439 of SEQ ID NO: 588068
ggcuguuccugguuaguuu

SEQ ID NO: 839865 - RNA, 19 nt, Artificial Sequence
  Description of Artificial Sequence: Synthetic oligonucleotide
  Antisense strand to SEQ ID NO: 839864
aaacuaaccaggaacagcc

SEQ ID NO: 839866 - RNA, 19 nt, Artificial Sequence
  Description of Artificial Sequence: Synthetic oligonucleotide
  Sense strand starting at position 3818 of SEQ ID NO: 588068
ugcagaacagaaugguaaa

SEQ ID NO: 839867 - RNA, 19 nt, Artificial Sequence
  Description of Artificial Sequence: Synthetic oligonucleotide
  Antisense strand to SEQ ID NO: 839866
uuuaccauucuguucugca

SEQ ID NO: 839868 - RNA, 19 nt, Artificial Sequence
  Description of Artificial Sequence: Synthetic oligonucleotide
  Sense strand starting at position 356 of SEQ ID NO: 588069
gcacauuaacuugaacgua

SEQ ID NO: 839869 - RNA, 19 nt, Artificial Sequence
  Description of Artificial Sequence: Synthetic oligonucleotide
  Antisense strand to SEQ ID NO: 839868
uacguucaaguuaaugugc

SEQ ID NO: 839870 - RNA, 19 nt, Artificial Sequence
  Description of Artificial Sequence: Synthetic oligonucleotide
  Sense strand starting at position 506 of SEQ ID NO: 588069
gaacuuaauggccauguuu

SEQ ID NO: 839871 - RNA, 19 nt, Artificial Sequence
  Description of Artificial Sequence: Synthetic oligonucleotide
  Antisense strand to SEQ ID NO: 839870
aaacauggccauuaaguuc

SEQ ID NO: 839872 - RNA, 19 nt, Artificial Sequence
  Description of Artificial Sequence: Synthetic oligonucleotide
  Sense strand starting at position 552 of SEQ ID NO: 588069
ggugcuucuguuuacacaa

SEQ ID NO: 839873 - RNA, 19 nt, Artificial Sequence
  Description of Artificial Sequence: Synthetic oligonucleotide
  Antisense strand to SEQ ID NO: 839872
uuguguaaacagaagcacc

SEQ ID NO: 839874 - RNA, 19 nt, Artificial Sequence
  Description of Artificial Sequence: Synthetic oligonucleotide
  Sense strand starting at position 596 of SEQ ID NO: 588069
cuuagauaccuguggauca

SEQ ID NO: 839875 - RNA, 19 nt, Artificial Sequence
  Description of Artificial Sequence: Synthetic oligonucleotide
  Antisense strand to SEQ ID NO: 839874
ugauccacagguaucuaag

SEQ ID NO: 839876 - RNA, 19 nt, Artificial Sequence
  Description of Artificial Sequence: Synthetic oligonucleotide
  Sense strand starting at position 607 of SEQ ID NO: 588069
guggaucacucacuuugaa

SEQ ID NO: 839877 - RNA, 19 nt, Artificial Sequence
  Description of Artificial Sequence: Synthetic oligonucleotide
  Antisense strand to SEQ ID NO: 839876
uucaaagugagugauccac

SEQ ID NO: 839878 - RNA, 19 nt, Artificial Sequence
  Description of Artificial Sequence: Synthetic oligonucleotide
  Sense strand starting at position 900 of SEQ ID NO: 588069
cuuggaaauuguuugcaca

SEQ ID NO: 839879 - RNA, 19 nt, Artificial Sequence
  Description of Artificial Sequence: Synthetic oligonucleotide
  Antisense strand to SEQ ID NO: 839878
ugugcaaacaauuuccaag

SEQ ID NO: 839880 - RNA, 19 nt, Artificial Sequence
  Description of Artificial Sequence: Synthetic oligonucleotide
  Sense strand starting at position 901 of SEQ ID NO: 588069
uuggaaauuguuugcacaa

SEQ ID NO: 839881 - RNA, 19 nt, Artificial Sequence
  Description of Artificial Sequence: Synthetic oligonucleotide
  Antisense strand to SEQ ID NO: 839880
uugugcaaacaauuuccaa

SEQ ID NO: 839882 - RNA, 19 nt, Artificial Sequence
  Description of Artificial Sequence: Synthetic oligonucleotide
  Sense strand starting at position 902 of SEQ ID NO: 588069
uggaaauuguuugcacaag

SEQ ID NO: 839883 - RNA, 19 nt, Artificial Sequence
  Description of Artificial Sequence: Synthetic oligonucleotide
  Antisense strand to SEQ ID NO: 839882
cuugugcaaacaauuucca

SEQ ID NO: 839884 - RNA, 19 nt, Artificial Sequence
  Description of Artificial Sequence: Synthetic oligonucleotide
  Sense strand starting at position 2426 of SEQ ID NO: 588069
ggaauuaaaugggagaaag

SEQ ID NO: 839885 - RNA, 19 nt, Artificial Sequence
  Description of Artificial Sequence: Synthetic oligonucleotide
  Antisense strand to SEQ ID NO: 839884
cuuucucccauuuaauucc

SEQ ID NO: 839886 - RNA, 19 nt, Artificial Sequence
  Description of Artificial Sequence: Synthetic oligonucleotide
  Sense strand starting at position 2513 of SEQ ID NO: 588069
uuggauaauuuguaacaag

SEQ ID NO: 839887 - RNA, 19 nt, Artificial Sequence
  Description of Artificial Sequence: Synthetic oligonucleotide
  Antisense strand to SEQ ID NO: 839886
cuuguuacaaauuauccaa

SEQ ID NO: 839888 - RNA, 19 nt, Artificial Sequence
  Description of Artificial Sequence: Synthetic oligonucleotide
  Sense strand starting at position 2516 of SEQ ID NO: 588069
gauaauuuguaacaaggag

SEQ ID NO: 839889 - RNA, 19 nt, Artificial Sequence
  Description of Artificial Sequence: Synthetic oligonucleotide
  Antisense strand to SEQ ID NO: 839888
cuccuuguuacaaauuauc

SEQ ID NO: 839890 - RNA, 19 nt, Artificial Sequence
  Description of Artificial Sequence: Synthetic oligonucleotide
  Sense strand starting at position 2618 of SEQ ID NO: 588069
auauaugugugggcaucaa

SEQ ID NO: 839891 - RNA, 19 nt, Artificial Sequence
  Description of Artificial Sequence: Synthetic oligonucleotide
  Antisense strand to SEQ ID NO: 839890
uugaugcccacacauauau

SEQ ID NO: 839892 - RNA, 19 nt, Artificial Sequence
  Description of Artificial Sequence: Synthetic oligonucleotide
  Sense strand starting at position 2622 of SEQ ID NO: 588069
augugugggcaucaauauu

SEQ ID NO: 839893 - RNA, 19 nt, Artificial Sequence
  Description of Artificial Sequence: Synthetic oligonucleotide
  Antisense strand to SEQ ID NO: 839892
aauauugaugcccacacau

SEQ ID NO: 839894 - RNA, 19 nt, Artificial Sequence
  Description of Artificial Sequence: Synthetic oligonucleotide
  Sense strand starting at position 2705 of SEQ ID NO: 588069
aucuguguuggacauaaug

SEQ ID NO: 839895 - RNA, 19 nt, Artificial Sequence
  Description of Artificial Sequence: Synthetic oligonucleotide
  Antisense strand to SEQ ID NO: 839894
cauuauguccaacacagau

SEQ ID NO: 839896 - RNA, 19 nt, Artificial Sequence
  Description of Artificial Sequence: Synthetic oligonucleotide
  Sense strand starting at position 2707 of SEQ ID NO: 588069
cuguguuggacauaauguu

SEQ ID NO: 839897 - RNA, 19 nt, Artificial Sequence
  Description of Artificial Sequence: Synthetic oligonucleotide
  Antisense strand to SEQ ID NO: 839896
aacauuauguccaacacag

SEQ ID NO: 839898 - RNA, 19 nt, Artificial Sequence
  Description of Artificial Sequence: Synthetic oligonucleotide
  Sense strand starting at position 2715 of SEQ ID NO: 588069
gacauaauguuugaauuug

SEQ ID NO: 839899 - RNA, 19 nt, Artificial Sequence
  Description of Artificial Sequence: Synthetic oligonucleotide
  Antisense strand to SEQ ID NO: 839898
caaauucaaacauuauguc

SEQ ID NO: 839900 - RNA, 19 nt, Artificial Sequence
  Description of Artificial Sequence: Synthetic oligonucleotide
  Sense strand starting at position 2745 of SEQ ID NO: 588069
ggauuuaaggugugcuguu

SEQ ID NO: 839901 - RNA, 19 nt, Artificial Sequence
  Description of Artificial Sequence: Synthetic oligonucleotide
  Antisense strand to SEQ ID NO: 839900
aacagcacaccuuaaaucc

SEQ ID NO: 839902 - RNA, 19 nt, Artificial Sequence
  Description of Artificial Sequence: Synthetic oligonucleotide
  Sense strand starting at position 2746 of SEQ ID NO: 588069
gauuuaaggugugcuguuu

SEQ ID NO: 839903 - RNA, 19 nt, Artificial Sequence
  Description of Artificial Sequence: Synthetic oligonucleotide
  Antisense strand to SEQ ID NO: 839902
aaacagcacaccuuaaauc

SEQ ID NO: 839904 - RNA, 19 nt, Artificial Sequence
  Description of Artificial Sequence: Synthetic oligonucleotide
  Sense strand starting at position 2780 of SEQ ID NO: 588069
agugggaguguccgggaaa

SEQ ID NO: 839905 - RNA, 19 nt, Artificial Sequence
  Description of Artificial Sequence: Synthetic oligonucleotide
  Antisense strand to SEQ ID NO: 839904
uuucccggacacucccacu

SEQ ID NO: 839906 - RNA, 19 nt, Artificial Sequence
  Description of Artificial Sequence: Synthetic oligonucleotide
  Sense strand starting at position 2806 of SEQ ID NO: 588069
aagucuuuguagucagaca

SEQ ID NO: 839907 - RNA, 19 nt, Artificial Sequence
  Description of Artificial Sequence: Synthetic oligonucleotide
  Antisense strand to SEQ ID NO: 839906
ugucugacuacaaagacuu

SEQ ID NO: 839908 - RNA, 19 nt, Artificial Sequence
  Description of Artificial Sequence: Synthetic oligonucleotide
  Sense strand starting at position 2836 of SEQ ID NO: 588069
aguccugacugagcuacau

SEQ ID NO: 839909 - RNA, 19 nt, Artificial Sequence
  Description of Artificial Sequence: Synthetic oligonucleotide
  Antisense strand to SEQ ID NO: 839908
auguagcucagucaggacu

SEQ ID NO: 839910 - RNA, 19 nt, Artificial Sequence
  Description of Artificial Sequence: Synthetic oligonucleotide
  Sense strand starting at position 2928 of SEQ ID NO: 588069
cauagauaagugugucuag

SEQ ID NO: 839911 - RNA, 19 nt, Artificial Sequence
  Description of Artificial Sequence: Synthetic oligonucleotide
  Antisense strand to SEQ ID NO: 839910
cuagacacacuuaucuaug

SEQ ID NO: 839912 - RNA, 19 nt, Artificial Sequence
  Description of Artificial Sequence: Synthetic oligonucleotide
  Sense strand starting at position 3114 of SEQ ID NO: 588069
gcuacugacaucugaugag

SEQ ID NO: 839913 - RNA, 19 nt, Artificial Sequence
  Description of Artificial Sequence: Synthetic oligonucleotide
  Antisense strand to SEQ ID NO: 839912
cucaucagaugucaguagc

SEQ ID NO: 839914 - RNA, 19 nt, Artificial Sequence
  Description of Artificial Sequence: Synthetic oligonucleotide
  Sense strand starting at position 3216 of SEQ ID NO: 588069
ugguauugccauugagaag

SEQ ID NO: 839915 - RNA, 19 nt, Artificial Sequence
  Description of Artificial Sequence: Synthetic oligonucleotide
  Antisense strand to SEQ ID NO: 839914
cuucucaauggcaauacca

SEQ ID NO: 839916 - RNA, 19 nt, Artificial Sequence
  Description of Artificial Sequence: Synthetic oligonucleotide
  Sense strand starting at position 3217 of SEQ ID NO: 588069
gguauugccauugagaagu

SEQ ID NO: 839917 - RNA, 19 nt, Artificial Sequence
  Description of Artificial Sequence: Synthetic oligonucleotide
  Antisense strand to SEQ ID NO: 839916
acuucucaauggcaauacc

SEQ ID NO: 839918 - RNA, 19 nt, Artificial Sequence
  Description of Artificial Sequence: Synthetic oligonucleotide
  Sense strand starting at position 3231 of SEQ ID NO: 588069
gaagucccgcuauagaaua

SEQ ID NO: 839919 - RNA, 19 nt, Artificial Sequence
  Description of Artificial Sequence: Synthetic oligonucleotide
  Antisense strand to SEQ ID NO: 839918
uauucuauagcgggacuuc

SEQ ID NO: 839920 - RNA, 19 nt, Artificial Sequence
  Description of Artificial Sequence: Synthetic oligonucleotide
  Sense strand starting at position 3312 of SEQ ID NO: 588069
acauuucugguuugcacua

SEQ ID NO: 839921 - RNA, 19 nt, Artificial Sequence
  Description of Artificial Sequence: Synthetic oligonucleotide
  Antisense strand to SEQ ID NO: 839920
uagugcaaaccagaaaugu

SEQ ID NO: 839922 - RNA, 19 nt, Artificial Sequence
  Description of Artificial Sequence: Synthetic oligonucleotide
  Sense strand starting at position 3317 of SEQ ID NO: 588069
ucugguuugcacuaagaag

SEQ ID NO: 839923 - RNA, 19 nt, Artificial Sequence
  Description of Artificial Sequence: Synthetic oligonucleotide
  Antisense strand to SEQ ID NO: 839922
cuucuuagugcaaaccaga

SEQ ID NO: 839924 - RNA, 19 nt, Artificial Sequence
  Description of Artificial Sequence: Synthetic oligonucleotide
  Sense strand starting at position 3664 of SEQ ID NO: 588069
aacaguggguguuuacuua

SEQ ID NO: 839925 - RNA, 19 nt, Artificial Sequence
  Description of Artificial Sequence: Synthetic oligonucleotide
  Antisense strand to SEQ ID NO: 839924
uaaguaaacacccacuguu

SEQ ID NO: 839926 - RNA, 19 nt, Artificial Sequence
  Description of Artificial Sequence: Synthetic oligonucleotide
  Sense strand starting at position 3713 of SEQ ID NO: 588069
cucaccuauccugagguuu

SEQ ID NO: 839927 - RNA, 19 nt, Artificial Sequence
  Description of Artificial Sequence: Synthetic oligonucleotide
  Antisense strand to SEQ ID NO: 839926
aaaccucaggauaggugag

SEQ ID NO: 839928 - RNA, 19 nt, Artificial Sequence
  Description of Artificial Sequence: Synthetic oligonucleotide
  Sense strand starting at position 3719 of SEQ ID NO: 588069
uauccugagguuuguaaua

SEQ ID NO: 839929 - RNA, 19 nt, Artificial Sequence
  Description of Artificial Sequence: Synthetic oligonucleotide
  Antisense strand to SEQ ID NO: 839928
uauuacaaaccucaggaua

SEQ ID NO: 839930 - RNA, 19 nt, Artificial Sequence
  Description of Artificial Sequence: Synthetic oligonucleotide
  Sense strand starting at position 3757 of SEQ ID NO: 588069
cuauacagccucugaggaa

SEQ ID NO: 839931 - RNA, 19 nt, Artificial Sequence
  Description of Artificial Sequence: Synthetic oligonucleotide
  Antisense strand to SEQ ID NO: 839930
uuccucagaggcuguauag

SEQ ID NO: 839932 - RNA, 19 nt, Artificial Sequence
  Description of Artificial Sequence: Synthetic oligonucleotide
  Sense strand starting at position 3777 of SEQ ID NO: 588069
uggauuaaugcacaugcaa

SEQ ID NO: 839933 - RNA, 19 nt, Artificial Sequence
  Description of Artificial Sequence: Synthetic oligonucleotide
  Antisense strand to SEQ ID NO: 839932
uugcaugugcauuaaucca

SEQ ID NO: 839934 - RNA, 19 nt, Artificial Sequence
  Description of Artificial Sequence: Synthetic oligonucleotide
  Sense strand starting at position 3838 of SEQ ID NO: 588069
uugcaacacccagaguaaa

SEQ ID NO: 839935 - RNA, 19 nt, Artificial Sequence
  Description of Artificial Sequence: Synthetic oligonucleotide
  Antisense strand to SEQ ID NO: 839934
uuuacucuggguguugcaa

SEQ ID NO: 839936 - RNA, 19 nt, Artificial Sequence
  Description of Artificial Sequence: Synthetic oligonucleotide
  Sense strand starting at position 3849 of SEQ ID NO: 588069
agaguaaagugguucagag

SEQ ID NO: 839937 - RNA, 19 nt, Artificial Sequence
  Description of Artificial Sequence: Synthetic oligonucleotide
  Antisense strand to SEQ ID NO: 839936
cucugaaccacuuuacucu

SEQ ID NO: 839938 - RNA, 19 nt, Artificial Sequence
  Description of Artificial Sequence: Synthetic oligonucleotide
  Sense strand starting at position 3875 of SEQ ID NO: 588069
aaaugaguccggcagcaaa

SEQ ID NO: 839939 - RNA, 19 nt, Artificial Sequence
  Description of Artificial Sequence: Synthetic oligonucleotide
  Antisense strand to SEQ ID NO: 839938
uuugcugccggacucauuu

SEQ ID NO: 839940 - RNA, 19 nt, Artificial Sequence
  Description of Artificial Sequence: Synthetic oligonucleotide
  Sense strand starting at position 3913 of SEQ ID NO: 588069
agacuaagguguucaggaa

SEQ ID NO: 839941 - RNA, 19 nt, Artificial Sequence
  Description of Artificial Sequence: Synthetic oligonucleotide
  Antisense strand to SEQ ID NO: 839940
uuccugaacaccuuagucu

SEQ ID NO: 839942 - RNA, 19 nt, Artificial Sequence
  Description of Artificial Sequence: Synthetic oligonucleotide
  Sense strand starting at position 3932 of SEQ ID NO: 588069
auguuuauugagugaaaug

SEQ ID NO: 839943 - RNA, 19 nt, Artificial Sequence
  Description of Artificial Sequence: Synthetic oligonucleotide
  Antisense strand to SEQ ID NO: 839942
cauuucacucaauaaacau

SEQ ID NO: 839944 - RNA, 19 nt, Artificial Sequence
  Description of Artificial Sequence: Synthetic oligonucleotide
  Sense strand starting at position 3955 of SEQ ID NO: 588069
agugaauguuucuuacaug

SEQ ID NO: 839945 - RNA, 19 nt, Artificial Sequence
  Description of Artificial Sequence: Synthetic oligonucleotide
  Antisense strand to SEQ ID NO: 839944
cauguaagaaacauucacu

SEQ ID NO: 839946 - RNA, 19 nt, Artificial Sequence
  Description of Artificial Sequence: Synthetic oligonucleotide
  Sense strand starting at position 3976 of SEQ ID NO: 588069
guaggacuaguauguaaac

SEQ ID NO: 839947 - RNA, 19 nt, Artificial Sequence
  Description of Artificial Sequence: Synthetic oligonucleotide
  Antisense strand to SEQ ID NO: 839946
guuuacauacuaguccuac

SEQ ID NO: 839948 - RNA, 19 nt, Artificial Sequence
  Description of Artificial Sequence: Synthetic oligonucleotide
  Sense strand starting at position 32 of SEQ ID NO: 588070
aauaaagagugcguuuaga

SEQ ID NO: 839949 - RNA, 19 nt, Artificial Sequence
  Description of Artificial Sequence: Synthetic oligonucleotide
  Antisense strand to SEQ ID NO: 839948
ucuaaacgcacucuuuauu

SEQ ID NO: 839950 - RNA, 19 nt, Artificial Sequence
  Description of Artificial Sequence: Synthetic oligonucleotide
  Sense strand starting at position 68 of SEQ ID NO: 588070
gucacaaugcuaugaagug

SEQ ID NO: 839951 - RNA, 19 nt, Artificial Sequence
  Description of Artificial Sequence: Synthetic oligonucleotide
  Antisense strand to SEQ ID NO: 839950
cacuucauagcauugugac

SEQ ID NO: 839952 - RNA, 19 nt, Artificial Sequence
  Description of Artificial Sequence: Synthetic oligonucleotide
  Sense strand starting at position 83 of SEQ ID NO: 588070
agugacauuuggcagcaga

SEQ ID NO: 839953 - RNA, 19 nt, Artificial Sequence
  Description of Artificial Sequence: Synthetic oligonucleotide
  Antisense strand to SEQ ID NO: 839952
ucugcugccaaaugucacu

SEQ ID NO: 839954 - RNA, 19 nt, Artificial Sequence
  Description of Artificial Sequence: Synthetic oligonucleotide
  Sense strand starting at position 143 of SEQ ID NO: 588070
aucagacagauucgugaau

SEQ ID NO: 839955 - RNA, 19 nt, Artificial Sequence
  Description of Artificial Sequence: Synthetic oligonucleotide
  Antisense strand to SEQ ID NO: 839954
auucacgaaucugucugau

SEQ ID NO: 839956 - RNA, 19 nt, Artificial Sequence
  Description of Artificial Sequence: Synthetic oligonucleotide
  Sense strand starting at position 323 of SEQ ID NO: 588070
agaguaucucaggguauga

SEQ ID NO: 839957 - RNA, 19 nt, Artificial Sequence
  Description of Artificial Sequence: Synthetic oligonucleotide
  Antisense strand to SEQ ID NO: 839956
ucauacccugagauacucu

SEQ ID NO: 839958 - RNA, 19 nt, Artificial Sequence
  Description of Artificial Sequence: Synthetic oligonucleotide
  Sense strand starting at position 417 of SEQ ID NO: 588070
uaggguaggacuuggacua

SEQ ID NO: 839959 - RNA, 19 nt, Artificial Sequence
  Description of Artificial Sequence: Synthetic oligonucleotide
  Antisense strand to SEQ ID NO: 839958
uaguccaaguccuacccua

SEQ ID NO: 839960 - RNA, 19 nt, Artificial Sequence
  Description of Artificial Sequence: Synthetic oligonucleotide
  Sense strand starting at position 462 of SEQ ID NO: 588070
guuugcucaugucuaggga

SEQ ID NO: 839961 - RNA, 19 nt, Artificial Sequence
  Description of Artificial Sequence: Synthetic oligonucleotide
  Antisense strand to SEQ ID NO: 839960
ucccuagacaugagcaaac

SEQ ID NO: 839962 - RNA, 19 nt, Artificial Sequence
  Description of Artificial Sequence: Synthetic oligonucleotide
  Sense strand starting at position 479 of SEQ ID NO: 588070
gagugcauguccucaggga

SEQ ID NO: 839963 - RNA, 19 nt, Artificial Sequence
  Description of Artificial Sequence: Synthetic oligonucleotide
  Antisense strand to SEQ ID NO: 839962
ucccugaggacaugcacuc

SEQ ID NO: 839964 - RNA, 19 nt, Artificial Sequence
  Description of Artificial Sequence: Synthetic oligonucleotide
  Sense strand starting at position 533 of SEQ ID NO: 588070
uuaguucuaucuucggaau

SEQ ID NO: 839965 - RNA, 19 nt, Artificial Sequence
  Description of Artificial Sequence: Synthetic oligonucleotide
  Antisense strand to SEQ ID NO: 839964
auuccgaagauagaacuaa

SEQ ID NO: 839966 - RNA, 19 nt, Artificial Sequence
  Description of Artificial Sequence: Synthetic oligonucleotide
  Sense strand starting at position 534 of SEQ ID NO: 588070
uaguucuaucuucggaauu

SEQ ID NO: 839967 - RNA, 19 nt, Artificial Sequence
  Description of Artificial Sequence: Synthetic oligonucleotide
  Antisense strand to SEQ ID NO: 839966
aauuccgaagauagaacua

SEQ ID NO: 839968 - RNA, 19 nt, Artificial Sequence
  Description of Artificial Sequence: Synthetic oligonucleotide
  Sense strand starting at position 601 of SEQ ID NO: 588070
ggagcagugauaugaugac

SEQ ID NO: 839969 - RNA, 19 nt, Artificial Sequence
  Description of Artificial Sequence: Synthetic oligonucleotide
  Antisense strand to SEQ ID NO: 839968
gucaucauaucacugcucc

SEQ ID NO: 839970 - RNA, 19 nt, Artificial Sequence
  Description of Artificial Sequence: Synthetic oligonucleotide
  Sense strand starting at position 607 of SEQ ID NO: 588070
gugauaugaugacaacaga

SEQ ID NO: 839971 - RNA, 19 nt, Artificial Sequence
  Description of Artificial Sequence: Synthetic oligonucleotide
  Antisense strand to SEQ ID NO: 839970
ucuguugucaucauaucac

SEQ ID NO: 839972 - RNA, 19 nt, Artificial Sequence
  Description of Artificial Sequence: Synthetic oligonucleotide
  Sense strand starting at position 849 of SEQ ID NO: 588070
ggaguuucuccucagggau

SEQ ID NO: 839973 - RNA, 19 nt, Artificial Sequence
  Description of Artificial Sequence: Synthetic oligonucleotide
  Antisense strand to SEQ ID NO: 839972
aucccugaggagaaacucc

SEQ ID NO: 839974 - RNA, 19 nt, Artificial Sequence
  Description of Artificial Sequence: Synthetic oligonucleotide
  Sense strand starting at position 1344 of SEQ ID NO: 588070
gcguuauugccuguuacac

SEQ ID NO: 839975 - RNA, 19 nt, Artificial Sequence
  Description of Artificial Sequence: Synthetic oligonucleotide
  Antisense strand to SEQ ID NO: 839974
guguaacaggcaauaacgc

SEQ ID NO: 839976 - RNA, 19 nt, Artificial Sequence
  Description of Artificial Sequence: Synthetic oligonucleotide
  Sense strand starting at position 1464 of SEQ ID NO: 588070
acagcuauuuacgaaauga

SEQ ID NO: 839977 - RNA, 19 nt, Artificial Sequence
  Description of Artificial Sequence: Synthetic oligonucleotide
  Antisense strand to SEQ ID NO: 839976
ucauuucguaaauagcugu

SEQ ID NO: 839978 - RNA, 19 nt, Artificial Sequence
  Description of Artificial Sequence: Synthetic oligonucleotide
  Sense strand starting at position 1472 of SEQ ID NO: 588070
uuacgaaaugacuguuggu

SEQ ID NO: 839979 - RNA, 19 nt, Artificial Sequence
  Description of Artificial Sequence: Synthetic oligonucleotide
  Antisense strand to SEQ ID NO: 839978
accaacagucauuucguaa

SEQ ID NO: 839980 - RNA, 19 nt, Artificial Sequence
  Description of Artificial Sequence: Synthetic oligonucleotide
  Sense strand starting at position 1477 of SEQ ID NO: 588070
aaaugacuguugguccaau

SEQ ID NO: 839981 - RNA, 19 nt, Artificial Sequence
  Description of Artificial Sequence: Synthetic oligonucleotide
  Antisense strand to SEQ ID NO: 839980
auuggaccaacagucauuu

SEQ ID NO: 839982 - RNA, 19 nt, Artificial Sequence
  Description of Artificial Sequence: Synthetic oligonucleotide
  Sense strand starting at position 1478 of SEQ ID NO: 588070
aaugacuguugguccaaua

SEQ ID NO: 839983 - RNA, 19 nt, Artificial Sequence
  Description of Artificial Sequence: Synthetic oligonucleotide
  Antisense strand to SEQ ID NO: 839982
uauuggaccaacagucauu

SEQ ID NO: 839984 - RNA, 19 nt, Artificial Sequence
  Description of Artificial Sequence: Synthetic oligonucleotide
  Sense strand starting at position 1536 of SEQ ID NO: 588070
aaaugaacgcugcgggaaa

SEQ ID NO: 839985 - RNA, 19 nt, Artificial Sequence
  Description of Artificial Sequence: Synthetic oligonucleotide
  Antisense strand to SEQ ID NO: 839984
uuucccgcagcguucauuu

SEQ ID NO: 839986 - RNA, 19 nt, Artificial Sequence
  Description of Artificial Sequence: Synthetic oligonucleotide
  Sense strand starting at position 2701 of SEQ ID NO: 588070
gggaucuugaagugucuuu

SEQ ID NO: 839987 - RNA, 19 nt, Artificial Sequence
  Description of Artificial Sequence: Synthetic oligonucleotide
  Antisense strand to SEQ ID NO: 839986
aaagacacuucaagauccc

SEQ ID NO: 839988 - RNA, 19 nt, Artificial Sequence
  Description of Artificial Sequence: Synthetic oligonucleotide
  Sense strand starting at position 2771 of SEQ ID NO: 588070
uggccauucugacuucuaa

SEQ ID NO: 839989 - RNA, 19 nt, Artificial Sequence
  Description of Artificial Sequence: Synthetic oligonucleotide
  Antisense strand to SEQ ID NO: 839988
uuagaagucagaauggcca

SEQ ID NO: 839990 - RNA, 19 nt, Artificial Sequence
  Description of Artificial Sequence: Synthetic oligonucleotide
  Sense strand starting at position 2795 of SEQ ID NO: 588070
cugugacuucuguaaacau

SEQ ID NO: 839991 - RNA, 19 nt, Artificial Sequence
  Description of Artificial Sequence: Synthetic oligonucleotide
  Antisense strand to SEQ ID NO: 839990
auguuuacagaagucacag

SEQ ID NO: 839992 - RNA, 19 nt, Artificial Sequence
  Description of Artificial Sequence: Synthetic oligonucleotide
  Sense strand starting at position 2814 of SEQ ID NO: 588070
uuguaugcucuuuguauuu

SEQ ID NO: 839993 - RNA, 19 nt, Artificial Sequence
  Description of Artificial Sequence: Synthetic oligonucleotide
  Antisense strand to SEQ ID NO: 839992
aaauacaaagagcauacaa

SEQ ID NO: 839994 - RNA, 19 nt, Artificial Sequence
  Description of Artificial Sequence: Synthetic oligonucleotide
  Sense strand starting at position 2905 of SEQ ID NO: 588070
cccuguuauuugccaaggu

SEQ ID NO: 839995 - RNA, 19 nt, Artificial Sequence
  Description of Artificial Sequence: Synthetic oligonucleotide
  Antisense strand to SEQ ID NO: 839994
accuuggcaaauaacaggg

SEQ ID NO: 839996 - RNA, 19 nt, Artificial Sequence
  Description of Artificial Sequence: Synthetic oligonucleotide
  Sense strand starting at position 3277 of SEQ ID NO: 588070
gucacauauucuuuagcca

SEQ ID NO: 839997 - RNA, 19 nt, Artificial Sequence
  Description of Artificial Sequence: Synthetic oligonucleotide
  Antisense strand to SEQ ID NO: 839996
uggcuaaagaauaugugac

SEQ ID NO: 839998 - RNA, 19 nt, Artificial Sequence
  Description of Artificial Sequence: Synthetic oligonucleotide
  Sense strand starting at position 3293 of SEQ ID NO: 588070
ccacuaaacuguguuguga

SEQ ID NO: 839999 - RNA, 19 nt, Artificial Sequence
  Description of Artificial Sequence: Synthetic oligonucleotide
  Antisense strand to SEQ ID NO: 839998
ucacaacacaguuuagugg

SEQ ID NO: 840000 - RNA, 19 nt, Artificial Sequence
  Description of Artificial Sequence: Synthetic oligonucleotide
  Sense strand starting at position 3306 of SEQ ID NO: 588070
uugugaaaccaucaugcaa

SEQ ID NO: 840001 - RNA, 19 nt, Artificial Sequence
  Description of Artificial Sequence: Synthetic oligonucleotide
  Antisense strand to SEQ ID NO: 840000
uugcaugaugguuucacaa

SEQ ID NO: 840002 - RNA, 19 nt, Artificial Sequence
  Description of Artificial Sequence: Synthetic oligonucleotide
  Sense strand starting at position 3342 of SEQ ID NO: 588070
auauaugaaacucgguguu

SEQ ID NO: 840003 - RNA, 19 nt, Artificial Sequence
  Description of Artificial Sequence: Synthetic oligonucleotide
  Antisense strand to SEQ ID NO: 840002
aacaccgaguuucauauau

SEQ ID NO: 840004 - RNA, 19 nt, Artificial Sequence
  Description of Artificial Sequence: Synthetic oligonucleotide
  Sense strand starting at position 3344 of SEQ ID NO: 588070
auaugaaacucgguguuuc

SEQ ID NO: 840005 - RNA, 19 nt, Artificial Sequence
  Description of Artificial Sequence: Synthetic oligonucleotide
  Antisense strand to SEQ ID NO: 840004
gaaacaccgaguuucauau

SEQ ID NO: 840006 - RNA, 19 nt, Artificial Sequence
  Description of Artificial Sequence: Synthetic oligonucleotide
  Sense strand starting at position 3593 of SEQ ID NO: 588070
gagggugauaucugucuaa

SEQ ID NO: 840007 - RNA, 19 nt, Artificial Sequence
  Description of Artificial Sequence: Synthetic oligonucleotide
  Antisense strand to SEQ ID NO: 840006
uuagacagauaucacccuc

SEQ ID NO: 840008 - RNA, 19 nt, Artificial Sequence
  Description of Artificial Sequence: Synthetic oligonucleotide
  Sense strand starting at position 3596 of SEQ ID NO: 588070
ggugauaucugucuaagua

SEQ ID NO: 840009 - RNA, 19 nt, Artificial Sequence
  Description of Artificial Sequence: Synthetic oligonucleotide
  Antisense strand to SEQ ID NO: 840008
uacuuagacagauaucacc

SEQ ID NO: 840010 - RNA, 19 nt, Artificial Sequence
  Description of Artificial Sequence: Synthetic oligonucleotide
  Sense strand starting at position 3597 of SEQ ID NO: 588070
gugauaucugucuaaguag

SEQ ID NO: 840011 - RNA, 19 nt, Artificial Sequence
  Description of Artificial Sequence: Synthetic oligonucleotide
  Antisense strand to SEQ ID NO: 840010
cuacuuagacagauaucac

SEQ ID NO: 840012 - RNA, 19 nt, Artificial Sequence
  Description of Artificial Sequence: Synthetic oligonucleotide
  Sense strand starting at position 3641 of SEQ ID NO: 588070
uggugcuaaacuuguauga

SEQ ID NO: 840013 - RNA, 19 nt, Artificial Sequence
  Description of Artificial Sequence: Synthetic oligonucleotide
  Antisense strand to SEQ ID NO: 840012
ucauacaaguuuagcacca

SEQ ID NO: 840014 - RNA, 19 nt, Artificial Sequence
  Description of Artificial Sequence: Synthetic oligonucleotide
  Sense strand starting at position 3645 of SEQ ID NO: 588070
gcuaaacuuguaugauguc

SEQ ID NO: 840015 - RNA, 19 nt, Artificial Sequence
  Description of Artificial Sequence: Synthetic oligonucleotide
  Antisense strand to SEQ ID NO: 840014
gacaucauacaaguuuagc

SEQ ID NO: 840016 - RNA, 19 nt, Artificial Sequence
  Description of Artificial Sequence: Synthetic oligonucleotide
  Sense strand starting at position 3651 of SEQ ID NO: 588070
cuuguaugaugucuacaua

SEQ ID NO: 840017 - RNA, 19 nt, Artificial Sequence
  Description of Artificial Sequence: Synthetic oligonucleotide
  Antisense strand to SEQ ID NO: 840016
uauguagacaucauacaag

SEQ ID NO: 840018 - RNA, 19 nt, Artificial Sequence
  Description of Artificial Sequence: Synthetic oligonucleotide
  Sense strand starting at position 3652 of SEQ ID NO: 588070
uuguaugaugucuacauag

SEQ ID NO: 840019 - RNA, 19 nt, Artificial Sequence
  Description of Artificial Sequence: Synthetic oligonucleotide
  Antisense strand to SEQ ID NO: 840018
cuauguagacaucauacaa

SEQ ID NO: 840020 - RNA, 19 nt, Artificial Sequence
  Description of Artificial Sequence: Synthetic oligonucleotide
  Sense strand starting at position 3654 of SEQ ID NO: 588070
guaugaugucuacauagau

SEQ ID NO: 840021 - RNA, 19 nt, Artificial Sequence
  Description of Artificial Sequence: Synthetic oligonucleotide
  Antisense strand to SEQ ID NO: 840020
aucuauguagacaucauac

SEQ ID NO: 840022 - RNA, 19 nt, Artificial Sequence
  Description of Artificial Sequence: Synthetic oligonucleotide
  Sense strand starting at position 3812 of SEQ ID NO: 588070
gagggaauuguggguacuu

SEQ ID NO: 840023 - RNA, 19 nt, Artificial Sequence
  Description of Artificial Sequence: Synthetic oligonucleotide
  Antisense strand to SEQ ID NO: 840022
aaguacccacaauucccuc

SEQ ID NO: 840024 - RNA, 19 nt, Artificial Sequence
  Description of Artificial Sequence: Synthetic oligonucleotide
  Sense strand starting at position 3923 of SEQ ID NO: 588070
ggugaacuuggauguccaa

SEQ ID NO: 840025 - RNA, 19 nt, Artificial Sequence
  Description of Artificial Sequence: Synthetic oligonucleotide
  Antisense strand to SEQ ID NO: 840024
uuggacauccaaguucacc

SEQ ID NO: 840026 - RNA, 19 nt, Artificial Sequence
  Description of Artificial Sequence: Synthetic oligonucleotide
  Sense strand starting at position 3950 of SEQ ID NO: 588070
uguaaauccugugcuauuc

SEQ ID NO: 840027 - RNA, 19 nt, Artificial Sequence
  Description of Artificial Sequence: Synthetic oligonucleotide
  Antisense strand to SEQ ID NO: 840026
gaauagcacaggauuuaca

SEQ ID NO: 840028 - RNA, 19 nt, Artificial Sequence
  Description of Artificial Sequence: Synthetic oligonucleotide
  Sense strand starting at position 119 of SEQ ID NO: 588071
agaauaacuuggucuugac

SEQ ID NO: 840029 - RNA, 19 nt, Artificial Sequence
  Description of Artificial Sequence: Synthetic oligonucleotide
  Antisense strand to SEQ ID NO: 840028
gucaagaccaaguuauucu

SEQ ID NO: 840030 - RNA, 19 nt, Artificial Sequence
  Description of Artificial Sequence: Synthetic oligonucleotide
  Sense strand starting at position 164 of SEQ ID NO: 588071
aaaggaaaguuaggauuua

SEQ ID NO: 840031 - RNA, 19 nt, Artificial Sequence
  Description of Artificial Sequence: Synthetic oligonucleotide
  Antisense strand to SEQ ID NO: 840030
uaaauccuaacuuuccuuu

SEQ ID NO: 840032 - RNA, 19 nt, Artificial Sequence
  Description of Artificial Sequence: Synthetic oligonucleotide
  Sense strand starting at position 165 of SEQ ID NO: 588071
aaggaaaguuaggauuuau

SEQ ID NO: 840033 - RNA, 19 nt, Artificial Sequence
  Description of Artificial Sequence: Synthetic oligonucleotide
  Antisense strand to SEQ ID NO: 840032
auaaauccuaacuuuccuu

SEQ ID NO: 840034 - RNA, 19 nt, Artificial Sequence
  Description of Artificial Sequence: Synthetic oligonucleotide
  Sense strand starting at position 291 of SEQ ID NO: 588071
aguuccuaagucuaucaua

SEQ ID NO: 840035 - RNA, 19 nt, Artificial Sequence
  Description of Artificial Sequence: Synthetic oligonucleotide
  Antisense strand to SEQ ID NO: 840034
uaugauagacuuaggaacu

SEQ ID NO: 840036 - RNA, 19 nt, Artificial Sequence
  Description of Artificial Sequence: Synthetic oligonucleotide
  Sense strand starting at position 642 of SEQ ID NO: 588071
acaggaaggcagugacaua

SEQ ID NO: 840037 - RNA, 19 nt, Artificial Sequence
  Description of Artificial Sequence: Synthetic oligonucleotide
  Antisense strand to SEQ ID NO: 840036
uaugucacugccuuccugu

SEQ ID NO: 840038 - RNA, 19 nt, Artificial Sequence
  Description of Artificial Sequence: Synthetic oligonucleotide
  Sense strand starting at position 649 of SEQ ID NO: 588071
ggcagugacauauggacuu

SEQ ID NO: 840039 - RNA, 19 nt, Artificial Sequence
  Description of Artificial Sequence: Synthetic oligonucleotide
  Antisense strand to SEQ ID NO: 840038
aaguccauaugucacugcc

SEQ ID NO: 840040 - RNA, 19 nt, Artificial Sequence
  Description of Artificial Sequence: Synthetic oligonucleotide
  Sense strand starting at position 805 of SEQ ID NO: 588071
uuaugugccagguagugaa

SEQ ID NO: 840041 - RNA, 19 nt, Artificial Sequence
  Description of Artificial Sequence: Synthetic oligonucleotide
  Antisense strand to SEQ ID NO: 840040
uucacuaccuggcacauaa

SEQ ID NO: 840042 - RNA, 19 nt, Artificial Sequence
  Description of Artificial Sequence: Synthetic oligonucleotide
  Sense strand starting at position 809 of SEQ ID NO: 588071
gugccagguagugaaugaa

SEQ ID NO: 840043 - RNA, 19 nt, Artificial Sequence
  Description of Artificial Sequence: Synthetic oligonucleotide
  Antisense strand to SEQ ID NO: 840042
uucauucacuaccuggcac

SEQ ID NO: 840044 - RNA, 19 nt, Artificial Sequence
  Description of Artificial Sequence: Synthetic oligonucleotide
  Sense strand starting at position 812 of SEQ ID NO: 588071
ccagguagugaaugaaaua

SEQ ID NO: 840045 - RNA, 19 nt, Artificial Sequence
  Description of Artificial Sequence: Synthetic oligonucleotide
  Antisense strand to SEQ ID NO: 840044
uauuucauucacuaccugg

SEQ ID NO: 840046 - RNA, 19 nt, Artificial Sequence
  Description of Artificial Sequence: Synthetic oligonucleotide
  Sense strand starting at position 868 of SEQ ID NO: 588071
cucugaaguguaugaacaa

SEQ ID NO: 840047 - RNA, 19 nt, Artificial Sequence
  Description of Artificial Sequence: Synthetic oligonucleotide
  Antisense strand to SEQ ID NO: 840046
uuguucauacacuucagag

SEQ ID NO: 840048 - RNA, 19 nt, Artificial Sequence
  Description of Artificial Sequence: Synthetic oligonucleotide
  Sense strand starting at position 897 of SEQ ID NO: 588071
uuuauaggaugaguuugaa

SEQ ID NO: 840049 - RNA, 19 nt, Artificial Sequence
  Description of Artificial Sequence: Synthetic oligonucleotide
  Antisense strand to SEQ ID NO: 840048
uucaaacucauccuauaaa

SEQ ID NO: 840050 - RNA, 19 nt, Artificial Sequence
  Description of Artificial Sequence: Synthetic oligonucleotide
  Sense strand starting at position 905 of SEQ ID NO: 588071
augaguuugaaagguauua

SEQ ID NO: 840051 - RNA, 19 nt, Artificial Sequence
  Description of Artificial Sequence: Synthetic oligonucleotide
  Antisense strand to SEQ ID NO: 840050
uaauaccuuucaaacucau

SEQ ID NO: 840052 - RNA, 19 nt, Artificial Sequence
  Description of Artificial Sequence: Synthetic oligonucleotide
  Sense strand starting at position 931 of SEQ ID NO: 588071
uuccuaaggucaccuagaa

SEQ ID NO: 840053 - RNA, 19 nt, Artificial Sequence
  Description of Artificial Sequence: Synthetic oligonucleotide
  Antisense strand to SEQ ID NO: 840052
uucuaggugaccuuaggaa

SEQ ID NO: 840054 - RNA, 19 nt, Artificial Sequence
  Description of Artificial Sequence: Synthetic oligonucleotide
  Sense strand starting at position 970 of SEQ ID NO: 588071
cuccaagucuguuuggaug

SEQ ID NO: 840055 - RNA, 19 nt, Artificial Sequence
  Description of Artificial Sequence: Synthetic oligonucleotide
  Antisense strand to SEQ ID NO: 840054
cauccaaacagacuuggag

SEQ ID NO: 840056 - RNA, 19 nt, Artificial Sequence
  Description of Artificial Sequence: Synthetic oligonucleotide
  Sense strand starting at position 1005 of SEQ ID NO: 588071
ucugaucuauuaucguaaa

SEQ ID NO: 840057 - RNA, 19 nt, Artificial Sequence
  Description of Artificial Sequence: Synthetic oligonucleotide
  Antisense strand to SEQ ID NO: 840056
uuuacgauaauagaucaga

SEQ ID NO: 840058 - RNA, 19 nt, Artificial Sequence
  Description of Artificial Sequence: Synthetic oligonucleotide
  Sense strand starting at position 1060 of SEQ ID NO: 588071
ugcaaagaauccucagagu

SEQ ID NO: 840059 - RNA, 19 nt, Artificial Sequence
  Description of Artificial Sequence: Synthetic oligonucleotide
  Antisense strand to SEQ ID NO: 840058
acucugaggauucuuugca

SEQ ID NO: 840060 - RNA, 19 nt, Artificial Sequence
  Description of Artificial Sequence: Synthetic oligonucleotide
  Sense strand starting at position 1069 of SEQ ID NO: 588071
uccucagagucccuuuauu

SEQ ID NO: 840061 - RNA, 19 nt, Artificial Sequence
  Description of Artificial Sequence: Synthetic oligonucleotide
  Antisense strand to SEQ ID NO: 840060
aauaaagggacucugagga

SEQ ID NO: 840062 - RNA, 19 nt, Artificial Sequence
  Description of Artificial Sequence: Synthetic oligonucleotide
  Sense strand starting at position 1194 of SEQ ID NO: 588071
guucuagagaaacgugaaa

SEQ ID NO: 840063 - RNA, 19 nt, Artificial Sequence
  Description of Artificial Sequence: Synthetic oligonucleotide
  Antisense strand to SEQ ID NO: 840062
uuucacguuucucuagaac

SEQ ID NO: 840064 - RNA, 19 nt, Artificial Sequence
  Description of Artificial Sequence: Synthetic oligonucleotide
  Sense strand starting at position 1196 of SEQ ID NO: 588071
ucuagagaaacgugaaacu

SEQ ID NO: 840065 - RNA, 19 nt, Artificial Sequence
  Description of Artificial Sequence: Synthetic oligonucleotide
  Antisense strand to SEQ ID NO: 840064
aguuucacguuucucuaga

SEQ ID NO: 840066 - RNA, 19 nt, Artificial Sequence
  Description of Artificial Sequence: Synthetic oligonucleotide
  Sense strand starting at position 1205 of SEQ ID NO: 588071
acgugaaacuagucuacau

SEQ ID NO: 840067 - RNA, 19 nt, Artificial Sequence
  Description of Artificial Sequence: Synthetic oligonucleotide
  Antisense strand to SEQ ID NO: 840066
auguagacuaguuucacgu

SEQ ID NO: 840068 - RNA, 19 nt, Artificial Sequence
  Description of Artificial Sequence: Synthetic oligonucleotide
  Sense strand starting at position 1207 of SEQ ID NO: 588071
gugaaacuagucuacauua

SEQ ID NO: 840069 - RNA, 19 nt, Artificial Sequence
  Description of Artificial Sequence: Synthetic oligonucleotide
  Antisense strand to SEQ ID NO: 840068
uaauguagacuaguuucac

SEQ ID NO: 840070 - RNA, 19 nt, Artificial Sequence
  Description of Artificial Sequence: Synthetic oligonucleotide
  Sense strand starting at position 1296 of SEQ ID NO: 588071
uggaguuguucgaauggag

SEQ ID NO: 840071 - RNA, 19 nt, Artificial Sequence
  Description of Artificial Sequence: Synthetic oligonucleotide
  Antisense strand to SEQ ID NO: 840070
cuccauucgaacaacucca

SEQ ID NO: 840072 - RNA, 19 nt, Artificial Sequence
  Description of Artificial Sequence: Synthetic oligonucleotide
  Sense strand starting at position 1300 of SEQ ID NO: 588071
guuguucgaauggaguuau

SEQ ID NO: 840073 - RNA, 19 nt, Artificial Sequence
  Description of Artificial Sequence: Synthetic oligonucleotide
  Antisense strand to SEQ ID NO: 840072
auaacuccauucgaacaac

SEQ ID NO: 840074 - RNA, 19 nt, Artificial Sequence
  Description of Artificial Sequence: Synthetic oligonucleotide
  Sense strand starting at position 1304 of SEQ ID NO: 588071
uucgaauggaguuauauau

SEQ ID NO: 840075 - RNA, 19 nt, Artificial Sequence
  Description of Artificial Sequence: Synthetic oligonucleotide
  Antisense strand to SEQ ID NO: 840074
auauauaacuccauucgaa

SEQ ID NO: 840076 - RNA, 19 nt, Artificial Sequence
  Description of Artificial Sequence: Synthetic oligonucleotide
  Sense strand starting at position 1374 of SEQ ID NO: 588071
gagucugggcaacacauua

SEQ ID NO: 840077 - RNA, 19 nt, Artificial Sequence
  Description of Artificial Sequence: Synthetic oligonucleotide
  Antisense strand to SEQ ID NO: 840076
uaauguguugcccagacuc

SEQ ID NO: 840078 - RNA, 19 nt, Artificial Sequence
  Description of Artificial Sequence: Synthetic oligonucleotide
  Sense strand starting at position 1451 of SEQ ID NO: 588071
ggaacaguggcucagcaaa

SEQ ID NO: 840079 - RNA, 19 nt, Artificial Sequence
  Description of Artificial Sequence: Synthetic oligonucleotide
  Antisense strand to SEQ ID NO: 840078
uuugcugagccacuguucc

SEQ ID NO: 840080 - RNA, 19 nt, Artificial Sequence
  Description of Artificial Sequence: Synthetic oligonucleotide
  Sense strand starting at position 1538 of SEQ ID NO: 588071
acuguucuagagcaacaau

SEQ ID NO: 840081 - RNA, 19 nt, Artificial Sequence
  Description of Artificial Sequence: Synthetic oligonucleotide
  Antisense strand to SEQ ID NO: 840080
auuguugcucuagaacagu

SEQ ID NO: 840082 - RNA, 19 nt, Artificial Sequence
  Description of Artificial Sequence: Synthetic oligonucleotide
  Sense strand starting at position 1549 of SEQ ID NO: 588071
gcaacaaugugaucagagu

SEQ ID NO: 840083 - RNA, 19 nt, Artificial Sequence
  Description of Artificial Sequence: Synthetic oligonucleotide
  Antisense strand to SEQ ID NO: 840082
acucugaucacauuguugc

SEQ ID NO: 840084 - RNA, 19 nt, Artificial Sequence
  Description of Artificial Sequence: Synthetic oligonucleotide
  Sense strand starting at position 1572 of SEQ ID NO: 588071
ccgugcuuugaucagaaag

SEQ ID NO: 840085 - RNA, 19 nt, Artificial Sequence
  Description of Artificial Sequence: Synthetic oligonucleotide
  Antisense strand to SEQ ID NO: 840084
cuuucugaucaaagcacgg

SEQ ID NO: 840086 - RNA, 19 nt, Artificial Sequence
  Description of Artificial Sequence: Synthetic oligonucleotide
  Sense strand starting at position 2063 of SEQ ID NO: 588071
cccacucucguugaucuua

SEQ ID NO: 840087 - RNA, 19 nt, Artificial Sequence
  Description of Artificial Sequence: Synthetic oligonucleotide
  Antisense strand to SEQ ID NO: 840086
uaagaucaacgagaguggg

SEQ ID NO: 840088 - RNA, 19 nt, Artificial Sequence
  Description of Artificial Sequence: Synthetic oligonucleotide
  Sense strand starting at position 2197 of SEQ ID NO: 588071
cugauuggagcuuauacuu

SEQ ID NO: 840089 - RNA, 19 nt, Artificial Sequence
  Description of Artificial Sequence: Synthetic oligonucleotide
  Antisense strand to SEQ ID NO: 840088
aaguauaagcuccaaucag

SEQ ID NO: 840090 - RNA, 19 nt, Artificial Sequence
  Description of Artificial Sequence: Synthetic oligonucleotide
  Sense strand starting at position 2611 of SEQ ID NO: 588071
ccgcuaugaacauggauau

SEQ ID NO: 840091 - RNA, 19 nt, Artificial Sequence
  Description of Artificial Sequence: Synthetic oligonucleotide
  Antisense strand to SEQ ID NO: 840090
auauccauguucauagcgg

SEQ ID NO: 840092 - RNA, 19 nt, Artificial Sequence
  Description of Artificial Sequence: Synthetic oligonucleotide
  Sense strand starting at position 2612 of SEQ ID NO: 588071
cgcuaugaacauggauaua

SEQ ID NO: 840093 - RNA, 19 nt, Artificial Sequence
  Description of Artificial Sequence: Synthetic oligonucleotide
  Antisense strand to SEQ ID NO: 840092
uauauccauguucauagcg

SEQ ID NO: 840094 - RNA, 19 nt, Artificial Sequence
  Description of Artificial Sequence: Synthetic oligonucleotide
  Sense strand starting at position 2633 of SEQ ID NO: 588071
uuuacuuaccugugaaagu

SEQ ID NO: 840095 - RNA, 19 nt, Artificial Sequence
  Description of Artificial Sequence: Synthetic oligonucleotide
  Antisense strand to SEQ ID NO: 840094
acuuucacagguaaguaaa

SEQ ID NO: 840096 - RNA, 19 nt, Artificial Sequence
  Description of Artificial Sequence: Synthetic oligonucleotide
  Sense strand starting at position 3384 of SEQ ID NO: 588071
guuagugcaacugguauuu

SEQ ID NO: 840097 - RNA, 19 nt, Artificial Sequence
  Description of Artificial Sequence: Synthetic oligonucleotide
  Antisense strand to SEQ ID NO: 840096
aaauaccaguugcacuaac

SEQ ID NO: 840098 - RNA, 19 nt, Artificial Sequence
  Description of Artificial Sequence: Synthetic oligonucleotide
  Sense strand starting at position 3425 of SEQ ID NO: 588071
ggagguuugauauggcuac

SEQ ID NO: 840099 - RNA, 19 nt, Artificial Sequence
  Description of Artificial Sequence: Synthetic oligonucleotide
  Antisense strand to SEQ ID NO: 840098
guagccauaucaaaccucc

SEQ ID NO: 840100 - RNA, 19 nt, Artificial Sequence
  Description of Artificial Sequence: Synthetic oligonucleotide
  Sense strand starting at position 3429 of SEQ ID NO: 588071
guuugauauggcuacggac

SEQ ID NO: 840101 - RNA, 19 nt, Artificial Sequence
  Description of Artificial Sequence: Synthetic oligonucleotide
  Antisense strand to SEQ ID NO: 840100
guccguagccauaucaaac

SEQ ID NO: 840102 - RNA, 19 nt, Artificial Sequence
  Description of Artificial Sequence: Synthetic oligonucleotide
  Sense strand starting at position 3446 of SEQ ID NO: 588071
acucgucuucuagaaacac

SEQ ID NO: 840103 - RNA, 19 nt, Artificial Sequence
  Description of Artificial Sequence: Synthetic oligonucleotide
  Antisense strand to SEQ ID NO: 840102
guguuucuagaagacgagu

SEQ ID NO: 840104 - RNA, 19 nt, Artificial Sequence
  Description of Artificial Sequence: Synthetic oligonucleotide
  Sense strand starting at position 3535 of SEQ ID NO: 588071
ccaagucagucccucaaga

SEQ ID NO: 840105 - RNA, 19 nt, Artificial Sequence
  Description of Artificial Sequence: Synthetic oligonucleotide
  Antisense strand to SEQ ID NO: 840104
ucuugagggacugacuugg

SEQ ID NO: 840106 - RNA, 19 nt, Artificial Sequence
  Description of Artificial Sequence: Synthetic oligonucleotide
  Sense strand starting at position 3947 of SEQ ID NO: 588071
ucaucuguuguguaauaaa

SEQ ID NO: 840107 - RNA, 19 nt, Artificial Sequence
  Description of Artificial Sequence: Synthetic oligonucleotide
  Antisense strand to SEQ ID NO: 840106
uuuauuacacaacagauga

SEQ ID NO: 840108 - RNA, 19 nt, Artificial Sequence
  Description of Artificial Sequence: Synthetic oligonucleotide
  Sense strand starting at position 26 of SEQ ID NO: 588072
ggcauaacucaacaugugu

SEQ ID NO: 840109 - RNA, 19 nt, Artificial Sequence
  Description of Artificial Sequence: Synthetic oligonucleotide
  Antisense strand to SEQ ID NO: 840108
acacauguugaguuaugcc

SEQ ID NO: 840110 - RNA, 19 nt, Artificial Sequence
  Description of Artificial Sequence: Synthetic oligonucleotide
  Sense strand starting at position 146 of SEQ ID NO: 588072
caccguucuucccuaguga

SEQ ID NO: 840111 - RNA, 19 nt, Artificial Sequence
  Description of Artificial Sequence: Synthetic oligonucleotide
  Antisense strand to SEQ ID NO: 840110
ucacuagggaagaacggug

SEQ ID NO: 840112 - RNA, 19 nt, Artificial Sequence
  Description of Artificial Sequence: Synthetic oligonucleotide
  Sense strand starting at position 147 of SEQ ID NO: 588072
accguucuucccuagugaa

SEQ ID NO: 840113 - RNA, 19 nt, Artificial Sequence
  Description of Artificial Sequence: Synthetic oligonucleotide
  Antisense strand to SEQ ID NO: 840112
uucacuagggaagaacggu

SEQ ID NO: 840114 - RNA, 19 nt, Artificial Sequence
  Description of Artificial Sequence: Synthetic oligonucleotide
  Sense strand starting at position 186 of SEQ ID NO: 588072
ggcagcuguggguauauca

SEQ ID NO: 840115 - RNA, 19 nt, Artificial Sequence
  Description of Artificial Sequence: Synthetic oligonucleotide
  Antisense strand to SEQ ID NO: 840114
ugauauacccacagcugcc

SEQ ID NO: 840116 - RNA, 19 nt, Artificial Sequence
  Description of Artificial Sequence: Synthetic oligonucleotide
  Sense strand starting at position 196 of SEQ ID NO: 588072
gguauaucaacuggucuga

SEQ ID NO: 840117 - RNA, 19 nt, Artificial Sequence
  Description of Artificial Sequence: Synthetic oligonucleotide
  Antisense strand to SEQ ID NO: 840116
ucagaccaguugauauacc

SEQ ID NO: 840118 - RNA, 19 nt, Artificial Sequence
  Description of Artificial Sequence: Synthetic oligonucleotide
  Sense strand starting at position 261 of SEQ ID NO: 588072
cagugucaugggugagaau

SEQ ID NO: 840119 - RNA, 19 nt, Artificial Sequence
  Description of Artificial Sequence: Synthetic oligonucleotide
  Antisense strand to SEQ ID NO: 840118
auucucacccaugacacug

SEQ ID NO: 840120 - RNA, 19 nt, Artificial Sequence
  Description of Artificial Sequence: Synthetic oligonucleotide
  Sense strand starting at position 328 of SEQ ID NO: 588072
acuucuggauccugaauac

SEQ ID NO: 840121 - RNA, 19 nt, Artificial Sequence
  Description of Artificial Sequence: Synthetic oligonucleotide
  Antisense strand to SEQ ID NO: 840120
guauucaggauccagaagu

SEQ ID NO: 840122 - RNA, 19 nt, Artificial Sequence
  Description of Artificial Sequence: Synthetic oligonucleotide
  Sense strand starting at position 390 of SEQ ID NO: 588072
uuagaaagauaccuuuguu

SEQ ID NO: 840123 - RNA, 19 nt, Artificial Sequence
  Description of Artificial Sequence: Synthetic oligonucleotide
  Antisense strand to SEQ ID NO: 840122
aacaaagguaucuuucuaa

SEQ ID NO: 840124 - RNA, 19 nt, Artificial Sequence
  Description of Artificial Sequence: Synthetic oligonucleotide
  Sense strand starting at position 393 of SEQ ID NO: 588072
gaaagauaccuuuguugug

SEQ ID NO: 840125 - RNA, 19 nt, Artificial Sequence
  Description of Artificial Sequence: Synthetic oligonucleotide
  Antisense strand to SEQ ID NO: 840124
cacaacaaagguaucuuuc

SEQ ID NO: 840126 - RNA, 19 nt, Artificial Sequence
  Description of Artificial Sequence: Synthetic oligonucleotide
  Sense strand starting at position 399 of SEQ ID NO: 588072
uaccuuuguugugugcuua

SEQ ID NO: 840127 - RNA, 19 nt, Artificial Sequence
  Description of Artificial Sequence: Synthetic oligonucleotide
  Antisense strand to SEQ ID NO: 840126
uaagcacacaacaaaggua

SEQ ID NO: 840128 - RNA, 19 nt, Artificial Sequence
  Description of Artificial Sequence: Synthetic oligonucleotide
  Sense strand starting at position 402 of SEQ ID NO: 588072
cuuuguugugugcuuacuu

SEQ ID NO: 840129 - RNA, 19 nt, Artificial Sequence
  Description of Artificial Sequence: Synthetic oligonucleotide
  Antisense strand to SEQ ID NO: 840128
aaguaagcacacaacaaag

SEQ ID NO: 840130 - RNA, 19 nt, Artificial Sequence
  Description of Artificial Sequence: Synthetic oligonucleotide
  Sense strand starting at position 403 of SEQ ID NO: 588072
uuuguugugugcuuacuuu

SEQ ID NO: 840131 - RNA, 19 nt, Artificial Sequence
  Description of Artificial Sequence: Synthetic oligonucleotide
  Antisense strand to SEQ ID NO: 840130
aaaguaagcacacaacaaa

SEQ ID NO: 840132 - RNA, 19 nt, Artificial Sequence
  Description of Artificial Sequence: Synthetic oligonucleotide
  Sense strand starting at position 407 of SEQ ID NO: 588072
uugugugcuuacuuuauaa

SEQ ID NO: 840133 - RNA, 19 nt, Artificial Sequence
  Description of Artificial Sequence: Synthetic oligonucleotide
  Antisense strand to SEQ ID NO: 840132
uuauaaaguaagcacacaa

SEQ ID NO: 840134 - RNA, 19 nt, Artificial Sequence
  Description of Artificial Sequence: Synthetic oligonucleotide
  Sense strand starting at position 409 of SEQ ID NO: 588072
gugugcuuacuuuauaaag

SEQ ID NO: 840135 - RNA, 19 nt, Artificial Sequence
  Description of Artificial Sequence: Synthetic oligonucleotide
  Antisense strand to SEQ ID NO: 840134
cuuuauaaaguaagcacac

SEQ ID NO: 840136 - RNA, 19 nt, Artificial Sequence
  Description of Artificial Sequence: Synthetic oligonucleotide
  Sense strand starting at position 539 of SEQ ID NO: 588072
gcaugaccuuaauacgaua

SEQ ID NO: 840137 - RNA, 19 nt, Artificial Sequence
  Description of Artificial Sequence: Synthetic oligonucleotide
  Antisense strand to SEQ ID NO: 840136
uaucguauuaaggucaugc

SEQ ID NO: 840138 - RNA, 19 nt, Artificial Sequence
  Description of Artificial Sequence: Synthetic oligonucleotide
  Sense strand starting at position 606 of SEQ ID NO: 588072
augucacacucuuaaguaa

SEQ ID NO: 840139 - RNA, 19 nt, Artificial Sequence
  Description of Artificial Sequence: Synthetic oligonucleotide
  Antisense strand to SEQ ID NO: 840138
uuacuuaagagugugacau

SEQ ID NO: 840140 - RNA, 19 nt, Artificial Sequence
  Description of Artificial Sequence: Synthetic oligonucleotide
  Sense strand starting at position 621 of SEQ ID NO: 588072
guaacagcgauuugucuuu

SEQ ID NO: 840141 - RNA, 19 nt, Artificial Sequence
  Description of Artificial Sequence: Synthetic oligonucleotide
  Antisense strand to SEQ ID NO: 840140
aaagacaaaucgcuguuac

SEQ ID NO: 840142 - RNA, 19 nt, Artificial Sequence
  Description of Artificial Sequence: Synthetic oligonucleotide
  Sense strand starting at position 666 of SEQ ID NO: 588072
gcauuugucuucuccagaa

SEQ ID NO: 840143 - RNA, 19 nt, Artificial Sequence
  Description of Artificial Sequence: Synthetic oligonucleotide
  Antisense strand to SEQ ID NO: 840142
uucuggagaagacaaaugc

SEQ ID NO: 840144 - RNA, 19 nt, Artificial Sequence
  Description of Artificial Sequence: Synthetic oligonucleotide
  Sense strand starting at position 722 of SEQ ID NO: 588072
agauguaauuauuggaacu

SEQ ID NO: 840145 - RNA, 19 nt, Artificial Sequence
  Description of Artificial Sequence: Synthetic oligonucleotide
  Antisense strand to SEQ ID NO: 840144
aguuccaauaauuacaucu

SEQ ID NO: 840146 - RNA, 19 nt, Artificial Sequence
  Description of Artificial Sequence: Synthetic oligonucleotide
  Sense strand starting at position 724 of SEQ ID NO: 588072
auguaauuauuggaacuga

SEQ ID NO: 840147 - RNA, 19 nt, Artificial Sequence
  Description of Artificial Sequence: Synthetic oligonucleotide
  Antisense strand to SEQ ID NO: 840146
ucaguuccaauaauuacau

SEQ ID NO: 840148 - RNA, 19 nt, Artificial Sequence
  Description of Artificial Sequence: Synthetic oligonucleotide
  Sense strand starting at position 751 of SEQ ID NO: 588072
aaaggugagcuuuggaaau

SEQ ID NO: 840149 - RNA, 19 nt, Artificial Sequence
  Description of Artificial Sequence: Synthetic oligonucleotide
  Antisense strand to SEQ ID NO: 840148
auuuccaaagcucaccuuu

SEQ ID NO: 840150 - RNA, 19 nt, Artificial Sequence
  Description of Artificial Sequence: Synthetic oligonucleotide
  Sense strand starting at position 753 of SEQ ID NO: 588072
aggugagcuuuggaaauau

SEQ ID NO: 840151 - RNA, 19 nt, Artificial Sequence
  Description of Artificial Sequence: Synthetic oligonucleotide
  Antisense strand to SEQ ID NO: 840150
auauuuccaaagcucaccu

SEQ ID NO: 840152 - RNA, 19 nt, Artificial Sequence
  Description of Artificial Sequence: Synthetic oligonucleotide
  Sense strand starting at position 762 of SEQ ID NO: 588072
uuggaaauaucuuugagca

SEQ ID NO: 840153 - RNA, 19 nt, Artificial Sequence
  Description of Artificial Sequence: Synthetic oligonucleotide
  Antisense strand to SEQ ID NO: 840152
ugcucaaagauauuuccaa

SEQ ID NO: 840154 - RNA, 19 nt, Artificial Sequence
  Description of Artificial Sequence: Synthetic oligonucleotide
  Sense strand starting at position 763 of SEQ ID NO: 588072
uggaaauaucuuugagcag

SEQ ID NO: 840155 - RNA, 19 nt, Artificial Sequence
  Description of Artificial Sequence: Synthetic oligonucleotide
  Antisense strand to SEQ ID NO: 840154
cugcucaaagauauuucca

SEQ ID NO: 840156 - RNA, 19 nt, Artificial Sequence
  Description of Artificial Sequence: Synthetic oligonucleotide
  Sense strand starting at position 764 of SEQ ID NO: 588072
ggaaauaucuuugagcagu

SEQ ID NO: 840157 - RNA, 19 nt, Artificial Sequence
  Description of Artificial Sequence: Synthetic oligonucleotide
  Antisense strand to SEQ ID NO: 840156
acugcucaaagauauuucc

SEQ ID NO: 840158 - RNA, 19 nt, Artificial Sequence
  Description of Artificial Sequence: Synthetic oligonucleotide
  Sense strand starting at position 1141 of SEQ ID NO: 588072
ucuaaagaauuugggaauu

SEQ ID NO: 840159 - RNA, 19 nt, Artificial Sequence
  Description of Artificial Sequence: Synthetic oligonucleotide
  Antisense strand to SEQ ID NO: 840158
aauucccaaauucuuuaga

SEQ ID NO: 840160 - RNA, 19 nt, Artificial Sequence
  Description of Artificial Sequence: Synthetic oligonucleotide
  Sense strand starting at position 2842 of SEQ ID NO: 588072
uauaaugaggcucguaaag

SEQ ID NO: 840161 - RNA, 19 nt, Artificial Sequence
  Description of Artificial Sequence: Synthetic oligonucleotide
  Antisense strand to SEQ ID NO: 840160
cuuuacgagccucauuaua

SEQ ID NO: 840162 - RNA, 19 nt, Artificial Sequence
  Description of Artificial Sequence: Synthetic oligonucleotide
  Sense strand starting at position 2860 of SEQ ID NO: 588072
guggauacuguucaggaca

SEQ ID NO: 840163 - RNA, 19 nt, Artificial Sequence
  Description of Artificial Sequence: Synthetic oligonucleotide
  Antisense strand to SEQ ID NO: 840162
uguccugaacaguauccac

SEQ ID NO: 840164 - RNA, 19 nt, Artificial Sequence
  Description of Artificial Sequence: Synthetic oligonucleotide
  Sense strand starting at position 2986 of SEQ ID NO: 588072
cggauuucguuagcuucau

SEQ ID NO: 840165 - RNA, 19 nt, Artificial Sequence
  Description of Artificial Sequence: Synthetic oligonucleotide
  Antisense strand to SEQ ID NO: 840164
augaagcuaacgaaauccg

SEQ ID NO: 840166 - RNA, 19 nt, Artificial Sequence
  Description of Artificial Sequence: Synthetic oligonucleotide
  Sense strand starting at position 3207 of SEQ ID NO: 588072
ucucuuagccaauggaaca

SEQ ID NO: 840167 - RNA, 19 nt, Artificial Sequence
  Description of Artificial Sequence: Synthetic oligonucleotide
  Antisense strand to SEQ ID NO: 840166
uguuccauuggcuaagaga

SEQ ID NO: 840168 - RNA, 19 nt, Artificial Sequence
  Description of Artificial Sequence: Synthetic oligonucleotide
  Sense strand starting at position 3322 of SEQ ID NO: 588072
uucuauguuucccucuaga

SEQ ID NO: 840169 - RNA, 19 nt, Artificial Sequence
  Description of Artificial Sequence: Synthetic oligonucleotide
  Antisense strand to SEQ ID NO: 840168
ucuagagggaaacauagaa

SEQ ID NO: 840170 - RNA, 19 nt, Artificial Sequence
  Description of Artificial Sequence: Synthetic oligonucleotide
  Sense strand starting at position 3454 of SEQ ID NO: 588072
gauaguuuauuagugacua

SEQ ID NO: 840171 - RNA, 19 nt, Artificial Sequence
  Description of Artificial Sequence: Synthetic oligonucleotide
  Antisense strand to SEQ ID NO: 840170
uagucacuaauaaacuauc

SEQ ID NO: 840172 - RNA, 19 nt, Artificial Sequence
  Description of Artificial Sequence: Synthetic oligonucleotide
  Sense strand starting at position 3458 of SEQ ID NO: 588072
guuuauuagugacuacuca

SEQ ID NO: 840173 - RNA, 19 nt, Artificial Sequence
  Description of Artificial Sequence: Synthetic oligonucleotide
  Antisense strand to SEQ ID NO: 840172
ugaguagucacuaauaaac

SEQ ID NO: 840174 - RNA, 19 nt, Artificial Sequence
  Description of Artificial Sequence: Synthetic oligonucleotide
  Sense strand starting at position 3462 of SEQ ID NO: 588072
auuagugacuacucagcua

SEQ ID NO: 840175 - RNA, 19 nt, Artificial Sequence
  Description of Artificial Sequence: Synthetic oligonucleotide
  Antisense strand to SEQ ID NO: 840174
uagcugaguagucacuaau

SEQ ID NO: 840176 - RNA, 19 nt, Artificial Sequence
  Description of Artificial Sequence: Synthetic oligonucleotide
  Sense strand starting at position 3465 of SEQ ID NO: 588072
agugacuacucagcuacau

SEQ ID NO: 840177 - RNA, 19 nt, Artificial Sequence
  Description of Artificial Sequence: Synthetic oligonucleotide
  Antisense strand to SEQ ID NO: 840176
auguagcugaguagucacu

SEQ ID NO: 840178 - RNA, 19 nt, Artificial Sequence
  Description of Artificial Sequence: Synthetic oligonucleotide
  Sense strand starting at position 3813 of SEQ ID NO: 588072
cgggcuuaauguuuguuua

SEQ ID NO: 840179 - RNA, 19 nt, Artificial Sequence
  Description of Artificial Sequence: Synthetic oligonucleotide
  Antisense strand to SEQ ID NO: 840178
uaaacaaacauuaagcccg

SEQ ID NO: 840180 - RNA, 19 nt, Artificial Sequence
  Description of Artificial Sequence: Synthetic oligonucleotide
  Sense strand starting at position 3814 of SEQ ID NO: 588072
gggcuuaauguuuguuuau

SEQ ID NO: 840181 - RNA, 19 nt, Artificial Sequence
  Description of Artificial Sequence: Synthetic oligonucleotide
  Antisense strand to SEQ ID NO: 840180
auaaacaaacauuaagccc

SEQ ID NO: 840182 - RNA, 19 nt, Artificial Sequence
  Description of Artificial Sequence: Synthetic oligonucleotide
  Sense strand starting at position 3815 of SEQ ID NO: 588072
ggcuuaauguuuguuuaua

SEQ ID NO: 840183 - RNA, 19 nt, Artificial Sequence
  Description of Artificial Sequence: Synthetic oligonucleotide
  Antisense strand to SEQ ID NO: 840182
uauaaacaaacauuaagcc

SEQ ID NO: 840184 - RNA, 19 nt, Artificial Sequence
  Description of Artificial Sequence: Synthetic oligonucleotide
  Sense strand starting at position 3907 of SEQ ID NO: 588072
caauuuauguguguacugu

SEQ ID NO: 840185 - RNA, 19 nt, Artificial Sequence
  Description of Artificial Sequence: Synthetic oligonucleotide
  Antisense strand to SEQ ID NO: 840184
acaguacacacauaaauug

SEQ ID NO: 840186 - RNA, 19 nt, Artificial Sequence
  Description of Artificial Sequence: Synthetic oligonucleotide
  Sense strand starting at position 3917 of SEQ ID NO: 588072
guguacuguuaccuuuaaa

SEQ ID NO: 840187 - RNA, 19 nt, Artificial Sequence
  Description of Artificial Sequence: Synthetic oligonucleotide
  Antisense strand to SEQ ID NO: 840186
uuuaaagguaacaguacac

SEQ ID NO: 840188 - RNA, 19 nt, Artificial Sequence
  Description of Artificial Sequence: Synthetic oligonucleotide
  Sense strand starting at position 83 of SEQ ID NO: 588073
caccguucuucccuaguga

SEQ ID NO: 840189 - RNA, 19 nt, Artificial Sequence
  Description of Artificial Sequence: Synthetic oligonucleotide
  Antisense strand to SEQ ID NO: 840188
ucacuagggaagaacggug

SEQ ID NO: 840190 - RNA, 19 nt, Artificial Sequence
  Description of Artificial Sequence: Synthetic oligonucleotide
  Sense strand starting at position 84 of SEQ ID NO: 588073
accguucuucccuagugaa

SEQ ID NO: 840191 - RNA, 19 nt, Artificial Sequence
  Description of Artificial Sequence: Synthetic oligonucleotide
  Antisense strand to SEQ ID NO: 840190
uucacuagggaagaacggu

SEQ ID NO: 840192 - RNA, 19 nt, Artificial Sequence
  Description of Artificial Sequence: Synthetic oligonucleotide
  Sense strand starting at position 123 of SEQ ID NO: 588073
ggcagcuguggguauauca

SEQ ID NO: 840193 - RNA, 19 nt, Artificial Sequence
  Description of Artificial Sequence: Synthetic oligonucleotide
  Antisense strand to SEQ ID NO: 840192
ugauauacccacagcugcc

SEQ ID NO: 840194 - RNA, 19 nt, Artificial Sequence
  Description of Artificial Sequence: Synthetic oligonucleotide
  Sense strand starting at position 133 of SEQ ID NO: 588073
gguauaucaacuggucuga

SEQ ID NO: 840195 - RNA, 19 nt, Artificial Sequence
  Description of Artificial Sequence: Synthetic oligonucleotide
  Antisense strand to SEQ ID NO: 840194
ucagaccaguugauauacc

SEQ ID NO: 840196 - RNA, 19 nt, Artificial Sequence
  Description of Artificial Sequence: Synthetic oligonucleotide
  Sense strand starting at position 198 of SEQ ID NO: 588073
cagugucaugggugagaau

SEQ ID NO: 840197 - RNA, 19 nt, Artificial Sequence
  Description of Artificial Sequence: Synthetic oligonucleotide
  Antisense strand to SEQ ID NO: 840196
auucucacccaugacacug

SEQ ID NO: 840198 - RNA, 19 nt, Artificial Sequence
  Description of Artificial Sequence: Synthetic oligonucleotide
  Sense strand starting at position 265 of SEQ ID NO: 588073
acuucuggauccugaauac

SEQ ID NO: 840199 - RNA, 19 nt, Artificial Sequence
  Description of Artificial Sequence: Synthetic oligonucleotide
  Antisense strand to SEQ ID NO: 840198
guauucaggauccagaagu

SEQ ID NO: 840200 - RNA, 19 nt, Artificial Sequence
  Description of Artificial Sequence: Synthetic oligonucleotide
  Sense strand starting at position 327 of SEQ ID NO: 588073
uuagaaagauaccuuuguu

SEQ ID NO: 840201 - RNA, 19 nt, Artificial Sequence
  Description of Artificial Sequence: Synthetic oligonucleotide
  Antisense strand to SEQ ID NO: 840200
aacaaagguaucuuucuaa

SEQ ID NO: 840202 - RNA, 19 nt, Artificial Sequence
  Description of Artificial Sequence: Synthetic oligonucleotide
  Sense strand starting at position 330 of SEQ ID NO: 588073
gaaagauaccuuuguugug

SEQ ID NO: 840203 - RNA, 19 nt, Artificial Sequence
  Description of Artificial Sequence: Synthetic oligonucleotide
  Antisense strand to SEQ ID NO: 840202
cacaacaaagguaucuuuc

SEQ ID NO: 840204 - RNA, 19 nt, Artificial Sequence
  Description of Artificial Sequence: Synthetic oligonucleotide
  Sense strand starting at position 336 of SEQ ID NO: 588073
uaccuuuguugugugcuua

SEQ ID NO: 840205 - RNA, 19 nt, Artificial Sequence
  Description of Artificial Sequence: Synthetic oligonucleotide
  Antisense strand to SEQ ID NO: 840204
uaagcacacaacaaaggua

SEQ ID NO: 840206 - RNA, 19 nt, Artificial Sequence
  Description of Artificial Sequence: Synthetic oligonucleotide
  Sense strand starting at position 339 of SEQ ID NO: 588073
cuuuguugugugcuuacuu

SEQ ID NO: 840207 - RNA, 19 nt, Artificial Sequence
  Description of Artificial Sequence: Synthetic oligonucleotide
  Antisense strand to SEQ ID NO: 840206
aaguaagcacacaacaaag

SEQ ID NO: 840208 - RNA, 19 nt, Artificial Sequence
  Description of Artificial Sequence: Synthetic oligonucleotide
  Sense strand starting at position 340 of SEQ ID NO: 588073
uuuguugugugcuuacuuu

SEQ ID NO: 840209 - RNA, 19 nt, Artificial Sequence
  Description of Artificial Sequence: Synthetic oligonucleotide
  Antisense strand to SEQ ID NO: 840208
aaaguaagcacacaacaaa

SEQ ID NO: 840210 - RNA, 19 nt, Artificial Sequence
  Description of Artificial Sequence: Synthetic oligonucleotide
  Sense strand starting at position 344 of SEQ ID NO: 588073
uugugugcuuacuuuauaa

SEQ ID NO: 840211 - RNA, 19 nt, Artificial Sequence
  Description of Artificial Sequence: Synthetic oligonucleotide
  Antisense strand to SEQ ID NO: 840210
uuauaaaguaagcacacaa

SEQ ID NO: 840212 - RNA, 19 nt, Artificial Sequence
  Description of Artificial Sequence: Synthetic oligonucleotide
  Sense strand starting at position 346 of SEQ ID NO: 588073
gugugcuuacuuuauaaag

SEQ ID NO: 840213 - RNA, 19 nt, Artificial Sequence
  Description of Artificial Sequence: Synthetic oligonucleotide
  Antisense strand to SEQ ID NO: 840212
cuuuauaaaguaagcacac

SEQ ID NO: 840214 - RNA, 19 nt, Artificial Sequence
  Description of Artificial Sequence: Synthetic oligonucleotide
  Sense strand starting at position 476 of SEQ ID NO: 588073
gcaugaccuuaauacgaua

SEQ ID NO: 840215 - RNA, 19 nt, Artificial Sequence
  Description of Artificial Sequence: Synthetic oligonucleotide
  Antisense strand to SEQ ID NO: 840214
uaucguauuaaggucaugc

SEQ ID NO: 840216 - RNA, 19 nt, Artificial Sequence
  Description of Artificial Sequence: Synthetic oligonucleotide
  Sense strand starting at position 543 of SEQ ID NO: 588073
augucacacucuuaaguaa

SEQ ID NO: 840217 - RNA, 19 nt, Artificial Sequence
  Description of Artificial Sequence: Synthetic oligonucleotide
  Antisense strand to SEQ ID NO: 840216
uuacuuaagagugugacau

SEQ ID NO: 840218 - RNA, 19 nt, Artificial Sequence
  Description of Artificial Sequence: Synthetic oligonucleotide
  Sense strand starting at position 558 of SEQ ID NO: 588073
guaacagcgauuugucuuu

SEQ ID NO: 840219 - RNA, 19 nt, Artificial Sequence
  Description of Artificial Sequence: Synthetic oligonucleotide
  Antisense strand to SEQ ID NO: 840218
aaagacaaaucgcuguuac

SEQ ID NO: 840220 - RNA, 19 nt, Artificial Sequence
  Description of Artificial Sequence: Synthetic oligonucleotide
  Sense strand starting at position 565 of SEQ ID NO: 588073
cgauuugucuuucacgguu

SEQ ID NO: 840221 - RNA, 19 nt, Artificial Sequence
  Description of Artificial Sequence: Synthetic oligonucleotide
  Antisense strand to SEQ ID NO: 840220
aaccgugaaagacaaaucg

SEQ ID NO: 840222 - RNA, 19 nt, Artificial Sequence
  Description of Artificial Sequence: Synthetic oligonucleotide
  Sense strand starting at position 603 of SEQ ID NO: 588073
gcauuugucuucuccagaa

SEQ ID NO: 840223 - RNA, 19 nt, Artificial Sequence
  Description of Artificial Sequence: Synthetic oligonucleotide
  Antisense strand to SEQ ID NO: 840222
uucuggagaagacaaaugc

SEQ ID NO: 840224 - RNA, 19 nt, Artificial Sequence
  Description of Artificial Sequence: Synthetic oligonucleotide
  Sense strand starting at position 659 of SEQ ID NO: 588073
agauguaauuauuggaacu

SEQ ID NO: 840225 - RNA, 19 nt, Artificial Sequence
  Description of Artificial Sequence: Synthetic oligonucleotide
  Antisense strand to SEQ ID NO: 840224
aguuccaauaauuacaucu

SEQ ID NO: 840226 - RNA, 19 nt, Artificial Sequence
  Description of Artificial Sequence: Synthetic oligonucleotide
  Sense strand starting at position 661 of SEQ ID NO: 588073
auguaauuauuggaacuga

SEQ ID NO: 840227 - RNA, 19 nt, Artificial Sequence
  Description of Artificial Sequence: Synthetic oligonucleotide
  Antisense strand to SEQ ID NO: 840226
ucaguuccaauaauuacau

SEQ ID NO: 840228 - RNA, 19 nt, Artificial Sequence
  Description of Artificial Sequence: Synthetic oligonucleotide
  Sense strand starting at position 688 of SEQ ID NO: 588073
aaaggugagcuuuggaaau

SEQ ID NO: 840229 - RNA, 19 nt, Artificial Sequence
  Description of Artificial Sequence: Synthetic oligonucleotide
  Antisense strand to SEQ ID NO: 840228
auuuccaaagcucaccuuu

SEQ ID NO: 840230 - RNA, 19 nt, Artificial Sequence
  Description of Artificial Sequence: Synthetic oligonucleotide
  Sense strand starting at position 690 of SEQ ID NO: 588073
aggugagcuuuggaaauau

SEQ ID NO: 840231 - RNA, 19 nt, Artificial Sequence
  Description of Artificial Sequence: Synthetic oligonucleotide
  Antisense strand to SEQ ID NO: 840230
auauuuccaaagcucaccu

SEQ ID NO: 840232 - RNA, 19 nt, Artificial Sequence
  Description of Artificial Sequence: Synthetic oligonucleotide
  Sense strand starting at position 699 of SEQ ID NO: 588073
uuggaaauaucuuugagca

SEQ ID NO: 840233 - RNA, 19 nt, Artificial Sequence
  Description of Artificial Sequence: Synthetic oligonucleotide
  Antisense strand to SEQ ID NO: 840232
ugcucaaagauauuuccaa

SEQ ID NO: 840234 - RNA, 19 nt, Artificial Sequence
  Description of Artificial Sequence: Synthetic oligonucleotide
  Sense strand starting at position 700 of SEQ ID NO: 588073
uggaaauaucuuugagcag

SEQ ID NO: 840235 - RNA, 19 nt, Artificial Sequence
  Description of Artificial Sequence: Synthetic oligonucleotide
  Antisense strand to SEQ ID NO: 840234
cugcucaaagauauuucca

SEQ ID NO: 840236 - RNA, 19 nt, Artificial Sequence
  Description of Artificial Sequence: Synthetic oligonucleotide
  Sense strand starting at position 701 of SEQ ID NO: 588073
ggaaauaucuuugagcagu

SEQ ID NO: 840237 - RNA, 19 nt, Artificial Sequence
  Description of Artificial Sequence: Synthetic oligonucleotide
  Antisense strand to SEQ ID NO: 840236
acugcucaaagauauuucc

SEQ ID NO: 840238 - RNA, 19 nt, Artificial Sequence
  Description of Artificial Sequence: Synthetic oligonucleotide
  Sense strand starting at position 1078 of SEQ ID NO: 588073
ucuaaagaauuugggaauu

SEQ ID NO: 840239 - RNA, 19 nt, Artificial Sequence
  Description of Artificial Sequence: Synthetic oligonucleotide
  Antisense strand to SEQ ID NO: 840238
aauucccaaauucuuuaga

SEQ ID NO: 840240 - RNA, 19 nt, Artificial Sequence
  Description of Artificial Sequence: Synthetic oligonucleotide
  Sense strand starting at position 2779 of SEQ ID NO: 588073
uauaaugaggcucguaaag

SEQ ID NO: 840241 - RNA, 19 nt, Artificial Sequence
  Description of Artificial Sequence: Synthetic oligonucleotide
  Antisense strand to SEQ ID NO: 840240
cuuuacgagccucauuaua

SEQ ID NO: 840242 - RNA, 19 nt, Artificial Sequence
  Description of Artificial Sequence: Synthetic oligonucleotide
  Sense strand starting at position 2797 of SEQ ID NO: 588073
guggauacuguucaggaca

SEQ ID NO: 840243 - RNA, 19 nt, Artificial Sequence
  Description of Artificial Sequence: Synthetic oligonucleotide
  Antisense strand to SEQ ID NO: 840242
uguccugaacaguauccac

SEQ ID NO: 840244 - RNA, 19 nt, Artificial Sequence
  Description of Artificial Sequence: Synthetic oligonucleotide
  Sense strand starting at position 2923 of SEQ ID NO: 588073
cggauuucguuagcuucau

SEQ ID NO: 840245 - RNA, 19 nt, Artificial Sequence
  Description of Artificial Sequence: Synthetic oligonucleotide
  Antisense strand to SEQ ID NO: 840244
augaagcuaacgaaauccg

SEQ ID NO: 840246 - RNA, 19 nt, Artificial Sequence
  Description of Artificial Sequence: Synthetic oligonucleotide
  Sense strand starting at position 3144 of SEQ ID NO: 588073
ucucuuagccaauggaaca

SEQ ID NO: 840247 - RNA, 19 nt, Artificial Sequence
  Description of Artificial Sequence: Synthetic oligonucleotide
  Antisense strand to SEQ ID NO: 840246
uguuccauuggcuaagaga

SEQ ID NO: 840248 - RNA, 19 nt, Artificial Sequence
  Description of Artificial Sequence: Synthetic oligonucleotide
  Sense strand starting at position 3259 of SEQ ID NO: 588073
uucuauguuucccucuaga

SEQ ID NO: 840249 - RNA, 19 nt, Artificial Sequence
  Description of Artificial Sequence: Synthetic oligonucleotide
  Antisense strand to SEQ ID NO: 840248
ucuagagggaaacauagaa

SEQ ID NO: 840250 - RNA, 19 nt, Artificial Sequence
  Description of Artificial Sequence: Synthetic oligonucleotide
  Sense strand starting at position 3391 of SEQ ID NO: 588073
gauaguuuauuagugacua

SEQ ID NO: 840251 - RNA, 19 nt, Artificial Sequence
  Description of Artificial Sequence: Synthetic oligonucleotide
  Antisense strand to SEQ ID NO: 840250
uagucacuaauaaacuauc

SEQ ID NO: 840252 - RNA, 19 nt, Artificial Sequence
  Description of Artificial Sequence: Synthetic oligonucleotide
  Sense strand starting at position 3395 of SEQ ID NO: 588073
guuuauuagugacuacuca

SEQ ID NO: 840253 - RNA, 19 nt, Artificial Sequence
  Description of Artificial Sequence: Synthetic oligonucleotide
  Antisense strand to SEQ ID NO: 840252
ugaguagucacuaauaaac

SEQ ID NO: 840254 - RNA, 19 nt, Artificial Sequence
  Description of Artificial Sequence: Synthetic oligonucleotide
  Sense strand starting at position 3399 of SEQ ID NO: 588073
auuagugacuacucagcua

SEQ ID NO: 840255 - RNA, 19 nt, Artificial Sequence
  Description of Artificial Sequence: Synthetic oligonucleotide
  Antisense strand to SEQ ID NO: 840254
uagcugaguagucacuaau

SEQ ID NO: 840256 - RNA, 19 nt, Artificial Sequence
  Description of Artificial Sequence: Synthetic oligonucleotide
  Sense strand starting at position 3402 of SEQ ID NO: 588073
agugacuacucagcuacau

SEQ ID NO: 840257 - RNA, 19 nt, Artificial Sequence
  Description of Artificial Sequence: Synthetic oligonucleotide
  Antisense strand to SEQ ID NO: 840256
auguagcugaguagucacu

SEQ ID NO: 840258 - RNA, 19 nt, Artificial Sequence
  Description of Artificial Sequence: Synthetic oligonucleotide
  Sense strand starting at position 3750 of SEQ ID NO: 588073
cgggcuuaauguuuguuua

SEQ ID NO: 840259 - RNA, 19 nt, Artificial Sequence
  Description of Artificial Sequence: Synthetic oligonucleotide
  Antisense strand to SEQ ID NO: 840258
uaaacaaacauuaagcccg

SEQ ID NO: 840260 - RNA, 19 nt, Artificial Sequence
  Description of Artificial Sequence: Synthetic oligonucleotide
  Sense strand starting at position 3751 of SEQ ID NO: 588073
gggcuuaauguuuguuuau

SEQ ID NO: 840261 - RNA, 19 nt, Artificial Sequence
  Description of Artificial Sequence: Synthetic oligonucleotide
  Antisense strand to SEQ ID NO: 840260
auaaacaaacauuaagccc

SEQ ID NO: 840262 - RNA, 19 nt, Artificial Sequence
  Description of Artificial Sequence: Synthetic oligonucleotide
  Sense strand starting at position 3752 of SEQ ID NO: 588073
ggcuuaauguuuguuuaua

SEQ ID NO: 840263 - RNA, 19 nt, Artificial Sequence
  Description of Artificial Sequence: Synthetic oligonucleotide
  Antisense strand to SEQ ID NO: 840262
uauaaacaaacauuaagcc

SEQ ID NO: 840264 - RNA, 19 nt, Artificial Sequence
  Description of Artificial Sequence: Synthetic oligonucleotide
  Sense strand starting at position 3844 of SEQ ID NO: 588073
caauuuauguguguacugu

SEQ ID NO: 840265 - RNA, 19 nt, Artificial Sequence
  Description of Artificial Sequence: Synthetic oligonucleotide
  Antisense strand to SEQ ID NO: 840264
acaguacacacauaaauug

SEQ ID NO: 840266 - RNA, 19 nt, Artificial Sequence
  Description of Artificial Sequence: Synthetic oligonucleotide
  Sense strand starting at position 3854 of SEQ ID NO: 588073
guguacuguuaccuuuaaa

SEQ ID NO: 840267 - RNA, 19 nt, Artificial Sequence
  Description of Artificial Sequence: Synthetic oligonucleotide
  Antisense strand to SEQ ID NO: 840266
uuuaaagguaacaguacac

SEQ ID NO: 840268 - RNA, 19 nt, Artificial Sequence
  Description of Artificial Sequence: Synthetic oligonucleotide
  Sense strand starting at position 16 of SEQ ID NO: 588074
gaagauccuucuugagaag

SEQ ID NO: 840269 - RNA, 19 nt, Artificial Sequence
  Description of Artificial Sequence: Synthetic oligonucleotide
  Antisense strand to SEQ ID NO: 840268
cuucucaagaaggaucuuc

SEQ ID NO: 840270 - RNA, 19 nt, Artificial Sequence
  Description of Artificial Sequence: Synthetic oligonucleotide
  Sense strand starting at position 37 of SEQ ID NO: 588074
ccugcugaguauuaggaaa

SEQ ID NO: 840271 - RNA, 19 nt, Artificial Sequence
  Description of Artificial Sequence: Synthetic oligonucleotide
  Antisense strand to SEQ ID NO: 840270
uuuccuaauacucagcagg

SEQ ID NO: 840272 - RNA, 19 nt, Artificial Sequence
  Description of Artificial Sequence: Synthetic oligonucleotide
  Sense strand starting at position 116 of SEQ ID NO: 588074
ggcauaacucaacaugugu

SEQ ID NO: 840273 - RNA, 19 nt, Artificial Sequence
  Description of Artificial Sequence: Synthetic oligonucleotide
  Antisense strand to SEQ ID NO: 840272
acacauguugaguuaugcc

SEQ ID NO: 840274 - RNA, 19 nt, Artificial Sequence
  Description of Artificial Sequence: Synthetic oligonucleotide
  Sense strand starting at position 236 of SEQ ID NO: 588074
caccguucuucccuaguga

SEQ ID NO: 840275 - RNA, 19 nt, Artificial Sequence
  Description of Artificial Sequence: Synthetic oligonucleotide
  Antisense strand to SEQ ID NO: 840274
ucacuagggaagaacggug

SEQ ID NO: 840276 - RNA, 19 nt, Artificial Sequence
  Description of Artificial Sequence: Synthetic oligonucleotide
  Sense strand starting at position 237 of SEQ ID NO: 588074
accguucuucccuagugaa

SEQ ID NO: 840277 - RNA, 19 nt, Artificial Sequence
  Description of Artificial Sequence: Synthetic oligonucleotide
  Antisense strand to SEQ ID NO: 840276
uucacuagggaagaacggu

SEQ ID NO: 840278 - RNA, 19 nt, Artificial Sequence
  Description of Artificial Sequence: Synthetic oligonucleotide
  Sense strand starting at position 276 of SEQ ID NO: 588074
ggcagcuguggguauauca

SEQ ID NO: 840279 - RNA, 19 nt, Artificial Sequence
  Description of Artificial Sequence: Synthetic oligonucleotide
  Antisense strand to SEQ ID NO: 840278
ugauauacccacagcugcc

SEQ ID NO: 840280 - RNA, 19 nt, Artificial Sequence
  Description of Artificial Sequence: Synthetic oligonucleotide
  Sense strand starting at position 286 of SEQ ID NO: 588074
gguauaucaacuggucuga

SEQ ID NO: 840281 - RNA, 19 nt, Artificial Sequence
  Description of Artificial Sequence: Synthetic oligonucleotide
  Antisense strand to SEQ ID NO: 840280
ucagaccaguugauauacc

SEQ ID NO: 840282 - RNA, 19 nt, Artificial Sequence
  Description of Artificial Sequence: Synthetic oligonucleotide
  Sense strand starting at position 351 of SEQ ID NO: 588074
cagugucaugggugagaau

SEQ ID NO: 840283 - RNA, 19 nt, Artificial Sequence
  Description of Artificial Sequence: Synthetic oligonucleotide
  Antisense strand to SEQ ID NO: 840282
auucucacccaugacacug

SEQ ID NO: 840284 - RNA, 19 nt, Artificial Sequence
  Description of Artificial Sequence: Synthetic oligonucleotide
  Sense strand starting at position 418 of SEQ ID NO: 588074
acuucuggauccugaauac

SEQ ID NO: 840285 - RNA, 19 nt, Artificial Sequence
  Description of Artificial Sequence: Synthetic oligonucleotide
  Antisense strand to SEQ ID NO: 840284
guauucaggauccagaagu

SEQ ID NO: 840286 - RNA, 19 nt, Artificial Sequence
  Description of Artificial Sequence: Synthetic oligonucleotide
  Sense strand starting at position 480 of SEQ ID NO: 588074
uuagaaagauaccuuuguu

SEQ ID NO: 840287 - RNA, 19 nt, Artificial Sequence
  Description of Artificial Sequence: Synthetic oligonucleotide
  Antisense strand to SEQ ID NO: 840286
aacaaagguaucuuucuaa

SEQ ID NO: 840288 - RNA, 19 nt, Artificial Sequence
  Description of Artificial Sequence: Synthetic oligonucleotide
  Sense strand starting at position 483 of SEQ ID NO: 588074
gaaagauaccuuuguugug

SEQ ID NO: 840289 - RNA, 19 nt, Artificial Sequence
  Description of Artificial Sequence: Synthetic oligonucleotide
  Antisense strand to SEQ ID NO: 840288
cacaacaaagguaucuuuc

SEQ ID NO: 840290 - RNA, 19 nt, Artificial Sequence
  Description of Artificial Sequence: Synthetic oligonucleotide
  Sense strand starting at position 489 of SEQ ID NO: 588074
uaccuuuguugugugcuua

SEQ ID NO: 840291 - RNA, 19 nt, Artificial Sequence
  Description of Artificial Sequence: Synthetic oligonucleotide
  Antisense strand to SEQ ID NO: 840290
uaagcacacaacaaaggua

SEQ ID NO: 840292 - RNA, 19 nt, Artificial Sequence
  Description of Artificial Sequence: Synthetic oligonucleotide
  Sense strand starting at position 492 of SEQ ID NO: 588074
cuuuguugugugcuuacuu

SEQ ID NO: 840293 - RNA, 19 nt, Artificial Sequence
  Description of Artificial Sequence: Synthetic oligonucleotide
  Antisense strand to SEQ ID NO: 840292
aaguaagcacacaacaaag

SEQ ID NO: 840294 - RNA, 19 nt, Artificial Sequence
  Description of Artificial Sequence: Synthetic oligonucleotide
  Sense strand starting at position 493 of SEQ ID NO: 588074
uuuguugugugcuuacuuu

SEQ ID NO: 840295 - RNA, 19 nt, Artificial Sequence
  Description of Artificial Sequence: Synthetic oligonucleotide
  Antisense strand to SEQ ID NO: 840294
aaaguaagcacacaacaaa

SEQ ID NO: 840296 - RNA, 19 nt, Artificial Sequence
  Description of Artificial Sequence: Synthetic oligonucleotide
  Sense strand starting at position 497 of SEQ ID NO: 588074
uugugugcuuacuuuauaa

SEQ ID NO: 840297 - RNA, 19 nt, Artificial Sequence
  Description of Artificial Sequence: Synthetic oligonucleotide
  Antisense strand to SEQ ID NO: 840296
uuauaaaguaagcacacaa

SEQ ID NO: 840298 - RNA, 19 nt, Artificial Sequence
  Description of Artificial Sequence: Synthetic oligonucleotide
  Sense strand starting at position 499 of SEQ ID NO: 588074
gugugcuuacuuuauaaag

SEQ ID NO: 840299 - RNA, 19 nt, Artificial Sequence
  Description of Artificial Sequence: Synthetic oligonucleotide
  Antisense strand to SEQ ID NO: 840298
cuuuauaaaguaagcacac

SEQ ID NO: 840300 - RNA, 19 nt, Artificial Sequence
  Description of Artificial Sequence: Synthetic oligonucleotide
  Sense strand starting at position 629 of SEQ ID NO: 588074
gcaugaccuuaauacgaua

SEQ ID NO: 840301 - RNA, 19 nt, Artificial Sequence
  Description of Artificial Sequence: Synthetic oligonucleotide
  Antisense strand to SEQ ID NO: 840300
uaucguauuaaggucaugc

SEQ ID NO: 840302 - RNA, 19 nt, Artificial Sequence
  Description of Artificial Sequence: Synthetic oligonucleotide
  Sense strand starting at position 696 of SEQ ID NO: 588074
augucacacucuuaaguaa

SEQ ID NO: 840303 - RNA, 19 nt, Artificial Sequence
  Description of Artificial Sequence: Synthetic oligonucleotide
  Antisense strand to SEQ ID NO: 840302
uuacuuaagagugugacau

SEQ ID NO: 840304 - RNA, 19 nt, Artificial Sequence
  Description of Artificial Sequence: Synthetic oligonucleotide
  Sense strand starting at position 711 of SEQ ID NO: 588074
guaacagcgauuugucuuu

SEQ ID NO: 840305 - RNA, 19 nt, Artificial Sequence
  Description of Artificial Sequence: Synthetic oligonucleotide
  Antisense strand to SEQ ID NO: 840304
aaagacaaaucgcuguuac

SEQ ID NO: 840306 - RNA, 19 nt, Artificial Sequence
  Description of Artificial Sequence: Synthetic oligonucleotide
  Sense strand starting at position 756 of SEQ ID NO: 588074
gcauuugucuucuccagaa

SEQ ID NO: 840307 - RNA, 19 nt, Artificial Sequence
  Description of Artificial Sequence: Synthetic oligonucleotide
  Antisense strand to SEQ ID NO: 840306
uucuggagaagacaaaugc

SEQ ID NO: 840308 - RNA, 19 nt, Artificial Sequence
  Description of Artificial Sequence: Synthetic oligonucleotide
  Sense strand starting at position 812 of SEQ ID NO: 588074
agauguaauuauuggaacu

SEQ ID NO: 840309 - RNA, 19 nt, Artificial Sequence
  Description of Artificial Sequence: Synthetic oligonucleotide
  Antisense strand to SEQ ID NO: 840308
aguuccaauaauuacaucu

SEQ ID NO: 840310 - RNA, 19 nt, Artificial Sequence
  Description of Artificial Sequence: Synthetic oligonucleotide
  Sense strand starting at position 814 of SEQ ID NO: 588074
auguaauuauuggaacuga

SEQ ID NO: 840311 - RNA, 19 nt, Artificial Sequence
  Description of Artificial Sequence: Synthetic oligonucleotide
  Antisense strand to SEQ ID NO: 840310
ucaguuccaauaauuacau

SEQ ID NO: 840312 - RNA, 19 nt, Artificial Sequence
  Description of Artificial Sequence: Synthetic oligonucleotide
  Sense strand starting at position 841 of SEQ ID NO: 588074
aaaggugagcuuuggaaau

SEQ ID NO: 840313 - RNA, 19 nt, Artificial Sequence
  Description of Artificial Sequence: Synthetic oligonucleotide
  Antisense strand to SEQ ID NO: 840312
auuuccaaagcucaccuuu

SEQ ID NO: 840314 - RNA, 19 nt, Artificial Sequence
  Description of Artificial Sequence: Synthetic oligonucleotide
  Sense strand starting at position 843 of SEQ ID NO: 588074
aggugagcuuuggaaauau

SEQ ID NO: 840315 - RNA, 19 nt, Artificial Sequence
  Description of Artificial Sequence: Synthetic oligonucleotide
  Antisense strand to SEQ ID NO: 840314
auauuuccaaagcucaccu

SEQ ID NO: 840316 - RNA, 19 nt, Artificial Sequence
  Description of Artificial Sequence: Synthetic oligonucleotide
  Sense strand starting at position 852 of SEQ ID NO: 588074
uuggaaauaucuuugagca

SEQ ID NO: 840317 - RNA, 19 nt, Artificial Sequence
  Description of Artificial Sequence: Synthetic oligonucleotide
  Antisense strand to SEQ ID NO: 840316
ugcucaaagauauuuccaa

SEQ ID NO: 840318 - RNA, 19 nt, Artificial Sequence
  Description of Artificial Sequence: Synthetic oligonucleotide
  Sense strand starting at position 853 of SEQ ID NO: 588074
uggaaauaucuuugagcag

SEQ ID NO: 840319 - RNA, 19 nt, Artificial Sequence
  Description of Artificial Sequence: Synthetic oligonucleotide
  Antisense strand to SEQ ID NO: 840318
cugcucaaagauauuucca

SEQ ID NO: 840320 - RNA, 19 nt, Artificial Sequence
  Description of Artificial Sequence: Synthetic oligonucleotide
  Sense strand starting at position 854 of SEQ ID NO: 588074
ggaaauaucuuugagcagu

SEQ ID NO: 840321 - RNA, 19 nt, Artificial Sequence
  Description of Artificial Sequence: Synthetic oligonucleotide
  Antisense strand to SEQ ID NO: 840320
acugcucaaagauauuucc

SEQ ID NO: 840322 - RNA, 19 nt, Artificial Sequence
  Description of Artificial Sequence: Synthetic oligonucleotide
  Sense strand starting at position 1231 of SEQ ID NO: 588074
ucuaaagaauuugggaauu

SEQ ID NO: 840323 - RNA, 19 nt, Artificial Sequence
  Description of Artificial Sequence: Synthetic oligonucleotide
  Antisense strand to SEQ ID NO: 840322
aauucccaaauucuuuaga

SEQ ID NO: 840324 - RNA, 19 nt, Artificial Sequence
  Description of Artificial Sequence: Synthetic oligonucleotide
  Sense strand starting at position 2932 of SEQ ID NO: 588074
uauaaugaggcucguaaag

SEQ ID NO: 840325 - RNA, 19 nt, Artificial Sequence
  Description of Artificial Sequence: Synthetic oligonucleotide
  Antisense strand to SEQ ID NO: 840324
cuuuacgagccucauuaua

SEQ ID NO: 840326 - RNA, 19 nt, Artificial Sequence
  Description of Artificial Sequence: Synthetic oligonucleotide
  Sense strand starting at position 2950 of SEQ ID NO: 588074
guggauacuguucaggaca

SEQ ID NO: 840327 - RNA, 19 nt, Artificial Sequence
  Description of Artificial Sequence: Synthetic oligonucleotide
  Antisense strand to SEQ ID NO: 840326
uguccugaacaguauccac

SEQ ID NO: 840328 - RNA, 19 nt, Artificial Sequence
  Description of Artificial Sequence: Synthetic oligonucleotide
  Sense strand starting at position 3076 of SEQ ID NO: 588074
cggauuucguuagcuucau

SEQ ID NO: 840329 - RNA, 19 nt, Artificial Sequence
  Description of Artificial Sequence: Synthetic oligonucleotide
  Antisense strand to SEQ ID NO: 840328
augaagcuaacgaaauccg

SEQ ID NO: 840330 - RNA, 19 nt, Artificial Sequence
  Description of Artificial Sequence: Synthetic oligonucleotide
  Sense strand starting at position 3297 of SEQ ID NO: 588074
ucucuuagccaauggaaca

SEQ ID NO: 840331 - RNA, 19 nt, Artificial Sequence
  Description of Artificial Sequence: Synthetic oligonucleotide
  Antisense strand to SEQ ID NO: 840330
uguuccauuggcuaagaga

SEQ ID NO: 840332 - RNA, 19 nt, Artificial Sequence
  Description of Artificial Sequence: Synthetic oligonucleotide
  Sense strand starting at position 3412 of SEQ ID NO: 588074
uucuauguuucccucuaga

SEQ ID NO: 840333 - RNA, 19 nt, Artificial Sequence
  Description of Artificial Sequence: Synthetic oligonucleotide
  Antisense strand to SEQ ID NO: 840332
ucuagagggaaacauagaa

SEQ ID NO: 840334 - RNA, 19 nt, Artificial Sequence
  Description of Artificial Sequence: Synthetic oligonucleotide
  Sense strand starting at position 3544 of SEQ ID NO: 588074
gauaguuuauuagugacua

SEQ ID NO: 840335 - RNA, 19 nt, Artificial Sequence
  Description of Artificial Sequence: Synthetic oligonucleotide
  Antisense strand to SEQ ID NO: 840334
uagucacuaauaaacuauc

SEQ ID NO: 840336 - RNA, 19 nt, Artificial Sequence
  Description of Artificial Sequence: Synthetic oligonucleotide
  Sense strand starting at position 3548 of SEQ ID NO: 588074
guuuauuagugacuacuca

SEQ ID NO: 840337 - RNA, 19 nt, Artificial Sequence
  Description of Artificial Sequence: Synthetic oligonucleotide
  Antisense strand to SEQ ID NO: 840336
ugaguagucacuaauaaac

SEQ ID NO: 840338 - RNA, 19 nt, Artificial Sequence
  Description of Artificial Sequence: Synthetic oligonucleotide
  Sense strand starting at position 3552 of SEQ ID NO: 588074
auuagugacuacucagcua

SEQ ID NO: 840339 - RNA, 19 nt, Artificial Sequence
  Description of Artificial Sequence: Synthetic oligonucleotide
  Antisense strand to SEQ ID NO: 840338
uagcugaguagucacuaau

SEQ ID NO: 840340 - RNA, 19 nt, Artificial Sequence
  Description of Artificial Sequence: Synthetic oligonucleotide
  Sense strand starting at position 3555 of SEQ ID NO: 588074
agugacuacucagcuacau

SEQ ID NO: 840341 - RNA, 19 nt, Artificial Sequence
  Description of Artificial Sequence: Synthetic oligonucleotide
  Antisense strand to SEQ ID NO: 840340
auguagcugaguagucacu

SEQ ID NO: 840342 - RNA, 19 nt, Artificial Sequence
  Description of Artificial Sequence: Synthetic oligonucleotide
  Sense strand starting at position 3903 of SEQ ID NO: 588074
cgggcuuaauguuuguuua

SEQ ID NO: 840343 - RNA, 19 nt, Artificial Sequence
  Description of Artificial Sequence: Synthetic oligonucleotide
  Antisense strand to SEQ ID NO: 840342
uaaacaaacauuaagcccg

SEQ ID NO: 840344 - RNA, 19 nt, Artificial Sequence
  Description of Artificial Sequence: Synthetic oligonucleotide
  Sense strand starting at position 3904 of SEQ ID NO: 588074
gggcuuaauguuuguuuau

SEQ ID NO: 840345 - RNA, 19 nt, Artificial Sequence
  Description of Artificial Sequence: Synthetic oligonucleotide
  Antisense strand to SEQ ID NO: 840344
auaaacaaacauuaagccc

SEQ ID NO: 840346 - RNA, 19 nt, Artificial Sequence
  Description of Artificial Sequence: Synthetic oligonucleotide
  Sense strand starting at position 3905 of SEQ ID NO: 588074
ggcuuaauguuuguuuaua

SEQ ID NO: 840347 - RNA, 19 nt, Artificial Sequence
  Description of Artificial Sequence: Synthetic oligonucleotide
  Antisense strand to SEQ ID NO: 840346
uauaaacaaacauuaagcc

SEQ ID NO: 840348 - RNA, 19 nt, Artificial Sequence
  Description of Artificial Sequence: Synthetic oligonucleotide
  Sense strand starting at position 5 of SEQ ID NO: 588075
acuucuggauccugaauac

SEQ ID NO: 840349 - RNA, 19 nt, Artificial Sequence
  Description of Artificial Sequence: Synthetic oligonucleotide
  Antisense strand to SEQ ID NO: 840348
guauucaggauccagaagu

SEQ ID NO: 840350 - RNA, 19 nt, Artificial Sequence
  Description of Artificial Sequence: Synthetic oligonucleotide
  Sense strand starting at position 67 of SEQ ID NO: 588075
uuagaaagauaccuuuguu

SEQ ID NO: 840351 - RNA, 19 nt, Artificial Sequence
  Description of Artificial Sequence: Synthetic oligonucleotide
  Antisense strand to SEQ ID NO: 840350
aacaaagguaucuuucuaa

SEQ ID NO: 840352 - RNA, 19 nt, Artificial Sequence
  Description of Artificial Sequence: Synthetic oligonucleotide
  Sense strand starting at position 70 of SEQ ID NO: 588075
gaaagauaccuuuguugug

SEQ ID NO: 840353 - RNA, 19 nt, Artificial Sequence
  Description of Artificial Sequence: Synthetic oligonucleotide
  Antisense strand to SEQ ID NO: 840352
cacaacaaagguaucuuuc

SEQ ID NO: 840354 - RNA, 19 nt, Artificial Sequence
  Description of Artificial Sequence: Synthetic oligonucleotide
  Sense strand starting at position 76 of SEQ ID NO: 588075
uaccuuuguugugugcuua

SEQ ID NO: 840355 - RNA, 19 nt, Artificial Sequence
  Description of Artificial Sequence: Synthetic oligonucleotide
  Antisense strand to SEQ ID NO: 840354
uaagcacacaacaaaggua

SEQ ID NO: 840356 - RNA, 19 nt, Artificial Sequence
  Description of Artificial Sequence: Synthetic oligonucleotide
  Sense strand starting at position 79 of SEQ ID NO: 588075
cuuuguugugugcuuacuu

SEQ ID NO: 840357 - RNA, 19 nt, Artificial Sequence
  Description of Artificial Sequence: Synthetic oligonucleotide
  Antisense strand to SEQ ID NO: 840356
aaguaagcacacaacaaag

SEQ ID NO: 840358 - RNA, 19 nt, Artificial Sequence
  Description of Artificial Sequence: Synthetic oligonucleotide
  Sense strand starting at position 80 of SEQ ID NO: 588075
uuuguugugugcuuacuuu

SEQ ID NO: 840359 - RNA, 19 nt, Artificial Sequence
  Description of Artificial Sequence: Synthetic oligonucleotide
  Antisense strand to SEQ ID NO: 840358
aaaguaagcacacaacaaa

SEQ ID NO: 840360 - RNA, 19 nt, Artificial Sequence
  Description of Artificial Sequence: Synthetic oligonucleotide
  Sense strand starting at position 84 of SEQ ID NO: 588075
uugugugcuuacuuuauaa

SEQ ID NO: 840361 - RNA, 19 nt, Artificial Sequence
  Description of Artificial Sequence: Synthetic oligonucleotide
  Antisense strand to SEQ ID NO: 840360
uuauaaaguaagcacacaa

SEQ ID NO: 840362 - RNA, 19 nt, Artificial Sequence
  Description of Artificial Sequence: Synthetic oligonucleotide
  Sense strand starting at position 86 of SEQ ID NO: 588075
gugugcuuacuuuauaaag

SEQ ID NO: 840363 - RNA, 19 nt, Artificial Sequence
  Description of Artificial Sequence: Synthetic oligonucleotide
  Antisense strand to SEQ ID NO: 840362
cuuuauaaaguaagcacac

SEQ ID NO: 840364 - RNA, 19 nt, Artificial Sequence
  Description of Artificial Sequence: Synthetic oligonucleotide
  Sense strand starting at position 216 of SEQ ID NO: 588075
gcaugaccuuaauacgaua

SEQ ID NO: 840365 - RNA, 19 nt, Artificial Sequence
  Description of Artificial Sequence: Synthetic oligonucleotide
  Antisense strand to SEQ ID NO: 840364
uaucguauuaaggucaugc

SEQ ID NO: 840366 - RNA, 19 nt, Artificial Sequence
  Description of Artificial Sequence: Synthetic oligonucleotide
  Sense strand starting at position 283 of SEQ ID NO: 588075
augucacacucuuaaguaa

SEQ ID NO: 840367 - RNA, 19 nt, Artificial Sequence
  Description of Artificial Sequence: Synthetic oligonucleotide
  Antisense strand to SEQ ID NO: 840366
uuacuuaagagugugacau

SEQ ID NO: 840368 - RNA, 19 nt, Artificial Sequence
  Description of Artificial Sequence: Synthetic oligonucleotide
  Sense strand starting at position 298 of SEQ ID NO: 588075
guaacagcgauuugucuuu

SEQ ID NO: 840369 - RNA, 19 nt, Artificial Sequence
  Description of Artificial Sequence: Synthetic oligonucleotide
  Antisense strand to SEQ ID NO: 840368
aaagacaaaucgcuguuac

SEQ ID NO: 840370 - RNA, 19 nt, Artificial Sequence
  Description of Artificial Sequence: Synthetic oligonucleotide
  Sense strand starting at position 305 of SEQ ID NO: 588075
cgauuugucuuucacgguu

SEQ ID NO: 840371 - RNA, 19 nt, Artificial Sequence
  Description of Artificial Sequence: Synthetic oligonucleotide
  Antisense strand to SEQ ID NO: 840370
aaccgugaaagacaaaucg

SEQ ID NO: 840372 - RNA, 19 nt, Artificial Sequence
  Description of Artificial Sequence: Synthetic oligonucleotide
  Sense strand starting at position 343 of SEQ ID NO: 588075
gcauuugucuucuccagaa

SEQ ID NO: 840373 - RNA, 19 nt, Artificial Sequence
  Description of Artificial Sequence: Synthetic oligonucleotide
  Antisense strand to SEQ ID NO: 840372
uucuggagaagacaaaugc

SEQ ID NO: 840374 - RNA, 19 nt, Artificial Sequence
  Description of Artificial Sequence: Synthetic oligonucleotide
  Sense strand starting at position 399 of SEQ ID NO: 588075
agauguaauuauuggaacu

SEQ ID NO: 840375 - RNA, 19 nt, Artificial Sequence
  Description of Artificial Sequence: Synthetic oligonucleotide
  Antisense strand to SEQ ID NO: 840374
aguuccaauaauuacaucu

SEQ ID NO: 840376 - RNA, 19 nt, Artificial Sequence
  Description of Artificial Sequence: Synthetic oligonucleotide
  Sense strand starting at position 401 of SEQ ID NO: 588075
auguaauuauuggaacuga

SEQ ID NO: 840377 - RNA, 19 nt, Artificial Sequence
  Description of Artificial Sequence: Synthetic oligonucleotide
  Antisense strand to SEQ ID NO: 840376
ucaguuccaauaauuacau

SEQ ID NO: 840378 - RNA, 19 nt, Artificial Sequence
  Description of Artificial Sequence: Synthetic oligonucleotide
  Sense strand starting at position 428 of SEQ ID NO: 588075
aaaggugagcuuuggaaau

SEQ ID NO: 840379 - RNA, 19 nt, Artificial Sequence
  Description of Artificial Sequence: Synthetic oligonucleotide
  Antisense strand to SEQ ID NO: 840378
auuuccaaagcucaccuuu

SEQ ID NO: 840380 - RNA, 19 nt, Artificial Sequence
  Description of Artificial Sequence: Synthetic oligonucleotide
  Sense strand starting at position 430 of SEQ ID NO: 588075
aggugagcuuuggaaauau

SEQ ID NO: 840381 - RNA, 19 nt, Artificial Sequence
  Description of Artificial Sequence: Synthetic oligonucleotide
  Antisense strand to SEQ ID NO: 840380
auauuuccaaagcucaccu

SEQ ID NO: 840382 - RNA, 19 nt, Artificial Sequence
  Description of Artificial Sequence: Synthetic oligonucleotide
  Sense strand starting at position 439 of SEQ ID NO: 588075
uuggaaauaucuuugagca

SEQ ID NO: 840383 - RNA, 19 nt, Artificial Sequence
  Description of Artificial Sequence: Synthetic oligonucleotide
  Antisense strand to SEQ ID NO: 840382
ugcucaaagauauuuccaa

SEQ ID NO: 840384 - RNA, 19 nt, Artificial Sequence
  Description of Artificial Sequence: Synthetic oligonucleotide
  Sense strand starting at position 440 of SEQ ID NO: 588075
uggaaauaucuuugagcag

SEQ ID NO: 840385 - RNA, 19 nt, Artificial Sequence
  Description of Artificial Sequence: Synthetic oligonucleotide
  Antisense strand to SEQ ID NO: 840384
cugcucaaagauauuucca

SEQ ID NO: 840386 - RNA, 19 nt, Artificial Sequence
  Description of Artificial Sequence: Synthetic oligonucleotide
  Sense strand starting at position 441 of SEQ ID NO: 588075
ggaaauaucuuugagcagu

SEQ ID NO: 840387 - RNA, 19 nt, Artificial Sequence
  Description of Artificial Sequence: Synthetic oligonucleotide
  Antisense strand to SEQ ID NO: 840386
acugcucaaagauauuucc

SEQ ID NO: 840388 - RNA, 19 nt, Artificial Sequence
  Description of Artificial Sequence: Synthetic oligonucleotide
  Sense strand starting at position 818 of SEQ ID NO: 588075
ucuaaagaauuugggaauu

SEQ ID NO: 840389 - RNA, 19 nt, Artificial Sequence
  Description of Artificial Sequence: Synthetic oligonucleotide
  Antisense strand to SEQ ID NO: 840388
aauucccaaauucuuuaga

SEQ ID NO: 840390 - RNA, 19 nt, Artificial Sequence
  Description of Artificial Sequence: Synthetic oligonucleotide
  Sense strand starting at position 2519 of SEQ ID NO: 588075
uauaaugaggcucguaaag

SEQ ID NO: 840391 - RNA, 19 nt, Artificial Sequence
  Description of Artificial Sequence: Synthetic oligonucleotide
  Antisense strand to SEQ ID NO: 840390
cuuuacgagccucauuaua

SEQ ID NO: 840392 - RNA, 19 nt, Artificial Sequence
  Description of Artificial Sequence: Synthetic oligonucleotide
  Sense strand starting at position 2521 of SEQ ID NO: 588075
uaaugaggcucguaaagug

SEQ ID NO: 840393 - RNA, 19 nt, Artificial Sequence
  Description of Artificial Sequence: Synthetic oligonucleotide
  Antisense strand to SEQ ID NO: 840392
cacuuuacgagccucauua

SEQ ID NO: 840394 - RNA, 19 nt, Artificial Sequence
  Description of Artificial Sequence: Synthetic oligonucleotide
  Sense strand starting at position 2537 of SEQ ID NO: 588075
guggauacuguucaggaca

SEQ ID NO: 840395 - RNA, 19 nt, Artificial Sequence
  Description of Artificial Sequence: Synthetic oligonucleotide
  Antisense strand to SEQ ID NO: 840394
uguccugaacaguauccac

SEQ ID NO: 840396 - RNA, 19 nt, Artificial Sequence
  Description of Artificial Sequence: Synthetic oligonucleotide
  Sense strand starting at position 2663 of SEQ ID NO: 588075
cggauuucguuagcuucau

SEQ ID NO: 840397 - RNA, 19 nt, Artificial Sequence
  Description of Artificial Sequence: Synthetic oligonucleotide
  Antisense strand to SEQ ID NO: 840396
augaagcuaacgaaauccg

SEQ ID NO: 840398 - RNA, 19 nt, Artificial Sequence
  Description of Artificial Sequence: Synthetic oligonucleotide
  Sense strand starting at position 2884 of SEQ ID NO: 588075
ucucuuagccaauggaaca

SEQ ID NO: 840399 - RNA, 19 nt, Artificial Sequence
  Description of Artificial Sequence: Synthetic oligonucleotide
  Antisense strand to SEQ ID NO: 840398
uguuccauuggcuaagaga

SEQ ID NO: 840400 - RNA, 19 nt, Artificial Sequence
  Description of Artificial Sequence: Synthetic oligonucleotide
  Sense strand starting at position 2999 of SEQ ID NO: 588075
uucuauguuucccucuaga

SEQ ID NO: 840401 - RNA, 19 nt, Artificial Sequence
  Description of Artificial Sequence: Synthetic oligonucleotide
  Antisense strand to SEQ ID NO: 840400
ucuagagggaaacauagaa

SEQ ID NO: 840402 - RNA, 19 nt, Artificial Sequence
  Description of Artificial Sequence: Synthetic oligonucleotide
  Sense strand starting at position 3131 of SEQ ID NO: 588075
gauaguuuauuagugacua

SEQ ID NO: 840403 - RNA, 19 nt, Artificial Sequence
  Description of Artificial Sequence: Synthetic oligonucleotide
  Antisense strand to SEQ ID NO: 840402
uagucacuaauaaacuauc

SEQ ID NO: 840404 - RNA, 19 nt, Artificial Sequence
  Description of Artificial Sequence: Synthetic oligonucleotide
  Sense strand starting at position 3132 of SEQ ID NO: 588075
auaguuuauuagugacuac

SEQ ID NO: 840405 - RNA, 19 nt, Artificial Sequence
  Description of Artificial Sequence: Synthetic oligonucleotide
  Antisense strand to SEQ ID NO: 840404
guagucacuaauaaacuau

SEQ ID NO: 840406 - RNA, 19 nt, Artificial Sequence
  Description of Artificial Sequence: Synthetic oligonucleotide
  Sense strand starting at position 3135 of SEQ ID NO: 588075
guuuauuagugacuacuca

SEQ ID NO: 840407 - RNA, 19 nt, Artificial Sequence
  Description of Artificial Sequence: Synthetic oligonucleotide
  Antisense strand to SEQ ID NO: 840406
ugaguagucacuaauaaac

SEQ ID NO: 840408 - RNA, 19 nt, Artificial Sequence
  Description of Artificial Sequence: Synthetic oligonucleotide
  Sense strand starting at position 3139 of SEQ ID NO: 588075
auuagugacuacucagcua

SEQ ID NO: 840409 - RNA, 19 nt, Artificial Sequence
  Description of Artificial Sequence: Synthetic oligonucleotide
  Antisense strand to SEQ ID NO: 840408
uagcugaguagucacuaau

SEQ ID NO: 840410 - RNA, 19 nt, Artificial Sequence
  Description of Artificial Sequence: Synthetic oligonucleotide
  Sense strand starting at position 3142 of SEQ ID NO: 588075
agugacuacucagcuacau

SEQ ID NO: 840411 - RNA, 19 nt, Artificial Sequence
  Description of Artificial Sequence: Synthetic oligonucleotide
  Antisense strand to SEQ ID NO: 840410
auguagcugaguagucacu

SEQ ID NO: 840412 - RNA, 19 nt, Artificial Sequence
  Description of Artificial Sequence: Synthetic oligonucleotide
  Sense strand starting at position 3490 of SEQ ID NO: 588075
cgggcuuaauguuuguuua

SEQ ID NO: 840413 - RNA, 19 nt, Artificial Sequence
  Description of Artificial Sequence: Synthetic oligonucleotide
  Antisense strand to SEQ ID NO: 840412
uaaacaaacauuaagcccg

SEQ ID NO: 840414 - RNA, 19 nt, Artificial Sequence
  Description of Artificial Sequence: Synthetic oligonucleotide
  Sense strand starting at position 3491 of SEQ ID NO: 588075
gggcuuaauguuuguuuau

SEQ ID NO: 840415 - RNA, 19 nt, Artificial Sequence
  Description of Artificial Sequence: Synthetic oligonucleotide
  Antisense strand to SEQ ID NO: 840414
auaaacaaacauuaagccc

SEQ ID NO: 840416 - RNA, 19 nt, Artificial Sequence
  Description of Artificial Sequence: Synthetic oligonucleotide
  Sense strand starting at position 3492 of SEQ ID NO: 588075
ggcuuaauguuuguuuaua

SEQ ID NO: 840417 - RNA, 19 nt, Artificial Sequence
  Description of Artificial Sequence: Synthetic oligonucleotide
  Antisense strand to SEQ ID NO: 840416
uauaaacaaacauuaagcc

SEQ ID NO: 840418 - RNA, 19 nt, Artificial Sequence
  Description of Artificial Sequence: Synthetic oligonucleotide
  Sense strand starting at position 3524 of SEQ ID NO: 588075
aucaguuugugacaggcua

SEQ ID NO: 840419 - RNA, 19 nt, Artificial Sequence
  Description of Artificial Sequence: Synthetic oligonucleotide
  Antisense strand to SEQ ID NO: 840418
uagccugucacaaacugau

SEQ ID NO: 840420 - RNA, 19 nt, Artificial Sequence
  Description of Artificial Sequence: Synthetic oligonucleotide
  Sense strand starting at position 3584 of SEQ ID NO: 588075
caauuuauguguguacugu

SEQ ID NO: 840421 - RNA, 19 nt, Artificial Sequence
  Description of Artificial Sequence: Synthetic oligonucleotide
  Antisense strand to SEQ ID NO: 840420
acaguacacacauaaauug

SEQ ID NO: 840422 - RNA, 19 nt, Artificial Sequence
  Description of Artificial Sequence: Synthetic oligonucleotide
  Sense strand starting at position 3594 of SEQ ID NO: 588075
guguacuguuaccuuuaaa

SEQ ID NO: 840423 - RNA, 19 nt, Artificial Sequence
  Description of Artificial Sequence: Synthetic oligonucleotide
  Antisense strand to SEQ ID NO: 840422
uuuaaagguaacaguacac

SEQ ID NO: 840424 - RNA, 19 nt, Artificial Sequence
  Description of Artificial Sequence: Synthetic oligonucleotide
  Sense strand starting at position 3836 of SEQ ID NO: 588075
ugcgauuauggcuggcuca

SEQ ID NO: 840425 - RNA, 19 nt, Artificial Sequence
  Description of Artificial Sequence: Synthetic oligonucleotide
  Antisense strand to SEQ ID NO: 840424
ugagccagccauaaucgca

SEQ ID NO: 840426 - RNA, 19 nt, Artificial Sequence
  Description of Artificial Sequence: Synthetic oligonucleotide
  Sense strand starting at position 3837 of SEQ ID NO: 588075
gcgauuauggcuggcucau

SEQ ID NO: 840427 - RNA, 19 nt, Artificial Sequence
  Description of Artificial Sequence: Synthetic oligonucleotide
  Antisense strand to SEQ ID NO: 840426
augagccagccauaaucgc

SEQ ID NO: 840428 - RNA, 19 nt, Artificial Sequence
  Description of Artificial Sequence: Synthetic oligonucleotide
  Sense strand starting at position 1 of SEQ ID NO: 588076
cagugucaugggugagaau

SEQ ID NO: 840429 - RNA, 19 nt, Artificial Sequence
  Description of Artificial Sequence: Synthetic oligonucleotide
  Antisense strand to SEQ ID NO: 840428
auucucacccaugacacug

SEQ ID NO: 840430 - RNA, 19 nt, Artificial Sequence
  Description of Artificial Sequence: Synthetic oligonucleotide
  Sense strand starting at position 68 of SEQ ID NO: 588076
acuucuggauccugaauac

SEQ ID NO: 840431 - RNA, 19 nt, Artificial Sequence
  Description of Artificial Sequence: Synthetic oligonucleotide
  Antisense strand to SEQ ID NO: 840430
guauucaggauccagaagu

SEQ ID NO: 840432 - RNA, 19 nt, Artificial Sequence
  Description of Artificial Sequence: Synthetic oligonucleotide
  Sense strand starting at position 130 of SEQ ID NO: 588076
uuagaaagauaccuuuguu

SEQ ID NO: 840433 - RNA, 19 nt, Artificial Sequence
  Description of Artificial Sequence: Synthetic oligonucleotide
  Antisense strand to SEQ ID NO: 840432
aacaaagguaucuuucuaa

SEQ ID NO: 840434 - RNA, 19 nt, Artificial Sequence
  Description of Artificial Sequence: Synthetic oligonucleotide
  Sense strand starting at position 133 of SEQ ID NO: 588076
gaaagauaccuuuguugug

SEQ ID NO: 840435 - RNA, 19 nt, Artificial Sequence
  Description of Artificial Sequence: Synthetic oligonucleotide
  Antisense strand to SEQ ID NO: 840434
cacaacaaagguaucuuuc

SEQ ID NO: 840436 - RNA, 19 nt, Artificial Sequence
  Description of Artificial Sequence: Synthetic oligonucleotide
  Sense strand starting at position 139 of SEQ ID NO: 588076
uaccuuuguugugugcuua

SEQ ID NO: 840437 - RNA, 19 nt, Artificial Sequence
  Description of Artificial Sequence: Synthetic oligonucleotide
  Antisense strand to SEQ ID NO: 840436
uaagcacacaacaaaggua

SEQ ID NO: 840438 - RNA, 19 nt, Artificial Sequence
  Description of Artificial Sequence: Synthetic oligonucleotide
  Sense strand starting at position 142 of SEQ ID NO: 588076
cuuuguugugugcuuacuu

SEQ ID NO: 840439 - RNA, 19 nt, Artificial Sequence
  Description of Artificial Sequence: Synthetic oligonucleotide
  Antisense strand to SEQ ID NO: 840438
aaguaagcacacaacaaag

SEQ ID NO: 840440 - RNA, 19 nt, Artificial Sequence
  Description of Artificial Sequence: Synthetic oligonucleotide
  Sense strand starting at position 143 of SEQ ID NO: 588076
uuuguugugugcuuacuuu

SEQ ID NO: 840441 - RNA, 19 nt, Artificial Sequence
  Description of Artificial Sequence: Synthetic oligonucleotide
  Antisense strand to SEQ ID NO: 840440
aaaguaagcacacaacaaa

SEQ ID NO: 840442 - RNA, 19 nt, Artificial Sequence
  Description of Artificial Sequence: Synthetic oligonucleotide
  Sense strand starting at position 147 of SEQ ID NO: 588076
uugugugcuuacuuuauaa

SEQ ID NO: 840443 - RNA, 19 nt, Artificial Sequence
  Description of Artificial Sequence: Synthetic oligonucleotide
  Antisense strand to SEQ ID NO: 840442
uuauaaaguaagcacacaa

SEQ ID NO: 840444 - RNA, 19 nt, Artificial Sequence
  Description of Artificial Sequence: Synthetic oligonucleotide
  Sense strand starting at position 149 of SEQ ID NO: 588076
gugugcuuacuuuauaaag

SEQ ID NO: 840445 - RNA, 19 nt, Artificial Sequence
  Description of Artificial Sequence: Synthetic oligonucleotide
  Antisense strand to SEQ ID NO: 840444
cuuuauaaaguaagcacac

SEQ ID NO: 840446 - RNA, 19 nt, Artificial Sequence
  Description of Artificial Sequence: Synthetic oligonucleotide
  Sense strand starting at position 279 of SEQ ID NO: 588076
gcaugaccuuaauacgaua

SEQ ID NO: 840447 - RNA, 19 nt, Artificial Sequence
  Description of Artificial Sequence: Synthetic oligonucleotide
  Antisense strand to SEQ ID NO: 840446
uaucguauuaaggucaugc

SEQ ID NO: 840448 - RNA, 19 nt, Artificial Sequence
  Description of Artificial Sequence: Synthetic oligonucleotide
  Sense strand starting at position 346 of SEQ ID NO: 588076
augucacacucuuaaguaa

SEQ ID NO: 840449 - RNA, 19 nt, Artificial Sequence
  Description of Artificial Sequence: Synthetic oligonucleotide
  Antisense strand to SEQ ID NO: 840448
uuacuuaagagugugacau

SEQ ID NO: 840450 - RNA, 19 nt, Artificial Sequence
  Description of Artificial Sequence: Synthetic oligonucleotide
  Sense strand starting at position 361 of SEQ ID NO: 588076
guaacagcgauuugucuuu

SEQ ID NO: 840451 - RNA, 19 nt, Artificial Sequence
  Description of Artificial Sequence: Synthetic oligonucleotide
  Antisense strand to SEQ ID NO: 840450
aaagacaaaucgcuguuac

SEQ ID NO: 840452 - RNA, 19 nt, Artificial Sequence
  Description of Artificial Sequence: Synthetic oligonucleotide
  Sense strand starting at position 368 of SEQ ID NO: 588076
cgauuugucuuucacgguu

SEQ ID NO: 840453 - RNA, 19 nt, Artificial Sequence
  Description of Artificial Sequence: Synthetic oligonucleotide
  Antisense strand to SEQ ID NO: 840452
aaccgugaaagacaaaucg

SEQ ID NO: 840454 - RNA, 19 nt, Artificial Sequence
  Description of Artificial Sequence: Synthetic oligonucleotide
  Sense strand starting at position 406 of SEQ ID NO: 588076
gcauuugucuucuccagaa

SEQ ID NO: 840455 - RNA, 19 nt, Artificial Sequence
  Description of Artificial Sequence: Synthetic oligonucleotide
  Antisense strand to SEQ ID NO: 840454
uucuggagaagacaaaugc

SEQ ID NO: 840456 - RNA, 19 nt, Artificial Sequence
  Description of Artificial Sequence: Synthetic oligonucleotide
  Sense strand starting at position 462 of SEQ ID NO: 588076
agauguaauuauuggaacu

SEQ ID NO: 840457 - RNA, 19 nt, Artificial Sequence
  Description of Artificial Sequence: Synthetic oligonucleotide
  Antisense strand to SEQ ID NO: 840456
aguuccaauaauuacaucu

SEQ ID NO: 840458 - RNA, 19 nt, Artificial Sequence
  Description of Artificial Sequence: Synthetic oligonucleotide
  Sense strand starting at position 464 of SEQ ID NO: 588076
auguaauuauuggaacuga

SEQ ID NO: 840459 - RNA, 19 nt, Artificial Sequence
  Description of Artificial Sequence: Synthetic oligonucleotide
  Antisense strand to SEQ ID NO: 840458
ucaguuccaauaauuacau

SEQ ID NO: 840460 - RNA, 19 nt, Artificial Sequence
  Description of Artificial Sequence: Synthetic oligonucleotide
  Sense strand starting at position 491 of SEQ ID NO: 588076
aaaggugagcuuuggaaau

SEQ ID NO: 840461 - RNA, 19 nt, Artificial Sequence
  Description of Artificial Sequence: Synthetic oligonucleotide
  Antisense strand to SEQ ID NO: 840460
auuuccaaagcucaccuuu

SEQ ID NO: 840462 - RNA, 19 nt, Artificial Sequence
  Description of Artificial Sequence: Synthetic oligonucleotide
  Sense strand starting at position 493 of SEQ ID NO: 588076
aggugagcuuuggaaauau

SEQ ID NO: 840463 - RNA, 19 nt, Artificial Sequence
  Description of Artificial Sequence: Synthetic oligonucleotide
  Antisense strand to SEQ ID NO: 840462
auauuuccaaagcucaccu

SEQ ID NO: 840464 - RNA, 19 nt, Artificial Sequence
  Description of Artificial Sequence: Synthetic oligonucleotide
  Sense strand starting at position 502 of SEQ ID NO: 588076
uuggaaauaucuuugagca

SEQ ID NO: 840465 - RNA, 19 nt, Artificial Sequence
  Description of Artificial Sequence: Synthetic oligonucleotide
  Antisense strand to SEQ ID NO: 840464
ugcucaaagauauuuccaa

SEQ ID NO: 840466 - RNA, 19 nt, Artificial Sequence
  Description of Artificial Sequence: Synthetic oligonucleotide
  Sense strand starting at position 503 of SEQ ID NO: 588076
uggaaauaucuuugagcag

SEQ ID NO: 840467 - RNA, 19 nt, Artificial Sequence
  Description of Artificial Sequence: Synthetic oligonucleotide
  Antisense strand to SEQ ID NO: 840466
cugcucaaagauauuucca

SEQ ID NO: 840468 - RNA, 19 nt, Artificial Sequence
  Description of Artificial Sequence: Synthetic oligonucleotide
  Sense strand starting at position 504 of SEQ ID NO: 588076
ggaaauaucuuugagcagu

SEQ ID NO: 840469 - RNA, 19 nt, Artificial Sequence
  Description of Artificial Sequence: Synthetic oligonucleotide
  Antisense strand to SEQ ID NO: 840468
acugcucaaagauauuucc

SEQ ID NO: 840470 - RNA, 19 nt, Artificial Sequence
  Description of Artificial Sequence: Synthetic oligonucleotide
  Sense strand starting at position 881 of SEQ ID NO: 588076
ucuaaagaauuugggaauu

SEQ ID NO: 840471 - RNA, 19 nt, Artificial Sequence
  Description of Artificial Sequence: Synthetic oligonucleotide
  Antisense strand to SEQ ID NO: 840470
aauucccaaauucuuuaga

SEQ ID NO: 840472 - RNA, 19 nt, Artificial Sequence
  Description of Artificial Sequence: Synthetic oligonucleotide
  Sense strand starting at position 2582 of SEQ ID NO: 588076
uauaaugaggcucguaaag

SEQ ID NO: 840473 - RNA, 19 nt, Artificial Sequence
  Description of Artificial Sequence: Synthetic oligonucleotide
  Antisense strand to SEQ ID NO: 840472
cuuuacgagccucauuaua

SEQ ID NO: 840474 - RNA, 19 nt, Artificial Sequence
  Description of Artificial Sequence: Synthetic oligonucleotide
  Sense strand starting at position 2584 of SEQ ID NO: 588076
uaaugaggcucguaaagug

SEQ ID NO: 840475 - RNA, 19 nt, Artificial Sequence
  Description of Artificial Sequence: Synthetic oligonucleotide
  Antisense strand to SEQ ID NO: 840474
cacuuuacgagccucauua

SEQ ID NO: 840476 - RNA, 19 nt, Artificial Sequence
  Description of Artificial Sequence: Synthetic oligonucleotide
  Sense strand starting at position 2600 of SEQ ID NO: 588076
guggauacuguucaggaca

SEQ ID NO: 840477 - RNA, 19 nt, Artificial Sequence
  Description of Artificial Sequence: Synthetic oligonucleotide
  Antisense strand to SEQ ID NO: 840476
uguccugaacaguauccac

SEQ ID NO: 840478 - RNA, 19 nt, Artificial Sequence
  Description of Artificial Sequence: Synthetic oligonucleotide
  Sense strand starting at position 2726 of SEQ ID NO: 588076
cggauuucguuagcuucau

SEQ ID NO: 840479 - RNA, 19 nt, Artificial Sequence
  Description of Artificial Sequence: Synthetic oligonucleotide
  Antisense strand to SEQ ID NO: 840478
augaagcuaacgaaauccg

SEQ ID NO: 840480 - RNA, 19 nt, Artificial Sequence
  Description of Artificial Sequence: Synthetic oligonucleotide
  Sense strand starting at position 2947 of SEQ ID NO: 588076
ucucuuagccaauggaaca

SEQ ID NO: 840481 - RNA, 19 nt, Artificial Sequence
  Description of Artificial Sequence: Synthetic oligonucleotide
  Antisense strand to SEQ ID NO: 840480
uguuccauuggcuaagaga

SEQ ID NO: 840482 - RNA, 19 nt, Artificial Sequence
  Description of Artificial Sequence: Synthetic oligonucleotide
  Sense strand starting at position 3062 of SEQ ID NO: 588076
uucuauguuucccucuaga

SEQ ID NO: 840483 - RNA, 19 nt, Artificial Sequence
  Description of Artificial Sequence: Synthetic oligonucleotide
  Antisense strand to SEQ ID NO: 840482
ucuagagggaaacauagaa

SEQ ID NO: 840484 - RNA, 19 nt, Artificial Sequence
  Description of Artificial Sequence: Synthetic oligonucleotide
  Sense strand starting at position 3194 of SEQ ID NO: 588076
gauaguuuauuagugacua

SEQ ID NO: 840485 - RNA, 19 nt, Artificial Sequence
  Description of Artificial Sequence: Synthetic oligonucleotide
  Antisense strand to SEQ ID NO: 840484
uagucacuaauaaacuauc

SEQ ID NO: 840486 - RNA, 19 nt, Artificial Sequence
  Description of Artificial Sequence: Synthetic oligonucleotide
  Sense strand starting at position 3198 of SEQ ID NO: 588076
guuuauuagugacuacuca

SEQ ID NO: 840487 - RNA, 19 nt, Artificial Sequence
  Description of Artificial Sequence: Synthetic oligonucleotide
  Antisense strand to SEQ ID NO: 840486
ugaguagucacuaauaaac

SEQ ID NO: 840488 - RNA, 19 nt, Artificial Sequence
  Description of Artificial Sequence: Synthetic oligonucleotide
  Sense strand starting at position 3202 of SEQ ID NO: 588076
auuagugacuacucagcua

SEQ ID NO: 840489 - RNA, 19 nt, Artificial Sequence
  Description of Artificial Sequence: Synthetic oligonucleotide
  Antisense strand to SEQ ID NO: 840488
uagcugaguagucacuaau

SEQ ID NO: 840490 - RNA, 19 nt, Artificial Sequence
  Description of Artificial Sequence: Synthetic oligonucleotide
  Sense strand starting at position 3205 of SEQ ID NO: 588076
agugacuacucagcuacau

SEQ ID NO: 840491 - RNA, 19 nt, Artificial Sequence
  Description of Artificial Sequence: Synthetic oligonucleotide
  Antisense strand to SEQ ID NO: 840490
auguagcugaguagucacu

SEQ ID NO: 840492 - RNA, 19 nt, Artificial Sequence
  Description of Artificial Sequence: Synthetic oligonucleotide
  Sense strand starting at position 3553 of SEQ ID NO: 588076
cgggcuuaauguuuguuua

SEQ ID NO: 840493 - RNA, 19 nt, Artificial Sequence
  Description of Artificial Sequence: Synthetic oligonucleotide
  Antisense strand to SEQ ID NO: 840492
uaaacaaacauuaagcccg

SEQ ID NO: 840494 - RNA, 19 nt, Artificial Sequence
  Description of Artificial Sequence: Synthetic oligonucleotide
  Sense strand starting at position 3554 of SEQ ID NO: 588076
gggcuuaauguuuguuuau

SEQ ID NO: 840495 - RNA, 19 nt, Artificial Sequence
  Description of Artificial Sequence: Synthetic oligonucleotide
  Antisense strand to SEQ ID NO: 840494
auaaacaaacauuaagccc

SEQ ID NO: 840496 - RNA, 19 nt, Artificial Sequence
  Description of Artificial Sequence: Synthetic oligonucleotide
  Sense strand starting at position 3555 of SEQ ID NO: 588076
ggcuuaauguuuguuuaua

SEQ ID NO: 840497 - RNA, 19 nt, Artificial Sequence
  Description of Artificial Sequence: Synthetic oligonucleotide
  Antisense strand to SEQ ID NO: 840496
uauaaacaaacauuaagcc

SEQ ID NO: 840498 - RNA, 19 nt, Artificial Sequence
  Description of Artificial Sequence: Synthetic oligonucleotide
  Sense strand starting at position 3587 of SEQ ID NO: 588076
aucaguuugugacaggcua

SEQ ID NO: 840499 - RNA, 19 nt, Artificial Sequence
  Description of Artificial Sequence: Synthetic oligonucleotide
  Antisense strand to SEQ ID NO: 840498
uagccugucacaaacugau

SEQ ID NO: 840500 - RNA, 19 nt, Artificial Sequence
  Description of Artificial Sequence: Synthetic oligonucleotide
  Sense strand starting at position 3647 of SEQ ID NO: 588076
caauuuauguguguacugu

SEQ ID NO: 840501 - RNA, 19 nt, Artificial Sequence
  Description of Artificial Sequence: Synthetic oligonucleotide
  Antisense strand to SEQ ID NO: 840500
acaguacacacauaaauug

SEQ ID NO: 840502 - RNA, 19 nt, Artificial Sequence
  Description of Artificial Sequence: Synthetic oligonucleotide
  Sense strand starting at position 3657 of SEQ ID NO: 588076
guguacuguuaccuuuaaa

SEQ ID NO: 840503 - RNA, 19 nt, Artificial Sequence
  Description of Artificial Sequence: Synthetic oligonucleotide
  Antisense strand to SEQ ID NO: 840502
uuuaaagguaacaguacac

SEQ ID NO: 840504 - RNA, 19 nt, Artificial Sequence
  Description of Artificial Sequence: Synthetic oligonucleotide
  Sense strand starting at position 3899 of SEQ ID NO: 588076
ugcgauuauggcuggcuca

SEQ ID NO: 840505 - RNA, 19 nt, Artificial Sequence
  Description of Artificial Sequence: Synthetic oligonucleotide
  Antisense strand to SEQ ID NO: 840504
ugagccagccauaaucgca

SEQ ID NO: 840506 - RNA, 19 nt, Artificial Sequence
  Description of Artificial Sequence: Synthetic oligonucleotide
  Sense strand starting at position 3900 of SEQ ID NO: 588076
gcgauuauggcuggcucau

SEQ ID NO: 840507 - RNA, 19 nt, Artificial Sequence
  Description of Artificial Sequence: Synthetic oligonucleotide
  Antisense strand to SEQ ID NO: 840506
augagccagccauaaucgc

SEQ ID NO: 840508 - RNA, 19 nt, Artificial Sequence
  Description of Artificial Sequence: Synthetic oligonucleotide
  Sense strand starting at position 75 of SEQ ID NO: 588077
gcaaauaucuugcuuugaa

SEQ ID NO: 840509 - RNA, 19 nt, Artificial Sequence
  Description of Artificial Sequence: Synthetic oligonucleotide
  Antisense strand to SEQ ID NO: 840508
uucaaagcaagauauuugc

SEQ ID NO: 840510 - RNA, 19 nt, Artificial Sequence
  Description of Artificial Sequence: Synthetic oligonucleotide
  Sense strand starting at position 631 of SEQ ID NO: 588077
uugaaauugucucaacagc

SEQ ID NO: 840511 - RNA, 19 nt, Artificial Sequence
  Description of Artificial Sequence: Synthetic oligonucleotide
  Antisense strand to SEQ ID NO: 840510
gcuguugagacaauuucaa

SEQ ID NO: 840512 - RNA, 19 nt, Artificial Sequence
  Description of Artificial Sequence: Synthetic oligonucleotide
  Sense strand starting at position 647 of SEQ ID NO: 588077
agcagauguuguguaucau

SEQ ID NO: 840513 - RNA, 19 nt, Artificial Sequence
  Description of Artificial Sequence: Synthetic oligonucleotide
  Antisense strand to SEQ ID NO: 840512
augauacacaacaucugcu

SEQ ID NO: 840514 - RNA, 19 nt, Artificial Sequence
  Description of Artificial Sequence: Synthetic oligonucleotide
  Sense strand starting at position 648 of SEQ ID NO: 588077
gcagauguuguguaucauc

SEQ ID NO: 840515 - RNA, 19 nt, Artificial Sequence
  Description of Artificial Sequence: Synthetic oligonucleotide
  Antisense strand to SEQ ID NO: 840514
gaugauacacaacaucugc

SEQ ID NO: 840516 - RNA, 19 nt, Artificial Sequence
  Description of Artificial Sequence: Synthetic oligonucleotide
  Sense strand starting at position 696 of SEQ ID NO: 588077
gggugucccaucuggcauu

SEQ ID NO: 840517 - RNA, 19 nt, Artificial Sequence
  Description of Artificial Sequence: Synthetic oligonucleotide
  Antisense strand to SEQ ID NO: 840516
aaugccagaugggacaccc

SEQ ID NO: 840518 - RNA, 19 nt, Artificial Sequence
  Description of Artificial Sequence: Synthetic oligonucleotide
  Sense strand starting at position 699 of SEQ ID NO: 588077
ugucccaucuggcauuaga

SEQ ID NO: 840519 - RNA, 19 nt, Artificial Sequence
  Description of Artificial Sequence: Synthetic oligonucleotide
  Antisense strand to SEQ ID NO: 840518
ucuaaugccagaugggaca

SEQ ID NO: 840520 - RNA, 19 nt, Artificial Sequence
  Description of Artificial Sequence: Synthetic oligonucleotide
  Sense strand starting at position 779 of SEQ ID NO: 588077
agucacuguguguugcuua

SEQ ID NO: 840521 - RNA, 19 nt, Artificial Sequence
  Description of Artificial Sequence: Synthetic oligonucleotide
  Antisense strand to SEQ ID NO: 840520
uaagcaacacacagugacu

SEQ ID NO: 840522 - RNA, 19 nt, Artificial Sequence
  Description of Artificial Sequence: Synthetic oligonucleotide
  Sense strand starting at position 791 of SEQ ID NO: 588077
uugcuuacagccugaagaa

SEQ ID NO: 840523 - RNA, 19 nt, Artificial Sequence
  Description of Artificial Sequence: Synthetic oligonucleotide
  Antisense strand to SEQ ID NO: 840522
uucuucaggcuguaagcaa

SEQ ID NO: 840524 - RNA, 19 nt, Artificial Sequence
  Description of Artificial Sequence: Synthetic oligonucleotide
  Sense strand starting at position 792 of SEQ ID NO: 588077
ugcuuacagccugaagaaa

SEQ ID NO: 840525 - RNA, 19 nt, Artificial Sequence
  Description of Artificial Sequence: Synthetic oligonucleotide
  Antisense strand to SEQ ID NO: 840524
uuucuucaggcuguaagca

SEQ ID NO: 840526 - RNA, 19 nt, Artificial Sequence
  Description of Artificial Sequence: Synthetic oligonucleotide
  Sense strand starting at position 803 of SEQ ID NO: 588077
ugaagaaauuaacaggaua

SEQ ID NO: 840527 - RNA, 19 nt, Artificial Sequence
  Description of Artificial Sequence: Synthetic oligonucleotide
  Antisense strand to SEQ ID NO: 840526
uauccuguuaauuucuuca

SEQ ID NO: 840528 - RNA, 19 nt, Artificial Sequence
  Description of Artificial Sequence: Synthetic oligonucleotide
  Sense strand starting at position 870 of SEQ ID NO: 588077
ccgagugagacguggacua

SEQ ID NO: 840529 - RNA, 19 nt, Artificial Sequence
  Description of Artificial Sequence: Synthetic oligonucleotide
  Antisense strand to SEQ ID NO: 840528
uaguccacgucucacucgg

SEQ ID NO: 840530 - RNA, 19 nt, Artificial Sequence
  Description of Artificial Sequence: Synthetic oligonucleotide
  Sense strand starting at position 962 of SEQ ID NO: 588077
gggagcgcuucuguuccua

SEQ ID NO: 840531 - RNA, 19 nt, Artificial Sequence
  Description of Artificial Sequence: Synthetic oligonucleotide
  Antisense strand to SEQ ID NO: 840530
uaggaacagaagcgcuccc

SEQ ID NO: 840532 - RNA, 19 nt, Artificial Sequence
  Description of Artificial Sequence: Synthetic oligonucleotide
  Sense strand starting at position 964 of SEQ ID NO: 588077
gagcgcuucuguuccuagu

SEQ ID NO: 840533 - RNA, 19 nt, Artificial Sequence
  Description of Artificial Sequence: Synthetic oligonucleotide
  Antisense strand to SEQ ID NO: 840532
acuaggaacagaagcgcuc

SEQ ID NO: 840534 - RNA, 19 nt, Artificial Sequence
  Description of Artificial Sequence: Synthetic oligonucleotide
  Sense strand starting at position 1020 of SEQ ID NO: 588077
agcguaaggucagagaacu

SEQ ID NO: 840535 - RNA, 19 nt, Artificial Sequence
  Description of Artificial Sequence: Synthetic oligonucleotide
  Antisense strand to SEQ ID NO: 840534
aguucucugaccuuacgcu

SEQ ID NO: 840536 - RNA, 19 nt, Artificial Sequence
  Description of Artificial Sequence: Synthetic oligonucleotide
  Sense strand starting at position 1261 of SEQ ID NO: 588077
cugagagucccuggaccau

SEQ ID NO: 840537 - RNA, 19 nt, Artificial Sequence
  Description of Artificial Sequence: Synthetic oligonucleotide
  Antisense strand to SEQ ID NO: 840536
augguccagggacucucag

SEQ ID NO: 840538 - RNA, 19 nt, Artificial Sequence
  Description of Artificial Sequence: Synthetic oligonucleotide
  Sense strand starting at position 1303 of SEQ ID NO: 588077
gcaagacagccuugacaga

SEQ ID NO: 840539 - RNA, 19 nt, Artificial Sequence
  Description of Artificial Sequence: Synthetic oligonucleotide
  Antisense strand to SEQ ID NO: 840538
ucugucaaggcugucuugc

SEQ ID NO: 840540 - RNA, 19 nt, Artificial Sequence
  Description of Artificial Sequence: Synthetic oligonucleotide
  Sense strand starting at position 1327 of SEQ ID NO: 588077
agagaacgccacugggauu

SEQ ID NO: 840541 - RNA, 19 nt, Artificial Sequence
  Description of Artificial Sequence: Synthetic oligonucleotide
  Antisense strand to SEQ ID NO: 840540
aaucccaguggcguucucu

SEQ ID NO: 840542 - RNA, 19 nt, Artificial Sequence
  Description of Artificial Sequence: Synthetic oligonucleotide
  Sense strand starting at position 1420 of SEQ ID NO: 588077
gggaauucuccagguccaa

SEQ ID NO: 840543 - RNA, 19 nt, Artificial Sequence
  Description of Artificial Sequence: Synthetic oligonucleotide
  Antisense strand to SEQ ID NO: 840542
uuggaccuggagaauuccc

SEQ ID NO: 840544 - RNA, 19 nt, Artificial Sequence
  Description of Artificial Sequence: Synthetic oligonucleotide
  Sense strand starting at position 1433 of SEQ ID NO: 588077
guccaagucuuguacuuaa

SEQ ID NO: 840545 - RNA, 19 nt, Artificial Sequence
  Description of Artificial Sequence: Synthetic oligonucleotide
  Antisense strand to SEQ ID NO: 840544
uuaaguacaagacuuggac

SEQ ID NO: 840546 - RNA, 19 nt, Artificial Sequence
  Description of Artificial Sequence: Synthetic oligonucleotide
  Sense strand starting at position 2648 of SEQ ID NO: 588077
cucauugauucuugguaga

SEQ ID NO: 840547 - RNA, 19 nt, Artificial Sequence
  Description of Artificial Sequence: Synthetic oligonucleotide
  Antisense strand to SEQ ID NO: 840546
ucuaccaagaaucaaugag

SEQ ID NO: 840548 - RNA, 19 nt, Artificial Sequence
  Description of Artificial Sequence: Synthetic oligonucleotide
  Sense strand starting at position 2650 of SEQ ID NO: 588077
cauugauucuugguagaca

SEQ ID NO: 840549 - RNA, 19 nt, Artificial Sequence
  Description of Artificial Sequence: Synthetic oligonucleotide
  Antisense strand to SEQ ID NO: 840548
ugucuaccaagaaucaaug

SEQ ID NO: 840550 - RNA, 19 nt, Artificial Sequence
  Description of Artificial Sequence: Synthetic oligonucleotide
  Sense strand starting at position 2651 of SEQ ID NO: 588077
auugauucuugguagacau

SEQ ID NO: 840551 - RNA, 19 nt, Artificial Sequence
  Description of Artificial Sequence: Synthetic oligonucleotide
  Antisense strand to SEQ ID NO: 840550
augucuaccaagaaucaau

SEQ ID NO: 840552 - RNA, 19 nt, Artificial Sequence
  Description of Artificial Sequence: Synthetic oligonucleotide
  Sense strand starting at position 2658 of SEQ ID NO: 588077
cuugguagacauuacucau

SEQ ID NO: 840553 - RNA, 19 nt, Artificial Sequence
  Description of Artificial Sequence: Synthetic oligonucleotide
  Antisense strand to SEQ ID NO: 840552
augaguaaugucuaccaag

SEQ ID NO: 840554 - RNA, 19 nt, Artificial Sequence
  Description of Artificial Sequence: Synthetic oligonucleotide
  Sense strand starting at position 2664 of SEQ ID NO: 588077
agacauuacucauugcuag

SEQ ID NO: 840555 - RNA, 19 nt, Artificial Sequence
  Description of Artificial Sequence: Synthetic oligonucleotide
  Antisense strand to SEQ ID NO: 840554
cuagcaaugaguaaugucu

SEQ ID NO: 840556 - RNA, 19 nt, Artificial Sequence
  Description of Artificial Sequence: Synthetic oligonucleotide
  Sense strand starting at position 2668 of SEQ ID NO: 588077
auuacucauugcuagaaug

SEQ ID NO: 840557 - RNA, 19 nt, Artificial Sequence
  Description of Artificial Sequence: Synthetic oligonucleotide
  Antisense strand to SEQ ID NO: 840556
cauucuagcaaugaguaau

SEQ ID NO: 840558 - RNA, 19 nt, Artificial Sequence
  Description of Artificial Sequence: Synthetic oligonucleotide
  Sense strand starting at position 2678 of SEQ ID NO: 588077
gcuagaaugagucacaguc

SEQ ID NO: 840559 - RNA, 19 nt, Artificial Sequence
  Description of Artificial Sequence: Synthetic oligonucleotide
  Antisense strand to SEQ ID NO: 840558
gacugugacucauucuagc

SEQ ID NO: 840560 - RNA, 19 nt, Artificial Sequence
  Description of Artificial Sequence: Synthetic oligonucleotide
  Sense strand starting at position 2685 of SEQ ID NO: 588077
ugagucacaguccgaaaua

SEQ ID NO: 840561 - RNA, 19 nt, Artificial Sequence
  Description of Artificial Sequence: Synthetic oligonucleotide
  Antisense strand to SEQ ID NO: 840560
uauuucggacugugacuca

SEQ ID NO: 840562 - RNA, 19 nt, Artificial Sequence
  Description of Artificial Sequence: Synthetic oligonucleotide
  Sense strand starting at position 2686 of SEQ ID NO: 588077
gagucacaguccgaaauaa

SEQ ID NO: 840563 - RNA, 19 nt, Artificial Sequence
  Description of Artificial Sequence: Synthetic oligonucleotide
  Antisense strand to SEQ ID NO: 840562
uuauuucggacugugacuc

SEQ ID NO: 840564 - RNA, 19 nt, Artificial Sequence
  Description of Artificial Sequence: Synthetic oligonucleotide
  Sense strand starting at position 2694 of SEQ ID NO: 588077
guccgaaauaaucgaaaua

SEQ ID NO: 840565 - RNA, 19 nt, Artificial Sequence
  Description of Artificial Sequence: Synthetic oligonucleotide
  Antisense strand to SEQ ID NO: 840564
uauuucgauuauuucggac

SEQ ID NO: 840566 - RNA, 19 nt, Artificial Sequence
  Description of Artificial Sequence: Synthetic oligonucleotide
  Sense strand starting at position 2786 of SEQ ID NO: 588077
ucugcuagcacugaggaaa

SEQ ID NO: 840567 - RNA, 19 nt, Artificial Sequence
  Description of Artificial Sequence: Synthetic oligonucleotide
  Antisense strand to SEQ ID NO: 840566
uuuccucagugcuagcaga

SEQ ID NO: 840568 - RNA, 19 nt, Artificial Sequence
  Description of Artificial Sequence: Synthetic oligonucleotide
  Sense strand starting at position 2797 of SEQ ID NO: 588077
ugaggaaacuuguuuaccu

SEQ ID NO: 840569 - RNA, 19 nt, Artificial Sequence
  Description of Artificial Sequence: Synthetic oligonucleotide
  Antisense strand to SEQ ID NO: 840568
agguaaacaaguuuccuca

SEQ ID NO: 840570 - RNA, 19 nt, Artificial Sequence
  Description of Artificial Sequence: Synthetic oligonucleotide
  Sense strand starting at position 2798 of SEQ ID NO: 588077
gaggaaacuuguuuaccua

SEQ ID NO: 840571 - RNA, 19 nt, Artificial Sequence
  Description of Artificial Sequence: Synthetic oligonucleotide
  Antisense strand to SEQ ID NO: 840570
uagguaaacaaguuuccuc

SEQ ID NO: 840572 - RNA, 19 nt, Artificial Sequence
  Description of Artificial Sequence: Synthetic oligonucleotide
  Sense strand starting at position 2813 of SEQ ID NO: 588077
ccuaaauuguuagauagga

SEQ ID NO: 840573 - RNA, 19 nt, Artificial Sequence
  Description of Artificial Sequence: Synthetic oligonucleotide
  Antisense strand to SEQ ID NO: 840572
uccuaucuaacaauuuagg

SEQ ID NO: 840574 - RNA, 19 nt, Artificial Sequence
  Description of Artificial Sequence: Synthetic oligonucleotide
  Sense strand starting at position 3225 of SEQ ID NO: 588077
gcaguuuaucaccaagugu

SEQ ID NO: 840575 - RNA, 19 nt, Artificial Sequence
  Description of Artificial Sequence: Synthetic oligonucleotide
  Antisense strand to SEQ ID NO: 840574
acacuuggugauaaacugc

SEQ ID NO: 840576 - RNA, 19 nt, Artificial Sequence
  Description of Artificial Sequence: Synthetic oligonucleotide
  Sense strand starting at position 3341 of SEQ ID NO: 588077
ugaagucuuucccagccaa

SEQ ID NO: 840577 - RNA, 19 nt, Artificial Sequence
  Description of Artificial Sequence: Synthetic oligonucleotide
  Antisense strand to SEQ ID NO: 840576
uuggcugggaaagacuuca

SEQ ID NO: 840578 - RNA, 19 nt, Artificial Sequence
  Description of Artificial Sequence: Synthetic oligonucleotide
  Sense strand starting at position 3396 of SEQ ID NO: 588077
uuugaauugucccuuugau

SEQ ID NO: 840579 - RNA, 19 nt, Artificial Sequence
  Description of Artificial Sequence: Synthetic oligonucleotide
  Antisense strand to SEQ ID NO: 840578
aucaaagggacaauucaaa

SEQ ID NO: 840580 - RNA, 19 nt, Artificial Sequence
  Description of Artificial Sequence: Synthetic oligonucleotide
  Sense strand starting at position 3553 of SEQ ID NO: 588077
gcagaauccauguggaacu

SEQ ID NO: 840581 - RNA, 19 nt, Artificial Sequence
  Description of Artificial Sequence: Synthetic oligonucleotide
  Antisense strand to SEQ ID NO: 840580
aguuccacauggauucugc

SEQ ID NO: 840582 - RNA, 19 nt, Artificial Sequence
  Description of Artificial Sequence: Synthetic oligonucleotide
  Sense strand starting at position 3633 of SEQ ID NO: 588077
gugugaaagcccuacauug

SEQ ID NO: 840583 - RNA, 19 nt, Artificial Sequence
  Description of Artificial Sequence: Synthetic oligonucleotide
  Antisense strand to SEQ ID NO: 840582
caauguagggcuuucacac

SEQ ID NO: 840584 - RNA, 19 nt, Artificial Sequence
  Description of Artificial Sequence: Synthetic oligonucleotide
  Sense strand starting at position 3799 of SEQ ID NO: 588077
gcccaaagagcuugagaac

SEQ ID NO: 840585 - RNA, 19 nt, Artificial Sequence
  Description of Artificial Sequence: Synthetic oligonucleotide
  Antisense strand to SEQ ID NO: 840584
guucucaagcucuuugggc

SEQ ID NO: 840586 - RNA, 19 nt, Artificial Sequence
  Description of Artificial Sequence: Synthetic oligonucleotide
  Sense strand starting at position 3824 of SEQ ID NO: 588077
ugagcagguugucacagau

SEQ ID NO: 840587 - RNA, 19 nt, Artificial Sequence
  Description of Artificial Sequence: Synthetic oligonucleotide
  Antisense strand to SEQ ID NO: 840586
aucugugacaaccugcuca

SEQ ID NO: 840588 - RNA, 19 nt, Artificial Sequence
  Description of Artificial Sequence: Synthetic oligonucleotide
  Sense strand starting at position 116 of SEQ ID NO: 588078
ggacccaucuccuguugua

SEQ ID NO: 840589 - RNA, 19 nt, Artificial Sequence
  Description of Artificial Sequence: Synthetic oligonucleotide
  Antisense strand to SEQ ID NO: 840588
uacaacaggagaugggucc

SEQ ID NO: 840590 - RNA, 19 nt, Artificial Sequence
  Description of Artificial Sequence: Synthetic oligonucleotide
  Sense strand starting at position 482 of SEQ ID NO: 588078
uugaaauugucucaacagc

SEQ ID NO: 840591 - RNA, 19 nt, Artificial Sequence
  Description of Artificial Sequence: Synthetic oligonucleotide
  Antisense strand to SEQ ID NO: 840590
gcuguugagacaauuucaa

SEQ ID NO: 840592 - RNA, 19 nt, Artificial Sequence
  Description of Artificial Sequence: Synthetic oligonucleotide
  Sense strand starting at position 498 of SEQ ID NO: 588078
agcagauguuguguaucau

SEQ ID NO: 840593 - RNA, 19 nt, Artificial Sequence
  Description of Artificial Sequence: Synthetic oligonucleotide
  Antisense strand to SEQ ID NO: 840592
augauacacaacaucugcu

SEQ ID NO: 840594 - RNA, 19 nt, Artificial Sequence
  Description of Artificial Sequence: Synthetic oligonucleotide
  Sense strand starting at position 499 of SEQ ID NO: 588078
gcagauguuguguaucauc

SEQ ID NO: 840595 - RNA, 19 nt, Artificial Sequence
  Description of Artificial Sequence: Synthetic oligonucleotide
  Antisense strand to SEQ ID NO: 840594
gaugauacacaacaucugc

SEQ ID NO: 840596 - RNA, 19 nt, Artificial Sequence
  Description of Artificial Sequence: Synthetic oligonucleotide
  Sense strand starting at position 547 of SEQ ID NO: 588078
gggugucccaucuggcauu

SEQ ID NO: 840597 - RNA, 19 nt, Artificial Sequence
  Description of Artificial Sequence: Synthetic oligonucleotide
  Antisense strand to SEQ ID NO: 840596
aaugccagaugggacaccc

SEQ ID NO: 840598 - RNA, 19 nt, Artificial Sequence
  Description of Artificial Sequence: Synthetic oligonucleotide
  Sense strand starting at position 550 of SEQ ID NO: 588078
ugucccaucuggcauuaga

SEQ ID NO: 840599 - RNA, 19 nt, Artificial Sequence
  Description of Artificial Sequence: Synthetic oligonucleotide
  Antisense strand to SEQ ID NO: 840598
ucuaaugccagaugggaca

SEQ ID NO: 840600 - RNA, 19 nt, Artificial Sequence
  Description of Artificial Sequence: Synthetic oligonucleotide
  Sense strand starting at position 630 of SEQ ID NO: 588078
agucacuguguguugcuua

SEQ ID NO: 840601 - RNA, 19 nt, Artificial Sequence
  Description of Artificial Sequence: Synthetic oligonucleotide
  Antisense strand to SEQ ID NO: 840600
uaagcaacacacagugacu

SEQ ID NO: 840602 - RNA, 19 nt, Artificial Sequence
  Description of Artificial Sequence: Synthetic oligonucleotide
  Sense strand starting at position 642 of SEQ ID NO: 588078
uugcuuacagccugaagaa

SEQ ID NO: 840603 - RNA, 19 nt, Artificial Sequence
  Description of Artificial Sequence: Synthetic oligonucleotide
  Antisense strand to SEQ ID NO: 840602
uucuucaggcuguaagcaa

SEQ ID NO: 840604 - RNA, 19 nt, Artificial Sequence
  Description of Artificial Sequence: Synthetic oligonucleotide
  Sense strand starting at position 643 of SEQ ID NO: 588078
ugcuuacagccugaagaaa

SEQ ID NO: 840605 - RNA, 19 nt, Artificial Sequence
  Description of Artificial Sequence: Synthetic oligonucleotide
  Antisense strand to SEQ ID NO: 840604
uuucuucaggcuguaagca

SEQ ID NO: 840606 - RNA, 19 nt, Artificial Sequence
  Description of Artificial Sequence: Synthetic oligonucleotide
  Sense strand starting at position 654 of SEQ ID NO: 588078
ugaagaaauuaacaggaua

SEQ ID NO: 840607 - RNA, 19 nt, Artificial Sequence
  Description of Artificial Sequence: Synthetic oligonucleotide
  Antisense strand to SEQ ID NO: 840606
uauccuguuaauuucuuca

SEQ ID NO: 840608 - RNA, 19 nt, Artificial Sequence
  Description of Artificial Sequence: Synthetic oligonucleotide
  Sense strand starting at position 721 of SEQ ID NO: 588078
ccgagugagacguggacua

SEQ ID NO: 840609 - RNA, 19 nt, Artificial Sequence
  Description of Artificial Sequence: Synthetic oligonucleotide
  Antisense strand to SEQ ID NO: 840608
uaguccacgucucacucgg

SEQ ID NO: 840610 - RNA, 19 nt, Artificial Sequence
  Description of Artificial Sequence: Synthetic oligonucleotide
  Sense strand starting at position 813 of SEQ ID NO: 588078
gggagcgcuucuguuccua

SEQ ID NO: 840611 - RNA, 19 nt, Artificial Sequence
  Description of Artificial Sequence: Synthetic oligonucleotide
  Antisense strand to SEQ ID NO: 840610
uaggaacagaagcgcuccc

SEQ ID NO: 840612 - RNA, 19 nt, Artificial Sequence
  Description of Artificial Sequence: Synthetic oligonucleotide
  Sense strand starting at position 815 of SEQ ID NO: 588078
gagcgcuucuguuccuagu

SEQ ID NO: 840613 - RNA, 19 nt, Artificial Sequence
  Description of Artificial Sequence: Synthetic oligonucleotide
  Antisense strand to SEQ ID NO: 840612
acuaggaacagaagcgcuc

SEQ ID NO: 840614 - RNA, 19 nt, Artificial Sequence
  Description of Artificial Sequence: Synthetic oligonucleotide
  Sense strand starting at position 871 of SEQ ID NO: 588078
agcguaaggucagagaacu

SEQ ID NO: 840615 - RNA, 19 nt, Artificial Sequence
  Description of Artificial Sequence: Synthetic oligonucleotide
  Antisense strand to SEQ ID NO: 840614
aguucucugaccuuacgcu

SEQ ID NO: 840616 - RNA, 19 nt, Artificial Sequence
  Description of Artificial Sequence: Synthetic oligonucleotide
  Sense strand starting at position 1112 of SEQ ID NO: 588078
cugagagucccuggaccau

SEQ ID NO: 840617 - RNA, 19 nt, Artificial Sequence
  Description of Artificial Sequence: Synthetic oligonucleotide
  Antisense strand to SEQ ID NO: 840616
augguccagggacucucag

SEQ ID NO: 840618 - RNA, 19 nt, Artificial Sequence
  Description of Artificial Sequence: Synthetic oligonucleotide
  Sense strand starting at position 1154 of SEQ ID NO: 588078
gcaagacagccuugacaga

SEQ ID NO: 840619 - RNA, 19 nt, Artificial Sequence
  Description of Artificial Sequence: Synthetic oligonucleotide
  Antisense strand to SEQ ID NO: 840618
ucugucaaggcugucuugc

SEQ ID NO: 840620 - RNA, 19 nt, Artificial Sequence
  Description of Artificial Sequence: Synthetic oligonucleotide
  Sense strand starting at position 1178 of SEQ ID NO: 588078
agagaacgccacugggauu

SEQ ID NO: 840621 - RNA, 19 nt, Artificial Sequence
  Description of Artificial Sequence: Synthetic oligonucleotide
  Antisense strand to SEQ ID NO: 840620
aaucccaguggcguucucu

SEQ ID NO: 840622 - RNA, 19 nt, Artificial Sequence
  Description of Artificial Sequence: Synthetic oligonucleotide
  Sense strand starting at position 1271 of SEQ ID NO: 588078
gggaauucuccagguccaa

SEQ ID NO: 840623 - RNA, 19 nt, Artificial Sequence
  Description of Artificial Sequence: Synthetic oligonucleotide
  Antisense strand to SEQ ID NO: 840622
uuggaccuggagaauuccc

SEQ ID NO: 840624 - RNA, 19 nt, Artificial Sequence
  Description of Artificial Sequence: Synthetic oligonucleotide
  Sense strand starting at position 1284 of SEQ ID NO: 588078
guccaagucuuguacuuaa

SEQ ID NO: 840625 - RNA, 19 nt, Artificial Sequence
  Description of Artificial Sequence: Synthetic oligonucleotide
  Antisense strand to SEQ ID NO: 840624
uuaaguacaagacuuggac

SEQ ID NO: 840626 - RNA, 19 nt, Artificial Sequence
  Description of Artificial Sequence: Synthetic oligonucleotide
  Sense strand starting at position 2499 of SEQ ID NO: 588078
cucauugauucuugguaga

SEQ ID NO: 840627 - RNA, 19 nt, Artificial Sequence
  Description of Artificial Sequence: Synthetic oligonucleotide
  Antisense strand to SEQ ID NO: 840626
ucuaccaagaaucaaugag

SEQ ID NO: 840628 - RNA, 19 nt, Artificial Sequence
  Description of Artificial Sequence: Synthetic oligonucleotide
  Sense strand starting at position 2501 of SEQ ID NO: 588078
cauugauucuugguagaca

SEQ ID NO: 840629 - RNA, 19 nt, Artificial Sequence
  Description of Artificial Sequence: Synthetic oligonucleotide
  Antisense strand to SEQ ID NO: 840628
ugucuaccaagaaucaaug

SEQ ID NO: 840630 - RNA, 19 nt, Artificial Sequence
  Description of Artificial Sequence: Synthetic oligonucleotide
  Sense strand starting at position 2502 of SEQ ID NO: 588078
auugauucuugguagacau

SEQ ID NO: 840631 - RNA, 19 nt, Artificial Sequence
  Description of Artificial Sequence: Synthetic oligonucleotide
  Antisense strand to SEQ ID NO: 840630
augucuaccaagaaucaau

SEQ ID NO: 840632 - RNA, 19 nt, Artificial Sequence
  Description of Artificial Sequence: Synthetic oligonucleotide
  Sense strand starting at position 2509 of SEQ ID NO: 588078
cuugguagacauuacucau

SEQ ID NO: 840633 - RNA, 19 nt, Artificial Sequence
  Description of Artificial Sequence: Synthetic oligonucleotide
  Antisense strand to SEQ ID NO: 840632
augaguaaugucuaccaag

SEQ ID NO: 840634 - RNA, 19 nt, Artificial Sequence
  Description of Artificial Sequence: Synthetic oligonucleotide
  Sense strand starting at position 2515 of SEQ ID NO: 588078
agacauuacucauugcuag

SEQ ID NO: 840635 - RNA, 19 nt, Artificial Sequence
  Description of Artificial Sequence: Synthetic oligonucleotide
  Antisense strand to SEQ ID NO: 840634
cuagcaaugaguaaugucu

SEQ ID NO: 840636 - RNA, 19 nt, Artificial Sequence
  Description of Artificial Sequence: Synthetic oligonucleotide
  Sense strand starting at position 2519 of SEQ ID NO: 588078
auuacucauugcuagaaug

SEQ ID NO: 840637 - RNA, 19 nt, Artificial Sequence
  Description of Artificial Sequence: Synthetic oligonucleotide
  Antisense strand to SEQ ID NO: 840636
cauucuagcaaugaguaau

SEQ ID NO: 840638 - RNA, 19 nt, Artificial Sequence
  Description of Artificial Sequence: Synthetic oligonucleotide
  Sense strand starting at position 2529 of SEQ ID NO: 588078
gcuagaaugagucacaguc

SEQ ID NO: 840639 - RNA, 19 nt, Artificial Sequence
  Description of Artificial Sequence: Synthetic oligonucleotide
  Antisense strand to SEQ ID NO: 840638
gacugugacucauucuagc

SEQ ID NO: 840640 - RNA, 19 nt, Artificial Sequence
  Description of Artificial Sequence: Synthetic oligonucleotide
  Sense strand starting at position 2536 of SEQ ID NO: 588078
ugagucacaguccgaaaua

SEQ ID NO: 840641 - RNA, 19 nt, Artificial Sequence
  Description of Artificial Sequence: Synthetic oligonucleotide
  Antisense strand to SEQ ID NO: 840640
uauuucggacugugacuca

SEQ ID NO: 840642 - RNA, 19 nt, Artificial Sequence
  Description of Artificial Sequence: Synthetic oligonucleotide
  Sense strand starting at position 2537 of SEQ ID NO: 588078
gagucacaguccgaaauaa

SEQ ID NO: 840643 - RNA, 19 nt, Artificial Sequence
  Description of Artificial Sequence: Synthetic oligonucleotide
  Antisense strand to SEQ ID NO: 840642
uuauuucggacugugacuc

SEQ ID NO: 840644 - RNA, 19 nt, Artificial Sequence
  Description of Artificial Sequence: Synthetic oligonucleotide
  Sense strand starting at position 2545 of SEQ ID NO: 588078
guccgaaauaaucgaaaua

SEQ ID NO: 840645 - RNA, 19 nt, Artificial Sequence
  Description of Artificial Sequence: Synthetic oligonucleotide
  Antisense strand to SEQ ID NO: 840644
uauuucgauuauuucggac

SEQ ID NO: 840646 - RNA, 19 nt, Artificial Sequence
  Description of Artificial Sequence: Synthetic oligonucleotide
  Sense strand starting at position 2637 of SEQ ID NO: 588078
ucugcuagcacugaggaaa

SEQ ID NO: 840647 - RNA, 19 nt, Artificial Sequence
  Description of Artificial Sequence: Synthetic oligonucleotide
  Antisense strand to SEQ ID NO: 840646
uuuccucagugcuagcaga

SEQ ID NO: 840648 - RNA, 19 nt, Artificial Sequence
  Description of Artificial Sequence: Synthetic oligonucleotide
  Sense strand starting at position 2648 of SEQ ID NO: 588078
ugaggaaacuuguuuaccu

SEQ ID NO: 840649 - RNA, 19 nt, Artificial Sequence
  Description of Artificial Sequence: Synthetic oligonucleotide
  Antisense strand to SEQ ID NO: 840648
agguaaacaaguuuccuca

SEQ ID NO: 840650 - RNA, 19 nt, Artificial Sequence
  Description of Artificial Sequence: Synthetic oligonucleotide
  Sense strand starting at position 2649 of SEQ ID NO: 588078
gaggaaacuuguuuaccua

SEQ ID NO: 840651 - RNA, 19 nt, Artificial Sequence
  Description of Artificial Sequence: Synthetic oligonucleotide
  Antisense strand to SEQ ID NO: 840650
uagguaaacaaguuuccuc

SEQ ID NO: 840652 - RNA, 19 nt, Artificial Sequence
  Description of Artificial Sequence: Synthetic oligonucleotide
  Sense strand starting at position 2664 of SEQ ID NO: 588078
ccuaaauuguuagauagga

SEQ ID NO: 840653 - RNA, 19 nt, Artificial Sequence
  Description of Artificial Sequence: Synthetic oligonucleotide
  Antisense strand to SEQ ID NO: 840652
uccuaucuaacaauuuagg

SEQ ID NO: 840654 - RNA, 19 nt, Artificial Sequence
  Description of Artificial Sequence: Synthetic oligonucleotide
  Sense strand starting at position 3076 of SEQ ID NO: 588078
gcaguuuaucaccaagugu

SEQ ID NO: 840655 - RNA, 19 nt, Artificial Sequence
  Description of Artificial Sequence: Synthetic oligonucleotide
  Antisense strand to SEQ ID NO: 840654
acacuuggugauaaacugc

SEQ ID NO: 840656 - RNA, 19 nt, Artificial Sequence
  Description of Artificial Sequence: Synthetic oligonucleotide
  Sense strand starting at position 3192 of SEQ ID NO: 588078
ugaagucuuucccagccaa

SEQ ID NO: 840657 - RNA, 19 nt, Artificial Sequence
  Description of Artificial Sequence: Synthetic oligonucleotide
  Antisense strand to SEQ ID NO: 840656
uuggcugggaaagacuuca

SEQ ID NO: 840658 - RNA, 19 nt, Artificial Sequence
  Description of Artificial Sequence: Synthetic oligonucleotide
  Sense strand starting at position 3247 of SEQ ID NO: 588078
uuugaauugucccuuugau

SEQ ID NO: 840659 - RNA, 19 nt, Artificial Sequence
  Description of Artificial Sequence: Synthetic oligonucleotide
  Antisense strand to SEQ ID NO: 840658
aucaaagggacaauucaaa

SEQ ID NO: 840660 - RNA, 19 nt, Artificial Sequence
  Description of Artificial Sequence: Synthetic oligonucleotide
  Sense strand starting at position 3404 of SEQ ID NO: 588078
gcagaauccauguggaacu

SEQ ID NO: 840661 - RNA, 19 nt, Artificial Sequence
  Description of Artificial Sequence: Synthetic oligonucleotide
  Antisense strand to SEQ ID NO: 840660
aguuccacauggauucugc

SEQ ID NO: 840662 - RNA, 19 nt, Artificial Sequence
  Description of Artificial Sequence: Synthetic oligonucleotide
  Sense strand starting at position 3484 of SEQ ID NO: 588078
gugugaaagcccuacauug

SEQ ID NO: 840663 - RNA, 19 nt, Artificial Sequence
  Description of Artificial Sequence: Synthetic oligonucleotide
  Antisense strand to SEQ ID NO: 840662
caauguagggcuuucacac

SEQ ID NO: 840664 - RNA, 19 nt, Artificial Sequence
  Description of Artificial Sequence: Synthetic oligonucleotide
  Sense strand starting at position 3650 of SEQ ID NO: 588078
gcccaaagagcuugagaac

SEQ ID NO: 840665 - RNA, 19 nt, Artificial Sequence
  Description of Artificial Sequence: Synthetic oligonucleotide
  Antisense strand to SEQ ID NO: 840664
guucucaagcucuuugggc

SEQ ID NO: 840666 - RNA, 19 nt, Artificial Sequence
  Description of Artificial Sequence: Synthetic oligonucleotide
  Sense strand starting at position 3675 of SEQ ID NO: 588078
ugagcagguugucacagau

SEQ ID NO: 840667 - RNA, 19 nt, Artificial Sequence
  Description of Artificial Sequence: Synthetic oligonucleotide
  Antisense strand to SEQ ID NO: 840666
aucugugacaaccugcuca

SEQ ID NO: 840668 - RNA, 19 nt, Artificial Sequence
  Description of Artificial Sequence: Synthetic oligonucleotide
  Sense strand starting at position 2133 of SEQ ID NO: 588079
uccucugaccauuagugaa

SEQ ID NO: 840669 - RNA, 19 nt, Artificial Sequence
  Description of Artificial Sequence: Synthetic oligonucleotide
  Antisense strand to SEQ ID NO: 840668
uucacuaauggucagagga

SEQ ID NO: 840670 - RNA, 19 nt, Artificial Sequence
  Description of Artificial Sequence: Synthetic oligonucleotide
  Sense strand starting at position 2143 of SEQ ID NO: 588079
auuagugaauccuggauga

SEQ ID NO: 840671 - RNA, 19 nt, Artificial Sequence
  Description of Artificial Sequence: Synthetic oligonucleotide
  Antisense strand to SEQ ID NO: 840670
ucauccaggauucacuaau

SEQ ID NO: 840672 - RNA, 19 nt, Artificial Sequence
  Description of Artificial Sequence: Synthetic oligonucleotide
  Sense strand starting at position 2145 of SEQ ID NO: 588079
uagugaauccuggaugagu

SEQ ID NO: 840673 - RNA, 19 nt, Artificial Sequence
  Description of Artificial Sequence: Synthetic oligonucleotide
  Antisense strand to SEQ ID NO: 840672
acucauccaggauucacua

SEQ ID NO: 840674 - RNA, 19 nt, Artificial Sequence
  Description of Artificial Sequence: Synthetic oligonucleotide
  Sense strand starting at position 2147 of SEQ ID NO: 588079
gugaauccuggaugaguug

SEQ ID NO: 840675 - RNA, 19 nt, Artificial Sequence
  Description of Artificial Sequence: Synthetic oligonucleotide
  Antisense strand to SEQ ID NO: 840674
caacucauccaggauucac

SEQ ID NO: 840676 - RNA, 19 nt, Artificial Sequence
  Description of Artificial Sequence: Synthetic oligonucleotide
  Sense strand starting at position 2329 of SEQ ID NO: 588079
cuguguucacuguaaguug

SEQ ID NO: 840677 - RNA, 19 nt, Artificial Sequence
  Description of Artificial Sequence: Synthetic oligonucleotide
  Antisense strand to SEQ ID NO: 840676
caacuuacagugaacacag

SEQ ID NO: 840678 - RNA, 19 nt, Artificial Sequence
  Description of Artificial Sequence: Synthetic oligonucleotide
  Sense strand starting at position 2336 of SEQ ID NO: 588079
cacuguaaguugcaugaga

SEQ ID NO: 840679 - RNA, 19 nt, Artificial Sequence
  Description of Artificial Sequence: Synthetic oligonucleotide
  Antisense strand to SEQ ID NO: 840678
ucucaugcaacuuacagug

SEQ ID NO: 840680 - RNA, 19 nt, Artificial Sequence
  Description of Artificial Sequence: Synthetic oligonucleotide
  Sense strand starting at position 2338 of SEQ ID NO: 588079
cuguaaguugcaugagaau

SEQ ID NO: 840681 - RNA, 19 nt, Artificial Sequence
  Description of Artificial Sequence: Synthetic oligonucleotide
  Antisense strand to SEQ ID NO: 840680
auucucaugcaacuuacag

SEQ ID NO: 840682 - RNA, 19 nt, Artificial Sequence
  Description of Artificial Sequence: Synthetic oligonucleotide
  Sense strand starting at position 2400 of SEQ ID NO: 588079
ccaugauacuuggauggga

SEQ ID NO: 840683 - RNA, 19 nt, Artificial Sequence
  Description of Artificial Sequence: Synthetic oligonucleotide
  Antisense strand to SEQ ID NO: 840682
ucccauccaaguaucaugg

SEQ ID NO: 840684 - RNA, 19 nt, Artificial Sequence
  Description of Artificial Sequence: Synthetic oligonucleotide
  Sense strand starting at position 2420 of SEQ ID NO: 588079
agcccaaccuuugguuaaa

SEQ ID NO: 840685 - RNA, 19 nt, Artificial Sequence
  Description of Artificial Sequence: Synthetic oligonucleotide
  Antisense strand to SEQ ID NO: 840684
uuuaaccaaagguugggcu

SEQ ID NO: 840686 - RNA, 19 nt, Artificial Sequence
  Description of Artificial Sequence: Synthetic oligonucleotide
  Sense strand starting at position 2451 of SEQ ID NO: 588079
uuugauuugugccugcacu

SEQ ID NO: 840687 - RNA, 19 nt, Artificial Sequence
  Description of Artificial Sequence: Synthetic oligonucleotide
  Antisense strand to SEQ ID NO: 840686
agugcaggcacaaaucaaa

SEQ ID NO: 840688 - RNA, 19 nt, Artificial Sequence
  Description of Artificial Sequence: Synthetic oligonucleotide
  Sense strand starting at position 3039 of SEQ ID NO: 588079
aggcuuguuaccuggguua

SEQ ID NO: 840689 - RNA, 19 nt, Artificial Sequence
  Description of Artificial Sequence: Synthetic oligonucleotide
  Antisense strand to SEQ ID NO: 840688
uaacccagguaacaagccu

SEQ ID NO: 840690 - RNA, 19 nt, Artificial Sequence
  Description of Artificial Sequence: Synthetic oligonucleotide
  Sense strand starting at position 3041 of SEQ ID NO: 588079
gcuuguuaccuggguuaaa

SEQ ID NO: 840691 - RNA, 19 nt, Artificial Sequence
  Description of Artificial Sequence: Synthetic oligonucleotide
  Antisense strand to SEQ ID NO: 840690
uuuaacccagguaacaagc

SEQ ID NO: 840692 - RNA, 19 nt, Artificial Sequence
  Description of Artificial Sequence: Synthetic oligonucleotide
  Sense strand starting at position 3042 of SEQ ID NO: 588079
cuuguuaccuggguuaaac

SEQ ID NO: 840693 - RNA, 19 nt, Artificial Sequence
  Description of Artificial Sequence: Synthetic oligonucleotide
  Antisense strand to SEQ ID NO: 840692
guuuaacccagguaacaag

SEQ ID NO: 840694 - RNA, 19 nt, Artificial Sequence
  Description of Artificial Sequence: Synthetic oligonucleotide
  Sense strand starting at position 3052 of SEQ ID NO: 588079
ggguuaaacugcccuuguu

SEQ ID NO: 840695 - RNA, 19 nt, Artificial Sequence
  Description of Artificial Sequence: Synthetic oligonucleotide
  Antisense strand to SEQ ID NO: 840694
aacaagggcaguuuaaccc

SEQ ID NO: 840696 - RNA, 19 nt, Artificial Sequence
  Description of Artificial Sequence: Synthetic oligonucleotide
  Sense strand starting at position 3060 of SEQ ID NO: 588079
cugcccuuguucugacuua

SEQ ID NO: 840697 - RNA, 19 nt, Artificial Sequence
  Description of Artificial Sequence: Synthetic oligonucleotide
  Antisense strand to SEQ ID NO: 840696
uaagucagaacaagggcag

SEQ ID NO: 840698 - RNA, 19 nt, Artificial Sequence
  Description of Artificial Sequence: Synthetic oligonucleotide
  Sense strand starting at position 3061 of SEQ ID NO: 588079
ugcccuuguucugacuuaa

SEQ ID NO: 840699 - RNA, 19 nt, Artificial Sequence
  Description of Artificial Sequence: Synthetic oligonucleotide
  Antisense strand to SEQ ID NO: 840698
uuaagucagaacaagggca

SEQ ID NO: 840700 - RNA, 19 nt, Artificial Sequence
  Description of Artificial Sequence: Synthetic oligonucleotide
  Sense strand starting at position 3472 of SEQ ID NO: 588079
agucacucuccuuauguga

SEQ ID NO: 840701 - RNA, 19 nt, Artificial Sequence
  Description of Artificial Sequence: Synthetic oligonucleotide
  Antisense strand to SEQ ID NO: 840700
ucacauaaggagagugacu

SEQ ID NO: 840702 - RNA, 19 nt, Artificial Sequence
  Description of Artificial Sequence: Synthetic oligonucleotide
  Sense strand starting at position 3527 of SEQ ID NO: 588079
acugauagcuccucccagu

SEQ ID NO: 840703 - RNA, 19 nt, Artificial Sequence
  Description of Artificial Sequence: Synthetic oligonucleotide
  Antisense strand to SEQ ID NO: 840702
acugggaggagcuaucagu

SEQ ID NO: 840704 - RNA, 19 nt, Artificial Sequence
  Description of Artificial Sequence: Synthetic oligonucleotide
  Sense strand starting at position 3613 of SEQ ID NO: 588079
gagugcacucauuaucaga

SEQ ID NO: 840705 - RNA, 19 nt, Artificial Sequence
  Description of Artificial Sequence: Synthetic oligonucleotide
  Antisense strand to SEQ ID NO: 840704
ucugauaaugagugcacuc

SEQ ID NO: 840706 - RNA, 19 nt, Artificial Sequence
  Description of Artificial Sequence: Synthetic oligonucleotide
  Sense strand starting at position 3615 of SEQ ID NO: 588079
gugcacucauuaucagaca

SEQ ID NO: 840707 - RNA, 19 nt, Artificial Sequence
  Description of Artificial Sequence: Synthetic oligonucleotide
  Antisense strand to SEQ ID NO: 840706
ugucugauaaugagugcac

SEQ ID NO: 840708 - RNA, 19 nt, Artificial Sequence
  Description of Artificial Sequence: Synthetic oligonucleotide
  Sense strand starting at position 3639 of SEQ ID NO: 588079
gccaucuaugcugaacacu

SEQ ID NO: 840709 - RNA, 19 nt, Artificial Sequence
  Description of Artificial Sequence: Synthetic oligonucleotide
  Antisense strand to SEQ ID NO: 840708
aguguucagcauagauggc

SEQ ID NO: 840710 - RNA, 19 nt, Artificial Sequence
  Description of Artificial Sequence: Synthetic oligonucleotide
  Sense strand starting at position 3729 of SEQ ID NO: 588079
uuuggaugcucucagaagu

SEQ ID NO: 840711 - RNA, 19 nt, Artificial Sequence
  Description of Artificial Sequence: Synthetic oligonucleotide
  Antisense strand to SEQ ID NO: 840710
acuucugagagcauccaaa

SEQ ID NO: 840712 - RNA, 19 nt, Artificial Sequence
  Description of Artificial Sequence: Synthetic oligonucleotide
  Sense strand starting at position 221 of SEQ ID NO: 588080
caguauaugcucugcguca

SEQ ID NO: 840713 - RNA, 19 nt, Artificial Sequence
  Description of Artificial Sequence: Synthetic oligonucleotide
  Antisense strand to SEQ ID NO: 840712
ugacgcagagcauauacug

SEQ ID NO: 840714 - RNA, 19 nt, Artificial Sequence
  Description of Artificial Sequence: Synthetic oligonucleotide
  Sense strand starting at position 223 of SEQ ID NO: 588080
guauaugcucugcgucagu

SEQ ID NO: 840715 - RNA, 19 nt, Artificial Sequence
  Description of Artificial Sequence: Synthetic oligonucleotide
  Antisense strand to SEQ ID NO: 840714
acugacgcagagcauauac

SEQ ID NO: 840716 - RNA, 19 nt, Artificial Sequence
  Description of Artificial Sequence: Synthetic oligonucleotide
  Sense strand starting at position 225 of SEQ ID NO: 588080
auaugcucugcgucaguga

SEQ ID NO: 840717 - RNA, 19 nt, Artificial Sequence
  Description of Artificial Sequence: Synthetic oligonucleotide
  Antisense strand to SEQ ID NO: 840716
ucacugacgcagagcauau

SEQ ID NO: 840718 - RNA, 19 nt, Artificial Sequence
  Description of Artificial Sequence: Synthetic oligonucleotide
  Sense strand starting at position 234 of SEQ ID NO: 588080
gcgucagugacugagacau

SEQ ID NO: 840719 - RNA, 19 nt, Artificial Sequence
  Description of Artificial Sequence: Synthetic oligonucleotide
  Antisense strand to SEQ ID NO: 840718
augucucagucacugacgc

SEQ ID NO: 840720 - RNA, 19 nt, Artificial Sequence
  Description of Artificial Sequence: Synthetic oligonucleotide
  Sense strand starting at position 240 of SEQ ID NO: 588080
gugacugagacaugguguu

SEQ ID NO: 840721 - RNA, 19 nt, Artificial Sequence
  Description of Artificial Sequence: Synthetic oligonucleotide
  Antisense strand to SEQ ID NO: 840720
aacaccaugucucagucac

SEQ ID NO: 840722 - RNA, 19 nt, Artificial Sequence
  Description of Artificial Sequence: Synthetic oligonucleotide
  Sense strand starting at position 501 of SEQ ID NO: 588080
agaggaaacugucagaaca

SEQ ID NO: 840723 - RNA, 19 nt, Artificial Sequence
  Description of Artificial Sequence: Synthetic oligonucleotide
  Antisense strand to SEQ ID NO: 840722
uguucugacaguuuccucu

SEQ ID NO: 840724 - RNA, 19 nt, Artificial Sequence
  Description of Artificial Sequence: Synthetic oligonucleotide
  Sense strand starting at position 606 of SEQ ID NO: 588080
gguguucuguucuguggga

SEQ ID NO: 840725 - RNA, 19 nt, Artificial Sequence
  Description of Artificial Sequence: Synthetic oligonucleotide
  Antisense strand to SEQ ID NO: 840724
ucccacagaacagaacacc

SEQ ID NO: 840726 - RNA, 19 nt, Artificial Sequence
  Description of Artificial Sequence: Synthetic oligonucleotide
  Sense strand starting at position 607 of SEQ ID NO: 588080
guguucuguucugugggau

SEQ ID NO: 840727 - RNA, 19 nt, Artificial Sequence
  Description of Artificial Sequence: Synthetic oligonucleotide
  Antisense strand to SEQ ID NO: 840726
aucccacagaacagaacac

SEQ ID NO: 840728 - RNA, 19 nt, Artificial Sequence
  Description of Artificial Sequence: Synthetic oligonucleotide
  Sense strand starting at position 758 of SEQ ID NO: 588080
uagagaaauucccaugggu

SEQ ID NO: 840729 - RNA, 19 nt, Artificial Sequence
  Description of Artificial Sequence: Synthetic oligonucleotide
  Antisense strand to SEQ ID NO: 840728
acccaugggaauuucucua

SEQ ID NO: 840730 - RNA, 19 nt, Artificial Sequence
  Description of Artificial Sequence: Synthetic oligonucleotide
  Sense strand starting at position 760 of SEQ ID NO: 588080
gagaaauucccauggguuu

SEQ ID NO: 840731 - RNA, 19 nt, Artificial Sequence
  Description of Artificial Sequence: Synthetic oligonucleotide
  Antisense strand to SEQ ID NO: 840730
aaacccaugggaauuucuc

SEQ ID NO: 840732 - RNA, 19 nt, Artificial Sequence
  Description of Artificial Sequence: Synthetic oligonucleotide
  Sense strand starting at position 882 of SEQ ID NO: 588080
uucuaagccugacaucaga

SEQ ID NO: 840733 - RNA, 19 nt, Artificial Sequence
  Description of Artificial Sequence: Synthetic oligonucleotide
  Antisense strand to SEQ ID NO: 840732
ucugaugucaggcuuagaa

SEQ ID NO: 840734 - RNA, 19 nt, Artificial Sequence
  Description of Artificial Sequence: Synthetic oligonucleotide
  Sense strand starting at position 892 of SEQ ID NO: 588080
gacaucagaugucugacaa

SEQ ID NO: 840735 - RNA, 19 nt, Artificial Sequence
  Description of Artificial Sequence: Synthetic oligonucleotide
  Antisense strand to SEQ ID NO: 840734
uugucagacaucugauguc

SEQ ID NO: 840736 - RNA, 19 nt, Artificial Sequence
  Description of Artificial Sequence: Synthetic oligonucleotide
  Sense strand starting at position 896 of SEQ ID NO: 588080
ucagaugucugacaaauuc

SEQ ID NO: 840737 - RNA, 19 nt, Artificial Sequence
  Description of Artificial Sequence: Synthetic oligonucleotide
  Antisense strand to SEQ ID NO: 840736
gaauuugucagacaucuga

SEQ ID NO: 840738 - RNA, 19 nt, Artificial Sequence
  Description of Artificial Sequence: Synthetic oligonucleotide
  Sense strand starting at position 959 of SEQ ID NO: 588080
gaggaauacgugcaaugca

SEQ ID NO: 840739 - RNA, 19 nt, Artificial Sequence
  Description of Artificial Sequence: Synthetic oligonucleotide
  Antisense strand to SEQ ID NO: 840738
ugcauugcacguauuccuc

SEQ ID NO: 840740 - RNA, 19 nt, Artificial Sequence
  Description of Artificial Sequence: Synthetic oligonucleotide
  Sense strand starting at position 964 of SEQ ID NO: 588080
auacgugcaaugcaaagau

SEQ ID NO: 840741 - RNA, 19 nt, Artificial Sequence
  Description of Artificial Sequence: Synthetic oligonucleotide
  Antisense strand to SEQ ID NO: 840740
aucuuugcauugcacguau

SEQ ID NO: 840742 - RNA, 19 nt, Artificial Sequence
  Description of Artificial Sequence: Synthetic oligonucleotide
  Sense strand starting at position 1035 of SEQ ID NO: 588080
uggcaaagaucaugaauag

SEQ ID NO: 840743 - RNA, 19 nt, Artificial Sequence
  Description of Artificial Sequence: Synthetic oligonucleotide
  Antisense strand to SEQ ID NO: 840742
cuauucaugaucuuugcca

SEQ ID NO: 840744 - RNA, 19 nt, Artificial Sequence
  Description of Artificial Sequence: Synthetic oligonucleotide
  Sense strand starting at position 1050 of SEQ ID NO: 588080
auagguaacucacaaagaa

SEQ ID NO: 840745 - RNA, 19 nt, Artificial Sequence
  Description of Artificial Sequence: Synthetic oligonucleotide
  Antisense strand to SEQ ID NO: 840744
uucuuugugaguuaccuau

SEQ ID NO: 840746 - RNA, 19 nt, Artificial Sequence
  Description of Artificial Sequence: Synthetic oligonucleotide
  Sense strand starting at position 1192 of SEQ ID NO: 588080
acugacugauuacaagagu

SEQ ID NO: 840747 - RNA, 19 nt, Artificial Sequence
  Description of Artificial Sequence: Synthetic oligonucleotide
  Antisense strand to SEQ ID NO: 840746
acucuuguaaucagucagu

SEQ ID NO: 840748 - RNA, 19 nt, Artificial Sequence
  Description of Artificial Sequence: Synthetic oligonucleotide
  Sense strand starting at position 1453 of SEQ ID NO: 588080
auuuaagccgccuguaauc

SEQ ID NO: 840749 - RNA, 19 nt, Artificial Sequence
  Description of Artificial Sequence: Synthetic oligonucleotide
  Antisense strand to SEQ ID NO: 840748
gauuacaggcggcuuaaau

SEQ ID NO: 840750 - RNA, 19 nt, Artificial Sequence
  Description of Artificial Sequence: Synthetic oligonucleotide
  Sense strand starting at position 1614 of SEQ ID NO: 588080
guaccuuaccggcaagaau

SEQ ID NO: 840751 - RNA, 19 nt, Artificial Sequence
  Description of Artificial Sequence: Synthetic oligonucleotide
  Antisense strand to SEQ ID NO: 840750
auucuugccgguaagguac

SEQ ID NO: 840752 - RNA, 19 nt, Artificial Sequence
  Description of Artificial Sequence: Synthetic oligonucleotide
  Sense strand starting at position 2249 of SEQ ID NO: 588080
cgugucaggaggugucgaa

SEQ ID NO: 840753 - RNA, 19 nt, Artificial Sequence
  Description of Artificial Sequence: Synthetic oligonucleotide
  Antisense strand to SEQ ID NO: 840752
uucgacaccuccugacacg

SEQ ID NO: 840754 - RNA, 19 nt, Artificial Sequence
  Description of Artificial Sequence: Synthetic oligonucleotide
  Sense strand starting at position 2519 of SEQ ID NO: 588080
ggcucuuucucaccaggga

SEQ ID NO: 840755 - RNA, 19 nt, Artificial Sequence
  Description of Artificial Sequence: Synthetic oligonucleotide
  Antisense strand to SEQ ID NO: 840754
ucccuggugagaaagagcc

SEQ ID NO: 840756 - RNA, 19 nt, Artificial Sequence
  Description of Artificial Sequence: Synthetic oligonucleotide
  Sense strand starting at position 2695 of SEQ ID NO: 588080
guggacuuguucccucuua

SEQ ID NO: 840757 - RNA, 19 nt, Artificial Sequence
  Description of Artificial Sequence: Synthetic oligonucleotide
  Antisense strand to SEQ ID NO: 840756
uaagagggaacaaguccac

SEQ ID NO: 840758 - RNA, 19 nt, Artificial Sequence
  Description of Artificial Sequence: Synthetic oligonucleotide
  Sense strand starting at position 2757 of SEQ ID NO: 588080
agaaccgauucccaugaga

SEQ ID NO: 840759 - RNA, 19 nt, Artificial Sequence
  Description of Artificial Sequence: Synthetic oligonucleotide
  Antisense strand to SEQ ID NO: 840758
ucucaugggaaucgguucu

SEQ ID NO: 840760 - RNA, 19 nt, Artificial Sequence
  Description of Artificial Sequence: Synthetic oligonucleotide
  Sense strand starting at position 2759 of SEQ ID NO: 588080
aaccgauucccaugagaga

SEQ ID NO: 840761 - RNA, 19 nt, Artificial Sequence
  Description of Artificial Sequence: Synthetic oligonucleotide
  Antisense strand to SEQ ID NO: 840760
ucucucaugggaaucgguu

SEQ ID NO: 840762 - RNA, 19 nt, Artificial Sequence
  Description of Artificial Sequence: Synthetic oligonucleotide
  Sense strand starting at position 2998 of SEQ ID NO: 588080
gcugcacguuuauuuguaa

SEQ ID NO: 840763 - RNA, 19 nt, Artificial Sequence
  Description of Artificial Sequence: Synthetic oligonucleotide
  Antisense strand to SEQ ID NO: 840762
uuacaaauaaacgugcagc

SEQ ID NO: 840764 - RNA, 19 nt, Artificial Sequence
  Description of Artificial Sequence: Synthetic oligonucleotide
  Sense strand starting at position 3001 of SEQ ID NO: 588080
gcacguuuauuuguaacaa

SEQ ID NO: 840765 - RNA, 19 nt, Artificial Sequence
  Description of Artificial Sequence: Synthetic oligonucleotide
  Antisense strand to SEQ ID NO: 840764
uuguuacaaauaaacgugc

SEQ ID NO: 840766 - RNA, 19 nt, Artificial Sequence
  Description of Artificial Sequence: Synthetic oligonucleotide
  Sense strand starting at position 3067 of SEQ ID NO: 588080
gggcgagaggcucaugaau

SEQ ID NO: 840767 - RNA, 19 nt, Artificial Sequence
  Description of Artificial Sequence: Synthetic oligonucleotide
  Antisense strand to SEQ ID NO: 840766
auucaugagccucucgccc

SEQ ID NO: 840768 - RNA, 19 nt, Artificial Sequence
  Description of Artificial Sequence: Synthetic oligonucleotide
  Sense strand starting at position 3069 of SEQ ID NO: 588080
gcgagaggcucaugaaugu

SEQ ID NO: 840769 - RNA, 19 nt, Artificial Sequence
  Description of Artificial Sequence: Synthetic oligonucleotide
  Antisense strand to SEQ ID NO: 840768
acauucaugagccucucgc

SEQ ID NO: 840770 - RNA, 19 nt, Artificial Sequence
  Description of Artificial Sequence: Synthetic oligonucleotide
  Sense strand starting at position 3073 of SEQ ID NO: 588080
gaggcucaugaauguaauc

SEQ ID NO: 840771 - RNA, 19 nt, Artificial Sequence
  Description of Artificial Sequence: Synthetic oligonucleotide
  Antisense strand to SEQ ID NO: 840770
gauuacauucaugagccuc

SEQ ID NO: 840772 - RNA, 19 nt, Artificial Sequence
  Description of Artificial Sequence: Synthetic oligonucleotide
  Sense strand starting at position 3161 of SEQ ID NO: 588080
uaguuagaaccgugucgac

SEQ ID NO: 840773 - RNA, 19 nt, Artificial Sequence
  Description of Artificial Sequence: Synthetic oligonucleotide
  Antisense strand to SEQ ID NO: 840772
gucgacacgguucuaacua

SEQ ID NO: 840774 - RNA, 19 nt, Artificial Sequence
  Description of Artificial Sequence: Synthetic oligonucleotide
  Sense strand starting at position 3164 of SEQ ID NO: 588080
uuagaaccgugucgacuaa

SEQ ID NO: 840775 - RNA, 19 nt, Artificial Sequence
  Description of Artificial Sequence: Synthetic oligonucleotide
  Antisense strand to SEQ ID NO: 840774
uuagucgacacgguucuaa

SEQ ID NO: 840776 - RNA, 19 nt, Artificial Sequence
  Description of Artificial Sequence: Synthetic oligonucleotide
  Sense strand starting at position 3325 of SEQ ID NO: 588080
gacagagauucugucgcaa

SEQ ID NO: 840777 - RNA, 19 nt, Artificial Sequence
  Description of Artificial Sequence: Synthetic oligonucleotide
  Antisense strand to SEQ ID NO: 840776
uugcgacagaaucucuguc

SEQ ID NO: 840778 - RNA, 19 nt, Artificial Sequence
  Description of Artificial Sequence: Synthetic oligonucleotide
  Sense strand starting at position 156 of SEQ ID NO: 588081
ggacuccucugccucuaau

SEQ ID NO: 840779 - RNA, 19 nt, Artificial Sequence
  Description of Artificial Sequence: Synthetic oligonucleotide
  Antisense strand to SEQ ID NO: 840778
auuagaggcagaggagucc

SEQ ID NO: 840780 - RNA, 19 nt, Artificial Sequence
  Description of Artificial Sequence: Synthetic oligonucleotide
  Sense strand starting at position 215 of SEQ ID NO: 588081
aguccaugguggucauaca

SEQ ID NO: 840781 - RNA, 19 nt, Artificial Sequence
  Description of Artificial Sequence: Synthetic oligonucleotide
  Antisense strand to SEQ ID NO: 840780
uguaugaccaccauggacu

SEQ ID NO: 840782 - RNA, 19 nt, Artificial Sequence
  Description of Artificial Sequence: Synthetic oligonucleotide
  Sense strand starting at position 216 of SEQ ID NO: 588081
guccaugguggucauacaa

SEQ ID NO: 840783 - RNA, 19 nt, Artificial Sequence
  Description of Artificial Sequence: Synthetic oligonucleotide
  Antisense strand to SEQ ID NO: 840782
uuguaugaccaccauggac

SEQ ID NO: 840784 - RNA, 19 nt, Artificial Sequence
  Description of Artificial Sequence: Synthetic oligonucleotide
  Sense strand starting at position 470 of SEQ ID NO: 588081
gagagaccuguuggcaauu

SEQ ID NO: 840785 - RNA, 19 nt, Artificial Sequence
  Description of Artificial Sequence: Synthetic oligonucleotide
  Antisense strand to SEQ ID NO: 840784
aauugccaacaggucucuc

SEQ ID NO: 840786 - RNA, 19 nt, Artificial Sequence
  Description of Artificial Sequence: Synthetic oligonucleotide
  Sense strand starting at position 471 of SEQ ID NO: 588081
agagaccuguuggcaauua

SEQ ID NO: 840787 - RNA, 19 nt, Artificial Sequence
  Description of Artificial Sequence: Synthetic oligonucleotide
  Antisense strand to SEQ ID NO: 840786
uaauugccaacaggucucu

SEQ ID NO: 840788 - RNA, 19 nt, Artificial Sequence
  Description of Artificial Sequence: Synthetic oligonucleotide
  Sense strand starting at position 472 of SEQ ID NO: 588081
gagaccuguuggcaauuau

SEQ ID NO: 840789 - RNA, 19 nt, Artificial Sequence
  Description of Artificial Sequence: Synthetic oligonucleotide
  Antisense strand to SEQ ID NO: 840788
auaauugccaacaggucuc

SEQ ID NO: 840790 - RNA, 19 nt, Artificial Sequence
  Description of Artificial Sequence: Synthetic oligonucleotide
  Sense strand starting at position 479 of SEQ ID NO: 588081
guuggcaauuaugaaagga

SEQ ID NO: 840791 - RNA, 19 nt, Artificial Sequence
  Description of Artificial Sequence: Synthetic oligonucleotide
  Antisense strand to SEQ ID NO: 840790
uccuuucauaauugccaac

SEQ ID NO: 840792 - RNA, 19 nt, Artificial Sequence
  Description of Artificial Sequence: Synthetic oligonucleotide
  Sense strand starting at position 519 of SEQ ID NO: 588081
gcccaacuuccaggcuaau

SEQ ID NO: 840793 - RNA, 19 nt, Artificial Sequence
  Description of Artificial Sequence: Synthetic oligonucleotide
  Antisense strand to SEQ ID NO: 840792
auuagccuggaaguugggc

SEQ ID NO: 840794 - RNA, 19 nt, Artificial Sequence
  Description of Artificial Sequence: Synthetic oligonucleotide
  Sense strand starting at position 651 of SEQ ID NO: 588081
ucuuguuccucuuuagagu

SEQ ID NO: 840795 - RNA, 19 nt, Artificial Sequence
  Description of Artificial Sequence: Synthetic oligonucleotide
  Antisense strand to SEQ ID NO: 840794
acucuaaagaggaacaaga

SEQ ID NO: 840796 - RNA, 19 nt, Artificial Sequence
  Description of Artificial Sequence: Synthetic oligonucleotide
  Sense strand starting at position 685 of SEQ ID NO: 588081
augugugacucacuccaca

SEQ ID NO: 840797 - RNA, 19 nt, Artificial Sequence
  Description of Artificial Sequence: Synthetic oligonucleotide
  Antisense strand to SEQ ID NO: 840796
uguggagugagucacacau

SEQ ID NO: 840798 - RNA, 19 nt, Artificial Sequence
  Description of Artificial Sequence: Synthetic oligonucleotide
  Sense strand starting at position 727 of SEQ ID NO: 588081
gugccaggcacugaguaau

SEQ ID NO: 840799 - RNA, 19 nt, Artificial Sequence
  Description of Artificial Sequence: Synthetic oligonucleotide
  Antisense strand to SEQ ID NO: 840798
auuacucagugccuggcac

SEQ ID NO: 840800 - RNA, 19 nt, Artificial Sequence
  Description of Artificial Sequence: Synthetic oligonucleotide
  Sense strand starting at position 785 of SEQ ID NO: 588081
agcagucuggcggaggaaa

SEQ ID NO: 840801 - RNA, 19 nt, Artificial Sequence
  Description of Artificial Sequence: Synthetic oligonucleotide
  Antisense strand to SEQ ID NO: 840800
uuuccuccgccagacugcu

SEQ ID NO: 840802 - RNA, 19 nt, Artificial Sequence
  Description of Artificial Sequence: Synthetic oligonucleotide
  Sense strand starting at position 873 of SEQ ID NO: 588081
ccacuuagacuagaacguu

SEQ ID NO: 840803 - RNA, 19 nt, Artificial Sequence
  Description of Artificial Sequence: Synthetic oligonucleotide
  Antisense strand to SEQ ID NO: 840802
aacguucuagucuaagugg

SEQ ID NO: 840804 - RNA, 19 nt, Artificial Sequence
  Description of Artificial Sequence: Synthetic oligonucleotide
  Sense strand starting at position 1009 of SEQ ID NO: 588081
ugaaccaguguggguaaau

SEQ ID NO: 840805 - RNA, 19 nt, Artificial Sequence
  Description of Artificial Sequence: Synthetic oligonucleotide
  Antisense strand to SEQ ID NO: 840804
auuuacccacacugguuca

SEQ ID NO: 840806 - RNA, 19 nt, Artificial Sequence
  Description of Artificial Sequence: Synthetic oligonucleotide
  Sense strand starting at position 1010 of SEQ ID NO: 588081
gaaccaguguggguaaauu

SEQ ID NO: 840807 - RNA, 19 nt, Artificial Sequence
  Description of Artificial Sequence: Synthetic oligonucleotide
  Antisense strand to SEQ ID NO: 840806
aauuuacccacacugguuc

SEQ ID NO: 840808 - RNA, 19 nt, Artificial Sequence
  Description of Artificial Sequence: Synthetic oligonucleotide
  Sense strand starting at position 1020 of SEQ ID NO: 588081
ggguaaauucccggcagca

SEQ ID NO: 840809 - RNA, 19 nt, Artificial Sequence
  Description of Artificial Sequence: Synthetic oligonucleotide
  Antisense strand to SEQ ID NO: 840808
ugcugccgggaauuuaccc

SEQ ID NO: 840810 - RNA, 19 nt, Artificial Sequence
  Description of Artificial Sequence: Synthetic oligonucleotide
  Sense strand starting at position 1404 of SEQ ID NO: 588081
ggcuccugacaguaggaau

SEQ ID NO: 840811 - RNA, 19 nt, Artificial Sequence
  Description of Artificial Sequence: Synthetic oligonucleotide
  Antisense strand to SEQ ID NO: 840810
auuccuacugucaggagcc

SEQ ID NO: 840812 - RNA, 19 nt, Artificial Sequence
  Description of Artificial Sequence: Synthetic oligonucleotide
  Sense strand starting at position 1415 of SEQ ID NO: 588081
guaggaaugcccggaauag

SEQ ID NO: 840813 - RNA, 19 nt, Artificial Sequence
  Description of Artificial Sequence: Synthetic oligonucleotide
  Antisense strand to SEQ ID NO: 840812
cuauuccgggcauuccuac

SEQ ID NO: 840814 - RNA, 19 nt, Artificial Sequence
  Description of Artificial Sequence: Synthetic oligonucleotide
  Sense strand starting at position 1542 of SEQ ID NO: 588081
gcucuagaaggaggugauu

SEQ ID NO: 840815 - RNA, 19 nt, Artificial Sequence
  Description of Artificial Sequence: Synthetic oligonucleotide
  Antisense strand to SEQ ID NO: 840814
aaucaccuccuucuagagc

SEQ ID NO: 840816 - RNA, 19 nt, Artificial Sequence
  Description of Artificial Sequence: Synthetic oligonucleotide
  Sense strand starting at position 3089 of SEQ ID NO: 588081
ccucucuggucaucuaagu

SEQ ID NO: 840817 - RNA, 19 nt, Artificial Sequence
  Description of Artificial Sequence: Synthetic oligonucleotide
  Antisense strand to SEQ ID NO: 840816
acuuagaugaccagagagg

SEQ ID NO: 840818 - RNA, 19 nt, Artificial Sequence
  Description of Artificial Sequence: Synthetic oligonucleotide
  Sense strand starting at position 3125 of SEQ ID NO: 588081
ggagcaugucgcgaaggau

SEQ ID NO: 840819 - RNA, 19 nt, Artificial Sequence
  Description of Artificial Sequence: Synthetic oligonucleotide
  Antisense strand to SEQ ID NO: 840818
auccuucgcgacaugcucc

SEQ ID NO: 840820 - RNA, 19 nt, Artificial Sequence
  Description of Artificial Sequence: Synthetic oligonucleotide
  Sense strand starting at position 3277 of SEQ ID NO: 588081
gggagaaagccuggcuaga

SEQ ID NO: 840821 - RNA, 19 nt, Artificial Sequence
  Description of Artificial Sequence: Synthetic oligonucleotide
  Antisense strand to SEQ ID NO: 840820
ucuagccaggcuuucuccc

SEQ ID NO: 840822 - RNA, 19 nt, Artificial Sequence
  Description of Artificial Sequence: Synthetic oligonucleotide
  Sense strand starting at position 3510 of SEQ ID NO: 588081
gcucaucccuagcugagau

SEQ ID NO: 840823 - RNA, 19 nt, Artificial Sequence
  Description of Artificial Sequence: Synthetic oligonucleotide
  Antisense strand to SEQ ID NO: 840822
aucucagcuagggaugagc

SEQ ID NO: 840824 - RNA, 19 nt, Artificial Sequence
  Description of Artificial Sequence: Synthetic oligonucleotide
  Sense strand starting at position 3563 of SEQ ID NO: 588081
uuucucuacugauugagaa

SEQ ID NO: 840825 - RNA, 19 nt, Artificial Sequence
  Description of Artificial Sequence: Synthetic oligonucleotide
  Antisense strand to SEQ ID NO: 840824
uucucaaucaguagagaaa

SEQ ID NO: 840826 - RNA, 19 nt, Artificial Sequence
  Description of Artificial Sequence: Synthetic oligonucleotide
  Sense strand starting at position 3564 of SEQ ID NO: 588081
uucucuacugauugagaaa

SEQ ID NO: 840827 - RNA, 19 nt, Artificial Sequence
  Description of Artificial Sequence: Synthetic oligonucleotide
  Antisense strand to SEQ ID NO: 840826
uuucucaaucaguagagaa

SEQ ID NO: 840828 - RNA, 19 nt, Artificial Sequence
  Description of Artificial Sequence: Synthetic oligonucleotide
  Sense strand starting at position 3590 of SEQ ID NO: 588081
uccuuugauugcucuggga

SEQ ID NO: 840829 - RNA, 19 nt, Artificial Sequence
  Description of Artificial Sequence: Synthetic oligonucleotide
  Antisense strand to SEQ ID NO: 840828
ucccagagcaaucaaagga

SEQ ID NO: 840830 - RNA, 19 nt, Artificial Sequence
  Description of Artificial Sequence: Synthetic oligonucleotide
  Sense strand starting at position 3657 of SEQ ID NO: 588081
cgggcacauucccugauaa

SEQ ID NO: 840831 - RNA, 19 nt, Artificial Sequence
  Description of Artificial Sequence: Synthetic oligonucleotide
  Antisense strand to SEQ ID NO: 840830
uuaucagggaaugugcccg

SEQ ID NO: 840832 - RNA, 19 nt, Artificial Sequence
  Description of Artificial Sequence: Synthetic oligonucleotide
  Sense strand starting at position 3658 of SEQ ID NO: 588081
gggcacauucccugauaaa

SEQ ID NO: 840833 - RNA, 19 nt, Artificial Sequence
  Description of Artificial Sequence: Synthetic oligonucleotide
  Antisense strand to SEQ ID NO: 840832
uuuaucagggaaugugccc

SEQ ID NO: 840834 - RNA, 19 nt, Artificial Sequence
  Description of Artificial Sequence: Synthetic oligonucleotide
  Sense strand starting at position 3670 of SEQ ID NO: 588081
ugauaaagcuguuuagguu

SEQ ID NO: 840835 - RNA, 19 nt, Artificial Sequence
  Description of Artificial Sequence: Synthetic oligonucleotide
  Antisense strand to SEQ ID NO: 840834
aaccuaaacagcuuuauca

SEQ ID NO: 840836 - RNA, 19 nt, Artificial Sequence
  Description of Artificial Sequence: Synthetic oligonucleotide
  Sense strand starting at position 3678 of SEQ ID NO: 588081
cuguuuagguugcuugaaa

SEQ ID NO: 840837 - RNA, 19 nt, Artificial Sequence
  Description of Artificial Sequence: Synthetic oligonucleotide
  Antisense strand to SEQ ID NO: 840836
uuucaagcaaccuaaacag

SEQ ID NO: 840838 - RNA, 19 nt, Artificial Sequence
  Description of Artificial Sequence: Synthetic oligonucleotide
  Sense strand starting at position 3781 of SEQ ID NO: 588081
cagagucccuugcugcaaa

SEQ ID NO: 840839 - RNA, 19 nt, Artificial Sequence
  Description of Artificial Sequence: Synthetic oligonucleotide
  Antisense strand to SEQ ID NO: 840838
uuugcagcaagggacucug

SEQ ID NO: 840840 - RNA, 19 nt, Artificial Sequence
  Description of Artificial Sequence: Synthetic oligonucleotide
  Sense strand starting at position 3846 of SEQ ID NO: 588081
gcugaagcuccaugugaaa

SEQ ID NO: 840841 - RNA, 19 nt, Artificial Sequence
  Description of Artificial Sequence: Synthetic oligonucleotide
  Antisense strand to SEQ ID NO: 840840
uuucacauggagcuucagc

SEQ ID NO: 840842 - RNA, 19 nt, Artificial Sequence
  Description of Artificial Sequence: Synthetic oligonucleotide
  Sense strand starting at position 3872 of SEQ ID NO: 588081
gaagaaaugcucuggacug

SEQ ID NO: 840843 - RNA, 19 nt, Artificial Sequence
  Description of Artificial Sequence: Synthetic oligonucleotide
  Antisense strand to SEQ ID NO: 840842
caguccagagcauuucuuc

SEQ ID NO: 840844 - RNA, 19 nt, Artificial Sequence
  Description of Artificial Sequence: Synthetic oligonucleotide
  Sense strand starting at position 3873 of SEQ ID NO: 588081
aagaaaugcucuggacuga

SEQ ID NO: 840845 - RNA, 19 nt, Artificial Sequence
  Description of Artificial Sequence: Synthetic oligonucleotide
  Antisense strand to SEQ ID NO: 840844
ucaguccagagcauuucuu

SEQ ID NO: 840846 - RNA, 19 nt, Artificial Sequence
  Description of Artificial Sequence: Synthetic oligonucleotide
  Sense strand starting at position 3886 of SEQ ID NO: 588081
gacugaucacccuggcguu

SEQ ID NO: 840847 - RNA, 19 nt, Artificial Sequence
  Description of Artificial Sequence: Synthetic oligonucleotide
  Antisense strand to SEQ ID NO: 840846
aacgccagggugaucaguc

SEQ ID NO: 840848 - RNA, 19 nt, Artificial Sequence
  Description of Artificial Sequence: Synthetic oligonucleotide
  Sense strand starting at position 3906 of SEQ ID NO: 588081
agagcuucuuuccuuggaa

SEQ ID NO: 840849 - RNA, 19 nt, Artificial Sequence
  Description of Artificial Sequence: Synthetic oligonucleotide
  Antisense strand to SEQ ID NO: 840848
uuccaaggaaagaagcucu

SEQ ID NO: 840850 - RNA, 19 nt, Artificial Sequence
  Description of Artificial Sequence: Synthetic oligonucleotide
  Sense strand starting at position 2677 of SEQ ID NO: 588082
gucugaagccugcaaguuu

SEQ ID NO: 840851 - RNA, 19 nt, Artificial Sequence
  Description of Artificial Sequence: Synthetic oligonucleotide
  Antisense strand to SEQ ID NO: 840850
aaacuugcaggcuucagac

SEQ ID NO: 840852 - RNA, 19 nt, Artificial Sequence
  Description of Artificial Sequence: Synthetic oligonucleotide
  Sense strand starting at position 2779 of SEQ ID NO: 588082
cucggugucugguguguua

SEQ ID NO: 840853 - RNA, 19 nt, Artificial Sequence
  Description of Artificial Sequence: Synthetic oligonucleotide
  Antisense strand to SEQ ID NO: 840852
uaacacaccagacaccgag

SEQ ID NO: 840854 - RNA, 19 nt, Artificial Sequence
  Description of Artificial Sequence: Synthetic oligonucleotide
  Sense strand starting at position 2781 of SEQ ID NO: 588082
cggugucugguguguuaca

SEQ ID NO: 840855 - RNA, 19 nt, Artificial Sequence
  Description of Artificial Sequence: Synthetic oligonucleotide
  Antisense strand to SEQ ID NO: 840854
uguaacacaccagacaccg

SEQ ID NO: 840856 - RNA, 19 nt, Artificial Sequence
  Description of Artificial Sequence: Synthetic oligonucleotide
  Sense strand starting at position 2826 of SEQ ID NO: 588082
gcgugaaguuccucacugu

SEQ ID NO: 840857 - RNA, 19 nt, Artificial Sequence
  Description of Artificial Sequence: Synthetic oligonucleotide
  Antisense strand to SEQ ID NO: 840856
acagugaggaacuucacgc

SEQ ID NO: 840858 - RNA, 19 nt, Artificial Sequence
  Description of Artificial Sequence: Synthetic oligonucleotide
  Sense strand starting at position 2827 of SEQ ID NO: 588082
cgugaaguuccucacugua

SEQ ID NO: 840859 - RNA, 19 nt, Artificial Sequence
  Description of Artificial Sequence: Synthetic oligonucleotide
  Antisense strand to SEQ ID NO: 840858
uacagugaggaacuucacg

SEQ ID NO: 840860 - RNA, 19 nt, Artificial Sequence
  Description of Artificial Sequence: Synthetic oligonucleotide
  Sense strand starting at position 2992 of SEQ ID NO: 588082
ccaggcaaauuucgggaua

SEQ ID NO: 840861 - RNA, 19 nt, Artificial Sequence
  Description of Artificial Sequence: Synthetic oligonucleotide
  Antisense strand to SEQ ID NO: 840860
uaucccgaaauuugccugg

SEQ ID NO: 840862 - RNA, 19 nt, Artificial Sequence
  Description of Artificial Sequence: Synthetic oligonucleotide
  Sense strand starting at position 2993 of SEQ ID NO: 588082
caggcaaauuucgggauaa

SEQ ID NO: 840863 - RNA, 19 nt, Artificial Sequence
  Description of Artificial Sequence: Synthetic oligonucleotide
  Antisense strand to SEQ ID NO: 840862
uuaucccgaaauuugccug

SEQ ID NO: 840864 - RNA, 19 nt, Artificial Sequence
  Description of Artificial Sequence: Synthetic oligonucleotide
  Sense strand starting at position 2994 of SEQ ID NO: 588082
aggcaaauuucgggauaaa

SEQ ID NO: 840865 - RNA, 19 nt, Artificial Sequence
  Description of Artificial Sequence: Synthetic oligonucleotide
  Antisense strand to SEQ ID NO: 840864
uuuaucccgaaauuugccu

SEQ ID NO: 840866 - RNA, 19 nt, Artificial Sequence
  Description of Artificial Sequence: Synthetic oligonucleotide
  Sense strand starting at position 3307 of SEQ ID NO: 588082
ggcguauugcucuaggaug

SEQ ID NO: 840867 - RNA, 19 nt, Artificial Sequence
  Description of Artificial Sequence: Synthetic oligonucleotide
  Antisense strand to SEQ ID NO: 840866
cauccuagagcaauacgcc

SEQ ID NO: 840868 - RNA, 19 nt, Artificial Sequence
  Description of Artificial Sequence: Synthetic oligonucleotide
  Sense strand starting at position 3422 of SEQ ID NO: 588082
agaaauagcuaucacgaau

SEQ ID NO: 840869 - RNA, 19 nt, Artificial Sequence
  Description of Artificial Sequence: Synthetic oligonucleotide
  Antisense strand to SEQ ID NO: 840868
auucgugauagcuauuucu

SEQ ID NO: 840870 - RNA, 19 nt, Artificial Sequence
  Description of Artificial Sequence: Synthetic oligonucleotide
  Sense strand starting at position 3439 of SEQ ID NO: 588082
aucuguaucuugcccagua

SEQ ID NO: 840871 - RNA, 19 nt, Artificial Sequence
  Description of Artificial Sequence: Synthetic oligonucleotide
  Antisense strand to SEQ ID NO: 840870
uacugggcaagauacagau

SEQ ID NO: 840872 - RNA, 19 nt, Artificial Sequence
  Description of Artificial Sequence: Synthetic oligonucleotide
  Sense strand starting at position 3441 of SEQ ID NO: 588082
cuguaucuugcccaguagu

SEQ ID NO: 840873 - RNA, 19 nt, Artificial Sequence
  Description of Artificial Sequence: Synthetic oligonucleotide
  Antisense strand to SEQ ID NO: 840872
acuacugggcaagauacag

SEQ ID NO: 840874 - RNA, 19 nt, Artificial Sequence
  Description of Artificial Sequence: Synthetic oligonucleotide
  Sense strand starting at position 3444 of SEQ ID NO: 588082
uaucuugcccaguaguaga

SEQ ID NO: 840875 - RNA, 19 nt, Artificial Sequence
  Description of Artificial Sequence: Synthetic oligonucleotide
  Antisense strand to SEQ ID NO: 840874
ucuacuacugggcaagaua

SEQ ID NO: 840876 - RNA, 19 nt, Artificial Sequence
  Description of Artificial Sequence: Synthetic oligonucleotide
  Sense strand starting at position 3520 of SEQ ID NO: 588082
cuggauccauacuguauuu

SEQ ID NO: 840877 - RNA, 19 nt, Artificial Sequence
  Description of Artificial Sequence: Synthetic oligonucleotide
  Antisense strand to SEQ ID NO: 840876
aaauacaguauggauccag

SEQ ID NO: 840878 - RNA, 19 nt, Artificial Sequence
  Description of Artificial Sequence: Synthetic oligonucleotide
  Sense strand starting at position 3538 of SEQ ID NO: 588082
uugggcagcacuuauagaa

SEQ ID NO: 840879 - RNA, 19 nt, Artificial Sequence
  Description of Artificial Sequence: Synthetic oligonucleotide
  Antisense strand to SEQ ID NO: 840878
uucuauaagugcugcccaa

SEQ ID NO: 840880 - RNA, 19 nt, Artificial Sequence
  Description of Artificial Sequence: Synthetic oligonucleotide
  Sense strand starting at position 3548 of SEQ ID NO: 588082
cuuauagaaugcuuagaaa

SEQ ID NO: 840881 - RNA, 19 nt, Artificial Sequence
  Description of Artificial Sequence: Synthetic oligonucleotide
  Antisense strand to SEQ ID NO: 840880
uuucuaagcauucuauaag

SEQ ID NO: 840882 - RNA, 19 nt, Artificial Sequence
  Description of Artificial Sequence: Synthetic oligonucleotide
  Sense strand starting at position 3611 of SEQ ID NO: 588082
aaaucauguuacgccgaau

SEQ ID NO: 840883 - RNA, 19 nt, Artificial Sequence
  Description of Artificial Sequence: Synthetic oligonucleotide
  Antisense strand to SEQ ID NO: 840882
auucggcguaacaugauuu

SEQ ID NO: 840884 - RNA, 19 nt, Artificial Sequence
  Description of Artificial Sequence: Synthetic oligonucleotide
  Sense strand starting at position 3614 of SEQ ID NO: 588082
ucauguuacgccgaaugga

SEQ ID NO: 840885 - RNA, 19 nt, Artificial Sequence
  Description of Artificial Sequence: Synthetic oligonucleotide
  Antisense strand to SEQ ID NO: 840884
uccauucggcguaacauga

SEQ ID NO: 840886 - RNA, 19 nt, Artificial Sequence
  Description of Artificial Sequence: Synthetic oligonucleotide
  Sense strand starting at position 3641 of SEQ ID NO: 588082
cccugacugugagauggau

SEQ ID NO: 840887 - RNA, 19 nt, Artificial Sequence
  Description of Artificial Sequence: Synthetic oligonucleotide
  Antisense strand to SEQ ID NO: 840886
auccaucucacagucaggg

SEQ ID NO: 840888 - RNA, 19 nt, Artificial Sequence
  Description of Artificial Sequence: Synthetic oligonucleotide
  Sense strand starting at position 3835 of SEQ ID NO: 588082
gggagacugcuguguagag

SEQ ID NO: 840889 - RNA, 19 nt, Artificial Sequence
  Description of Artificial Sequence: Synthetic oligonucleotide
  Antisense strand to SEQ ID NO: 840888
cucuacacagcagucuccc

SEQ ID NO: 840890 - RNA, 19 nt, Artificial Sequence
  Description of Artificial Sequence: Synthetic oligonucleotide
  Sense strand starting at position 3938 of SEQ ID NO: 588082
cuaggaggcuaugaaagau

SEQ ID NO: 840891 - RNA, 19 nt, Artificial Sequence
  Description of Artificial Sequence: Synthetic oligonucleotide
  Antisense strand to SEQ ID NO: 840890
aucuuucauagccuccuag

SEQ ID NO: 840892 - RNA, 19 nt, Artificial Sequence
  Description of Artificial Sequence: Synthetic oligonucleotide
  Sense strand starting at position 3944 of SEQ ID NO: 588082
ggcuaugaaagaugaaagu

SEQ ID NO: 840893 - RNA, 19 nt, Artificial Sequence
  Description of Artificial Sequence: Synthetic oligonucleotide
  Antisense strand to SEQ ID NO: 840892
acuuucaucuuucauagcc

SEQ ID NO: 840894 - RNA, 19 nt, Artificial Sequence
  Description of Artificial Sequence: Synthetic oligonucleotide
  Sense strand starting at position 3953 of SEQ ID NO: 588082
agaugaaagucucccugau

SEQ ID NO: 840895 - RNA, 19 nt, Artificial Sequence
  Description of Artificial Sequence: Synthetic oligonucleotide
  Antisense strand to SEQ ID NO: 840894
aucagggagacuuucaucu

SEQ ID NO: 840896 - RNA, 19 nt, Artificial Sequence
  Description of Artificial Sequence: Synthetic oligonucleotide
  Sense strand starting at position 3955 of SEQ ID NO: 588082
augaaagucucccugauua

SEQ ID NO: 840897 - RNA, 19 nt, Artificial Sequence
  Description of Artificial Sequence: Synthetic oligonucleotide
  Antisense strand to SEQ ID NO: 840896
uaaucagggagacuuucau

SEQ ID NO: 840898 - RNA, 19 nt, Artificial Sequence
  Description of Artificial Sequence: Synthetic oligonucleotide
  Sense strand starting at position 3960 of SEQ ID NO: 588082
agucucccugauuauugua

SEQ ID NO: 840899 - RNA, 19 nt, Artificial Sequence
  Description of Artificial Sequence: Synthetic oligonucleotide
  Antisense strand to SEQ ID NO: 840898
uacaauaaucagggagacu

SEQ ID NO: 840900 - RNA, 19 nt, Artificial Sequence
  Description of Artificial Sequence: Synthetic oligonucleotide
  Sense strand starting at position 3965 of SEQ ID NO: 588082
cccugauuauuguaaccag

SEQ ID NO: 840901 - RNA, 19 nt, Artificial Sequence
  Description of Artificial Sequence: Synthetic oligonucleotide
  Antisense strand to SEQ ID NO: 840900
cugguuacaauaaucaggg

SEQ ID NO: 840902 - RNA, 19 nt, Artificial Sequence
  Description of Artificial Sequence: Synthetic oligonucleotide
  Sense strand starting at position 2 of SEQ ID NO: 588083
cuagaauucucagcagaaa

SEQ ID NO: 840903 - RNA, 19 nt, Artificial Sequence
  Description of Artificial Sequence: Synthetic oligonucleotide
  Antisense strand to SEQ ID NO: 840902
uuucugcugagaauucuag

SEQ ID NO: 840904 - RNA, 19 nt, Artificial Sequence
  Description of Artificial Sequence: Synthetic oligonucleotide
  Sense strand starting at position 117 of SEQ ID NO: 588083
cuaaaugaugucgagugga

SEQ ID NO: 840905 - RNA, 19 nt, Artificial Sequence
  Description of Artificial Sequence: Synthetic oligonucleotide
  Antisense strand to SEQ ID NO: 840904
uccacucgacaucauuuag

SEQ ID NO: 840906 - RNA, 19 nt, Artificial Sequence
  Description of Artificial Sequence: Synthetic oligonucleotide
  Sense strand starting at position 120 of SEQ ID NO: 588083
aaugaugucgaguggaaac

SEQ ID NO: 840907 - RNA, 19 nt, Artificial Sequence
  Description of Artificial Sequence: Synthetic oligonucleotide
  Antisense strand to SEQ ID NO: 840906
guuuccacucgacaucauu

SEQ ID NO: 840908 - RNA, 19 nt, Artificial Sequence
  Description of Artificial Sequence: Synthetic oligonucleotide
  Sense strand starting at position 250 of SEQ ID NO: 588083
gaaacucaucgacaauugu

SEQ ID NO: 840909 - RNA, 19 nt, Artificial Sequence
  Description of Artificial Sequence: Synthetic oligonucleotide
  Antisense strand to SEQ ID NO: 840908
acaauugucgaugaguuuc

SEQ ID NO: 840910 - RNA, 19 nt, Artificial Sequence
  Description of Artificial Sequence: Synthetic oligonucleotide
  Sense strand starting at position 261 of SEQ ID NO: 588083
acaauuguucuugguugga

SEQ ID NO: 840911 - RNA, 19 nt, Artificial Sequence
  Description of Artificial Sequence: Synthetic oligonucleotide
  Antisense strand to SEQ ID NO: 840910
uccaaccaagaacaauugu

SEQ ID NO: 840912 - RNA, 19 nt, Artificial Sequence
  Description of Artificial Sequence: Synthetic oligonucleotide
  Sense strand starting at position 263 of SEQ ID NO: 588083
aauuguucuugguuggaag

SEQ ID NO: 840913 - RNA, 19 nt, Artificial Sequence
  Description of Artificial Sequence: Synthetic oligonucleotide
  Antisense strand to SEQ ID NO: 840912
cuuccaaccaagaacaauu

SEQ ID NO: 840914 - RNA, 19 nt, Artificial Sequence
  Description of Artificial Sequence: Synthetic oligonucleotide
  Sense strand starting at position 264 of SEQ ID NO: 588083
auuguucuugguuggaaga

SEQ ID NO: 840915 - RNA, 19 nt, Artificial Sequence
  Description of Artificial Sequence: Synthetic oligonucleotide
  Antisense strand to SEQ ID NO: 840914
ucuuccaaccaagaacaau

SEQ ID NO: 840916 - RNA, 19 nt, Artificial Sequence
  Description of Artificial Sequence: Synthetic oligonucleotide
  Sense strand starting at position 265 of SEQ ID NO: 588083
uuguucuugguuggaagaa

SEQ ID NO: 840917 - RNA, 19 nt, Artificial Sequence
  Description of Artificial Sequence: Synthetic oligonucleotide
  Antisense strand to SEQ ID NO: 840916
uucuuccaaccaagaacaa

SEQ ID NO: 840918 - RNA, 19 nt, Artificial Sequence
  Description of Artificial Sequence: Synthetic oligonucleotide
  Sense strand starting at position 288 of SEQ ID NO: 588083
cugagagauugacaagaaa

SEQ ID NO: 840919 - RNA, 19 nt, Artificial Sequence
  Description of Artificial Sequence: Synthetic oligonucleotide
  Antisense strand to SEQ ID NO: 840918
uuucuugucaaucucucag

SEQ ID NO: 840920 - RNA, 19 nt, Artificial Sequence
  Description of Artificial Sequence: Synthetic oligonucleotide
  Sense strand starting at position 1676 of SEQ ID NO: 588083
gcuguuuguguuguauguu

SEQ ID NO: 840921 - RNA, 19 nt, Artificial Sequence
  Description of Artificial Sequence: Synthetic oligonucleotide
  Antisense strand to SEQ ID NO: 840920
aacauacaacacaaacagc

SEQ ID NO: 840922 - RNA, 19 nt, Artificial Sequence
  Description of Artificial Sequence: Synthetic oligonucleotide
  Sense strand starting at position 1883 of SEQ ID NO: 588083
ggaguagacuucgcuggaa

SEQ ID NO: 840923 - RNA, 19 nt, Artificial Sequence
  Description of Artificial Sequence: Synthetic oligonucleotide
  Antisense strand to SEQ ID NO: 840922
uuccagcgaagucuacucc

SEQ ID NO: 840924 - RNA, 19 nt, Artificial Sequence
  Description of Artificial Sequence: Synthetic oligonucleotide
  Sense strand starting at position 1887 of SEQ ID NO: 588083
uagacuucgcuggaaguaa

SEQ ID NO: 840925 - RNA, 19 nt, Artificial Sequence
  Description of Artificial Sequence: Synthetic oligonucleotide
  Antisense strand to SEQ ID NO: 840924
uuacuuccagcgaagucua

SEQ ID NO: 840926 - RNA, 19 nt, Artificial Sequence
  Description of Artificial Sequence: Synthetic oligonucleotide
  Sense strand starting at position 1910 of SEQ ID NO: 588083
gucugucaaaguuagacuu

SEQ ID NO: 840927 - RNA, 19 nt, Artificial Sequence
  Description of Artificial Sequence: Synthetic oligonucleotide
  Antisense strand to SEQ ID NO: 840926
aagucuaacuuugacagac

SEQ ID NO: 840928 - RNA, 19 nt, Artificial Sequence
  Description of Artificial Sequence: Synthetic oligonucleotide
  Sense strand starting at position 1917 of SEQ ID NO: 588083
aaaguuagacuuugaacgu

SEQ ID NO: 840929 - RNA, 19 nt, Artificial Sequence
  Description of Artificial Sequence: Synthetic oligonucleotide
  Antisense strand to SEQ ID NO: 840928
acguucaaagucuaacuuu

SEQ ID NO: 840930 - RNA, 19 nt, Artificial Sequence
  Description of Artificial Sequence: Synthetic oligonucleotide
  Sense strand starting at position 1997 of SEQ ID NO: 588083
gugugaaaucaaggaaggu

SEQ ID NO: 840931 - RNA, 19 nt, Artificial Sequence
  Description of Artificial Sequence: Synthetic oligonucleotide
  Antisense strand to SEQ ID NO: 840930
accuuccuugauuucacac

SEQ ID NO: 840932 - RNA, 19 nt, Artificial Sequence
  Description of Artificial Sequence: Synthetic oligonucleotide
  Sense strand starting at position 2025 of SEQ ID NO: 588083
ugagguuugggaugaauuc

SEQ ID NO: 840933 - RNA, 19 nt, Artificial Sequence
  Description of Artificial Sequence: Synthetic oligonucleotide
  Antisense strand to SEQ ID NO: 840932
gaauucaucccaaaccuca

SEQ ID NO: 840934 - RNA, 19 nt, Artificial Sequence
  Description of Artificial Sequence: Synthetic oligonucleotide
  Sense strand starting at position 2207 of SEQ ID NO: 588083
uaccuugagugccugauuu

SEQ ID NO: 840935 - RNA, 19 nt, Artificial Sequence
  Description of Artificial Sequence: Synthetic oligonucleotide
  Antisense strand to SEQ ID NO: 840934
aaaucaggcacucaaggua

SEQ ID NO: 840936 - RNA, 19 nt, Artificial Sequence
  Description of Artificial Sequence: Synthetic oligonucleotide
  Sense strand starting at position 2231 of SEQ ID NO: 588083
gcugaauuccaagaagcuu

SEQ ID NO: 840937 - RNA, 19 nt, Artificial Sequence
  Description of Artificial Sequence: Synthetic oligonucleotide
  Antisense strand to SEQ ID NO: 840936
aagcuucuuggaauucagc

SEQ ID NO: 840938 - RNA, 19 nt, Artificial Sequence
  Description of Artificial Sequence: Synthetic oligonucleotide
  Sense strand starting at position 2317 of SEQ ID NO: 588083
gugggaguucaagaucguu

SEQ ID NO: 840939 - RNA, 19 nt, Artificial Sequence
  Description of Artificial Sequence: Synthetic oligonucleotide
  Antisense strand to SEQ ID NO: 840938
aacgaucuugaacucccac

SEQ ID NO: 840940 - RNA, 19 nt, Artificial Sequence
  Description of Artificial Sequence: Synthetic oligonucleotide
  Sense strand starting at position 2333 of SEQ ID NO: 588083
guuugaguugguuacuuaa

SEQ ID NO: 840941 - RNA, 19 nt, Artificial Sequence
  Description of Artificial Sequence: Synthetic oligonucleotide
  Antisense strand to SEQ ID NO: 840940
uuaaguaaccaacucaaac

SEQ ID NO: 840942 - RNA, 19 nt, Artificial Sequence
  Description of Artificial Sequence: Synthetic oligonucleotide
  Sense strand starting at position 2335 of SEQ ID NO: 588083
uugaguugguuacuuaaga

SEQ ID NO: 840943 - RNA, 19 nt, Artificial Sequence
  Description of Artificial Sequence: Synthetic oligonucleotide
  Antisense strand to SEQ ID NO: 840942
ucuuaaguaaccaacucaa

SEQ ID NO: 840944 - RNA, 19 nt, Artificial Sequence
  Description of Artificial Sequence: Synthetic oligonucleotide
  Sense strand starting at position 2336 of SEQ ID NO: 588083
ugaguugguuacuuaagaa

SEQ ID NO: 840945 - RNA, 19 nt, Artificial Sequence
  Description of Artificial Sequence: Synthetic oligonucleotide
  Antisense strand to SEQ ID NO: 840944
uucuuaaguaaccaacuca

SEQ ID NO: 840946 - RNA, 19 nt, Artificial Sequence
  Description of Artificial Sequence: Synthetic oligonucleotide
  Sense strand starting at position 2471 of SEQ ID NO: 588083
ggcuauguaguaaguggua

SEQ ID NO: 840947 - RNA, 19 nt, Artificial Sequence
  Description of Artificial Sequence: Synthetic oligonucleotide
  Antisense strand to SEQ ID NO: 840946
uaccacuuacuacauagcc

SEQ ID NO: 840948 - RNA, 19 nt, Artificial Sequence
  Description of Artificial Sequence: Synthetic oligonucleotide
  Sense strand starting at position 2885 of SEQ ID NO: 588083
ggaggaucuuacgcaucaa

SEQ ID NO: 840949 - RNA, 19 nt, Artificial Sequence
  Description of Artificial Sequence: Synthetic oligonucleotide
  Antisense strand to SEQ ID NO: 840948
uugaugcguaagauccucc

SEQ ID NO: 840950 - RNA, 19 nt, Artificial Sequence
  Description of Artificial Sequence: Synthetic oligonucleotide
  Sense strand starting at position 3052 of SEQ ID NO: 588083
cagggaugaugacaaagau

SEQ ID NO: 840951 - RNA, 19 nt, Artificial Sequence
  Description of Artificial Sequence: Synthetic oligonucleotide
  Antisense strand to SEQ ID NO: 840950
aucuuugucaucaucccug

SEQ ID NO: 840952 - RNA, 19 nt, Artificial Sequence
  Description of Artificial Sequence: Synthetic oligonucleotide
  Sense strand starting at position 3085 of SEQ ID NO: 588083
uuuguucucccugaaucag

SEQ ID NO: 840953 - RNA, 19 nt, Artificial Sequence
  Description of Artificial Sequence: Synthetic oligonucleotide
  Antisense strand to SEQ ID NO: 840952
cugauucagggagaacaaa

SEQ ID NO: 840954 - RNA, 19 nt, Artificial Sequence
  Description of Artificial Sequence: Synthetic oligonucleotide
  Sense strand starting at position 3196 of SEQ ID NO: 588083
accuuaucccuagaggcaa

SEQ ID NO: 840955 - RNA, 19 nt, Artificial Sequence
  Description of Artificial Sequence: Synthetic oligonucleotide
  Antisense strand to SEQ ID NO: 840954
uugccucuagggauaaggu

SEQ ID NO: 840956 - RNA, 19 nt, Artificial Sequence
  Description of Artificial Sequence: Synthetic oligonucleotide
  Sense strand starting at position 3208 of SEQ ID NO: 588083
gaggcaauugcccacaagu

SEQ ID NO: 840957 - RNA, 19 nt, Artificial Sequence
  Description of Artificial Sequence: Synthetic oligonucleotide
  Antisense strand to SEQ ID NO: 840956
acuugugggcaauugccuc

SEQ ID NO: 840958 - RNA, 19 nt, Artificial Sequence
  Description of Artificial Sequence: Synthetic oligonucleotide
  Sense strand starting at position 3497 of SEQ ID NO: 588083
aagagaugggugugucuga

SEQ ID NO: 840959 - RNA, 19 nt, Artificial Sequence
  Description of Artificial Sequence: Synthetic oligonucleotide
  Antisense strand to SEQ ID NO: 840958
ucagacacacccaucucuu

SEQ ID NO: 840960 - RNA, 19 nt, Artificial Sequence
  Description of Artificial Sequence: Synthetic oligonucleotide
  Sense strand starting at position 3498 of SEQ ID NO: 588083
agagaugggugugucugau

SEQ ID NO: 840961 - RNA, 19 nt, Artificial Sequence
  Description of Artificial Sequence: Synthetic oligonucleotide
  Antisense strand to SEQ ID NO: 840960
aucagacacacccaucucu

SEQ ID NO: 840962 - RNA, 19 nt, Artificial Sequence
  Description of Artificial Sequence: Synthetic oligonucleotide
  Sense strand starting at position 3512 of SEQ ID NO: 588083
cugaucaaagcauggaaua

SEQ ID NO: 840963 - RNA, 19 nt, Artificial Sequence
  Description of Artificial Sequence: Synthetic oligonucleotide
  Antisense strand to SEQ ID NO: 840962
uauuccaugcuuugaucag

SEQ ID NO: 840964 - RNA, 19 nt, Artificial Sequence
  Description of Artificial Sequence: Synthetic oligonucleotide
  Sense strand starting at position 3537 of SEQ ID NO: 588083
gcuagccaauaagugaaua

SEQ ID NO: 840965 - RNA, 19 nt, Artificial Sequence
  Description of Artificial Sequence: Synthetic oligonucleotide
  Antisense strand to SEQ ID NO: 840964
uauucacuuauuggcuagc

SEQ ID NO: 840966 - RNA, 19 nt, Artificial Sequence
  Description of Artificial Sequence: Synthetic oligonucleotide
  Sense strand starting at position 3548 of SEQ ID NO: 588083
agugaauaaucaguaucag

SEQ ID NO: 840967 - RNA, 19 nt, Artificial Sequence
  Description of Artificial Sequence: Synthetic oligonucleotide
  Antisense strand to SEQ ID NO: 840966
cugauacugauuauucacu

SEQ ID NO: 840968 - RNA, 19 nt, Artificial Sequence
  Description of Artificial Sequence: Synthetic oligonucleotide
  Sense strand starting at position 3549 of SEQ ID NO: 588083
gugaauaaucaguaucagc

SEQ ID NO: 840969 - RNA, 19 nt, Artificial Sequence
  Description of Artificial Sequence: Synthetic oligonucleotide
  Antisense strand to SEQ ID NO: 840968
gcugauacugauuauucac

SEQ ID NO: 840970 - RNA, 19 nt, Artificial Sequence
  Description of Artificial Sequence: Synthetic oligonucleotide
  Sense strand starting at position 3623 of SEQ ID NO: 588083
gaaauuuagcuucguugau

SEQ ID NO: 840971 - RNA, 19 nt, Artificial Sequence
  Description of Artificial Sequence: Synthetic oligonucleotide
  Antisense strand to SEQ ID NO: 840970
aucaacgaagcuaaauuuc

SEQ ID NO: 840972 - RNA, 19 nt, Artificial Sequence
  Description of Artificial Sequence: Synthetic oligonucleotide
  Sense strand starting at position 3624 of SEQ ID NO: 588083
aaauuuagcuucguugauu

SEQ ID NO: 840973 - RNA, 19 nt, Artificial Sequence
  Description of Artificial Sequence: Synthetic oligonucleotide
  Antisense strand to SEQ ID NO: 840972
aaucaacgaagcuaaauuu

SEQ ID NO: 840974 - RNA, 19 nt, Artificial Sequence
  Description of Artificial Sequence: Synthetic oligonucleotide
  Sense strand starting at position 3673 of SEQ ID NO: 588083
aucuuucucuggccaugaa

SEQ ID NO: 840975 - RNA, 19 nt, Artificial Sequence
  Description of Artificial Sequence: Synthetic oligonucleotide
  Antisense strand to SEQ ID NO: 840974
uucauggccagagaaagau

SEQ ID NO: 840976 - RNA, 19 nt, Artificial Sequence
  Description of Artificial Sequence: Synthetic oligonucleotide
  Sense strand starting at position 3674 of SEQ ID NO: 588083
ucuuucucuggccaugaaa

SEQ ID NO: 840977 - RNA, 19 nt, Artificial Sequence
  Description of Artificial Sequence: Synthetic oligonucleotide
  Antisense strand to SEQ ID NO: 840976
uuucauggccagagaaaga

SEQ ID NO: 840978 - RNA, 19 nt, Artificial Sequence
  Description of Artificial Sequence: Synthetic oligonucleotide
  Sense strand starting at position 3928 of SEQ ID NO: 588083
augcaaucagcuuacaaga

SEQ ID NO: 840979 - RNA, 19 nt, Artificial Sequence
  Description of Artificial Sequence: Synthetic oligonucleotide
  Antisense strand to SEQ ID NO: 840978
ucuuguaagcugauugcau

SEQ ID NO: 840980 - RNA, 19 nt, Artificial Sequence
  Description of Artificial Sequence: Synthetic oligonucleotide
  Sense strand starting at position 3941 of SEQ ID NO: 588083
acaagagugccugggacaa

SEQ ID NO: 840981 - RNA, 19 nt, Artificial Sequence
  Description of Artificial Sequence: Synthetic oligonucleotide
  Antisense strand to SEQ ID NO: 840980
uugucccaggcacucuugu

SEQ ID NO: 840982 - RNA, 19 nt, Artificial Sequence
  Description of Artificial Sequence: Synthetic oligonucleotide
  Sense strand starting at position 67 of SEQ ID NO: 588084
caagguggugacgauauua

SEQ ID NO: 840983 - RNA, 19 nt, Artificial Sequence
  Description of Artificial Sequence: Synthetic oligonucleotide
  Antisense strand to SEQ ID NO: 840982
uaauaucgucaccaccuug

SEQ ID NO: 840984 - RNA, 19 nt, Artificial Sequence
  Description of Artificial Sequence: Synthetic oligonucleotide
  Sense strand starting at position 109 of SEQ ID NO: 588084
gauuaagucguggagcuga

SEQ ID NO: 840985 - RNA, 19 nt, Artificial Sequence
  Description of Artificial Sequence: Synthetic oligonucleotide
  Antisense strand to SEQ ID NO: 840984
ucagcuccacgacuuaauc

SEQ ID NO: 840986 - RNA, 19 nt, Artificial Sequence
  Description of Artificial Sequence: Synthetic oligonucleotide
  Sense strand starting at position 412 of SEQ ID NO: 588084
uuucgaccucucuaacagu

SEQ ID NO: 840987 - RNA, 19 nt, Artificial Sequence
  Description of Artificial Sequence: Synthetic oligonucleotide
  Antisense strand to SEQ ID NO: 840986
acuguuagagaggucgaaa

SEQ ID NO: 840988 - RNA, 19 nt, Artificial Sequence
  Description of Artificial Sequence: Synthetic oligonucleotide
  Sense strand starting at position 429 of SEQ ID NO: 588084
guggucacccuacauuaau

SEQ ID NO: 840989 - RNA, 19 nt, Artificial Sequence
  Description of Artificial Sequence: Synthetic oligonucleotide
  Antisense strand to SEQ ID NO: 840988
auuaauguagggugaccac

SEQ ID NO: 840990 - RNA, 19 nt, Artificial Sequence
  Description of Artificial Sequence: Synthetic oligonucleotide
  Sense strand starting at position 447 of SEQ ID NO: 588084
uaaucaguauguguugaga

SEQ ID NO: 840991 - RNA, 19 nt, Artificial Sequence
  Description of Artificial Sequence: Synthetic oligonucleotide
  Antisense strand to SEQ ID NO: 840990
ucucaacacauacugauua

SEQ ID NO: 840992 - RNA, 19 nt, Artificial Sequence
  Description of Artificial Sequence: Synthetic oligonucleotide
  Sense strand starting at position 471 of SEQ ID NO: 588084
aaagguagauuguugauga

SEQ ID NO: 840993 - RNA, 19 nt, Artificial Sequence
  Description of Artificial Sequence: Synthetic oligonucleotide
  Antisense strand to SEQ ID NO: 840992
ucaucaacaaucuaccuuu

SEQ ID NO: 840994 - RNA, 19 nt, Artificial Sequence
  Description of Artificial Sequence: Synthetic oligonucleotide
  Sense strand starting at position 476 of SEQ ID NO: 588084
uagauuguugaugagaugu

SEQ ID NO: 840995 - RNA, 19 nt, Artificial Sequence
  Description of Artificial Sequence: Synthetic oligonucleotide
  Antisense strand to SEQ ID NO: 840994
acaucucaucaacaaucua

SEQ ID NO: 840996 - RNA, 19 nt, Artificial Sequence
  Description of Artificial Sequence: Synthetic oligonucleotide
  Sense strand starting at position 630 of SEQ ID NO: 588084
ucaucaacugagugaucuu

SEQ ID NO: 840997 - RNA, 19 nt, Artificial Sequence
  Description of Artificial Sequence: Synthetic oligonucleotide
  Antisense strand to SEQ ID NO: 840996
aagaucacucaguugauga

SEQ ID NO: 840998 - RNA, 19 nt, Artificial Sequence
  Description of Artificial Sequence: Synthetic oligonucleotide
  Sense strand starting at position 640 of SEQ ID NO: 588084
agugaucuugugcaaauaa

SEQ ID NO: 840999 - RNA, 19 nt, Artificial Sequence
  Description of Artificial Sequence: Synthetic oligonucleotide
  Antisense strand to SEQ ID NO: 840998
uuauuugcacaagaucacu

SEQ ID NO: 841000 - RNA, 19 nt, Artificial Sequence
  Description of Artificial Sequence: Synthetic oligonucleotide
  Sense strand starting at position 1137 of SEQ ID NO: 588084
ggagaaagauggucguaga

SEQ ID NO: 841001 - RNA, 19 nt, Artificial Sequence
  Description of Artificial Sequence: Synthetic oligonucleotide
  Antisense strand to SEQ ID NO: 841000
ucuacgaccaucuuucucc

SEQ ID NO: 841002 - RNA, 19 nt, Artificial Sequence
  Description of Artificial Sequence: Synthetic oligonucleotide
  Sense strand starting at position 1138 of SEQ ID NO: 588084
gagaaagauggucguagau

SEQ ID NO: 841003 - RNA, 19 nt, Artificial Sequence
  Description of Artificial Sequence: Synthetic oligonucleotide
  Antisense strand to SEQ ID NO: 841002
aucuacgaccaucuuucuc

SEQ ID NO: 841004 - RNA, 19 nt, Artificial Sequence
  Description of Artificial Sequence: Synthetic oligonucleotide
  Sense strand starting at position 1252 of SEQ ID NO: 588084
cugucacuccaguaagaau

SEQ ID NO: 841005 - RNA, 19 nt, Artificial Sequence
  Description of Artificial Sequence: Synthetic oligonucleotide
  Antisense strand to SEQ ID NO: 841004
auucuuacuggagugacag

SEQ ID NO: 841006 - RNA, 19 nt, Artificial Sequence
  Description of Artificial Sequence: Synthetic oligonucleotide
  Sense strand starting at position 1314 of SEQ ID NO: 588084
gguaucuuaguugacauaa

SEQ ID NO: 841007 - RNA, 19 nt, Artificial Sequence
  Description of Artificial Sequence: Synthetic oligonucleotide
  Antisense strand to SEQ ID NO: 841006
uuaugucaacuaagauacc

SEQ ID NO: 841008 - RNA, 19 nt, Artificial Sequence
  Description of Artificial Sequence: Synthetic oligonucleotide
  Sense strand starting at position 1366 of SEQ ID NO: 588084
gucaaugcagguuauacaa

SEQ ID NO: 841009 - RNA, 19 nt, Artificial Sequence
  Description of Artificial Sequence: Synthetic oligonucleotide
  Antisense strand to SEQ ID NO: 841008
uuguauaaccugcauugac

SEQ ID NO: 841010 - RNA, 19 nt, Artificial Sequence
  Description of Artificial Sequence: Synthetic oligonucleotide
  Sense strand starting at position 1386 of SEQ ID NO: 588084
uagugauugagcugggauu

SEQ ID NO: 841011 - RNA, 19 nt, Artificial Sequence
  Description of Artificial Sequence: Synthetic oligonucleotide
  Antisense strand to SEQ ID NO: 841010
aaucccagcucaaucacua

SEQ ID NO: 841012 - RNA, 19 nt, Artificial Sequence
  Description of Artificial Sequence: Synthetic oligonucleotide
  Sense strand starting at position 1500 of SEQ ID NO: 588084
gagauaaacuaguucugug

SEQ ID NO: 841013 - RNA, 19 nt, Artificial Sequence
  Description of Artificial Sequence: Synthetic oligonucleotide
  Antisense strand to SEQ ID NO: 841012
cacagaacuaguuuaucuc

SEQ ID NO: 841014 - RNA, 19 nt, Artificial Sequence
  Description of Artificial Sequence: Synthetic oligonucleotide
  Sense strand starting at position 1517 of SEQ ID NO: 588084
uguguuugacagcaauaga

SEQ ID NO: 841015 - RNA, 19 nt, Artificial Sequence
  Description of Artificial Sequence: Synthetic oligonucleotide
  Antisense strand to SEQ ID NO: 841014
ucuauugcugucaaacaca

SEQ ID NO: 841016 - RNA, 19 nt, Artificial Sequence
  Description of Artificial Sequence: Synthetic oligonucleotide
  Sense strand starting at position 1528 of SEQ ID NO: 588084
gcaauagagcuugagguuu

SEQ ID NO: 841017 - RNA, 19 nt, Artificial Sequence
  Description of Artificial Sequence: Synthetic oligonucleotide
  Antisense strand to SEQ ID NO: 841016
aaaccucaagcucuauugc

SEQ ID NO: 841018 - RNA, 19 nt, Artificial Sequence
  Description of Artificial Sequence: Synthetic oligonucleotide
  Sense strand starting at position 1760 of SEQ ID NO: 588084
gcaaauaaugauggugaua

SEQ ID NO: 841019 - RNA, 19 nt, Artificial Sequence
  Description of Artificial Sequence: Synthetic oligonucleotide
  Antisense strand to SEQ ID NO: 841018
uaucaccaucauuauuugc

SEQ ID NO: 841020 - RNA, 19 nt, Artificial Sequence
  Description of Artificial Sequence: Synthetic oligonucleotide
  Sense strand starting at position 1832 of SEQ ID NO: 588084
ugaaaucuguugucuacau

SEQ ID NO: 841021 - RNA, 19 nt, Artificial Sequence
  Description of Artificial Sequence: Synthetic oligonucleotide
  Antisense strand to SEQ ID NO: 841020
auguagacaacagauuuca

SEQ ID NO: 841022 - RNA, 19 nt, Artificial Sequence
  Description of Artificial Sequence: Synthetic oligonucleotide
  Sense strand starting at position 2036 of SEQ ID NO: 588084
ggucauaucaaugggcaga

SEQ ID NO: 841023 - RNA, 19 nt, Artificial Sequence
  Description of Artificial Sequence: Synthetic oligonucleotide
  Antisense strand to SEQ ID NO: 841022
ucugcccauugauaugacc

SEQ ID NO: 841024 - RNA, 19 nt, Artificial Sequence
  Description of Artificial Sequence: Synthetic oligonucleotide
  Sense strand starting at position 2249 of SEQ ID NO: 588084
uugguauagaugcaguaga

SEQ ID NO: 841025 - RNA, 19 nt, Artificial Sequence
  Description of Artificial Sequence: Synthetic oligonucleotide
  Antisense strand to SEQ ID NO: 841024
ucuacugcaucuauaccaa

SEQ ID NO: 841026 - RNA, 19 nt, Artificial Sequence
  Description of Artificial Sequence: Synthetic oligonucleotide
  Sense strand starting at position 2293 of SEQ ID NO: 588084
gagaaagaauugcuggagu

SEQ ID NO: 841027 - RNA, 19 nt, Artificial Sequence
  Description of Artificial Sequence: Synthetic oligonucleotide
  Antisense strand to SEQ ID NO: 841026
acuccagcaauucuuucuc

SEQ ID NO: 841028 - RNA, 19 nt, Artificial Sequence
  Description of Artificial Sequence: Synthetic oligonucleotide
  Sense strand starting at position 2398 of SEQ ID NO: 588084
ugauuagaucgaggaggca

SEQ ID NO: 841029 - RNA, 19 nt, Artificial Sequence
  Description of Artificial Sequence: Synthetic oligonucleotide
  Antisense strand to SEQ ID NO: 841028
ugccuccucgaucuaauca

SEQ ID NO: 841030 - RNA, 19 nt, Artificial Sequence
  Description of Artificial Sequence: Synthetic oligonucleotide
  Sense strand starting at position 2674 of SEQ ID NO: 588084
ccugucuaugaguaagcaa

SEQ ID NO: 841031 - RNA, 19 nt, Artificial Sequence
  Description of Artificial Sequence: Synthetic oligonucleotide
  Antisense strand to SEQ ID NO: 841030
uugcuuacucauagacagg

SEQ ID NO: 841032 - RNA, 19 nt, Artificial Sequence
  Description of Artificial Sequence: Synthetic oligonucleotide
  Sense strand starting at position 2677 of SEQ ID NO: 588084
gucuaugaguaagcaagga

SEQ ID NO: 841033 - RNA, 19 nt, Artificial Sequence
  Description of Artificial Sequence: Synthetic oligonucleotide
  Antisense strand to SEQ ID NO: 841032
uccuugcuuacucauagac

SEQ ID NO: 841034 - RNA, 19 nt, Artificial Sequence
  Description of Artificial Sequence: Synthetic oligonucleotide
  Sense strand starting at position 2933 of SEQ ID NO: 588084
caauacaugccgggacaaa

SEQ ID NO: 841035 - RNA, 19 nt, Artificial Sequence
  Description of Artificial Sequence: Synthetic oligonucleotide
  Antisense strand to SEQ ID NO: 841034
uuugucccggcauguauug

SEQ ID NO: 841036 - RNA, 19 nt, Artificial Sequence
  Description of Artificial Sequence: Synthetic oligonucleotide
  Sense strand starting at position 2987 of SEQ ID NO: 588084
caaaguugugauggagaac

SEQ ID NO: 841037 - RNA, 19 nt, Artificial Sequence
  Description of Artificial Sequence: Synthetic oligonucleotide
  Antisense strand to SEQ ID NO: 841036
guucuccaucacaacuuug

SEQ ID NO: 841038 - RNA, 19 nt, Artificial Sequence
  Description of Artificial Sequence: Synthetic oligonucleotide
  Sense strand starting at position 2990 of SEQ ID NO: 588084
aguugugauggagaacagu

SEQ ID NO: 841039 - RNA, 19 nt, Artificial Sequence
  Description of Artificial Sequence: Synthetic oligonucleotide
  Antisense strand to SEQ ID NO: 841038
acuguucuccaucacaacu

SEQ ID NO: 841040 - RNA, 19 nt, Artificial Sequence
  Description of Artificial Sequence: Synthetic oligonucleotide
  Sense strand starting at position 3243 of SEQ ID NO: 588084
gggaucaucacagguaauu

SEQ ID NO: 841041 - RNA, 19 nt, Artificial Sequence
  Description of Artificial Sequence: Synthetic oligonucleotide
  Antisense strand to SEQ ID NO: 841040
aauuaccugugaugauccc

SEQ ID NO: 841042 - RNA, 19 nt, Artificial Sequence
  Description of Artificial Sequence: Synthetic oligonucleotide
  Sense strand starting at position 3372 of SEQ ID NO: 588084
uagucuaucuggucuagag

SEQ ID NO: 841043 - RNA, 19 nt, Artificial Sequence
  Description of Artificial Sequence: Synthetic oligonucleotide
  Antisense strand to SEQ ID NO: 841042
cucuagaccagauagacua

SEQ ID NO: 841044 - RNA, 19 nt, Artificial Sequence
  Description of Artificial Sequence: Synthetic oligonucleotide
  Sense strand starting at position 3374 of SEQ ID NO: 588084
gucuaucuggucuagagaa

SEQ ID NO: 841045 - RNA, 19 nt, Artificial Sequence
  Description of Artificial Sequence: Synthetic oligonucleotide
  Antisense strand to SEQ ID NO: 841044
uucucuagaccagauagac

SEQ ID NO: 841046 - RNA, 19 nt, Artificial Sequence
  Description of Artificial Sequence: Synthetic oligonucleotide
  Sense strand starting at position 3498 of SEQ ID NO: 588084
agagcagguaacugacauu

SEQ ID NO: 841047 - RNA, 19 nt, Artificial Sequence
  Description of Artificial Sequence: Synthetic oligonucleotide
  Antisense strand to SEQ ID NO: 841046
aaugucaguuaccugcucu

SEQ ID NO: 841048 - RNA, 19 nt, Artificial Sequence
  Description of Artificial Sequence: Synthetic oligonucleotide
  Sense strand starting at position 3554 of SEQ ID NO: 588084
auugcuaccuucuuaagag

SEQ ID NO: 841049 - RNA, 19 nt, Artificial Sequence
  Description of Artificial Sequence: Synthetic oligonucleotide
  Antisense strand to SEQ ID NO: 841048
cucuuaagaagguagcaau

SEQ ID NO: 841050 - RNA, 19 nt, Artificial Sequence
  Description of Artificial Sequence: Synthetic oligonucleotide
  Sense strand starting at position 3563 of SEQ ID NO: 588084
uucuuaagagucugacacu

SEQ ID NO: 841051 - RNA, 19 nt, Artificial Sequence
  Description of Artificial Sequence: Synthetic oligonucleotide
  Antisense strand to SEQ ID NO: 841050
agugucagacucuuaagaa

SEQ ID NO: 841052 - RNA, 19 nt, Artificial Sequence
  Description of Artificial Sequence: Synthetic oligonucleotide
  Sense strand starting at position 3572 of SEQ ID NO: 588084
gucugacacuuucuacaca

SEQ ID NO: 841053 - RNA, 19 nt, Artificial Sequence
  Description of Artificial Sequence: Synthetic oligonucleotide
  Antisense strand to SEQ ID NO: 841052
uguguagaaagugucagac

SEQ ID NO: 841054 - RNA, 19 nt, Artificial Sequence
  Description of Artificial Sequence: Synthetic oligonucleotide
  Sense strand starting at position 3774 of SEQ ID NO: 588084
ggaggugugugauugauua

SEQ ID NO: 841055 - RNA, 19 nt, Artificial Sequence
  Description of Artificial Sequence: Synthetic oligonucleotide
  Antisense strand to SEQ ID NO: 841054
uaaucaaucacacaccucc

SEQ ID NO: 841056 - RNA, 19 nt, Artificial Sequence
  Description of Artificial Sequence: Synthetic oligonucleotide
  Sense strand starting at position 3776 of SEQ ID NO: 588084
aggugugugauugauuaau

SEQ ID NO: 841057 - RNA, 19 nt, Artificial Sequence
  Description of Artificial Sequence: Synthetic oligonucleotide
  Antisense strand to SEQ ID NO: 841056
auuaaucaaucacacaccu

SEQ ID NO: 841058 - RNA, 19 nt, Artificial Sequence
  Description of Artificial Sequence: Synthetic oligonucleotide
  Sense strand starting at position 3778 of SEQ ID NO: 588084
gugugugauugauuaauaa

SEQ ID NO: 841059 - RNA, 19 nt, Artificial Sequence
  Description of Artificial Sequence: Synthetic oligonucleotide
  Antisense strand to SEQ ID NO: 841058
uuauuaaucaaucacacac

SEQ ID NO: 841060 - RNA, 19 nt, Artificial Sequence
  Description of Artificial Sequence: Synthetic oligonucleotide
  Sense strand starting at position 3850 of SEQ ID NO: 588084
uugcaaauucuauggagga

SEQ ID NO: 841061 - RNA, 19 nt, Artificial Sequence
  Description of Artificial Sequence: Synthetic oligonucleotide
  Antisense strand to SEQ ID NO: 841060
uccuccauagaauuugcaa

SEQ ID NO: 841062 - RNA, 19 nt, Artificial Sequence
  Description of Artificial Sequence: Synthetic oligonucleotide
  Sense strand starting at position 586 of SEQ ID NO: 588085
agcuaugcauucgacaaag

SEQ ID NO: 841063 - RNA, 19 nt, Artificial Sequence
  Description of Artificial Sequence: Synthetic oligonucleotide
  Antisense strand to SEQ ID NO: 841062
cuuugucgaaugcauagcu

SEQ ID NO: 841064 - RNA, 19 nt, Artificial Sequence
  Description of Artificial Sequence: Synthetic oligonucleotide
  Sense strand starting at position 588 of SEQ ID NO: 588085
cuaugcauucgacaaagau

SEQ ID NO: 841065 - RNA, 19 nt, Artificial Sequence
  Description of Artificial Sequence: Synthetic oligonucleotide
  Antisense strand to SEQ ID NO: 841064
aucuuugucgaaugcauag

SEQ ID NO: 841066 - RNA, 19 nt, Artificial Sequence
  Description of Artificial Sequence: Synthetic oligonucleotide
  Sense strand starting at position 1689 of SEQ ID NO: 588085
aacauacgaucuuuggagu

SEQ ID NO: 841067 - RNA, 19 nt, Artificial Sequence
  Description of Artificial Sequence: Synthetic oligonucleotide
  Antisense strand to SEQ ID NO: 841066
acuccaaagaucguauguu

SEQ ID NO: 841068 - RNA, 19 nt, Artificial Sequence
  Description of Artificial Sequence: Synthetic oligonucleotide
  Sense strand starting at position 1690 of SEQ ID NO: 588085
acauacgaucuuuggaguu

SEQ ID NO: 841069 - RNA, 19 nt, Artificial Sequence
  Description of Artificial Sequence: Synthetic oligonucleotide
  Antisense strand to SEQ ID NO: 841068
aacuccaaagaucguaugu

SEQ ID NO: 841070 - RNA, 19 nt, Artificial Sequence
  Description of Artificial Sequence: Synthetic oligonucleotide
  Sense strand starting at position 1692 of SEQ ID NO: 588085
auacgaucuuuggaguucu

SEQ ID NO: 841071 - RNA, 19 nt, Artificial Sequence
  Description of Artificial Sequence: Synthetic oligonucleotide
  Antisense strand to SEQ ID NO: 841070
agaacuccaaagaucguau

SEQ ID NO: 841072 - RNA, 19 nt, Artificial Sequence
  Description of Artificial Sequence: Synthetic oligonucleotide
  Sense strand starting at position 2977 of SEQ ID NO: 588085
uucuuauagcagcguuauu

SEQ ID NO: 841073 - RNA, 19 nt, Artificial Sequence
  Description of Artificial Sequence: Synthetic oligonucleotide
  Antisense strand to SEQ ID NO: 841072
aauaacgcugcuauaagaa

SEQ ID NO: 841074 - RNA, 19 nt, Artificial Sequence
  Description of Artificial Sequence: Synthetic oligonucleotide
  Sense strand starting at position 21 of SEQ ID NO: 588086
ugagaucugugagagaauc

SEQ ID NO: 841075 - RNA, 19 nt, Artificial Sequence
  Description of Artificial Sequence: Synthetic oligonucleotide
  Antisense strand to SEQ ID NO: 841074
gauucucucacagaucuca

SEQ ID NO: 841076 - RNA, 19 nt, Artificial Sequence
  Description of Artificial Sequence: Synthetic oligonucleotide
  Sense strand starting at position 94 of SEQ ID NO: 588086
augagugaaugugucucua

SEQ ID NO: 841077 - RNA, 19 nt, Artificial Sequence
  Description of Artificial Sequence: Synthetic oligonucleotide
  Antisense strand to SEQ ID NO: 841076
uagagacacauucacucau

SEQ ID NO: 841078 - RNA, 19 nt, Artificial Sequence
  Description of Artificial Sequence: Synthetic oligonucleotide
  Sense strand starting at position 96 of SEQ ID NO: 588086
gagugaaugugucucuaca

SEQ ID NO: 841079 - RNA, 19 nt, Artificial Sequence
  Description of Artificial Sequence: Synthetic oligonucleotide
  Antisense strand to SEQ ID NO: 841078
uguagagacacauucacuc

SEQ ID NO: 841080 - RNA, 19 nt, Artificial Sequence
  Description of Artificial Sequence: Synthetic oligonucleotide
  Sense strand starting at position 98 of SEQ ID NO: 588086
gugaaugugucucuacaua

SEQ ID NO: 841081 - RNA, 19 nt, Artificial Sequence
  Description of Artificial Sequence: Synthetic oligonucleotide
  Antisense strand to SEQ ID NO: 841080
uauguagagacacauucac

SEQ ID NO: 841082 - RNA, 19 nt, Artificial Sequence
  Description of Artificial Sequence: Synthetic oligonucleotide
  Sense strand starting at position 118 of SEQ ID NO: 588086
guacaugaauguucaggga

SEQ ID NO: 841083 - RNA, 19 nt, Artificial Sequence
  Description of Artificial Sequence: Synthetic oligonucleotide
  Antisense strand to SEQ ID NO: 841082
ucccugaacauucauguac

SEQ ID NO: 841084 - RNA, 19 nt, Artificial Sequence
  Description of Artificial Sequence: Synthetic oligonucleotide
  Sense strand starting at position 487 of SEQ ID NO: 588086
ucacaugagguguggcaua

SEQ ID NO: 841085 - RNA, 19 nt, Artificial Sequence
  Description of Artificial Sequence: Synthetic oligonucleotide
  Antisense strand to SEQ ID NO: 841084
uaugccacaccucauguga

SEQ ID NO: 841086 - RNA, 19 nt, Artificial Sequence
  Description of Artificial Sequence: Synthetic oligonucleotide
  Sense strand starting at position 1015 of SEQ ID NO: 588086
gaggaaaucuuaguccgau

SEQ ID NO: 841087 - RNA, 19 nt, Artificial Sequence
  Description of Artificial Sequence: Synthetic oligonucleotide
  Antisense strand to SEQ ID NO: 841086
aucggacuaagauuuccuc

SEQ ID NO: 841088 - RNA, 19 nt, Artificial Sequence
  Description of Artificial Sequence: Synthetic oligonucleotide
  Sense strand starting at position 1016 of SEQ ID NO: 588086
aggaaaucuuaguccgaug

SEQ ID NO: 841089 - RNA, 19 nt, Artificial Sequence
  Description of Artificial Sequence: Synthetic oligonucleotide
  Antisense strand to SEQ ID NO: 841088
caucggacuaagauuuccu

SEQ ID NO: 841090 - RNA, 19 nt, Artificial Sequence
  Description of Artificial Sequence: Synthetic oligonucleotide
  Sense strand starting at position 1018 of SEQ ID NO: 588086
gaaaucuuaguccgaugau

SEQ ID NO: 841091 - RNA, 19 nt, Artificial Sequence
  Description of Artificial Sequence: Synthetic oligonucleotide
  Antisense strand to SEQ ID NO: 841090
aucaucggacuaagauuuc

SEQ ID NO: 841092 - RNA, 19 nt, Artificial Sequence
  Description of Artificial Sequence: Synthetic oligonucleotide
  Sense strand starting at position 1027 of SEQ ID NO: 588086
guccgaugauuccugugau

SEQ ID NO: 841093 - RNA, 19 nt, Artificial Sequence
  Description of Artificial Sequence: Synthetic oligonucleotide
  Antisense strand to SEQ ID NO: 841092
aucacaggaaucaucggac

SEQ ID NO: 841094 - RNA, 19 nt, Artificial Sequence
  Description of Artificial Sequence: Synthetic oligonucleotide
  Sense strand starting at position 1030 of SEQ ID NO: 588086
cgaugauuccugugauaug

SEQ ID NO: 841095 - RNA, 19 nt, Artificial Sequence
  Description of Artificial Sequence: Synthetic oligonucleotide
  Antisense strand to SEQ ID NO: 841094
cauaucacaggaaucaucg

SEQ ID NO: 841096 - RNA, 19 nt, Artificial Sequence
  Description of Artificial Sequence: Synthetic oligonucleotide
  Sense strand starting at position 1044 of SEQ ID NO: 588086
auaugaagcuuucuguucu

SEQ ID NO: 841097 - RNA, 19 nt, Artificial Sequence
  Description of Artificial Sequence: Synthetic oligonucleotide
  Antisense strand to SEQ ID NO: 841096
agaacagaaagcuucauau

SEQ ID NO: 841098 - RNA, 19 nt, Artificial Sequence
  Description of Artificial Sequence: Synthetic oligonucleotide
  Sense strand starting at position 1087 of SEQ ID NO: 588086
aucaguuaucaucguuucu

SEQ ID NO: 841099 - RNA, 19 nt, Artificial Sequence
  Description of Artificial Sequence: Synthetic oligonucleotide
  Antisense strand to SEQ ID NO: 841098
agaaacgaugauaacugau

SEQ ID NO: 841100 - RNA, 19 nt, Artificial Sequence
  Description of Artificial Sequence: Synthetic oligonucleotide
  Sense strand starting at position 1528 of SEQ ID NO: 588086
aucucuaucgccugcauua

SEQ ID NO: 841101 - RNA, 19 nt, Artificial Sequence
  Description of Artificial Sequence: Synthetic oligonucleotide
  Antisense strand to SEQ ID NO: 841100
uaaugcaggcgauagagau

SEQ ID NO: 841102 - RNA, 19 nt, Artificial Sequence
  Description of Artificial Sequence: Synthetic oligonucleotide
  Sense strand starting at position 1530 of SEQ ID NO: 588086
cucuaucgccugcauuaau

SEQ ID NO: 841103 - RNA, 19 nt, Artificial Sequence
  Description of Artificial Sequence: Synthetic oligonucleotide
  Antisense strand to SEQ ID NO: 841102
auuaaugcaggcgauagag

SEQ ID NO: 841104 - RNA, 19 nt, Artificial Sequence
  Description of Artificial Sequence: Synthetic oligonucleotide
  Sense strand starting at position 1576 of SEQ ID NO: 588086
aguauaguuaaugggucaa

SEQ ID NO: 841105 - RNA, 19 nt, Artificial Sequence
  Description of Artificial Sequence: Synthetic oligonucleotide
  Antisense strand to SEQ ID NO: 841104
uugacccauuaacuauacu

SEQ ID NO: 841106 - RNA, 19 nt, Artificial Sequence
  Description of Artificial Sequence: Synthetic oligonucleotide
  Sense strand starting at position 1578 of SEQ ID NO: 588086
uauaguuaaugggucaauu

SEQ ID NO: 841107 - RNA, 19 nt, Artificial Sequence
  Description of Artificial Sequence: Synthetic oligonucleotide
  Antisense strand to SEQ ID NO: 841106
aauugacccauuaacuaua

SEQ ID NO: 841108 - RNA, 19 nt, Artificial Sequence
  Description of Artificial Sequence: Synthetic oligonucleotide
  Sense strand starting at position 1580 of SEQ ID NO: 588086
uaguuaaugggucaauuau

SEQ ID NO: 841109 - RNA, 19 nt, Artificial Sequence
  Description of Artificial Sequence: Synthetic oligonucleotide
  Antisense strand to SEQ ID NO: 841108
auaauugacccauuaacua

SEQ ID NO: 841110 - RNA, 19 nt, Artificial Sequence
  Description of Artificial Sequence: Synthetic oligonucleotide
  Sense strand starting at position 1721 of SEQ ID NO: 588086
auugauaauuucggagucu

SEQ ID NO: 841111 - RNA, 19 nt, Artificial Sequence
  Description of Artificial Sequence: Synthetic oligonucleotide
  Antisense strand to SEQ ID NO: 841110
agacuccgaaauuaucaau

SEQ ID NO: 841112 - RNA, 19 nt, Artificial Sequence
  Description of Artificial Sequence: Synthetic oligonucleotide
  Sense strand starting at position 1722 of SEQ ID NO: 588086
uugauaauuucggagucuu

SEQ ID NO: 841113 - RNA, 19 nt, Artificial Sequence
  Description of Artificial Sequence: Synthetic oligonucleotide
  Antisense strand to SEQ ID NO: 841112
aagacuccgaaauuaucaa

SEQ ID NO: 841114 - RNA, 19 nt, Artificial Sequence
  Description of Artificial Sequence: Synthetic oligonucleotide
  Sense strand starting at position 2098 of SEQ ID NO: 588086
ucagaucaaucugugauga

SEQ ID NO: 841115 - RNA, 19 nt, Artificial Sequence
  Description of Artificial Sequence: Synthetic oligonucleotide
  Antisense strand to SEQ ID NO: 841114
ucaucacagauugaucuga

SEQ ID NO: 841116 - RNA, 19 nt, Artificial Sequence
  Description of Artificial Sequence: Synthetic oligonucleotide
  Sense strand starting at position 2099 of SEQ ID NO: 588086
cagaucaaucugugaugaa

SEQ ID NO: 841117 - RNA, 19 nt, Artificial Sequence
  Description of Artificial Sequence: Synthetic oligonucleotide
  Antisense strand to SEQ ID NO: 841116
uucaucacagauugaucug

SEQ ID NO: 841118 - RNA, 19 nt, Artificial Sequence
  Description of Artificial Sequence: Synthetic oligonucleotide
  Sense strand starting at position 2100 of SEQ ID NO: 588086
agaucaaucugugaugaaa

SEQ ID NO: 841119 - RNA, 19 nt, Artificial Sequence
  Description of Artificial Sequence: Synthetic oligonucleotide
  Antisense strand to SEQ ID NO: 841118
uuucaucacagauugaucu

SEQ ID NO: 841120 - RNA, 19 nt, Artificial Sequence
  Description of Artificial Sequence: Synthetic oligonucleotide
  Sense strand starting at position 2215 of SEQ ID NO: 588086
uuaagaagccuaugacuau

SEQ ID NO: 841121 - RNA, 19 nt, Artificial Sequence
  Description of Artificial Sequence: Synthetic oligonucleotide
  Antisense strand to SEQ ID NO: 841120
auagucauaggcuucuuaa

SEQ ID NO: 841122 - RNA, 19 nt, Artificial Sequence
  Description of Artificial Sequence: Synthetic oligonucleotide
  Sense strand starting at position 2225 of SEQ ID NO: 588086
uaugacuaugguugcuaau

SEQ ID NO: 841123 - RNA, 19 nt, Artificial Sequence
  Description of Artificial Sequence: Synthetic oligonucleotide
  Antisense strand to SEQ ID NO: 841122
auuagcaaccauagucaua

SEQ ID NO: 841124 - RNA, 19 nt, Artificial Sequence
  Description of Artificial Sequence: Synthetic oligonucleotide
  Sense strand starting at position 2227 of SEQ ID NO: 588086
ugacuaugguugcuaauaa

SEQ ID NO: 841125 - RNA, 19 nt, Artificial Sequence
  Description of Artificial Sequence: Synthetic oligonucleotide
  Antisense strand to SEQ ID NO: 841124
uuauuagcaaccauaguca

SEQ ID NO: 841126 - RNA, 19 nt, Artificial Sequence
  Description of Artificial Sequence: Synthetic oligonucleotide
  Sense strand starting at position 2251 of SEQ ID NO: 588086
gaacacagauaucuuguga

SEQ ID NO: 841127 - RNA, 19 nt, Artificial Sequence
  Description of Artificial Sequence: Synthetic oligonucleotide
  Antisense strand to SEQ ID NO: 841126
ucacaagauaucuguguuc

SEQ ID NO: 841128 - RNA, 19 nt, Artificial Sequence
  Description of Artificial Sequence: Synthetic oligonucleotide
  Sense strand starting at position 2255 of SEQ ID NO: 588086
acagauaucuugugaauga

SEQ ID NO: 841129 - RNA, 19 nt, Artificial Sequence
  Description of Artificial Sequence: Synthetic oligonucleotide
  Antisense strand to SEQ ID NO: 841128
ucauucacaagauaucugu

SEQ ID NO: 841130 - RNA, 19 nt, Artificial Sequence
  Description of Artificial Sequence: Synthetic oligonucleotide
  Sense strand starting at position 2256 of SEQ ID NO: 588086
cagauaucuugugaaugag

SEQ ID NO: 841131 - RNA, 19 nt, Artificial Sequence
  Description of Artificial Sequence: Synthetic oligonucleotide
  Antisense strand to SEQ ID NO: 841130
cucauucacaagauaucug

SEQ ID NO: 841132 - RNA, 19 nt, Artificial Sequence
  Description of Artificial Sequence: Synthetic oligonucleotide
  Sense strand starting at position 2434 of SEQ ID NO: 588086
agcuuuaugcccuagcaac

SEQ ID NO: 841133 - RNA, 19 nt, Artificial Sequence
  Description of Artificial Sequence: Synthetic oligonucleotide
  Antisense strand to SEQ ID NO: 841132
guugcuagggcauaaagcu

SEQ ID NO: 841134 - RNA, 19 nt, Artificial Sequence
  Description of Artificial Sequence: Synthetic oligonucleotide
  Sense strand starting at position 2992 of SEQ ID NO: 588086
guuucucuccuguguauac

SEQ ID NO: 841135 - RNA, 19 nt, Artificial Sequence
  Description of Artificial Sequence: Synthetic oligonucleotide
  Antisense strand to SEQ ID NO: 841134
guauacacaggagagaaac

SEQ ID NO: 841136 - RNA, 19 nt, Artificial Sequence
  Description of Artificial Sequence: Synthetic oligonucleotide
  Sense strand starting at position 3181 of SEQ ID NO: 588086
gagaaauaccgauguccau

SEQ ID NO: 841137 - RNA, 19 nt, Artificial Sequence
  Description of Artificial Sequence: Synthetic oligonucleotide
  Antisense strand to SEQ ID NO: 841136
auggacaucgguauuucuc

SEQ ID NO: 841138 - RNA, 19 nt, Artificial Sequence
  Description of Artificial Sequence: Synthetic oligonucleotide
  Sense strand starting at position 3187 of SEQ ID NO: 588086
uaccgauguccauguauac

SEQ ID NO: 841139 - RNA, 19 nt, Artificial Sequence
  Description of Artificial Sequence: Synthetic oligonucleotide
  Antisense strand to SEQ ID NO: 841138
guauacauggacaucggua

SEQ ID NO: 841140 - RNA, 19 nt, Artificial Sequence
  Description of Artificial Sequence: Synthetic oligonucleotide
  Sense strand starting at position 3198 of SEQ ID NO: 588086
auguauacauucguacaua

SEQ ID NO: 841141 - RNA, 19 nt, Artificial Sequence
  Description of Artificial Sequence: Synthetic oligonucleotide
  Antisense strand to SEQ ID NO: 841140
uauguacgaauguauacau

SEQ ID NO: 841142 - RNA, 19 nt, Artificial Sequence
  Description of Artificial Sequence: Synthetic oligonucleotide
  Sense strand starting at position 3209 of SEQ ID NO: 588086
cguacauagauauguagau

SEQ ID NO: 841143 - RNA, 19 nt, Artificial Sequence
  Description of Artificial Sequence: Synthetic oligonucleotide
  Antisense strand to SEQ ID NO: 841142
aucuacauaucuauguacg

SEQ ID NO: 841144 - RNA, 19 nt, Artificial Sequence
  Description of Artificial Sequence: Synthetic oligonucleotide
  Sense strand starting at position 3210 of SEQ ID NO: 588086
guacauagauauguagaua

SEQ ID NO: 841145 - RNA, 19 nt, Artificial Sequence
  Description of Artificial Sequence: Synthetic oligonucleotide
  Antisense strand to SEQ ID NO: 841144
uaucuacauaucuauguac

SEQ ID NO: 841146 - RNA, 19 nt, Artificial Sequence
  Description of Artificial Sequence: Synthetic oligonucleotide
  Sense strand starting at position 3221 of SEQ ID NO: 588086
uguagauauauaggugcau

SEQ ID NO: 841147 - RNA, 19 nt, Artificial Sequence
  Description of Artificial Sequence: Synthetic oligonucleotide
  Antisense strand to SEQ ID NO: 841146
augcaccuauauaucuaca

SEQ ID NO: 841148 - RNA, 19 nt, Artificial Sequence
  Description of Artificial Sequence: Synthetic oligonucleotide
  Sense strand starting at position 3225 of SEQ ID NO: 588086
gauauauaggugcauaugu

SEQ ID NO: 841149 - RNA, 19 nt, Artificial Sequence
  Description of Artificial Sequence: Synthetic oligonucleotide
  Antisense strand to SEQ ID NO: 841148
acauaugcaccuauauauc

SEQ ID NO: 841150 - RNA, 19 nt, Artificial Sequence
  Description of Artificial Sequence: Synthetic oligonucleotide
  Sense strand starting at position 3638 of SEQ ID NO: 588086
accaacguucucuaugauu

SEQ ID NO: 841151 - RNA, 19 nt, Artificial Sequence
  Description of Artificial Sequence: Synthetic oligonucleotide
  Antisense strand to SEQ ID NO: 841150
aaucauagagaacguuggu

SEQ ID NO: 841152 - RNA, 19 nt, Artificial Sequence
  Description of Artificial Sequence: Synthetic oligonucleotide
  Sense strand starting at position 3928 of SEQ ID NO: 588086
agagaaugccuacaaagcu

SEQ ID NO: 841153 - RNA, 19 nt, Artificial Sequence
  Description of Artificial Sequence: Synthetic oligonucleotide
  Antisense strand to SEQ ID NO: 841152
agcuuuguaggcauucucu

SEQ ID NO: 841154 - RNA, 19 nt, Artificial Sequence
  Description of Artificial Sequence: Synthetic oligonucleotide
  Sense strand starting at position 37 of SEQ ID NO: 588087
uguuaucaguccuugaaga

SEQ ID NO: 841155 - RNA, 19 nt, Artificial Sequence
  Description of Artificial Sequence: Synthetic oligonucleotide
  Antisense strand to SEQ ID NO: 841154
ucuucaaggacugauaaca

SEQ ID NO: 841156 - RNA, 19 nt, Artificial Sequence
  Description of Artificial Sequence: Synthetic oligonucleotide
  Sense strand starting at position 39 of SEQ ID NO: 588087
uuaucaguccuugaagacu

SEQ ID NO: 841157 - RNA, 19 nt, Artificial Sequence
  Description of Artificial Sequence: Synthetic oligonucleotide
  Antisense strand to SEQ ID NO: 841156
agucuucaaggacugauaa

SEQ ID NO: 841158 - RNA, 19 nt, Artificial Sequence
  Description of Artificial Sequence: Synthetic oligonucleotide
  Sense strand starting at position 45 of SEQ ID NO: 588087
guccuugaagacuaagcuu

SEQ ID NO: 841159 - RNA, 19 nt, Artificial Sequence
  Description of Artificial Sequence: Synthetic oligonucleotide
  Antisense strand to SEQ ID NO: 841158
aagcuuagucuucaaggac

SEQ ID NO: 841160 - RNA, 19 nt, Artificial Sequence
  Description of Artificial Sequence: Synthetic oligonucleotide
  Sense strand starting at position 121 of SEQ ID NO: 588087
aaguguauuuaaguccgau

SEQ ID NO: 841161 - RNA, 19 nt, Artificial Sequence
  Description of Artificial Sequence: Synthetic oligonucleotide
  Antisense strand to SEQ ID NO: 841160
aucggacuuaaauacacuu

SEQ ID NO: 841162 - RNA, 19 nt, Artificial Sequence
  Description of Artificial Sequence: Synthetic oligonucleotide
  Sense strand starting at position 124 of SEQ ID NO: 588087
uguauuuaaguccgauguu

SEQ ID NO: 841163 - RNA, 19 nt, Artificial Sequence
  Description of Artificial Sequence: Synthetic oligonucleotide
  Antisense strand to SEQ ID NO: 841162
aacaucggacuuaaauaca

SEQ ID NO: 841164 - RNA, 19 nt, Artificial Sequence
  Description of Artificial Sequence: Synthetic oligonucleotide
  Sense strand starting at position 176 of SEQ ID NO: 588087
agguuuggauacuuaugua

SEQ ID NO: 841165 - RNA, 19 nt, Artificial Sequence
  Description of Artificial Sequence: Synthetic oligonucleotide
  Antisense strand to SEQ ID NO: 841164
uacauaaguauccaaaccu

SEQ ID NO: 841166 - RNA, 19 nt, Artificial Sequence
  Description of Artificial Sequence: Synthetic oligonucleotide
  Sense strand starting at position 273 of SEQ ID NO: 588087
cuaucaggaccuuguaaca

SEQ ID NO: 841167 - RNA, 19 nt, Artificial Sequence
  Description of Artificial Sequence: Synthetic oligonucleotide
  Antisense strand to SEQ ID NO: 841166
uguuacaagguccugauag

SEQ ID NO: 841168 - RNA, 19 nt, Artificial Sequence
  Description of Artificial Sequence: Synthetic oligonucleotide
  Sense strand starting at position 430 of SEQ ID NO: 588087
cuuugcuuucuagaaguua

SEQ ID NO: 841169 - RNA, 19 nt, Artificial Sequence
  Description of Artificial Sequence: Synthetic oligonucleotide
  Antisense strand to SEQ ID NO: 841168
uaacuucuagaaagcaaag

SEQ ID NO: 841170 - RNA, 19 nt, Artificial Sequence
  Description of Artificial Sequence: Synthetic oligonucleotide
  Sense strand starting at position 637 of SEQ ID NO: 588087
acuuguucuuauucugaag

SEQ ID NO: 841171 - RNA, 19 nt, Artificial Sequence
  Description of Artificial Sequence: Synthetic oligonucleotide
  Antisense strand to SEQ ID NO: 841170
cuucagaauaagaacaagu

SEQ ID NO: 841172 - RNA, 19 nt, Artificial Sequence
  Description of Artificial Sequence: Synthetic oligonucleotide
  Sense strand starting at position 1215 of SEQ ID NO: 588087
cagugaggucuccacccaa

SEQ ID NO: 841173 - RNA, 19 nt, Artificial Sequence
  Description of Artificial Sequence: Synthetic oligonucleotide
  Antisense strand to SEQ ID NO: 841172
uuggguggagaccucacug

SEQ ID NO: 841174 - RNA, 19 nt, Artificial Sequence
  Description of Artificial Sequence: Synthetic oligonucleotide
  Sense strand starting at position 3099 of SEQ ID NO: 588087
aagagcaauggcgauuaua

SEQ ID NO: 841175 - RNA, 19 nt, Artificial Sequence
  Description of Artificial Sequence: Synthetic oligonucleotide
  Antisense strand to SEQ ID NO: 841174
uauaaucgccauugcucuu

SEQ ID NO: 841176 - RNA, 19 nt, Artificial Sequence
  Description of Artificial Sequence: Synthetic oligonucleotide
  Sense strand starting at position 3107 of SEQ ID NO: 588087
uggcgauuauaaccaugau

SEQ ID NO: 841177 - RNA, 19 nt, Artificial Sequence
  Description of Artificial Sequence: Synthetic oligonucleotide
  Antisense strand to SEQ ID NO: 841176
aucaugguuauaaucgcca

SEQ ID NO: 841178 - RNA, 19 nt, Artificial Sequence
  Description of Artificial Sequence: Synthetic oligonucleotide
  Sense strand starting at position 3108 of SEQ ID NO: 588087
ggcgauuauaaccaugauu

SEQ ID NO: 841179 - RNA, 19 nt, Artificial Sequence
  Description of Artificial Sequence: Synthetic oligonucleotide
  Antisense strand to SEQ ID NO: 841178
aaucaugguuauaaucgcc

SEQ ID NO: 841180 - RNA, 19 nt, Artificial Sequence
  Description of Artificial Sequence: Synthetic oligonucleotide
  Sense strand starting at position 3110 of SEQ ID NO: 588087
cgauuauaaccaugauuaa

SEQ ID NO: 841181 - RNA, 19 nt, Artificial Sequence
  Description of Artificial Sequence: Synthetic oligonucleotide
  Antisense strand to SEQ ID NO: 841180
uuaaucaugguuauaaucg

SEQ ID NO: 841182 - RNA, 19 nt, Artificial Sequence
  Description of Artificial Sequence: Synthetic oligonucleotide
  Sense strand starting at position 3130 of SEQ ID NO: 588087
auugcugaauaucuggaaa

SEQ ID NO: 841183 - RNA, 19 nt, Artificial Sequence
  Description of Artificial Sequence: Synthetic oligonucleotide
  Antisense strand to SEQ ID NO: 841182
uuuccagauauucagcaau

SEQ ID NO: 841184 - RNA, 19 nt, Artificial Sequence
  Description of Artificial Sequence: Synthetic oligonucleotide
  Sense strand starting at position 3312 of SEQ ID NO: 588087
ccaggaaauguuggcugaa

SEQ ID NO: 841185 - RNA, 19 nt, Artificial Sequence
  Description of Artificial Sequence: Synthetic oligonucleotide
  Antisense strand to SEQ ID NO: 841184
uucagccaacauuuccugg

SEQ ID NO: 841186 - RNA, 19 nt, Artificial Sequence
  Description of Artificial Sequence: Synthetic oligonucleotide
  Sense strand starting at position 3313 of SEQ ID NO: 588087
caggaaauguuggcugaau

SEQ ID NO: 841187 - RNA, 19 nt, Artificial Sequence
  Description of Artificial Sequence: Synthetic oligonucleotide
  Antisense strand to SEQ ID NO: 841186
auucagccaacauuuccug

SEQ ID NO: 841188 - RNA, 19 nt, Artificial Sequence
  Description of Artificial Sequence: Synthetic oligonucleotide
  Sense strand starting at position 3314 of SEQ ID NO: 588087
aggaaauguuggcugaaua

SEQ ID NO: 841189 - RNA, 19 nt, Artificial Sequence
  Description of Artificial Sequence: Synthetic oligonucleotide
  Antisense strand to SEQ ID NO: 841188
uauucagccaacauuuccu

SEQ ID NO: 841190 - RNA, 19 nt, Artificial Sequence
  Description of Artificial Sequence: Synthetic oligonucleotide
  Sense strand starting at position 3315 of SEQ ID NO: 588087
ggaaauguuggcugaauau

SEQ ID NO: 841191 - RNA, 19 nt, Artificial Sequence
  Description of Artificial Sequence: Synthetic oligonucleotide
  Antisense strand to SEQ ID NO: 841190
auauucagccaacauuucc

SEQ ID NO: 841192 - RNA, 19 nt, Artificial Sequence
  Description of Artificial Sequence: Synthetic oligonucleotide
  Sense strand starting at position 3324 of SEQ ID NO: 588087
ggcugaauauuaguauauc

SEQ ID NO: 841193 - RNA, 19 nt, Artificial Sequence
  Description of Artificial Sequence: Synthetic oligonucleotide
  Antisense strand to SEQ ID NO: 841192
gauauacuaauauucagcc

SEQ ID NO: 841194 - RNA, 19 nt, Artificial Sequence
  Description of Artificial Sequence: Synthetic oligonucleotide
  Sense strand starting at position 3351 of SEQ ID NO: 588087
cuuggacugggcuauagau

SEQ ID NO: 841195 - RNA, 19 nt, Artificial Sequence
  Description of Artificial Sequence: Synthetic oligonucleotide
  Antisense strand to SEQ ID NO: 841194
aucuauagcccaguccaag

SEQ ID NO: 841196 - RNA, 19 nt, Artificial Sequence
  Description of Artificial Sequence: Synthetic oligonucleotide
  Sense strand starting at position 3380 of SEQ ID NO: 588087
uguuuaaacuagccaggaa

SEQ ID NO: 841197 - RNA, 19 nt, Artificial Sequence
  Description of Artificial Sequence: Synthetic oligonucleotide
  Antisense strand to SEQ ID NO: 841196
uuccuggcuaguuuaaaca

SEQ ID NO: 841198 - RNA, 19 nt, Artificial Sequence
  Description of Artificial Sequence: Synthetic oligonucleotide
  Sense strand starting at position 3402 of SEQ ID NO: 588087
guuagcugccuauugcauu

SEQ ID NO: 841199 - RNA, 19 nt, Artificial Sequence
  Description of Artificial Sequence: Synthetic oligonucleotide
  Antisense strand to SEQ ID NO: 841198
aaugcaauaggcagcuaac

SEQ ID NO: 841200 - RNA, 19 nt, Artificial Sequence
  Description of Artificial Sequence: Synthetic oligonucleotide
  Sense strand starting at position 3550 of SEQ ID NO: 588087
auuacucucuaguccuaga

SEQ ID NO: 841201 - RNA, 19 nt, Artificial Sequence
  Description of Artificial Sequence: Synthetic oligonucleotide
  Antisense strand to SEQ ID NO: 841200
ucuaggacuagagaguaau

SEQ ID NO: 841202 - RNA, 19 nt, Artificial Sequence
  Description of Artificial Sequence: Synthetic oligonucleotide
  Sense strand starting at position 3555 of SEQ ID NO: 588087
ucucuaguccuagauugua

SEQ ID NO: 841203 - RNA, 19 nt, Artificial Sequence
  Description of Artificial Sequence: Synthetic oligonucleotide
  Antisense strand to SEQ ID NO: 841202
uacaaucuaggacuagaga

SEQ ID NO: 841204 - RNA, 19 nt, Artificial Sequence
  Description of Artificial Sequence: Synthetic oligonucleotide
  Sense strand starting at position 3558 of SEQ ID NO: 588087
cuaguccuagauuguaaga

SEQ ID NO: 841205 - RNA, 19 nt, Artificial Sequence
  Description of Artificial Sequence: Synthetic oligonucleotide
  Antisense strand to SEQ ID NO: 841204
ucuuacaaucuaggacuag

SEQ ID NO: 841206 - RNA, 19 nt, Artificial Sequence
  Description of Artificial Sequence: Synthetic oligonucleotide
  Sense strand starting at position 3589 of SEQ ID NO: 588087
gggaauacgcaguauguua

SEQ ID NO: 841207 - RNA, 19 nt, Artificial Sequence
  Description of Artificial Sequence: Synthetic oligonucleotide
  Antisense strand to SEQ ID NO: 841206
uaacauacugcguauuccc

SEQ ID NO: 841208 - RNA, 19 nt, Artificial Sequence
  Description of Artificial Sequence: Synthetic oligonucleotide
  Sense strand starting at position 3600 of SEQ ID NO: 588087
guauguuaaacauaguaga

SEQ ID NO: 841209 - RNA, 19 nt, Artificial Sequence
  Description of Artificial Sequence: Synthetic oligonucleotide
  Antisense strand to SEQ ID NO: 841208
ucuacuauguuuaacauac

SEQ ID NO: 841210 - RNA, 19 nt, Artificial Sequence
  Description of Artificial Sequence: Synthetic oligonucleotide
  Sense strand starting at position 3610 of SEQ ID NO: 588087
cauaguagacguugaauaa

SEQ ID NO: 841211 - RNA, 19 nt, Artificial Sequence
  Description of Artificial Sequence: Synthetic oligonucleotide
  Antisense strand to SEQ ID NO: 841210
uuauucaacgucuacuaug

SEQ ID NO: 841212 - RNA, 19 nt, Artificial Sequence
  Description of Artificial Sequence: Synthetic oligonucleotide
  Sense strand starting at position 3619 of SEQ ID NO: 588087
cguugaauaaauggauauu

SEQ ID NO: 841213 - RNA, 19 nt, Artificial Sequence
  Description of Artificial Sequence: Synthetic oligonucleotide
  Antisense strand to SEQ ID NO: 841212
aauauccauuuauucaacg

SEQ ID NO: 841214 - RNA, 19 nt, Artificial Sequence
  Description of Artificial Sequence: Synthetic oligonucleotide
  Sense strand starting at position 3642 of SEQ ID NO: 588087
aaaugaaccgaguaugucu

SEQ ID NO: 841215 - RNA, 19 nt, Artificial Sequence
  Description of Artificial Sequence: Synthetic oligonucleotide
  Antisense strand to SEQ ID NO: 841214
agacauacucgguucauuu

SEQ ID NO: 841216 - RNA, 19 nt, Artificial Sequence
  Description of Artificial Sequence: Synthetic oligonucleotide
  Sense strand starting at position 3647 of SEQ ID NO: 588087
aaccgaguaugucugaaga

SEQ ID NO: 841217 - RNA, 19 nt, Artificial Sequence
  Description of Artificial Sequence: Synthetic oligonucleotide
  Antisense strand to SEQ ID NO: 841216
ucuucagacauacucgguu

SEQ ID NO: 841218 - RNA, 19 nt, Artificial Sequence
  Description of Artificial Sequence: Synthetic oligonucleotide
  Sense strand starting at position 3739 of SEQ ID NO: 588087
guuaaucuggcugauagag

SEQ ID NO: 841219 - RNA, 19 nt, Artificial Sequence
  Description of Artificial Sequence: Synthetic oligonucleotide
  Antisense strand to SEQ ID NO: 841218
cucuaucagccagauuaac

SEQ ID NO: 841220 - RNA, 19 nt, Artificial Sequence
  Description of Artificial Sequence: Synthetic oligonucleotide
  Sense strand starting at position 3766 of SEQ ID NO: 588087
acuuguuggcccuagaaau

SEQ ID NO: 841221 - RNA, 19 nt, Artificial Sequence
  Description of Artificial Sequence: Synthetic oligonucleotide
  Antisense strand to SEQ ID NO: 841220
auuucuagggccaacaagu

SEQ ID NO: 841222 - RNA, 19 nt, Artificial Sequence
  Description of Artificial Sequence: Synthetic oligonucleotide
  Sense strand starting at position 3801 of SEQ ID NO: 588087
uguguuuaucuagccguga

SEQ ID NO: 841223 - RNA, 19 nt, Artificial Sequence
  Description of Artificial Sequence: Synthetic oligonucleotide
  Antisense strand to SEQ ID NO: 841222
ucacggcuagauaaacaca

SEQ ID NO: 841224 - RNA, 19 nt, Artificial Sequence
  Description of Artificial Sequence: Synthetic oligonucleotide
  Sense strand starting at position 3846 of SEQ ID NO: 588087
gugaaauuuguguggcaga

SEQ ID NO: 841225 - RNA, 19 nt, Artificial Sequence
  Description of Artificial Sequence: Synthetic oligonucleotide
  Antisense strand to SEQ ID NO: 841224
ucugccacacaaauuucac

SEQ ID NO: 841226 - RNA, 19 nt, Artificial Sequence
  Description of Artificial Sequence: Synthetic oligonucleotide
  Sense strand starting at position 3862 of SEQ ID NO: 588087
agagauaugucuucuuaac

SEQ ID NO: 841227 - RNA, 19 nt, Artificial Sequence
  Description of Artificial Sequence: Synthetic oligonucleotide
  Antisense strand to SEQ ID NO: 841226
guuaagaagacauaucucu

SEQ ID NO: 841228 - RNA, 19 nt, Artificial Sequence
  Description of Artificial Sequence: Synthetic oligonucleotide
  Sense strand starting at position 3894 of SEQ ID NO: 588087
ccuauugugaaguagguua

SEQ ID NO: 841229 - RNA, 19 nt, Artificial Sequence
  Description of Artificial Sequence: Synthetic oligonucleotide
  Antisense strand to SEQ ID NO: 841228
uaaccuacuucacaauagg

SEQ ID NO: 841230 - RNA, 19 nt, Artificial Sequence
  Description of Artificial Sequence: Synthetic oligonucleotide
  Sense strand starting at position 3899 of SEQ ID NO: 588087
ugugaaguagguuaauaug

SEQ ID NO: 841231 - RNA, 19 nt, Artificial Sequence
  Description of Artificial Sequence: Synthetic oligonucleotide
  Antisense strand to SEQ ID NO: 841230
cauauuaaccuacuucaca

SEQ ID NO: 841232 - RNA, 19 nt, Artificial Sequence
  Description of Artificial Sequence: Synthetic oligonucleotide
  Sense strand starting at position 3978 of SEQ ID NO: 588087
agucauaacuccuuugaga

SEQ ID NO: 841233 - RNA, 19 nt, Artificial Sequence
  Description of Artificial Sequence: Synthetic oligonucleotide
  Antisense strand to SEQ ID NO: 841232
ucucaaaggaguuaugacu

SEQ ID NO: 841234 - RNA, 19 nt, Artificial Sequence
  Description of Artificial Sequence: Synthetic oligonucleotide
  Sense strand starting at position 98 of SEQ ID NO: 588088
cuuugcuuucuagaaguua

SEQ ID NO: 841235 - RNA, 19 nt, Artificial Sequence
  Description of Artificial Sequence: Synthetic oligonucleotide
  Antisense strand to SEQ ID NO: 841234
uaacuucuagaaagcaaag

SEQ ID NO: 841236 - RNA, 19 nt, Artificial Sequence
  Description of Artificial Sequence: Synthetic oligonucleotide
  Sense strand starting at position 305 of SEQ ID NO: 588088
acuuguucuuauucugaag

SEQ ID NO: 841237 - RNA, 19 nt, Artificial Sequence
  Description of Artificial Sequence: Synthetic oligonucleotide
  Antisense strand to SEQ ID NO: 841236
cuucagaauaagaacaagu

SEQ ID NO: 841238 - RNA, 19 nt, Artificial Sequence
  Description of Artificial Sequence: Synthetic oligonucleotide
  Sense strand starting at position 364 of SEQ ID NO: 588088
aagcuaaaugcaugaggua

SEQ ID NO: 841239 - RNA, 19 nt, Artificial Sequence
  Description of Artificial Sequence: Synthetic oligonucleotide
  Antisense strand to SEQ ID NO: 841238
uaccucaugcauuuagcuu

SEQ ID NO: 841240 - RNA, 19 nt, Artificial Sequence
  Description of Artificial Sequence: Synthetic oligonucleotide
  Sense strand starting at position 883 of SEQ ID NO: 588088
cagugaggucuccacccaa

SEQ ID NO: 841241 - RNA, 19 nt, Artificial Sequence
  Description of Artificial Sequence: Synthetic oligonucleotide
  Antisense strand to SEQ ID NO: 841240
uuggguggagaccucacug

SEQ ID NO: 841242 - RNA, 19 nt, Artificial Sequence
  Description of Artificial Sequence: Synthetic oligonucleotide
  Sense strand starting at position 2767 of SEQ ID NO: 588088
aagagcaauggcgauuaua

SEQ ID NO: 841243 - RNA, 19 nt, Artificial Sequence
  Description of Artificial Sequence: Synthetic oligonucleotide
  Antisense strand to SEQ ID NO: 841242
uauaaucgccauugcucuu

SEQ ID NO: 841244 - RNA, 19 nt, Artificial Sequence
  Description of Artificial Sequence: Synthetic oligonucleotide
  Sense strand starting at position 2775 of SEQ ID NO: 588088
uggcgauuauaaccaugau

SEQ ID NO: 841245 - RNA, 19 nt, Artificial Sequence
  Description of Artificial Sequence: Synthetic oligonucleotide
  Antisense strand to SEQ ID NO: 841244
aucaugguuauaaucgcca

SEQ ID NO: 841246 - RNA, 19 nt, Artificial Sequence
  Description of Artificial Sequence: Synthetic oligonucleotide
  Sense strand starting at position 2776 of SEQ ID NO: 588088
ggcgauuauaaccaugauu

SEQ ID NO: 841247 - RNA, 19 nt, Artificial Sequence
  Description of Artificial Sequence: Synthetic oligonucleotide
  Antisense strand to SEQ ID NO: 841246
aaucaugguuauaaucgcc

SEQ ID NO: 841248 - RNA, 19 nt, Artificial Sequence
  Description of Artificial Sequence: Synthetic oligonucleotide
  Sense strand starting at position 2778 of SEQ ID NO: 588088
cgauuauaaccaugauuaa

SEQ ID NO: 841249 - RNA, 19 nt, Artificial Sequence
  Description of Artificial Sequence: Synthetic oligonucleotide
  Antisense strand to SEQ ID NO: 841248
uuaaucaugguuauaaucg

SEQ ID NO: 841250 - RNA, 19 nt, Artificial Sequence
  Description of Artificial Sequence: Synthetic oligonucleotide
  Sense strand starting at position 2798 of SEQ ID NO: 588088
auugcugaauaucuggaaa

SEQ ID NO: 841251 - RNA, 19 nt, Artificial Sequence
  Description of Artificial Sequence: Synthetic oligonucleotide
  Antisense strand to SEQ ID NO: 841250
uuuccagauauucagcaau

SEQ ID NO: 841252 - RNA, 19 nt, Artificial Sequence
  Description of Artificial Sequence: Synthetic oligonucleotide
  Sense strand starting at position 2870 of SEQ ID NO: 588088
auucguuucuaauuagaac

SEQ ID NO: 841253 - RNA, 19 nt, Artificial Sequence
  Description of Artificial Sequence: Synthetic oligonucleotide
  Antisense strand to SEQ ID NO: 841252
guucuaauuagaaacgaau

SEQ ID NO: 841254 - RNA, 19 nt, Artificial Sequence
  Description of Artificial Sequence: Synthetic oligonucleotide
  Sense strand starting at position 2980 of SEQ ID NO: 588088
ccaggaaauguuggcugaa

SEQ ID NO: 841255 - RNA, 19 nt, Artificial Sequence
  Description of Artificial Sequence: Synthetic oligonucleotide
  Antisense strand to SEQ ID NO: 841254
uucagccaacauuuccugg

SEQ ID NO: 841256 - RNA, 19 nt, Artificial Sequence
  Description of Artificial Sequence: Synthetic oligonucleotide
  Sense strand starting at position 2981 of SEQ ID NO: 588088
caggaaauguuggcugaau

SEQ ID NO: 841257 - RNA, 19 nt, Artificial Sequence
  Description of Artificial Sequence: Synthetic oligonucleotide
  Antisense strand to SEQ ID NO: 841256
auucagccaacauuuccug

SEQ ID NO: 841258 - RNA, 19 nt, Artificial Sequence
  Description of Artificial Sequence: Synthetic oligonucleotide
  Sense strand starting at position 2982 of SEQ ID NO: 588088
aggaaauguuggcugaaua

SEQ ID NO: 841259 - RNA, 19 nt, Artificial Sequence
  Description of Artificial Sequence: Synthetic oligonucleotide
  Antisense strand to SEQ ID NO: 841258
uauucagccaacauuuccu

SEQ ID NO: 841260 - RNA, 19 nt, Artificial Sequence
  Description of Artificial Sequence: Synthetic oligonucleotide
  Sense strand starting at position 2983 of SEQ ID NO: 588088
ggaaauguuggcugaauau

SEQ ID NO: 841261 - RNA, 19 nt, Artificial Sequence
  Description of Artificial Sequence: Synthetic oligonucleotide
  Antisense strand to SEQ ID NO: 841260
auauucagccaacauuucc

SEQ ID NO: 841262 - RNA, 19 nt, Artificial Sequence
  Description of Artificial Sequence: Synthetic oligonucleotide
  Sense strand starting at position 2992 of SEQ ID NO: 588088
ggcugaauauuaguauauc

SEQ ID NO: 841263 - RNA, 19 nt, Artificial Sequence
  Description of Artificial Sequence: Synthetic oligonucleotide
  Antisense strand to SEQ ID NO: 841262
gauauacuaauauucagcc

SEQ ID NO: 841264 - RNA, 19 nt, Artificial Sequence
  Description of Artificial Sequence: Synthetic oligonucleotide
  Sense strand starting at position 3019 of SEQ ID NO: 588088
cuuggacugggcuauagau

SEQ ID NO: 841265 - RNA, 19 nt, Artificial Sequence
  Description of Artificial Sequence: Synthetic oligonucleotide
  Antisense strand to SEQ ID NO: 841264
aucuauagcccaguccaag

SEQ ID NO: 841266 - RNA, 19 nt, Artificial Sequence
  Description of Artificial Sequence: Synthetic oligonucleotide
  Sense strand starting at position 3048 of SEQ ID NO: 588088
uguuuaaacuagccaggaa

SEQ ID NO: 841267 - RNA, 19 nt, Artificial Sequence
  Description of Artificial Sequence: Synthetic oligonucleotide
  Antisense strand to SEQ ID NO: 841266
uuccuggcuaguuuaaaca

SEQ ID NO: 841268 - RNA, 19 nt, Artificial Sequence
  Description of Artificial Sequence: Synthetic oligonucleotide
  Sense strand starting at position 3070 of SEQ ID NO: 588088
guuagcugccuauugcauu

SEQ ID NO: 841269 - RNA, 19 nt, Artificial Sequence
  Description of Artificial Sequence: Synthetic oligonucleotide
  Antisense strand to SEQ ID NO: 841268
aaugcaauaggcagcuaac

SEQ ID NO: 841270 - RNA, 19 nt, Artificial Sequence
  Description of Artificial Sequence: Synthetic oligonucleotide
  Sense strand starting at position 3218 of SEQ ID NO: 588088
auuacucucuaguccuaga

SEQ ID NO: 841271 - RNA, 19 nt, Artificial Sequence
  Description of Artificial Sequence: Synthetic oligonucleotide
  Antisense strand to SEQ ID NO: 841270
ucuaggacuagagaguaau

SEQ ID NO: 841272 - RNA, 19 nt, Artificial Sequence
  Description of Artificial Sequence: Synthetic oligonucleotide
  Sense strand starting at position 3223 of SEQ ID NO: 588088
ucucuaguccuagauugua

SEQ ID NO: 841273 - RNA, 19 nt, Artificial Sequence
  Description of Artificial Sequence: Synthetic oligonucleotide
  Antisense strand to SEQ ID NO: 841272
uacaaucuaggacuagaga

SEQ ID NO: 841274 - RNA, 19 nt, Artificial Sequence
  Description of Artificial Sequence: Synthetic oligonucleotide
  Sense strand starting at position 3226 of SEQ ID NO: 588088
cuaguccuagauuguaaga

SEQ ID NO: 841275 - RNA, 19 nt, Artificial Sequence
  Description of Artificial Sequence: Synthetic oligonucleotide
  Antisense strand to SEQ ID NO: 841274
ucuuacaaucuaggacuag

SEQ ID NO: 841276 - RNA, 19 nt, Artificial Sequence
  Description of Artificial Sequence: Synthetic oligonucleotide
  Sense strand starting at position 3257 of SEQ ID NO: 588088
gggaauacgcaguauguua

SEQ ID NO: 841277 - RNA, 19 nt, Artificial Sequence
  Description of Artificial Sequence: Synthetic oligonucleotide
  Antisense strand to SEQ ID NO: 841276
uaacauacugcguauuccc

SEQ ID NO: 841278 - RNA, 19 nt, Artificial Sequence
  Description of Artificial Sequence: Synthetic oligonucleotide
  Sense strand starting at position 3268 of SEQ ID NO: 588088
guauguuaaacauaguaga

SEQ ID NO: 841279 - RNA, 19 nt, Artificial Sequence
  Description of Artificial Sequence: Synthetic oligonucleotide
  Antisense strand to SEQ ID NO: 841278
ucuacuauguuuaacauac

SEQ ID NO: 841280 - RNA, 19 nt, Artificial Sequence
  Description of Artificial Sequence: Synthetic oligonucleotide
  Sense strand starting at position 3278 of SEQ ID NO: 588088
cauaguagacguugaauaa

SEQ ID NO: 841281 - RNA, 19 nt, Artificial Sequence
  Description of Artificial Sequence: Synthetic oligonucleotide
  Antisense strand to SEQ ID NO: 841280
uuauucaacgucuacuaug

SEQ ID NO: 841282 - RNA, 19 nt, Artificial Sequence
  Description of Artificial Sequence: Synthetic oligonucleotide
  Sense strand starting at position 3287 of SEQ ID NO: 588088
cguugaauaaauggauauu

SEQ ID NO: 841283 - RNA, 19 nt, Artificial Sequence
  Description of Artificial Sequence: Synthetic oligonucleotide
  Antisense strand to SEQ ID NO: 841282
aauauccauuuauucaacg

SEQ ID NO: 841284 - RNA, 19 nt, Artificial Sequence
  Description of Artificial Sequence: Synthetic oligonucleotide
  Sense strand starting at position 3310 of SEQ ID NO: 588088
aaaugaaccgaguaugucu

SEQ ID NO: 841285 - RNA, 19 nt, Artificial Sequence
  Description of Artificial Sequence: Synthetic oligonucleotide
  Antisense strand to SEQ ID NO: 841284
agacauacucgguucauuu

SEQ ID NO: 841286 - RNA, 19 nt, Artificial Sequence
  Description of Artificial Sequence: Synthetic oligonucleotide
  Sense strand starting at position 3315 of SEQ ID NO: 588088
aaccgaguaugucugaaga

SEQ ID NO: 841287 - RNA, 19 nt, Artificial Sequence
  Description of Artificial Sequence: Synthetic oligonucleotide
  Antisense strand to SEQ ID NO: 841286
ucuucagacauacucgguu

SEQ ID NO: 841288 - RNA, 19 nt, Artificial Sequence
  Description of Artificial Sequence: Synthetic oligonucleotide
  Sense strand starting at position 3406 of SEQ ID NO: 588088
uguuaaucuggcugauaga

SEQ ID NO: 841289 - RNA, 19 nt, Artificial Sequence
  Description of Artificial Sequence: Synthetic oligonucleotide
  Antisense strand to SEQ ID NO: 841288
ucuaucagccagauuaaca

SEQ ID NO: 841290 - RNA, 19 nt, Artificial Sequence
  Description of Artificial Sequence: Synthetic oligonucleotide
  Sense strand starting at position 3407 of SEQ ID NO: 588088
guuaaucuggcugauagag

SEQ ID NO: 841291 - RNA, 19 nt, Artificial Sequence
  Description of Artificial Sequence: Synthetic oligonucleotide
  Antisense strand to SEQ ID NO: 841290
cucuaucagccagauuaac

SEQ ID NO: 841292 - RNA, 19 nt, Artificial Sequence
  Description of Artificial Sequence: Synthetic oligonucleotide
  Sense strand starting at position 3434 of SEQ ID NO: 588088
acuuguuggcccuagaaau

SEQ ID NO: 841293 - RNA, 19 nt, Artificial Sequence
  Description of Artificial Sequence: Synthetic oligonucleotide
  Antisense strand to SEQ ID NO: 841292
auuucuagggccaacaagu

SEQ ID NO: 841294 - RNA, 19 nt, Artificial Sequence
  Description of Artificial Sequence: Synthetic oligonucleotide
  Sense strand starting at position 3469 of SEQ ID NO: 588088
uguguuuaucuagccguga

SEQ ID NO: 841295 - RNA, 19 nt, Artificial Sequence
  Description of Artificial Sequence: Synthetic oligonucleotide
  Antisense strand to SEQ ID NO: 841294
ucacggcuagauaaacaca

SEQ ID NO: 841296 - RNA, 19 nt, Artificial Sequence
  Description of Artificial Sequence: Synthetic oligonucleotide
  Sense strand starting at position 3514 of SEQ ID NO: 588088
gugaaauuuguguggcaga

SEQ ID NO: 841297 - RNA, 19 nt, Artificial Sequence
  Description of Artificial Sequence: Synthetic oligonucleotide
  Antisense strand to SEQ ID NO: 841296
ucugccacacaaauuucac

SEQ ID NO: 841298 - RNA, 19 nt, Artificial Sequence
  Description of Artificial Sequence: Synthetic oligonucleotide
  Sense strand starting at position 3530 of SEQ ID NO: 588088
agagauaugucuucuuaac

SEQ ID NO: 841299 - RNA, 19 nt, Artificial Sequence
  Description of Artificial Sequence: Synthetic oligonucleotide
  Antisense strand to SEQ ID NO: 841298
guuaagaagacauaucucu

SEQ ID NO: 841300 - RNA, 19 nt, Artificial Sequence
  Description of Artificial Sequence: Synthetic oligonucleotide
  Sense strand starting at position 3562 of SEQ ID NO: 588088
ccuauugugaaguagguua

SEQ ID NO: 841301 - RNA, 19 nt, Artificial Sequence
  Description of Artificial Sequence: Synthetic oligonucleotide
  Antisense strand to SEQ ID NO: 841300
uaaccuacuucacaauagg

SEQ ID NO: 841302 - RNA, 19 nt, Artificial Sequence
  Description of Artificial Sequence: Synthetic oligonucleotide
  Sense strand starting at position 3567 of SEQ ID NO: 588088
ugugaaguagguuaauaug

SEQ ID NO: 841303 - RNA, 19 nt, Artificial Sequence
  Description of Artificial Sequence: Synthetic oligonucleotide
  Antisense strand to SEQ ID NO: 841302
cauauuaaccuacuucaca

SEQ ID NO: 841304 - RNA, 19 nt, Artificial Sequence
  Description of Artificial Sequence: Synthetic oligonucleotide
  Sense strand starting at position 3646 of SEQ ID NO: 588088
agucauaacuccuuugaga

SEQ ID NO: 841305 - RNA, 19 nt, Artificial Sequence
  Description of Artificial Sequence: Synthetic oligonucleotide
  Antisense strand to SEQ ID NO: 841304
ucucaaaggaguuaugacu

SEQ ID NO: 841306 - RNA, 19 nt, Artificial Sequence
  Description of Artificial Sequence: Synthetic oligonucleotide
  Sense strand starting at position 3716 of SEQ ID NO: 588088
guaacuuauccucauaggu

SEQ ID NO: 841307 - RNA, 19 nt, Artificial Sequence
  Description of Artificial Sequence: Synthetic oligonucleotide
  Antisense strand to SEQ ID NO: 841306
accuaugaggauaaguuac

SEQ ID NO: 841308 - RNA, 19 nt, Artificial Sequence
  Description of Artificial Sequence: Synthetic oligonucleotide
  Sense strand starting at position 3769 of SEQ ID NO: 588088
gcuggaugauucuuuauua

SEQ ID NO: 841309 - RNA, 19 nt, Artificial Sequence
  Description of Artificial Sequence: Synthetic oligonucleotide
  Antisense strand to SEQ ID NO: 841308
uaauaaagaaucauccagc

SEQ ID NO: 841310 - RNA, 19 nt, Artificial Sequence
  Description of Artificial Sequence: Synthetic oligonucleotide
  Sense strand starting at position 3770 of SEQ ID NO: 588088
cuggaugauucuuuauuau

SEQ ID NO: 841311 - RNA, 19 nt, Artificial Sequence
  Description of Artificial Sequence: Synthetic oligonucleotide
  Antisense strand to SEQ ID NO: 841310
auaauaaagaaucauccag

SEQ ID NO: 841312 - RNA, 19 nt, Artificial Sequence
  Description of Artificial Sequence: Synthetic oligonucleotide
  Sense strand starting at position 3966 of SEQ ID NO: 588088
gcauaaugguaacuuuaug

SEQ ID NO: 841313 - RNA, 19 nt, Artificial Sequence
  Description of Artificial Sequence: Synthetic oligonucleotide
  Antisense strand to SEQ ID NO: 841312
cauaaaguuaccauuaugc

SEQ ID NO: 841314 - RNA, 19 nt, Artificial Sequence
  Description of Artificial Sequence: Synthetic oligonucleotide
  Sense strand starting at position 47 of SEQ ID NO: 588089
uagcaaugaccacagugau

SEQ ID NO: 841315 - RNA, 19 nt, Artificial Sequence
  Description of Artificial Sequence: Synthetic oligonucleotide
  Antisense strand to SEQ ID NO: 841314
aucacuguggucauugcua

SEQ ID NO: 841316 - RNA, 19 nt, Artificial Sequence
  Description of Artificial Sequence: Synthetic oligonucleotide
  Sense strand starting at position 439 of SEQ ID NO: 588089
cagggagaaccgugagaua

SEQ ID NO: 841317 - RNA, 19 nt, Artificial Sequence
  Description of Artificial Sequence: Synthetic oligonucleotide
  Antisense strand to SEQ ID NO: 841316
uaucucacgguucucccug

SEQ ID NO: 841318 - RNA, 19 nt, Artificial Sequence
  Description of Artificial Sequence: Synthetic oligonucleotide
  Sense strand starting at position 469 of SEQ ID NO: 588089
gggcuaaagccagauuccu

SEQ ID NO: 841319 - RNA, 19 nt, Artificial Sequence
  Description of Artificial Sequence: Synthetic oligonucleotide
  Antisense strand to SEQ ID NO: 841318
aggaaucuggcuuuagccc

SEQ ID NO: 841320 - RNA, 19 nt, Artificial Sequence
  Description of Artificial Sequence: Synthetic oligonucleotide
  Sense strand starting at position 513 of SEQ ID NO: 588089
uguguaaugcaacaaaguu

SEQ ID NO: 841321 - RNA, 19 nt, Artificial Sequence
  Description of Artificial Sequence: Synthetic oligonucleotide
  Antisense strand to SEQ ID NO: 841320
aacuuuguugcauuacaca

SEQ ID NO: 841322 - RNA, 19 nt, Artificial Sequence
  Description of Artificial Sequence: Synthetic oligonucleotide
  Sense strand starting at position 526 of SEQ ID NO: 588089
aaaguuuaauacgggagaa

SEQ ID NO: 841323 - RNA, 19 nt, Artificial Sequence
  Description of Artificial Sequence: Synthetic oligonucleotide
  Antisense strand to SEQ ID NO: 841322
uucucccguauuaaacuuu

SEQ ID NO: 841324 - RNA, 19 nt, Artificial Sequence
  Description of Artificial Sequence: Synthetic oligonucleotide
  Sense strand starting at position 544 of SEQ ID NO: 588089
acagaaggauauugucaua

SEQ ID NO: 841325 - RNA, 19 nt, Artificial Sequence
  Description of Artificial Sequence: Synthetic oligonucleotide
  Antisense strand to SEQ ID NO: 841324
uaugacaauauccuucugu

SEQ ID NO: 841326 - RNA, 19 nt, Artificial Sequence
  Description of Artificial Sequence: Synthetic oligonucleotide
  Sense strand starting at position 547 of SEQ ID NO: 588089
gaaggauauugucauagcu

SEQ ID NO: 841327 - RNA, 19 nt, Artificial Sequence
  Description of Artificial Sequence: Synthetic oligonucleotide
  Antisense strand to SEQ ID NO: 841326
agcuaugacaauauccuuc

SEQ ID NO: 841328 - RNA, 19 nt, Artificial Sequence
  Description of Artificial Sequence: Synthetic oligonucleotide
  Sense strand starting at position 549 of SEQ ID NO: 588089
aggauauugucauagcuac

SEQ ID NO: 841329 - RNA, 19 nt, Artificial Sequence
  Description of Artificial Sequence: Synthetic oligonucleotide
  Antisense strand to SEQ ID NO: 841328
guagcuaugacaauauccu

SEQ ID NO: 841330 - RNA, 19 nt, Artificial Sequence
  Description of Artificial Sequence: Synthetic oligonucleotide
  Sense strand starting at position 744 of SEQ ID NO: 588089
gccaacaugcccugcaauu

SEQ ID NO: 841331 - RNA, 19 nt, Artificial Sequence
  Description of Artificial Sequence: Synthetic oligonucleotide
  Antisense strand to SEQ ID NO: 841330
aauugcagggcauguuggc

SEQ ID NO: 841332 - RNA, 19 nt, Artificial Sequence
  Description of Artificial Sequence: Synthetic oligonucleotide
  Sense strand starting at position 1226 of SEQ ID NO: 588089
aaagauccucugugaugaa

SEQ ID NO: 841333 - RNA, 19 nt, Artificial Sequence
  Description of Artificial Sequence: Synthetic oligonucleotide
  Antisense strand to SEQ ID NO: 841332
uucaucacagaggaucuuu

SEQ ID NO: 841334 - RNA, 19 nt, Artificial Sequence
  Description of Artificial Sequence: Synthetic oligonucleotide
  Sense strand starting at position 1229 of SEQ ID NO: 588089
gauccucugugaugaacaa

SEQ ID NO: 841335 - RNA, 19 nt, Artificial Sequence
  Description of Artificial Sequence: Synthetic oligonucleotide
  Antisense strand to SEQ ID NO: 841334
uuguucaucacagaggauc

SEQ ID NO: 841336 - RNA, 19 nt, Artificial Sequence
  Description of Artificial Sequence: Synthetic oligonucleotide
  Sense strand starting at position 1352 of SEQ ID NO: 588089
ggaggcaaaugguucaguu

SEQ ID NO: 841337 - RNA, 19 nt, Artificial Sequence
  Description of Artificial Sequence: Synthetic oligonucleotide
  Antisense strand to SEQ ID NO: 841336
aacugaaccauuugccucc

SEQ ID NO: 841338 - RNA, 19 nt, Artificial Sequence
  Description of Artificial Sequence: Synthetic oligonucleotide
  Sense strand starting at position 1361 of SEQ ID NO: 588089
ugguucaguuauggagcua

SEQ ID NO: 841339 - RNA, 19 nt, Artificial Sequence
  Description of Artificial Sequence: Synthetic oligonucleotide
  Antisense strand to SEQ ID NO: 841338
uagcuccauaacugaacca

SEQ ID NO: 841340 - RNA, 19 nt, Artificial Sequence
  Description of Artificial Sequence: Synthetic oligonucleotide
  Sense strand starting at position 1425 of SEQ ID NO: 588089
aagcgaaucucggguuucu

SEQ ID NO: 841341 - RNA, 19 nt, Artificial Sequence
  Description of Artificial Sequence: Synthetic oligonucleotide
  Antisense strand to SEQ ID NO: 841340
agaaacccgagauucgcuu

SEQ ID NO: 841342 - RNA, 19 nt, Artificial Sequence
  Description of Artificial Sequence: Synthetic oligonucleotide
  Sense strand starting at position 1524 of SEQ ID NO: 588089
gggagcuuuggguguuaug

SEQ ID NO: 841343 - RNA, 19 nt, Artificial Sequence
  Description of Artificial Sequence: Synthetic oligonucleotide
  Antisense strand to SEQ ID NO: 841342
cauaacacccaaagcuccc

SEQ ID NO: 841344 - RNA, 19 nt, Artificial Sequence
  Description of Artificial Sequence: Synthetic oligonucleotide
  Sense strand starting at position 1534 of SEQ ID NO: 588089
gguguuaugaaucaagucu

SEQ ID NO: 841345 - RNA, 19 nt, Artificial Sequence
  Description of Artificial Sequence: Synthetic oligonucleotide
  Antisense strand to SEQ ID NO: 841344
agacuugauucauaacacc

SEQ ID NO: 841346 - RNA, 19 nt, Artificial Sequence
  Description of Artificial Sequence: Synthetic oligonucleotide
  Sense strand starting at position 1560 of SEQ ID NO: 588089
cgggucucaucggagcgau

SEQ ID NO: 841347 - RNA, 19 nt, Artificial Sequence
  Description of Artificial Sequence: Synthetic oligonucleotide
  Antisense strand to SEQ ID NO: 841346
aucgcuccgaugagacccg

SEQ ID NO: 841348 - RNA, 19 nt, Artificial Sequence
  Description of Artificial Sequence: Synthetic oligonucleotide
  Sense strand starting at position 1593 of SEQ ID NO: 588089
agguguggaaagugucuau

SEQ ID NO: 841349 - RNA, 19 nt, Artificial Sequence
  Description of Artificial Sequence: Synthetic oligonucleotide
  Antisense strand to SEQ ID NO: 841348
auagacacuuuccacaccu

SEQ ID NO: 841350 - RNA, 19 nt, Artificial Sequence
  Description of Artificial Sequence: Synthetic oligonucleotide
  Sense strand starting at position 1596 of SEQ ID NO: 588089
uguggaaagugucuaugag

SEQ ID NO: 841351 - RNA, 19 nt, Artificial Sequence
  Description of Artificial Sequence: Synthetic oligonucleotide
  Antisense strand to SEQ ID NO: 841350
cucauagacacuuuccaca

SEQ ID NO: 841352 - RNA, 19 nt, Artificial Sequence
  Description of Artificial Sequence: Synthetic oligonucleotide
  Sense strand starting at position 1600 of SEQ ID NO: 588089
gaaagugucuaugagggau

SEQ ID NO: 841353 - RNA, 19 nt, Artificial Sequence
  Description of Artificial Sequence: Synthetic oligonucleotide
  Antisense strand to SEQ ID NO: 841352
aucccucauagacacuuuc

SEQ ID NO: 841354 - RNA, 19 nt, Artificial Sequence
  Description of Artificial Sequence: Synthetic oligonucleotide
  Sense strand starting at position 1604 of SEQ ID NO: 588089
gugucuaugagggauaacu

SEQ ID NO: 841355 - RNA, 19 nt, Artificial Sequence
  Description of Artificial Sequence: Synthetic oligonucleotide
  Antisense strand to SEQ ID NO: 841354
aguuaucccucauagacac

SEQ ID NO: 841356 - RNA, 19 nt, Artificial Sequence
  Description of Artificial Sequence: Synthetic oligonucleotide
  Sense strand starting at position 1678 of SEQ ID NO: 588089
gcaaccggguccugacaaa

SEQ ID NO: 841357 - RNA, 19 nt, Artificial Sequence
  Description of Artificial Sequence: Synthetic oligonucleotide
  Antisense strand to SEQ ID NO: 841356
uuugucaggacccgguugc

SEQ ID NO: 841358 - RNA, 19 nt, Artificial Sequence
  Description of Artificial Sequence: Synthetic oligonucleotide
  Sense strand starting at position 1841 of SEQ ID NO: 588089
gcagaauuagaagguuuga

SEQ ID NO: 841359 - RNA, 19 nt, Artificial Sequence
  Description of Artificial Sequence: Synthetic oligonucleotide
  Antisense strand to SEQ ID NO: 841358
ucaaaccuucuaauucugc

SEQ ID NO: 841360 - RNA, 19 nt, Artificial Sequence
  Description of Artificial Sequence: Synthetic oligonucleotide
  Sense strand starting at position 1985 of SEQ ID NO: 588089
agcggaaguuguuauccga

SEQ ID NO: 841361 - RNA, 19 nt, Artificial Sequence
  Description of Artificial Sequence: Synthetic oligonucleotide
  Antisense strand to SEQ ID NO: 841360
ucggauaacaacuuccgcu

SEQ ID NO: 841362 - RNA, 19 nt, Artificial Sequence
  Description of Artificial Sequence: Synthetic oligonucleotide
  Sense strand starting at position 1988 of SEQ ID NO: 588089
ggaaguuguuauccgaaag

SEQ ID NO: 841363 - RNA, 19 nt, Artificial Sequence
  Description of Artificial Sequence: Synthetic oligonucleotide
  Antisense strand to SEQ ID NO: 841362
cuuucggauaacaacuucc

SEQ ID NO: 841364 - RNA, 19 nt, Artificial Sequence
  Description of Artificial Sequence: Synthetic oligonucleotide
  Sense strand starting at position 2310 of SEQ ID NO: 588089
ggccuaaagguuuauccua

SEQ ID NO: 841365 - RNA, 19 nt, Artificial Sequence
  Description of Artificial Sequence: Synthetic oligonucleotide
  Antisense strand to SEQ ID NO: 841364
uaggauaaaccuuuaggcc

SEQ ID NO: 841366 - RNA, 19 nt, Artificial Sequence
  Description of Artificial Sequence: Synthetic oligonucleotide
  Sense strand starting at position 2317 of SEQ ID NO: 588089
agguuuauccuacaaagug

SEQ ID NO: 841367 - RNA, 19 nt, Artificial Sequence
  Description of Artificial Sequence: Synthetic oligonucleotide
  Antisense strand to SEQ ID NO: 841366
cacuuuguaggauaaaccu

SEQ ID NO: 841368 - RNA, 19 nt, Artificial Sequence
  Description of Artificial Sequence: Synthetic oligonucleotide
  Sense strand starting at position 2355 of SEQ ID NO: 588089
gugugaacagacugucacu

SEQ ID NO: 841369 - RNA, 19 nt, Artificial Sequence
  Description of Artificial Sequence: Synthetic oligonucleotide
  Antisense strand to SEQ ID NO: 841368
agugacagucuguucacac

SEQ ID NO: 841370 - RNA, 19 nt, Artificial Sequence
  Description of Artificial Sequence: Synthetic oligonucleotide
  Sense strand starting at position 2652 of SEQ ID NO: 588089
ugaagcaagucacaugauu

SEQ ID NO: 841371 - RNA, 19 nt, Artificial Sequence
  Description of Artificial Sequence: Synthetic oligonucleotide
  Antisense strand to SEQ ID NO: 841370
aaucaugugacuugcuuca

SEQ ID NO: 841372 - RNA, 19 nt, Artificial Sequence
  Description of Artificial Sequence: Synthetic oligonucleotide
  Sense strand starting at position 2722 of SEQ ID NO: 588089
agcauaaguuagcauuaau

SEQ ID NO: 841373 - RNA, 19 nt, Artificial Sequence
  Description of Artificial Sequence: Synthetic oligonucleotide
  Antisense strand to SEQ ID NO: 841372
auuaaugcuaacuuaugcu

SEQ ID NO: 841374 - RNA, 19 nt, Artificial Sequence
  Description of Artificial Sequence: Synthetic oligonucleotide
  Sense strand starting at position 2889 of SEQ ID NO: 588089
cggccaggccuggguaaua

SEQ ID NO: 841375 - RNA, 19 nt, Artificial Sequence
  Description of Artificial Sequence: Synthetic oligonucleotide
  Antisense strand to SEQ ID NO: 841374
uauuacccaggccuggccg

SEQ ID NO: 841376 - RNA, 19 nt, Artificial Sequence
  Description of Artificial Sequence: Synthetic oligonucleotide
  Sense strand starting at position 3393 of SEQ ID NO: 588089
gauuccaggucuuagguaa

SEQ ID NO: 841377 - RNA, 19 nt, Artificial Sequence
  Description of Artificial Sequence: Synthetic oligonucleotide
  Antisense strand to SEQ ID NO: 841376
uuaccuaagaccuggaauc

SEQ ID NO: 841378 - RNA, 19 nt, Artificial Sequence
  Description of Artificial Sequence: Synthetic oligonucleotide
  Sense strand starting at position 3400 of SEQ ID NO: 588089
ggucuuagguaaucacuua

SEQ ID NO: 841379 - RNA, 19 nt, Artificial Sequence
  Description of Artificial Sequence: Synthetic oligonucleotide
  Antisense strand to SEQ ID NO: 841378
uaagugauuaccuaagacc

SEQ ID NO: 841380 - RNA, 19 nt, Artificial Sequence
  Description of Artificial Sequence: Synthetic oligonucleotide
  Sense strand starting at position 3700 of SEQ ID NO: 588089
gcaggagaacggugugaaa

SEQ ID NO: 841381 - RNA, 19 nt, Artificial Sequence
  Description of Artificial Sequence: Synthetic oligonucleotide
  Antisense strand to SEQ ID NO: 841380
uuucacaccguucuccugc

SEQ ID NO: 841382 - RNA, 19 nt, Artificial Sequence
  Description of Artificial Sequence: Synthetic oligonucleotide
  Sense strand starting at position 3837 of SEQ ID NO: 588089
uuaucugucaugugacguu

SEQ ID NO: 841383 - RNA, 19 nt, Artificial Sequence
  Description of Artificial Sequence: Synthetic oligonucleotide
  Antisense strand to SEQ ID NO: 841382
aacgucacaugacagauaa

SEQ ID NO: 841384 - RNA, 19 nt, Artificial Sequence
  Description of Artificial Sequence: Synthetic oligonucleotide
  Sense strand starting at position 3850 of SEQ ID NO: 588089
gacguuaugcuagagucag

SEQ ID NO: 841385 - RNA, 19 nt, Artificial Sequence
  Description of Artificial Sequence: Synthetic oligonucleotide
  Antisense strand to SEQ ID NO: 841384
cugacucuagcauaacguc

SEQ ID NO: 841386 - RNA, 19 nt, Artificial Sequence
  Description of Artificial Sequence: Synthetic oligonucleotide
  Sense strand starting at position 3882 of SEQ ID NO: 588089
ccaauuauauaggguuaaa

SEQ ID NO: 841387 - RNA, 19 nt, Artificial Sequence
  Description of Artificial Sequence: Synthetic oligonucleotide
  Antisense strand to SEQ ID NO: 841386
uuuaacccuauauaauugg

SEQ ID NO: 841388 - RNA, 19 nt, Artificial Sequence
  Description of Artificial Sequence: Synthetic oligonucleotide
  Sense strand starting at position 3 of SEQ ID NO: 588090
ccuggaggacaucguguaa

SEQ ID NO: 841389 - RNA, 19 nt, Artificial Sequence
  Description of Artificial Sequence: Synthetic oligonucleotide
  Antisense strand to SEQ ID NO: 841388
uuacacgauguccuccagg

SEQ ID NO: 841390 - RNA, 19 nt, Artificial Sequence
  Description of Artificial Sequence: Synthetic oligonucleotide
  Sense strand starting at position 7 of SEQ ID NO: 588090
gaggacaucguguaaguga

SEQ ID NO: 841391 - RNA, 19 nt, Artificial Sequence
  Description of Artificial Sequence: Synthetic oligonucleotide
  Antisense strand to SEQ ID NO: 841390
ucacuuacacgauguccuc

SEQ ID NO: 841392 - RNA, 19 nt, Artificial Sequence
  Description of Artificial Sequence: Synthetic oligonucleotide
  Sense strand starting at position 107 of SEQ ID NO: 588090
accagagacugguuacuca

SEQ ID NO: 841393 - RNA, 19 nt, Artificial Sequence
  Description of Artificial Sequence: Synthetic oligonucleotide
  Antisense strand to SEQ ID NO: 841392
ugaguaaccagucucuggu

SEQ ID NO: 841394 - RNA, 19 nt, Artificial Sequence
  Description of Artificial Sequence: Synthetic oligonucleotide
  Sense strand starting at position 115 of SEQ ID NO: 588090
cugguuacucagggauaag

SEQ ID NO: 841395 - RNA, 19 nt, Artificial Sequence
  Description of Artificial Sequence: Synthetic oligonucleotide
  Antisense strand to SEQ ID NO: 841394
cuuaucccugaguaaccag

SEQ ID NO: 841396 - RNA, 19 nt, Artificial Sequence
  Description of Artificial Sequence: Synthetic oligonucleotide
  Sense strand starting at position 298 of SEQ ID NO: 588090
ugacaugauggauguauua

SEQ ID NO: 841397 - RNA, 19 nt, Artificial Sequence
  Description of Artificial Sequence: Synthetic oligonucleotide
  Antisense strand to SEQ ID NO: 841396
uaauacauccaucauguca

SEQ ID NO: 841398 - RNA, 19 nt, Artificial Sequence
  Description of Artificial Sequence: Synthetic oligonucleotide
  Sense strand starting at position 305 of SEQ ID NO: 588090
auggauguauuaucucgau

SEQ ID NO: 841399 - RNA, 19 nt, Artificial Sequence
  Description of Artificial Sequence: Synthetic oligonucleotide
  Antisense strand to SEQ ID NO: 841398
aucgagauaauacauccau

SEQ ID NO: 841400 - RNA, 19 nt, Artificial Sequence
  Description of Artificial Sequence: Synthetic oligonucleotide
  Sense strand starting at position 821 of SEQ ID NO: 588090
ccgcacaguuauuuaauca

SEQ ID NO: 841401 - RNA, 19 nt, Artificial Sequence
  Description of Artificial Sequence: Synthetic oligonucleotide
  Antisense strand to SEQ ID NO: 841400
ugauuaaauaacugugcgg

SEQ ID NO: 841402 - RNA, 19 nt, Artificial Sequence
  Description of Artificial Sequence: Synthetic oligonucleotide
  Sense strand starting at position 862 of SEQ ID NO: 588090
uugacaaggucugcugaaa

SEQ ID NO: 841403 - RNA, 19 nt, Artificial Sequence
  Description of Artificial Sequence: Synthetic oligonucleotide
  Antisense strand to SEQ ID NO: 841402
uuucagcagaccuugucaa

SEQ ID NO: 841404 - RNA, 19 nt, Artificial Sequence
  Description of Artificial Sequence: Synthetic oligonucleotide
  Sense strand starting at position 972 of SEQ ID NO: 588090
ugguuuguccuagggacau

SEQ ID NO: 841405 - RNA, 19 nt, Artificial Sequence
  Description of Artificial Sequence: Synthetic oligonucleotide
  Antisense strand to SEQ ID NO: 841404
augucccuaggacaaacca

SEQ ID NO: 841406 - RNA, 19 nt, Artificial Sequence
  Description of Artificial Sequence: Synthetic oligonucleotide
  Sense strand starting at position 1021 of SEQ ID NO: 588090
gcaccuuuacgauauauua

SEQ ID NO: 841407 - RNA, 19 nt, Artificial Sequence
  Description of Artificial Sequence: Synthetic oligonucleotide
  Antisense strand to SEQ ID NO: 841406
uaauauaucguaaaggugc

SEQ ID NO: 841408 - RNA, 19 nt, Artificial Sequence
  Description of Artificial Sequence: Synthetic oligonucleotide
  Sense strand starting at position 1120 of SEQ ID NO: 588090
agggcauuaucagucaaca

SEQ ID NO: 841409 - RNA, 19 nt, Artificial Sequence
  Description of Artificial Sequence: Synthetic oligonucleotide
  Antisense strand to SEQ ID NO: 841408
uguugacugauaaugcccu

SEQ ID NO: 841410 - RNA, 19 nt, Artificial Sequence
  Description of Artificial Sequence: Synthetic oligonucleotide
  Sense strand starting at position 1221 of SEQ ID NO: 588090
agaaauagaucucugacgu

SEQ ID NO: 841411 - RNA, 19 nt, Artificial Sequence
  Description of Artificial Sequence: Synthetic oligonucleotide
  Antisense strand to SEQ ID NO: 841410
acgucagagaucuauuucu

SEQ ID NO: 841412 - RNA, 19 nt, Artificial Sequence
  Description of Artificial Sequence: Synthetic oligonucleotide
  Sense strand starting at position 1222 of SEQ ID NO: 588090
gaaauagaucucugacguc

SEQ ID NO: 841413 - RNA, 19 nt, Artificial Sequence
  Description of Artificial Sequence: Synthetic oligonucleotide
  Antisense strand to SEQ ID NO: 841412
gacgucagagaucuauuuc

SEQ ID NO: 841414 - RNA, 19 nt, Artificial Sequence
  Description of Artificial Sequence: Synthetic oligonucleotide
  Sense strand starting at position 1375 of SEQ ID NO: 588090
cugggaaacucacuuguaa

SEQ ID NO: 841415 - RNA, 19 nt, Artificial Sequence
  Description of Artificial Sequence: Synthetic oligonucleotide
  Antisense strand to SEQ ID NO: 841414
uuacaagugaguuucccag

SEQ ID NO: 841416 - RNA, 19 nt, Artificial Sequence
  Description of Artificial Sequence: Synthetic oligonucleotide
  Sense strand starting at position 1427 of SEQ ID NO: 588090
guauuccuugcagauguaa

SEQ ID NO: 841417 - RNA, 19 nt, Artificial Sequence
  Description of Artificial Sequence: Synthetic oligonucleotide
  Antisense strand to SEQ ID NO: 841416
uuacaucugcaaggaauac

SEQ ID NO: 841418 - RNA, 19 nt, Artificial Sequence
  Description of Artificial Sequence: Synthetic oligonucleotide
  Sense strand starting at position 2194 of SEQ ID NO: 588090
gagcaagcauuauugagga

SEQ ID NO: 841419 - RNA, 19 nt, Artificial Sequence
  Description of Artificial Sequence: Synthetic oligonucleotide
  Antisense strand to SEQ ID NO: 841418
uccucaauaaugcuugcuc

SEQ ID NO: 841420 - RNA, 19 nt, Artificial Sequence
  Description of Artificial Sequence: Synthetic oligonucleotide
  Sense strand starting at position 2252 of SEQ ID NO: 588090
guucucaccuauucgagaa

SEQ ID NO: 841421 - RNA, 19 nt, Artificial Sequence
  Description of Artificial Sequence: Synthetic oligonucleotide
  Antisense strand to SEQ ID NO: 841420
uucucgaauaggugagaac

SEQ ID NO: 841422 - RNA, 19 nt, Artificial Sequence
  Description of Artificial Sequence: Synthetic oligonucleotide
  Sense strand starting at position 2264 of SEQ ID NO: 588090
ucgagaacuaaugggugua

SEQ ID NO: 841423 - RNA, 19 nt, Artificial Sequence
  Description of Artificial Sequence: Synthetic oligonucleotide
  Antisense strand to SEQ ID NO: 841422
uacacccauuaguucucga

SEQ ID NO: 841424 - RNA, 19 nt, Artificial Sequence
  Description of Artificial Sequence: Synthetic oligonucleotide
  Sense strand starting at position 2265 of SEQ ID NO: 588090
cgagaacuaauggguguau

SEQ ID NO: 841425 - RNA, 19 nt, Artificial Sequence
  Description of Artificial Sequence: Synthetic oligonucleotide
  Antisense strand to SEQ ID NO: 841424
auacacccauuaguucucg

SEQ ID NO: 841426 - RNA, 19 nt, Artificial Sequence
  Description of Artificial Sequence: Synthetic oligonucleotide
  Sense strand starting at position 2267 of SEQ ID NO: 588090
agaacuaauggguguaugu

SEQ ID NO: 841427 - RNA, 19 nt, Artificial Sequence
  Description of Artificial Sequence: Synthetic oligonucleotide
  Antisense strand to SEQ ID NO: 841426
acauacacccauuaguucu

SEQ ID NO: 841428 - RNA, 19 nt, Artificial Sequence
  Description of Artificial Sequence: Synthetic oligonucleotide
  Sense strand starting at position 2503 of SEQ ID NO: 588090
gaaguuagaugacuuagca

SEQ ID NO: 841429 - RNA, 19 nt, Artificial Sequence
  Description of Artificial Sequence: Synthetic oligonucleotide
  Antisense strand to SEQ ID NO: 841428
ugcuaagucaucuaacuuc

SEQ ID NO: 841430 - RNA, 19 nt, Artificial Sequence
  Description of Artificial Sequence: Synthetic oligonucleotide
  Sense strand starting at position 2738 of SEQ ID NO: 588090
cucacucuuguguauggau

SEQ ID NO: 841431 - RNA, 19 nt, Artificial Sequence
  Description of Artificial Sequence: Synthetic oligonucleotide
  Antisense strand to SEQ ID NO: 841430
auccauacacaagagugag

SEQ ID NO: 841432 - RNA, 19 nt, Artificial Sequence
  Description of Artificial Sequence: Synthetic oligonucleotide
  Sense strand starting at position 2791 of SEQ ID NO: 588090
cuuuguugagcugaagaau

SEQ ID NO: 841433 - RNA, 19 nt, Artificial Sequence
  Description of Artificial Sequence: Synthetic oligonucleotide
  Antisense strand to SEQ ID NO: 841432
auucuucagcucaacaaag

SEQ ID NO: 841434 - RNA, 19 nt, Artificial Sequence
  Description of Artificial Sequence: Synthetic oligonucleotide
  Sense strand starting at position 2794 of SEQ ID NO: 588090
uguugagcugaagaauauu

SEQ ID NO: 841435 - RNA, 19 nt, Artificial Sequence
  Description of Artificial Sequence: Synthetic oligonucleotide
  Antisense strand to SEQ ID NO: 841434
aauauucuucagcucaaca

SEQ ID NO: 841436 - RNA, 19 nt, Artificial Sequence
  Description of Artificial Sequence: Synthetic oligonucleotide
  Sense strand starting at position 2835 of SEQ ID NO: 588090
gucuaugugacugauguga

SEQ ID NO: 841437 - RNA, 19 nt, Artificial Sequence
  Description of Artificial Sequence: Synthetic oligonucleotide
  Antisense strand to SEQ ID NO: 841436
ucacaucagucacauagac

SEQ ID NO: 841438 - RNA, 19 nt, Artificial Sequence
  Description of Artificial Sequence: Synthetic oligonucleotide
  Sense strand starting at position 2846 of SEQ ID NO: 588090
ugaugugacucugccacaa

SEQ ID NO: 841439 - RNA, 19 nt, Artificial Sequence
  Description of Artificial Sequence: Synthetic oligonucleotide
  Antisense strand to SEQ ID NO: 841438
uuguggcagagucacauca

SEQ ID NO: 841440 - RNA, 19 nt, Artificial Sequence
  Description of Artificial Sequence: Synthetic oligonucleotide
  Sense strand starting at position 2959 of SEQ ID NO: 588090
cucugcagcguguuuacaa

SEQ ID NO: 841441 - RNA, 19 nt, Artificial Sequence
  Description of Artificial Sequence: Synthetic oligonucleotide
  Antisense strand to SEQ ID NO: 841440
uuguaaacacgcugcagag

SEQ ID NO: 841442 - RNA, 19 nt, Artificial Sequence
  Description of Artificial Sequence: Synthetic oligonucleotide
  Sense strand starting at position 2992 of SEQ ID NO: 588090
aucuguuucuaagucaaga

SEQ ID NO: 841443 - RNA, 19 nt, Artificial Sequence
  Description of Artificial Sequence: Synthetic oligonucleotide
  Antisense strand to SEQ ID NO: 841442
ucuugacuuagaaacagau

SEQ ID NO: 841444 - RNA, 19 nt, Artificial Sequence
  Description of Artificial Sequence: Synthetic oligonucleotide
  Sense strand starting at position 2997 of SEQ ID NO: 588090
uuucuaagucaagauaguu

SEQ ID NO: 841445 - RNA, 19 nt, Artificial Sequence
  Description of Artificial Sequence: Synthetic oligonucleotide
  Antisense strand to SEQ ID NO: 841444
aacuaucuugacuuagaaa

SEQ ID NO: 841446 - RNA, 19 nt, Artificial Sequence
  Description of Artificial Sequence: Synthetic oligonucleotide
  Sense strand starting at position 3009 of SEQ ID NO: 588090
gauaguuucuuucugagac

SEQ ID NO: 841447 - RNA, 19 nt, Artificial Sequence
  Description of Artificial Sequence: Synthetic oligonucleotide
  Antisense strand to SEQ ID NO: 841446
gucucagaaagaaacuauc

SEQ ID NO: 841448 - RNA, 19 nt, Artificial Sequence
  Description of Artificial Sequence: Synthetic oligonucleotide
  Sense strand starting at position 3054 of SEQ ID NO: 588090
gagcauuggcacgaucaug

SEQ ID NO: 841449 - RNA, 19 nt, Artificial Sequence
  Description of Artificial Sequence: Synthetic oligonucleotide
  Antisense strand to SEQ ID NO: 841448
caugaucgugccaaugcuc

SEQ ID NO: 841450 - RNA, 19 nt, Artificial Sequence
  Description of Artificial Sequence: Synthetic oligonucleotide
  Sense strand starting at position 3474 of SEQ ID NO: 588090
ugauuaauugcugguauca

SEQ ID NO: 841451 - RNA, 19 nt, Artificial Sequence
  Description of Artificial Sequence: Synthetic oligonucleotide
  Antisense strand to SEQ ID NO: 841450
ugauaccagcaauuaauca

SEQ ID NO: 841452 - RNA, 19 nt, Artificial Sequence
  Description of Artificial Sequence: Synthetic oligonucleotide
  Sense strand starting at position 3687 of SEQ ID NO: 588090
agguauugucuagggagca

SEQ ID NO: 841453 - RNA, 19 nt, Artificial Sequence
  Description of Artificial Sequence: Synthetic oligonucleotide
  Antisense strand to SEQ ID NO: 841452
ugcucccuagacaauaccu

SEQ ID NO: 841454 - RNA, 19 nt, Artificial Sequence
  Description of Artificial Sequence: Synthetic oligonucleotide
  Sense strand starting at position 3700 of SEQ ID NO: 588090
ggagcaucaguacaugacu

SEQ ID NO: 841455 - RNA, 19 nt, Artificial Sequence
  Description of Artificial Sequence: Synthetic oligonucleotide
  Antisense strand to SEQ ID NO: 841454
agucauguacugaugcucc

SEQ ID NO: 841456 - RNA, 19 nt, Artificial Sequence
  Description of Artificial Sequence: Synthetic oligonucleotide
  Sense strand starting at position 3703 of SEQ ID NO: 588090
gcaucaguacaugacugaa

SEQ ID NO: 841457 - RNA, 19 nt, Artificial Sequence
  Description of Artificial Sequence: Synthetic oligonucleotide
  Antisense strand to SEQ ID NO: 841456
uucagucauguacugaugc

SEQ ID NO: 841458 - RNA, 19 nt, Artificial Sequence
  Description of Artificial Sequence: Synthetic oligonucleotide
  Sense strand starting at position 3706 of SEQ ID NO: 588090
ucaguacaugacugaauga

SEQ ID NO: 841459 - RNA, 19 nt, Artificial Sequence
  Description of Artificial Sequence: Synthetic oligonucleotide
  Antisense strand to SEQ ID NO: 841458
ucauucagucauguacuga

SEQ ID NO: 841460 - RNA, 19 nt, Artificial Sequence
  Description of Artificial Sequence: Synthetic oligonucleotide
  Sense strand starting at position 3734 of SEQ ID NO: 588090
agaugaagugccugugaca

SEQ ID NO: 841461 - RNA, 19 nt, Artificial Sequence
  Description of Artificial Sequence: Synthetic oligonucleotide
  Antisense strand to SEQ ID NO: 841460
ugucacaggcacuucaucu

SEQ ID NO: 841462 - RNA, 19 nt, Artificial Sequence
  Description of Artificial Sequence: Synthetic oligonucleotide
  Sense strand starting at position 3836 of SEQ ID NO: 588090
cuuugcaaugggcaauaua

SEQ ID NO: 841463 - RNA, 19 nt, Artificial Sequence
  Description of Artificial Sequence: Synthetic oligonucleotide
  Antisense strand to SEQ ID NO: 841462
uauauugcccauugcaaag

SEQ ID NO: 841464 - RNA, 19 nt, Artificial Sequence
  Description of Artificial Sequence: Synthetic oligonucleotide
  Sense strand starting at position 3839 of SEQ ID NO: 588090
ugcaaugggcaauauauua

SEQ ID NO: 841465 - RNA, 19 nt, Artificial Sequence
  Description of Artificial Sequence: Synthetic oligonucleotide
  Antisense strand to SEQ ID NO: 841464
uaauauauugcccauugca

SEQ ID NO: 841466 - RNA, 19 nt, Artificial Sequence
  Description of Artificial Sequence: Synthetic oligonucleotide
  Sense strand starting at position 3949 of SEQ ID NO: 588090
ggcacuuuaccaggauaca

SEQ ID NO: 841467 - RNA, 19 nt, Artificial Sequence
  Description of Artificial Sequence: Synthetic oligonucleotide
  Antisense strand to SEQ ID NO: 841466
uguauccugguaaagugcc

SEQ ID NO: 841468 - RNA, 19 nt, Artificial Sequence
  Description of Artificial Sequence: Synthetic oligonucleotide
  Sense strand starting at position 53 of SEQ ID NO: 588092
agggcaaaccucugucauc

SEQ ID NO: 841469 - RNA, 19 nt, Artificial Sequence
  Description of Artificial Sequence: Synthetic oligonucleotide
  Antisense strand to SEQ ID NO: 841468
gaugacagagguuugcccu

SEQ ID NO: 841470 - RNA, 19 nt, Artificial Sequence
  Description of Artificial Sequence: Synthetic oligonucleotide
  Sense strand starting at position 92 of SEQ ID NO: 588092
cagcucugauguccaagau

SEQ ID NO: 841471 - RNA, 19 nt, Artificial Sequence
  Description of Artificial Sequence: Synthetic oligonucleotide
  Antisense strand to SEQ ID NO: 841470
aucuuggacaucagagcug

SEQ ID NO: 841472 - RNA, 19 nt, Artificial Sequence
  Description of Artificial Sequence: Synthetic oligonucleotide
  Sense strand starting at position 93 of SEQ ID NO: 588092
agcucugauguccaagauc

SEQ ID NO: 841473 - RNA, 19 nt, Artificial Sequence
  Description of Artificial Sequence: Synthetic oligonucleotide
  Antisense strand to SEQ ID NO: 841472
gaucuuggacaucagagcu

SEQ ID NO: 841474 - RNA, 19 nt, Artificial Sequence
  Description of Artificial Sequence: Synthetic oligonucleotide
  Sense strand starting at position 96 of SEQ ID NO: 588092
ucugauguccaagauccuu

SEQ ID NO: 841475 - RNA, 19 nt, Artificial Sequence
  Description of Artificial Sequence: Synthetic oligonucleotide
  Antisense strand to SEQ ID NO: 841474
aaggaucuuggacaucaga

SEQ ID NO: 841476 - RNA, 19 nt, Artificial Sequence
  Description of Artificial Sequence: Synthetic oligonucleotide
  Sense strand starting at position 107 of SEQ ID NO: 588092
agauccuucccaggaaagu

SEQ ID NO: 841477 - RNA, 19 nt, Artificial Sequence
  Description of Artificial Sequence: Synthetic oligonucleotide
  Antisense strand to SEQ ID NO: 841476
acuuuccugggaaggaucu

SEQ ID NO: 841478 - RNA, 19 nt, Artificial Sequence
  Description of Artificial Sequence: Synthetic oligonucleotide
  Sense strand starting at position 736 of SEQ ID NO: 588092
ugcagugcauguugaaaga

SEQ ID NO: 841479 - RNA, 19 nt, Artificial Sequence
  Description of Artificial Sequence: Synthetic oligonucleotide
  Antisense strand to SEQ ID NO: 841478
ucuuucaacaugcacugca

SEQ ID NO: 841480 - RNA, 19 nt, Artificial Sequence
  Description of Artificial Sequence: Synthetic oligonucleotide
  Sense strand starting at position 1000 of SEQ ID NO: 588092
ggacuucugucccugacag

SEQ ID NO: 841481 - RNA, 19 nt, Artificial Sequence
  Description of Artificial Sequence: Synthetic oligonucleotide
  Antisense strand to SEQ ID NO: 841480
cugucagggacagaagucc

SEQ ID NO: 841482 - RNA, 19 nt, Artificial Sequence
  Description of Artificial Sequence: Synthetic oligonucleotide
  Sense strand starting at position 1795 of SEQ ID NO: 588092
ggcguuugagcgucacguu

SEQ ID NO: 841483 - RNA, 19 nt, Artificial Sequence
  Description of Artificial Sequence: Synthetic oligonucleotide
  Antisense strand to SEQ ID NO: 841482
aacgugacgcucaaacgcc

SEQ ID NO: 841484 - RNA, 19 nt, Artificial Sequence
  Description of Artificial Sequence: Synthetic oligonucleotide
  Sense strand starting at position 1798 of SEQ ID NO: 588092
guuugagcgucacguucuu

SEQ ID NO: 841485 - RNA, 19 nt, Artificial Sequence
  Description of Artificial Sequence: Synthetic oligonucleotide
  Antisense strand to SEQ ID NO: 841484
aagaacgugacgcucaaac

SEQ ID NO: 841486 - RNA, 19 nt, Artificial Sequence
  Description of Artificial Sequence: Synthetic oligonucleotide
  Sense strand starting at position 2252 of SEQ ID NO: 588092
gcucuucucccagaggcau

SEQ ID NO: 841487 - RNA, 19 nt, Artificial Sequence
  Description of Artificial Sequence: Synthetic oligonucleotide
  Antisense strand to SEQ ID NO: 841486
augccucugggagaagagc

SEQ ID NO: 841488 - RNA, 19 nt, Artificial Sequence
  Description of Artificial Sequence: Synthetic oligonucleotide
  Sense strand starting at position 2379 of SEQ ID NO: 588092
gucuccugugugcuuugua

SEQ ID NO: 841489 - RNA, 19 nt, Artificial Sequence
  Description of Artificial Sequence: Synthetic oligonucleotide
  Antisense strand to SEQ ID NO: 841488
uacaaagcacacaggagac

SEQ ID NO: 841490 - RNA, 19 nt, Artificial Sequence
  Description of Artificial Sequence: Synthetic oligonucleotide
  Sense strand starting at position 2380 of SEQ ID NO: 588092
ucuccugugugcuuuguaa

SEQ ID NO: 841491 - RNA, 19 nt, Artificial Sequence
  Description of Artificial Sequence: Synthetic oligonucleotide
  Antisense strand to SEQ ID NO: 841490
uuacaaagcacacaggaga

SEQ ID NO: 841492 - RNA, 19 nt, Artificial Sequence
  Description of Artificial Sequence: Synthetic oligonucleotide
  Sense strand starting at position 2382 of SEQ ID NO: 588092
uccugugugcuuuguaaac

SEQ ID NO: 841493 - RNA, 19 nt, Artificial Sequence
  Description of Artificial Sequence: Synthetic oligonucleotide
  Antisense strand to SEQ ID NO: 841492
guuuacaaagcacacagga

SEQ ID NO: 841494 - RNA, 19 nt, Artificial Sequence
  Description of Artificial Sequence: Synthetic oligonucleotide
  Sense strand starting at position 2384 of SEQ ID NO: 588092
cugugugcuuuguaaacca

SEQ ID NO: 841495 - RNA, 19 nt, Artificial Sequence
  Description of Artificial Sequence: Synthetic oligonucleotide
  Antisense strand to SEQ ID NO: 841494
ugguuuacaaagcacacag

SEQ ID NO: 841496 - RNA, 19 nt, Artificial Sequence
  Description of Artificial Sequence: Synthetic oligonucleotide
  Sense strand starting at position 2580 of SEQ ID NO: 588092
cccauauucgggcgagucu

SEQ ID NO: 841497 - RNA, 19 nt, Artificial Sequence
  Description of Artificial Sequence: Synthetic oligonucleotide
  Antisense strand to SEQ ID NO: 841496
agacucgcccgaauauggg

SEQ ID NO: 841498 - RNA, 19 nt, Artificial Sequence
  Description of Artificial Sequence: Synthetic oligonucleotide
  Sense strand starting at position 2827 of SEQ ID NO: 588092
cgcauccucaagugaauga

SEQ ID NO: 841499 - RNA, 19 nt, Artificial Sequence
  Description of Artificial Sequence: Synthetic oligonucleotide
  Antisense strand to SEQ ID NO: 841498
ucauucacuugaggaugcg

SEQ ID NO: 841500 - RNA, 19 nt, Artificial Sequence
  Description of Artificial Sequence: Synthetic oligonucleotide
  Sense strand starting at position 3013 of SEQ ID NO: 588092
aggucuuucccacaagcca

SEQ ID NO: 841501 - RNA, 19 nt, Artificial Sequence
  Description of Artificial Sequence: Synthetic oligonucleotide
  Antisense strand to SEQ ID NO: 841500
uggcuugugggaaagaccu

SEQ ID NO: 841502 - RNA, 19 nt, Artificial Sequence
  Description of Artificial Sequence: Synthetic oligonucleotide
  Sense strand starting at position 3639 of SEQ ID NO: 588092
acagaaggcucucugauaa

SEQ ID NO: 841503 - RNA, 19 nt, Artificial Sequence
  Description of Artificial Sequence: Synthetic oligonucleotide
  Antisense strand to SEQ ID NO: 841502
uuaucagagagccuucugu

SEQ ID NO: 841504 - RNA, 19 nt, Artificial Sequence
  Description of Artificial Sequence: Synthetic oligonucleotide
  Sense strand starting at position 3883 of SEQ ID NO: 588092
aggcacugcucagauguuu

SEQ ID NO: 841505 - RNA, 19 nt, Artificial Sequence
  Description of Artificial Sequence: Synthetic oligonucleotide
  Antisense strand to SEQ ID NO: 841504
aaacaucugagcagugccu

SEQ ID NO: 841506 - RNA, 19 nt, Artificial Sequence
  Description of Artificial Sequence: Synthetic oligonucleotide
  Sense strand starting at position 102 of SEQ ID NO: 588093
ugcagugcauguugaaaga

SEQ ID NO: 841507 - RNA, 19 nt, Artificial Sequence
  Description of Artificial Sequence: Synthetic oligonucleotide
  Antisense strand to SEQ ID NO: 841506
ucuuucaacaugcacugca

SEQ ID NO: 841508 - RNA, 19 nt, Artificial Sequence
  Description of Artificial Sequence: Synthetic oligonucleotide
  Sense strand starting at position 366 of SEQ ID NO: 588093
ggacuucugucccugacag

SEQ ID NO: 841509 - RNA, 19 nt, Artificial Sequence
  Description of Artificial Sequence: Synthetic oligonucleotide
  Antisense strand to SEQ ID NO: 841508
cugucagggacagaagucc

SEQ ID NO: 841510 - RNA, 19 nt, Artificial Sequence
  Description of Artificial Sequence: Synthetic oligonucleotide
  Sense strand starting at position 1161 of SEQ ID NO: 588093
ggcguuugagcgucacguu

SEQ ID NO: 841511 - RNA, 19 nt, Artificial Sequence
  Description of Artificial Sequence: Synthetic oligonucleotide
  Antisense strand to SEQ ID NO: 841510
aacgugacgcucaaacgcc

SEQ ID NO: 841512 - RNA, 19 nt, Artificial Sequence
  Description of Artificial Sequence: Synthetic oligonucleotide
  Sense strand starting at position 1164 of SEQ ID NO: 588093
guuugagcgucacguucuu

SEQ ID NO: 841513 - RNA, 19 nt, Artificial Sequence
  Description of Artificial Sequence: Synthetic oligonucleotide
  Antisense strand to SEQ ID NO: 841512
aagaacgugacgcucaaac

SEQ ID NO: 841514 - RNA, 19 nt, Artificial Sequence
  Description of Artificial Sequence: Synthetic oligonucleotide
  Sense strand starting at position 1618 of SEQ ID NO: 588093
gcucuucucccagaggcau

SEQ ID NO: 841515 - RNA, 19 nt, Artificial Sequence
  Description of Artificial Sequence: Synthetic oligonucleotide
  Antisense strand to SEQ ID NO: 841514
augccucugggagaagagc

SEQ ID NO: 841516 - RNA, 19 nt, Artificial Sequence
  Description of Artificial Sequence: Synthetic oligonucleotide
  Sense strand starting at position 1745 of SEQ ID NO: 588093
gucuccugugugcuuugua

SEQ ID NO: 841517 - RNA, 19 nt, Artificial Sequence
  Description of Artificial Sequence: Synthetic oligonucleotide
  Antisense strand to SEQ ID NO: 841516
uacaaagcacacaggagac

SEQ ID NO: 841518 - RNA, 19 nt, Artificial Sequence
  Description of Artificial Sequence: Synthetic oligonucleotide
  Sense strand starting at position 1746 of SEQ ID NO: 588093
ucuccugugugcuuuguaa

SEQ ID NO: 841519 - RNA, 19 nt, Artificial Sequence
  Description of Artificial Sequence: Synthetic oligonucleotide
  Antisense strand to SEQ ID NO: 841518
uuacaaagcacacaggaga

SEQ ID NO: 841520 - RNA, 19 nt, Artificial Sequence
  Description of Artificial Sequence: Synthetic oligonucleotide
  Sense strand starting at position 1748 of SEQ ID NO: 588093
uccugugugcuuuguaaac

SEQ ID NO: 841521 - RNA, 19 nt, Artificial Sequence
  Description of Artificial Sequence: Synthetic oligonucleotide
  Antisense strand to SEQ ID NO: 841520
guuuacaaagcacacagga

SEQ ID NO: 841522 - RNA, 19 nt, Artificial Sequence
  Description of Artificial Sequence: Synthetic oligonucleotide
  Sense strand starting at position 1750 of SEQ ID NO: 588093
cugugugcuuuguaaacca

SEQ ID NO: 841523 - RNA, 19 nt, Artificial Sequence
  Description of Artificial Sequence: Synthetic oligonucleotide
  Antisense strand to SEQ ID NO: 841522
ugguuuacaaagcacacag

SEQ ID NO: 841524 - RNA, 19 nt, Artificial Sequence
  Description of Artificial Sequence: Synthetic oligonucleotide
  Sense strand starting at position 1946 of SEQ ID NO: 588093
cccauauucgggcgagucu

SEQ ID NO: 841525 - RNA, 19 nt, Artificial Sequence
  Description of Artificial Sequence: Synthetic oligonucleotide
  Antisense strand to SEQ ID NO: 841524
agacucgcccgaauauggg

SEQ ID NO: 841526 - RNA, 19 nt, Artificial Sequence
  Description of Artificial Sequence: Synthetic oligonucleotide
  Sense strand starting at position 2193 of SEQ ID NO: 588093
cgcauccucaagugaauga

SEQ ID NO: 841527 - RNA, 19 nt, Artificial Sequence
  Description of Artificial Sequence: Synthetic oligonucleotide
  Antisense strand to SEQ ID NO: 841526
ucauucacuugaggaugcg

SEQ ID NO: 841528 - RNA, 19 nt, Artificial Sequence
  Description of Artificial Sequence: Synthetic oligonucleotide
  Sense strand starting at position 2379 of SEQ ID NO: 588093
aggucuuucccacaagcca

SEQ ID NO: 841529 - RNA, 19 nt, Artificial Sequence
  Description of Artificial Sequence: Synthetic oligonucleotide
  Antisense strand to SEQ ID NO: 841528
uggcuugugggaaagaccu

SEQ ID NO: 841530 - RNA, 19 nt, Artificial Sequence
  Description of Artificial Sequence: Synthetic oligonucleotide
  Sense strand starting at position 3005 of SEQ ID NO: 588093
acagaaggcucucugauaa

SEQ ID NO: 841531 - RNA, 19 nt, Artificial Sequence
  Description of Artificial Sequence: Synthetic oligonucleotide
  Antisense strand to SEQ ID NO: 841530
uuaucagagagccuucugu

SEQ ID NO: 841532 - RNA, 19 nt, Artificial Sequence
  Description of Artificial Sequence: Synthetic oligonucleotide
  Sense strand starting at position 3249 of SEQ ID NO: 588093
aggcacugcucagauguuu

SEQ ID NO: 841533 - RNA, 19 nt, Artificial Sequence
  Description of Artificial Sequence: Synthetic oligonucleotide
  Antisense strand to SEQ ID NO: 841532
aaacaucugagcagugccu

SEQ ID NO: 841534 - RNA, 19 nt, Artificial Sequence
  Description of Artificial Sequence: Synthetic oligonucleotide
  Sense strand starting at position 3720 of SEQ ID NO: 588093
gaugccuggugguuugauu

SEQ ID NO: 841535 - RNA, 19 nt, Artificial Sequence
  Description of Artificial Sequence: Synthetic oligonucleotide
  Antisense strand to SEQ ID NO: 841534
aaucaaaccaccaggcauc

SEQ ID NO: 841536 - RNA, 19 nt, Artificial Sequence
  Description of Artificial Sequence: Synthetic oligonucleotide
  Sense strand starting at position 3804 of SEQ ID NO: 588093
cccucaagguccucauaga

SEQ ID NO: 841537 - RNA, 19 nt, Artificial Sequence
  Description of Artificial Sequence: Synthetic oligonucleotide
  Antisense strand to SEQ ID NO: 841536
ucuaugaggaccuugaggg

SEQ ID NO: 841538 - RNA, 19 nt, Artificial Sequence
  Description of Artificial Sequence: Synthetic oligonucleotide
  Sense strand starting at position 3841 of SEQ ID NO: 588093
guggguagcggucacagau

SEQ ID NO: 841539 - RNA, 19 nt, Artificial Sequence
  Description of Artificial Sequence: Synthetic oligonucleotide
  Antisense strand to SEQ ID NO: 841538
aucugugaccgcuacccac

SEQ ID NO: 841540 - RNA, 19 nt, Artificial Sequence
  Description of Artificial Sequence: Synthetic oligonucleotide
  Sense strand starting at position 97 of SEQ ID NO: 588094
ucugcuguuccuuaaguaa

SEQ ID NO: 841541 - RNA, 19 nt, Artificial Sequence
  Description of Artificial Sequence: Synthetic oligonucleotide
  Antisense strand to SEQ ID NO: 841540
uuacuuaaggaacagcaga

SEQ ID NO: 841542 - RNA, 19 nt, Artificial Sequence
  Description of Artificial Sequence: Synthetic oligonucleotide
  Sense strand starting at position 203 of SEQ ID NO: 588094
acuggcuaucauuagaugu

SEQ ID NO: 841543 - RNA, 19 nt, Artificial Sequence
  Description of Artificial Sequence: Synthetic oligonucleotide
  Antisense strand to SEQ ID NO: 841542
acaucuaaugauagccagu

SEQ ID NO: 841544 - RNA, 19 nt, Artificial Sequence
  Description of Artificial Sequence: Synthetic oligonucleotide
  Sense strand starting at position 254 of SEQ ID NO: 588094
uagagaaacucuuuacgga

SEQ ID NO: 841545 - RNA, 19 nt, Artificial Sequence
  Description of Artificial Sequence: Synthetic oligonucleotide
  Antisense strand to SEQ ID NO: 841544
uccguaaagaguuucucua

SEQ ID NO: 841546 - RNA, 19 nt, Artificial Sequence
  Description of Artificial Sequence: Synthetic oligonucleotide
  Sense strand starting at position 314 of SEQ ID NO: 588094
agauuaacguuauuacaac

SEQ ID NO: 841547 - RNA, 19 nt, Artificial Sequence
  Description of Artificial Sequence: Synthetic oligonucleotide
  Antisense strand to SEQ ID NO: 841546
guuguaauaacguuaaucu

SEQ ID NO: 841548 - RNA, 19 nt, Artificial Sequence
  Description of Artificial Sequence: Synthetic oligonucleotide
  Sense strand starting at position 320 of SEQ ID NO: 588094
acguuauuacaacauguau

SEQ ID NO: 841549 - RNA, 19 nt, Artificial Sequence
  Description of Artificial Sequence: Synthetic oligonucleotide
  Antisense strand to SEQ ID NO: 841548
auacauguuguaauaacgu

SEQ ID NO: 841550 - RNA, 19 nt, Artificial Sequence
  Description of Artificial Sequence: Synthetic oligonucleotide
  Sense strand starting at position 331 of SEQ ID NO: 588094
acauguaucuggcuuucua

SEQ ID NO: 841551 - RNA, 19 nt, Artificial Sequence
  Description of Artificial Sequence: Synthetic oligonucleotide
  Antisense strand to SEQ ID NO: 841550
uagaaagccagauacaugu

SEQ ID NO: 841552 - RNA, 19 nt, Artificial Sequence
  Description of Artificial Sequence: Synthetic oligonucleotide
  Sense strand starting at position 341 of SEQ ID NO: 588094
ggcuuucuacuccgacuca

SEQ ID NO: 841553 - RNA, 19 nt, Artificial Sequence
  Description of Artificial Sequence: Synthetic oligonucleotide
  Antisense strand to SEQ ID NO: 841552
ugagucggaguagaaagcc

SEQ ID NO: 841554 - RNA, 19 nt, Artificial Sequence
  Description of Artificial Sequence: Synthetic oligonucleotide
  Sense strand starting at position 348 of SEQ ID NO: 588094
uacuccgacucauuaggua

SEQ ID NO: 841555 - RNA, 19 nt, Artificial Sequence
  Description of Artificial Sequence: Synthetic oligonucleotide
  Antisense strand to SEQ ID NO: 841554
uaccuaaugagucggagua

SEQ ID NO: 841556 - RNA, 19 nt, Artificial Sequence
  Description of Artificial Sequence: Synthetic oligonucleotide
  Sense strand starting at position 352 of SEQ ID NO: 588094
ccgacucauuagguauuau

SEQ ID NO: 841557 - RNA, 19 nt, Artificial Sequence
  Description of Artificial Sequence: Synthetic oligonucleotide
  Antisense strand to SEQ ID NO: 841556
auaauaccuaaugagucgg

SEQ ID NO: 841558 - RNA, 19 nt, Artificial Sequence
  Description of Artificial Sequence: Synthetic oligonucleotide
  Sense strand starting at position 598 of SEQ ID NO: 588094
cuggcauuggcagagaucu

SEQ ID NO: 841559 - RNA, 19 nt, Artificial Sequence
  Description of Artificial Sequence: Synthetic oligonucleotide
  Antisense strand to SEQ ID NO: 841558
agaucucugccaaugccag

SEQ ID NO: 841560 - RNA, 19 nt, Artificial Sequence
  Description of Artificial Sequence: Synthetic oligonucleotide
  Sense strand starting at position 795 of SEQ ID NO: 588094
auaagccuaccuuagaguu

SEQ ID NO: 841561 - RNA, 19 nt, Artificial Sequence
  Description of Artificial Sequence: Synthetic oligonucleotide
  Antisense strand to SEQ ID NO: 841560
aacucuaagguaggcuuau

SEQ ID NO: 841562 - RNA, 19 nt, Artificial Sequence
  Description of Artificial Sequence: Synthetic oligonucleotide
  Sense strand starting at position 1176 of SEQ ID NO: 588094
ucacgcaaccaucagagaa

SEQ ID NO: 841563 - RNA, 19 nt, Artificial Sequence
  Description of Artificial Sequence: Synthetic oligonucleotide
  Antisense strand to SEQ ID NO: 841562
uucucugaugguugcguga

SEQ ID NO: 841564 - RNA, 19 nt, Artificial Sequence
  Description of Artificial Sequence: Synthetic oligonucleotide
  Sense strand starting at position 2225 of SEQ ID NO: 588094
gggacuuguucuccggguu

SEQ ID NO: 841565 - RNA, 19 nt, Artificial Sequence
  Description of Artificial Sequence: Synthetic oligonucleotide
  Antisense strand to SEQ ID NO: 841564
aacccggagaacaaguccc

SEQ ID NO: 841566 - RNA, 19 nt, Artificial Sequence
  Description of Artificial Sequence: Synthetic oligonucleotide
  Sense strand starting at position 2228 of SEQ ID NO: 588094
acuuguucuccggguuuga

SEQ ID NO: 841567 - RNA, 19 nt, Artificial Sequence
  Description of Artificial Sequence: Synthetic oligonucleotide
  Antisense strand to SEQ ID NO: 841566
ucaaacccggagaacaagu

SEQ ID NO: 841568 - RNA, 19 nt, Artificial Sequence
  Description of Artificial Sequence: Synthetic oligonucleotide
  Sense strand starting at position 2232 of SEQ ID NO: 588094
guucuccggguuugagaaa

SEQ ID NO: 841569 - RNA, 19 nt, Artificial Sequence
  Description of Artificial Sequence: Synthetic oligonucleotide
  Antisense strand to SEQ ID NO: 841568
uuucucaaacccggagaac

SEQ ID NO: 841570 - RNA, 19 nt, Artificial Sequence
  Description of Artificial Sequence: Synthetic oligonucleotide
  Sense strand starting at position 2796 of SEQ ID NO: 588094
guaaauauuugauggucag

SEQ ID NO: 841571 - RNA, 19 nt, Artificial Sequence
  Description of Artificial Sequence: Synthetic oligonucleotide
  Antisense strand to SEQ ID NO: 841570
cugaccaucaaauauuuac

SEQ ID NO: 841572 - RNA, 19 nt, Artificial Sequence
  Description of Artificial Sequence: Synthetic oligonucleotide
  Sense strand starting at position 2853 of SEQ ID NO: 588094
ugaaaucuaaggugcagau

SEQ ID NO: 841573 - RNA, 19 nt, Artificial Sequence
  Description of Artificial Sequence: Synthetic oligonucleotide
  Antisense strand to SEQ ID NO: 841572
aucugcaccuuagauuuca

SEQ ID NO: 841574 - RNA, 19 nt, Artificial Sequence
  Description of Artificial Sequence: Synthetic oligonucleotide
  Sense strand starting at position 2966 of SEQ ID NO: 588094
aguuuaugcagcuacgauu

SEQ ID NO: 841575 - RNA, 19 nt, Artificial Sequence
  Description of Artificial Sequence: Synthetic oligonucleotide
  Antisense strand to SEQ ID NO: 841574
aaucguagcugcauaaacu

SEQ ID NO: 841576 - RNA, 19 nt, Artificial Sequence
  Description of Artificial Sequence: Synthetic oligonucleotide
  Sense strand starting at position 3041 of SEQ ID NO: 588094
ggcuguccucacuaguauu

SEQ ID NO: 841577 - RNA, 19 nt, Artificial Sequence
  Description of Artificial Sequence: Synthetic oligonucleotide
  Antisense strand to SEQ ID NO: 841576
aauacuagugaggacagcc

SEQ ID NO: 841578 - RNA, 19 nt, Artificial Sequence
  Description of Artificial Sequence: Synthetic oligonucleotide
  Sense strand starting at position 3051 of SEQ ID NO: 588094
acuaguauugugugaaauu

SEQ ID NO: 841579 - RNA, 19 nt, Artificial Sequence
  Description of Artificial Sequence: Synthetic oligonucleotide
  Antisense strand to SEQ ID NO: 841578
aauuucacacaauacuagu

SEQ ID NO: 841580 - RNA, 19 nt, Artificial Sequence
  Description of Artificial Sequence: Synthetic oligonucleotide
  Sense strand starting at position 3052 of SEQ ID NO: 588094
cuaguauugugugaaauuu

SEQ ID NO: 841581 - RNA, 19 nt, Artificial Sequence
  Description of Artificial Sequence: Synthetic oligonucleotide
  Antisense strand to SEQ ID NO: 841580
aaauuucacacaauacuag

SEQ ID NO: 841582 - RNA, 19 nt, Artificial Sequence
  Description of Artificial Sequence: Synthetic oligonucleotide
  Sense strand starting at position 3146 of SEQ ID NO: 588094
gcaggacuucuguaaaguc

SEQ ID NO: 841583 - RNA, 19 nt, Artificial Sequence
  Description of Artificial Sequence: Synthetic oligonucleotide
  Antisense strand to SEQ ID NO: 841582
gacuuuacagaaguccugc

SEQ ID NO: 841584 - RNA, 19 nt, Artificial Sequence
  Description of Artificial Sequence: Synthetic oligonucleotide
  Sense strand starting at position 3197 of SEQ ID NO: 588094
gaggacuuggguuguauau

SEQ ID NO: 841585 - RNA, 19 nt, Artificial Sequence
  Description of Artificial Sequence: Synthetic oligonucleotide
  Antisense strand to SEQ ID NO: 841584
auauacaacccaaguccuc

SEQ ID NO: 841586 - RNA, 19 nt, Artificial Sequence
  Description of Artificial Sequence: Synthetic oligonucleotide
  Sense strand starting at position 3206 of SEQ ID NO: 588094
gguuguauauaaguacuaa

SEQ ID NO: 841587 - RNA, 19 nt, Artificial Sequence
  Description of Artificial Sequence: Synthetic oligonucleotide
  Antisense strand to SEQ ID NO: 841586
uuaguacuuauauacaacc

SEQ ID NO: 841588 - RNA, 19 nt, Artificial Sequence
  Description of Artificial Sequence: Synthetic oligonucleotide
  Sense strand starting at position 3311 of SEQ ID NO: 588094
ucgagaacgaccuggucaa

SEQ ID NO: 841589 - RNA, 19 nt, Artificial Sequence
  Description of Artificial Sequence: Synthetic oligonucleotide
  Antisense strand to SEQ ID NO: 841588
uugaccaggucguucucga

SEQ ID NO: 841590 - RNA, 19 nt, Artificial Sequence
  Description of Artificial Sequence: Synthetic oligonucleotide
  Sense strand starting at position 3440 of SEQ ID NO: 588094
gucagaaguucgagaacga

SEQ ID NO: 841591 - RNA, 19 nt, Artificial Sequence
  Description of Artificial Sequence: Synthetic oligonucleotide
  Antisense strand to SEQ ID NO: 841590
ucguucucgaacuucugac

SEQ ID NO: 841592 - RNA, 19 nt, Artificial Sequence
  Description of Artificial Sequence: Synthetic oligonucleotide
  Sense strand starting at position 3818 of SEQ ID NO: 588094
gcggcuugagugaguugua

SEQ ID NO: 841593 - RNA, 19 nt, Artificial Sequence
  Description of Artificial Sequence: Synthetic oligonucleotide
  Antisense strand to SEQ ID NO: 841592
uacaacucacucaagccgc

SEQ ID NO: 841594 - RNA, 19 nt, Artificial Sequence
  Description of Artificial Sequence: Synthetic oligonucleotide
  Sense strand starting at position 3821 of SEQ ID NO: 588094
gcuugagugaguuguauaa

SEQ ID NO: 841595 - RNA, 19 nt, Artificial Sequence
  Description of Artificial Sequence: Synthetic oligonucleotide
  Antisense strand to SEQ ID NO: 841594
uuauacaacucacucaagc

SEQ ID NO: 841596 - RNA, 19 nt, Artificial Sequence
  Description of Artificial Sequence: Synthetic oligonucleotide
  Sense strand starting at position 3825 of SEQ ID NO: 588094
gagugaguuguauaauauu

SEQ ID NO: 841597 - RNA, 19 nt, Artificial Sequence
  Description of Artificial Sequence: Synthetic oligonucleotide
  Antisense strand to SEQ ID NO: 841596
aauauuauacaacucacuc

SEQ ID NO: 841598 - RNA, 19 nt, Artificial Sequence
  Description of Artificial Sequence: Synthetic oligonucleotide
  Sense strand starting at position 3855 of SEQ ID NO: 588094
agccuuacuuuggucucaa

SEQ ID NO: 841599 - RNA, 19 nt, Artificial Sequence
  Description of Artificial Sequence: Synthetic oligonucleotide
  Antisense strand to SEQ ID NO: 841598
uugagaccaaaguaaggcu

SEQ ID NO: 841600 - RNA, 19 nt, Artificial Sequence
  Description of Artificial Sequence: Synthetic oligonucleotide
  Sense strand starting at position 3856 of SEQ ID NO: 588094
gccuuacuuuggucucaaa

SEQ ID NO: 841601 - RNA, 19 nt, Artificial Sequence
  Description of Artificial Sequence: Synthetic oligonucleotide
  Antisense strand to SEQ ID NO: 841600
uuugagaccaaaguaaggc

SEQ ID NO: 841602 - RNA, 19 nt, Artificial Sequence
  Description of Artificial Sequence: Synthetic oligonucleotide
  Sense strand starting at position 3874 of SEQ ID NO: 588094
augcaaauuugucaggauu

SEQ ID NO: 841603 - RNA, 19 nt, Artificial Sequence
  Description of Artificial Sequence: Synthetic oligonucleotide
  Antisense strand to SEQ ID NO: 841602
aauccugacaaauuugcau

SEQ ID NO: 841604 - RNA, 19 nt, Artificial Sequence
  Description of Artificial Sequence: Synthetic oligonucleotide
  Sense strand starting at position 3888 of SEQ ID NO: 588094
ggauuguugggaggcgaaa

SEQ ID NO: 841605 - RNA, 19 nt, Artificial Sequence
  Description of Artificial Sequence: Synthetic oligonucleotide
  Antisense strand to SEQ ID NO: 841604
uuucgccucccaacaaucc

SEQ ID NO: 841606 - RNA, 19 nt, Artificial Sequence
  Description of Artificial Sequence: Synthetic oligonucleotide
  Sense strand starting at position 3900 of SEQ ID NO: 588094
ggcgaaacuauaugauuau

SEQ ID NO: 841607 - RNA, 19 nt, Artificial Sequence
  Description of Artificial Sequence: Synthetic oligonucleotide
  Antisense strand to SEQ ID NO: 841606
auaaucauauaguuucgcc

SEQ ID NO: 841608 - RNA, 19 nt, Artificial Sequence
  Description of Artificial Sequence: Synthetic oligonucleotide
  Sense strand starting at position 3919 of SEQ ID NO: 588094
gcauaaauggccuagguca

SEQ ID NO: 841609 - RNA, 19 nt, Artificial Sequence
  Description of Artificial Sequence: Synthetic oligonucleotide
  Antisense strand to SEQ ID NO: 841608
ugaccuaggccauuuaugc

SEQ ID NO: 841610 - RNA, 19 nt, Artificial Sequence
  Description of Artificial Sequence: Synthetic oligonucleotide
  Sense strand starting at position 3921 of SEQ ID NO: 588094
auaaauggccuaggucaua

SEQ ID NO: 841611 - RNA, 19 nt, Artificial Sequence
  Description of Artificial Sequence: Synthetic oligonucleotide
  Antisense strand to SEQ ID NO: 841610
uaugaccuaggccauuuau

SEQ ID NO: 841612 - RNA, 19 nt, Artificial Sequence
  Description of Artificial Sequence: Synthetic oligonucleotide
  Sense strand starting at position 3932 of SEQ ID NO: 588094
aggucauaguaaguguuca

SEQ ID NO: 841613 - RNA, 19 nt, Artificial Sequence
  Description of Artificial Sequence: Synthetic oligonucleotide
  Antisense strand to SEQ ID NO: 841612
ugaacacuuacuaugaccu

SEQ ID NO: 841614 - RNA, 19 nt, Artificial Sequence
  Description of Artificial Sequence: Synthetic oligonucleotide
  Sense strand starting at position 3965 of SEQ ID NO: 588094
ucccgacauugauugggaa

SEQ ID NO: 841615 - RNA, 19 nt, Artificial Sequence
  Description of Artificial Sequence: Synthetic oligonucleotide
  Antisense strand to SEQ ID NO: 841614
uucccaaucaaugucggga

SEQ ID NO: 841616 - RNA, 19 nt, Artificial Sequence
  Description of Artificial Sequence: Synthetic oligonucleotide
  Sense strand starting at position 3966 of SEQ ID NO: 588094
cccgacauugauugggaaa

SEQ ID NO: 841617 - RNA, 19 nt, Artificial Sequence
  Description of Artificial Sequence: Synthetic oligonucleotide
  Antisense strand to SEQ ID NO: 841616
uuucccaaucaaugucggg

SEQ ID NO: 841618 - RNA, 19 nt, Artificial Sequence
  Description of Artificial Sequence: Synthetic oligonucleotide
  Sense strand starting at position 3969 of SEQ ID NO: 588094
gacauugauugggaaagca

SEQ ID NO: 841619 - RNA, 19 nt, Artificial Sequence
  Description of Artificial Sequence: Synthetic oligonucleotide
  Antisense strand to SEQ ID NO: 841618
ugcuuucccaaucaauguc

SEQ ID NO: 841620 - RNA, 19 nt, Artificial Sequence
  Description of Artificial Sequence: Synthetic oligonucleotide
  Sense strand starting at position 13 of SEQ ID NO: 588095
cgauguauuaauugaagau

SEQ ID NO: 841621 - RNA, 19 nt, Artificial Sequence
  Description of Artificial Sequence: Synthetic oligonucleotide
  Antisense strand to SEQ ID NO: 841620
aucuucaauuaauacaucg

SEQ ID NO: 841622 - RNA, 19 nt, Artificial Sequence
  Description of Artificial Sequence: Synthetic oligonucleotide
  Sense strand starting at position 265 of SEQ ID NO: 588095
gguagagucagagguuaag

SEQ ID NO: 841623 - RNA, 19 nt, Artificial Sequence
  Description of Artificial Sequence: Synthetic oligonucleotide
  Antisense strand to SEQ ID NO: 841622
cuuaaccucugacucuacc

SEQ ID NO: 841624 - RNA, 19 nt, Artificial Sequence
  Description of Artificial Sequence: Synthetic oligonucleotide
  Sense strand starting at position 305 of SEQ ID NO: 588095
auaaaugaggccuguuuau

SEQ ID NO: 841625 - RNA, 19 nt, Artificial Sequence
  Description of Artificial Sequence: Synthetic oligonucleotide
  Antisense strand to SEQ ID NO: 841624
auaaacaggccucauuuau

SEQ ID NO: 841626 - RNA, 19 nt, Artificial Sequence
  Description of Artificial Sequence: Synthetic oligonucleotide
  Sense strand starting at position 1065 of SEQ ID NO: 588095
ggaaacgccuucuuaaaug

SEQ ID NO: 841627 - RNA, 19 nt, Artificial Sequence
  Description of Artificial Sequence: Synthetic oligonucleotide
  Antisense strand to SEQ ID NO: 841626
cauuuaagaaggcguuucc

SEQ ID NO: 841628 - RNA, 19 nt, Artificial Sequence
  Description of Artificial Sequence: Synthetic oligonucleotide
  Sense strand starting at position 1124 of SEQ ID NO: 588095
cuucguggucuguagauaa

SEQ ID NO: 841629 - RNA, 19 nt, Artificial Sequence
  Description of Artificial Sequence: Synthetic oligonucleotide
  Antisense strand to SEQ ID NO: 841628
uuaucuacagaccacgaag

SEQ ID NO: 841630 - RNA, 19 nt, Artificial Sequence
  Description of Artificial Sequence: Synthetic oligonucleotide
  Sense strand starting at position 1128 of SEQ ID NO: 588095
guggucuguagauaagaug

SEQ ID NO: 841631 - RNA, 19 nt, Artificial Sequence
  Description of Artificial Sequence: Synthetic oligonucleotide
  Antisense strand to SEQ ID NO: 841630
caucuuaucuacagaccac

SEQ ID NO: 841632 - RNA, 19 nt, Artificial Sequence
  Description of Artificial Sequence: Synthetic oligonucleotide
  Sense strand starting at position 1214 of SEQ ID NO: 588095
guacaugaugcuuaaugga

SEQ ID NO: 841633 - RNA, 19 nt, Artificial Sequence
  Description of Artificial Sequence: Synthetic oligonucleotide
  Antisense strand to SEQ ID NO: 841632
uccauuaagcaucauguac

SEQ ID NO: 841634 - RNA, 19 nt, Artificial Sequence
  Description of Artificial Sequence: Synthetic oligonucleotide
  Sense strand starting at position 1277 of SEQ ID NO: 588095
gucccaauuaacgguggaa

SEQ ID NO: 841635 - RNA, 19 nt, Artificial Sequence
  Description of Artificial Sequence: Synthetic oligonucleotide
  Antisense strand to SEQ ID NO: 841634
uuccaccguuaauugggac

SEQ ID NO: 841636 - RNA, 19 nt, Artificial Sequence
  Description of Artificial Sequence: Synthetic oligonucleotide
  Sense strand starting at position 1279 of SEQ ID NO: 588095
cccaauuaacgguggaaau

SEQ ID NO: 841637 - RNA, 19 nt, Artificial Sequence
  Description of Artificial Sequence: Synthetic oligonucleotide
  Antisense strand to SEQ ID NO: 841636
auuuccaccguuaauuggg

SEQ ID NO: 841638 - RNA, 19 nt, Artificial Sequence
  Description of Artificial Sequence: Synthetic oligonucleotide
  Sense strand starting at position 1280 of SEQ ID NO: 588095
ccaauuaacgguggaaauu

SEQ ID NO: 841639 - RNA, 19 nt, Artificial Sequence
  Description of Artificial Sequence: Synthetic oligonucleotide
  Antisense strand to SEQ ID NO: 841638
aauuuccaccguuaauugg

SEQ ID NO: 841640 - RNA, 19 nt, Artificial Sequence
  Description of Artificial Sequence: Synthetic oligonucleotide
  Sense strand starting at position 1290 of SEQ ID NO: 588095
guggaaauuccacaacgug

SEQ ID NO: 841641 - RNA, 19 nt, Artificial Sequence
  Description of Artificial Sequence: Synthetic oligonucleotide
  Antisense strand to SEQ ID NO: 841640
cacguuguggaauuuccac

SEQ ID NO: 841642 - RNA, 19 nt, Artificial Sequence
  Description of Artificial Sequence: Synthetic oligonucleotide
  Sense strand starting at position 1306 of SEQ ID NO: 588095
gugggaucccagggauguu

SEQ ID NO: 841643 - RNA, 19 nt, Artificial Sequence
  Description of Artificial Sequence: Synthetic oligonucleotide
  Antisense strand to SEQ ID NO: 841642
aacaucccugggaucccac

SEQ ID NO: 841644 - RNA, 19 nt, Artificial Sequence
  Description of Artificial Sequence: Synthetic oligonucleotide
  Sense strand starting at position 2452 of SEQ ID NO: 588095
ugugauuaaggcugaggca

SEQ ID NO: 841645 - RNA, 19 nt, Artificial Sequence
  Description of Artificial Sequence: Synthetic oligonucleotide
  Antisense strand to SEQ ID NO: 841644
ugccucagccuuaaucaca

SEQ ID NO: 841646 - RNA, 19 nt, Artificial Sequence
  Description of Artificial Sequence: Synthetic oligonucleotide
  Sense strand starting at position 2607 of SEQ ID NO: 588095
aggacuuagucccuacaau

SEQ ID NO: 841647 - RNA, 19 nt, Artificial Sequence
  Description of Artificial Sequence: Synthetic oligonucleotide
  Antisense strand to SEQ ID NO: 841646
auuguagggacuaaguccu

SEQ ID NO: 841648 - RNA, 19 nt, Artificial Sequence
  Description of Artificial Sequence: Synthetic oligonucleotide
  Sense strand starting at position 2796 of SEQ ID NO: 588095
guuauaaagcagcaacaau

SEQ ID NO: 841649 - RNA, 19 nt, Artificial Sequence
  Description of Artificial Sequence: Synthetic oligonucleotide
  Antisense strand to SEQ ID NO: 841648
auuguugcugcuuuauaac

SEQ ID NO: 841650 - RNA, 19 nt, Artificial Sequence
  Description of Artificial Sequence: Synthetic oligonucleotide
  Sense strand starting at position 2838 of SEQ ID NO: 588095
cccagaaaucuaggucaga

SEQ ID NO: 841651 - RNA, 19 nt, Artificial Sequence
  Description of Artificial Sequence: Synthetic oligonucleotide
  Antisense strand to SEQ ID NO: 841650
ucugaccuagauuucuggg

SEQ ID NO: 841652 - RNA, 19 nt, Artificial Sequence
  Description of Artificial Sequence: Synthetic oligonucleotide
  Sense strand starting at position 2843 of SEQ ID NO: 588095
aaaucuaggucagagggaa

SEQ ID NO: 841653 - RNA, 19 nt, Artificial Sequence
  Description of Artificial Sequence: Synthetic oligonucleotide
  Antisense strand to SEQ ID NO: 841652
uucccucugaccuagauuu

SEQ ID NO: 841654 - RNA, 19 nt, Artificial Sequence
  Description of Artificial Sequence: Synthetic oligonucleotide
  Sense strand starting at position 2987 of SEQ ID NO: 588095
ggaaguuuaguccacaucu

SEQ ID NO: 841655 - RNA, 19 nt, Artificial Sequence
  Description of Artificial Sequence: Synthetic oligonucleotide
  Antisense strand to SEQ ID NO: 841654
agauguggacuaaacuucc

SEQ ID NO: 841656 - RNA, 19 nt, Artificial Sequence
  Description of Artificial Sequence: Synthetic oligonucleotide
  Sense strand starting at position 3002 of SEQ ID NO: 588095
aucuucuagccaugaagag

SEQ ID NO: 841657 - RNA, 19 nt, Artificial Sequence
  Description of Artificial Sequence: Synthetic oligonucleotide
  Antisense strand to SEQ ID NO: 841656
cucuucauggcuagaagau

SEQ ID NO: 841658 - RNA, 19 nt, Artificial Sequence
  Description of Artificial Sequence: Synthetic oligonucleotide
  Sense strand starting at position 3003 of SEQ ID NO: 588095
ucuucuagccaugaagagu

SEQ ID NO: 841659 - RNA, 19 nt, Artificial Sequence
  Description of Artificial Sequence: Synthetic oligonucleotide
  Antisense strand to SEQ ID NO: 841658
acucuucauggcuagaaga

SEQ ID NO: 841660 - RNA, 19 nt, Artificial Sequence
  Description of Artificial Sequence: Synthetic oligonucleotide
  Sense strand starting at position 3072 of SEQ ID NO: 588095
acuguauugcaucugcgua

SEQ ID NO: 841661 - RNA, 19 nt, Artificial Sequence
  Description of Artificial Sequence: Synthetic oligonucleotide
  Antisense strand to SEQ ID NO: 841660
uacgcagaugcaauacagu

SEQ ID NO: 841662 - RNA, 19 nt, Artificial Sequence
  Description of Artificial Sequence: Synthetic oligonucleotide
  Sense strand starting at position 3087 of SEQ ID NO: 588095
cguaaugauucugugagga

SEQ ID NO: 841663 - RNA, 19 nt, Artificial Sequence
  Description of Artificial Sequence: Synthetic oligonucleotide
  Antisense strand to SEQ ID NO: 841662
uccucacagaaucauuacg

SEQ ID NO: 841664 - RNA, 19 nt, Artificial Sequence
  Description of Artificial Sequence: Synthetic oligonucleotide
  Sense strand starting at position 3293 of SEQ ID NO: 588095
ggauuaaagcauuggauau

SEQ ID NO: 841665 - RNA, 19 nt, Artificial Sequence
  Description of Artificial Sequence: Synthetic oligonucleotide
  Antisense strand to SEQ ID NO: 841664
auauccaaugcuuuaaucc

SEQ ID NO: 841666 - RNA, 19 nt, Artificial Sequence
  Description of Artificial Sequence: Synthetic oligonucleotide
  Sense strand starting at position 3303 of SEQ ID NO: 588095
auuggauaucuuuggucaa

SEQ ID NO: 841667 - RNA, 19 nt, Artificial Sequence
  Description of Artificial Sequence: Synthetic oligonucleotide
  Antisense strand to SEQ ID NO: 841666
uugaccaaagauauccaau

SEQ ID NO: 841668 - RNA, 19 nt, Artificial Sequence
  Description of Artificial Sequence: Synthetic oligonucleotide
  Sense strand starting at position 3305 of SEQ ID NO: 588095
uggauaucuuuggucaaau

SEQ ID NO: 841669 - RNA, 19 nt, Artificial Sequence
  Description of Artificial Sequence: Synthetic oligonucleotide
  Antisense strand to SEQ ID NO: 841668
auuugaccaaagauaucca

SEQ ID NO: 841670 - RNA, 19 nt, Artificial Sequence
  Description of Artificial Sequence: Synthetic oligonucleotide
  Sense strand starting at position 3306 of SEQ ID NO: 588095
ggauaucuuuggucaaaua

SEQ ID NO: 841671 - RNA, 19 nt, Artificial Sequence
  Description of Artificial Sequence: Synthetic oligonucleotide
  Antisense strand to SEQ ID NO: 841670
uauuugaccaaagauaucc

SEQ ID NO: 841672 - RNA, 19 nt, Artificial Sequence
  Description of Artificial Sequence: Synthetic oligonucleotide
  Sense strand starting at position 3326 of SEQ ID NO: 588095
cuagcauugucauuauaug

SEQ ID NO: 841673 - RNA, 19 nt, Artificial Sequence
  Description of Artificial Sequence: Synthetic oligonucleotide
  Antisense strand to SEQ ID NO: 841672
cauauaaugacaaugcuag

SEQ ID NO: 841674 - RNA, 19 nt, Artificial Sequence
  Description of Artificial Sequence: Synthetic oligonucleotide
  Sense strand starting at position 3348 of SEQ ID NO: 588095
cagagaaagccuugguuau

SEQ ID NO: 841675 - RNA, 19 nt, Artificial Sequence
  Description of Artificial Sequence: Synthetic oligonucleotide
  Antisense strand to SEQ ID NO: 841674
auaaccaaggcuuucucug

SEQ ID NO: 841676 - RNA, 19 nt, Artificial Sequence
  Description of Artificial Sequence: Synthetic oligonucleotide
  Sense strand starting at position 3349 of SEQ ID NO: 588095
agagaaagccuugguuaug

SEQ ID NO: 841677 - RNA, 19 nt, Artificial Sequence
  Description of Artificial Sequence: Synthetic oligonucleotide
  Antisense strand to SEQ ID NO: 841676
cauaaccaaggcuuucucu

SEQ ID NO: 841678 - RNA, 19 nt, Artificial Sequence
  Description of Artificial Sequence: Synthetic oligonucleotide
  Sense strand starting at position 3350 of SEQ ID NO: 588095
gagaaagccuugguuauga

SEQ ID NO: 841679 - RNA, 19 nt, Artificial Sequence
  Description of Artificial Sequence: Synthetic oligonucleotide
  Antisense strand to SEQ ID NO: 841678
ucauaaccaaggcuuucuc

SEQ ID NO: 841680 - RNA, 19 nt, Artificial Sequence
  Description of Artificial Sequence: Synthetic oligonucleotide
  Sense strand starting at position 3430 of SEQ ID NO: 588095
aggaauggcuaaguaacaa

SEQ ID NO: 841681 - RNA, 19 nt, Artificial Sequence
  Description of Artificial Sequence: Synthetic oligonucleotide
  Antisense strand to SEQ ID NO: 841680
uuguuacuuagccauuccu

SEQ ID NO: 841682 - RNA, 19 nt, Artificial Sequence
  Description of Artificial Sequence: Synthetic oligonucleotide
  Sense strand starting at position 3497 of SEQ ID NO: 588095
acaggauguaaccagugua

SEQ ID NO: 841683 - RNA, 19 nt, Artificial Sequence
  Description of Artificial Sequence: Synthetic oligonucleotide
  Antisense strand to SEQ ID NO: 841682
uacacugguuacauccugu

SEQ ID NO: 841684 - RNA, 19 nt, Artificial Sequence
  Description of Artificial Sequence: Synthetic oligonucleotide
  Sense strand starting at position 3500 of SEQ ID NO: 588095
ggauguaaccaguguauau

SEQ ID NO: 841685 - RNA, 19 nt, Artificial Sequence
  Description of Artificial Sequence: Synthetic oligonucleotide
  Antisense strand to SEQ ID NO: 841684
auauacacugguuacaucc

SEQ ID NO: 841686 - RNA, 19 nt, Artificial Sequence
  Description of Artificial Sequence: Synthetic oligonucleotide
  Sense strand starting at position 3504 of SEQ ID NO: 588095
guaaccaguguauaucaca

SEQ ID NO: 841687 - RNA, 19 nt, Artificial Sequence
  Description of Artificial Sequence: Synthetic oligonucleotide
  Antisense strand to SEQ ID NO: 841686
ugugauauacacugguuac

SEQ ID NO: 841688 - RNA, 19 nt, Artificial Sequence
  Description of Artificial Sequence: Synthetic oligonucleotide
  Sense strand starting at position 3534 of SEQ ID NO: 588095
ccaggaugucauuaacuuu

SEQ ID NO: 841689 - RNA, 19 nt, Artificial Sequence
  Description of Artificial Sequence: Synthetic oligonucleotide
  Antisense strand to SEQ ID NO: 841688
aaaguuaaugacauccugg

SEQ ID NO: 841690 - RNA, 19 nt, Artificial Sequence
  Description of Artificial Sequence: Synthetic oligonucleotide
  Sense strand starting at position 3537 of SEQ ID NO: 588095
ggaugucauuaacuuucca

SEQ ID NO: 841691 - RNA, 19 nt, Artificial Sequence
  Description of Artificial Sequence: Synthetic oligonucleotide
  Antisense strand to SEQ ID NO: 841690
uggaaaguuaaugacaucc

SEQ ID NO: 841692 - RNA, 19 nt, Artificial Sequence
  Description of Artificial Sequence: Synthetic oligonucleotide
  Sense strand starting at position 3544 of SEQ ID NO: 588095
auuaacuuuccacaugugu

SEQ ID NO: 841693 - RNA, 19 nt, Artificial Sequence
  Description of Artificial Sequence: Synthetic oligonucleotide
  Antisense strand to SEQ ID NO: 841692
acacauguggaaaguuaau

SEQ ID NO: 841694 - RNA, 19 nt, Artificial Sequence
  Description of Artificial Sequence: Synthetic oligonucleotide
  Sense strand starting at position 3666 of SEQ ID NO: 588095
ggcaccaucagggaaguuu

SEQ ID NO: 841695 - RNA, 19 nt, Artificial Sequence
  Description of Artificial Sequence: Synthetic oligonucleotide
  Antisense strand to SEQ ID NO: 841694
aaacuucccugauggugcc

SEQ ID NO: 841696 - RNA, 19 nt, Artificial Sequence
  Description of Artificial Sequence: Synthetic oligonucleotide
  Sense strand starting at position 3745 of SEQ ID NO: 588095
ucuggaugcuuucuaggau

SEQ ID NO: 841697 - RNA, 19 nt, Artificial Sequence
  Description of Artificial Sequence: Synthetic oligonucleotide
  Antisense strand to SEQ ID NO: 841696
auccuagaaagcauccaga

SEQ ID NO: 841698 - RNA, 19 nt, Artificial Sequence
  Description of Artificial Sequence: Synthetic oligonucleotide
  Sense strand starting at position 3820 of SEQ ID NO: 588095
uaguguugucuugaaucug

SEQ ID NO: 841699 - RNA, 19 nt, Artificial Sequence
  Description of Artificial Sequence: Synthetic oligonucleotide
  Antisense strand to SEQ ID NO: 841698
cagauucaagacaacacua

SEQ ID NO: 841700 - RNA, 19 nt, Artificial Sequence
  Description of Artificial Sequence: Synthetic oligonucleotide
  Sense strand starting at position 2 of SEQ ID NO: 588096
gagacaagaccuugguacu

SEQ ID NO: 841701 - RNA, 19 nt, Artificial Sequence
  Description of Artificial Sequence: Synthetic oligonucleotide
  Antisense strand to SEQ ID NO: 841700
aguaccaaggucuugucuc

SEQ ID NO: 841702 - RNA, 19 nt, Artificial Sequence
  Description of Artificial Sequence: Synthetic oligonucleotide
  Sense strand starting at position 8 of SEQ ID NO: 588096
agaccuugguacucuauua

SEQ ID NO: 841703 - RNA, 19 nt, Artificial Sequence
  Description of Artificial Sequence: Synthetic oligonucleotide
  Antisense strand to SEQ ID NO: 841702
uaauagaguaccaaggucu

SEQ ID NO: 841704 - RNA, 19 nt, Artificial Sequence
  Description of Artificial Sequence: Synthetic oligonucleotide
  Sense strand starting at position 13 of SEQ ID NO: 588096
uugguacucuauuaacaag

SEQ ID NO: 841705 - RNA, 19 nt, Artificial Sequence
  Description of Artificial Sequence: Synthetic oligonucleotide
  Antisense strand to SEQ ID NO: 841704
cuuguuaauagaguaccaa

SEQ ID NO: 841706 - RNA, 19 nt, Artificial Sequence
  Description of Artificial Sequence: Synthetic oligonucleotide
  Sense strand starting at position 115 of SEQ ID NO: 588096
augggauuacugggucauu

SEQ ID NO: 841707 - RNA, 19 nt, Artificial Sequence
  Description of Artificial Sequence: Synthetic oligonucleotide
  Antisense strand to SEQ ID NO: 841706
aaugacccaguaaucccau

SEQ ID NO: 841708 - RNA, 19 nt, Artificial Sequence
  Description of Artificial Sequence: Synthetic oligonucleotide
  Sense strand starting at position 126 of SEQ ID NO: 588096
gggucauuggcacguacau

SEQ ID NO: 841709 - RNA, 19 nt, Artificial Sequence
  Description of Artificial Sequence: Synthetic oligonucleotide
  Antisense strand to SEQ ID NO: 841708
auguacgugccaaugaccc

SEQ ID NO: 841710 - RNA, 19 nt, Artificial Sequence
  Description of Artificial Sequence: Synthetic oligonucleotide
  Sense strand starting at position 128 of SEQ ID NO: 588096
gucauuggcacguacauuu

SEQ ID NO: 841711 - RNA, 19 nt, Artificial Sequence
  Description of Artificial Sequence: Synthetic oligonucleotide
  Antisense strand to SEQ ID NO: 841710
aaauguacgugccaaugac

SEQ ID NO: 841712 - RNA, 19 nt, Artificial Sequence
  Description of Artificial Sequence: Synthetic oligonucleotide
  Sense strand starting at position 153 of SEQ ID NO: 588096
cugauaaguuccgccaaag

SEQ ID NO: 841713 - RNA, 19 nt, Artificial Sequence
  Description of Artificial Sequence: Synthetic oligonucleotide
  Antisense strand to SEQ ID NO: 841712
cuuuggcggaacuuaucag

SEQ ID NO: 841714 - RNA, 19 nt, Artificial Sequence
  Description of Artificial Sequence: Synthetic oligonucleotide
  Sense strand starting at position 202 of SEQ ID NO: 588096
auguaaggugcaugaucau

SEQ ID NO: 841715 - RNA, 19 nt, Artificial Sequence
  Description of Artificial Sequence: Synthetic oligonucleotide
  Antisense strand to SEQ ID NO: 841714
augaucaugcaccuuacau

SEQ ID NO: 841716 - RNA, 19 nt, Artificial Sequence
  Description of Artificial Sequence: Synthetic oligonucleotide
  Sense strand starting at position 208 of SEQ ID NO: 588096
ggugcaugaucaucacuag

SEQ ID NO: 841717 - RNA, 19 nt, Artificial Sequence
  Description of Artificial Sequence: Synthetic oligonucleotide
  Antisense strand to SEQ ID NO: 841716
cuagugaugaucaugcacc

SEQ ID NO: 841718 - RNA, 19 nt, Artificial Sequence
  Description of Artificial Sequence: Synthetic oligonucleotide
  Sense strand starting at position 209 of SEQ ID NO: 588096
gugcaugaucaucacuagu

SEQ ID NO: 841719 - RNA, 19 nt, Artificial Sequence
  Description of Artificial Sequence: Synthetic oligonucleotide
  Antisense strand to SEQ ID NO: 841718
acuagugaugaucaugcac

SEQ ID NO: 841720 - RNA, 19 nt, Artificial Sequence
  Description of Artificial Sequence: Synthetic oligonucleotide
  Sense strand starting at position 211 of SEQ ID NO: 588096
gcaugaucaucacuaguua

SEQ ID NO: 841721 - RNA, 19 nt, Artificial Sequence
  Description of Artificial Sequence: Synthetic oligonucleotide
  Antisense strand to SEQ ID NO: 841720
uaacuagugaugaucaugc

SEQ ID NO: 841722 - RNA, 19 nt, Artificial Sequence
  Description of Artificial Sequence: Synthetic oligonucleotide
  Sense strand starting at position 255 of SEQ ID NO: 588096
uccugaauuugggaaccau

SEQ ID NO: 841723 - RNA, 19 nt, Artificial Sequence
  Description of Artificial Sequence: Synthetic oligonucleotide
  Antisense strand to SEQ ID NO: 841722
augguucccaaauucagga

SEQ ID NO: 841724 - RNA, 19 nt, Artificial Sequence
  Description of Artificial Sequence: Synthetic oligonucleotide
  Sense strand starting at position 434 of SEQ ID NO: 588096
acagaagccuuuguugacu

SEQ ID NO: 841725 - RNA, 19 nt, Artificial Sequence
  Description of Artificial Sequence: Synthetic oligonucleotide
  Antisense strand to SEQ ID NO: 841724
agucaacaaaggcuucugu

SEQ ID NO: 841726 - RNA, 19 nt, Artificial Sequence
  Description of Artificial Sequence: Synthetic oligonucleotide
  Sense strand starting at position 612 of SEQ ID NO: 588096
cuaauuaacugguuauaga

SEQ ID NO: 841727 - RNA, 19 nt, Artificial Sequence
  Description of Artificial Sequence: Synthetic oligonucleotide
  Antisense strand to SEQ ID NO: 841726
ucuauaaccaguuaauuag

SEQ ID NO: 841728 - RNA, 19 nt, Artificial Sequence
  Description of Artificial Sequence: Synthetic oligonucleotide
  Sense strand starting at position 615 of SEQ ID NO: 588096
auuaacugguuauagacau

SEQ ID NO: 841729 - RNA, 19 nt, Artificial Sequence
  Description of Artificial Sequence: Synthetic oligonucleotide
  Antisense strand to SEQ ID NO: 841728
augucuauaaccaguuaau

SEQ ID NO: 841730 - RNA, 19 nt, Artificial Sequence
  Description of Artificial Sequence: Synthetic oligonucleotide
  Sense strand starting at position 622 of SEQ ID NO: 588096
gguuauagacaucagugua

SEQ ID NO: 841731 - RNA, 19 nt, Artificial Sequence
  Description of Artificial Sequence: Synthetic oligonucleotide
  Antisense strand to SEQ ID NO: 841730
uacacugaugucuauaacc

SEQ ID NO: 841732 - RNA, 19 nt, Artificial Sequence
  Description of Artificial Sequence: Synthetic oligonucleotide
  Sense strand starting at position 652 of SEQ ID NO: 588096
agcuuuaacuucgcacaga

SEQ ID NO: 841733 - RNA, 19 nt, Artificial Sequence
  Description of Artificial Sequence: Synthetic oligonucleotide
  Antisense strand to SEQ ID NO: 841732
ucugugcgaaguuaaagcu

SEQ ID NO: 841734 - RNA, 19 nt, Artificial Sequence
  Description of Artificial Sequence: Synthetic oligonucleotide
  Sense strand starting at position 655 of SEQ ID NO: 588096
uuuaacuucgcacagaauu

SEQ ID NO: 841735 - RNA, 19 nt, Artificial Sequence
  Description of Artificial Sequence: Synthetic oligonucleotide
  Antisense strand to SEQ ID NO: 841734
aauucugugcgaaguuaaa

SEQ ID NO: 841736 - RNA, 19 nt, Artificial Sequence
  Description of Artificial Sequence: Synthetic oligonucleotide
  Sense strand starting at position 821 of SEQ ID NO: 588096
cuccuuauggaagguaaga

SEQ ID NO: 841737 - RNA, 19 nt, Artificial Sequence
  Description of Artificial Sequence: Synthetic oligonucleotide
  Antisense strand to SEQ ID NO: 841736
ucuuaccuuccauaaggag

SEQ ID NO: 841738 - RNA, 19 nt, Artificial Sequence
  Description of Artificial Sequence: Synthetic oligonucleotide
  Sense strand starting at position 838 of SEQ ID NO: 588096
gacagaagcugucuaucua

SEQ ID NO: 841739 - RNA, 19 nt, Artificial Sequence
  Description of Artificial Sequence: Synthetic oligonucleotide
  Antisense strand to SEQ ID NO: 841738
uagauagacagcuucuguc

SEQ ID NO: 841740 - RNA, 19 nt, Artificial Sequence
  Description of Artificial Sequence: Synthetic oligonucleotide
  Sense strand starting at position 839 of SEQ ID NO: 588096
acagaagcugucuaucuaa

SEQ ID NO: 841741 - RNA, 19 nt, Artificial Sequence
  Description of Artificial Sequence: Synthetic oligonucleotide
  Antisense strand to SEQ ID NO: 841740
uuagauagacagcuucugu

SEQ ID NO: 841742 - RNA, 19 nt, Artificial Sequence
  Description of Artificial Sequence: Synthetic oligonucleotide
  Sense strand starting at position 950 of SEQ ID NO: 588096
ggauauuagcgucaaccag

SEQ ID NO: 841743 - RNA, 19 nt, Artificial Sequence
  Description of Artificial Sequence: Synthetic oligonucleotide
  Antisense strand to SEQ ID NO: 841742
cugguugacgcuaauaucc

SEQ ID NO: 841744 - RNA, 19 nt, Artificial Sequence
  Description of Artificial Sequence: Synthetic oligonucleotide
  Sense strand starting at position 957 of SEQ ID NO: 588096
agcgucaaccaguaucuau

SEQ ID NO: 841745 - RNA, 19 nt, Artificial Sequence
  Description of Artificial Sequence: Synthetic oligonucleotide
  Antisense strand to SEQ ID NO: 841744
auagauacugguugacgcu

SEQ ID NO: 841746 - RNA, 19 nt, Artificial Sequence
  Description of Artificial Sequence: Synthetic oligonucleotide
  Sense strand starting at position 1048 of SEQ ID NO: 588096
agaauccaugcuugucaga

SEQ ID NO: 841747 - RNA, 19 nt, Artificial Sequence
  Description of Artificial Sequence: Synthetic oligonucleotide
  Antisense strand to SEQ ID NO: 841746
ucugacaagcauggauucu

SEQ ID NO: 841748 - RNA, 19 nt, Artificial Sequence
  Description of Artificial Sequence: Synthetic oligonucleotide
  Sense strand starting at position 1050 of SEQ ID NO: 588096
aauccaugcuugucagaag

SEQ ID NO: 841749 - RNA, 19 nt, Artificial Sequence
  Description of Artificial Sequence: Synthetic oligonucleotide
  Antisense strand to SEQ ID NO: 841748
cuucugacaagcauggauu

SEQ ID NO: 841750 - RNA, 19 nt, Artificial Sequence
  Description of Artificial Sequence: Synthetic oligonucleotide
  Sense strand starting at position 1080 of SEQ ID NO: 588096
ucgguuagagcagaaucau

SEQ ID NO: 841751 - RNA, 19 nt, Artificial Sequence
  Description of Artificial Sequence: Synthetic oligonucleotide
  Antisense strand to SEQ ID NO: 841750
augauucugcucuaaccga

SEQ ID NO: 841752 - RNA, 19 nt, Artificial Sequence
  Description of Artificial Sequence: Synthetic oligonucleotide
  Sense strand starting at position 1161 of SEQ ID NO: 588096
aguaaaguggcuuguccaa

SEQ ID NO: 841753 - RNA, 19 nt, Artificial Sequence
  Description of Artificial Sequence: Synthetic oligonucleotide
  Antisense strand to SEQ ID NO: 841752
uuggacaagccacuuuacu

SEQ ID NO: 841754 - RNA, 19 nt, Artificial Sequence
  Description of Artificial Sequence: Synthetic oligonucleotide
  Sense strand starting at position 1177 of SEQ ID NO: 588096
caaggucaacagugaauua

SEQ ID NO: 841755 - RNA, 19 nt, Artificial Sequence
  Description of Artificial Sequence: Synthetic oligonucleotide
  Antisense strand to SEQ ID NO: 841754
uaauucacuguugaccuug

SEQ ID NO: 841756 - RNA, 19 nt, Artificial Sequence
  Description of Artificial Sequence: Synthetic oligonucleotide
  Sense strand starting at position 1244 of SEQ ID NO: 588096
agccgaagucacgaaguaa

SEQ ID NO: 841757 - RNA, 19 nt, Artificial Sequence
  Description of Artificial Sequence: Synthetic oligonucleotide
  Antisense strand to SEQ ID NO: 841756
uuacuucgugacuucggcu

SEQ ID NO: 841758 - RNA, 19 nt, Artificial Sequence
  Description of Artificial Sequence: Synthetic oligonucleotide
  Sense strand starting at position 1372 of SEQ ID NO: 588096
gccuaagaugaaugcauga

SEQ ID NO: 841759 - RNA, 19 nt, Artificial Sequence
  Description of Artificial Sequence: Synthetic oligonucleotide
  Antisense strand to SEQ ID NO: 841758
ucaugcauucaucuuaggc

SEQ ID NO: 841760 - RNA, 19 nt, Artificial Sequence
  Description of Artificial Sequence: Synthetic oligonucleotide
  Sense strand starting at position 2066 of SEQ ID NO: 588096
cugcuuugcucuccggaaa

SEQ ID NO: 841761 - RNA, 19 nt, Artificial Sequence
  Description of Artificial Sequence: Synthetic oligonucleotide
  Antisense strand to SEQ ID NO: 841760
uuuccggagagcaaagcag

SEQ ID NO: 841762 - RNA, 19 nt, Artificial Sequence
  Description of Artificial Sequence: Synthetic oligonucleotide
  Sense strand starting at position 2109 of SEQ ID NO: 588096
gcgaguuugcccucgacuc

SEQ ID NO: 841763 - RNA, 19 nt, Artificial Sequence
  Description of Artificial Sequence: Synthetic oligonucleotide
  Antisense strand to SEQ ID NO: 841762
gagucgagggcaaacucgc

SEQ ID NO: 841764 - RNA, 19 nt, Artificial Sequence
  Description of Artificial Sequence: Synthetic oligonucleotide
  Sense strand starting at position 2246 of SEQ ID NO: 588096
guaggugacauuggaagaa

SEQ ID NO: 841765 - RNA, 19 nt, Artificial Sequence
  Description of Artificial Sequence: Synthetic oligonucleotide
  Antisense strand to SEQ ID NO: 841764
uucuuccaaugucaccuac

SEQ ID NO: 841766 - RNA, 19 nt, Artificial Sequence
  Description of Artificial Sequence: Synthetic oligonucleotide
  Sense strand starting at position 2258 of SEQ ID NO: 588096
ggaagaagucagggcauua

SEQ ID NO: 841767 - RNA, 19 nt, Artificial Sequence
  Description of Artificial Sequence: Synthetic oligonucleotide
  Antisense strand to SEQ ID NO: 841766
uaaugcccugacuucuucc

SEQ ID NO: 841768 - RNA, 19 nt, Artificial Sequence
  Description of Artificial Sequence: Synthetic oligonucleotide
  Sense strand starting at position 3031 of SEQ ID NO: 588096
caaggugagugguaaggaa

SEQ ID NO: 841769 - RNA, 19 nt, Artificial Sequence
  Description of Artificial Sequence: Synthetic oligonucleotide
  Antisense strand to SEQ ID NO: 841768
uuccuuaccacucaccuug

SEQ ID NO: 841770 - RNA, 19 nt, Artificial Sequence
  Description of Artificial Sequence: Synthetic oligonucleotide
  Sense strand starting at position 3070 of SEQ ID NO: 588096
gccauuggccuccgagaau

SEQ ID NO: 841771 - RNA, 19 nt, Artificial Sequence
  Description of Artificial Sequence: Synthetic oligonucleotide
  Antisense strand to SEQ ID NO: 841770
auucucggaggccaauggc

SEQ ID NO: 841772 - RNA, 19 nt, Artificial Sequence
  Description of Artificial Sequence: Synthetic oligonucleotide
  Sense strand starting at position 3335 of SEQ ID NO: 588096
aguagugagaccuggaaga

SEQ ID NO: 841773 - RNA, 19 nt, Artificial Sequence
  Description of Artificial Sequence: Synthetic oligonucleotide
  Antisense strand to SEQ ID NO: 841772
ucuuccaggucucacuacu

SEQ ID NO: 841774 - RNA, 19 nt, Artificial Sequence
  Description of Artificial Sequence: Synthetic oligonucleotide
  Sense strand starting at position 3496 of SEQ ID NO: 588096
gcauaaauauuagaacuag

SEQ ID NO: 841775 - RNA, 19 nt, Artificial Sequence
  Description of Artificial Sequence: Synthetic oligonucleotide
  Antisense strand to SEQ ID NO: 841774
cuaguucuaauauuuaugc

SEQ ID NO: 841776 - RNA, 19 nt, Artificial Sequence
  Description of Artificial Sequence: Synthetic oligonucleotide
  Sense strand starting at position 3893 of SEQ ID NO: 588096
uuaggaggcuuacucauua

SEQ ID NO: 841777 - RNA, 19 nt, Artificial Sequence
  Description of Artificial Sequence: Synthetic oligonucleotide
  Antisense strand to SEQ ID NO: 841776
uaaugaguaagccuccuaa

SEQ ID NO: 841778 - RNA, 19 nt, Artificial Sequence
  Description of Artificial Sequence: Synthetic oligonucleotide
  Sense strand starting at position 3897 of SEQ ID NO: 588096
gaggcuuacucauuacaga

SEQ ID NO: 841779 - RNA, 19 nt, Artificial Sequence
  Description of Artificial Sequence: Synthetic oligonucleotide
  Antisense strand to SEQ ID NO: 841778
ucuguaaugaguaagccuc

SEQ ID NO: 841780 - RNA, 19 nt, Artificial Sequence
  Description of Artificial Sequence: Synthetic oligonucleotide
  Sense strand starting at position 149 of SEQ ID NO: 588097
gagcucuucucccuggcau

SEQ ID NO: 841781 - RNA, 19 nt, Artificial Sequence
  Description of Artificial Sequence: Synthetic oligonucleotide
  Antisense strand to SEQ ID NO: 841780
augccagggagaagagcuc

SEQ ID NO: 841782 - RNA, 19 nt, Artificial Sequence
  Description of Artificial Sequence: Synthetic oligonucleotide
  Sense strand starting at position 270 of SEQ ID NO: 588097
gcuuguucucaucaguguu

SEQ ID NO: 841783 - RNA, 19 nt, Artificial Sequence
  Description of Artificial Sequence: Synthetic oligonucleotide
  Antisense strand to SEQ ID NO: 841782
aacacugaugagaacaagc

SEQ ID NO: 841784 - RNA, 19 nt, Artificial Sequence
  Description of Artificial Sequence: Synthetic oligonucleotide
  Sense strand starting at position 350 of SEQ ID NO: 588097
acucauuugccagguuucu

SEQ ID NO: 841785 - RNA, 19 nt, Artificial Sequence
  Description of Artificial Sequence: Synthetic oligonucleotide
  Antisense strand to SEQ ID NO: 841784
agaaaccuggcaaaugagu

SEQ ID NO: 841786 - RNA, 19 nt, Artificial Sequence
  Description of Artificial Sequence: Synthetic oligonucleotide
  Sense strand starting at position 544 of SEQ ID NO: 588097
guggcagcuguguucauca

SEQ ID NO: 841787 - RNA, 19 nt, Artificial Sequence
  Description of Artificial Sequence: Synthetic oligonucleotide
  Antisense strand to SEQ ID NO: 841786
ugaugaacacagcugccac

SEQ ID NO: 841788 - RNA, 19 nt, Artificial Sequence
  Description of Artificial Sequence: Synthetic oligonucleotide
  Sense strand starting at position 561 of SEQ ID NO: 588097
caucuugacugggucaaga

SEQ ID NO: 841789 - RNA, 19 nt, Artificial Sequence
  Description of Artificial Sequence: Synthetic oligonucleotide
  Antisense strand to SEQ ID NO: 841788
ucuugacccagucaagaug

SEQ ID NO: 841790 - RNA, 19 nt, Artificial Sequence
  Description of Artificial Sequence: Synthetic oligonucleotide
  Sense strand starting at position 598 of SEQ ID NO: 588097
ucaugugcgguuuauugua

SEQ ID NO: 841791 - RNA, 19 nt, Artificial Sequence
  Description of Artificial Sequence: Synthetic oligonucleotide
  Antisense strand to SEQ ID NO: 841790
uacaauaaaccgcacauga

SEQ ID NO: 841792 - RNA, 19 nt, Artificial Sequence
  Description of Artificial Sequence: Synthetic oligonucleotide
  Sense strand starting at position 612 of SEQ ID NO: 588097
uuguauacauccguugaaa

SEQ ID NO: 841793 - RNA, 19 nt, Artificial Sequence
  Description of Artificial Sequence: Synthetic oligonucleotide
  Antisense strand to SEQ ID NO: 841792
uuucaacggauguauacaa

SEQ ID NO: 841794 - RNA, 19 nt, Artificial Sequence
  Description of Artificial Sequence: Synthetic oligonucleotide
  Sense strand starting at position 614 of SEQ ID NO: 588097
guauacauccguugaaaca

SEQ ID NO: 841795 - RNA, 19 nt, Artificial Sequence
  Description of Artificial Sequence: Synthetic oligonucleotide
  Antisense strand to SEQ ID NO: 841794
uguuucaacggauguauac

SEQ ID NO: 841796 - RNA, 19 nt, Artificial Sequence
  Description of Artificial Sequence: Synthetic oligonucleotide
  Sense strand starting at position 624 of SEQ ID NO: 588097
guugaaacauauuaagaca

SEQ ID NO: 841797 - RNA, 19 nt, Artificial Sequence
  Description of Artificial Sequence: Synthetic oligonucleotide
  Antisense strand to SEQ ID NO: 841796
ugucuuaauauguuucaac

SEQ ID NO: 841798 - RNA, 19 nt, Artificial Sequence
  Description of Artificial Sequence: Synthetic oligonucleotide
  Sense strand starting at position 718 of SEQ ID NO: 588097
gguguuugcagucagaccu

SEQ ID NO: 841799 - RNA, 19 nt, Artificial Sequence
  Description of Artificial Sequence: Synthetic oligonucleotide
  Antisense strand to SEQ ID NO: 841798
aggucugacugcaaacacc

SEQ ID NO: 841800 - RNA, 19 nt, Artificial Sequence
  Description of Artificial Sequence: Synthetic oligonucleotide
  Sense strand starting at position 841 of SEQ ID NO: 588097
uaccguuccuuccugagaa

SEQ ID NO: 841801 - RNA, 19 nt, Artificial Sequence
  Description of Artificial Sequence: Synthetic oligonucleotide
  Antisense strand to SEQ ID NO: 841800
uucucaggaaggaacggua

SEQ ID NO: 841802 - RNA, 19 nt, Artificial Sequence
  Description of Artificial Sequence: Synthetic oligonucleotide
  Sense strand starting at position 843 of SEQ ID NO: 588097
ccguuccuuccugagaacu

SEQ ID NO: 841803 - RNA, 19 nt, Artificial Sequence
  Description of Artificial Sequence: Synthetic oligonucleotide
  Antisense strand to SEQ ID NO: 841802
aguucucaggaaggaacgg

SEQ ID NO: 841804 - RNA, 19 nt, Artificial Sequence
  Description of Artificial Sequence: Synthetic oligonucleotide
  Sense strand starting at position 853 of SEQ ID NO: 588097
cugagaacucagcgauacu

SEQ ID NO: 841805 - RNA, 19 nt, Artificial Sequence
  Description of Artificial Sequence: Synthetic oligonucleotide
  Antisense strand to SEQ ID NO: 841804
aguaucgcugaguucucag

SEQ ID NO: 841806 - RNA, 19 nt, Artificial Sequence
  Description of Artificial Sequence: Synthetic oligonucleotide
  Sense strand starting at position 854 of SEQ ID NO: 588097
ugagaacucagcgauacug

SEQ ID NO: 841807 - RNA, 19 nt, Artificial Sequence
  Description of Artificial Sequence: Synthetic oligonucleotide
  Antisense strand to SEQ ID NO: 841806
caguaucgcugaguucuca

SEQ ID NO: 841808 - RNA, 19 nt, Artificial Sequence
  Description of Artificial Sequence: Synthetic oligonucleotide
  Sense strand starting at position 899 of SEQ ID NO: 588097
cugacaaauggugagcauu

SEQ ID NO: 841809 - RNA, 19 nt, Artificial Sequence
  Description of Artificial Sequence: Synthetic oligonucleotide
  Antisense strand to SEQ ID NO: 841808
aaugcucaccauuugucag

SEQ ID NO: 841810 - RNA, 19 nt, Artificial Sequence
  Description of Artificial Sequence: Synthetic oligonucleotide
  Sense strand starting at position 1239 of SEQ ID NO: 588097
gacguuguugucuggguaa

SEQ ID NO: 841811 - RNA, 19 nt, Artificial Sequence
  Description of Artificial Sequence: Synthetic oligonucleotide
  Antisense strand to SEQ ID NO: 841810
uuacccagacaacaacguc

SEQ ID NO: 841812 - RNA, 19 nt, Artificial Sequence
  Description of Artificial Sequence: Synthetic oligonucleotide
  Sense strand starting at position 1242 of SEQ ID NO: 588097
guuguugucuggguaaaua

SEQ ID NO: 841813 - RNA, 19 nt, Artificial Sequence
  Description of Artificial Sequence: Synthetic oligonucleotide
  Antisense strand to SEQ ID NO: 841812
uauuuacccagacaacaac

SEQ ID NO: 841814 - RNA, 19 nt, Artificial Sequence
  Description of Artificial Sequence: Synthetic oligonucleotide
  Sense strand starting at position 1269 of SEQ ID NO: 588097
aucuucuggcgccaagaaa

SEQ ID NO: 841815 - RNA, 19 nt, Artificial Sequence
  Description of Artificial Sequence: Synthetic oligonucleotide
  Antisense strand to SEQ ID NO: 841814
uuucuuggcgccagaagau

SEQ ID NO: 841816 - RNA, 19 nt, Artificial Sequence
  Description of Artificial Sequence: Synthetic oligonucleotide
  Sense strand starting at position 1350 of SEQ ID NO: 588097
gcaucugguugccucaaua

SEQ ID NO: 841817 - RNA, 19 nt, Artificial Sequence
  Description of Artificial Sequence: Synthetic oligonucleotide
  Antisense strand to SEQ ID NO: 841816
uauugaggcaaccagaugc

SEQ ID NO: 841818 - RNA, 19 nt, Artificial Sequence
  Description of Artificial Sequence: Synthetic oligonucleotide
  Sense strand starting at position 1552 of SEQ ID NO: 588097
agcccagagccuuguccua

SEQ ID NO: 841819 - RNA, 19 nt, Artificial Sequence
  Description of Artificial Sequence: Synthetic oligonucleotide
  Antisense strand to SEQ ID NO: 841818
uaggacaaggcucugggcu

SEQ ID NO: 841820 - RNA, 19 nt, Artificial Sequence
  Description of Artificial Sequence: Synthetic oligonucleotide
  Sense strand starting at position 2741 of SEQ ID NO: 588097
gaguuaccucccgaagggu

SEQ ID NO: 841821 - RNA, 19 nt, Artificial Sequence
  Description of Artificial Sequence: Synthetic oligonucleotide
  Antisense strand to SEQ ID NO: 841820
acccuucgggagguaacuc

SEQ ID NO: 841822 - RNA, 19 nt, Artificial Sequence
  Description of Artificial Sequence: Synthetic oligonucleotide
  Sense strand starting at position 2783 of SEQ ID NO: 588097
ccugauaucucucagagga

SEQ ID NO: 841823 - RNA, 19 nt, Artificial Sequence
  Description of Artificial Sequence: Synthetic oligonucleotide
  Antisense strand to SEQ ID NO: 841822
uccucugagagauaucagg

SEQ ID NO: 841824 - RNA, 19 nt, Artificial Sequence
  Description of Artificial Sequence: Synthetic oligonucleotide
  Sense strand starting at position 2785 of SEQ ID NO: 588097
ugauaucucucagaggagu

SEQ ID NO: 841825 - RNA, 19 nt, Artificial Sequence
  Description of Artificial Sequence: Synthetic oligonucleotide
  Antisense strand to SEQ ID NO: 841824
acuccucugagagauauca

SEQ ID NO: 841826 - RNA, 19 nt, Artificial Sequence
  Description of Artificial Sequence: Synthetic oligonucleotide
  Sense strand starting at position 2859 of SEQ ID NO: 588097
cguucucaucuccgugaaa

SEQ ID NO: 841827 - RNA, 19 nt, Artificial Sequence
  Description of Artificial Sequence: Synthetic oligonucleotide
  Antisense strand to SEQ ID NO: 841826
uuucacggagaugagaacg

SEQ ID NO: 841828 - RNA, 19 nt, Artificial Sequence
  Description of Artificial Sequence: Synthetic oligonucleotide
  Sense strand starting at position 2860 of SEQ ID NO: 588097
guucucaucuccgugaaag

SEQ ID NO: 841829 - RNA, 19 nt, Artificial Sequence
  Description of Artificial Sequence: Synthetic oligonucleotide
  Antisense strand to SEQ ID NO: 841828
cuuucacggagaugagaac

SEQ ID NO: 841830 - RNA, 19 nt, Artificial Sequence
  Description of Artificial Sequence: Synthetic oligonucleotide
  Sense strand starting at position 2861 of SEQ ID NO: 588097
uucucaucuccgugaaagc

SEQ ID NO: 841831 - RNA, 19 nt, Artificial Sequence
  Description of Artificial Sequence: Synthetic oligonucleotide
  Antisense strand to SEQ ID NO: 841830
gcuuucacggagaugagaa

SEQ ID NO: 841832 - RNA, 19 nt, Artificial Sequence
  Description of Artificial Sequence: Synthetic oligonucleotide
  Sense strand starting at position 2862 of SEQ ID NO: 588097
ucucaucuccgugaaagcu

SEQ ID NO: 841833 - RNA, 19 nt, Artificial Sequence
  Description of Artificial Sequence: Synthetic oligonucleotide
  Antisense strand to SEQ ID NO: 841832
agcuuucacggagaugaga

SEQ ID NO: 841834 - RNA, 19 nt, Artificial Sequence
  Description of Artificial Sequence: Synthetic oligonucleotide
  Sense strand starting at position 2936 of SEQ ID NO: 588097
cgagacgugucccuaaaca

SEQ ID NO: 841835 - RNA, 19 nt, Artificial Sequence
  Description of Artificial Sequence: Synthetic oligonucleotide
  Antisense strand to SEQ ID NO: 841834
uguuuagggacacgucucg

SEQ ID NO: 841836 - RNA, 19 nt, Artificial Sequence
  Description of Artificial Sequence: Synthetic oligonucleotide
  Sense strand starting at position 3282 of SEQ ID NO: 588097
auauuauuaccguaugagc

SEQ ID NO: 841837 - RNA, 19 nt, Artificial Sequence
  Description of Artificial Sequence: Synthetic oligonucleotide
  Antisense strand to SEQ ID NO: 841836
gcucauacgguaauaauau

SEQ ID NO: 841838 - RNA, 19 nt, Artificial Sequence
  Description of Artificial Sequence: Synthetic oligonucleotide
  Sense strand starting at position 3349 of SEQ ID NO: 588097
ggaagagacaugugcacau

SEQ ID NO: 841839 - RNA, 19 nt, Artificial Sequence
  Description of Artificial Sequence: Synthetic oligonucleotide
  Antisense strand to SEQ ID NO: 841838
augugcacaugucucuucc

SEQ ID NO: 841840 - RNA, 19 nt, Artificial Sequence
  Description of Artificial Sequence: Synthetic oligonucleotide
  Sense strand starting at position 3353 of SEQ ID NO: 588097
gagacaugugcacaucugu

SEQ ID NO: 841841 - RNA, 19 nt, Artificial Sequence
  Description of Artificial Sequence: Synthetic oligonucleotide
  Antisense strand to SEQ ID NO: 841840
acagaugugcacaugucuc

SEQ ID NO: 841842 - RNA, 19 nt, Artificial Sequence
  Description of Artificial Sequence: Synthetic oligonucleotide
  Sense strand starting at position 3364 of SEQ ID NO: 588097
acaucuguguuccuagcaa

SEQ ID NO: 841843 - RNA, 19 nt, Artificial Sequence
  Description of Artificial Sequence: Synthetic oligonucleotide
  Antisense strand to SEQ ID NO: 841842
uugcuaggaacacagaugu

SEQ ID NO: 841844 - RNA, 19 nt, Artificial Sequence
  Description of Artificial Sequence: Synthetic oligonucleotide
  Sense strand starting at position 3446 of SEQ ID NO: 588097
cggagugagucugucucua

SEQ ID NO: 841845 - RNA, 19 nt, Artificial Sequence
  Description of Artificial Sequence: Synthetic oligonucleotide
  Antisense strand to SEQ ID NO: 841844
uagagacagacucacuccg

SEQ ID NO: 841846 - RNA, 19 nt, Artificial Sequence
  Description of Artificial Sequence: Synthetic oligonucleotide
  Sense strand starting at position 3448 of SEQ ID NO: 588097
gagugagucugucucuaga

SEQ ID NO: 841847 - RNA, 19 nt, Artificial Sequence
  Description of Artificial Sequence: Synthetic oligonucleotide
  Antisense strand to SEQ ID NO: 841846
ucuagagacagacucacuc

SEQ ID NO: 841848 - RNA, 19 nt, Artificial Sequence
  Description of Artificial Sequence: Synthetic oligonucleotide
  Sense strand starting at position 3450 of SEQ ID NO: 588097
gugagucugucucuagaug

SEQ ID NO: 841849 - RNA, 19 nt, Artificial Sequence
  Description of Artificial Sequence: Synthetic oligonucleotide
  Antisense strand to SEQ ID NO: 841848
caucuagagacagacucac

SEQ ID NO: 841850 - RNA, 19 nt, Artificial Sequence
  Description of Artificial Sequence: Synthetic oligonucleotide
  Sense strand starting at position 3457 of SEQ ID NO: 588097
ugucucuagauggaauguu

SEQ ID NO: 841851 - RNA, 19 nt, Artificial Sequence
  Description of Artificial Sequence: Synthetic oligonucleotide
  Antisense strand to SEQ ID NO: 841850
aacauuccaucuagagaca

SEQ ID NO: 841852 - RNA, 19 nt, Artificial Sequence
  Description of Artificial Sequence: Synthetic oligonucleotide
  Sense strand starting at position 3469 of SEQ ID NO: 588097
gaauguuucucagcccuag

SEQ ID NO: 841853 - RNA, 19 nt, Artificial Sequence
  Description of Artificial Sequence: Synthetic oligonucleotide
  Antisense strand to SEQ ID NO: 841852
cuagggcugagaaacauuc

SEQ ID NO: 841854 - RNA, 19 nt, Artificial Sequence
  Description of Artificial Sequence: Synthetic oligonucleotide
  Sense strand starting at position 3473 of SEQ ID NO: 588097
guuucucagcccuagaaag

SEQ ID NO: 841855 - RNA, 19 nt, Artificial Sequence
  Description of Artificial Sequence: Synthetic oligonucleotide
  Antisense strand to SEQ ID NO: 841854
cuuucuagggcugagaaac

SEQ ID NO: 841856 - RNA, 19 nt, Artificial Sequence
  Description of Artificial Sequence: Synthetic oligonucleotide
  Sense strand starting at position 3917 of SEQ ID NO: 588097
gucaucaaauucguagaaa

SEQ ID NO: 841857 - RNA, 19 nt, Artificial Sequence
  Description of Artificial Sequence: Synthetic oligonucleotide
  Antisense strand to SEQ ID NO: 841856
uuucuacgaauuugaugac

SEQ ID NO: 841858 - RNA, 19 nt, Artificial Sequence
  Description of Artificial Sequence: Synthetic oligonucleotide
  Sense strand starting at position 3980 of SEQ ID NO: 588097
gcugugaacgguguugagu

SEQ ID NO: 841859 - RNA, 19 nt, Artificial Sequence
  Description of Artificial Sequence: Synthetic oligonucleotide
  Antisense strand to SEQ ID NO: 841858
acucaacaccguucacagc

SEQ ID NO: 841860 - RNA, 19 nt, Artificial Sequence
  Description of Artificial Sequence: Synthetic oligonucleotide
  Sense strand starting at position 1 of SEQ ID NO: 588098
uggugaaauccuuacucuu

SEQ ID NO: 841861 - RNA, 19 nt, Artificial Sequence
  Description of Artificial Sequence: Synthetic oligonucleotide
  Antisense strand to SEQ ID NO: 841860
aagaguaaggauuucacca

SEQ ID NO: 841862 - RNA, 19 nt, Artificial Sequence
  Description of Artificial Sequence: Synthetic oligonucleotide
  Sense strand starting at position 61 of SEQ ID NO: 588098
acugguguuucuccuuauu

SEQ ID NO: 841863 - RNA, 19 nt, Artificial Sequence
  Description of Artificial Sequence: Synthetic oligonucleotide
  Antisense strand to SEQ ID NO: 841862
aauaaggagaaacaccagu

SEQ ID NO: 841864 - RNA, 19 nt, Artificial Sequence
  Description of Artificial Sequence: Synthetic oligonucleotide
  Sense strand starting at position 63 of SEQ ID NO: 588098
ugguguuucuccuuauuga

SEQ ID NO: 841865 - RNA, 19 nt, Artificial Sequence
  Description of Artificial Sequence: Synthetic oligonucleotide
  Antisense strand to SEQ ID NO: 841864
ucaauaaggagaaacacca

SEQ ID NO: 841866 - RNA, 19 nt, Artificial Sequence
  Description of Artificial Sequence: Synthetic oligonucleotide
  Sense strand starting at position 64 of SEQ ID NO: 588098
gguguuucuccuuauugaa

SEQ ID NO: 841867 - RNA, 19 nt, Artificial Sequence
  Description of Artificial Sequence: Synthetic oligonucleotide
  Antisense strand to SEQ ID NO: 841866
uucaauaaggagaaacacc

SEQ ID NO: 841868 - RNA, 19 nt, Artificial Sequence
  Description of Artificial Sequence: Synthetic oligonucleotide
  Sense strand starting at position 66 of SEQ ID NO: 588098
uguuucuccuuauugaaag

SEQ ID NO: 841869 - RNA, 19 nt, Artificial Sequence
  Description of Artificial Sequence: Synthetic oligonucleotide
  Antisense strand to SEQ ID NO: 841868
cuuucaauaaggagaaaca

SEQ ID NO: 841870 - RNA, 19 nt, Artificial Sequence
  Description of Artificial Sequence: Synthetic oligonucleotide
  Sense strand starting at position 194 of SEQ ID NO: 588098
aguaucuguggucagcaga

SEQ ID NO: 841871 - RNA, 19 nt, Artificial Sequence
  Description of Artificial Sequence: Synthetic oligonucleotide
  Antisense strand to SEQ ID NO: 841870
ucugcugaccacagauacu

SEQ ID NO: 841872 - RNA, 19 nt, Artificial Sequence
  Description of Artificial Sequence: Synthetic oligonucleotide
  Sense strand starting at position 544 of SEQ ID NO: 588098
aggaguguuuguguggaag

SEQ ID NO: 841873 - RNA, 19 nt, Artificial Sequence
  Description of Artificial Sequence: Synthetic oligonucleotide
  Antisense strand to SEQ ID NO: 841872
cuuccacacaaacacuccu

SEQ ID NO: 841874 - RNA, 19 nt, Artificial Sequence
  Description of Artificial Sequence: Synthetic oligonucleotide
  Sense strand starting at position 626 of SEQ ID NO: 588098
augccagaaaugugagcau

SEQ ID NO: 841875 - RNA, 19 nt, Artificial Sequence
  Description of Artificial Sequence: Synthetic oligonucleotide
  Antisense strand to SEQ ID NO: 841874
augcucacauuucuggcau

SEQ ID NO: 841876 - RNA, 19 nt, Artificial Sequence
  Description of Artificial Sequence: Synthetic oligonucleotide
  Sense strand starting at position 700 of SEQ ID NO: 588098
acuagaucaucugagauuc

SEQ ID NO: 841877 - RNA, 19 nt, Artificial Sequence
  Description of Artificial Sequence: Synthetic oligonucleotide
  Antisense strand to SEQ ID NO: 841876
gaaucucagaugaucuagu

SEQ ID NO: 841878 - RNA, 19 nt, Artificial Sequence
  Description of Artificial Sequence: Synthetic oligonucleotide
  Sense strand starting at position 710 of SEQ ID NO: 588098
cugagauuccugcaggcag

SEQ ID NO: 841879 - RNA, 19 nt, Artificial Sequence
  Description of Artificial Sequence: Synthetic oligonucleotide
  Antisense strand to SEQ ID NO: 841878
cugccugcaggaaucucag

SEQ ID NO: 841880 - RNA, 19 nt, Artificial Sequence
  Description of Artificial Sequence: Synthetic oligonucleotide
  Sense strand starting at position 712 of SEQ ID NO: 588098
gagauuccugcaggcagua

SEQ ID NO: 841881 - RNA, 19 nt, Artificial Sequence
  Description of Artificial Sequence: Synthetic oligonucleotide
  Antisense strand to SEQ ID NO: 841880
uacugccugcaggaaucuc

SEQ ID NO: 841882 - RNA, 19 nt, Artificial Sequence
  Description of Artificial Sequence: Synthetic oligonucleotide
  Sense strand starting at position 736 of SEQ ID NO: 588098
cugacuccugcugaagaca

SEQ ID NO: 841883 - RNA, 19 nt, Artificial Sequence
  Description of Artificial Sequence: Synthetic oligonucleotide
  Antisense strand to SEQ ID NO: 841882
ugucuucagcaggagucag

SEQ ID NO: 841884 - RNA, 19 nt, Artificial Sequence
  Description of Artificial Sequence: Synthetic oligonucleotide
  Sense strand starting at position 836 of SEQ ID NO: 588098
ccuuguuugggcggugaaa

SEQ ID NO: 841885 - RNA, 19 nt, Artificial Sequence
  Description of Artificial Sequence: Synthetic oligonucleotide
  Antisense strand to SEQ ID NO: 841884
uuucaccgcccaaacaagg

SEQ ID NO: 841886 - RNA, 19 nt, Artificial Sequence
  Description of Artificial Sequence: Synthetic oligonucleotide
  Sense strand starting at position 902 of SEQ ID NO: 588098
gauucugagccauggacau

SEQ ID NO: 841887 - RNA, 19 nt, Artificial Sequence
  Description of Artificial Sequence: Synthetic oligonucleotide
  Antisense strand to SEQ ID NO: 841886
auguccauggcucagaauc

SEQ ID NO: 841888 - RNA, 19 nt, Artificial Sequence
  Description of Artificial Sequence: Synthetic oligonucleotide
  Sense strand starting at position 1003 of SEQ ID NO: 588098
ggaaguuucugcucacccu

SEQ ID NO: 841889 - RNA, 19 nt, Artificial Sequence
  Description of Artificial Sequence: Synthetic oligonucleotide
  Antisense strand to SEQ ID NO: 841888
agggugagcagaaacuucc

SEQ ID NO: 841890 - RNA, 19 nt, Artificial Sequence
  Description of Artificial Sequence: Synthetic oligonucleotide
  Sense strand starting at position 1127 of SEQ ID NO: 588098
gaauuagcggcuugcacaa

SEQ ID NO: 841891 - RNA, 19 nt, Artificial Sequence
  Description of Artificial Sequence: Synthetic oligonucleotide
  Antisense strand to SEQ ID NO: 841890
uugugcaagccgcuaauuc

SEQ ID NO: 841892 - RNA, 19 nt, Artificial Sequence
  Description of Artificial Sequence: Synthetic oligonucleotide
  Sense strand starting at position 1215 of SEQ ID NO: 588098
ccauuauaggcauguucuu

SEQ ID NO: 841893 - RNA, 19 nt, Artificial Sequence
  Description of Artificial Sequence: Synthetic oligonucleotide
  Antisense strand to SEQ ID NO: 841892
aagaacaugccuauaaugg

SEQ ID NO: 841894 - RNA, 19 nt, Artificial Sequence
  Description of Artificial Sequence: Synthetic oligonucleotide
  Sense strand starting at position 1386 of SEQ ID NO: 588098
gagacuugucccggcaggu

SEQ ID NO: 841895 - RNA, 19 nt, Artificial Sequence
  Description of Artificial Sequence: Synthetic oligonucleotide
  Antisense strand to SEQ ID NO: 841894
accugccgggacaagucuc

SEQ ID NO: 841896 - RNA, 19 nt, Artificial Sequence
  Description of Artificial Sequence: Synthetic oligonucleotide
  Sense strand starting at position 2369 of SEQ ID NO: 588098
cagugcuuacaccagagaa

SEQ ID NO: 841897 - RNA, 19 nt, Artificial Sequence
  Description of Artificial Sequence: Synthetic oligonucleotide
  Antisense strand to SEQ ID NO: 841896
uucucugguguaagcacug

SEQ ID NO: 841898 - RNA, 19 nt, Artificial Sequence
  Description of Artificial Sequence: Synthetic oligonucleotide
  Sense strand starting at position 2371 of SEQ ID NO: 588098
gugcuuacaccagagaagu

SEQ ID NO: 841899 - RNA, 19 nt, Artificial Sequence
  Description of Artificial Sequence: Synthetic oligonucleotide
  Antisense strand to SEQ ID NO: 841898
acuucucugguguaagcac

SEQ ID NO: 841900 - RNA, 19 nt, Artificial Sequence
  Description of Artificial Sequence: Synthetic oligonucleotide
  Sense strand starting at position 2538 of SEQ ID NO: 588098
agcguuaaggcuuaaucua

SEQ ID NO: 841901 - RNA, 19 nt, Artificial Sequence
  Description of Artificial Sequence: Synthetic oligonucleotide
  Antisense strand to SEQ ID NO: 841900
uagauuaagccuuaacgcu

SEQ ID NO: 841902 - RNA, 19 nt, Artificial Sequence
  Description of Artificial Sequence: Synthetic oligonucleotide
  Sense strand starting at position 2546 of SEQ ID NO: 588098
ggcuuaaucuagccuucga

SEQ ID NO: 841903 - RNA, 19 nt, Artificial Sequence
  Description of Artificial Sequence: Synthetic oligonucleotide
  Antisense strand to SEQ ID NO: 841902
ucgaaggcuagauuaagcc

SEQ ID NO: 841904 - RNA, 19 nt, Artificial Sequence
  Description of Artificial Sequence: Synthetic oligonucleotide
  Sense strand starting at position 2619 of SEQ ID NO: 588098
uaguguggcaguuaugaca

SEQ ID NO: 841905 - RNA, 19 nt, Artificial Sequence
  Description of Artificial Sequence: Synthetic oligonucleotide
  Antisense strand to SEQ ID NO: 841904
ugucauaacugccacacua

SEQ ID NO: 841906 - RNA, 19 nt, Artificial Sequence
  Description of Artificial Sequence: Synthetic oligonucleotide
  Sense strand starting at position 2650 of SEQ ID NO: 588098
cgagguucaagaggugaua

SEQ ID NO: 841907 - RNA, 19 nt, Artificial Sequence
  Description of Artificial Sequence: Synthetic oligonucleotide
  Antisense strand to SEQ ID NO: 841906
uaucaccucuugaaccucg

SEQ ID NO: 841908 - RNA, 19 nt, Artificial Sequence
  Description of Artificial Sequence: Synthetic oligonucleotide
  Sense strand starting at position 2764 of SEQ ID NO: 588098
agugacagagcuggaaauu

SEQ ID NO: 841909 - RNA, 19 nt, Artificial Sequence
  Description of Artificial Sequence: Synthetic oligonucleotide
  Antisense strand to SEQ ID NO: 841908
aauuuccagcucugucacu

SEQ ID NO: 841910 - RNA, 19 nt, Artificial Sequence
  Description of Artificial Sequence: Synthetic oligonucleotide
  Sense strand starting at position 2788 of SEQ ID NO: 588098
caggcaagauguccucaga

SEQ ID NO: 841911 - RNA, 19 nt, Artificial Sequence
  Description of Artificial Sequence: Synthetic oligonucleotide
  Antisense strand to SEQ ID NO: 841910
ucugaggacaucuugccug

SEQ ID NO: 841912 - RNA, 19 nt, Artificial Sequence
  Description of Artificial Sequence: Synthetic oligonucleotide
  Sense strand starting at position 2791 of SEQ ID NO: 588098
gcaagauguccucagaucc

SEQ ID NO: 841913 - RNA, 19 nt, Artificial Sequence
  Description of Artificial Sequence: Synthetic oligonucleotide
  Antisense strand to SEQ ID NO: 841912
ggaucugaggacaucuugc

SEQ ID NO: 841914 - RNA, 19 nt, Artificial Sequence
  Description of Artificial Sequence: Synthetic oligonucleotide
  Sense strand starting at position 2838 of SEQ ID NO: 588098
aacuguucugcgguuugua

SEQ ID NO: 841915 - RNA, 19 nt, Artificial Sequence
  Description of Artificial Sequence: Synthetic oligonucleotide
  Antisense strand to SEQ ID NO: 841914
uacaaaccgcagaacaguu

SEQ ID NO: 841916 - RNA, 19 nt, Artificial Sequence
  Description of Artificial Sequence: Synthetic oligonucleotide
  Sense strand starting at position 2839 of SEQ ID NO: 588098
acuguucugcgguuuguaa

SEQ ID NO: 841917 - RNA, 19 nt, Artificial Sequence
  Description of Artificial Sequence: Synthetic oligonucleotide
  Antisense strand to SEQ ID NO: 841916
uuacaaaccgcagaacagu

SEQ ID NO: 841918 - RNA, 19 nt, Artificial Sequence
  Description of Artificial Sequence: Synthetic oligonucleotide
  Sense strand starting at position 2840 of SEQ ID NO: 588098
cuguucugcgguuuguaaa

SEQ ID NO: 841919 - RNA, 19 nt, Artificial Sequence
  Description of Artificial Sequence: Synthetic oligonucleotide
  Antisense strand to SEQ ID NO: 841918
uuuacaaaccgcagaacag

SEQ ID NO: 841920 - RNA, 19 nt, Artificial Sequence
  Description of Artificial Sequence: Synthetic oligonucleotide
  Sense strand starting at position 2924 of SEQ ID NO: 588098
ccguucuccuuccuugaaa

SEQ ID NO: 841921 - RNA, 19 nt, Artificial Sequence
  Description of Artificial Sequence: Synthetic oligonucleotide
  Antisense strand to SEQ ID NO: 841920
uuucaaggaaggagaacgg

SEQ ID NO: 841922 - RNA, 19 nt, Artificial Sequence
  Description of Artificial Sequence: Synthetic oligonucleotide
  Sense strand starting at position 2925 of SEQ ID NO: 588098
cguucuccuuccuugaaag

SEQ ID NO: 841923 - RNA, 19 nt, Artificial Sequence
  Description of Artificial Sequence: Synthetic oligonucleotide
  Antisense strand to SEQ ID NO: 841922
cuuucaaggaaggagaacg

SEQ ID NO: 841924 - RNA, 19 nt, Artificial Sequence
  Description of Artificial Sequence: Synthetic oligonucleotide
  Sense strand starting at position 2927 of SEQ ID NO: 588098
uucuccuuccuugaaaggu

SEQ ID NO: 841925 - RNA, 19 nt, Artificial Sequence
  Description of Artificial Sequence: Synthetic oligonucleotide
  Antisense strand to SEQ ID NO: 841924
accuuucaaggaaggagaa

SEQ ID NO: 841926 - RNA, 19 nt, Artificial Sequence
  Description of Artificial Sequence: Synthetic oligonucleotide
  Sense strand starting at position 2947 of SEQ ID NO: 588098
guaggauucuaggucagga

SEQ ID NO: 841927 - RNA, 19 nt, Artificial Sequence
  Description of Artificial Sequence: Synthetic oligonucleotide
  Antisense strand to SEQ ID NO: 841926
uccugaccuagaauccuac

SEQ ID NO: 841928 - RNA, 19 nt, Artificial Sequence
  Description of Artificial Sequence: Synthetic oligonucleotide
  Sense strand starting at position 2993 of SEQ ID NO: 588098
gcccauuggugacugucau

SEQ ID NO: 841929 - RNA, 19 nt, Artificial Sequence
  Description of Artificial Sequence: Synthetic oligonucleotide
  Antisense strand to SEQ ID NO: 841928
augacagucaccaaugggc

SEQ ID NO: 841930 - RNA, 19 nt, Artificial Sequence
  Description of Artificial Sequence: Synthetic oligonucleotide
  Sense strand starting at position 2994 of SEQ ID NO: 588098
cccauuggugacugucauu

SEQ ID NO: 841931 - RNA, 19 nt, Artificial Sequence
  Description of Artificial Sequence: Synthetic oligonucleotide
  Antisense strand to SEQ ID NO: 841930
aaugacagucaccaauggg

SEQ ID NO: 841932 - RNA, 19 nt, Artificial Sequence
  Description of Artificial Sequence: Synthetic oligonucleotide
  Sense strand starting at position 2999 of SEQ ID NO: 588098
uggugacugucauuaggac

SEQ ID NO: 841933 - RNA, 19 nt, Artificial Sequence
  Description of Artificial Sequence: Synthetic oligonucleotide
  Antisense strand to SEQ ID NO: 841932
guccuaaugacagucacca

SEQ ID NO: 841934 - RNA, 19 nt, Artificial Sequence
  Description of Artificial Sequence: Synthetic oligonucleotide
  Sense strand starting at position 3787 of SEQ ID NO: 588098
aguuaauuucugugucuca

SEQ ID NO: 841935 - RNA, 19 nt, Artificial Sequence
  Description of Artificial Sequence: Synthetic oligonucleotide
  Antisense strand to SEQ ID NO: 841934
ugagacacagaaauuaacu

SEQ ID NO: 841936 - RNA, 19 nt, Artificial Sequence
  Description of Artificial Sequence: Synthetic oligonucleotide
  Sense strand starting at position 3788 of SEQ ID NO: 588098
guuaauuucugugucucaa

SEQ ID NO: 841937 - RNA, 19 nt, Artificial Sequence
  Description of Artificial Sequence: Synthetic oligonucleotide
  Antisense strand to SEQ ID NO: 841936
uugagacacagaaauuaac

SEQ ID NO: 841938 - RNA, 19 nt, Artificial Sequence
  Description of Artificial Sequence: Synthetic oligonucleotide
  Sense strand starting at position 3947 of SEQ ID NO: 588098
agauucucaaagugugguu

SEQ ID NO: 841939 - RNA, 19 nt, Artificial Sequence
  Description of Artificial Sequence: Synthetic oligonucleotide
  Antisense strand to SEQ ID NO: 841938
aaccacacuuugagaaucu

SEQ ID NO: 841940 - RNA, 19 nt, Artificial Sequence
  Description of Artificial Sequence: Synthetic oligonucleotide
  Sense strand starting at position 24 of SEQ ID NO: 588099
aggcucuauggaugaagga

SEQ ID NO: 841941 - RNA, 19 nt, Artificial Sequence
  Description of Artificial Sequence: Synthetic oligonucleotide
  Antisense strand to SEQ ID NO: 841940
uccuucauccauagagccu

SEQ ID NO: 841942 - RNA, 19 nt, Artificial Sequence
  Description of Artificial Sequence: Synthetic oligonucleotide
  Sense strand starting at position 103 of SEQ ID NO: 588099
ucuugaacuuguucugaca

SEQ ID NO: 841943 - RNA, 19 nt, Artificial Sequence
  Description of Artificial Sequence: Synthetic oligonucleotide
  Antisense strand to SEQ ID NO: 841942
ugucagaacaaguucaaga

SEQ ID NO: 841944 - RNA, 19 nt, Artificial Sequence
  Description of Artificial Sequence: Synthetic oligonucleotide
  Sense strand starting at position 137 of SEQ ID NO: 588099
gaaagagucccgugaagga

SEQ ID NO: 841945 - RNA, 19 nt, Artificial Sequence
  Description of Artificial Sequence: Synthetic oligonucleotide
  Antisense strand to SEQ ID NO: 841944
uccuucacgggacucuuuc

SEQ ID NO: 841946 - RNA, 19 nt, Artificial Sequence
  Description of Artificial Sequence: Synthetic oligonucleotide
  Sense strand starting at position 223 of SEQ ID NO: 588099
agugacacccucugaaagu

SEQ ID NO: 841947 - RNA, 19 nt, Artificial Sequence
  Description of Artificial Sequence: Synthetic oligonucleotide
  Antisense strand to SEQ ID NO: 841946
acuuucagagggugucacu

SEQ ID NO: 841948 - RNA, 19 nt, Artificial Sequence
  Description of Artificial Sequence: Synthetic oligonucleotide
  Sense strand starting at position 253 of SEQ ID NO: 588099
gaacgucaagacuggaaau

SEQ ID NO: 841949 - RNA, 19 nt, Artificial Sequence
  Description of Artificial Sequence: Synthetic oligonucleotide
  Antisense strand to SEQ ID NO: 841948
auuuccagucuugacguuc

SEQ ID NO: 841950 - RNA, 19 nt, Artificial Sequence
  Description of Artificial Sequence: Synthetic oligonucleotide
  Sense strand starting at position 292 of SEQ ID NO: 588099
ggcuaauaaccaugcaacu

SEQ ID NO: 841951 - RNA, 19 nt, Artificial Sequence
  Description of Artificial Sequence: Synthetic oligonucleotide
  Antisense strand to SEQ ID NO: 841950
aguugcaugguuauuagcc

SEQ ID NO: 841952 - RNA, 19 nt, Artificial Sequence
  Description of Artificial Sequence: Synthetic oligonucleotide
  Sense strand starting at position 375 of SEQ ID NO: 588099
cuuccugacuacuugguaa

SEQ ID NO: 841953 - RNA, 19 nt, Artificial Sequence
  Description of Artificial Sequence: Synthetic oligonucleotide
  Antisense strand to SEQ ID NO: 841952
uuaccaaguagucaggaag

SEQ ID NO: 841954 - RNA, 19 nt, Artificial Sequence
  Description of Artificial Sequence: Synthetic oligonucleotide
  Sense strand starting at position 377 of SEQ ID NO: 588099
uccugacuacuugguaacu

SEQ ID NO: 841955 - RNA, 19 nt, Artificial Sequence
  Description of Artificial Sequence: Synthetic oligonucleotide
  Antisense strand to SEQ ID NO: 841954
aguuaccaaguagucagga

SEQ ID NO: 841956 - RNA, 19 nt, Artificial Sequence
  Description of Artificial Sequence: Synthetic oligonucleotide
  Sense strand starting at position 536 of SEQ ID NO: 588099
gugcgaagccuugcugacu

SEQ ID NO: 841957 - RNA, 19 nt, Artificial Sequence
  Description of Artificial Sequence: Synthetic oligonucleotide
  Antisense strand to SEQ ID NO: 841956
agucagcaaggcuucgcac

SEQ ID NO: 841958 - RNA, 19 nt, Artificial Sequence
  Description of Artificial Sequence: Synthetic oligonucleotide
  Sense strand starting at position 597 of SEQ ID NO: 588099
ccuaguacaugguuuccaa

SEQ ID NO: 841959 - RNA, 19 nt, Artificial Sequence
  Description of Artificial Sequence: Synthetic oligonucleotide
  Antisense strand to SEQ ID NO: 841958
uuggaaaccauguacuagg

SEQ ID NO: 841960 - RNA, 19 nt, Artificial Sequence
  Description of Artificial Sequence: Synthetic oligonucleotide
  Sense strand starting at position 621 of SEQ ID NO: 588099
gaucaaacuugguuccaga

SEQ ID NO: 841961 - RNA, 19 nt, Artificial Sequence
  Description of Artificial Sequence: Synthetic oligonucleotide
  Antisense strand to SEQ ID NO: 841960
ucuggaaccaaguuugauc

SEQ ID NO: 841962 - RNA, 19 nt, Artificial Sequence
  Description of Artificial Sequence: Synthetic oligonucleotide
  Sense strand starting at position 648 of SEQ ID NO: 588099
guuaauacuguccauggca

SEQ ID NO: 841963 - RNA, 19 nt, Artificial Sequence
  Description of Artificial Sequence: Synthetic oligonucleotide
  Antisense strand to SEQ ID NO: 841962
ugccauggacaguauuaac

SEQ ID NO: 841964 - RNA, 19 nt, Artificial Sequence
  Description of Artificial Sequence: Synthetic oligonucleotide
  Sense strand starting at position 691 of SEQ ID NO: 588099
gaggaaggaucacaaacaa

SEQ ID NO: 841965 - RNA, 19 nt, Artificial Sequence
  Description of Artificial Sequence: Synthetic oligonucleotide
  Antisense strand to SEQ ID NO: 841964
uuguuugugauccuuccuc

SEQ ID NO: 841966 - RNA, 19 nt, Artificial Sequence
  Description of Artificial Sequence: Synthetic oligonucleotide
  Sense strand starting at position 724 of SEQ ID NO: 588099
gaaugaagccucugaagca

SEQ ID NO: 841967 - RNA, 19 nt, Artificial Sequence
  Description of Artificial Sequence: Synthetic oligonucleotide
  Antisense strand to SEQ ID NO: 841966
ugcuucagaggcuucauuc

SEQ ID NO: 841968 - RNA, 19 nt, Artificial Sequence
  Description of Artificial Sequence: Synthetic oligonucleotide
  Sense strand starting at position 762 of SEQ ID NO: 588099
caaaguguggugcagagaa

SEQ ID NO: 841969 - RNA, 19 nt, Artificial Sequence
  Description of Artificial Sequence: Synthetic oligonucleotide
  Antisense strand to SEQ ID NO: 841968
uucucugcaccacacuuug

SEQ ID NO: 841970 - RNA, 19 nt, Artificial Sequence
  Description of Artificial Sequence: Synthetic oligonucleotide
  Sense strand starting at position 914 of SEQ ID NO: 588099
ugcagaagcagcuaucaga

SEQ ID NO: 841971 - RNA, 19 nt, Artificial Sequence
  Description of Artificial Sequence: Synthetic oligonucleotide
  Antisense strand to SEQ ID NO: 841970
ucugauagcugcuucugca

SEQ ID NO: 841972 - RNA, 19 nt, Artificial Sequence
  Description of Artificial Sequence: Synthetic oligonucleotide
  Sense strand starting at position 945 of SEQ ID NO: 588099
ucaauuacgcuugacauca

SEQ ID NO: 841973 - RNA, 19 nt, Artificial Sequence
  Description of Artificial Sequence: Synthetic oligonucleotide
  Antisense strand to SEQ ID NO: 841972
ugaugucaagcguaauuga

SEQ ID NO: 841974 - RNA, 19 nt, Artificial Sequence
  Description of Artificial Sequence: Synthetic oligonucleotide
  Sense strand starting at position 1252 of SEQ ID NO: 588099
aagagaguuacauguguug

SEQ ID NO: 841975 - RNA, 19 nt, Artificial Sequence
  Description of Artificial Sequence: Synthetic oligonucleotide
  Antisense strand to SEQ ID NO: 841974
caacacauguaacucucuu

SEQ ID NO: 841976 - RNA, 19 nt, Artificial Sequence
  Description of Artificial Sequence: Synthetic oligonucleotide
  Sense strand starting at position 1797 of SEQ ID NO: 588099
ccgacucucgagggauaca

SEQ ID NO: 841977 - RNA, 19 nt, Artificial Sequence
  Description of Artificial Sequence: Synthetic oligonucleotide
  Antisense strand to SEQ ID NO: 841976
uguaucccucgagagucgg

SEQ ID NO: 841978 - RNA, 19 nt, Artificial Sequence
  Description of Artificial Sequence: Synthetic oligonucleotide
  Sense strand starting at position 2472 of SEQ ID NO: 588099
ucagcauuuccguggcaaa

SEQ ID NO: 841979 - RNA, 19 nt, Artificial Sequence
  Description of Artificial Sequence: Synthetic oligonucleotide
  Antisense strand to SEQ ID NO: 841978
uuugccacggaaaugcuga

SEQ ID NO: 841980 - RNA, 19 nt, Artificial Sequence
  Description of Artificial Sequence: Synthetic oligonucleotide
  Sense strand starting at position 2550 of SEQ ID NO: 588099
cggucugaagucggagaaa

SEQ ID NO: 841981 - RNA, 19 nt, Artificial Sequence
  Description of Artificial Sequence: Synthetic oligonucleotide
  Antisense strand to SEQ ID NO: 841980
uuucuccgacuucagaccg

SEQ ID NO: 841982 - RNA, 19 nt, Artificial Sequence
  Description of Artificial Sequence: Synthetic oligonucleotide
  Sense strand starting at position 2642 of SEQ ID NO: 588099
gugaauggcguucaaagaa

SEQ ID NO: 841983 - RNA, 19 nt, Artificial Sequence
  Description of Artificial Sequence: Synthetic oligonucleotide
  Antisense strand to SEQ ID NO: 841982
uucuuugaacgccauucac

SEQ ID NO: 841984 - RNA, 19 nt, Artificial Sequence
  Description of Artificial Sequence: Synthetic oligonucleotide
  Sense strand starting at position 2661 of SEQ ID NO: 588099
gugauuagaucuuucuaga

SEQ ID NO: 841985 - RNA, 19 nt, Artificial Sequence
  Description of Artificial Sequence: Synthetic oligonucleotide
  Antisense strand to SEQ ID NO: 841984
ucuagaaagaucuaaucac

SEQ ID NO: 841986 - RNA, 19 nt, Artificial Sequence
  Description of Artificial Sequence: Synthetic oligonucleotide
  Sense strand starting at position 2704 of SEQ ID NO: 588099
ccaaauuauuuggaaaguu

SEQ ID NO: 841987 - RNA, 19 nt, Artificial Sequence
  Description of Artificial Sequence: Synthetic oligonucleotide
  Antisense strand to SEQ ID NO: 841986
aacuuuccaaauaauuugg

SEQ ID NO: 841988 - RNA, 19 nt, Artificial Sequence
  Description of Artificial Sequence: Synthetic oligonucleotide
  Sense strand starting at position 2743 of SEQ ID NO: 588099
cagcuuauaggaugaguaa

SEQ ID NO: 841989 - RNA, 19 nt, Artificial Sequence
  Description of Artificial Sequence: Synthetic oligonucleotide
  Antisense strand to SEQ ID NO: 841988
uuacucauccuauaagcug

SEQ ID NO: 841990 - RNA, 19 nt, Artificial Sequence
  Description of Artificial Sequence: Synthetic oligonucleotide
  Sense strand starting at position 2921 of SEQ ID NO: 588099
agcugagacucaguccuua

SEQ ID NO: 841991 - RNA, 19 nt, Artificial Sequence
  Description of Artificial Sequence: Synthetic oligonucleotide
  Antisense strand to SEQ ID NO: 841990
uaaggacugagucucagcu

SEQ ID NO: 841992 - RNA, 19 nt, Artificial Sequence
  Description of Artificial Sequence: Synthetic oligonucleotide
  Sense strand starting at position 2925 of SEQ ID NO: 588099
gagacucaguccuuagguu

SEQ ID NO: 841993 - RNA, 19 nt, Artificial Sequence
  Description of Artificial Sequence: Synthetic oligonucleotide
  Antisense strand to SEQ ID NO: 841992
aaccuaaggacugagucuc

SEQ ID NO: 841994 - RNA, 19 nt, Artificial Sequence
  Description of Artificial Sequence: Synthetic oligonucleotide
  Sense strand starting at position 2970 of SEQ ID NO: 588099
ccugucauacugcacuaua

SEQ ID NO: 841995 - RNA, 19 nt, Artificial Sequence
  Description of Artificial Sequence: Synthetic oligonucleotide
  Antisense strand to SEQ ID NO: 841994
uauagugcaguaugacagg

SEQ ID NO: 841996 - RNA, 19 nt, Artificial Sequence
  Description of Artificial Sequence: Synthetic oligonucleotide
  Sense strand starting at position 2993 of SEQ ID NO: 588099
acaacuaucgucuaguuau

SEQ ID NO: 841997 - RNA, 19 nt, Artificial Sequence
  Description of Artificial Sequence: Synthetic oligonucleotide
  Antisense strand to SEQ ID NO: 841996
auaacuagacgauaguugu

SEQ ID NO: 841998 - RNA, 19 nt, Artificial Sequence
  Description of Artificial Sequence: Synthetic oligonucleotide
  Sense strand starting at position 3310 of SEQ ID NO: 588099
cggaaagcaaaguaucuaa

SEQ ID NO: 841999 - RNA, 19 nt, Artificial Sequence
  Description of Artificial Sequence: Synthetic oligonucleotide
  Antisense strand to SEQ ID NO: 841998
uuagauacuuugcuuuccg

SEQ ID NO: 842000 - RNA, 19 nt, Artificial Sequence
  Description of Artificial Sequence: Synthetic oligonucleotide
  Sense strand starting at position 3335 of SEQ ID NO: 588099
augauaacauccguguaac

SEQ ID NO: 842001 - RNA, 19 nt, Artificial Sequence
  Description of Artificial Sequence: Synthetic oligonucleotide
  Antisense strand to SEQ ID NO: 842000
guuacacggauguuaucau

SEQ ID NO: 842002 - RNA, 19 nt, Artificial Sequence
  Description of Artificial Sequence: Synthetic oligonucleotide
  Sense strand starting at position 3338 of SEQ ID NO: 588099
auaacauccguguaacuga

SEQ ID NO: 842003 - RNA, 19 nt, Artificial Sequence
  Description of Artificial Sequence: Synthetic oligonucleotide
  Antisense strand to SEQ ID NO: 842002
ucaguuacacggauguuau

SEQ ID NO: 842004 - RNA, 19 nt, Artificial Sequence
  Description of Artificial Sequence: Synthetic oligonucleotide
  Sense strand starting at position 3343 of SEQ ID NO: 588099
auccguguaacugagaauc

SEQ ID NO: 842005 - RNA, 19 nt, Artificial Sequence
  Description of Artificial Sequence: Synthetic oligonucleotide
  Antisense strand to SEQ ID NO: 842004
gauucucaguuacacggau

SEQ ID NO: 842006 - RNA, 19 nt, Artificial Sequence
  Description of Artificial Sequence: Synthetic oligonucleotide
  Sense strand starting at position 3353 of SEQ ID NO: 588099
cugagaauccuucgcagaa

SEQ ID NO: 842007 - RNA, 19 nt, Artificial Sequence
  Description of Artificial Sequence: Synthetic oligonucleotide
  Antisense strand to SEQ ID NO: 842006
uucugcgaaggauucucag

SEQ ID NO: 842008 - RNA, 19 nt, Artificial Sequence
  Description of Artificial Sequence: Synthetic oligonucleotide
  Sense strand starting at position 3354 of SEQ ID NO: 588099
ugagaauccuucgcagaaa

SEQ ID NO: 842009 - RNA, 19 nt, Artificial Sequence
  Description of Artificial Sequence: Synthetic oligonucleotide
  Antisense strand to SEQ ID NO: 842008
uuucugcgaaggauucuca

SEQ ID NO: 842010 - RNA, 19 nt, Artificial Sequence
  Description of Artificial Sequence: Synthetic oligonucleotide
  Sense strand starting at position 3552 of SEQ ID NO: 588099
gguauuugacacuggcgau

SEQ ID NO: 842011 - RNA, 19 nt, Artificial Sequence
  Description of Artificial Sequence: Synthetic oligonucleotide
  Antisense strand to SEQ ID NO: 842010
aucgccagugucaaauacc

SEQ ID NO: 842012 - RNA, 19 nt, Artificial Sequence
  Description of Artificial Sequence: Synthetic oligonucleotide
  Sense strand starting at position 3553 of SEQ ID NO: 588099
guauuugacacuggcgauu

SEQ ID NO: 842013 - RNA, 19 nt, Artificial Sequence
  Description of Artificial Sequence: Synthetic oligonucleotide
  Antisense strand to SEQ ID NO: 842012
aaucgccagugucaaauac

SEQ ID NO: 842014 - RNA, 19 nt, Artificial Sequence
  Description of Artificial Sequence: Synthetic oligonucleotide
  Sense strand starting at position 3767 of SEQ ID NO: 588099
gccugcuaugucucuguca

SEQ ID NO: 842015 - RNA, 19 nt, Artificial Sequence
  Description of Artificial Sequence: Synthetic oligonucleotide
  Antisense strand to SEQ ID NO: 842014
ugacagagacauagcaggc

SEQ ID NO: 842016 - RNA, 19 nt, Artificial Sequence
  Description of Artificial Sequence: Synthetic oligonucleotide
  Sense strand starting at position 3851 of SEQ ID NO: 588099
ggauauuccaaaggugucu

SEQ ID NO: 842017 - RNA, 19 nt, Artificial Sequence
  Description of Artificial Sequence: Synthetic oligonucleotide
  Antisense strand to SEQ ID NO: 842016
agacaccuuuggaauaucc

SEQ ID NO: 842018 - RNA, 19 nt, Artificial Sequence
  Description of Artificial Sequence: Synthetic oligonucleotide
  Sense strand starting at position 3893 of SEQ ID NO: 588099
uguaaagaacccugagacu

SEQ ID NO: 842019 - RNA, 19 nt, Artificial Sequence
  Description of Artificial Sequence: Synthetic oligonucleotide
  Antisense strand to SEQ ID NO: 842018
agucucaggguucuuuaca

SEQ ID NO: 842020 - RNA, 19 nt, Artificial Sequence
  Description of Artificial Sequence: Synthetic oligonucleotide
  Sense strand starting at position 97 of SEQ ID NO: 588100
aggguuguugaugaaguau

SEQ ID NO: 842021 - RNA, 19 nt, Artificial Sequence
  Description of Artificial Sequence: Synthetic oligonucleotide
  Antisense strand to SEQ ID NO: 842020
auacuucaucaacaacccu

SEQ ID NO: 842022 - RNA, 19 nt, Artificial Sequence
  Description of Artificial Sequence: Synthetic oligonucleotide
  Sense strand starting at position 103 of SEQ ID NO: 588100
guugaugaaguaugaaaug

SEQ ID NO: 842023 - RNA, 19 nt, Artificial Sequence
  Description of Artificial Sequence: Synthetic oligonucleotide
  Antisense strand to SEQ ID NO: 842022
cauuucauacuucaucaac

SEQ ID NO: 842024 - RNA, 19 nt, Artificial Sequence
  Description of Artificial Sequence: Synthetic oligonucleotide
  Sense strand starting at position 247 of SEQ ID NO: 588100
agcagaguuuaaccguaaa

SEQ ID NO: 842025 - RNA, 19 nt, Artificial Sequence
  Description of Artificial Sequence: Synthetic oligonucleotide
  Antisense strand to SEQ ID NO: 842024
uuuacgguuaaacucugcu

SEQ ID NO: 842026 - RNA, 19 nt, Artificial Sequence
  Description of Artificial Sequence: Synthetic oligonucleotide
  Sense strand starting at position 250 of SEQ ID NO: 588100
agaguuuaaccguaaagua

SEQ ID NO: 842027 - RNA, 19 nt, Artificial Sequence
  Description of Artificial Sequence: Synthetic oligonucleotide
  Antisense strand to SEQ ID NO: 842026
uacuuuacgguuaaacucu

SEQ ID NO: 842028 - RNA, 19 nt, Artificial Sequence
  Description of Artificial Sequence: Synthetic oligonucleotide
  Sense strand starting at position 314 of SEQ ID NO: 588100
agaacaagugaauguuuaa

SEQ ID NO: 842029 - RNA, 19 nt, Artificial Sequence
  Description of Artificial Sequence: Synthetic oligonucleotide
  Antisense strand to SEQ ID NO: 842028
uuaaacauucacuuguucu

SEQ ID NO: 842030 - RNA, 19 nt, Artificial Sequence
  Description of Artificial Sequence: Synthetic oligonucleotide
  Sense strand starting at position 317 of SEQ ID NO: 588100
acaagugaauguuuaagca

SEQ ID NO: 842031 - RNA, 19 nt, Artificial Sequence
  Description of Artificial Sequence: Synthetic oligonucleotide
  Antisense strand to SEQ ID NO: 842030
ugcuuaaacauucacuugu

SEQ ID NO: 842032 - RNA, 19 nt, Artificial Sequence
  Description of Artificial Sequence: Synthetic oligonucleotide
  Sense strand starting at position 430 of SEQ ID NO: 588100
ugaaguuguuucuuaugaa

SEQ ID NO: 842033 - RNA, 19 nt, Artificial Sequence
  Description of Artificial Sequence: Synthetic oligonucleotide
  Antisense strand to SEQ ID NO: 842032
uucauaagaaacaacuuca

SEQ ID NO: 842034 - RNA, 19 nt, Artificial Sequence
  Description of Artificial Sequence: Synthetic oligonucleotide
  Sense strand starting at position 2039 of SEQ ID NO: 588100
cugggcuuucuagauauug

SEQ ID NO: 842035 - RNA, 19 nt, Artificial Sequence
  Description of Artificial Sequence: Synthetic oligonucleotide
  Antisense strand to SEQ ID NO: 842034
caauaucuagaaagcccag

SEQ ID NO: 842036 - RNA, 19 nt, Artificial Sequence
  Description of Artificial Sequence: Synthetic oligonucleotide
  Sense strand starting at position 2041 of SEQ ID NO: 588100
gggcuuucuagauauugca

SEQ ID NO: 842037 - RNA, 19 nt, Artificial Sequence
  Description of Artificial Sequence: Synthetic oligonucleotide
  Antisense strand to SEQ ID NO: 842036
ugcaauaucuagaaagccc

SEQ ID NO: 842038 - RNA, 19 nt, Artificial Sequence
  Description of Artificial Sequence: Synthetic oligonucleotide
  Sense strand starting at position 2192 of SEQ ID NO: 588100
ugggaauucgcuggugaaa

SEQ ID NO: 842039 - RNA, 19 nt, Artificial Sequence
  Description of Artificial Sequence: Synthetic oligonucleotide
  Antisense strand to SEQ ID NO: 842038
uuucaccagcgaauuccca

SEQ ID NO: 842040 - RNA, 19 nt, Artificial Sequence
  Description of Artificial Sequence: Synthetic oligonucleotide
  Sense strand starting at position 2369 of SEQ ID NO: 588100
gggagagagccauguguau

SEQ ID NO: 842041 - RNA, 19 nt, Artificial Sequence
  Description of Artificial Sequence: Synthetic oligonucleotide
  Antisense strand to SEQ ID NO: 842040
auacacauggcucucuccc

SEQ ID NO: 842042 - RNA, 19 nt, Artificial Sequence
  Description of Artificial Sequence: Synthetic oligonucleotide
  Sense strand starting at position 2373 of SEQ ID NO: 588100
gagagccauguguauguca

SEQ ID NO: 842043 - RNA, 19 nt, Artificial Sequence
  Description of Artificial Sequence: Synthetic oligonucleotide
  Antisense strand to SEQ ID NO: 842042
ugacauacacauggcucuc

SEQ ID NO: 842044 - RNA, 19 nt, Artificial Sequence
  Description of Artificial Sequence: Synthetic oligonucleotide
  Sense strand starting at position 2417 of SEQ ID NO: 588100
gaggcagaugugugacuga

SEQ ID NO: 842045 - RNA, 19 nt, Artificial Sequence
  Description of Artificial Sequence: Synthetic oligonucleotide
  Antisense strand to SEQ ID NO: 842044
ucagucacacaucugccuc

SEQ ID NO: 842046 - RNA, 19 nt, Artificial Sequence
  Description of Artificial Sequence: Synthetic oligonucleotide
  Sense strand starting at position 2420 of SEQ ID NO: 588100
gcagaugugugacugaaga

SEQ ID NO: 842047 - RNA, 19 nt, Artificial Sequence
  Description of Artificial Sequence: Synthetic oligonucleotide
  Antisense strand to SEQ ID NO: 842046
ucuucagucacacaucugc

SEQ ID NO: 842048 - RNA, 19 nt, Artificial Sequence
  Description of Artificial Sequence: Synthetic oligonucleotide
  Sense strand starting at position 2422 of SEQ ID NO: 588100
agaugugugacugaagagu

SEQ ID NO: 842049 - RNA, 19 nt, Artificial Sequence
  Description of Artificial Sequence: Synthetic oligonucleotide
  Antisense strand to SEQ ID NO: 842048
acucuucagucacacaucu

SEQ ID NO: 842050 - RNA, 19 nt, Artificial Sequence
  Description of Artificial Sequence: Synthetic oligonucleotide
  Sense strand starting at position 2480 of SEQ ID NO: 588100
cggcuuguuggauaggaau

SEQ ID NO: 842051 - RNA, 19 nt, Artificial Sequence
  Description of Artificial Sequence: Synthetic oligonucleotide
  Antisense strand to SEQ ID NO: 842050
auuccuauccaacaagccg

SEQ ID NO: 842052 - RNA, 19 nt, Artificial Sequence
  Description of Artificial Sequence: Synthetic oligonucleotide
  Sense strand starting at position 2482 of SEQ ID NO: 588100
gcuuguuggauaggaauac

SEQ ID NO: 842053 - RNA, 19 nt, Artificial Sequence
  Description of Artificial Sequence: Synthetic oligonucleotide
  Antisense strand to SEQ ID NO: 842052
guauuccuauccaacaagc

SEQ ID NO: 842054 - RNA, 19 nt, Artificial Sequence
  Description of Artificial Sequence: Synthetic oligonucleotide
  Sense strand starting at position 2505 of SEQ ID NO: 588100
gugcucauucauguacgua

SEQ ID NO: 842055 - RNA, 19 nt, Artificial Sequence
  Description of Artificial Sequence: Synthetic oligonucleotide
  Antisense strand to SEQ ID NO: 842054
uacguacaugaaugagcac

SEQ ID NO: 842056 - RNA, 19 nt, Artificial Sequence
  Description of Artificial Sequence: Synthetic oligonucleotide
  Sense strand starting at position 2816 of SEQ ID NO: 588100
ccaucugauuuagauguua

SEQ ID NO: 842057 - RNA, 19 nt, Artificial Sequence
  Description of Artificial Sequence: Synthetic oligonucleotide
  Antisense strand to SEQ ID NO: 842056
uaacaucuaaaucagaugg

SEQ ID NO: 842058 - RNA, 19 nt, Artificial Sequence
  Description of Artificial Sequence: Synthetic oligonucleotide
  Sense strand starting at position 2825 of SEQ ID NO: 588100
uuagauguuagugggaauc

SEQ ID NO: 842059 - RNA, 19 nt, Artificial Sequence
  Description of Artificial Sequence: Synthetic oligonucleotide
  Antisense strand to SEQ ID NO: 842058
gauucccacuaacaucuaa

SEQ ID NO: 842060 - RNA, 19 nt, Artificial Sequence
  Description of Artificial Sequence: Synthetic oligonucleotide
  Sense strand starting at position 2912 of SEQ ID NO: 588100
ggauauacauguguacacu

SEQ ID NO: 842061 - RNA, 19 nt, Artificial Sequence
  Description of Artificial Sequence: Synthetic oligonucleotide
  Antisense strand to SEQ ID NO: 842060
aguguacacauguauaucc

SEQ ID NO: 842062 - RNA, 19 nt, Artificial Sequence
  Description of Artificial Sequence: Synthetic oligonucleotide
  Sense strand starting at position 2945 of SEQ ID NO: 588100
cagggucauuggcuagaca

SEQ ID NO: 842063 - RNA, 19 nt, Artificial Sequence
  Description of Artificial Sequence: Synthetic oligonucleotide
  Antisense strand to SEQ ID NO: 842062
ugucuagccaaugacccug

SEQ ID NO: 842064 - RNA, 19 nt, Artificial Sequence
  Description of Artificial Sequence: Synthetic oligonucleotide
  Sense strand starting at position 2953 of SEQ ID NO: 588100
uuggcuagacagugaaauu

SEQ ID NO: 842065 - RNA, 19 nt, Artificial Sequence
  Description of Artificial Sequence: Synthetic oligonucleotide
  Antisense strand to SEQ ID NO: 842064
aauuucacugucuagccaa

SEQ ID NO: 842066 - RNA, 19 nt, Artificial Sequence
  Description of Artificial Sequence: Synthetic oligonucleotide
  Sense strand starting at position 3276 of SEQ ID NO: 588100
ugggcuuucuccuuuagag

SEQ ID NO: 842067 - RNA, 19 nt, Artificial Sequence
  Description of Artificial Sequence: Synthetic oligonucleotide
  Antisense strand to SEQ ID NO: 842066
cucuaaaggagaaagccca

SEQ ID NO: 842068 - RNA, 19 nt, Artificial Sequence
  Description of Artificial Sequence: Synthetic oligonucleotide
  Sense strand starting at position 3278 of SEQ ID NO: 588100
ggcuuucuccuuuagagag

SEQ ID NO: 842069 - RNA, 19 nt, Artificial Sequence
  Description of Artificial Sequence: Synthetic oligonucleotide
  Antisense strand to SEQ ID NO: 842068
cucucuaaaggagaaagcc

SEQ ID NO: 842070 - RNA, 19 nt, Artificial Sequence
  Description of Artificial Sequence: Synthetic oligonucleotide
  Sense strand starting at position 3317 of SEQ ID NO: 588100
uuccuuguuggguaugaga

SEQ ID NO: 842071 - RNA, 19 nt, Artificial Sequence
  Description of Artificial Sequence: Synthetic oligonucleotide
  Antisense strand to SEQ ID NO: 842070
ucucauacccaacaaggaa

SEQ ID NO: 842072 - RNA, 19 nt, Artificial Sequence
  Description of Artificial Sequence: Synthetic oligonucleotide
  Sense strand starting at position 3319 of SEQ ID NO: 588100
ccuuguuggguaugagaga

SEQ ID NO: 842073 - RNA, 19 nt, Artificial Sequence
  Description of Artificial Sequence: Synthetic oligonucleotide
  Antisense strand to SEQ ID NO: 842072
ucucucauacccaacaagg

SEQ ID NO: 842074 - RNA, 19 nt, Artificial Sequence
  Description of Artificial Sequence: Synthetic oligonucleotide
  Sense strand starting at position 3363 of SEQ ID NO: 588100
gagguuuguggugacuauc

SEQ ID NO: 842075 - RNA, 19 nt, Artificial Sequence
  Description of Artificial Sequence: Synthetic oligonucleotide
  Antisense strand to SEQ ID NO: 842074
gauagucaccacaaaccuc

SEQ ID NO: 842076 - RNA, 19 nt, Artificial Sequence
  Description of Artificial Sequence: Synthetic oligonucleotide
  Sense strand starting at position 3366 of SEQ ID NO: 588100
guuuguggugacuaucuga

SEQ ID NO: 842077 - RNA, 19 nt, Artificial Sequence
  Description of Artificial Sequence: Synthetic oligonucleotide
  Antisense strand to SEQ ID NO: 842076
ucagauagucaccacaaac

SEQ ID NO: 842078 - RNA, 19 nt, Artificial Sequence
  Description of Artificial Sequence: Synthetic oligonucleotide
  Sense strand starting at position 3398 of SEQ ID NO: 588100
gugucaucccaaggacaaa

SEQ ID NO: 842079 - RNA, 19 nt, Artificial Sequence
  Description of Artificial Sequence: Synthetic oligonucleotide
  Antisense strand to SEQ ID NO: 842078
uuuguccuugggaugacac

SEQ ID NO: 842080 - RNA, 19 nt, Artificial Sequence
  Description of Artificial Sequence: Synthetic oligonucleotide
  Sense strand starting at position 3435 of SEQ ID NO: 588100
auugguuagugggugagau

SEQ ID NO: 842081 - RNA, 19 nt, Artificial Sequence
  Description of Artificial Sequence: Synthetic oligonucleotide
  Antisense strand to SEQ ID NO: 842080
aucucacccacuaaccaau

SEQ ID NO: 842082 - RNA, 19 nt, Artificial Sequence
  Description of Artificial Sequence: Synthetic oligonucleotide
  Sense strand starting at position 3436 of SEQ ID NO: 588100
uugguuagugggugagaua

SEQ ID NO: 842083 - RNA, 19 nt, Artificial Sequence
  Description of Artificial Sequence: Synthetic oligonucleotide
  Antisense strand to SEQ ID NO: 842082
uaucucacccacuaaccaa

SEQ ID NO: 842084 - RNA, 19 nt, Artificial Sequence
  Description of Artificial Sequence: Synthetic oligonucleotide
  Sense strand starting at position 3437 of SEQ ID NO: 588100
ugguuagugggugagauaa

SEQ ID NO: 842085 - RNA, 19 nt, Artificial Sequence
  Description of Artificial Sequence: Synthetic oligonucleotide
  Antisense strand to SEQ ID NO: 842084
uuaucucacccacuaacca

SEQ ID NO: 842086 - RNA, 19 nt, Artificial Sequence
  Description of Artificial Sequence: Synthetic oligonucleotide
  Sense strand starting at position 3538 of SEQ ID NO: 588100
cagggauuugcgugggcaa

SEQ ID NO: 842087 - RNA, 19 nt, Artificial Sequence
  Description of Artificial Sequence: Synthetic oligonucleotide
  Antisense strand to SEQ ID NO: 842086
uugcccacgcaaaucccug

SEQ ID NO: 842088 - RNA, 19 nt, Artificial Sequence
  Description of Artificial Sequence: Synthetic oligonucleotide
  Sense strand starting at position 3540 of SEQ ID NO: 588100
gggauuugcgugggcaacu

SEQ ID NO: 842089 - RNA, 19 nt, Artificial Sequence
  Description of Artificial Sequence: Synthetic oligonucleotide
  Antisense strand to SEQ ID NO: 842088
aguugcccacgcaaauccc

SEQ ID NO: 842090 - RNA, 19 nt, Artificial Sequence
  Description of Artificial Sequence: Synthetic oligonucleotide
  Sense strand starting at position 3552 of SEQ ID NO: 588100
ggcaacucagauuguuuga

SEQ ID NO: 842091 - RNA, 19 nt, Artificial Sequence
  Description of Artificial Sequence: Synthetic oligonucleotide
  Antisense strand to SEQ ID NO: 842090
ucaaacaaucugaguugcc

SEQ ID NO: 842092 - RNA, 19 nt, Artificial Sequence
  Description of Artificial Sequence: Synthetic oligonucleotide
  Sense strand starting at position 3704 of SEQ ID NO: 588100
ccuagaagagccuguauua

SEQ ID NO: 842093 - RNA, 19 nt, Artificial Sequence
  Description of Artificial Sequence: Synthetic oligonucleotide
  Antisense strand to SEQ ID NO: 842092
uaauacaggcucuucuagg

SEQ ID NO: 842094 - RNA, 19 nt, Artificial Sequence
  Description of Artificial Sequence: Synthetic oligonucleotide
  Sense strand starting at position 3728 of SEQ ID NO: 588100
cuguuucugcuguaacaaa

SEQ ID NO: 842095 - RNA, 19 nt, Artificial Sequence
  Description of Artificial Sequence: Synthetic oligonucleotide
  Antisense strand to SEQ ID NO: 842094
uuuguuacagcagaaacag

SEQ ID NO: 842096 - RNA, 19 nt, Artificial Sequence
  Description of Artificial Sequence: Synthetic oligonucleotide
  Sense strand starting at position 3820 of SEQ ID NO: 588100
ucuucuuagugggcuacaa

SEQ ID NO: 842097 - RNA, 19 nt, Artificial Sequence
  Description of Artificial Sequence: Synthetic oligonucleotide
  Antisense strand to SEQ ID NO: 842096
uuguagcccacuaagaaga

SEQ ID NO: 842098 - RNA, 19 nt, Artificial Sequence
  Description of Artificial Sequence: Synthetic oligonucleotide
  Sense strand starting at position 3822 of SEQ ID NO: 588100
uucuuagugggcuacaauu

SEQ ID NO: 842099 - RNA, 19 nt, Artificial Sequence
  Description of Artificial Sequence: Synthetic oligonucleotide
  Antisense strand to SEQ ID NO: 842098
aauuguagcccacuaagaa

SEQ ID NO: 842100 - RNA, 19 nt, Artificial Sequence
  Description of Artificial Sequence: Synthetic oligonucleotide
  Sense strand starting at position 10 of SEQ ID NO: 588101
ucugacauccucuggaauc

SEQ ID NO: 842101 - RNA, 19 nt, Artificial Sequence
  Description of Artificial Sequence: Synthetic oligonucleotide
  Antisense strand to SEQ ID NO: 842100
gauuccagaggaugucaga

SEQ ID NO: 842102 - RNA, 19 nt, Artificial Sequence
  Description of Artificial Sequence: Synthetic oligonucleotide
  Sense strand starting at position 92 of SEQ ID NO: 588101
gcccacagauggguugaaa

SEQ ID NO: 842103 - RNA, 19 nt, Artificial Sequence
  Description of Artificial Sequence: Synthetic oligonucleotide
  Antisense strand to SEQ ID NO: 842102
uuucaacccaucugugggc

SEQ ID NO: 842104 - RNA, 19 nt, Artificial Sequence
  Description of Artificial Sequence: Synthetic oligonucleotide
  Sense strand starting at position 226 of SEQ ID NO: 588101
agcacuugugaacagcaga

SEQ ID NO: 842105 - RNA, 19 nt, Artificial Sequence
  Description of Artificial Sequence: Synthetic oligonucleotide
  Antisense strand to SEQ ID NO: 842104
ucugcuguucacaagugcu

SEQ ID NO: 842106 - RNA, 19 nt, Artificial Sequence
  Description of Artificial Sequence: Synthetic oligonucleotide
  Sense strand starting at position 353 of SEQ ID NO: 588101
ugaggagugucuuuggauc

SEQ ID NO: 842107 - RNA, 19 nt, Artificial Sequence
  Description of Artificial Sequence: Synthetic oligonucleotide
  Antisense strand to SEQ ID NO: 842106
gauccaaagacacuccuca

SEQ ID NO: 842108 - RNA, 19 nt, Artificial Sequence
  Description of Artificial Sequence: Synthetic oligonucleotide
  Sense strand starting at position 359 of SEQ ID NO: 588101
gugucuuuggaucagguuu

SEQ ID NO: 842109 - RNA, 19 nt, Artificial Sequence
  Description of Artificial Sequence: Synthetic oligonucleotide
  Antisense strand to SEQ ID NO: 842108
aaaccugauccaaagacac

SEQ ID NO: 842110 - RNA, 19 nt, Artificial Sequence
  Description of Artificial Sequence: Synthetic oligonucleotide
  Sense strand starting at position 411 of SEQ ID NO: 588101
cuuucuaggcccugagaug

SEQ ID NO: 842111 - RNA, 19 nt, Artificial Sequence
  Description of Artificial Sequence: Synthetic oligonucleotide
  Antisense strand to SEQ ID NO: 842110
caucucagggccuagaaag

SEQ ID NO: 842112 - RNA, 19 nt, Artificial Sequence
  Description of Artificial Sequence: Synthetic oligonucleotide
  Sense strand starting at position 412 of SEQ ID NO: 588101
uuucuaggcccugagauga

SEQ ID NO: 842113 - RNA, 19 nt, Artificial Sequence
  Description of Artificial Sequence: Synthetic oligonucleotide
  Antisense strand to SEQ ID NO: 842112
ucaucucagggccuagaaa

SEQ ID NO: 842114 - RNA, 19 nt, Artificial Sequence
  Description of Artificial Sequence: Synthetic oligonucleotide
  Sense strand starting at position 457 of SEQ ID NO: 588101
gggugggaucaguauggua

SEQ ID NO: 842115 - RNA, 19 nt, Artificial Sequence
  Description of Artificial Sequence: Synthetic oligonucleotide
  Antisense strand to SEQ ID NO: 842114
uaccauacugaucccaccc

SEQ ID NO: 842116 - RNA, 19 nt, Artificial Sequence
  Description of Artificial Sequence: Synthetic oligonucleotide
  Sense strand starting at position 600 of SEQ ID NO: 588101
guaaaccuuuaugugaaau

SEQ ID NO: 842117 - RNA, 19 nt, Artificial Sequence
  Description of Artificial Sequence: Synthetic oligonucleotide
  Antisense strand to SEQ ID NO: 842116
auuucacauaaagguuuac

SEQ ID NO: 842118 - RNA, 19 nt, Artificial Sequence
  Description of Artificial Sequence: Synthetic oligonucleotide
  Sense strand starting at position 610 of SEQ ID NO: 588101
augugaaauucuguaaaug

SEQ ID NO: 842119 - RNA, 19 nt, Artificial Sequence
  Description of Artificial Sequence: Synthetic oligonucleotide
  Antisense strand to SEQ ID NO: 842118
cauuuacagaauuucacau

SEQ ID NO: 842120 - RNA, 19 nt, Artificial Sequence
  Description of Artificial Sequence: Synthetic oligonucleotide
  Sense strand starting at position 611 of SEQ ID NO: 588101
ugugaaauucuguaaaugu

SEQ ID NO: 842121 - RNA, 19 nt, Artificial Sequence
  Description of Artificial Sequence: Synthetic oligonucleotide
  Antisense strand to SEQ ID NO: 842120
acauuuacagaauuucaca

SEQ ID NO: 842122 - RNA, 19 nt, Artificial Sequence
  Description of Artificial Sequence: Synthetic oligonucleotide
  Sense strand starting at position 618 of SEQ ID NO: 588101
uucuguaaauguguauaga

SEQ ID NO: 842123 - RNA, 19 nt, Artificial Sequence
  Description of Artificial Sequence: Synthetic oligonucleotide
  Antisense strand to SEQ ID NO: 842122
ucuauacacauuuacagaa

SEQ ID NO: 842124 - RNA, 19 nt, Artificial Sequence
  Description of Artificial Sequence: Synthetic oligonucleotide
  Sense strand starting at position 619 of SEQ ID NO: 588101
ucuguaaauguguauagag

SEQ ID NO: 842125 - RNA, 19 nt, Artificial Sequence
  Description of Artificial Sequence: Synthetic oligonucleotide
  Antisense strand to SEQ ID NO: 842124
cucuauacacauuuacaga

SEQ ID NO: 842126 - RNA, 19 nt, Artificial Sequence
  Description of Artificial Sequence: Synthetic oligonucleotide
  Sense strand starting at position 621 of SEQ ID NO: 588101
uguaaauguguauagagag

SEQ ID NO: 842127 - RNA, 19 nt, Artificial Sequence
  Description of Artificial Sequence: Synthetic oligonucleotide
  Antisense strand to SEQ ID NO: 842126
cucucuauacacauuuaca

SEQ ID NO: 842128 - RNA, 19 nt, Artificial Sequence
  Description of Artificial Sequence: Synthetic oligonucleotide
  Sense strand starting at position 1168 of SEQ ID NO: 588101
cuugaugugcucuaugaug

SEQ ID NO: 842129 - RNA, 19 nt, Artificial Sequence
  Description of Artificial Sequence: Synthetic oligonucleotide
  Antisense strand to SEQ ID NO: 842128
caucauagagcacaucaag

SEQ ID NO: 842130 - RNA, 19 nt, Artificial Sequence
  Description of Artificial Sequence: Synthetic oligonucleotide
  Sense strand starting at position 1188 of SEQ ID NO: 588101
gcagguggucguccgugaa

SEQ ID NO: 842131 - RNA, 19 nt, Artificial Sequence
  Description of Artificial Sequence: Synthetic oligonucleotide
  Antisense strand to SEQ ID NO: 842130
uucacggacgaccaccugc

SEQ ID NO: 842132 - RNA, 19 nt, Artificial Sequence
  Description of Artificial Sequence: Synthetic oligonucleotide
  Sense strand starting at position 1359 of SEQ ID NO: 588101
aggucuugccguaggagua

SEQ ID NO: 842133 - RNA, 19 nt, Artificial Sequence
  Description of Artificial Sequence: Synthetic oligonucleotide
  Antisense strand to SEQ ID NO: 842132
uacuccuacggcaagaccu

SEQ ID NO: 842134 - RNA, 19 nt, Artificial Sequence
  Description of Artificial Sequence: Synthetic oligonucleotide
  Sense strand starting at position 2378 of SEQ ID NO: 588101
ggacuugcccaagagcaaa

SEQ ID NO: 842135 - RNA, 19 nt, Artificial Sequence
  Description of Artificial Sequence: Synthetic oligonucleotide
  Antisense strand to SEQ ID NO: 842134
uuugcucuugggcaagucc

SEQ ID NO: 842136 - RNA, 19 nt, Artificial Sequence
  Description of Artificial Sequence: Synthetic oligonucleotide
  Sense strand starting at position 2408 of SEQ ID NO: 588101
guguuuguaccuuaaccca

SEQ ID NO: 842137 - RNA, 19 nt, Artificial Sequence
  Description of Artificial Sequence: Synthetic oligonucleotide
  Antisense strand to SEQ ID NO: 842136
uggguuaagguacaaacac

SEQ ID NO: 842138 - RNA, 19 nt, Artificial Sequence
  Description of Artificial Sequence: Synthetic oligonucleotide
  Sense strand starting at position 2534 of SEQ ID NO: 588101
cugccagugauagaugauu

SEQ ID NO: 842139 - RNA, 19 nt, Artificial Sequence
  Description of Artificial Sequence: Synthetic oligonucleotide
  Antisense strand to SEQ ID NO: 842138
aaucaucuaucacuggcag

SEQ ID NO: 842140 - RNA, 19 nt, Artificial Sequence
  Description of Artificial Sequence: Synthetic oligonucleotide
  Sense strand starting at position 2536 of SEQ ID NO: 588101
gccagugauagaugauuaa

SEQ ID NO: 842141 - RNA, 19 nt, Artificial Sequence
  Description of Artificial Sequence: Synthetic oligonucleotide
  Antisense strand to SEQ ID NO: 842140
uuaaucaucuaucacuggc

SEQ ID NO: 842142 - RNA, 19 nt, Artificial Sequence
  Description of Artificial Sequence: Synthetic oligonucleotide
  Sense strand starting at position 2678 of SEQ ID NO: 588101
ggaggugaugcuuaaguug

SEQ ID NO: 842143 - RNA, 19 nt, Artificial Sequence
  Description of Artificial Sequence: Synthetic oligonucleotide
  Antisense strand to SEQ ID NO: 842142
caacuuaagcaucaccucc

SEQ ID NO: 842144 - RNA, 19 nt, Artificial Sequence
  Description of Artificial Sequence: Synthetic oligonucleotide
  Sense strand starting at position 2701 of SEQ ID NO: 588101
cuggaagagguguagguau

SEQ ID NO: 842145 - RNA, 19 nt, Artificial Sequence
  Description of Artificial Sequence: Synthetic oligonucleotide
  Antisense strand to SEQ ID NO: 842144
auaccuacaccucuuccag

SEQ ID NO: 842146 - RNA, 19 nt, Artificial Sequence
  Description of Artificial Sequence: Synthetic oligonucleotide
  Sense strand starting at position 2708 of SEQ ID NO: 588101
agguguagguauuugucaa

SEQ ID NO: 842147 - RNA, 19 nt, Artificial Sequence
  Description of Artificial Sequence: Synthetic oligonucleotide
  Antisense strand to SEQ ID NO: 842146
uugacaaauaccuacaccu

SEQ ID NO: 842148 - RNA, 19 nt, Artificial Sequence
  Description of Artificial Sequence: Synthetic oligonucleotide
  Sense strand starting at position 2709 of SEQ ID NO: 588101
gguguagguauuugucaag

SEQ ID NO: 842149 - RNA, 19 nt, Artificial Sequence
  Description of Artificial Sequence: Synthetic oligonucleotide
  Antisense strand to SEQ ID NO: 842148
cuugacaaauaccuacacc

SEQ ID NO: 842150 - RNA, 19 nt, Artificial Sequence
  Description of Artificial Sequence: Synthetic oligonucleotide
  Sense strand starting at position 2812 of SEQ ID NO: 588101
cagucaaaguguuuggaaa

SEQ ID NO: 842151 - RNA, 19 nt, Artificial Sequence
  Description of Artificial Sequence: Synthetic oligonucleotide
  Antisense strand to SEQ ID NO: 842150
uuuccaaacacuuugacug

SEQ ID NO: 842152 - RNA, 19 nt, Artificial Sequence
  Description of Artificial Sequence: Synthetic oligonucleotide
  Sense strand starting at position 3291 of SEQ ID NO: 588101
guuagaaagaucugcauug

SEQ ID NO: 842153 - RNA, 19 nt, Artificial Sequence
  Description of Artificial Sequence: Synthetic oligonucleotide
  Antisense strand to SEQ ID NO: 842152
caaugcagaucuuucuaac

SEQ ID NO: 842154 - RNA, 19 nt, Artificial Sequence
  Description of Artificial Sequence: Synthetic oligonucleotide
  Sense strand starting at position 3308 of SEQ ID NO: 588101
ugggcuguaauguagagaa

SEQ ID NO: 842155 - RNA, 19 nt, Artificial Sequence
  Description of Artificial Sequence: Synthetic oligonucleotide
  Antisense strand to SEQ ID NO: 842154
uucucuacauuacagccca

SEQ ID NO: 842156 - RNA, 19 nt, Artificial Sequence
  Description of Artificial Sequence: Synthetic oligonucleotide
  Sense strand starting at position 3310 of SEQ ID NO: 588101
ggcuguaauguagagaaug

SEQ ID NO: 842157 - RNA, 19 nt, Artificial Sequence
  Description of Artificial Sequence: Synthetic oligonucleotide
  Antisense strand to SEQ ID NO: 842156
cauucucuacauuacagcc

SEQ ID NO: 842158 - RNA, 19 nt, Artificial Sequence
  Description of Artificial Sequence: Synthetic oligonucleotide
  Sense strand starting at position 3383 of SEQ ID NO: 588101
ucugauaagacuugaaggu

SEQ ID NO: 842159 - RNA, 19 nt, Artificial Sequence
  Description of Artificial Sequence: Synthetic oligonucleotide
  Antisense strand to SEQ ID NO: 842158
accuucaagucuuaucaga

SEQ ID NO: 842160 - RNA, 19 nt, Artificial Sequence
  Description of Artificial Sequence: Synthetic oligonucleotide
  Sense strand starting at position 3407 of SEQ ID NO: 588101
gaccuagggcugugagagu

SEQ ID NO: 842161 - RNA, 19 nt, Artificial Sequence
  Description of Artificial Sequence: Synthetic oligonucleotide
  Antisense strand to SEQ ID NO: 842160
acucucacagcccuagguc

SEQ ID NO: 842162 - RNA, 19 nt, Artificial Sequence
  Description of Artificial Sequence: Synthetic oligonucleotide
  Sense strand starting at position 3436 of SEQ ID NO: 588101
ggaagagccuaguucuaga

SEQ ID NO: 842163 - RNA, 19 nt, Artificial Sequence
  Description of Artificial Sequence: Synthetic oligonucleotide
  Antisense strand to SEQ ID NO: 842162
ucuagaacuaggcucuucc

SEQ ID NO: 842164 - RNA, 19 nt, Artificial Sequence
  Description of Artificial Sequence: Synthetic oligonucleotide
  Sense strand starting at position 3441 of SEQ ID NO: 588101
agccuaguucuagagaaac

SEQ ID NO: 842165 - RNA, 19 nt, Artificial Sequence
  Description of Artificial Sequence: Synthetic oligonucleotide
  Antisense strand to SEQ ID NO: 842164
guuucucuagaacuaggcu

SEQ ID NO: 842166 - RNA, 19 nt, Artificial Sequence
  Description of Artificial Sequence: Synthetic oligonucleotide
  Sense strand starting at position 3586 of SEQ ID NO: 588101
aaggaugaaucgcuuacuu

SEQ ID NO: 842167 - RNA, 19 nt, Artificial Sequence
  Description of Artificial Sequence: Synthetic oligonucleotide
  Antisense strand to SEQ ID NO: 842166
aaguaagcgauucauccuu

SEQ ID NO: 842168 - RNA, 19 nt, Artificial Sequence
  Description of Artificial Sequence: Synthetic oligonucleotide
  Sense strand starting at position 3588 of SEQ ID NO: 588101
ggaugaaucgcuuacuugu

SEQ ID NO: 842169 - RNA, 19 nt, Artificial Sequence
  Description of Artificial Sequence: Synthetic oligonucleotide
  Antisense strand to SEQ ID NO: 842168
acaaguaagcgauucaucc

SEQ ID NO: 842170 - RNA, 19 nt, Artificial Sequence
  Description of Artificial Sequence: Synthetic oligonucleotide
  Sense strand starting at position 3622 of SEQ ID NO: 588101
gauggccugucauccagaa

SEQ ID NO: 842171 - RNA, 19 nt, Artificial Sequence
  Description of Artificial Sequence: Synthetic oligonucleotide
  Antisense strand to SEQ ID NO: 842170
uucuggaugacaggccauc

SEQ ID NO: 842172 - RNA, 19 nt, Artificial Sequence
  Description of Artificial Sequence: Synthetic oligonucleotide
  Sense strand starting at position 3626 of SEQ ID NO: 588101
gccugucauccagaaagga

SEQ ID NO: 842173 - RNA, 19 nt, Artificial Sequence
  Description of Artificial Sequence: Synthetic oligonucleotide
  Antisense strand to SEQ ID NO: 842172
uccuuucuggaugacaggc

SEQ ID NO: 842174 - RNA, 19 nt, Artificial Sequence
  Description of Artificial Sequence: Synthetic oligonucleotide
  Sense strand starting at position 3722 of SEQ ID NO: 588101
ggcuuugguggugaagagu

SEQ ID NO: 842175 - RNA, 19 nt, Artificial Sequence
  Description of Artificial Sequence: Synthetic oligonucleotide
  Antisense strand to SEQ ID NO: 842174
acucuucaccaccaaagcc

SEQ ID NO: 842176 - RNA, 19 nt, Artificial Sequence
  Description of Artificial Sequence: Synthetic oligonucleotide
  Sense strand starting at position 3818 of SEQ ID NO: 588101
ggaauugauuaggcaacau

SEQ ID NO: 842177 - RNA, 19 nt, Artificial Sequence
  Description of Artificial Sequence: Synthetic oligonucleotide
  Antisense strand to SEQ ID NO: 842176
auguugccuaaucaauucc

SEQ ID NO: 842178 - RNA, 19 nt, Artificial Sequence
  Description of Artificial Sequence: Synthetic oligonucleotide
  Sense strand starting at position 3858 of SEQ ID NO: 588101
gaaauacugccauggagca

SEQ ID NO: 842179 - RNA, 19 nt, Artificial Sequence
  Description of Artificial Sequence: Synthetic oligonucleotide
  Antisense strand to SEQ ID NO: 842178
ugcuccauggcaguauuuc

SEQ ID NO: 842180 - RNA, 19 nt, Artificial Sequence
  Description of Artificial Sequence: Synthetic oligonucleotide
  Sense strand starting at position 381 of SEQ ID NO: 588102
cggagaaggucacagacau

SEQ ID NO: 842181 - RNA, 19 nt, Artificial Sequence
  Description of Artificial Sequence: Synthetic oligonucleotide
  Antisense strand to SEQ ID NO: 842180
augucugugaccuucuccg

SEQ ID NO: 842182 - RNA, 19 nt, Artificial Sequence
  Description of Artificial Sequence: Synthetic oligonucleotide
  Sense strand starting at position 421 of SEQ ID NO: 588102
aggccuuuaucauaaggaa

SEQ ID NO: 842183 - RNA, 19 nt, Artificial Sequence
  Description of Artificial Sequence: Synthetic oligonucleotide
  Antisense strand to SEQ ID NO: 842182
uuccuuaugauaaaggccu

SEQ ID NO: 842184 - RNA, 19 nt, Artificial Sequence
  Description of Artificial Sequence: Synthetic oligonucleotide
  Sense strand starting at position 466 of SEQ ID NO: 588102
gccaguaccuaucuuguuu

SEQ ID NO: 842185 - RNA, 19 nt, Artificial Sequence
  Description of Artificial Sequence: Synthetic oligonucleotide
  Antisense strand to SEQ ID NO: 842184
aaacaagauagguacuggc

SEQ ID NO: 842186 - RNA, 19 nt, Artificial Sequence
  Description of Artificial Sequence: Synthetic oligonucleotide
  Sense strand starting at position 470 of SEQ ID NO: 588102
guaccuaucuuguuuccca

SEQ ID NO: 842187 - RNA, 19 nt, Artificial Sequence
  Description of Artificial Sequence: Synthetic oligonucleotide
  Antisense strand to SEQ ID NO: 842186
ugggaaacaagauagguac

SEQ ID NO: 842188 - RNA, 19 nt, Artificial Sequence
  Description of Artificial Sequence: Synthetic oligonucleotide
  Sense strand starting at position 474 of SEQ ID NO: 588102
cuaucuuguuucccacaga

SEQ ID NO: 842189 - RNA, 19 nt, Artificial Sequence
  Description of Artificial Sequence: Synthetic oligonucleotide
  Antisense strand to SEQ ID NO: 842188
ucugugggaaacaagauag

SEQ ID NO: 842190 - RNA, 19 nt, Artificial Sequence
  Description of Artificial Sequence: Synthetic oligonucleotide
  Sense strand starting at position 594 of SEQ ID NO: 588102
ccguucccuugugauauuu

SEQ ID NO: 842191 - RNA, 19 nt, Artificial Sequence
  Description of Artificial Sequence: Synthetic oligonucleotide
  Antisense strand to SEQ ID NO: 842190
aaauaucacaagggaacgg

SEQ ID NO: 842192 - RNA, 19 nt, Artificial Sequence
  Description of Artificial Sequence: Synthetic oligonucleotide
  Sense strand starting at position 596 of SEQ ID NO: 588102
guucccuugugauauuuaa

SEQ ID NO: 842193 - RNA, 19 nt, Artificial Sequence
  Description of Artificial Sequence: Synthetic oligonucleotide
  Antisense strand to SEQ ID NO: 842192
uuaaauaucacaagggaac

SEQ ID NO: 842194 - RNA, 19 nt, Artificial Sequence
  Description of Artificial Sequence: Synthetic oligonucleotide
  Sense strand starting at position 690 of SEQ ID NO: 588102
aguuaauuaacaggguuga

SEQ ID NO: 842195 - RNA, 19 nt, Artificial Sequence
  Description of Artificial Sequence: Synthetic oligonucleotide
  Antisense strand to SEQ ID NO: 842194
ucaacccuguuaauuaacu

SEQ ID NO: 842196 - RNA, 19 nt, Artificial Sequence
  Description of Artificial Sequence: Synthetic oligonucleotide
  Sense strand starting at position 758 of SEQ ID NO: 588102
cacugacucaguggugaga

SEQ ID NO: 842197 - RNA, 19 nt, Artificial Sequence
  Description of Artificial Sequence: Synthetic oligonucleotide
  Antisense strand to SEQ ID NO: 842196
ucucaccacugagucagug

SEQ ID NO: 842198 - RNA, 19 nt, Artificial Sequence
  Description of Artificial Sequence: Synthetic oligonucleotide
  Sense strand starting at position 760 of SEQ ID NO: 588102
cugacucaguggugagaua

SEQ ID NO: 842199 - RNA, 19 nt, Artificial Sequence
  Description of Artificial Sequence: Synthetic oligonucleotide
  Antisense strand to SEQ ID NO: 842198
uaucucaccacugagucag

SEQ ID NO: 842200 - RNA, 19 nt, Artificial Sequence
  Description of Artificial Sequence: Synthetic oligonucleotide
  Sense strand starting at position 781 of SEQ ID NO: 588102
ccuugaaaguccugagaaa

SEQ ID NO: 842201 - RNA, 19 nt, Artificial Sequence
  Description of Artificial Sequence: Synthetic oligonucleotide
  Antisense strand to SEQ ID NO: 842200
uuucucaggacuuucaagg

SEQ ID NO: 842202 - RNA, 19 nt, Artificial Sequence
  Description of Artificial Sequence: Synthetic oligonucleotide
  Sense strand starting at position 890 of SEQ ID NO: 588102
ugaagacaacucugcaaga

SEQ ID NO: 842203 - RNA, 19 nt, Artificial Sequence
  Description of Artificial Sequence: Synthetic oligonucleotide
  Antisense strand to SEQ ID NO: 842202
ucuugcagaguugucuuca

SEQ ID NO: 842204 - RNA, 19 nt, Artificial Sequence
  Description of Artificial Sequence: Synthetic oligonucleotide
  Sense strand starting at position 1216 of SEQ ID NO: 588102
gggacaaacuaguaucugu

SEQ ID NO: 842205 - RNA, 19 nt, Artificial Sequence
  Description of Artificial Sequence: Synthetic oligonucleotide
  Antisense strand to SEQ ID NO: 842204
acagauacuaguuuguccc

SEQ ID NO: 842206 - RNA, 19 nt, Artificial Sequence
  Description of Artificial Sequence: Synthetic oligonucleotide
  Sense strand starting at position 1351 of SEQ ID NO: 588102
agcugauguagucagcuau

SEQ ID NO: 842207 - RNA, 19 nt, Artificial Sequence
  Description of Artificial Sequence: Synthetic oligonucleotide
  Antisense strand to SEQ ID NO: 842206
auagcugacuacaucagcu

SEQ ID NO: 842208 - RNA, 19 nt, Artificial Sequence
  Description of Artificial Sequence: Synthetic oligonucleotide
  Sense strand starting at position 1409 of SEQ ID NO: 588102
cccagaggcucccagaaua

SEQ ID NO: 842209 - RNA, 19 nt, Artificial Sequence
  Description of Artificial Sequence: Synthetic oligonucleotide
  Antisense strand to SEQ ID NO: 842208
uauucugggagccucuggg

SEQ ID NO: 842210 - RNA, 19 nt, Artificial Sequence
  Description of Artificial Sequence: Synthetic oligonucleotide
  Sense strand starting at position 2467 of SEQ ID NO: 588102
gcuuaaauucuagggaaga

SEQ ID NO: 842211 - RNA, 19 nt, Artificial Sequence
  Description of Artificial Sequence: Synthetic oligonucleotide
  Antisense strand to SEQ ID NO: 842210
ucuucccuagaauuuaagc

SEQ ID NO: 842212 - RNA, 19 nt, Artificial Sequence
  Description of Artificial Sequence: Synthetic oligonucleotide
  Sense strand starting at position 2468 of SEQ ID NO: 588102
cuuaaauucuagggaagag

SEQ ID NO: 842213 - RNA, 19 nt, Artificial Sequence
  Description of Artificial Sequence: Synthetic oligonucleotide
  Antisense strand to SEQ ID NO: 842212
cucuucccuagaauuuaag

SEQ ID NO: 842214 - RNA, 19 nt, Artificial Sequence
  Description of Artificial Sequence: Synthetic oligonucleotide
  Sense strand starting at position 2511 of SEQ ID NO: 588102
agacacauguuguauaugu

SEQ ID NO: 842215 - RNA, 19 nt, Artificial Sequence
  Description of Artificial Sequence: Synthetic oligonucleotide
  Antisense strand to SEQ ID NO: 842214
acauauacaacaugugucu

SEQ ID NO: 842216 - RNA, 19 nt, Artificial Sequence
  Description of Artificial Sequence: Synthetic oligonucleotide
  Sense strand starting at position 2515 of SEQ ID NO: 588102
acauguuguauauguagua

SEQ ID NO: 842217 - RNA, 19 nt, Artificial Sequence
  Description of Artificial Sequence: Synthetic oligonucleotide
  Antisense strand to SEQ ID NO: 842216
uacuacauauacaacaugu

SEQ ID NO: 842218 - RNA, 19 nt, Artificial Sequence
  Description of Artificial Sequence: Synthetic oligonucleotide
  Sense strand starting at position 2542 of SEQ ID NO: 588102
ggugguaaguguuauggag

SEQ ID NO: 842219 - RNA, 19 nt, Artificial Sequence
  Description of Artificial Sequence: Synthetic oligonucleotide
  Antisense strand to SEQ ID NO: 842218
cuccauaacacuuaccacc

SEQ ID NO: 842220 - RNA, 19 nt, Artificial Sequence
  Description of Artificial Sequence: Synthetic oligonucleotide
  Sense strand starting at position 3023 of SEQ ID NO: 588102
ggugucucuugauuacaau

SEQ ID NO: 842221 - RNA, 19 nt, Artificial Sequence
  Description of Artificial Sequence: Synthetic oligonucleotide
  Antisense strand to SEQ ID NO: 842220
auuguaaucaagagacacc

SEQ ID NO: 842222 - RNA, 19 nt, Artificial Sequence
  Description of Artificial Sequence: Synthetic oligonucleotide
  Sense strand starting at position 3024 of SEQ ID NO: 588102
gugucucuugauuacaauc

SEQ ID NO: 842223 - RNA, 19 nt, Artificial Sequence
  Description of Artificial Sequence: Synthetic oligonucleotide
  Antisense strand to SEQ ID NO: 842222
gauuguaaucaagagacac

SEQ ID NO: 842224 - RNA, 19 nt, Artificial Sequence
  Description of Artificial Sequence: Synthetic oligonucleotide
  Sense strand starting at position 3089 of SEQ ID NO: 588102
ucuggcugucuuuaagaac

SEQ ID NO: 842225 - RNA, 19 nt, Artificial Sequence
  Description of Artificial Sequence: Synthetic oligonucleotide
  Antisense strand to SEQ ID NO: 842224
guucuuaaagacagccaga

SEQ ID NO: 842226 - RNA, 19 nt, Artificial Sequence
  Description of Artificial Sequence: Synthetic oligonucleotide
  Sense strand starting at position 3092 of SEQ ID NO: 588102
ggcugucuuuaagaacuua

SEQ ID NO: 842227 - RNA, 19 nt, Artificial Sequence
  Description of Artificial Sequence: Synthetic oligonucleotide
  Antisense strand to SEQ ID NO: 842226
uaaguucuuaaagacagcc

SEQ ID NO: 842228 - RNA, 19 nt, Artificial Sequence
  Description of Artificial Sequence: Synthetic oligonucleotide
  Sense strand starting at position 3227 of SEQ ID NO: 588102
cuugauggaucccaaguua

SEQ ID NO: 842229 - RNA, 19 nt, Artificial Sequence
  Description of Artificial Sequence: Synthetic oligonucleotide
  Antisense strand to SEQ ID NO: 842228
uaacuugggauccaucaag

SEQ ID NO: 842230 - RNA, 19 nt, Artificial Sequence
  Description of Artificial Sequence: Synthetic oligonucleotide
  Sense strand starting at position 3242 of SEQ ID NO: 588102
guuacuaacugggccuaaa

SEQ ID NO: 842231 - RNA, 19 nt, Artificial Sequence
  Description of Artificial Sequence: Synthetic oligonucleotide
  Antisense strand to SEQ ID NO: 842230
uuuaggcccaguuaguaac

SEQ ID NO: 842232 - RNA, 19 nt, Artificial Sequence
  Description of Artificial Sequence: Synthetic oligonucleotide
  Sense strand starting at position 3307 of SEQ ID NO: 588102
cauucugcguuccuggaaa

SEQ ID NO: 842233 - RNA, 19 nt, Artificial Sequence
  Description of Artificial Sequence: Synthetic oligonucleotide
  Antisense strand to SEQ ID NO: 842232
uuuccaggaacgcagaaug

SEQ ID NO: 842234 - RNA, 19 nt, Artificial Sequence
  Description of Artificial Sequence: Synthetic oligonucleotide
  Sense strand starting at position 3337 of SEQ ID NO: 588102
cacuuaacucugggauggu

SEQ ID NO: 842235 - RNA, 19 nt, Artificial Sequence
  Description of Artificial Sequence: Synthetic oligonucleotide
  Antisense strand to SEQ ID NO: 842234
accaucccagaguuaagug

SEQ ID NO: 842236 - RNA, 19 nt, Artificial Sequence
  Description of Artificial Sequence: Synthetic oligonucleotide
  Sense strand starting at position 3338 of SEQ ID NO: 588102
acuuaacucugggaugguu

SEQ ID NO: 842237 - RNA, 19 nt, Artificial Sequence
  Description of Artificial Sequence: Synthetic oligonucleotide
  Antisense strand to SEQ ID NO: 842236
aaccaucccagaguuaagu

SEQ ID NO: 842238 - RNA, 19 nt, Artificial Sequence
  Description of Artificial Sequence: Synthetic oligonucleotide
  Sense strand starting at position 3374 of SEQ ID NO: 588102
uguuuaugccgccagaauc

SEQ ID NO: 842239 - RNA, 19 nt, Artificial Sequence
  Description of Artificial Sequence: Synthetic oligonucleotide
  Antisense strand to SEQ ID NO: 842238
gauucuggcggcauaaaca

SEQ ID NO: 842240 - RNA, 19 nt, Artificial Sequence
  Description of Artificial Sequence: Synthetic oligonucleotide
  Sense strand starting at position 3422 of SEQ ID NO: 588102
aucugaacucagcaaguau

SEQ ID NO: 842241 - RNA, 19 nt, Artificial Sequence
  Description of Artificial Sequence: Synthetic oligonucleotide
  Antisense strand to SEQ ID NO: 842240
auacuugcugaguucagau

SEQ ID NO: 842242 - RNA, 19 nt, Artificial Sequence
  Description of Artificial Sequence: Synthetic oligonucleotide
  Sense strand starting at position 3464 of SEQ ID NO: 588102
gugccuuccucauuugcau

SEQ ID NO: 842243 - RNA, 19 nt, Artificial Sequence
  Description of Artificial Sequence: Synthetic oligonucleotide
  Antisense strand to SEQ ID NO: 842242
augcaaaugaggaaggcac

SEQ ID NO: 842244 - RNA, 19 nt, Artificial Sequence
  Description of Artificial Sequence: Synthetic oligonucleotide
  Sense strand starting at position 3507 of SEQ ID NO: 588102
gcaggaaguucucuacaaa

SEQ ID NO: 842245 - RNA, 19 nt, Artificial Sequence
  Description of Artificial Sequence: Synthetic oligonucleotide
  Antisense strand to SEQ ID NO: 842244
uuuguagagaacuuccugc

SEQ ID NO: 842246 - RNA, 19 nt, Artificial Sequence
  Description of Artificial Sequence: Synthetic oligonucleotide
  Sense strand starting at position 3544 of SEQ ID NO: 588102
uucucuuuguucccuggaa

SEQ ID NO: 842247 - RNA, 19 nt, Artificial Sequence
  Description of Artificial Sequence: Synthetic oligonucleotide
  Antisense strand to SEQ ID NO: 842246
uuccagggaacaaagagaa

SEQ ID NO: 842248 - RNA, 19 nt, Artificial Sequence
  Description of Artificial Sequence: Synthetic oligonucleotide
  Sense strand starting at position 3545 of SEQ ID NO: 588102
ucucuuuguucccuggaau

SEQ ID NO: 842249 - RNA, 19 nt, Artificial Sequence
  Description of Artificial Sequence: Synthetic oligonucleotide
  Antisense strand to SEQ ID NO: 842248
auuccagggaacaaagaga

SEQ ID NO: 842250 - RNA, 19 nt, Artificial Sequence
  Description of Artificial Sequence: Synthetic oligonucleotide
  Sense strand starting at position 3546 of SEQ ID NO: 588102
cucuuuguucccuggaaug

SEQ ID NO: 842251 - RNA, 19 nt, Artificial Sequence
  Description of Artificial Sequence: Synthetic oligonucleotide
  Antisense strand to SEQ ID NO: 842250
cauuccagggaacaaagag

SEQ ID NO: 842252 - RNA, 19 nt, Artificial Sequence
  Description of Artificial Sequence: Synthetic oligonucleotide
  Sense strand starting at position 3548 of SEQ ID NO: 588102
cuuuguucccuggaaugca

SEQ ID NO: 842253 - RNA, 19 nt, Artificial Sequence
  Description of Artificial Sequence: Synthetic oligonucleotide
  Antisense strand to SEQ ID NO: 842252
ugcauuccagggaacaaag

SEQ ID NO: 842254 - RNA, 19 nt, Artificial Sequence
  Description of Artificial Sequence: Synthetic oligonucleotide
  Sense strand starting at position 3560 of SEQ ID NO: 588102
gaaugcaccuuuguacaga

SEQ ID NO: 842255 - RNA, 19 nt, Artificial Sequence
  Description of Artificial Sequence: Synthetic oligonucleotide
  Antisense strand to SEQ ID NO: 842254
ucuguacaaaggugcauuc

SEQ ID NO: 842256 - RNA, 19 nt, Artificial Sequence
  Description of Artificial Sequence: Synthetic oligonucleotide
  Sense strand starting at position 3581 of SEQ ID NO: 588102
gcugcauugcccugguuua

SEQ ID NO: 842257 - RNA, 19 nt, Artificial Sequence
  Description of Artificial Sequence: Synthetic oligonucleotide
  Antisense strand to SEQ ID NO: 842256
uaaaccagggcaaugcagc

SEQ ID NO: 842258 - RNA, 19 nt, Artificial Sequence
  Description of Artificial Sequence: Synthetic oligonucleotide
  Sense strand starting at position 3858 of SEQ ID NO: 588102
ucaccugaugucuggagau

SEQ ID NO: 842259 - RNA, 19 nt, Artificial Sequence
  Description of Artificial Sequence: Synthetic oligonucleotide
  Antisense strand to SEQ ID NO: 842258
aucuccagacaucagguga

SEQ ID NO: 842260 - RNA, 19 nt, Artificial Sequence
  Description of Artificial Sequence: Synthetic oligonucleotide
  Sense strand starting at position 160 of SEQ ID NO: 588103
auauaaugcguuuaccaaa

SEQ ID NO: 842261 - RNA, 19 nt, Artificial Sequence
  Description of Artificial Sequence: Synthetic oligonucleotide
  Antisense strand to SEQ ID NO: 842260
uuugguaaacgcauuauau

SEQ ID NO: 842262 - RNA, 19 nt, Artificial Sequence
  Description of Artificial Sequence: Synthetic oligonucleotide
  Sense strand starting at position 500 of SEQ ID NO: 588103
cuugaaauguaguuuaccu

SEQ ID NO: 842263 - RNA, 19 nt, Artificial Sequence
  Description of Artificial Sequence: Synthetic oligonucleotide
  Antisense strand to SEQ ID NO: 842262
agguaaacuacauuucaag

SEQ ID NO: 842264 - RNA, 19 nt, Artificial Sequence
  Description of Artificial Sequence: Synthetic oligonucleotide
  Sense strand starting at position 502 of SEQ ID NO: 588103
ugaaauguaguuuaccuuu

SEQ ID NO: 842265 - RNA, 19 nt, Artificial Sequence
  Description of Artificial Sequence: Synthetic oligonucleotide
  Antisense strand to SEQ ID NO: 842264
aaagguaaacuacauuuca

SEQ ID NO: 842266 - RNA, 19 nt, Artificial Sequence
  Description of Artificial Sequence: Synthetic oligonucleotide
  Sense strand starting at position 636 of SEQ ID NO: 588103
uugaaucacugucugauua

SEQ ID NO: 842267 - RNA, 19 nt, Artificial Sequence
  Description of Artificial Sequence: Synthetic oligonucleotide
  Antisense strand to SEQ ID NO: 842266
uaaucagacagugauucaa

SEQ ID NO: 842268 - RNA, 19 nt, Artificial Sequence
  Description of Artificial Sequence: Synthetic oligonucleotide
  Sense strand starting at position 643 of SEQ ID NO: 588103
acugucugauuacucuauu

SEQ ID NO: 842269 - RNA, 19 nt, Artificial Sequence
  Description of Artificial Sequence: Synthetic oligonucleotide
  Antisense strand to SEQ ID NO: 842268
aauagaguaaucagacagu

SEQ ID NO: 842270 - RNA, 19 nt, Artificial Sequence
  Description of Artificial Sequence: Synthetic oligonucleotide
  Sense strand starting at position 719 of SEQ ID NO: 588103
aauuauagcgcagaucaga

SEQ ID NO: 842271 - RNA, 19 nt, Artificial Sequence
  Description of Artificial Sequence: Synthetic oligonucleotide
  Antisense strand to SEQ ID NO: 842270
ucugaucugcgcuauaauu

SEQ ID NO: 842272 - RNA, 19 nt, Artificial Sequence
  Description of Artificial Sequence: Synthetic oligonucleotide
  Sense strand starting at position 733 of SEQ ID NO: 588103
ucagauuugucagaauaua

SEQ ID NO: 842273 - RNA, 19 nt, Artificial Sequence
  Description of Artificial Sequence: Synthetic oligonucleotide
  Antisense strand to SEQ ID NO: 842272
uauauucugacaaaucuga

SEQ ID NO: 842274 - RNA, 19 nt, Artificial Sequence
  Description of Artificial Sequence: Synthetic oligonucleotide
  Sense strand starting at position 937 of SEQ ID NO: 588103
agaugagguuuacuaagcu

SEQ ID NO: 842275 - RNA, 19 nt, Artificial Sequence
  Description of Artificial Sequence: Synthetic oligonucleotide
  Antisense strand to SEQ ID NO: 842274
agcuuaguaaaccucaucu

SEQ ID NO: 842276 - RNA, 19 nt, Artificial Sequence
  Description of Artificial Sequence: Synthetic oligonucleotide
  Sense strand starting at position 961 of SEQ ID NO: 588103
cccagaacacucugguuua

SEQ ID NO: 842277 - RNA, 19 nt, Artificial Sequence
  Description of Artificial Sequence: Synthetic oligonucleotide
  Antisense strand to SEQ ID NO: 842276
uaaaccagaguguucuggg

SEQ ID NO: 842278 - RNA, 19 nt, Artificial Sequence
  Description of Artificial Sequence: Synthetic oligonucleotide
  Sense strand starting at position 1129 of SEQ ID NO: 588103
aucuuaucacuaugacugu

SEQ ID NO: 842279 - RNA, 19 nt, Artificial Sequence
  Description of Artificial Sequence: Synthetic oligonucleotide
  Antisense strand to SEQ ID NO: 842278
acagucauagugauaagau

SEQ ID NO: 842280 - RNA, 19 nt, Artificial Sequence
  Description of Artificial Sequence: Synthetic oligonucleotide
  Sense strand starting at position 1135 of SEQ ID NO: 588103
ucacuaugacuguggcaau

SEQ ID NO: 842281 - RNA, 19 nt, Artificial Sequence
  Description of Artificial Sequence: Synthetic oligonucleotide
  Antisense strand to SEQ ID NO: 842280
auugccacagucauaguga

SEQ ID NO: 842282 - RNA, 19 nt, Artificial Sequence
  Description of Artificial Sequence: Synthetic oligonucleotide
  Sense strand starting at position 1148 of SEQ ID NO: 588103
ggcaaucagccguacuaaa

SEQ ID NO: 842283 - RNA, 19 nt, Artificial Sequence
  Description of Artificial Sequence: Synthetic oligonucleotide
  Antisense strand to SEQ ID NO: 842282
uuuaguacggcugauugcc

SEQ ID NO: 842284 - RNA, 19 nt, Artificial Sequence
  Description of Artificial Sequence: Synthetic oligonucleotide
  Sense strand starting at position 1334 of SEQ ID NO: 588103
cauaguacaugugcauaga

SEQ ID NO: 842285 - RNA, 19 nt, Artificial Sequence
  Description of Artificial Sequence: Synthetic oligonucleotide
  Antisense strand to SEQ ID NO: 842284
ucuaugcacauguacuaug

SEQ ID NO: 842286 - RNA, 19 nt, Artificial Sequence
  Description of Artificial Sequence: Synthetic oligonucleotide
  Sense strand starting at position 1335 of SEQ ID NO: 588103
auaguacaugugcauagau

SEQ ID NO: 842287 - RNA, 19 nt, Artificial Sequence
  Description of Artificial Sequence: Synthetic oligonucleotide
  Antisense strand to SEQ ID NO: 842286
aucuaugcacauguacuau

SEQ ID NO: 842288 - RNA, 19 nt, Artificial Sequence
  Description of Artificial Sequence: Synthetic oligonucleotide
  Sense strand starting at position 1343 of SEQ ID NO: 588103
ugugcauagauggaaagua

SEQ ID NO: 842289 - RNA, 19 nt, Artificial Sequence
  Description of Artificial Sequence: Synthetic oligonucleotide
  Antisense strand to SEQ ID NO: 842288
uacuuuccaucuaugcaca

SEQ ID NO: 842290 - RNA, 19 nt, Artificial Sequence
  Description of Artificial Sequence: Synthetic oligonucleotide
  Sense strand starting at position 1425 of SEQ ID NO: 588103
cacagugagugaguuuaau

SEQ ID NO: 842291 - RNA, 19 nt, Artificial Sequence
  Description of Artificial Sequence: Synthetic oligonucleotide
  Antisense strand to SEQ ID NO: 842290
auuaaacucacucacugug

SEQ ID NO: 842292 - RNA, 19 nt, Artificial Sequence
  Description of Artificial Sequence: Synthetic oligonucleotide
  Sense strand starting at position 1547 of SEQ ID NO: 588103
ucaguauuacuguauagca

SEQ ID NO: 842293 - RNA, 19 nt, Artificial Sequence
  Description of Artificial Sequence: Synthetic oligonucleotide
  Antisense strand to SEQ ID NO: 842292
ugcuauacaguaauacuga

SEQ ID NO: 842294 - RNA, 19 nt, Artificial Sequence
  Description of Artificial Sequence: Synthetic oligonucleotide
  Sense strand starting at position 1562 of SEQ ID NO: 588103
agcaguaacuaauuccaga

SEQ ID NO: 842295 - RNA, 19 nt, Artificial Sequence
  Description of Artificial Sequence: Synthetic oligonucleotide
  Antisense strand to SEQ ID NO: 842294
ucuggaauuaguuacugcu

SEQ ID NO: 842296 - RNA, 19 nt, Artificial Sequence
  Description of Artificial Sequence: Synthetic oligonucleotide
  Sense strand starting at position 1579 of SEQ ID NO: 588103
gaaagucuugcagacuuua

SEQ ID NO: 842297 - RNA, 19 nt, Artificial Sequence
  Description of Artificial Sequence: Synthetic oligonucleotide
  Antisense strand to SEQ ID NO: 842296
uaaagucugcaagacuuuc

SEQ ID NO: 842298 - RNA, 19 nt, Artificial Sequence
  Description of Artificial Sequence: Synthetic oligonucleotide
  Sense strand starting at position 1591 of SEQ ID NO: 588103
gacuuuaucuugcuuggga

SEQ ID NO: 842299 - RNA, 19 nt, Artificial Sequence
  Description of Artificial Sequence: Synthetic oligonucleotide
  Antisense strand to SEQ ID NO: 842298
ucccaagcaagauaaaguc

SEQ ID NO: 842300 - RNA, 19 nt, Artificial Sequence
  Description of Artificial Sequence: Synthetic oligonucleotide
  Sense strand starting at position 1592 of SEQ ID NO: 588103
acuuuaucuugcuugggaa

SEQ ID NO: 842301 - RNA, 19 nt, Artificial Sequence
  Description of Artificial Sequence: Synthetic oligonucleotide
  Antisense strand to SEQ ID NO: 842300
uucccaagcaagauaaagu

SEQ ID NO: 842302 - RNA, 19 nt, Artificial Sequence
  Description of Artificial Sequence: Synthetic oligonucleotide
  Sense strand starting at position 1593 of SEQ ID NO: 588103
cuuuaucuugcuugggaag

SEQ ID NO: 842303 - RNA, 19 nt, Artificial Sequence
  Description of Artificial Sequence: Synthetic oligonucleotide
  Antisense strand to SEQ ID NO: 842302
cuucccaagcaagauaaag

SEQ ID NO: 842304 - RNA, 19 nt, Artificial Sequence
  Description of Artificial Sequence: Synthetic oligonucleotide
  Sense strand starting at position 1621 of SEQ ID NO: 588103
aaaguucuagaaggaguau

SEQ ID NO: 842305 - RNA, 19 nt, Artificial Sequence
  Description of Artificial Sequence: Synthetic oligonucleotide
  Antisense strand to SEQ ID NO: 842304
auacuccuucuagaacuuu

SEQ ID NO: 842306 - RNA, 19 nt, Artificial Sequence
  Description of Artificial Sequence: Synthetic oligonucleotide
  Sense strand starting at position 1630 of SEQ ID NO: 588103
gaaggaguauucucucuuu

SEQ ID NO: 842307 - RNA, 19 nt, Artificial Sequence
  Description of Artificial Sequence: Synthetic oligonucleotide
  Antisense strand to SEQ ID NO: 842306
aaagagagaauacuccuuc

SEQ ID NO: 842308 - RNA, 19 nt, Artificial Sequence
  Description of Artificial Sequence: Synthetic oligonucleotide
  Sense strand starting at position 1744 of SEQ ID NO: 588103
acucaauggcaauagcaau

SEQ ID NO: 842309 - RNA, 19 nt, Artificial Sequence
  Description of Artificial Sequence: Synthetic oligonucleotide
  Antisense strand to SEQ ID NO: 842308
auugcuauugccauugagu

SEQ ID NO: 842310 - RNA, 19 nt, Artificial Sequence
  Description of Artificial Sequence: Synthetic oligonucleotide
  Sense strand starting at position 1755 of SEQ ID NO: 588103
auagcaaugcauugaaaug

SEQ ID NO: 842311 - RNA, 19 nt, Artificial Sequence
  Description of Artificial Sequence: Synthetic oligonucleotide
  Antisense strand to SEQ ID NO: 842310
cauuucaaugcauugcuau

SEQ ID NO: 842312 - RNA, 19 nt, Artificial Sequence
  Description of Artificial Sequence: Synthetic oligonucleotide
  Sense strand starting at position 2289 of SEQ ID NO: 588103
ugcugaugucuguugcuuu

SEQ ID NO: 842313 - RNA, 19 nt, Artificial Sequence
  Description of Artificial Sequence: Synthetic oligonucleotide
  Antisense strand to SEQ ID NO: 842312
aaagcaacagacaucagca

SEQ ID NO: 842314 - RNA, 19 nt, Artificial Sequence
  Description of Artificial Sequence: Synthetic oligonucleotide
  Sense strand starting at position 2353 of SEQ ID NO: 588103
agagaaacuuaaucccugu

SEQ ID NO: 842315 - RNA, 19 nt, Artificial Sequence
  Description of Artificial Sequence: Synthetic oligonucleotide
  Antisense strand to SEQ ID NO: 842314
acagggauuaaguuucucu

SEQ ID NO: 842316 - RNA, 19 nt, Artificial Sequence
  Description of Artificial Sequence: Synthetic oligonucleotide
  Sense strand starting at position 2526 of SEQ ID NO: 588103
uucugaagguuccucacua

SEQ ID NO: 842317 - RNA, 19 nt, Artificial Sequence
  Description of Artificial Sequence: Synthetic oligonucleotide
  Antisense strand to SEQ ID NO: 842316
uagugaggaaccuucagaa

SEQ ID NO: 842318 - RNA, 19 nt, Artificial Sequence
  Description of Artificial Sequence: Synthetic oligonucleotide
  Sense strand starting at position 2527 of SEQ ID NO: 588103
ucugaagguuccucacuaa

SEQ ID NO: 842319 - RNA, 19 nt, Artificial Sequence
  Description of Artificial Sequence: Synthetic oligonucleotide
  Antisense strand to SEQ ID NO: 842318
uuagugaggaaccuucaga

SEQ ID NO: 842320 - RNA, 19 nt, Artificial Sequence
  Description of Artificial Sequence: Synthetic oligonucleotide
  Sense strand starting at position 2549 of SEQ ID NO: 588103
uaaacaguggcauaaguua

SEQ ID NO: 842321 - RNA, 19 nt, Artificial Sequence
  Description of Artificial Sequence: Synthetic oligonucleotide
  Antisense strand to SEQ ID NO: 842320
uaacuuaugccacuguuua

SEQ ID NO: 842322 - RNA, 19 nt, Artificial Sequence
  Description of Artificial Sequence: Synthetic oligonucleotide
  Sense strand starting at position 2890 of SEQ ID NO: 588103
acccacguccuuuaucaga

SEQ ID NO: 842323 - RNA, 19 nt, Artificial Sequence
  Description of Artificial Sequence: Synthetic oligonucleotide
  Antisense strand to SEQ ID NO: 842322
ucugauaaaggacgugggu

SEQ ID NO: 842324 - RNA, 19 nt, Artificial Sequence
  Description of Artificial Sequence: Synthetic oligonucleotide
  Sense strand starting at position 2959 of SEQ ID NO: 588103
ccacuauugcaagaggguu

SEQ ID NO: 842325 - RNA, 19 nt, Artificial Sequence
  Description of Artificial Sequence: Synthetic oligonucleotide
  Antisense strand to SEQ ID NO: 842324
aacccucuugcaauagugg

SEQ ID NO: 842326 - RNA, 19 nt, Artificial Sequence
  Description of Artificial Sequence: Synthetic oligonucleotide
  Sense strand starting at position 3007 of SEQ ID NO: 588103
cccugaaggaagugcuaau

SEQ ID NO: 842327 - RNA, 19 nt, Artificial Sequence
  Description of Artificial Sequence: Synthetic oligonucleotide
  Antisense strand to SEQ ID NO: 842326
auuagcacuuccuucaggg

SEQ ID NO: 842328 - RNA, 19 nt, Artificial Sequence
  Description of Artificial Sequence: Synthetic oligonucleotide
  Sense strand starting at position 3110 of SEQ ID NO: 588103
auuugacucuacuagagga

SEQ ID NO: 842329 - RNA, 19 nt, Artificial Sequence
  Description of Artificial Sequence: Synthetic oligonucleotide
  Antisense strand to SEQ ID NO: 842328
uccucuaguagagucaaau

SEQ ID NO: 842330 - RNA, 19 nt, Artificial Sequence
  Description of Artificial Sequence: Synthetic oligonucleotide
  Sense strand starting at position 3249 of SEQ ID NO: 588103
auaggugugucaucaggac

SEQ ID NO: 842331 - RNA, 19 nt, Artificial Sequence
  Description of Artificial Sequence: Synthetic oligonucleotide
  Antisense strand to SEQ ID NO: 842330
guccugaugacacaccuau

SEQ ID NO: 842332 - RNA, 19 nt, Artificial Sequence
  Description of Artificial Sequence: Synthetic oligonucleotide
  Sense strand starting at position 3301 of SEQ ID NO: 588103
aauauaugcaguggaggua

SEQ ID NO: 842333 - RNA, 19 nt, Artificial Sequence
  Description of Artificial Sequence: Synthetic oligonucleotide
  Antisense strand to SEQ ID NO: 842332
uaccuccacugcauauauu

SEQ ID NO: 842334 - RNA, 19 nt, Artificial Sequence
  Description of Artificial Sequence: Synthetic oligonucleotide
  Sense strand starting at position 3411 of SEQ ID NO: 588103
ccauaaugggcaugugaau

SEQ ID NO: 842335 - RNA, 19 nt, Artificial Sequence
  Description of Artificial Sequence: Synthetic oligonucleotide
  Antisense strand to SEQ ID NO: 842334
auucacaugcccauuaugg

SEQ ID NO: 842336 - RNA, 19 nt, Artificial Sequence
  Description of Artificial Sequence: Synthetic oligonucleotide
  Sense strand starting at position 3575 of SEQ ID NO: 588103
uaggaaagucaaggucaua

SEQ ID NO: 842337 - RNA, 19 nt, Artificial Sequence
  Description of Artificial Sequence: Synthetic oligonucleotide
  Antisense strand to SEQ ID NO: 842336
uaugaccuugacuuuccua

SEQ ID NO: 842338 - RNA, 19 nt, Artificial Sequence
  Description of Artificial Sequence: Synthetic oligonucleotide
  Sense strand starting at position 3597 of SEQ ID NO: 588103
agauuauccuuuguucuca

SEQ ID NO: 842339 - RNA, 19 nt, Artificial Sequence
  Description of Artificial Sequence: Synthetic oligonucleotide
  Antisense strand to SEQ ID NO: 842338
ugagaacaaaggauaaucu

SEQ ID NO: 842340 - RNA, 19 nt, Artificial Sequence
  Description of Artificial Sequence: Synthetic oligonucleotide
  Sense strand starting at position 141 of SEQ ID NO: 588104
cucuguuccugcugaguca

SEQ ID NO: 842341 - RNA, 19 nt, Artificial Sequence
  Description of Artificial Sequence: Synthetic oligonucleotide
  Antisense strand to SEQ ID NO: 842340
ugacucagcaggaacagag

SEQ ID NO: 842342 - RNA, 19 nt, Artificial Sequence
  Description of Artificial Sequence: Synthetic oligonucleotide
  Sense strand starting at position 231 of SEQ ID NO: 588104
uugugaggcuuuccuaaag

SEQ ID NO: 842343 - RNA, 19 nt, Artificial Sequence
  Description of Artificial Sequence: Synthetic oligonucleotide
  Antisense strand to SEQ ID NO: 842342
cuuuaggaaagccucacaa

SEQ ID NO: 842344 - RNA, 19 nt, Artificial Sequence
  Description of Artificial Sequence: Synthetic oligonucleotide
  Sense strand starting at position 346 of SEQ ID NO: 588104
gcaccauuccaucagguca

SEQ ID NO: 842345 - RNA, 19 nt, Artificial Sequence
  Description of Artificial Sequence: Synthetic oligonucleotide
  Antisense strand to SEQ ID NO: 842344
ugaccugauggaauggugc

SEQ ID NO: 842346 - RNA, 19 nt, Artificial Sequence
  Description of Artificial Sequence: Synthetic oligonucleotide
  Sense strand starting at position 357 of SEQ ID NO: 588104
ucaggucaucugugucuuu

SEQ ID NO: 842347 - RNA, 19 nt, Artificial Sequence
  Description of Artificial Sequence: Synthetic oligonucleotide
  Antisense strand to SEQ ID NO: 842346
aaagacacagaugaccuga

SEQ ID NO: 842348 - RNA, 19 nt, Artificial Sequence
  Description of Artificial Sequence: Synthetic oligonucleotide
  Sense strand starting at position 463 of SEQ ID NO: 588104
cuggaagaaacuugugagu

SEQ ID NO: 842349 - RNA, 19 nt, Artificial Sequence
  Description of Artificial Sequence: Synthetic oligonucleotide
  Antisense strand to SEQ ID NO: 842348
acucacaaguuucuuccag

SEQ ID NO: 842350 - RNA, 19 nt, Artificial Sequence
  Description of Artificial Sequence: Synthetic oligonucleotide
  Sense strand starting at position 465 of SEQ ID NO: 588104
ggaagaaacuugugaguuc

SEQ ID NO: 842351 - RNA, 19 nt, Artificial Sequence
  Description of Artificial Sequence: Synthetic oligonucleotide
  Antisense strand to SEQ ID NO: 842350
gaacucacaaguuucuucc

SEQ ID NO: 842352 - RNA, 19 nt, Artificial Sequence
  Description of Artificial Sequence: Synthetic oligonucleotide
  Sense strand starting at position 468 of SEQ ID NO: 588104
agaaacuugugaguuccuu

SEQ ID NO: 842353 - RNA, 19 nt, Artificial Sequence
  Description of Artificial Sequence: Synthetic oligonucleotide
  Antisense strand to SEQ ID NO: 842352
aaggaacucacaaguuucu

SEQ ID NO: 842354 - RNA, 19 nt, Artificial Sequence
  Description of Artificial Sequence: Synthetic oligonucleotide
  Sense strand starting at position 499 of SEQ ID NO: 588104
ugagaaaguucugcccugu

SEQ ID NO: 842355 - RNA, 19 nt, Artificial Sequence
  Description of Artificial Sequence: Synthetic oligonucleotide
  Antisense strand to SEQ ID NO: 842354
acagggcagaacuuucuca

SEQ ID NO: 842356 - RNA, 19 nt, Artificial Sequence
  Description of Artificial Sequence: Synthetic oligonucleotide
  Sense strand starting at position 548 of SEQ ID NO: 588104
gaaagccaccaguaauagu

SEQ ID NO: 842357 - RNA, 19 nt, Artificial Sequence
  Description of Artificial Sequence: Synthetic oligonucleotide
  Antisense strand to SEQ ID NO: 842356
acuauuacugguggcuuuc

SEQ ID NO: 842358 - RNA, 19 nt, Artificial Sequence
  Description of Artificial Sequence: Synthetic oligonucleotide
  Sense strand starting at position 564 of SEQ ID NO: 588104
aguagugaaagcgauaaua

SEQ ID NO: 842359 - RNA, 19 nt, Artificial Sequence
  Description of Artificial Sequence: Synthetic oligonucleotide
  Antisense strand to SEQ ID NO: 842358
uauuaucgcuuucacuacu

SEQ ID NO: 842360 - RNA, 19 nt, Artificial Sequence
  Description of Artificial Sequence: Synthetic oligonucleotide
  Sense strand starting at position 1131 of SEQ ID NO: 588104
uggcguuuguggccucaca

SEQ ID NO: 842361 - RNA, 19 nt, Artificial Sequence
  Description of Artificial Sequence: Synthetic oligonucleotide
  Antisense strand to SEQ ID NO: 842360
ugugaggccacaaacgcca

SEQ ID NO: 842362 - RNA, 19 nt, Artificial Sequence
  Description of Artificial Sequence: Synthetic oligonucleotide
  Sense strand starting at position 1132 of SEQ ID NO: 588104
ggcguuuguggccucacau

SEQ ID NO: 842363 - RNA, 19 nt, Artificial Sequence
  Description of Artificial Sequence: Synthetic oligonucleotide
  Antisense strand to SEQ ID NO: 842362
augugaggccacaaacgcc

SEQ ID NO: 842364 - RNA, 19 nt, Artificial Sequence
  Description of Artificial Sequence: Synthetic oligonucleotide
  Sense strand starting at position 1133 of SEQ ID NO: 588104
gcguuuguggccucacauc

SEQ ID NO: 842365 - RNA, 19 nt, Artificial Sequence
  Description of Artificial Sequence: Synthetic oligonucleotide
  Antisense strand to SEQ ID NO: 842364
gaugugaggccacaaacgc

SEQ ID NO: 842366 - RNA, 19 nt, Artificial Sequence
  Description of Artificial Sequence: Synthetic oligonucleotide
  Sense strand starting at position 1222 of SEQ ID NO: 588104
agugucuucucuuggcuca

SEQ ID NO: 842367 - RNA, 19 nt, Artificial Sequence
  Description of Artificial Sequence: Synthetic oligonucleotide
  Antisense strand to SEQ ID NO: 842366
ugagccaagagaagacacu

SEQ ID NO: 842368 - RNA, 19 nt, Artificial Sequence
  Description of Artificial Sequence: Synthetic oligonucleotide
  Sense strand starting at position 1488 of SEQ ID NO: 588104
gagugcuguugaggugagu

SEQ ID NO: 842369 - RNA, 19 nt, Artificial Sequence
  Description of Artificial Sequence: Synthetic oligonucleotide
  Antisense strand to SEQ ID NO: 842368
acucaccucaacagcacuc

SEQ ID NO: 842370 - RNA, 19 nt, Artificial Sequence
  Description of Artificial Sequence: Synthetic oligonucleotide
  Sense strand starting at position 1524 of SEQ ID NO: 588104
cccucuucggccugcaaau

SEQ ID NO: 842371 - RNA, 19 nt, Artificial Sequence
  Description of Artificial Sequence: Synthetic oligonucleotide
  Antisense strand to SEQ ID NO: 842370
auuugcaggccgaagaggg

SEQ ID NO: 842372 - RNA, 19 nt, Artificial Sequence
  Description of Artificial Sequence: Synthetic oligonucleotide
  Sense strand starting at position 2006 of SEQ ID NO: 588104
ccagauaucugaggagcuu

SEQ ID NO: 842373 - RNA, 19 nt, Artificial Sequence
  Description of Artificial Sequence: Synthetic oligonucleotide
  Antisense strand to SEQ ID NO: 842372
aagcuccucagauaucugg

SEQ ID NO: 842374 - RNA, 19 nt, Artificial Sequence
  Description of Artificial Sequence: Synthetic oligonucleotide
  Sense strand starting at position 2301 of SEQ ID NO: 588104
gcaaauguauguguguagu

SEQ ID NO: 842375 - RNA, 19 nt, Artificial Sequence
  Description of Artificial Sequence: Synthetic oligonucleotide
  Antisense strand to SEQ ID NO: 842374
acuacacacauacauuugc

SEQ ID NO: 842376 - RNA, 19 nt, Artificial Sequence
  Description of Artificial Sequence: Synthetic oligonucleotide
  Sense strand starting at position 2303 of SEQ ID NO: 588104
aaauguauguguguagugu

SEQ ID NO: 842377 - RNA, 19 nt, Artificial Sequence
  Description of Artificial Sequence: Synthetic oligonucleotide
  Antisense strand to SEQ ID NO: 842376
acacuacacacauacauuu

SEQ ID NO: 842378 - RNA, 19 nt, Artificial Sequence
  Description of Artificial Sequence: Synthetic oligonucleotide
  Sense strand starting at position 2307 of SEQ ID NO: 588104
guauguguguagugugguu

SEQ ID NO: 842379 - RNA, 19 nt, Artificial Sequence
  Description of Artificial Sequence: Synthetic oligonucleotide
  Antisense strand to SEQ ID NO: 842378
aaccacacuacacacauac

SEQ ID NO: 842380 - RNA, 19 nt, Artificial Sequence
  Description of Artificial Sequence: Synthetic oligonucleotide
  Sense strand starting at position 2358 of SEQ ID NO: 588104
ucaagaguggcccaccaau

SEQ ID NO: 842381 - RNA, 19 nt, Artificial Sequence
  Description of Artificial Sequence: Synthetic oligonucleotide
  Antisense strand to SEQ ID NO: 842380
auuggugggccacucuuga

SEQ ID NO: 842382 - RNA, 19 nt, Artificial Sequence
  Description of Artificial Sequence: Synthetic oligonucleotide
  Sense strand starting at position 2776 of SEQ ID NO: 588104
cgaguuuccuggucuguug

SEQ ID NO: 842383 - RNA, 19 nt, Artificial Sequence
  Description of Artificial Sequence: Synthetic oligonucleotide
  Antisense strand to SEQ ID NO: 842382
caacagaccaggaaacucg

SEQ ID NO: 842384 - RNA, 19 nt, Artificial Sequence
  Description of Artificial Sequence: Synthetic oligonucleotide
  Sense strand starting at position 2935 of SEQ ID NO: 588104
cuggaagcaucaucugaaa

SEQ ID NO: 842385 - RNA, 19 nt, Artificial Sequence
  Description of Artificial Sequence: Synthetic oligonucleotide
  Antisense strand to SEQ ID NO: 842384
uuucagaugaugcuuccag

SEQ ID NO: 842386 - RNA, 19 nt, Artificial Sequence
  Description of Artificial Sequence: Synthetic oligonucleotide
  Sense strand starting at position 3228 of SEQ ID NO: 588104
agcagcagcucuuccaaua

SEQ ID NO: 842387 - RNA, 19 nt, Artificial Sequence
  Description of Artificial Sequence: Synthetic oligonucleotide
  Antisense strand to SEQ ID NO: 842386
uauuggaagagcugcugcu

SEQ ID NO: 842388 - RNA, 19 nt, Artificial Sequence
  Description of Artificial Sequence: Synthetic oligonucleotide
  Sense strand starting at position 3284 of SEQ ID NO: 588104
ccggacucuuuggguucaa

SEQ ID NO: 842389 - RNA, 19 nt, Artificial Sequence
  Description of Artificial Sequence: Synthetic oligonucleotide
  Antisense strand to SEQ ID NO: 842388
uugaacccaaagaguccgg

SEQ ID NO: 842390 - RNA, 19 nt, Artificial Sequence
  Description of Artificial Sequence: Synthetic oligonucleotide
  Sense strand starting at position 3285 of SEQ ID NO: 588104
cggacucuuuggguucaaa

SEQ ID NO: 842391 - RNA, 19 nt, Artificial Sequence
  Description of Artificial Sequence: Synthetic oligonucleotide
  Antisense strand to SEQ ID NO: 842390
uuugaacccaaagaguccg

SEQ ID NO: 842392 - RNA, 19 nt, Artificial Sequence
  Description of Artificial Sequence: Synthetic oligonucleotide
  Sense strand starting at position 3349 of SEQ ID NO: 588104
gaagcuucucugugccuca

SEQ ID NO: 842393 - RNA, 19 nt, Artificial Sequence
  Description of Artificial Sequence: Synthetic oligonucleotide
  Antisense strand to SEQ ID NO: 842392
ugaggcacagagaagcuuc

SEQ ID NO: 842394 - RNA, 19 nt, Artificial Sequence
  Description of Artificial Sequence: Synthetic oligonucleotide
  Sense strand starting at position 3378 of SEQ ID NO: 588104
cuguaaaguggcggugaua

SEQ ID NO: 842395 - RNA, 19 nt, Artificial Sequence
  Description of Artificial Sequence: Synthetic oligonucleotide
  Antisense strand to SEQ ID NO: 842394
uaucaccgccacuuuacag

SEQ ID NO: 842396 - RNA, 19 nt, Artificial Sequence
  Description of Artificial Sequence: Synthetic oligonucleotide
  Sense strand starting at position 3410 of SEQ ID NO: 588104
gcuggacucuugugaggcu

SEQ ID NO: 842397 - RNA, 19 nt, Artificial Sequence
  Description of Artificial Sequence: Synthetic oligonucleotide
  Antisense strand to SEQ ID NO: 842396
agccucacaagaguccagc

SEQ ID NO: 842398 - RNA, 19 nt, Artificial Sequence
  Description of Artificial Sequence: Synthetic oligonucleotide
  Sense strand starting at position 3413 of SEQ ID NO: 588104
ggacucuugugaggcugaa

SEQ ID NO: 842399 - RNA, 19 nt, Artificial Sequence
  Description of Artificial Sequence: Synthetic oligonucleotide
  Antisense strand to SEQ ID NO: 842398
uucagccucacaagagucc

SEQ ID NO: 842400 - RNA, 19 nt, Artificial Sequence
  Description of Artificial Sequence: Synthetic oligonucleotide
  Sense strand starting at position 3525 of SEQ ID NO: 588104
gugucuacucugcugucau

SEQ ID NO: 842401 - RNA, 19 nt, Artificial Sequence
  Description of Artificial Sequence: Synthetic oligonucleotide
  Antisense strand to SEQ ID NO: 842400
augacagcagaguagacac

SEQ ID NO: 842402 - RNA, 19 nt, Artificial Sequence
  Description of Artificial Sequence: Synthetic oligonucleotide
  Sense strand starting at position 3663 of SEQ ID NO: 588104
cucacauugucucucgagu

SEQ ID NO: 842403 - RNA, 19 nt, Artificial Sequence
  Description of Artificial Sequence: Synthetic oligonucleotide
  Antisense strand to SEQ ID NO: 842402
acucgagagacaaugugag

SEQ ID NO: 842404 - RNA, 19 nt, Artificial Sequence
  Description of Artificial Sequence: Synthetic oligonucleotide
  Sense strand starting at position 3665 of SEQ ID NO: 588104
cacauugucucucgagugu

SEQ ID NO: 842405 - RNA, 19 nt, Artificial Sequence
  Description of Artificial Sequence: Synthetic oligonucleotide
  Antisense strand to SEQ ID NO: 842404
acacucgagagacaaugug

SEQ ID NO: 842406 - RNA, 19 nt, Artificial Sequence
  Description of Artificial Sequence: Synthetic oligonucleotide
  Sense strand starting at position 3677 of SEQ ID NO: 588104
cgagugugccugugagaug

SEQ ID NO: 842407 - RNA, 19 nt, Artificial Sequence
  Description of Artificial Sequence: Synthetic oligonucleotide
  Antisense strand to SEQ ID NO: 842406
caucucacaggcacacucg

SEQ ID NO: 842408 - RNA, 19 nt, Artificial Sequence
  Description of Artificial Sequence: Synthetic oligonucleotide
  Sense strand starting at position 3678 of SEQ ID NO: 588104
gagugugccugugagaugu

SEQ ID NO: 842409 - RNA, 19 nt, Artificial Sequence
  Description of Artificial Sequence: Synthetic oligonucleotide
  Antisense strand to SEQ ID NO: 842408
acaucucacaggcacacuc

SEQ ID NO: 842410 - RNA, 19 nt, Artificial Sequence
  Description of Artificial Sequence: Synthetic oligonucleotide
  Sense strand starting at position 3715 of SEQ ID NO: 588104
gccugucauugguccagga

SEQ ID NO: 842411 - RNA, 19 nt, Artificial Sequence
  Description of Artificial Sequence: Synthetic oligonucleotide
  Antisense strand to SEQ ID NO: 842410
uccuggaccaaugacaggc

SEQ ID NO: 842412 - RNA, 19 nt, Artificial Sequence
  Description of Artificial Sequence: Synthetic oligonucleotide
  Sense strand starting at position 3717 of SEQ ID NO: 588104
cugucauugguccaggaug

SEQ ID NO: 842413 - RNA, 19 nt, Artificial Sequence
  Description of Artificial Sequence: Synthetic oligonucleotide
  Antisense strand to SEQ ID NO: 842412
cauccuggaccaaugacag

SEQ ID NO: 842414 - RNA, 19 nt, Artificial Sequence
  Description of Artificial Sequence: Synthetic oligonucleotide
  Sense strand starting at position 3916 of SEQ ID NO: 588104
caaguuuccacguagagag

SEQ ID NO: 842415 - RNA, 19 nt, Artificial Sequence
  Description of Artificial Sequence: Synthetic oligonucleotide
  Antisense strand to SEQ ID NO: 842414
cucucuacguggaaacuug

SEQ ID NO: 842416 - RNA, 19 nt, Artificial Sequence
  Description of Artificial Sequence: Synthetic oligonucleotide
  Sense strand starting at position 290 of SEQ ID NO: 588105
cccuguugggaaggaugaa

SEQ ID NO: 842417 - RNA, 19 nt, Artificial Sequence
  Description of Artificial Sequence: Synthetic oligonucleotide
  Antisense strand to SEQ ID NO: 842416
uucauccuucccaacaggg

SEQ ID NO: 842418 - RNA, 19 nt, Artificial Sequence
  Description of Artificial Sequence: Synthetic oligonucleotide
  Sense strand starting at position 320 of SEQ ID NO: 588105
agucuaggcuuagcaagaa

SEQ ID NO: 842419 - RNA, 19 nt, Artificial Sequence
  Description of Artificial Sequence: Synthetic oligonucleotide
  Antisense strand to SEQ ID NO: 842418
uucuugcuaagccuagacu

SEQ ID NO: 842420 - RNA, 19 nt, Artificial Sequence
  Description of Artificial Sequence: Synthetic oligonucleotide
  Sense strand starting at position 336 of SEQ ID NO: 588105
gaaggagcuuggugaauga

SEQ ID NO: 842421 - RNA, 19 nt, Artificial Sequence
  Description of Artificial Sequence: Synthetic oligonucleotide
  Antisense strand to SEQ ID NO: 842420
ucauucaccaagcuccuuc

SEQ ID NO: 842422 - RNA, 19 nt, Artificial Sequence
  Description of Artificial Sequence: Synthetic oligonucleotide
  Sense strand starting at position 340 of SEQ ID NO: 588105
gagcuuggugaaugauuag

SEQ ID NO: 842423 - RNA, 19 nt, Artificial Sequence
  Description of Artificial Sequence: Synthetic oligonucleotide
  Antisense strand to SEQ ID NO: 842422
cuaaucauucaccaagcuc

SEQ ID NO: 842424 - RNA, 19 nt, Artificial Sequence
  Description of Artificial Sequence: Synthetic oligonucleotide
  Sense strand starting at position 343 of SEQ ID NO: 588105
cuuggugaaugauuaguaa

SEQ ID NO: 842425 - RNA, 19 nt, Artificial Sequence
  Description of Artificial Sequence: Synthetic oligonucleotide
  Antisense strand to SEQ ID NO: 842424
uuacuaaucauucaccaag

SEQ ID NO: 842426 - RNA, 19 nt, Artificial Sequence
  Description of Artificial Sequence: Synthetic oligonucleotide
  Sense strand starting at position 535 of SEQ ID NO: 588105
gggaaaggcucugguucga

SEQ ID NO: 842427 - RNA, 19 nt, Artificial Sequence
  Description of Artificial Sequence: Synthetic oligonucleotide
  Antisense strand to SEQ ID NO: 842426
ucgaaccagagccuuuccc

SEQ ID NO: 842428 - RNA, 19 nt, Artificial Sequence
  Description of Artificial Sequence: Synthetic oligonucleotide
  Sense strand starting at position 541 of SEQ ID NO: 588105
ggcucugguucgaagggau

SEQ ID NO: 842429 - RNA, 19 nt, Artificial Sequence
  Description of Artificial Sequence: Synthetic oligonucleotide
  Antisense strand to SEQ ID NO: 842428
aucccuucgaaccagagcc

SEQ ID NO: 842430 - RNA, 19 nt, Artificial Sequence
  Description of Artificial Sequence: Synthetic oligonucleotide
  Sense strand starting at position 586 of SEQ ID NO: 588105
gcaggagcaccuugggauu

SEQ ID NO: 842431 - RNA, 19 nt, Artificial Sequence
  Description of Artificial Sequence: Synthetic oligonucleotide
  Antisense strand to SEQ ID NO: 842430
aaucccaaggugcuccugc

SEQ ID NO: 842432 - RNA, 19 nt, Artificial Sequence
  Description of Artificial Sequence: Synthetic oligonucleotide
  Sense strand starting at position 1084 of SEQ ID NO: 588105
gggucacuugccagcgagu

SEQ ID NO: 842433 - RNA, 19 nt, Artificial Sequence
  Description of Artificial Sequence: Synthetic oligonucleotide
  Antisense strand to SEQ ID NO: 842432
acucgcuggcaagugaccc

SEQ ID NO: 842434 - RNA, 19 nt, Artificial Sequence
  Description of Artificial Sequence: Synthetic oligonucleotide
  Sense strand starting at position 1085 of SEQ ID NO: 588105
ggucacuugccagcgaguu

SEQ ID NO: 842435 - RNA, 19 nt, Artificial Sequence
  Description of Artificial Sequence: Synthetic oligonucleotide
  Antisense strand to SEQ ID NO: 842434
aacucgcuggcaagugacc

SEQ ID NO: 842436 - RNA, 19 nt, Artificial Sequence
  Description of Artificial Sequence: Synthetic oligonucleotide
  Sense strand starting at position 1086 of SEQ ID NO: 588105
gucacuugccagcgaguua

SEQ ID NO: 842437 - RNA, 19 nt, Artificial Sequence
  Description of Artificial Sequence: Synthetic oligonucleotide
  Antisense strand to SEQ ID NO: 842436
uaacucgcuggcaagugac

SEQ ID NO: 842438 - RNA, 19 nt, Artificial Sequence
  Description of Artificial Sequence: Synthetic oligonucleotide
  Sense strand starting at position 1334 of SEQ ID NO: 588105
cuugaagaguuuccuugca

SEQ ID NO: 842439 - RNA, 19 nt, Artificial Sequence
  Description of Artificial Sequence: Synthetic oligonucleotide
  Antisense strand to SEQ ID NO: 842438
ugcaaggaaacucuucaag

SEQ ID NO: 842440 - RNA, 19 nt, Artificial Sequence
  Description of Artificial Sequence: Synthetic oligonucleotide
  Sense strand starting at position 1336 of SEQ ID NO: 588105
ugaagaguuuccuugcagg

SEQ ID NO: 842441 - RNA, 19 nt, Artificial Sequence
  Description of Artificial Sequence: Synthetic oligonucleotide
  Antisense strand to SEQ ID NO: 842440
ccugcaaggaaacucuuca

SEQ ID NO: 842442 - RNA, 19 nt, Artificial Sequence
  Description of Artificial Sequence: Synthetic oligonucleotide
  Sense strand starting at position 2544 of SEQ ID NO: 588105
gucugauggcuccguugua

SEQ ID NO: 842443 - RNA, 19 nt, Artificial Sequence
  Description of Artificial Sequence: Synthetic oligonucleotide
  Antisense strand to SEQ ID NO: 842442
uacaacggagccaucagac

SEQ ID NO: 842444 - RNA, 19 nt, Artificial Sequence
  Description of Artificial Sequence: Synthetic oligonucleotide
  Sense strand starting at position 2613 of SEQ ID NO: 588105
ucagaaagcucccgagaug

SEQ ID NO: 842445 - RNA, 19 nt, Artificial Sequence
  Description of Artificial Sequence: Synthetic oligonucleotide
  Antisense strand to SEQ ID NO: 842444
caucucgggagcuuucuga

SEQ ID NO: 842446 - RNA, 19 nt, Artificial Sequence
  Description of Artificial Sequence: Synthetic oligonucleotide
  Sense strand starting at position 2830 of SEQ ID NO: 588105
cucuguuccugcugaguca

SEQ ID NO: 842447 - RNA, 19 nt, Artificial Sequence
  Description of Artificial Sequence: Synthetic oligonucleotide
  Antisense strand to SEQ ID NO: 842446
ugacucagcaggaacagag

SEQ ID NO: 842448 - RNA, 19 nt, Artificial Sequence
  Description of Artificial Sequence: Synthetic oligonucleotide
  Sense strand starting at position 2920 of SEQ ID NO: 588105
uugugaggcuuuccuaaag

SEQ ID NO: 842449 - RNA, 19 nt, Artificial Sequence
  Description of Artificial Sequence: Synthetic oligonucleotide
  Antisense strand to SEQ ID NO: 842448
cuuuaggaaagccucacaa

SEQ ID NO: 842450 - RNA, 19 nt, Artificial Sequence
  Description of Artificial Sequence: Synthetic oligonucleotide
  Sense strand starting at position 3035 of SEQ ID NO: 588105
gcaccauuccaucagguca

SEQ ID NO: 842451 - RNA, 19 nt, Artificial Sequence
  Description of Artificial Sequence: Synthetic oligonucleotide
  Antisense strand to SEQ ID NO: 842450
ugaccugauggaauggugc

SEQ ID NO: 842452 - RNA, 19 nt, Artificial Sequence
  Description of Artificial Sequence: Synthetic oligonucleotide
  Sense strand starting at position 3046 of SEQ ID NO: 588105
ucaggucaucugugucuuu

SEQ ID NO: 842453 - RNA, 19 nt, Artificial Sequence
  Description of Artificial Sequence: Synthetic oligonucleotide
  Antisense strand to SEQ ID NO: 842452
aaagacacagaugaccuga

SEQ ID NO: 842454 - RNA, 19 nt, Artificial Sequence
  Description of Artificial Sequence: Synthetic oligonucleotide
  Sense strand starting at position 3152 of SEQ ID NO: 588105
cuggaagaaacuugugagu

SEQ ID NO: 842455 - RNA, 19 nt, Artificial Sequence
  Description of Artificial Sequence: Synthetic oligonucleotide
  Antisense strand to SEQ ID NO: 842454
acucacaaguuucuuccag

SEQ ID NO: 842456 - RNA, 19 nt, Artificial Sequence
  Description of Artificial Sequence: Synthetic oligonucleotide
  Sense strand starting at position 3154 of SEQ ID NO: 588105
ggaagaaacuugugaguuc

SEQ ID NO: 842457 - RNA, 19 nt, Artificial Sequence
  Description of Artificial Sequence: Synthetic oligonucleotide
  Antisense strand to SEQ ID NO: 842456
gaacucacaaguuucuucc

SEQ ID NO: 842458 - RNA, 19 nt, Artificial Sequence
  Description of Artificial Sequence: Synthetic oligonucleotide
  Sense strand starting at position 3157 of SEQ ID NO: 588105
agaaacuugugaguuccuu

SEQ ID NO: 842459 - RNA, 19 nt, Artificial Sequence
  Description of Artificial Sequence: Synthetic oligonucleotide
  Antisense strand to SEQ ID NO: 842458
aaggaacucacaaguuucu

SEQ ID NO: 842460 - RNA, 19 nt, Artificial Sequence
  Description of Artificial Sequence: Synthetic oligonucleotide
  Sense strand starting at position 3188 of SEQ ID NO: 588105
ugagaaaguucugcccugu

SEQ ID NO: 842461 - RNA, 19 nt, Artificial Sequence
  Description of Artificial Sequence: Synthetic oligonucleotide
  Antisense strand to SEQ ID NO: 842460
acagggcagaacuuucuca

SEQ ID NO: 842462 - RNA, 19 nt, Artificial Sequence
  Description of Artificial Sequence: Synthetic oligonucleotide
  Sense strand starting at position 3237 of SEQ ID NO: 588105
gaaagccaccaguaauagu

SEQ ID NO: 842463 - RNA, 19 nt, Artificial Sequence
  Description of Artificial Sequence: Synthetic oligonucleotide
  Antisense strand to SEQ ID NO: 842462
acuauuacugguggcuuuc

SEQ ID NO: 842464 - RNA, 19 nt, Artificial Sequence
  Description of Artificial Sequence: Synthetic oligonucleotide
  Sense strand starting at position 3253 of SEQ ID NO: 588105
aguagugaaagcgauaaua

SEQ ID NO: 842465 - RNA, 19 nt, Artificial Sequence
  Description of Artificial Sequence: Synthetic oligonucleotide
  Antisense strand to SEQ ID NO: 842464
uauuaucgcuuucacuacu

SEQ ID NO: 842466 - RNA, 19 nt, Artificial Sequence
  Description of Artificial Sequence: Synthetic oligonucleotide
  Sense strand starting at position 3820 of SEQ ID NO: 588105
uggcguuuguggccucaca

SEQ ID NO: 842467 - RNA, 19 nt, Artificial Sequence
  Description of Artificial Sequence: Synthetic oligonucleotide
  Antisense strand to SEQ ID NO: 842466
ugugaggccacaaacgcca

SEQ ID NO: 842468 - RNA, 19 nt, Artificial Sequence
  Description of Artificial Sequence: Synthetic oligonucleotide
  Sense strand starting at position 3821 of SEQ ID NO: 588105
ggcguuuguggccucacau

SEQ ID NO: 842469 - RNA, 19 nt, Artificial Sequence
  Description of Artificial Sequence: Synthetic oligonucleotide
  Antisense strand to SEQ ID NO: 842468
augugaggccacaaacgcc

SEQ ID NO: 842470 - RNA, 19 nt, Artificial Sequence
  Description of Artificial Sequence: Synthetic oligonucleotide
  Sense strand starting at position 3822 of SEQ ID NO: 588105
gcguuuguggccucacauc

SEQ ID NO: 842471 - RNA, 19 nt, Artificial Sequence
  Description of Artificial Sequence: Synthetic oligonucleotide
  Antisense strand to SEQ ID NO: 842470
gaugugaggccacaaacgc

SEQ ID NO: 842472 - RNA, 19 nt, Artificial Sequence
  Description of Artificial Sequence: Synthetic oligonucleotide
  Sense strand starting at position 3911 of SEQ ID NO: 588105
agugucuucucuuggcuca

SEQ ID NO: 842473 - RNA, 19 nt, Artificial Sequence
  Description of Artificial Sequence: Synthetic oligonucleotide
  Antisense strand to SEQ ID NO: 842472
ugagccaagagaagacacu

SEQ ID NO: 842474 - RNA, 19 nt, Artificial Sequence
  Description of Artificial Sequence: Synthetic oligonucleotide
  Sense strand starting at position 371 of SEQ ID NO: 588106
aggugaggccuucacagau

SEQ ID NO: 842475 - RNA, 19 nt, Artificial Sequence
  Description of Artificial Sequence: Synthetic oligonucleotide
  Antisense strand to SEQ ID NO: 842474
aucugugaaggccucaccu

SEQ ID NO: 842476 - RNA, 19 nt, Artificial Sequence
  Description of Artificial Sequence: Synthetic oligonucleotide
  Sense strand starting at position 667 of SEQ ID NO: 588106
guuggaagccaugacugua

SEQ ID NO: 842477 - RNA, 19 nt, Artificial Sequence
  Description of Artificial Sequence: Synthetic oligonucleotide
  Antisense strand to SEQ ID NO: 842476
uacagucauggcuuccaac

SEQ ID NO: 842478 - RNA, 19 nt, Artificial Sequence
  Description of Artificial Sequence: Synthetic oligonucleotide
  Sense strand starting at position 1284 of SEQ ID NO: 588106
cgucgugcgcccugaucaa

SEQ ID NO: 842479 - RNA, 19 nt, Artificial Sequence
  Description of Artificial Sequence: Synthetic oligonucleotide
  Antisense strand to SEQ ID NO: 842478
uugaucagggcgcacgacg

SEQ ID NO: 842480 - RNA, 19 nt, Artificial Sequence
  Description of Artificial Sequence: Synthetic oligonucleotide
  Sense strand starting at position 1388 of SEQ ID NO: 588106
cccuuucucuccgaaagcu

SEQ ID NO: 842481 - RNA, 19 nt, Artificial Sequence
  Description of Artificial Sequence: Synthetic oligonucleotide
  Antisense strand to SEQ ID NO: 842480
agcuuucggagagaaaggg

SEQ ID NO: 842482 - RNA, 19 nt, Artificial Sequence
  Description of Artificial Sequence: Synthetic oligonucleotide
  Sense strand starting at position 1807 of SEQ ID NO: 588106
gcgaccuuggcguagaacu

SEQ ID NO: 842483 - RNA, 19 nt, Artificial Sequence
  Description of Artificial Sequence: Synthetic oligonucleotide
  Antisense strand to SEQ ID NO: 842482
aguucuacgccaaggucgc

SEQ ID NO: 842484 - RNA, 19 nt, Artificial Sequence
  Description of Artificial Sequence: Synthetic oligonucleotide
  Sense strand starting at position 2207 of SEQ ID NO: 588106
acagccuucugccagguua

SEQ ID NO: 842485 - RNA, 19 nt, Artificial Sequence
  Description of Artificial Sequence: Synthetic oligonucleotide
  Antisense strand to SEQ ID NO: 842484
uaaccuggcagaaggcugu

SEQ ID NO: 842486 - RNA, 19 nt, Artificial Sequence
  Description of Artificial Sequence: Synthetic oligonucleotide
  Sense strand starting at position 2498 of SEQ ID NO: 588106
ggcagaaagccuggcucuu

SEQ ID NO: 842487 - RNA, 19 nt, Artificial Sequence
  Description of Artificial Sequence: Synthetic oligonucleotide
  Antisense strand to SEQ ID NO: 842486
aagagccaggcuuucugcc

SEQ ID NO: 842488 - RNA, 19 nt, Artificial Sequence
  Description of Artificial Sequence: Synthetic oligonucleotide
  Sense strand starting at position 2962 of SEQ ID NO: 588106
cccaaacuguacugagaga

SEQ ID NO: 842489 - RNA, 19 nt, Artificial Sequence
  Description of Artificial Sequence: Synthetic oligonucleotide
  Antisense strand to SEQ ID NO: 842488
ucucucaguacaguuuggg

SEQ ID NO: 842490 - RNA, 19 nt, Artificial Sequence
  Description of Artificial Sequence: Synthetic oligonucleotide
  Sense strand starting at position 3116 of SEQ ID NO: 588106
gccuuaggccuguaggcau

SEQ ID NO: 842491 - RNA, 19 nt, Artificial Sequence
  Description of Artificial Sequence: Synthetic oligonucleotide
  Antisense strand to SEQ ID NO: 842490
augccuacaggccuaaggc

SEQ ID NO: 842492 - RNA, 19 nt, Artificial Sequence
  Description of Artificial Sequence: Synthetic oligonucleotide
  Sense strand starting at position 3127 of SEQ ID NO: 588106
guaggcaucuuacagcgaa

SEQ ID NO: 842493 - RNA, 19 nt, Artificial Sequence
  Description of Artificial Sequence: Synthetic oligonucleotide
  Antisense strand to SEQ ID NO: 842492
uucgcuguaagaugccuac

SEQ ID NO: 842494 - RNA, 19 nt, Artificial Sequence
  Description of Artificial Sequence: Synthetic oligonucleotide
  Sense strand starting at position 3170 of SEQ ID NO: 588106
agucuccuuccagauccau

SEQ ID NO: 842495 - RNA, 19 nt, Artificial Sequence
  Description of Artificial Sequence: Synthetic oligonucleotide
  Antisense strand to SEQ ID NO: 842494
auggaucuggaaggagacu

SEQ ID NO: 842496 - RNA, 19 nt, Artificial Sequence
  Description of Artificial Sequence: Synthetic oligonucleotide
  Sense strand starting at position 3745 of SEQ ID NO: 588106
aggccaaugucuggcacau

SEQ ID NO: 842497 - RNA, 19 nt, Artificial Sequence
  Description of Artificial Sequence: Synthetic oligonucleotide
  Antisense strand to SEQ ID NO: 842496
augugccagacauuggccu

SEQ ID NO: 842498 - RNA, 19 nt, Artificial Sequence
  Description of Artificial Sequence: Synthetic oligonucleotide
  Sense strand starting at position 3776 of SEQ ID NO: 588106
gcacacacuuuccauagua

SEQ ID NO: 842499 - RNA, 19 nt, Artificial Sequence
  Description of Artificial Sequence: Synthetic oligonucleotide
  Antisense strand to SEQ ID NO: 842498
uacuauggaaagugugugc

SEQ ID NO: 842500 - RNA, 19 nt, Artificial Sequence
  Description of Artificial Sequence: Synthetic oligonucleotide
  Sense strand starting at position 3883 of SEQ ID NO: 588106
gacucugagccggaagacu

SEQ ID NO: 842501 - RNA, 19 nt, Artificial Sequence
  Description of Artificial Sequence: Synthetic oligonucleotide
  Antisense strand to SEQ ID NO: 842500
agucuuccggcucagaguc

SEQ ID NO: 842502 - RNA, 19 nt, Artificial Sequence
  Description of Artificial Sequence: Synthetic oligonucleotide
  Sense strand starting at position 168 of SEQ ID NO: 588107
uugcaauguuggccaaaua

SEQ ID NO: 842503 - RNA, 19 nt, Artificial Sequence
  Description of Artificial Sequence: Synthetic oligonucleotide
  Antisense strand to SEQ ID NO: 842502
uauuuggccaacauugcaa

SEQ ID NO: 842504 - RNA, 19 nt, Artificial Sequence
  Description of Artificial Sequence: Synthetic oligonucleotide
  Sense strand starting at position 179 of SEQ ID NO: 588107
gccaaauacgaggguaguu

SEQ ID NO: 842505 - RNA, 19 nt, Artificial Sequence
  Description of Artificial Sequence: Synthetic oligonucleotide
  Antisense strand to SEQ ID NO: 842504
aacuacccucguauuuggc

SEQ ID NO: 842506 - RNA, 19 nt, Artificial Sequence
  Description of Artificial Sequence: Synthetic oligonucleotide
  Sense strand starting at position 237 of SEQ ID NO: 588107
ugcaguuguaauuauguga

SEQ ID NO: 842507 - RNA, 19 nt, Artificial Sequence
  Description of Artificial Sequence: Synthetic oligonucleotide
  Antisense strand to SEQ ID NO: 842506
ucacauaauuacaacugca

SEQ ID NO: 842508 - RNA, 19 nt, Artificial Sequence
  Description of Artificial Sequence: Synthetic oligonucleotide
  Sense strand starting at position 390 of SEQ ID NO: 588107
uggguaaggcacgacuuau

SEQ ID NO: 842509 - RNA, 19 nt, Artificial Sequence
  Description of Artificial Sequence: Synthetic oligonucleotide
  Antisense strand to SEQ ID NO: 842508
auaagucgugccuuaccca

SEQ ID NO: 842510 - RNA, 19 nt, Artificial Sequence
  Description of Artificial Sequence: Synthetic oligonucleotide
  Sense strand starting at position 403 of SEQ ID NO: 588107
acuuauuauuucgcaguaa

SEQ ID NO: 842511 - RNA, 19 nt, Artificial Sequence
  Description of Artificial Sequence: Synthetic oligonucleotide
  Antisense strand to SEQ ID NO: 842510
uuacugcgaaauaauaagu

SEQ ID NO: 842512 - RNA, 19 nt, Artificial Sequence
  Description of Artificial Sequence: Synthetic oligonucleotide
  Sense strand starting at position 415 of SEQ ID NO: 588107
gcaguaauucuacauagga

SEQ ID NO: 842513 - RNA, 19 nt, Artificial Sequence
  Description of Artificial Sequence: Synthetic oligonucleotide
  Antisense strand to SEQ ID NO: 842512
uccuauguagaauuacugc

SEQ ID NO: 842514 - RNA, 19 nt, Artificial Sequence
  Description of Artificial Sequence: Synthetic oligonucleotide
  Sense strand starting at position 831 of SEQ ID NO: 588107
uugaguaagcuauguuaaa

SEQ ID NO: 842515 - RNA, 19 nt, Artificial Sequence
  Description of Artificial Sequence: Synthetic oligonucleotide
  Antisense strand to SEQ ID NO: 842514
uuuaacauagcuuacucaa

SEQ ID NO: 842516 - RNA, 19 nt, Artificial Sequence
  Description of Artificial Sequence: Synthetic oligonucleotide
  Sense strand starting at position 884 of SEQ ID NO: 588107
ucgauuacacuaugaugca

SEQ ID NO: 842517 - RNA, 19 nt, Artificial Sequence
  Description of Artificial Sequence: Synthetic oligonucleotide
  Antisense strand to SEQ ID NO: 842516
ugcaucauaguguaaucga

SEQ ID NO: 842518 - RNA, 19 nt, Artificial Sequence
  Description of Artificial Sequence: Synthetic oligonucleotide
  Sense strand starting at position 922 of SEQ ID NO: 588107
ugaguaaacgcccaagaaa

SEQ ID NO: 842519 - RNA, 19 nt, Artificial Sequence
  Description of Artificial Sequence: Synthetic oligonucleotide
  Antisense strand to SEQ ID NO: 842518
uuucuugggcguuuacuca

SEQ ID NO: 842520 - RNA, 19 nt, Artificial Sequence
  Description of Artificial Sequence: Synthetic oligonucleotide
  Sense strand starting at position 964 of SEQ ID NO: 588107
ccuggugcucguaagaggu

SEQ ID NO: 842521 - RNA, 19 nt, Artificial Sequence
  Description of Artificial Sequence: Synthetic oligonucleotide
  Antisense strand to SEQ ID NO: 842520
accucuuacgagcaccagg

SEQ ID NO: 842522 - RNA, 19 nt, Artificial Sequence
  Description of Artificial Sequence: Synthetic oligonucleotide
  Sense strand starting at position 1022 of SEQ ID NO: 588107
aagccuuuggguuacaaca

SEQ ID NO: 842523 - RNA, 19 nt, Artificial Sequence
  Description of Artificial Sequence: Synthetic oligonucleotide
  Antisense strand to SEQ ID NO: 842522
uguuguaacccaaaggcuu

SEQ ID NO: 842524 - RNA, 19 nt, Artificial Sequence
  Description of Artificial Sequence: Synthetic oligonucleotide
  Sense strand starting at position 1103 of SEQ ID NO: 588107
cacugucauccagggugau

SEQ ID NO: 842525 - RNA, 19 nt, Artificial Sequence
  Description of Artificial Sequence: Synthetic oligonucleotide
  Antisense strand to SEQ ID NO: 842524
aucacccuggaugacagug

SEQ ID NO: 842526 - RNA, 19 nt, Artificial Sequence
  Description of Artificial Sequence: Synthetic oligonucleotide
  Sense strand starting at position 1109 of SEQ ID NO: 588107
cauccagggugaucugauu

SEQ ID NO: 842527 - RNA, 19 nt, Artificial Sequence
  Description of Artificial Sequence: Synthetic oligonucleotide
  Antisense strand to SEQ ID NO: 842526
aaucagaucacccuggaug

SEQ ID NO: 842528 - RNA, 19 nt, Artificial Sequence
  Description of Artificial Sequence: Synthetic oligonucleotide
  Sense strand starting at position 1259 of SEQ ID NO: 588107
ucgggaacgcuagaauucu

SEQ ID NO: 842529 - RNA, 19 nt, Artificial Sequence
  Description of Artificial Sequence: Synthetic oligonucleotide
  Antisense strand to SEQ ID NO: 842528
agaauucuagcguucccga

SEQ ID NO: 842530 - RNA, 19 nt, Artificial Sequence
  Description of Artificial Sequence: Synthetic oligonucleotide
  Sense strand starting at position 1267 of SEQ ID NO: 588107
gcuagaauucucgaagcac

SEQ ID NO: 842531 - RNA, 19 nt, Artificial Sequence
  Description of Artificial Sequence: Synthetic oligonucleotide
  Antisense strand to SEQ ID NO: 842530
gugcuucgagaauucuagc

SEQ ID NO: 842532 - RNA, 19 nt, Artificial Sequence
  Description of Artificial Sequence: Synthetic oligonucleotide
  Sense strand starting at position 1594 of SEQ ID NO: 588107
uguaacaugcguuacacaa

SEQ ID NO: 842533 - RNA, 19 nt, Artificial Sequence
  Description of Artificial Sequence: Synthetic oligonucleotide
  Antisense strand to SEQ ID NO: 842532
uuguguaacgcauguuaca

SEQ ID NO: 842534 - RNA, 19 nt, Artificial Sequence
  Description of Artificial Sequence: Synthetic oligonucleotide
  Sense strand starting at position 2264 of SEQ ID NO: 588107
agucaucuuucuguacacu

SEQ ID NO: 842535 - RNA, 19 nt, Artificial Sequence
  Description of Artificial Sequence: Synthetic oligonucleotide
  Antisense strand to SEQ ID NO: 842534
aguguacagaaagaugacu

SEQ ID NO: 842536 - RNA, 19 nt, Artificial Sequence
  Description of Artificial Sequence: Synthetic oligonucleotide
  Sense strand starting at position 2347 of SEQ ID NO: 588107
ucagucacuuucuuaggaa

SEQ ID NO: 842537 - RNA, 19 nt, Artificial Sequence
  Description of Artificial Sequence: Synthetic oligonucleotide
  Antisense strand to SEQ ID NO: 842536
uuccuaagaaagugacuga

SEQ ID NO: 842538 - RNA, 19 nt, Artificial Sequence
  Description of Artificial Sequence: Synthetic oligonucleotide
  Sense strand starting at position 2531 of SEQ ID NO: 588107
ggccaaaucucaguaaauu

SEQ ID NO: 842539 - RNA, 19 nt, Artificial Sequence
  Description of Artificial Sequence: Synthetic oligonucleotide
  Antisense strand to SEQ ID NO: 842538
aauuuacugagauuuggcc

SEQ ID NO: 842540 - RNA, 19 nt, Artificial Sequence
  Description of Artificial Sequence: Synthetic oligonucleotide
  Sense strand starting at position 2633 of SEQ ID NO: 588107
ugcuaaguuggcuacugaa

SEQ ID NO: 842541 - RNA, 19 nt, Artificial Sequence
  Description of Artificial Sequence: Synthetic oligonucleotide
  Antisense strand to SEQ ID NO: 842540
uucaguagccaacuuagca

SEQ ID NO: 842542 - RNA, 19 nt, Artificial Sequence
  Description of Artificial Sequence: Synthetic oligonucleotide
  Sense strand starting at position 2677 of SEQ ID NO: 588107
gccaaaguaaugugucaga

SEQ ID NO: 842543 - RNA, 19 nt, Artificial Sequence
  Description of Artificial Sequence: Synthetic oligonucleotide
  Antisense strand to SEQ ID NO: 842542
ucugacacauuacuuuggc

SEQ ID NO: 842544 - RNA, 19 nt, Artificial Sequence
  Description of Artificial Sequence: Synthetic oligonucleotide
  Sense strand starting at position 2812 of SEQ ID NO: 588107
guuuaugguaaggaaugua

SEQ ID NO: 842545 - RNA, 19 nt, Artificial Sequence
  Description of Artificial Sequence: Synthetic oligonucleotide
  Antisense strand to SEQ ID NO: 842544
uacauuccuuaccauaaac

SEQ ID NO: 842546 - RNA, 19 nt, Artificial Sequence
  Description of Artificial Sequence: Synthetic oligonucleotide
  Sense strand starting at position 2815 of SEQ ID NO: 588107
uaugguaaggaauguaaua

SEQ ID NO: 842547 - RNA, 19 nt, Artificial Sequence
  Description of Artificial Sequence: Synthetic oligonucleotide
  Antisense strand to SEQ ID NO: 842546
uauuacauuccuuaccaua

SEQ ID NO: 842548 - RNA, 19 nt, Artificial Sequence
  Description of Artificial Sequence: Synthetic oligonucleotide
  Sense strand starting at position 2853 of SEQ ID NO: 588107
ugcauugagaacugugaga

SEQ ID NO: 842549 - RNA, 19 nt, Artificial Sequence
  Description of Artificial Sequence: Synthetic oligonucleotide
  Antisense strand to SEQ ID NO: 842548
ucucacaguucucaaugca

SEQ ID NO: 842550 - RNA, 19 nt, Artificial Sequence
  Description of Artificial Sequence: Synthetic oligonucleotide
  Sense strand starting at position 2974 of SEQ ID NO: 588107
cuugguagaugucuuuauu

SEQ ID NO: 842551 - RNA, 19 nt, Artificial Sequence
  Description of Artificial Sequence: Synthetic oligonucleotide
  Antisense strand to SEQ ID NO: 842550
aauaaagacaucuaccaag

SEQ ID NO: 842552 - RNA, 19 nt, Artificial Sequence
  Description of Artificial Sequence: Synthetic oligonucleotide
  Sense strand starting at position 3035 of SEQ ID NO: 588107
ccucaucgugagcacuaaa

SEQ ID NO: 842553 - RNA, 19 nt, Artificial Sequence
  Description of Artificial Sequence: Synthetic oligonucleotide
  Antisense strand to SEQ ID NO: 842552
uuuagugcucacgaugagg

SEQ ID NO: 842554 - RNA, 19 nt, Artificial Sequence
  Description of Artificial Sequence: Synthetic oligonucleotide
  Sense strand starting at position 3113 of SEQ ID NO: 588107
agaaacguauuaucugaaa

SEQ ID NO: 842555 - RNA, 19 nt, Artificial Sequence
  Description of Artificial Sequence: Synthetic oligonucleotide
  Antisense strand to SEQ ID NO: 842554
uuucagauaauacguuucu

SEQ ID NO: 842556 - RNA, 19 nt, Artificial Sequence
  Description of Artificial Sequence: Synthetic oligonucleotide
  Sense strand starting at position 3220 of SEQ ID NO: 588107
ugagucaaccugcaauaua

SEQ ID NO: 842557 - RNA, 19 nt, Artificial Sequence
  Description of Artificial Sequence: Synthetic oligonucleotide
  Antisense strand to SEQ ID NO: 842556
uauauugcagguugacuca

SEQ ID NO: 842558 - RNA, 19 nt, Artificial Sequence
  Description of Artificial Sequence: Synthetic oligonucleotide
  Sense strand starting at position 3240 of SEQ ID NO: 588107
gaagauauuauguggaugu

SEQ ID NO: 842559 - RNA, 19 nt, Artificial Sequence
  Description of Artificial Sequence: Synthetic oligonucleotide
  Antisense strand to SEQ ID NO: 842558
acauccacauaauaucuuc

SEQ ID NO: 842560 - RNA, 19 nt, Artificial Sequence
  Description of Artificial Sequence: Synthetic oligonucleotide
  Sense strand starting at position 3242 of SEQ ID NO: 588107
agauauuauguggaugugu

SEQ ID NO: 842561 - RNA, 19 nt, Artificial Sequence
  Description of Artificial Sequence: Synthetic oligonucleotide
  Antisense strand to SEQ ID NO: 842560
acacauccacauaauaucu

SEQ ID NO: 842562 - RNA, 19 nt, Artificial Sequence
  Description of Artificial Sequence: Synthetic oligonucleotide
  Sense strand starting at position 3259 of SEQ ID NO: 588107
guguguuuguggaauuuga

SEQ ID NO: 842563 - RNA, 19 nt, Artificial Sequence
  Description of Artificial Sequence: Synthetic oligonucleotide
  Antisense strand to SEQ ID NO: 842562
ucaaauuccacaaacacac

SEQ ID NO: 842564 - RNA, 19 nt, Artificial Sequence
  Description of Artificial Sequence: Synthetic oligonucleotide
  Sense strand starting at position 3360 of SEQ ID NO: 588107
agcauuacauagcuuugaa

SEQ ID NO: 842565 - RNA, 19 nt, Artificial Sequence
  Description of Artificial Sequence: Synthetic oligonucleotide
  Antisense strand to SEQ ID NO: 842564
uucaaagcuauguaaugcu

SEQ ID NO: 842566 - RNA, 19 nt, Artificial Sequence
  Description of Artificial Sequence: Synthetic oligonucleotide
  Sense strand starting at position 3363 of SEQ ID NO: 588107
auuacauagcuuugaaaug

SEQ ID NO: 842567 - RNA, 19 nt, Artificial Sequence
  Description of Artificial Sequence: Synthetic oligonucleotide
  Antisense strand to SEQ ID NO: 842566
cauuucaaagcuauguaau

SEQ ID NO: 842568 - RNA, 19 nt, Artificial Sequence
  Description of Artificial Sequence: Synthetic oligonucleotide
  Sense strand starting at position 3392 of SEQ ID NO: 588107
cauaguuugccacaagagu

SEQ ID NO: 842569 - RNA, 19 nt, Artificial Sequence
  Description of Artificial Sequence: Synthetic oligonucleotide
  Antisense strand to SEQ ID NO: 842568
acucuuguggcaaacuaug

SEQ ID NO: 842570 - RNA, 19 nt, Artificial Sequence
  Description of Artificial Sequence: Synthetic oligonucleotide
  Sense strand starting at position 3487 of SEQ ID NO: 588107
ucagaucccacguguauga

SEQ ID NO: 842571 - RNA, 19 nt, Artificial Sequence
  Description of Artificial Sequence: Synthetic oligonucleotide
  Antisense strand to SEQ ID NO: 842570
ucauacacgugggaucuga

SEQ ID NO: 842572 - RNA, 19 nt, Artificial Sequence
  Description of Artificial Sequence: Synthetic oligonucleotide
  Sense strand starting at position 3497 of SEQ ID NO: 588107
cguguaugaaguugaaaua

SEQ ID NO: 842573 - RNA, 19 nt, Artificial Sequence
  Description of Artificial Sequence: Synthetic oligonucleotide
  Antisense strand to SEQ ID NO: 842572
uauuucaacuucauacacg

SEQ ID NO: 842574 - RNA, 19 nt, Artificial Sequence
  Description of Artificial Sequence: Synthetic oligonucleotide
  Sense strand starting at position 3584 of SEQ ID NO: 588107
acuacaggauuucgaaaua

SEQ ID NO: 842575 - RNA, 19 nt, Artificial Sequence
  Description of Artificial Sequence: Synthetic oligonucleotide
  Antisense strand to SEQ ID NO: 842574
uauuucgaaauccuguagu

SEQ ID NO: 842576 - RNA, 19 nt, Artificial Sequence
  Description of Artificial Sequence: Synthetic oligonucleotide
  Sense strand starting at position 3619 of SEQ ID NO: 588107
uuugcaagauacuuugaga

SEQ ID NO: 842577 - RNA, 19 nt, Artificial Sequence
  Description of Artificial Sequence: Synthetic oligonucleotide
  Antisense strand to SEQ ID NO: 842576
ucucaaaguaucuugcaaa

SEQ ID NO: 842578 - RNA, 19 nt, Artificial Sequence
  Description of Artificial Sequence: Synthetic oligonucleotide
  Sense strand starting at position 3782 of SEQ ID NO: 588107
cuugcauauccucaccgau

SEQ ID NO: 842579 - RNA, 19 nt, Artificial Sequence
  Description of Artificial Sequence: Synthetic oligonucleotide
  Antisense strand to SEQ ID NO: 842578
aucggugaggauaugcaag

SEQ ID NO: 842580 - RNA, 19 nt, Artificial Sequence
  Description of Artificial Sequence: Synthetic oligonucleotide
  Sense strand starting at position 3934 of SEQ ID NO: 588107
uugccaaggcuguaauaca

SEQ ID NO: 842581 - RNA, 19 nt, Artificial Sequence
  Description of Artificial Sequence: Synthetic oligonucleotide
  Antisense strand to SEQ ID NO: 842580
uguauuacagccuuggcaa

SEQ ID NO: 842582 - RNA, 19 nt, Artificial Sequence
  Description of Artificial Sequence: Synthetic oligonucleotide
  Sense strand starting at position 155 of SEQ ID NO: 588108
uccaguugugcucaagaug

SEQ ID NO: 842583 - RNA, 19 nt, Artificial Sequence
  Description of Artificial Sequence: Synthetic oligonucleotide
  Antisense strand to SEQ ID NO: 842582
caucuugagcacaacugga

SEQ ID NO: 842584 - RNA, 19 nt, Artificial Sequence
  Description of Artificial Sequence: Synthetic oligonucleotide
  Sense strand starting at position 560 of SEQ ID NO: 588108
gaaggaaacugggagacau

SEQ ID NO: 842585 - RNA, 19 nt, Artificial Sequence
  Description of Artificial Sequence: Synthetic oligonucleotide
  Antisense strand to SEQ ID NO: 842584
augucucccaguuuccuuc

SEQ ID NO: 842586 - RNA, 19 nt, Artificial Sequence
  Description of Artificial Sequence: Synthetic oligonucleotide
  Sense strand starting at position 586 of SEQ ID NO: 588108
aggaaauaaugcuaguucu

SEQ ID NO: 842587 - RNA, 19 nt, Artificial Sequence
  Description of Artificial Sequence: Synthetic oligonucleotide
  Antisense strand to SEQ ID NO: 842586
agaacuagcauuauuuccu

SEQ ID NO: 842588 - RNA, 19 nt, Artificial Sequence
  Description of Artificial Sequence: Synthetic oligonucleotide
  Sense strand starting at position 748 of SEQ ID NO: 588108
ccaggucuugcagaacuuu

SEQ ID NO: 842589 - RNA, 19 nt, Artificial Sequence
  Description of Artificial Sequence: Synthetic oligonucleotide
  Antisense strand to SEQ ID NO: 842588
aaaguucugcaagaccugg

SEQ ID NO: 842590 - RNA, 19 nt, Artificial Sequence
  Description of Artificial Sequence: Synthetic oligonucleotide
  Sense strand starting at position 785 of SEQ ID NO: 588108
gccuuugagcuuuggccaa

SEQ ID NO: 842591 - RNA, 19 nt, Artificial Sequence
  Description of Artificial Sequence: Synthetic oligonucleotide
  Antisense strand to SEQ ID NO: 842590
uuggccaaagcucaaaggc

SEQ ID NO: 842592 - RNA, 19 nt, Artificial Sequence
  Description of Artificial Sequence: Synthetic oligonucleotide
  Sense strand starting at position 805 of SEQ ID NO: 588108
ccagacagguccugauauc

SEQ ID NO: 842593 - RNA, 19 nt, Artificial Sequence
  Description of Artificial Sequence: Synthetic oligonucleotide
  Antisense strand to SEQ ID NO: 842592
gauaucaggaccugucugg

SEQ ID NO: 842594 - RNA, 19 nt, Artificial Sequence
  Description of Artificial Sequence: Synthetic oligonucleotide
  Sense strand starting at position 945 of SEQ ID NO: 588108
aggcaaucuuuccugaaag

SEQ ID NO: 842595 - RNA, 19 nt, Artificial Sequence
  Description of Artificial Sequence: Synthetic oligonucleotide
  Antisense strand to SEQ ID NO: 842594
cuuucaggaaagauugccu

SEQ ID NO: 842596 - RNA, 19 nt, Artificial Sequence
  Description of Artificial Sequence: Synthetic oligonucleotide
  Sense strand starting at position 955 of SEQ ID NO: 588108
uccugaaaguuggagugaa

SEQ ID NO: 842597 - RNA, 19 nt, Artificial Sequence
  Description of Artificial Sequence: Synthetic oligonucleotide
  Antisense strand to SEQ ID NO: 842596
uucacuccaacuuucagga

SEQ ID NO: 842598 - RNA, 19 nt, Artificial Sequence
  Description of Artificial Sequence: Synthetic oligonucleotide
  Sense strand starting at position 973 of SEQ ID NO: 588108
agaggagugguguguuuga

SEQ ID NO: 842599 - RNA, 19 nt, Artificial Sequence
  Description of Artificial Sequence: Synthetic oligonucleotide
  Antisense strand to SEQ ID NO: 842598
ucaaacacaccacuccucu

SEQ ID NO: 842600 - RNA, 19 nt, Artificial Sequence
  Description of Artificial Sequence: Synthetic oligonucleotide
  Sense strand starting at position 977 of SEQ ID NO: 588108
gagugguguguuugaggga

SEQ ID NO: 842601 - RNA, 19 nt, Artificial Sequence
  Description of Artificial Sequence: Synthetic oligonucleotide
  Antisense strand to SEQ ID NO: 842600
ucccucaaacacaccacuc

SEQ ID NO: 842602 - RNA, 19 nt, Artificial Sequence
  Description of Artificial Sequence: Synthetic oligonucleotide
  Sense strand starting at position 1029 of SEQ ID NO: 588108
gaucucuacgcccaucaga

SEQ ID NO: 842603 - RNA, 19 nt, Artificial Sequence
  Description of Artificial Sequence: Synthetic oligonucleotide
  Antisense strand to SEQ ID NO: 842602
ucugaugggcguagagauc

SEQ ID NO: 842604 - RNA, 19 nt, Artificial Sequence
  Description of Artificial Sequence: Synthetic oligonucleotide
  Sense strand starting at position 1042 of SEQ ID NO: 588108
aucagagucuucuauuugu

SEQ ID NO: 842605 - RNA, 19 nt, Artificial Sequence
  Description of Artificial Sequence: Synthetic oligonucleotide
  Antisense strand to SEQ ID NO: 842604
acaaauagaagacucugau

SEQ ID NO: 842606 - RNA, 19 nt, Artificial Sequence
  Description of Artificial Sequence: Synthetic oligonucleotide
  Sense strand starting at position 1187 of SEQ ID NO: 588108
cugagauugggccaccgaa

SEQ ID NO: 842607 - RNA, 19 nt, Artificial Sequence
  Description of Artificial Sequence: Synthetic oligonucleotide
  Antisense strand to SEQ ID NO: 842606
uucgguggcccaaucucag

SEQ ID NO: 842608 - RNA, 19 nt, Artificial Sequence
  Description of Artificial Sequence: Synthetic oligonucleotide
  Sense strand starting at position 1247 of SEQ ID NO: 588108
uguucugagcuggagagau

SEQ ID NO: 842609 - RNA, 19 nt, Artificial Sequence
  Description of Artificial Sequence: Synthetic oligonucleotide
  Antisense strand to SEQ ID NO: 842608
aucucuccagcucagaaca

SEQ ID NO: 842610 - RNA, 19 nt, Artificial Sequence
  Description of Artificial Sequence: Synthetic oligonucleotide
  Sense strand starting at position 1257 of SEQ ID NO: 588108
uggagagaucacuggccua

SEQ ID NO: 842611 - RNA, 19 nt, Artificial Sequence
  Description of Artificial Sequence: Synthetic oligonucleotide
  Antisense strand to SEQ ID NO: 842610
uaggccagugaucucucca

SEQ ID NO: 842612 - RNA, 19 nt, Artificial Sequence
  Description of Artificial Sequence: Synthetic oligonucleotide
  Sense strand starting at position 2244 of SEQ ID NO: 588108
aaugaaaugcgaggaucuu

SEQ ID NO: 842613 - RNA, 19 nt, Artificial Sequence
  Description of Artificial Sequence: Synthetic oligonucleotide
  Antisense strand to SEQ ID NO: 842612
aagauccucgcauuucauu

SEQ ID NO: 842614 - RNA, 19 nt, Artificial Sequence
  Description of Artificial Sequence: Synthetic oligonucleotide
  Sense strand starting at position 2253 of SEQ ID NO: 588108
cgaggaucuuagcaugaac

SEQ ID NO: 842615 - RNA, 19 nt, Artificial Sequence
  Description of Artificial Sequence: Synthetic oligonucleotide
  Antisense strand to SEQ ID NO: 842614
guucaugcuaagauccucg

SEQ ID NO: 842616 - RNA, 19 nt, Artificial Sequence
  Description of Artificial Sequence: Synthetic oligonucleotide
  Sense strand starting at position 2307 of SEQ ID NO: 588108
ggagucggcgcucaaacau

SEQ ID NO: 842617 - RNA, 19 nt, Artificial Sequence
  Description of Artificial Sequence: Synthetic oligonucleotide
  Antisense strand to SEQ ID NO: 842616
auguuugagcgccgacucc

SEQ ID NO: 842618 - RNA, 19 nt, Artificial Sequence
  Description of Artificial Sequence: Synthetic oligonucleotide
  Sense strand starting at position 2359 of SEQ ID NO: 588108
acaacaguggcccgucaaa

SEQ ID NO: 842619 - RNA, 19 nt, Artificial Sequence
  Description of Artificial Sequence: Synthetic oligonucleotide
  Antisense strand to SEQ ID NO: 842618
uuugacgggccacuguugu

SEQ ID NO: 842620 - RNA, 19 nt, Artificial Sequence
  Description of Artificial Sequence: Synthetic oligonucleotide
  Sense strand starting at position 2371 of SEQ ID NO: 588108
cgucaaaucaauuggaaug

SEQ ID NO: 842621 - RNA, 19 nt, Artificial Sequence
  Description of Artificial Sequence: Synthetic oligonucleotide
  Antisense strand to SEQ ID NO: 842620
cauuccaauugauuugacg

SEQ ID NO: 842622 - RNA, 19 nt, Artificial Sequence
  Description of Artificial Sequence: Synthetic oligonucleotide
  Sense strand starting at position 2373 of SEQ ID NO: 588108
ucaaaucaauuggaaugaa

SEQ ID NO: 842623 - RNA, 19 nt, Artificial Sequence
  Description of Artificial Sequence: Synthetic oligonucleotide
  Antisense strand to SEQ ID NO: 842622
uucauuccaauugauuuga

SEQ ID NO: 842624 - RNA, 19 nt, Artificial Sequence
  Description of Artificial Sequence: Synthetic oligonucleotide
  Sense strand starting at position 2382 of SEQ ID NO: 588108
uuggaaugaauucgugucu

SEQ ID NO: 842625 - RNA, 19 nt, Artificial Sequence
  Description of Artificial Sequence: Synthetic oligonucleotide
  Antisense strand to SEQ ID NO: 842624
agacacgaauucauuccaa

SEQ ID NO: 842626 - RNA, 19 nt, Artificial Sequence
  Description of Artificial Sequence: Synthetic oligonucleotide
  Sense strand starting at position 2383 of SEQ ID NO: 588108
uggaaugaauucgugucuu

SEQ ID NO: 842627 - RNA, 19 nt, Artificial Sequence
  Description of Artificial Sequence: Synthetic oligonucleotide
  Antisense strand to SEQ ID NO: 842626
aagacacgaauucauucca

SEQ ID NO: 842628 - RNA, 19 nt, Artificial Sequence
  Description of Artificial Sequence: Synthetic oligonucleotide
  Sense strand starting at position 2387 of SEQ ID NO: 588108
augaauucgugucuuguua

SEQ ID NO: 842629 - RNA, 19 nt, Artificial Sequence
  Description of Artificial Sequence: Synthetic oligonucleotide
  Antisense strand to SEQ ID NO: 842628
uaacaagacacgaauucau

SEQ ID NO: 842630 - RNA, 19 nt, Artificial Sequence
  Description of Artificial Sequence: Synthetic oligonucleotide
  Sense strand starting at position 2391 of SEQ ID NO: 588108
auucgugucuuguuaauaa

SEQ ID NO: 842631 - RNA, 19 nt, Artificial Sequence
  Description of Artificial Sequence: Synthetic oligonucleotide
  Antisense strand to SEQ ID NO: 842630
uuauuaacaagacacgaau

SEQ ID NO: 842632 - RNA, 19 nt, Artificial Sequence
  Description of Artificial Sequence: Synthetic oligonucleotide
  Sense strand starting at position 2411 of SEQ ID NO: 588108
agagauuucuugggcacuc

SEQ ID NO: 842633 - RNA, 19 nt, Artificial Sequence
  Description of Artificial Sequence: Synthetic oligonucleotide
  Antisense strand to SEQ ID NO: 842632
gagugcccaagaaaucucu

SEQ ID NO: 842634 - RNA, 19 nt, Artificial Sequence
  Description of Artificial Sequence: Synthetic oligonucleotide
  Sense strand starting at position 2477 of SEQ ID NO: 588108
ugaaauaggacuuggcauu

SEQ ID NO: 842635 - RNA, 19 nt, Artificial Sequence
  Description of Artificial Sequence: Synthetic oligonucleotide
  Antisense strand to SEQ ID NO: 842634
aaugccaaguccuauuuca

SEQ ID NO: 842636 - RNA, 19 nt, Artificial Sequence
  Description of Artificial Sequence: Synthetic oligonucleotide
  Sense strand starting at position 2629 of SEQ ID NO: 588108
gaagucuaguguccaaauc

SEQ ID NO: 842637 - RNA, 19 nt, Artificial Sequence
  Description of Artificial Sequence: Synthetic oligonucleotide
  Antisense strand to SEQ ID NO: 842636
gauuuggacacuagacuuc

SEQ ID NO: 842638 - RNA, 19 nt, Artificial Sequence
  Description of Artificial Sequence: Synthetic oligonucleotide
  Sense strand starting at position 2749 of SEQ ID NO: 588108
gcaucugacuccuagggua

SEQ ID NO: 842639 - RNA, 19 nt, Artificial Sequence
  Description of Artificial Sequence: Synthetic oligonucleotide
  Antisense strand to SEQ ID NO: 842638
uacccuaggagucagaugc

SEQ ID NO: 842640 - RNA, 19 nt, Artificial Sequence
  Description of Artificial Sequence: Synthetic oligonucleotide
  Sense strand starting at position 2994 of SEQ ID NO: 588108
uggcaagguuugucucgaa

SEQ ID NO: 842641 - RNA, 19 nt, Artificial Sequence
  Description of Artificial Sequence: Synthetic oligonucleotide
  Antisense strand to SEQ ID NO: 842640
uucgagacaaaccuugcca

SEQ ID NO: 842642 - RNA, 19 nt, Artificial Sequence
  Description of Artificial Sequence: Synthetic oligonucleotide
  Sense strand starting at position 3301 of SEQ ID NO: 588108
acuugaucuggcugagcuu

SEQ ID NO: 842643 - RNA, 19 nt, Artificial Sequence
  Description of Artificial Sequence: Synthetic oligonucleotide
  Antisense strand to SEQ ID NO: 842642
aagcucagccagaucaagu

SEQ ID NO: 842644 - RNA, 19 nt, Artificial Sequence
  Description of Artificial Sequence: Synthetic oligonucleotide
  Sense strand starting at position 3385 of SEQ ID NO: 588108
ugacuugcuggaugguuua

SEQ ID NO: 842645 - RNA, 19 nt, Artificial Sequence
  Description of Artificial Sequence: Synthetic oligonucleotide
  Antisense strand to SEQ ID NO: 842644
uaaaccauccagcaaguca

SEQ ID NO: 842646 - RNA, 19 nt, Artificial Sequence
  Description of Artificial Sequence: Synthetic oligonucleotide
  Sense strand starting at position 3396 of SEQ ID NO: 588108
augguuuaagcagagagua

SEQ ID NO: 842647 - RNA, 19 nt, Artificial Sequence
  Description of Artificial Sequence: Synthetic oligonucleotide
  Antisense strand to SEQ ID NO: 842646
uacucucugcuuaaaccau

SEQ ID NO: 842648 - RNA, 19 nt, Artificial Sequence
  Description of Artificial Sequence: Synthetic oligonucleotide
  Sense strand starting at position 3438 of SEQ ID NO: 588108
guggaugggagcugacuua

SEQ ID NO: 842649 - RNA, 19 nt, Artificial Sequence
  Description of Artificial Sequence: Synthetic oligonucleotide
  Antisense strand to SEQ ID NO: 842648
uaagucagcucccauccac

SEQ ID NO: 842650 - RNA, 19 nt, Artificial Sequence
  Description of Artificial Sequence: Synthetic oligonucleotide
  Sense strand starting at position 3445 of SEQ ID NO: 588108
ggagcugacuuaggacaga

SEQ ID NO: 842651 - RNA, 19 nt, Artificial Sequence
  Description of Artificial Sequence: Synthetic oligonucleotide
  Antisense strand to SEQ ID NO: 842650
ucuguccuaagucagcucc

SEQ ID NO: 842652 - RNA, 19 nt, Artificial Sequence
  Description of Artificial Sequence: Synthetic oligonucleotide
  Sense strand starting at position 3588 of SEQ ID NO: 588108
cugcauugcuagccagaug

SEQ ID NO: 842653 - RNA, 19 nt, Artificial Sequence
  Description of Artificial Sequence: Synthetic oligonucleotide
  Antisense strand to SEQ ID NO: 842652
caucuggcuagcaaugcag

SEQ ID NO: 842654 - RNA, 19 nt, Artificial Sequence
  Description of Artificial Sequence: Synthetic oligonucleotide
  Sense strand starting at position 3681 of SEQ ID NO: 588108
gcaugaucagacugcguga

SEQ ID NO: 842655 - RNA, 19 nt, Artificial Sequence
  Description of Artificial Sequence: Synthetic oligonucleotide
  Antisense strand to SEQ ID NO: 842654
ucacgcagucugaucaugc

SEQ ID NO: 842656 - RNA, 19 nt, Artificial Sequence
  Description of Artificial Sequence: Synthetic oligonucleotide
  Sense strand starting at position 3766 of SEQ ID NO: 588108
cacggcuugaguggauaaa

SEQ ID NO: 842657 - RNA, 19 nt, Artificial Sequence
  Description of Artificial Sequence: Synthetic oligonucleotide
  Antisense strand to SEQ ID NO: 842656
uuuauccacucaagccgug

SEQ ID NO: 842658 - RNA, 19 nt, Artificial Sequence
  Description of Artificial Sequence: Synthetic oligonucleotide
  Sense strand starting at position 3819 of SEQ ID NO: 588108
ugugccaucggcugagaaa

SEQ ID NO: 842659 - RNA, 19 nt, Artificial Sequence
  Description of Artificial Sequence: Synthetic oligonucleotide
  Antisense strand to SEQ ID NO: 842658
uuucucagccgauggcaca

SEQ ID NO: 842660 - RNA, 19 nt, Artificial Sequence
  Description of Artificial Sequence: Synthetic oligonucleotide
  Sense strand starting at position 3820 of SEQ ID NO: 588108
gugccaucggcugagaaac

SEQ ID NO: 842661 - RNA, 19 nt, Artificial Sequence
  Description of Artificial Sequence: Synthetic oligonucleotide
  Antisense strand to SEQ ID NO: 842660
guuucucagccgauggcac

SEQ ID NO: 842662 - RNA, 19 nt, Artificial Sequence
  Description of Artificial Sequence: Synthetic oligonucleotide
  Sense strand starting at position 8 of SEQ ID NO: 588109
caggcugagucagugugaa

SEQ ID NO: 842663 - RNA, 19 nt, Artificial Sequence
  Description of Artificial Sequence: Synthetic oligonucleotide
  Antisense strand to SEQ ID NO: 842662
uucacacugacucagccug

SEQ ID NO: 842664 - RNA, 19 nt, Artificial Sequence
  Description of Artificial Sequence: Synthetic oligonucleotide
  Sense strand starting at position 108 of SEQ ID NO: 588109
cacuauguccugugcuaag

SEQ ID NO: 842665 - RNA, 19 nt, Artificial Sequence
  Description of Artificial Sequence: Synthetic oligonucleotide
  Antisense strand to SEQ ID NO: 842664
cuuagcacaggacauagug

SEQ ID NO: 842666 - RNA, 19 nt, Artificial Sequence
  Description of Artificial Sequence: Synthetic oligonucleotide
  Sense strand starting at position 111 of SEQ ID NO: 588109
uauguccugugcuaaguaa

SEQ ID NO: 842667 - RNA, 19 nt, Artificial Sequence
  Description of Artificial Sequence: Synthetic oligonucleotide
  Antisense strand to SEQ ID NO: 842666
uuacuuagcacaggacaua

SEQ ID NO: 842668 - RNA, 19 nt, Artificial Sequence
  Description of Artificial Sequence: Synthetic oligonucleotide
  Sense strand starting at position 209 of SEQ ID NO: 588109
uggcaaguaucagaccaca

SEQ ID NO: 842669 - RNA, 19 nt, Artificial Sequence
  Description of Artificial Sequence: Synthetic oligonucleotide
  Antisense strand to SEQ ID NO: 842668
uguggucugauacuugcca

SEQ ID NO: 842670 - RNA, 19 nt, Artificial Sequence
  Description of Artificial Sequence: Synthetic oligonucleotide
  Sense strand starting at position 400 of SEQ ID NO: 588109
ugcuauugugugggacuca

SEQ ID NO: 842671 - RNA, 19 nt, Artificial Sequence
  Description of Artificial Sequence: Synthetic oligonucleotide
  Antisense strand to SEQ ID NO: 842670
ugagucccacacaauagca

SEQ ID NO: 842672 - RNA, 19 nt, Artificial Sequence
  Description of Artificial Sequence: Synthetic oligonucleotide
  Sense strand starting at position 617 of SEQ ID NO: 588109
acugccaucuugggaggaa

SEQ ID NO: 842673 - RNA, 19 nt, Artificial Sequence
  Description of Artificial Sequence: Synthetic oligonucleotide
  Antisense strand to SEQ ID NO: 842672
uuccucccaagauggcagu

SEQ ID NO: 842674 - RNA, 19 nt, Artificial Sequence
  Description of Artificial Sequence: Synthetic oligonucleotide
  Sense strand starting at position 620 of SEQ ID NO: 588109
gccaucuugggaggaaacu

SEQ ID NO: 842675 - RNA, 19 nt, Artificial Sequence
  Description of Artificial Sequence: Synthetic oligonucleotide
  Antisense strand to SEQ ID NO: 842674
aguuuccucccaagauggc

SEQ ID NO: 842676 - RNA, 19 nt, Artificial Sequence
  Description of Artificial Sequence: Synthetic oligonucleotide
  Sense strand starting at position 1028 of SEQ ID NO: 588109
cuaggauggaguuggguua

SEQ ID NO: 842677 - RNA, 19 nt, Artificial Sequence
  Description of Artificial Sequence: Synthetic oligonucleotide
  Antisense strand to SEQ ID NO: 842676
uaacccaacuccauccuag

SEQ ID NO: 842678 - RNA, 19 nt, Artificial Sequence
  Description of Artificial Sequence: Synthetic oligonucleotide
  Sense strand starting at position 2162 of SEQ ID NO: 588109
uuuacaguuugccaagagu

SEQ ID NO: 842679 - RNA, 19 nt, Artificial Sequence
  Description of Artificial Sequence: Synthetic oligonucleotide
  Antisense strand to SEQ ID NO: 842678
acucuuggcaaacuguaaa

SEQ ID NO: 842680 - RNA, 19 nt, Artificial Sequence
  Description of Artificial Sequence: Synthetic oligonucleotide
  Sense strand starting at position 2196 of SEQ ID NO: 588109
cccgacugugcucaaggua

SEQ ID NO: 842681 - RNA, 19 nt, Artificial Sequence
  Description of Artificial Sequence: Synthetic oligonucleotide
  Antisense strand to SEQ ID NO: 842680
uaccuugagcacagucggg

SEQ ID NO: 842682 - RNA, 19 nt, Artificial Sequence
  Description of Artificial Sequence: Synthetic oligonucleotide
  Sense strand starting at position 2232 of SEQ ID NO: 588109
ccaggcuuucccuaugaua

SEQ ID NO: 842683 - RNA, 19 nt, Artificial Sequence
  Description of Artificial Sequence: Synthetic oligonucleotide
  Antisense strand to SEQ ID NO: 842682
uaucauagggaaagccugg

SEQ ID NO: 842684 - RNA, 19 nt, Artificial Sequence
  Description of Artificial Sequence: Synthetic oligonucleotide
  Sense strand starting at position 2234 of SEQ ID NO: 588109
aggcuuucccuaugauagc

SEQ ID NO: 842685 - RNA, 19 nt, Artificial Sequence
  Description of Artificial Sequence: Synthetic oligonucleotide
  Antisense strand to SEQ ID NO: 842684
gcuaucauagggaaagccu

SEQ ID NO: 842686 - RNA, 19 nt, Artificial Sequence
  Description of Artificial Sequence: Synthetic oligonucleotide
  Sense strand starting at position 2235 of SEQ ID NO: 588109
ggcuuucccuaugauagcu

SEQ ID NO: 842687 - RNA, 19 nt, Artificial Sequence
  Description of Artificial Sequence: Synthetic oligonucleotide
  Antisense strand to SEQ ID NO: 842686
agcuaucauagggaaagcc

SEQ ID NO: 842688 - RNA, 19 nt, Artificial Sequence
  Description of Artificial Sequence: Synthetic oligonucleotide
  Sense strand starting at position 2240 of SEQ ID NO: 588109
ucccuaugauagcuggaga

SEQ ID NO: 842689 - RNA, 19 nt, Artificial Sequence
  Description of Artificial Sequence: Synthetic oligonucleotide
  Antisense strand to SEQ ID NO: 842688
ucuccagcuaucauaggga

SEQ ID NO: 842690 - RNA, 19 nt, Artificial Sequence
  Description of Artificial Sequence: Synthetic oligonucleotide
  Sense strand starting at position 2241 of SEQ ID NO: 588109
cccuaugauagcuggagaa

SEQ ID NO: 842691 - RNA, 19 nt, Artificial Sequence
  Description of Artificial Sequence: Synthetic oligonucleotide
  Antisense strand to SEQ ID NO: 842690
uucuccagcuaucauaggg

SEQ ID NO: 842692 - RNA, 19 nt, Artificial Sequence
  Description of Artificial Sequence: Synthetic oligonucleotide
  Sense strand starting at position 2551 of SEQ ID NO: 588109
uggaguugcccgggacauu

SEQ ID NO: 842693 - RNA, 19 nt, Artificial Sequence
  Description of Artificial Sequence: Synthetic oligonucleotide
  Antisense strand to SEQ ID NO: 842692
aaugucccgggcaacucca

SEQ ID NO: 842694 - RNA, 19 nt, Artificial Sequence
  Description of Artificial Sequence: Synthetic oligonucleotide
  Sense strand starting at position 2603 of SEQ ID NO: 588109
cggucuugauaagaagaau

SEQ ID NO: 842695 - RNA, 19 nt, Artificial Sequence
  Description of Artificial Sequence: Synthetic oligonucleotide
  Antisense strand to SEQ ID NO: 842694
auucuucuuaucaagaccg

SEQ ID NO: 842696 - RNA, 19 nt, Artificial Sequence
  Description of Artificial Sequence: Synthetic oligonucleotide
  Sense strand starting at position 2632 of SEQ ID NO: 588109
augagcacucacugugcua

SEQ ID NO: 842697 - RNA, 19 nt, Artificial Sequence
  Description of Artificial Sequence: Synthetic oligonucleotide
  Antisense strand to SEQ ID NO: 842696
uagcacagugagugcucau

SEQ ID NO: 842698 - RNA, 19 nt, Artificial Sequence
  Description of Artificial Sequence: Synthetic oligonucleotide
  Sense strand starting at position 2670 of SEQ ID NO: 588109
aucugugaauccuuagaca

SEQ ID NO: 842699 - RNA, 19 nt, Artificial Sequence
  Description of Artificial Sequence: Synthetic oligonucleotide
  Antisense strand to SEQ ID NO: 842698
ugucuaaggauucacagau

SEQ ID NO: 842700 - RNA, 19 nt, Artificial Sequence
  Description of Artificial Sequence: Synthetic oligonucleotide
  Sense strand starting at position 2673 of SEQ ID NO: 588109
ugugaauccuuagacacag

SEQ ID NO: 842701 - RNA, 19 nt, Artificial Sequence
  Description of Artificial Sequence: Synthetic oligonucleotide
  Antisense strand to SEQ ID NO: 842700
cugugucuaaggauucaca

SEQ ID NO: 842702 - RNA, 19 nt, Artificial Sequence
  Description of Artificial Sequence: Synthetic oligonucleotide
  Sense strand starting at position 2712 of SEQ ID NO: 588109
ugucaaauaccuugcggga

SEQ ID NO: 842703 - RNA, 19 nt, Artificial Sequence
  Description of Artificial Sequence: Synthetic oligonucleotide
  Antisense strand to SEQ ID NO: 842702
ucccgcaagguauuugaca

SEQ ID NO: 842704 - RNA, 19 nt, Artificial Sequence
  Description of Artificial Sequence: Synthetic oligonucleotide
  Sense strand starting at position 2726 of SEQ ID NO: 588109
cgggagguucccugguaga

SEQ ID NO: 842705 - RNA, 19 nt, Artificial Sequence
  Description of Artificial Sequence: Synthetic oligonucleotide
  Antisense strand to SEQ ID NO: 842704
ucuaccagggaaccucccg

SEQ ID NO: 842706 - RNA, 19 nt, Artificial Sequence
  Description of Artificial Sequence: Synthetic oligonucleotide
  Sense strand starting at position 2729 of SEQ ID NO: 588109
gagguucccugguagaaag

SEQ ID NO: 842707 - RNA, 19 nt, Artificial Sequence
  Description of Artificial Sequence: Synthetic oligonucleotide
  Antisense strand to SEQ ID NO: 842706
cuuucuaccagggaaccuc

SEQ ID NO: 842708 - RNA, 19 nt, Artificial Sequence
  Description of Artificial Sequence: Synthetic oligonucleotide
  Sense strand starting at position 2739 of SEQ ID NO: 588109
gguagaaagccacguguuu

SEQ ID NO: 842709 - RNA, 19 nt, Artificial Sequence
  Description of Artificial Sequence: Synthetic oligonucleotide
  Antisense strand to SEQ ID NO: 842708
aaacacguggcuuucuacc

SEQ ID NO: 842710 - RNA, 19 nt, Artificial Sequence
  Description of Artificial Sequence: Synthetic oligonucleotide
  Sense strand starting at position 2792 of SEQ ID NO: 588109
guaggugcucagugaugua

SEQ ID NO: 842711 - RNA, 19 nt, Artificial Sequence
  Description of Artificial Sequence: Synthetic oligonucleotide
  Antisense strand to SEQ ID NO: 842710
uacaucacugagcaccuac

SEQ ID NO: 842712 - RNA, 19 nt, Artificial Sequence
  Description of Artificial Sequence: Synthetic oligonucleotide
  Sense strand starting at position 2855 of SEQ ID NO: 588109
guggguugaacuuggaauu

SEQ ID NO: 842713 - RNA, 19 nt, Artificial Sequence
  Description of Artificial Sequence: Synthetic oligonucleotide
  Antisense strand to SEQ ID NO: 842712
aauuccaaguucaacccac

SEQ ID NO: 842714 - RNA, 19 nt, Artificial Sequence
  Description of Artificial Sequence: Synthetic oligonucleotide
  Sense strand starting at position 3015 of SEQ ID NO: 588109
gaugucagauaaguccuua

SEQ ID NO: 842715 - RNA, 19 nt, Artificial Sequence
  Description of Artificial Sequence: Synthetic oligonucleotide
  Antisense strand to SEQ ID NO: 842714
uaaggacuuaucugacauc

SEQ ID NO: 842716 - RNA, 19 nt, Artificial Sequence
  Description of Artificial Sequence: Synthetic oligonucleotide
  Sense strand starting at position 3030 of SEQ ID NO: 588109
cuuacuucuugggaccuua

SEQ ID NO: 842717 - RNA, 19 nt, Artificial Sequence
  Description of Artificial Sequence: Synthetic oligonucleotide
  Antisense strand to SEQ ID NO: 842716
uaaggucccaagaaguaag

SEQ ID NO: 842718 - RNA, 19 nt, Artificial Sequence
  Description of Artificial Sequence: Synthetic oligonucleotide
  Sense strand starting at position 3097 of SEQ ID NO: 588109
auuagaagcuguuugaaag

SEQ ID NO: 842719 - RNA, 19 nt, Artificial Sequence
  Description of Artificial Sequence: Synthetic oligonucleotide
  Antisense strand to SEQ ID NO: 842718
cuuucaaacagcuucuaau

SEQ ID NO: 842720 - RNA, 19 nt, Artificial Sequence
  Description of Artificial Sequence: Synthetic oligonucleotide
  Sense strand starting at position 3193 of SEQ ID NO: 588109
gcauaauggucacuccugu

SEQ ID NO: 842721 - RNA, 19 nt, Artificial Sequence
  Description of Artificial Sequence: Synthetic oligonucleotide
  Antisense strand to SEQ ID NO: 842720
acaggagugaccauuaugc

SEQ ID NO: 842722 - RNA, 19 nt, Artificial Sequence
  Description of Artificial Sequence: Synthetic oligonucleotide
  Sense strand starting at position 3369 of SEQ ID NO: 588109
gcgcccuucuacuuuaaga

SEQ ID NO: 842723 - RNA, 19 nt, Artificial Sequence
  Description of Artificial Sequence: Synthetic oligonucleotide
  Antisense strand to SEQ ID NO: 842722
ucuuaaaguagaagggcgc

SEQ ID NO: 842724 - RNA, 19 nt, Artificial Sequence
  Description of Artificial Sequence: Synthetic oligonucleotide
  Sense strand starting at position 3400 of SEQ ID NO: 588109
ggaaacaugugggcacaaa

SEQ ID NO: 842725 - RNA, 19 nt, Artificial Sequence
  Description of Artificial Sequence: Synthetic oligonucleotide
  Antisense strand to SEQ ID NO: 842724
uuugugcccacauguuucc

SEQ ID NO: 842726 - RNA, 19 nt, Artificial Sequence
  Description of Artificial Sequence: Synthetic oligonucleotide
  Sense strand starting at position 3411 of SEQ ID NO: 588109
ggcacaaauuugcauagga

SEQ ID NO: 842727 - RNA, 19 nt, Artificial Sequence
  Description of Artificial Sequence: Synthetic oligonucleotide
  Antisense strand to SEQ ID NO: 842726
uccuaugcaaauuugugcc

SEQ ID NO: 842728 - RNA, 19 nt, Artificial Sequence
  Description of Artificial Sequence: Synthetic oligonucleotide
  Sense strand starting at position 3416 of SEQ ID NO: 588109
aaauuugcauaggaaaguu

SEQ ID NO: 842729 - RNA, 19 nt, Artificial Sequence
  Description of Artificial Sequence: Synthetic oligonucleotide
  Antisense strand to SEQ ID NO: 842728
aacuuuccuaugcaaauuu

SEQ ID NO: 842730 - RNA, 19 nt, Artificial Sequence
  Description of Artificial Sequence: Synthetic oligonucleotide
  Sense strand starting at position 3501 of SEQ ID NO: 588109
ucccauagggucugaguga

SEQ ID NO: 842731 - RNA, 19 nt, Artificial Sequence
  Description of Artificial Sequence: Synthetic oligonucleotide
  Antisense strand to SEQ ID NO: 842730
ucacucagacccuauggga

SEQ ID NO: 842732 - RNA, 19 nt, Artificial Sequence
  Description of Artificial Sequence: Synthetic oligonucleotide
  Sense strand starting at position 3528 of SEQ ID NO: 588109
guccaaguuguuugugguu

SEQ ID NO: 842733 - RNA, 19 nt, Artificial Sequence
  Description of Artificial Sequence: Synthetic oligonucleotide
  Antisense strand to SEQ ID NO: 842732
aaccacaaacaacuuggac

SEQ ID NO: 842734 - RNA, 19 nt, Artificial Sequence
  Description of Artificial Sequence: Synthetic oligonucleotide
  Sense strand starting at position 3537 of SEQ ID NO: 588109
guuugugguuaaugggaca

SEQ ID NO: 842735 - RNA, 19 nt, Artificial Sequence
  Description of Artificial Sequence: Synthetic oligonucleotide
  Antisense strand to SEQ ID NO: 842734
ugucccauuaaccacaaac

SEQ ID NO: 842736 - RNA, 19 nt, Artificial Sequence
  Description of Artificial Sequence: Synthetic oligonucleotide
  Sense strand starting at position 3540 of SEQ ID NO: 588109
ugugguuaaugggacaaga

SEQ ID NO: 842737 - RNA, 19 nt, Artificial Sequence
  Description of Artificial Sequence: Synthetic oligonucleotide
  Antisense strand to SEQ ID NO: 842736
ucuugucccauuaaccaca

SEQ ID NO: 842738 - RNA, 19 nt, Artificial Sequence
  Description of Artificial Sequence: Synthetic oligonucleotide
  Sense strand starting at position 3570 of SEQ ID NO: 588109
cccauagcauugguaagaa

SEQ ID NO: 842739 - RNA, 19 nt, Artificial Sequence
  Description of Artificial Sequence: Synthetic oligonucleotide
  Antisense strand to SEQ ID NO: 842738
uucuuaccaaugcuauggg

SEQ ID NO: 842740 - RNA, 19 nt, Artificial Sequence
  Description of Artificial Sequence: Synthetic oligonucleotide
  Sense strand starting at position 3574 of SEQ ID NO: 588109
uagcauugguaagaaauag

SEQ ID NO: 842741 - RNA, 19 nt, Artificial Sequence
  Description of Artificial Sequence: Synthetic oligonucleotide
  Antisense strand to SEQ ID NO: 842740
cuauuucuuaccaaugcua

SEQ ID NO: 842742 - RNA, 19 nt, Artificial Sequence
  Description of Artificial Sequence: Synthetic oligonucleotide
  Sense strand starting at position 159 of SEQ ID NO: 588110
acaagugugaacugguuaa

SEQ ID NO: 842743 - RNA, 19 nt, Artificial Sequence
  Description of Artificial Sequence: Synthetic oligonucleotide
  Antisense strand to SEQ ID NO: 842742
uuaaccaguucacacuugu

SEQ ID NO: 842744 - RNA, 19 nt, Artificial Sequence
  Description of Artificial Sequence: Synthetic oligonucleotide
  Sense strand starting at position 163 of SEQ ID NO: 588110
gugugaacugguuaaauaa

SEQ ID NO: 842745 - RNA, 19 nt, Artificial Sequence
  Description of Artificial Sequence: Synthetic oligonucleotide
  Antisense strand to SEQ ID NO: 842744
uuauuuaaccaguucacac

SEQ ID NO: 842746 - RNA, 19 nt, Artificial Sequence
  Description of Artificial Sequence: Synthetic oligonucleotide
  Sense strand starting at position 276 of SEQ ID NO: 588110
cacacuagugcagaguaua

SEQ ID NO: 842747 - RNA, 19 nt, Artificial Sequence
  Description of Artificial Sequence: Synthetic oligonucleotide
  Antisense strand to SEQ ID NO: 842746
uauacucugcacuagugug

SEQ ID NO: 842748 - RNA, 19 nt, Artificial Sequence
  Description of Artificial Sequence: Synthetic oligonucleotide
  Sense strand starting at position 615 of SEQ ID NO: 588110
acacguaucugcgcuuaaa

SEQ ID NO: 842749 - RNA, 19 nt, Artificial Sequence
  Description of Artificial Sequence: Synthetic oligonucleotide
  Antisense strand to SEQ ID NO: 842748
uuuaagcgcagauacgugu

SEQ ID NO: 842750 - RNA, 19 nt, Artificial Sequence
  Description of Artificial Sequence: Synthetic oligonucleotide
  Sense strand starting at position 734 of SEQ ID NO: 588110
ccuguuugcuauccuuaca

SEQ ID NO: 842751 - RNA, 19 nt, Artificial Sequence
  Description of Artificial Sequence: Synthetic oligonucleotide
  Antisense strand to SEQ ID NO: 842750
uguaaggauagcaaacagg

SEQ ID NO: 842752 - RNA, 19 nt, Artificial Sequence
  Description of Artificial Sequence: Synthetic oligonucleotide
  Sense strand starting at position 958 of SEQ ID NO: 588110
uauaguguagauuguuaac

SEQ ID NO: 842753 - RNA, 19 nt, Artificial Sequence
  Description of Artificial Sequence: Synthetic oligonucleotide
  Antisense strand to SEQ ID NO: 842752
guuaacaaucuacacuaua

SEQ ID NO: 842754 - RNA, 19 nt, Artificial Sequence
  Description of Artificial Sequence: Synthetic oligonucleotide
  Sense strand starting at position 984 of SEQ ID NO: 588110
cgugccgagcuguaagaau

SEQ ID NO: 842755 - RNA, 19 nt, Artificial Sequence
  Description of Artificial Sequence: Synthetic oligonucleotide
  Antisense strand to SEQ ID NO: 842754
auucuuacagcucggcacg

SEQ ID NO: 842756 - RNA, 19 nt, Artificial Sequence
  Description of Artificial Sequence: Synthetic oligonucleotide
  Sense strand starting at position 1045 of SEQ ID NO: 588110
aagaauagccuucgugucu

SEQ ID NO: 842757 - RNA, 19 nt, Artificial Sequence
  Description of Artificial Sequence: Synthetic oligonucleotide
  Antisense strand to SEQ ID NO: 842756
agacacgaaggcuauucuu

SEQ ID NO: 842758 - RNA, 19 nt, Artificial Sequence
  Description of Artificial Sequence: Synthetic oligonucleotide
  Sense strand starting at position 1046 of SEQ ID NO: 588110
agaauagccuucgugucua

SEQ ID NO: 842759 - RNA, 19 nt, Artificial Sequence
  Description of Artificial Sequence: Synthetic oligonucleotide
  Antisense strand to SEQ ID NO: 842758
uagacacgaaggcuauucu

SEQ ID NO: 842760 - RNA, 19 nt, Artificial Sequence
  Description of Artificial Sequence: Synthetic oligonucleotide
  Sense strand starting at position 1050 of SEQ ID NO: 588110
uagccuucgugucuacgaa

SEQ ID NO: 842761 - RNA, 19 nt, Artificial Sequence
  Description of Artificial Sequence: Synthetic oligonucleotide
  Antisense strand to SEQ ID NO: 842760
uucguagacacgaaggcua

SEQ ID NO: 842762 - RNA, 19 nt, Artificial Sequence
  Description of Artificial Sequence: Synthetic oligonucleotide
  Sense strand starting at position 1051 of SEQ ID NO: 588110
agccuucgugucuacgaaa

SEQ ID NO: 842763 - RNA, 19 nt, Artificial Sequence
  Description of Artificial Sequence: Synthetic oligonucleotide
  Antisense strand to SEQ ID NO: 842762
uuucguagacacgaaggcu

SEQ ID NO: 842764 - RNA, 19 nt, Artificial Sequence
  Description of Artificial Sequence: Synthetic oligonucleotide
  Sense strand starting at position 1119 of SEQ ID NO: 588110
aauacuuggccuugggaau

SEQ ID NO: 842765 - RNA, 19 nt, Artificial Sequence
  Description of Artificial Sequence: Synthetic oligonucleotide
  Antisense strand to SEQ ID NO: 842764
auucccaaggccaaguauu

SEQ ID NO: 842766 - RNA, 19 nt, Artificial Sequence
  Description of Artificial Sequence: Synthetic oligonucleotide
  Sense strand starting at position 1120 of SEQ ID NO: 588110
auacuuggccuugggaaua

SEQ ID NO: 842767 - RNA, 19 nt, Artificial Sequence
  Description of Artificial Sequence: Synthetic oligonucleotide
  Antisense strand to SEQ ID NO: 842766
uauucccaaggccaaguau

SEQ ID NO: 842768 - RNA, 19 nt, Artificial Sequence
  Description of Artificial Sequence: Synthetic oligonucleotide
  Sense strand starting at position 1385 of SEQ ID NO: 588110
ucgagcucgaccuaacuuu

SEQ ID NO: 842769 - RNA, 19 nt, Artificial Sequence
  Description of Artificial Sequence: Synthetic oligonucleotide
  Antisense strand to SEQ ID NO: 842768
aaaguuaggucgagcucga

SEQ ID NO: 842770 - RNA, 19 nt, Artificial Sequence
  Description of Artificial Sequence: Synthetic oligonucleotide
  Sense strand starting at position 1670 of SEQ ID NO: 588110
agaggugcuucagcucgaa

SEQ ID NO: 842771 - RNA, 19 nt, Artificial Sequence
  Description of Artificial Sequence: Synthetic oligonucleotide
  Antisense strand to SEQ ID NO: 842770
uucgagcugaagcaccucu

SEQ ID NO: 842772 - RNA, 19 nt, Artificial Sequence
  Description of Artificial Sequence: Synthetic oligonucleotide
  Sense strand starting at position 1682 of SEQ ID NO: 588110
gcucgaaguguguagugau

SEQ ID NO: 842773 - RNA, 19 nt, Artificial Sequence
  Description of Artificial Sequence: Synthetic oligonucleotide
  Antisense strand to SEQ ID NO: 842772
aucacuacacacuucgagc

SEQ ID NO: 842774 - RNA, 19 nt, Artificial Sequence
  Description of Artificial Sequence: Synthetic oligonucleotide
  Sense strand starting at position 1693 of SEQ ID NO: 588110
guagugaugcgcgacgaca

SEQ ID NO: 842775 - RNA, 19 nt, Artificial Sequence
  Description of Artificial Sequence: Synthetic oligonucleotide
  Antisense strand to SEQ ID NO: 842774
ugucgucgcgcaucacuac

SEQ ID NO: 842776 - RNA, 19 nt, Artificial Sequence
  Description of Artificial Sequence: Synthetic oligonucleotide
  Sense strand starting at position 2610 of SEQ ID NO: 588110
acucccucucuguguagaa

SEQ ID NO: 842777 - RNA, 19 nt, Artificial Sequence
  Description of Artificial Sequence: Synthetic oligonucleotide
  Antisense strand to SEQ ID NO: 842776
uucuacacagagagggagu

SEQ ID NO: 842778 - RNA, 19 nt, Artificial Sequence
  Description of Artificial Sequence: Synthetic oligonucleotide
  Sense strand starting at position 2611 of SEQ ID NO: 588110
cucccucucuguguagaau

SEQ ID NO: 842779 - RNA, 19 nt, Artificial Sequence
  Description of Artificial Sequence: Synthetic oligonucleotide
  Antisense strand to SEQ ID NO: 842778
auucuacacagagagggag

SEQ ID NO: 842780 - RNA, 19 nt, Artificial Sequence
  Description of Artificial Sequence: Synthetic oligonucleotide
  Sense strand starting at position 2623 of SEQ ID NO: 588110
guagaaucacagggaguga

SEQ ID NO: 842781 - RNA, 19 nt, Artificial Sequence
  Description of Artificial Sequence: Synthetic oligonucleotide
  Antisense strand to SEQ ID NO: 842780
ucacucccugugauucuac

SEQ ID NO: 842782 - RNA, 19 nt, Artificial Sequence
  Description of Artificial Sequence: Synthetic oligonucleotide
  Sense strand starting at position 2684 of SEQ ID NO: 588110
uccagcuuccauugaguga

SEQ ID NO: 842783 - RNA, 19 nt, Artificial Sequence
  Description of Artificial Sequence: Synthetic oligonucleotide
  Antisense strand to SEQ ID NO: 842782
ucacucaauggaagcugga

SEQ ID NO: 842784 - RNA, 19 nt, Artificial Sequence
  Description of Artificial Sequence: Synthetic oligonucleotide
  Sense strand starting at position 2688 of SEQ ID NO: 588110
gcuuccauugagugagacu

SEQ ID NO: 842785 - RNA, 19 nt, Artificial Sequence
  Description of Artificial Sequence: Synthetic oligonucleotide
  Antisense strand to SEQ ID NO: 842784
agucucacucaauggaagc

SEQ ID NO: 842786 - RNA, 19 nt, Artificial Sequence
  Description of Artificial Sequence: Synthetic oligonucleotide
  Sense strand starting at position 2793 of SEQ ID NO: 588110
augugugcugagugcuuaa

SEQ ID NO: 842787 - RNA, 19 nt, Artificial Sequence
  Description of Artificial Sequence: Synthetic oligonucleotide
  Antisense strand to SEQ ID NO: 842786
uuaagcacucagcacacau

SEQ ID NO: 842788 - RNA, 19 nt, Artificial Sequence
  Description of Artificial Sequence: Synthetic oligonucleotide
  Sense strand starting at position 2795 of SEQ ID NO: 588110
gugugcugagugcuuaauu

SEQ ID NO: 842789 - RNA, 19 nt, Artificial Sequence
  Description of Artificial Sequence: Synthetic oligonucleotide
  Antisense strand to SEQ ID NO: 842788
aauuaagcacucagcacac

SEQ ID NO: 842790 - RNA, 19 nt, Artificial Sequence
  Description of Artificial Sequence: Synthetic oligonucleotide
  Sense strand starting at position 2796 of SEQ ID NO: 588110
ugugcugagugcuuaauua

SEQ ID NO: 842791 - RNA, 19 nt, Artificial Sequence
  Description of Artificial Sequence: Synthetic oligonucleotide
  Antisense strand to SEQ ID NO: 842790
uaauuaagcacucagcaca

SEQ ID NO: 842792 - RNA, 19 nt, Artificial Sequence
  Description of Artificial Sequence: Synthetic oligonucleotide
  Sense strand starting at position 2800 of SEQ ID NO: 588110
cugagugcuuaauuagaau

SEQ ID NO: 842793 - RNA, 19 nt, Artificial Sequence
  Description of Artificial Sequence: Synthetic oligonucleotide
  Antisense strand to SEQ ID NO: 842792
auucuaauuaagcacucag

SEQ ID NO: 842794 - RNA, 19 nt, Artificial Sequence
  Description of Artificial Sequence: Synthetic oligonucleotide
  Sense strand starting at position 2803 of SEQ ID NO: 588110
agugcuuaauuagaauaug

SEQ ID NO: 842795 - RNA, 19 nt, Artificial Sequence
  Description of Artificial Sequence: Synthetic oligonucleotide
  Antisense strand to SEQ ID NO: 842794
cauauucuaauuaagcacu

SEQ ID NO: 842796 - RNA, 19 nt, Artificial Sequence
  Description of Artificial Sequence: Synthetic oligonucleotide
  Sense strand starting at position 2878 of SEQ ID NO: 588110
ggagguuuggcauguuuca

SEQ ID NO: 842797 - RNA, 19 nt, Artificial Sequence
  Description of Artificial Sequence: Synthetic oligonucleotide
  Antisense strand to SEQ ID NO: 842796
ugaaacaugccaaaccucc

SEQ ID NO: 842798 - RNA, 19 nt, Artificial Sequence
  Description of Artificial Sequence: Synthetic oligonucleotide
  Sense strand starting at position 2917 of SEQ ID NO: 588110
aaacguucgagugaguauc

SEQ ID NO: 842799 - RNA, 19 nt, Artificial Sequence
  Description of Artificial Sequence: Synthetic oligonucleotide
  Antisense strand to SEQ ID NO: 842798
gauacucacucgaacguuu

SEQ ID NO: 842800 - RNA, 19 nt, Artificial Sequence
  Description of Artificial Sequence: Synthetic oligonucleotide
  Sense strand starting at position 2961 of SEQ ID NO: 588110
ggaguagaauggaggaguu

SEQ ID NO: 842801 - RNA, 19 nt, Artificial Sequence
  Description of Artificial Sequence: Synthetic oligonucleotide
  Antisense strand to SEQ ID NO: 842800
aacuccuccauucuacucc

SEQ ID NO: 842802 - RNA, 19 nt, Artificial Sequence
  Description of Artificial Sequence: Synthetic oligonucleotide
  Sense strand starting at position 3052 of SEQ ID NO: 588110
uugcuuugucccggacacu

SEQ ID NO: 842803 - RNA, 19 nt, Artificial Sequence
  Description of Artificial Sequence: Synthetic oligonucleotide
  Antisense strand to SEQ ID NO: 842802
aguguccgggacaaagcaa

SEQ ID NO: 842804 - RNA, 19 nt, Artificial Sequence
  Description of Artificial Sequence: Synthetic oligonucleotide
  Sense strand starting at position 3053 of SEQ ID NO: 588110
ugcuuugucccggacacua

SEQ ID NO: 842805 - RNA, 19 nt, Artificial Sequence
  Description of Artificial Sequence: Synthetic oligonucleotide
  Antisense strand to SEQ ID NO: 842804
uaguguccgggacaaagca

SEQ ID NO: 842806 - RNA, 19 nt, Artificial Sequence
  Description of Artificial Sequence: Synthetic oligonucleotide
  Sense strand starting at position 3170 of SEQ ID NO: 588110
gugagacagucagugaauc

SEQ ID NO: 842807 - RNA, 19 nt, Artificial Sequence
  Description of Artificial Sequence: Synthetic oligonucleotide
  Antisense strand to SEQ ID NO: 842806
gauucacugacugucucac

SEQ ID NO: 842808 - RNA, 19 nt, Artificial Sequence
  Description of Artificial Sequence: Synthetic oligonucleotide
  Sense strand starting at position 3182 of SEQ ID NO: 588110
gugaaucguagcugaguga

SEQ ID NO: 842809 - RNA, 19 nt, Artificial Sequence
  Description of Artificial Sequence: Synthetic oligonucleotide
  Antisense strand to SEQ ID NO: 842808
ucacucagcuacgauucac

SEQ ID NO: 842810 - RNA, 19 nt, Artificial Sequence
  Description of Artificial Sequence: Synthetic oligonucleotide
  Sense strand starting at position 3183 of SEQ ID NO: 588110
ugaaucguagcugagugaa

SEQ ID NO: 842811 - RNA, 19 nt, Artificial Sequence
  Description of Artificial Sequence: Synthetic oligonucleotide
  Antisense strand to SEQ ID NO: 842810
uucacucagcuacgauuca

SEQ ID NO: 842812 - RNA, 19 nt, Artificial Sequence
  Description of Artificial Sequence: Synthetic oligonucleotide
  Sense strand starting at position 3226 of SEQ ID NO: 588110
acagccugguacuuagaaa

SEQ ID NO: 842813 - RNA, 19 nt, Artificial Sequence
  Description of Artificial Sequence: Synthetic oligonucleotide
  Antisense strand to SEQ ID NO: 842812
uuucuaaguaccaggcugu

SEQ ID NO: 842814 - RNA, 19 nt, Artificial Sequence
  Description of Artificial Sequence: Synthetic oligonucleotide
  Sense strand starting at position 3246 of SEQ ID NO: 588110
ggcauuagccuuuauacuu

SEQ ID NO: 842815 - RNA, 19 nt, Artificial Sequence
  Description of Artificial Sequence: Synthetic oligonucleotide
  Antisense strand to SEQ ID NO: 842814
aaguauaaaggcuaaugcc

SEQ ID NO: 842816 - RNA, 19 nt, Artificial Sequence
  Description of Artificial Sequence: Synthetic oligonucleotide
  Sense strand starting at position 3494 of SEQ ID NO: 588110
guugcuuagacuggucuga

SEQ ID NO: 842817 - RNA, 19 nt, Artificial Sequence
  Description of Artificial Sequence: Synthetic oligonucleotide
  Antisense strand to SEQ ID NO: 842816
ucagaccagucuaagcaac

SEQ ID NO: 842818 - RNA, 19 nt, Artificial Sequence
  Description of Artificial Sequence: Synthetic oligonucleotide
  Sense strand starting at position 3496 of SEQ ID NO: 588110
ugcuuagacuggucugaaa

SEQ ID NO: 842819 - RNA, 19 nt, Artificial Sequence
  Description of Artificial Sequence: Synthetic oligonucleotide
  Antisense strand to SEQ ID NO: 842818
uuucagaccagucuaagca

SEQ ID NO: 842820 - RNA, 19 nt, Artificial Sequence
  Description of Artificial Sequence: Synthetic oligonucleotide
  Sense strand starting at position 3498 of SEQ ID NO: 588110
cuuagacuggucugaaacu

SEQ ID NO: 842821 - RNA, 19 nt, Artificial Sequence
  Description of Artificial Sequence: Synthetic oligonucleotide
  Antisense strand to SEQ ID NO: 842820
aguuucagaccagucuaag

SEQ ID NO: 842822 - RNA, 19 nt, Artificial Sequence
  Description of Artificial Sequence: Synthetic oligonucleotide
  Sense strand starting at position 224 of SEQ ID NO: 588111
uauaguguagauuguuaac

SEQ ID NO: 842823 - RNA, 19 nt, Artificial Sequence
  Description of Artificial Sequence: Synthetic oligonucleotide
  Antisense strand to SEQ ID NO: 842822
guuaacaaucuacacuaua

SEQ ID NO: 842824 - RNA, 19 nt, Artificial Sequence
  Description of Artificial Sequence: Synthetic oligonucleotide
  Sense strand starting at position 311 of SEQ ID NO: 588111
aagaauagccuucgugucu

SEQ ID NO: 842825 - RNA, 19 nt, Artificial Sequence
  Description of Artificial Sequence: Synthetic oligonucleotide
  Antisense strand to SEQ ID NO: 842824
agacacgaaggcuauucuu

SEQ ID NO: 842826 - RNA, 19 nt, Artificial Sequence
  Description of Artificial Sequence: Synthetic oligonucleotide
  Sense strand starting at position 312 of SEQ ID NO: 588111
agaauagccuucgugucua

SEQ ID NO: 842827 - RNA, 19 nt, Artificial Sequence
  Description of Artificial Sequence: Synthetic oligonucleotide
  Antisense strand to SEQ ID NO: 842826
uagacacgaaggcuauucu

SEQ ID NO: 842828 - RNA, 19 nt, Artificial Sequence
  Description of Artificial Sequence: Synthetic oligonucleotide
  Sense strand starting at position 317 of SEQ ID NO: 588111
agccuucgugucuacgaaa

SEQ ID NO: 842829 - RNA, 19 nt, Artificial Sequence
  Description of Artificial Sequence: Synthetic oligonucleotide
  Antisense strand to SEQ ID NO: 842828
uuucguagacacgaaggcu

SEQ ID NO: 842830 - RNA, 19 nt, Artificial Sequence
  Description of Artificial Sequence: Synthetic oligonucleotide
  Sense strand starting at position 385 of SEQ ID NO: 588111
aauacuuggccuugggaau

SEQ ID NO: 842831 - RNA, 19 nt, Artificial Sequence
  Description of Artificial Sequence: Synthetic oligonucleotide
  Antisense strand to SEQ ID NO: 842830
auucccaaggccaaguauu

SEQ ID NO: 842832 - RNA, 19 nt, Artificial Sequence
  Description of Artificial Sequence: Synthetic oligonucleotide
  Sense strand starting at position 386 of SEQ ID NO: 588111
auacuuggccuugggaaua

SEQ ID NO: 842833 - RNA, 19 nt, Artificial Sequence
  Description of Artificial Sequence: Synthetic oligonucleotide
  Antisense strand to SEQ ID NO: 842832
uauucccaaggccaaguau

SEQ ID NO: 842834 - RNA, 19 nt, Artificial Sequence
  Description of Artificial Sequence: Synthetic oligonucleotide
  Sense strand starting at position 651 of SEQ ID NO: 588111
ucgagcucgaccuaacuuu

SEQ ID NO: 842835 - RNA, 19 nt, Artificial Sequence
  Description of Artificial Sequence: Synthetic oligonucleotide
  Antisense strand to SEQ ID NO: 842834
aaaguuaggucgagcucga

SEQ ID NO: 842836 - RNA, 19 nt, Artificial Sequence
  Description of Artificial Sequence: Synthetic oligonucleotide
  Sense strand starting at position 936 of SEQ ID NO: 588111
agaggugcuucagcucgaa

SEQ ID NO: 842837 - RNA, 19 nt, Artificial Sequence
  Description of Artificial Sequence: Synthetic oligonucleotide
  Antisense strand to SEQ ID NO: 842836
uucgagcugaagcaccucu

SEQ ID NO: 842838 - RNA, 19 nt, Artificial Sequence
  Description of Artificial Sequence: Synthetic oligonucleotide
  Sense strand starting at position 948 of SEQ ID NO: 588111
gcucgaaguguguagugau

SEQ ID NO: 842839 - RNA, 19 nt, Artificial Sequence
  Description of Artificial Sequence: Synthetic oligonucleotide
  Antisense strand to SEQ ID NO: 842838
aucacuacacacuucgagc

SEQ ID NO: 842840 - RNA, 19 nt, Artificial Sequence
  Description of Artificial Sequence: Synthetic oligonucleotide
  Sense strand starting at position 1876 of SEQ ID NO: 588111
acucccucucuguguagaa

SEQ ID NO: 842841 - RNA, 19 nt, Artificial Sequence
  Description of Artificial Sequence: Synthetic oligonucleotide
  Antisense strand to SEQ ID NO: 842840
uucuacacagagagggagu

SEQ ID NO: 842842 - RNA, 19 nt, Artificial Sequence
  Description of Artificial Sequence: Synthetic oligonucleotide
  Sense strand starting at position 1877 of SEQ ID NO: 588111
cucccucucuguguagaau

SEQ ID NO: 842843 - RNA, 19 nt, Artificial Sequence
  Description of Artificial Sequence: Synthetic oligonucleotide
  Antisense strand to SEQ ID NO: 842842
auucuacacagagagggag

SEQ ID NO: 842844 - RNA, 19 nt, Artificial Sequence
  Description of Artificial Sequence: Synthetic oligonucleotide
  Sense strand starting at position 1889 of SEQ ID NO: 588111
guagaaucacagggaguga

SEQ ID NO: 842845 - RNA, 19 nt, Artificial Sequence
  Description of Artificial Sequence: Synthetic oligonucleotide
  Antisense strand to SEQ ID NO: 842844
ucacucccugugauucuac

SEQ ID NO: 842846 - RNA, 19 nt, Artificial Sequence
  Description of Artificial Sequence: Synthetic oligonucleotide
  Sense strand starting at position 1950 of SEQ ID NO: 588111
uccagcuuccauugaguga

SEQ ID NO: 842847 - RNA, 19 nt, Artificial Sequence
  Description of Artificial Sequence: Synthetic oligonucleotide
  Antisense strand to SEQ ID NO: 842846
ucacucaauggaagcugga

SEQ ID NO: 842848 - RNA, 19 nt, Artificial Sequence
  Description of Artificial Sequence: Synthetic oligonucleotide
  Sense strand starting at position 1954 of SEQ ID NO: 588111
gcuuccauugagugagacu

SEQ ID NO: 842849 - RNA, 19 nt, Artificial Sequence
  Description of Artificial Sequence: Synthetic oligonucleotide
  Antisense strand to SEQ ID NO: 842848
agucucacucaauggaagc

SEQ ID NO: 842850 - RNA, 19 nt, Artificial Sequence
  Description of Artificial Sequence: Synthetic oligonucleotide
  Sense strand starting at position 2061 of SEQ ID NO: 588111
gugugcugagugcuuaauu

SEQ ID NO: 842851 - RNA, 19 nt, Artificial Sequence
  Description of Artificial Sequence: Synthetic oligonucleotide
  Antisense strand to SEQ ID NO: 842850
aauuaagcacucagcacac

SEQ ID NO: 842852 - RNA, 19 nt, Artificial Sequence
  Description of Artificial Sequence: Synthetic oligonucleotide
  Sense strand starting at position 2066 of SEQ ID NO: 588111
cugagugcuuaauuagaau

SEQ ID NO: 842853 - RNA, 19 nt, Artificial Sequence
  Description of Artificial Sequence: Synthetic oligonucleotide
  Antisense strand to SEQ ID NO: 842852
auucuaauuaagcacucag

SEQ ID NO: 842854 - RNA, 19 nt, Artificial Sequence
  Description of Artificial Sequence: Synthetic oligonucleotide
  Sense strand starting at position 2144 of SEQ ID NO: 588111
ggagguuuggcauguuuca

SEQ ID NO: 842855 - RNA, 19 nt, Artificial Sequence
  Description of Artificial Sequence: Synthetic oligonucleotide
  Antisense strand to SEQ ID NO: 842854
ugaaacaugccaaaccucc

SEQ ID NO: 842856 - RNA, 19 nt, Artificial Sequence
  Description of Artificial Sequence: Synthetic oligonucleotide
  Sense strand starting at position 2183 of SEQ ID NO: 588111
aaacguucgagugaguauc

SEQ ID NO: 842857 - RNA, 19 nt, Artificial Sequence
  Description of Artificial Sequence: Synthetic oligonucleotide
  Antisense strand to SEQ ID NO: 842856
gauacucacucgaacguuu

SEQ ID NO: 842858 - RNA, 19 nt, Artificial Sequence
  Description of Artificial Sequence: Synthetic oligonucleotide
  Sense strand starting at position 2227 of SEQ ID NO: 588111
ggaguagaauggaggaguu

SEQ ID NO: 842859 - RNA, 19 nt, Artificial Sequence
  Description of Artificial Sequence: Synthetic oligonucleotide
  Antisense strand to SEQ ID NO: 842858
aacuccuccauucuacucc

SEQ ID NO: 842860 - RNA, 19 nt, Artificial Sequence
  Description of Artificial Sequence: Synthetic oligonucleotide
  Sense strand starting at position 2319 of SEQ ID NO: 588111
ugcuuugucccggacacua

SEQ ID NO: 842861 - RNA, 19 nt, Artificial Sequence
  Description of Artificial Sequence: Synthetic oligonucleotide
  Antisense strand to SEQ ID NO: 842860
uaguguccgggacaaagca

SEQ ID NO: 842862 - RNA, 19 nt, Artificial Sequence
  Description of Artificial Sequence: Synthetic oligonucleotide
  Sense strand starting at position 2436 of SEQ ID NO: 588111
gugagacagucagugaauc

SEQ ID NO: 842863 - RNA, 19 nt, Artificial Sequence
  Description of Artificial Sequence: Synthetic oligonucleotide
  Antisense strand to SEQ ID NO: 842862
gauucacugacugucucac

SEQ ID NO: 842864 - RNA, 19 nt, Artificial Sequence
  Description of Artificial Sequence: Synthetic oligonucleotide
  Sense strand starting at position 2448 of SEQ ID NO: 588111
gugaaucguagcugaguga

SEQ ID NO: 842865 - RNA, 19 nt, Artificial Sequence
  Description of Artificial Sequence: Synthetic oligonucleotide
  Antisense strand to SEQ ID NO: 842864
ucacucagcuacgauucac

SEQ ID NO: 842866 - RNA, 19 nt, Artificial Sequence
  Description of Artificial Sequence: Synthetic oligonucleotide
  Sense strand starting at position 2449 of SEQ ID NO: 588111
ugaaucguagcugagugaa

SEQ ID NO: 842867 - RNA, 19 nt, Artificial Sequence
  Description of Artificial Sequence: Synthetic oligonucleotide
  Antisense strand to SEQ ID NO: 842866
uucacucagcuacgauuca

SEQ ID NO: 842868 - RNA, 19 nt, Artificial Sequence
  Description of Artificial Sequence: Synthetic oligonucleotide
  Sense strand starting at position 2492 of SEQ ID NO: 588111
acagccugguacuuagaaa

SEQ ID NO: 842869 - RNA, 19 nt, Artificial Sequence
  Description of Artificial Sequence: Synthetic oligonucleotide
  Antisense strand to SEQ ID NO: 842868
uuucuaaguaccaggcugu

SEQ ID NO: 842870 - RNA, 19 nt, Artificial Sequence
  Description of Artificial Sequence: Synthetic oligonucleotide
  Sense strand starting at position 2512 of SEQ ID NO: 588111
ggcauuagccuuuauacuu

SEQ ID NO: 842871 - RNA, 19 nt, Artificial Sequence
  Description of Artificial Sequence: Synthetic oligonucleotide
  Antisense strand to SEQ ID NO: 842870
aaguauaaaggcuaaugcc

SEQ ID NO: 842872 - RNA, 19 nt, Artificial Sequence
  Description of Artificial Sequence: Synthetic oligonucleotide
  Sense strand starting at position 2760 of SEQ ID NO: 588111
guugcuuagacuggucuga

SEQ ID NO: 842873 - RNA, 19 nt, Artificial Sequence
  Description of Artificial Sequence: Synthetic oligonucleotide
  Antisense strand to SEQ ID NO: 842872
ucagaccagucuaagcaac

SEQ ID NO: 842874 - RNA, 19 nt, Artificial Sequence
  Description of Artificial Sequence: Synthetic oligonucleotide
  Sense strand starting at position 2762 of SEQ ID NO: 588111
ugcuuagacuggucugaaa

SEQ ID NO: 842875 - RNA, 19 nt, Artificial Sequence
  Description of Artificial Sequence: Synthetic oligonucleotide
  Antisense strand to SEQ ID NO: 842874
uuucagaccagucuaagca

SEQ ID NO: 842876 - RNA, 19 nt, Artificial Sequence
  Description of Artificial Sequence: Synthetic oligonucleotide
  Sense strand starting at position 2764 of SEQ ID NO: 588111
cuuagacuggucugaaacu

SEQ ID NO: 842877 - RNA, 19 nt, Artificial Sequence
  Description of Artificial Sequence: Synthetic oligonucleotide
  Antisense strand to SEQ ID NO: 842876
aguuucagaccagucuaag

SEQ ID NO: 842878 - RNA, 19 nt, Artificial Sequence
  Description of Artificial Sequence: Synthetic oligonucleotide
  Sense strand starting at position 3556 of SEQ ID NO: 588111
gagugucguggucauauua

SEQ ID NO: 842879 - RNA, 19 nt, Artificial Sequence
  Description of Artificial Sequence: Synthetic oligonucleotide
  Antisense strand to SEQ ID NO: 842878
uaauaugaccacgacacuc

SEQ ID NO: 842880 - RNA, 19 nt, Artificial Sequence
  Description of Artificial Sequence: Synthetic oligonucleotide
  Sense strand starting at position 3612 of SEQ ID NO: 588111
aaagguuguugauuacaaa

SEQ ID NO: 842881 - RNA, 19 nt, Artificial Sequence
  Description of Artificial Sequence: Synthetic oligonucleotide
  Antisense strand to SEQ ID NO: 842880
uuuguaaucaacaaccuuu

SEQ ID NO: 842882 - RNA, 19 nt, Artificial Sequence
  Description of Artificial Sequence: Synthetic oligonucleotide
  Sense strand starting at position 3636 of SEQ ID NO: 588111
aacugccagucugugaaau

SEQ ID NO: 842883 - RNA, 19 nt, Artificial Sequence
  Description of Artificial Sequence: Synthetic oligonucleotide
  Antisense strand to SEQ ID NO: 842882
auuucacagacuggcaguu

SEQ ID NO: 842884 - RNA, 19 nt, Artificial Sequence
  Description of Artificial Sequence: Synthetic oligonucleotide
  Sense strand starting at position 3637 of SEQ ID NO: 588111
acugccagucugugaaauc

SEQ ID NO: 842885 - RNA, 19 nt, Artificial Sequence
  Description of Artificial Sequence: Synthetic oligonucleotide
  Antisense strand to SEQ ID NO: 842884
gauuucacagacuggcagu

SEQ ID NO: 842886 - RNA, 19 nt, Artificial Sequence
  Description of Artificial Sequence: Synthetic oligonucleotide
  Sense strand starting at position 3648 of SEQ ID NO: 588111
gugaaaucuccuggcaacu

SEQ ID NO: 842887 - RNA, 19 nt, Artificial Sequence
  Description of Artificial Sequence: Synthetic oligonucleotide
  Antisense strand to SEQ ID NO: 842886
aguugccaggagauuucac

SEQ ID NO: 842888 - RNA, 19 nt, Artificial Sequence
  Description of Artificial Sequence: Synthetic oligonucleotide
  Sense strand starting at position 3781 of SEQ ID NO: 588111
augaccaaguguuuauaca

SEQ ID NO: 842889 - RNA, 19 nt, Artificial Sequence
  Description of Artificial Sequence: Synthetic oligonucleotide
  Antisense strand to SEQ ID NO: 842888
uguauaaacacuuggucau

SEQ ID NO: 842890 - RNA, 19 nt, Artificial Sequence
  Description of Artificial Sequence: Synthetic oligonucleotide
  Sense strand starting at position 3788 of SEQ ID NO: 588111
aguguuuauacagauuagu

SEQ ID NO: 842891 - RNA, 19 nt, Artificial Sequence
  Description of Artificial Sequence: Synthetic oligonucleotide
  Antisense strand to SEQ ID NO: 842890
acuaaucuguauaaacacu

SEQ ID NO: 842892 - RNA, 19 nt, Artificial Sequence
  Description of Artificial Sequence: Synthetic oligonucleotide
  Sense strand starting at position 3794 of SEQ ID NO: 588111
uauacagauuaguuugaag

SEQ ID NO: 842893 - RNA, 19 nt, Artificial Sequence
  Description of Artificial Sequence: Synthetic oligonucleotide
  Antisense strand to SEQ ID NO: 842892
cuucaaacuaaucuguaua

SEQ ID NO: 842894 - RNA, 19 nt, Artificial Sequence
  Description of Artificial Sequence: Synthetic oligonucleotide
  Sense strand starting at position 3796 of SEQ ID NO: 588111
uacagauuaguuugaagca

SEQ ID NO: 842895 - RNA, 19 nt, Artificial Sequence
  Description of Artificial Sequence: Synthetic oligonucleotide
  Antisense strand to SEQ ID NO: 842894
ugcuucaaacuaaucugua

SEQ ID NO: 842896 - RNA, 19 nt, Artificial Sequence
  Description of Artificial Sequence: Synthetic oligonucleotide
  Sense strand starting at position 3825 of SEQ ID NO: 588111
agaugagugcuuugcacau

SEQ ID NO: 842897 - RNA, 19 nt, Artificial Sequence
  Description of Artificial Sequence: Synthetic oligonucleotide
  Antisense strand to SEQ ID NO: 842896
augugcaaagcacucaucu

SEQ ID NO: 842898 - RNA, 19 nt, Artificial Sequence
  Description of Artificial Sequence: Synthetic oligonucleotide
  Sense strand starting at position 3945 of SEQ ID NO: 588111
uggugcaguggcgagauau

SEQ ID NO: 842899 - RNA, 19 nt, Artificial Sequence
  Description of Artificial Sequence: Synthetic oligonucleotide
  Antisense strand to SEQ ID NO: 842898
auaucucgccacugcacca

SEQ ID NO: 842900 - RNA, 19 nt, Artificial Sequence
  Description of Artificial Sequence: Synthetic oligonucleotide
  Sense strand starting at position 3946 of SEQ ID NO: 588111
ggugcaguggcgagauauu

SEQ ID NO: 842901 - RNA, 19 nt, Artificial Sequence
  Description of Artificial Sequence: Synthetic oligonucleotide
  Antisense strand to SEQ ID NO: 842900
aauaucucgccacugcacc

SEQ ID NO: 842902 - RNA, 19 nt, Artificial Sequence
  Description of Artificial Sequence: Synthetic oligonucleotide
  Sense strand starting at position 244 of SEQ ID NO: 588112
ccuguuugcuauccuuaca

SEQ ID NO: 842903 - RNA, 19 nt, Artificial Sequence
  Description of Artificial Sequence: Synthetic oligonucleotide
  Antisense strand to SEQ ID NO: 842902
uguaaggauagcaaacagg

SEQ ID NO: 842904 - RNA, 19 nt, Artificial Sequence
  Description of Artificial Sequence: Synthetic oligonucleotide
  Sense strand starting at position 468 of SEQ ID NO: 588112
uauaguguagauuguuaac

SEQ ID NO: 842905 - RNA, 19 nt, Artificial Sequence
  Description of Artificial Sequence: Synthetic oligonucleotide
  Antisense strand to SEQ ID NO: 842904
guuaacaaucuacacuaua

SEQ ID NO: 842906 - RNA, 19 nt, Artificial Sequence
  Description of Artificial Sequence: Synthetic oligonucleotide
  Sense strand starting at position 494 of SEQ ID NO: 588112
cgugccgagcuguaagaau

SEQ ID NO: 842907 - RNA, 19 nt, Artificial Sequence
  Description of Artificial Sequence: Synthetic oligonucleotide
  Antisense strand to SEQ ID NO: 842906
auucuuacagcucggcacg

SEQ ID NO: 842908 - RNA, 19 nt, Artificial Sequence
  Description of Artificial Sequence: Synthetic oligonucleotide
  Sense strand starting at position 555 of SEQ ID NO: 588112
aagaauagccuucgugucu

SEQ ID NO: 842909 - RNA, 19 nt, Artificial Sequence
  Description of Artificial Sequence: Synthetic oligonucleotide
  Antisense strand to SEQ ID NO: 842908
agacacgaaggcuauucuu

SEQ ID NO: 842910 - RNA, 19 nt, Artificial Sequence
  Description of Artificial Sequence: Synthetic oligonucleotide
  Sense strand starting at position 556 of SEQ ID NO: 588112
agaauagccuucgugucua

SEQ ID NO: 842911 - RNA, 19 nt, Artificial Sequence
  Description of Artificial Sequence: Synthetic oligonucleotide
  Antisense strand to SEQ ID NO: 842910
uagacacgaaggcuauucu

SEQ ID NO: 842912 - RNA, 19 nt, Artificial Sequence
  Description of Artificial Sequence: Synthetic oligonucleotide
  Sense strand starting at position 561 of SEQ ID NO: 588112
agccuucgugucuacgaaa

SEQ ID NO: 842913 - RNA, 19 nt, Artificial Sequence
  Description of Artificial Sequence: Synthetic oligonucleotide
  Antisense strand to SEQ ID NO: 842912
uuucguagacacgaaggcu

SEQ ID NO: 842914 - RNA, 19 nt, Artificial Sequence
  Description of Artificial Sequence: Synthetic oligonucleotide
  Sense strand starting at position 629 of SEQ ID NO: 588112
aauacuuggccuugggaau

SEQ ID NO: 842915 - RNA, 19 nt, Artificial Sequence
  Description of Artificial Sequence: Synthetic oligonucleotide
  Antisense strand to SEQ ID NO: 842914
auucccaaggccaaguauu

SEQ ID NO: 842916 - RNA, 19 nt, Artificial Sequence
  Description of Artificial Sequence: Synthetic oligonucleotide
  Sense strand starting at position 630 of SEQ ID NO: 588112
auacuuggccuugggaaua

SEQ ID NO: 842917 - RNA, 19 nt, Artificial Sequence
  Description of Artificial Sequence: Synthetic oligonucleotide
  Antisense strand to SEQ ID NO: 842916
uauucccaaggccaaguau

SEQ ID NO: 842918 - RNA, 19 nt, Artificial Sequence
  Description of Artificial Sequence: Synthetic oligonucleotide
  Sense strand starting at position 895 of SEQ ID NO: 588112
ucgagcucgaccuaacuuu

SEQ ID NO: 842919 - RNA, 19 nt, Artificial Sequence
  Description of Artificial Sequence: Synthetic oligonucleotide
  Antisense strand to SEQ ID NO: 842918
aaaguuaggucgagcucga

SEQ ID NO: 842920 - RNA, 19 nt, Artificial Sequence
  Description of Artificial Sequence: Synthetic oligonucleotide
  Sense strand starting at position 1180 of SEQ ID NO: 588112
agaggugcuucagcucgaa

SEQ ID NO: 842921 - RNA, 19 nt, Artificial Sequence
  Description of Artificial Sequence: Synthetic oligonucleotide
  Antisense strand to SEQ ID NO: 842920
uucgagcugaagcaccucu

SEQ ID NO: 842922 - RNA, 19 nt, Artificial Sequence
  Description of Artificial Sequence: Synthetic oligonucleotide
  Sense strand starting at position 1192 of SEQ ID NO: 588112
gcucgaaguguguagugau

SEQ ID NO: 842923 - RNA, 19 nt, Artificial Sequence
  Description of Artificial Sequence: Synthetic oligonucleotide
  Antisense strand to SEQ ID NO: 842922
aucacuacacacuucgagc

SEQ ID NO: 842924 - RNA, 19 nt, Artificial Sequence
  Description of Artificial Sequence: Synthetic oligonucleotide
  Sense strand starting at position 1203 of SEQ ID NO: 588112
guagugaugcgcgacgaca

SEQ ID NO: 842925 - RNA, 19 nt, Artificial Sequence
  Description of Artificial Sequence: Synthetic oligonucleotide
  Antisense strand to SEQ ID NO: 842924
ugucgucgcgcaucacuac

SEQ ID NO: 842926 - RNA, 19 nt, Artificial Sequence
  Description of Artificial Sequence: Synthetic oligonucleotide
  Sense strand starting at position 2120 of SEQ ID NO: 588112
acucccucucuguguagaa

SEQ ID NO: 842927 - RNA, 19 nt, Artificial Sequence
  Description of Artificial Sequence: Synthetic oligonucleotide
  Antisense strand to SEQ ID NO: 842926
uucuacacagagagggagu

SEQ ID NO: 842928 - RNA, 19 nt, Artificial Sequence
  Description of Artificial Sequence: Synthetic oligonucleotide
  Sense strand starting at position 2121 of SEQ ID NO: 588112
cucccucucuguguagaau

SEQ ID NO: 842929 - RNA, 19 nt, Artificial Sequence
  Description of Artificial Sequence: Synthetic oligonucleotide
  Antisense strand to SEQ ID NO: 842928
auucuacacagagagggag

SEQ ID NO: 842930 - RNA, 19 nt, Artificial Sequence
  Description of Artificial Sequence: Synthetic oligonucleotide
  Sense strand starting at position 2133 of SEQ ID NO: 588112
guagaaucacagggaguga

SEQ ID NO: 842931 - RNA, 19 nt, Artificial Sequence
  Description of Artificial Sequence: Synthetic oligonucleotide
  Antisense strand to SEQ ID NO: 842930
ucacucccugugauucuac

SEQ ID NO: 842932 - RNA, 19 nt, Artificial Sequence
  Description of Artificial Sequence: Synthetic oligonucleotide
  Sense strand starting at position 2194 of SEQ ID NO: 588112
uccagcuuccauugaguga

SEQ ID NO: 842933 - RNA, 19 nt, Artificial Sequence
  Description of Artificial Sequence: Synthetic oligonucleotide
  Antisense strand to SEQ ID NO: 842932
ucacucaauggaagcugga

SEQ ID NO: 842934 - RNA, 19 nt, Artificial Sequence
  Description of Artificial Sequence: Synthetic oligonucleotide
  Sense strand starting at position 2198 of SEQ ID NO: 588112
gcuuccauugagugagacu

SEQ ID NO: 842935 - RNA, 19 nt, Artificial Sequence
  Description of Artificial Sequence: Synthetic oligonucleotide
  Antisense strand to SEQ ID NO: 842934
agucucacucaauggaagc

SEQ ID NO: 842936 - RNA, 19 nt, Artificial Sequence
  Description of Artificial Sequence: Synthetic oligonucleotide
  Sense strand starting at position 2305 of SEQ ID NO: 588112
gugugcugagugcuuaauu

SEQ ID NO: 842937 - RNA, 19 nt, Artificial Sequence
  Description of Artificial Sequence: Synthetic oligonucleotide
  Antisense strand to SEQ ID NO: 842936
aauuaagcacucagcacac

SEQ ID NO: 842938 - RNA, 19 nt, Artificial Sequence
  Description of Artificial Sequence: Synthetic oligonucleotide
  Sense strand starting at position 2306 of SEQ ID NO: 588112
ugugcugagugcuuaauua

SEQ ID NO: 842939 - RNA, 19 nt, Artificial Sequence
  Description of Artificial Sequence: Synthetic oligonucleotide
  Antisense strand to SEQ ID NO: 842938
uaauuaagcacucagcaca

SEQ ID NO: 842940 - RNA, 19 nt, Artificial Sequence
  Description of Artificial Sequence: Synthetic oligonucleotide
  Sense strand starting at position 2310 of SEQ ID NO: 588112
cugagugcuuaauuagaau

SEQ ID NO: 842941 - RNA, 19 nt, Artificial Sequence
  Description of Artificial Sequence: Synthetic oligonucleotide
  Antisense strand to SEQ ID NO: 842940
auucuaauuaagcacucag

SEQ ID NO: 842942 - RNA, 19 nt, Artificial Sequence
  Description of Artificial Sequence: Synthetic oligonucleotide
  Sense strand starting at position 2388 of SEQ ID NO: 588112
ggagguuuggcauguuuca

SEQ ID NO: 842943 - RNA, 19 nt, Artificial Sequence
  Description of Artificial Sequence: Synthetic oligonucleotide
  Antisense strand to SEQ ID NO: 842942
ugaaacaugccaaaccucc

SEQ ID NO: 842944 - RNA, 19 nt, Artificial Sequence
  Description of Artificial Sequence: Synthetic oligonucleotide
  Sense strand starting at position 2427 of SEQ ID NO: 588112
aaacguucgagugaguauc

SEQ ID NO: 842945 - RNA, 19 nt, Artificial Sequence
  Description of Artificial Sequence: Synthetic oligonucleotide
  Antisense strand to SEQ ID NO: 842944
gauacucacucgaacguuu

SEQ ID NO: 842946 - RNA, 19 nt, Artificial Sequence
  Description of Artificial Sequence: Synthetic oligonucleotide
  Sense strand starting at position 2471 of SEQ ID NO: 588112
ggaguagaauggaggaguu

SEQ ID NO: 842947 - RNA, 19 nt, Artificial Sequence
  Description of Artificial Sequence: Synthetic oligonucleotide
  Antisense strand to SEQ ID NO: 842946
aacuccuccauucuacucc

SEQ ID NO: 842948 - RNA, 19 nt, Artificial Sequence
  Description of Artificial Sequence: Synthetic oligonucleotide
  Sense strand starting at position 2562 of SEQ ID NO: 588112
uugcuuugucccggacacu

SEQ ID NO: 842949 - RNA, 19 nt, Artificial Sequence
  Description of Artificial Sequence: Synthetic oligonucleotide
  Antisense strand to SEQ ID NO: 842948
aguguccgggacaaagcaa

SEQ ID NO: 842950 - RNA, 19 nt, Artificial Sequence
  Description of Artificial Sequence: Synthetic oligonucleotide
  Sense strand starting at position 2563 of SEQ ID NO: 588112
ugcuuugucccggacacua

SEQ ID NO: 842951 - RNA, 19 nt, Artificial Sequence
  Description of Artificial Sequence: Synthetic oligonucleotide
  Antisense strand to SEQ ID NO: 842950
uaguguccgggacaaagca

SEQ ID NO: 842952 - RNA, 19 nt, Artificial Sequence
  Description of Artificial Sequence: Synthetic oligonucleotide
  Sense strand starting at position 2680 of SEQ ID NO: 588112
gugagacagucagugaauc

SEQ ID NO: 842953 - RNA, 19 nt, Artificial Sequence
  Description of Artificial Sequence: Synthetic oligonucleotide
  Antisense strand to SEQ ID NO: 842952
gauucacugacugucucac

SEQ ID NO: 842954 - RNA, 19 nt, Artificial Sequence
  Description of Artificial Sequence: Synthetic oligonucleotide
  Sense strand starting at position 2692 of SEQ ID NO: 588112
gugaaucguagcugaguga

SEQ ID NO: 842955 - RNA, 19 nt, Artificial Sequence
  Description of Artificial Sequence: Synthetic oligonucleotide
  Antisense strand to SEQ ID NO: 842954
ucacucagcuacgauucac

SEQ ID NO: 842956 - RNA, 19 nt, Artificial Sequence
  Description of Artificial Sequence: Synthetic oligonucleotide
  Sense strand starting at position 2693 of SEQ ID NO: 588112
ugaaucguagcugagugaa

SEQ ID NO: 842957 - RNA, 19 nt, Artificial Sequence
  Description of Artificial Sequence: Synthetic oligonucleotide
  Antisense strand to SEQ ID NO: 842956
uucacucagcuacgauuca

SEQ ID NO: 842958 - RNA, 19 nt, Artificial Sequence
  Description of Artificial Sequence: Synthetic oligonucleotide
  Sense strand starting at position 2736 of SEQ ID NO: 588112
acagccugguacuuagaaa

SEQ ID NO: 842959 - RNA, 19 nt, Artificial Sequence
  Description of Artificial Sequence: Synthetic oligonucleotide
  Antisense strand to SEQ ID NO: 842958
uuucuaaguaccaggcugu

SEQ ID NO: 842960 - RNA, 19 nt, Artificial Sequence
  Description of Artificial Sequence: Synthetic oligonucleotide
  Sense strand starting at position 2756 of SEQ ID NO: 588112
ggcauuagccuuuauacuu

SEQ ID NO: 842961 - RNA, 19 nt, Artificial Sequence
  Description of Artificial Sequence: Synthetic oligonucleotide
  Antisense strand to SEQ ID NO: 842960
aaguauaaaggcuaaugcc

SEQ ID NO: 842962 - RNA, 19 nt, Artificial Sequence
  Description of Artificial Sequence: Synthetic oligonucleotide
  Sense strand starting at position 3004 of SEQ ID NO: 588112
guugcuuagacuggucuga

SEQ ID NO: 842963 - RNA, 19 nt, Artificial Sequence
  Description of Artificial Sequence: Synthetic oligonucleotide
  Antisense strand to SEQ ID NO: 842962
ucagaccagucuaagcaac

SEQ ID NO: 842964 - RNA, 19 nt, Artificial Sequence
  Description of Artificial Sequence: Synthetic oligonucleotide
  Sense strand starting at position 3006 of SEQ ID NO: 588112
ugcuuagacuggucugaaa

SEQ ID NO: 842965 - RNA, 19 nt, Artificial Sequence
  Description of Artificial Sequence: Synthetic oligonucleotide
  Antisense strand to SEQ ID NO: 842964
uuucagaccagucuaagca

SEQ ID NO: 842966 - RNA, 19 nt, Artificial Sequence
  Description of Artificial Sequence: Synthetic oligonucleotide
  Sense strand starting at position 3008 of SEQ ID NO: 588112
cuuagacuggucugaaacu

SEQ ID NO: 842967 - RNA, 19 nt, Artificial Sequence
  Description of Artificial Sequence: Synthetic oligonucleotide
  Antisense strand to SEQ ID NO: 842966
aguuucagaccagucuaag

SEQ ID NO: 842968 - RNA, 19 nt, Artificial Sequence
  Description of Artificial Sequence: Synthetic oligonucleotide
  Sense strand starting at position 3657 of SEQ ID NO: 588112
cuccaaagcugggaacaua

SEQ ID NO: 842969 - RNA, 19 nt, Artificial Sequence
  Description of Artificial Sequence: Synthetic oligonucleotide
  Antisense strand to SEQ ID NO: 842968
uauguucccagcuuuggag

SEQ ID NO: 842970 - RNA, 19 nt, Artificial Sequence
  Description of Artificial Sequence: Synthetic oligonucleotide
  Sense strand starting at position 3800 of SEQ ID NO: 588112
gagugucguggucauauua

SEQ ID NO: 842971 - RNA, 19 nt, Artificial Sequence
  Description of Artificial Sequence: Synthetic oligonucleotide
  Antisense strand to SEQ ID NO: 842970
uaauaugaccacgacacuc

SEQ ID NO: 842972 - RNA, 19 nt, Artificial Sequence
  Description of Artificial Sequence: Synthetic oligonucleotide
  Sense strand starting at position 3856 of SEQ ID NO: 588112
aaagguuguugauuacaaa

SEQ ID NO: 842973 - RNA, 19 nt, Artificial Sequence
  Description of Artificial Sequence: Synthetic oligonucleotide
  Antisense strand to SEQ ID NO: 842972
uuuguaaucaacaaccuuu

SEQ ID NO: 842974 - RNA, 19 nt, Artificial Sequence
  Description of Artificial Sequence: Synthetic oligonucleotide
  Sense strand starting at position 3880 of SEQ ID NO: 588112
aacugccagucugugaaau

SEQ ID NO: 842975 - RNA, 19 nt, Artificial Sequence
  Description of Artificial Sequence: Synthetic oligonucleotide
  Antisense strand to SEQ ID NO: 842974
auuucacagacuggcaguu

SEQ ID NO: 842976 - RNA, 19 nt, Artificial Sequence
  Description of Artificial Sequence: Synthetic oligonucleotide
  Sense strand starting at position 3881 of SEQ ID NO: 588112
acugccagucugugaaauc

SEQ ID NO: 842977 - RNA, 19 nt, Artificial Sequence
  Description of Artificial Sequence: Synthetic oligonucleotide
  Antisense strand to SEQ ID NO: 842976
gauuucacagacuggcagu

SEQ ID NO: 842978 - RNA, 19 nt, Artificial Sequence
  Description of Artificial Sequence: Synthetic oligonucleotide
  Sense strand starting at position 3892 of SEQ ID NO: 588112
gugaaaucuccuggcaacu

SEQ ID NO: 842979 - RNA, 19 nt, Artificial Sequence
  Description of Artificial Sequence: Synthetic oligonucleotide
  Antisense strand to SEQ ID NO: 842978
aguugccaggagauuucac

SEQ ID NO: 842980 - RNA, 19 nt, Artificial Sequence
  Description of Artificial Sequence: Synthetic oligonucleotide
  Sense strand starting at position 3904 of SEQ ID NO: 588112
ggcaacugugccuggcaua

SEQ ID NO: 842981 - RNA, 19 nt, Artificial Sequence
  Description of Artificial Sequence: Synthetic oligonucleotide
  Antisense strand to SEQ ID NO: 842980
uaugccaggcacaguugcc

SEQ ID NO: 842982 - RNA, 19 nt, Artificial Sequence
  Description of Artificial Sequence: Synthetic oligonucleotide
  Sense strand starting at position 52 of SEQ ID NO: 588113
cgcaauucucuagggccaa

SEQ ID NO: 842983 - RNA, 19 nt, Artificial Sequence
  Description of Artificial Sequence: Synthetic oligonucleotide
  Antisense strand to SEQ ID NO: 842982
uuggcccuagagaauugcg

SEQ ID NO: 842984 - RNA, 19 nt, Artificial Sequence
  Description of Artificial Sequence: Synthetic oligonucleotide
  Sense strand starting at position 260 of SEQ ID NO: 588113
agagauucuagccaaggca

SEQ ID NO: 842985 - RNA, 19 nt, Artificial Sequence
  Description of Artificial Sequence: Synthetic oligonucleotide
  Antisense strand to SEQ ID NO: 842984
ugccuuggcuagaaucucu

SEQ ID NO: 842986 - RNA, 19 nt, Artificial Sequence
  Description of Artificial Sequence: Synthetic oligonucleotide
  Sense strand starting at position 343 of SEQ ID NO: 588113
acgguuugagaccagcuua

SEQ ID NO: 842987 - RNA, 19 nt, Artificial Sequence
  Description of Artificial Sequence: Synthetic oligonucleotide
  Antisense strand to SEQ ID NO: 842986
uaagcuggucucaaaccgu

SEQ ID NO: 842988 - RNA, 19 nt, Artificial Sequence
  Description of Artificial Sequence: Synthetic oligonucleotide
  Sense strand starting at position 671 of SEQ ID NO: 588113
acaaaugcuccugggacaa

SEQ ID NO: 842989 - RNA, 19 nt, Artificial Sequence
  Description of Artificial Sequence: Synthetic oligonucleotide
  Antisense strand to SEQ ID NO: 842988
uugucccaggagcauuugu

SEQ ID NO: 842990 - RNA, 19 nt, Artificial Sequence
  Description of Artificial Sequence: Synthetic oligonucleotide
  Sense strand starting at position 841 of SEQ ID NO: 588113
gcuaaagugcaaugaugua

SEQ ID NO: 842991 - RNA, 19 nt, Artificial Sequence
  Description of Artificial Sequence: Synthetic oligonucleotide
  Antisense strand to SEQ ID NO: 842990
uacaucauugcacuuuagc

SEQ ID NO: 842992 - RNA, 19 nt, Artificial Sequence
  Description of Artificial Sequence: Synthetic oligonucleotide
  Sense strand starting at position 1140 of SEQ ID NO: 588113
aggcaaugguuucuagaua

SEQ ID NO: 842993 - RNA, 19 nt, Artificial Sequence
  Description of Artificial Sequence: Synthetic oligonucleotide
  Antisense strand to SEQ ID NO: 842992
uaucuagaaaccauugccu

SEQ ID NO: 842994 - RNA, 19 nt, Artificial Sequence
  Description of Artificial Sequence: Synthetic oligonucleotide
  Sense strand starting at position 1141 of SEQ ID NO: 588113
ggcaaugguuucuagauaa

SEQ ID NO: 842995 - RNA, 19 nt, Artificial Sequence
  Description of Artificial Sequence: Synthetic oligonucleotide
  Antisense strand to SEQ ID NO: 842994
uuaucuagaaaccauugcc

SEQ ID NO: 842996 - RNA, 19 nt, Artificial Sequence
  Description of Artificial Sequence: Synthetic oligonucleotide
  Sense strand starting at position 1524 of SEQ ID NO: 588113
gggcauaggaucugaauac

SEQ ID NO: 842997 - RNA, 19 nt, Artificial Sequence
  Description of Artificial Sequence: Synthetic oligonucleotide
  Antisense strand to SEQ ID NO: 842996
guauucagauccuaugccc

SEQ ID NO: 842998 - RNA, 19 nt, Artificial Sequence
  Description of Artificial Sequence: Synthetic oligonucleotide
  Sense strand starting at position 1525 of SEQ ID NO: 588113
ggcauaggaucugaauaca

SEQ ID NO: 842999 - RNA, 19 nt, Artificial Sequence
  Description of Artificial Sequence: Synthetic oligonucleotide
  Antisense strand to SEQ ID NO: 842998
uguauucagauccuaugcc

SEQ ID NO: 843000 - RNA, 19 nt, Artificial Sequence
  Description of Artificial Sequence: Synthetic oligonucleotide
  Sense strand starting at position 1589 of SEQ ID NO: 588113
ugaucaacguccuuaauca

SEQ ID NO: 843001 - RNA, 19 nt, Artificial Sequence
  Description of Artificial Sequence: Synthetic oligonucleotide
  Antisense strand to SEQ ID NO: 843000
ugauuaaggacguugauca

SEQ ID NO: 843002 - RNA, 19 nt, Artificial Sequence
  Description of Artificial Sequence: Synthetic oligonucleotide
  Sense strand starting at position 1596 of SEQ ID NO: 588113
cguccuuaaucauuaggga

SEQ ID NO: 843003 - RNA, 19 nt, Artificial Sequence
  Description of Artificial Sequence: Synthetic oligonucleotide
  Antisense strand to SEQ ID NO: 843002
ucccuaaugauuaaggacg

SEQ ID NO: 843004 - RNA, 19 nt, Artificial Sequence
  Description of Artificial Sequence: Synthetic oligonucleotide
  Sense strand starting at position 1652 of SEQ ID NO: 588113
ucacgaacaugguuauagu

SEQ ID NO: 843005 - RNA, 19 nt, Artificial Sequence
  Description of Artificial Sequence: Synthetic oligonucleotide
  Antisense strand to SEQ ID NO: 843004
acuauaaccauguucguga

SEQ ID NO: 843006 - RNA, 19 nt, Artificial Sequence
  Description of Artificial Sequence: Synthetic oligonucleotide
  Sense strand starting at position 1685 of SEQ ID NO: 588113
caggccuacccuggagaua

SEQ ID NO: 843007 - RNA, 19 nt, Artificial Sequence
  Description of Artificial Sequence: Synthetic oligonucleotide
  Antisense strand to SEQ ID NO: 843006
uaucuccaggguaggccug

SEQ ID NO: 843008 - RNA, 19 nt, Artificial Sequence
  Description of Artificial Sequence: Synthetic oligonucleotide
  Sense strand starting at position 1740 of SEQ ID NO: 588113
auaugugagucacacaaau

SEQ ID NO: 843009 - RNA, 19 nt, Artificial Sequence
  Description of Artificial Sequence: Synthetic oligonucleotide
  Antisense strand to SEQ ID NO: 843008
auuugugugacucacauau

SEQ ID NO: 843010 - RNA, 19 nt, Artificial Sequence
  Description of Artificial Sequence: Synthetic oligonucleotide
  Sense strand starting at position 1977 of SEQ ID NO: 588113
gauggagguugcuaaauga

SEQ ID NO: 843011 - RNA, 19 nt, Artificial Sequence
  Description of Artificial Sequence: Synthetic oligonucleotide
  Antisense strand to SEQ ID NO: 843010
ucauuuagcaaccuccauc

SEQ ID NO: 843012 - RNA, 19 nt, Artificial Sequence
  Description of Artificial Sequence: Synthetic oligonucleotide
  Sense strand starting at position 2000 of SEQ ID NO: 588113
guggcugugcaauugcaua

SEQ ID NO: 843013 - RNA, 19 nt, Artificial Sequence
  Description of Artificial Sequence: Synthetic oligonucleotide
  Antisense strand to SEQ ID NO: 843012
uaugcaauugcacagccac

SEQ ID NO: 843014 - RNA, 19 nt, Artificial Sequence
  Description of Artificial Sequence: Synthetic oligonucleotide
  Sense strand starting at position 2029 of SEQ ID NO: 588113
acaguaaagucugucucau

SEQ ID NO: 843015 - RNA, 19 nt, Artificial Sequence
  Description of Artificial Sequence: Synthetic oligonucleotide
  Antisense strand to SEQ ID NO: 843014
augagacagacuuuacugu

SEQ ID NO: 843016 - RNA, 19 nt, Artificial Sequence
  Description of Artificial Sequence: Synthetic oligonucleotide
  Sense strand starting at position 2031 of SEQ ID NO: 588113
aguaaagucugucucauca

SEQ ID NO: 843017 - RNA, 19 nt, Artificial Sequence
  Description of Artificial Sequence: Synthetic oligonucleotide
  Antisense strand to SEQ ID NO: 843016
ugaugagacagacuuuacu

SEQ ID NO: 843018 - RNA, 19 nt, Artificial Sequence
  Description of Artificial Sequence: Synthetic oligonucleotide
  Sense strand starting at position 2084 of SEQ ID NO: 588113
gcaugcaguguugugugau

SEQ ID NO: 843019 - RNA, 19 nt, Artificial Sequence
  Description of Artificial Sequence: Synthetic oligonucleotide
  Antisense strand to SEQ ID NO: 843018
aucacacaacacugcaugc

SEQ ID NO: 843020 - RNA, 19 nt, Artificial Sequence
  Description of Artificial Sequence: Synthetic oligonucleotide
  Sense strand starting at position 2137 of SEQ ID NO: 588113
uguagucuauccucucaga

SEQ ID NO: 843021 - RNA, 19 nt, Artificial Sequence
  Description of Artificial Sequence: Synthetic oligonucleotide
  Antisense strand to SEQ ID NO: 843020
ucugagaggauagacuaca

SEQ ID NO: 843022 - RNA, 19 nt, Artificial Sequence
  Description of Artificial Sequence: Synthetic oligonucleotide
  Sense strand starting at position 2201 of SEQ ID NO: 588113
cucguugccaguugaauaa

SEQ ID NO: 843023 - RNA, 19 nt, Artificial Sequence
  Description of Artificial Sequence: Synthetic oligonucleotide
  Antisense strand to SEQ ID NO: 843022
uuauucaacuggcaacgag

SEQ ID NO: 843024 - RNA, 19 nt, Artificial Sequence
  Description of Artificial Sequence: Synthetic oligonucleotide
  Sense strand starting at position 2212 of SEQ ID NO: 588113
uugaauaaugcucacagca

SEQ ID NO: 843025 - RNA, 19 nt, Artificial Sequence
  Description of Artificial Sequence: Synthetic oligonucleotide
  Antisense strand to SEQ ID NO: 843024
ugcugugagcauuauucaa

SEQ ID NO: 843026 - RNA, 19 nt, Artificial Sequence
  Description of Artificial Sequence: Synthetic oligonucleotide
  Sense strand starting at position 2239 of SEQ ID NO: 588113
aggacuagauucuaccuca

SEQ ID NO: 843027 - RNA, 19 nt, Artificial Sequence
  Description of Artificial Sequence: Synthetic oligonucleotide
  Antisense strand to SEQ ID NO: 843026
ugagguagaaucuaguccu

SEQ ID NO: 843028 - RNA, 19 nt, Artificial Sequence
  Description of Artificial Sequence: Synthetic oligonucleotide
  Sense strand starting at position 2378 of SEQ ID NO: 588113
uccaccauauguguaguua

SEQ ID NO: 843029 - RNA, 19 nt, Artificial Sequence
  Description of Artificial Sequence: Synthetic oligonucleotide
  Antisense strand to SEQ ID NO: 843028
uaacuacacauauggugga

SEQ ID NO: 843030 - RNA, 19 nt, Artificial Sequence
  Description of Artificial Sequence: Synthetic oligonucleotide
  Sense strand starting at position 2389 of SEQ ID NO: 588113
uguaguuacuuccuacacu

SEQ ID NO: 843031 - RNA, 19 nt, Artificial Sequence
  Description of Artificial Sequence: Synthetic oligonucleotide
  Antisense strand to SEQ ID NO: 843030
aguguaggaaguaacuaca

SEQ ID NO: 843032 - RNA, 19 nt, Artificial Sequence
  Description of Artificial Sequence: Synthetic oligonucleotide
  Sense strand starting at position 2531 of SEQ ID NO: 588113
cgcauccuuucccuaaguu

SEQ ID NO: 843033 - RNA, 19 nt, Artificial Sequence
  Description of Artificial Sequence: Synthetic oligonucleotide
  Antisense strand to SEQ ID NO: 843032
aacuuagggaaaggaugcg

SEQ ID NO: 843034 - RNA, 19 nt, Artificial Sequence
  Description of Artificial Sequence: Synthetic oligonucleotide
  Sense strand starting at position 2598 of SEQ ID NO: 588113
gcagcugaaccuuaugaaa

SEQ ID NO: 843035 - RNA, 19 nt, Artificial Sequence
  Description of Artificial Sequence: Synthetic oligonucleotide
  Antisense strand to SEQ ID NO: 843034
uuucauaagguucagcugc

SEQ ID NO: 843036 - RNA, 19 nt, Artificial Sequence
  Description of Artificial Sequence: Synthetic oligonucleotide
  Sense strand starting at position 2657 of SEQ ID NO: 588113
ccuugaugcgugggcuaca

SEQ ID NO: 843037 - RNA, 19 nt, Artificial Sequence
  Description of Artificial Sequence: Synthetic oligonucleotide
  Antisense strand to SEQ ID NO: 843036
uguagcccacgcaucaagg

SEQ ID NO: 843038 - RNA, 19 nt, Artificial Sequence
  Description of Artificial Sequence: Synthetic oligonucleotide
  Sense strand starting at position 2709 of SEQ ID NO: 588113
caugaauuuccguguacau

SEQ ID NO: 843039 - RNA, 19 nt, Artificial Sequence
  Description of Artificial Sequence: Synthetic oligonucleotide
  Antisense strand to SEQ ID NO: 843038
auguacacggaaauucaug

SEQ ID NO: 843040 - RNA, 19 nt, Artificial Sequence
  Description of Artificial Sequence: Synthetic oligonucleotide
  Sense strand starting at position 2719 of SEQ ID NO: 588113
cguguacaucuccagcaga

SEQ ID NO: 843041 - RNA, 19 nt, Artificial Sequence
  Description of Artificial Sequence: Synthetic oligonucleotide
  Antisense strand to SEQ ID NO: 843040
ucugcuggagauguacacg

SEQ ID NO: 843042 - RNA, 19 nt, Artificial Sequence
  Description of Artificial Sequence: Synthetic oligonucleotide
  Sense strand starting at position 2903 of SEQ ID NO: 588113
aggguagauuuagauaauu

SEQ ID NO: 843043 - RNA, 19 nt, Artificial Sequence
  Description of Artificial Sequence: Synthetic oligonucleotide
  Antisense strand to SEQ ID NO: 843042
aauuaucuaaaucuacccu

SEQ ID NO: 843044 - RNA, 19 nt, Artificial Sequence
  Description of Artificial Sequence: Synthetic oligonucleotide
  Sense strand starting at position 3046 of SEQ ID NO: 588113
ucucuucuccagcaaugga

SEQ ID NO: 843045 - RNA, 19 nt, Artificial Sequence
  Description of Artificial Sequence: Synthetic oligonucleotide
  Antisense strand to SEQ ID NO: 843044
uccauugcuggagaagaga

SEQ ID NO: 843046 - RNA, 19 nt, Artificial Sequence
  Description of Artificial Sequence: Synthetic oligonucleotide
  Sense strand starting at position 3089 of SEQ ID NO: 588113
auagaaggcuguuucguuu

SEQ ID NO: 843047 - RNA, 19 nt, Artificial Sequence
  Description of Artificial Sequence: Synthetic oligonucleotide
  Antisense strand to SEQ ID NO: 843046
aaacgaaacagccuucuau

SEQ ID NO: 843048 - RNA, 19 nt, Artificial Sequence
  Description of Artificial Sequence: Synthetic oligonucleotide
  Sense strand starting at position 3095 of SEQ ID NO: 588113
ggcuguuucguuuacauug

SEQ ID NO: 843049 - RNA, 19 nt, Artificial Sequence
  Description of Artificial Sequence: Synthetic oligonucleotide
  Antisense strand to SEQ ID NO: 843048
caauguaaacgaaacagcc

SEQ ID NO: 843050 - RNA, 19 nt, Artificial Sequence
  Description of Artificial Sequence: Synthetic oligonucleotide
  Sense strand starting at position 3366 of SEQ ID NO: 588113
gucugaucuucuuucuaga

SEQ ID NO: 843051 - RNA, 19 nt, Artificial Sequence
  Description of Artificial Sequence: Synthetic oligonucleotide
  Antisense strand to SEQ ID NO: 843050
ucuagaaagaagaucagac

SEQ ID NO: 843052 - RNA, 19 nt, Artificial Sequence
  Description of Artificial Sequence: Synthetic oligonucleotide
  Sense strand starting at position 3426 of SEQ ID NO: 588113
uuucuugugcuccaguguu

SEQ ID NO: 843053 - RNA, 19 nt, Artificial Sequence
  Description of Artificial Sequence: Synthetic oligonucleotide
  Antisense strand to SEQ ID NO: 843052
aacacuggagcacaagaaa

SEQ ID NO: 843054 - RNA, 19 nt, Artificial Sequence
  Description of Artificial Sequence: Synthetic oligonucleotide
  Sense strand starting at position 3428 of SEQ ID NO: 588113
ucuugugcuccaguguuua

SEQ ID NO: 843055 - RNA, 19 nt, Artificial Sequence
  Description of Artificial Sequence: Synthetic oligonucleotide
  Antisense strand to SEQ ID NO: 843054
uaaacacuggagcacaaga

SEQ ID NO: 843056 - RNA, 19 nt, Artificial Sequence
  Description of Artificial Sequence: Synthetic oligonucleotide
  Sense strand starting at position 3601 of SEQ ID NO: 588113
gugccacucucuuccuuua

SEQ ID NO: 843057 - RNA, 19 nt, Artificial Sequence
  Description of Artificial Sequence: Synthetic oligonucleotide
  Antisense strand to SEQ ID NO: 843056
uaaaggaagagaguggcac

SEQ ID NO: 843058 - RNA, 19 nt, Artificial Sequence
  Description of Artificial Sequence: Synthetic oligonucleotide
  Sense strand starting at position 3715 of SEQ ID NO: 588113
aagggaauggcugguuagu

SEQ ID NO: 843059 - RNA, 19 nt, Artificial Sequence
  Description of Artificial Sequence: Synthetic oligonucleotide
  Antisense strand to SEQ ID NO: 843058
acuaaccagccauucccuu

SEQ ID NO: 843060 - RNA, 19 nt, Artificial Sequence
  Description of Artificial Sequence: Synthetic oligonucleotide
  Sense strand starting at position 3951 of SEQ ID NO: 588113
ggccaauagccuugcuuga

SEQ ID NO: 843061 - RNA, 19 nt, Artificial Sequence
  Description of Artificial Sequence: Synthetic oligonucleotide
  Antisense strand to SEQ ID NO: 843060
ucaagcaaggcuauuggcc

SEQ ID NO: 843062 - RNA, 19 nt, Artificial Sequence
  Description of Artificial Sequence: Synthetic oligonucleotide
  Sense strand starting at position 274 of SEQ ID NO: 588114
cugggcaauuccuccaaca

SEQ ID NO: 843063 - RNA, 19 nt, Artificial Sequence
  Description of Artificial Sequence: Synthetic oligonucleotide
  Antisense strand to SEQ ID NO: 843062
uguuggaggaauugcccag

SEQ ID NO: 843064 - RNA, 19 nt, Artificial Sequence
  Description of Artificial Sequence: Synthetic oligonucleotide
  Sense strand starting at position 276 of SEQ ID NO: 588114
gggcaauuccuccaacaau

SEQ ID NO: 843065 - RNA, 19 nt, Artificial Sequence
  Description of Artificial Sequence: Synthetic oligonucleotide
  Antisense strand to SEQ ID NO: 843064
auuguuggaggaauugccc

SEQ ID NO: 843066 - RNA, 19 nt, Artificial Sequence
  Description of Artificial Sequence: Synthetic oligonucleotide
  Sense strand starting at position 311 of SEQ ID NO: 588114
ccagguucucuagagcaga

SEQ ID NO: 843067 - RNA, 19 nt, Artificial Sequence
  Description of Artificial Sequence: Synthetic oligonucleotide
  Antisense strand to SEQ ID NO: 843066
ucugcucuagagaaccugg

SEQ ID NO: 843068 - RNA, 19 nt, Artificial Sequence
  Description of Artificial Sequence: Synthetic oligonucleotide
  Sense strand starting at position 314 of SEQ ID NO: 588114
gguucucuagagcagacaa

SEQ ID NO: 843069 - RNA, 19 nt, Artificial Sequence
  Description of Artificial Sequence: Synthetic oligonucleotide
  Antisense strand to SEQ ID NO: 843068
uugucugcucuagagaacc

SEQ ID NO: 843070 - RNA, 19 nt, Artificial Sequence
  Description of Artificial Sequence: Synthetic oligonucleotide
  Sense strand starting at position 454 of SEQ ID NO: 588114
aacacuuuccgagggaaau

SEQ ID NO: 843071 - RNA, 19 nt, Artificial Sequence
  Description of Artificial Sequence: Synthetic oligonucleotide
  Antisense strand to SEQ ID NO: 843070
auuucccucggaaaguguu

SEQ ID NO: 843072 - RNA, 19 nt, Artificial Sequence
  Description of Artificial Sequence: Synthetic oligonucleotide
  Sense strand starting at position 455 of SEQ ID NO: 588114
acacuuuccgagggaaaug

SEQ ID NO: 843073 - RNA, 19 nt, Artificial Sequence
  Description of Artificial Sequence: Synthetic oligonucleotide
  Antisense strand to SEQ ID NO: 843072
cauuucccucggaaagugu

SEQ ID NO: 843074 - RNA, 19 nt, Artificial Sequence
  Description of Artificial Sequence: Synthetic oligonucleotide
  Sense strand starting at position 460 of SEQ ID NO: 588114
uuccgagggaaauguguuu

SEQ ID NO: 843075 - RNA, 19 nt, Artificial Sequence
  Description of Artificial Sequence: Synthetic oligonucleotide
  Antisense strand to SEQ ID NO: 843074
aaacacauuucccucggaa

SEQ ID NO: 843076 - RNA, 19 nt, Artificial Sequence
  Description of Artificial Sequence: Synthetic oligonucleotide
  Sense strand starting at position 466 of SEQ ID NO: 588114
gggaaauguguuugaugga

SEQ ID NO: 843077 - RNA, 19 nt, Artificial Sequence
  Description of Artificial Sequence: Synthetic oligonucleotide
  Antisense strand to SEQ ID NO: 843076
uccaucaaacacauuuccc

SEQ ID NO: 843078 - RNA, 19 nt, Artificial Sequence
  Description of Artificial Sequence: Synthetic oligonucleotide
  Sense strand starting at position 661 of SEQ ID NO: 588114
cuuugaguggcugagaguu

SEQ ID NO: 843079 - RNA, 19 nt, Artificial Sequence
  Description of Artificial Sequence: Synthetic oligonucleotide
  Antisense strand to SEQ ID NO: 843078
aacucucagccacucaaag

SEQ ID NO: 843080 - RNA, 19 nt, Artificial Sequence
  Description of Artificial Sequence: Synthetic oligonucleotide
  Sense strand starting at position 807 of SEQ ID NO: 588114
gaaugagagcuucggagcu

SEQ ID NO: 843081 - RNA, 19 nt, Artificial Sequence
  Description of Artificial Sequence: Synthetic oligonucleotide
  Antisense strand to SEQ ID NO: 843080
agcuccgaagcucucauuc

SEQ ID NO: 843082 - RNA, 19 nt, Artificial Sequence
  Description of Artificial Sequence: Synthetic oligonucleotide
  Sense strand starting at position 912 of SEQ ID NO: 588114
cagcuugaacucggacaau

SEQ ID NO: 843083 - RNA, 19 nt, Artificial Sequence
  Description of Artificial Sequence: Synthetic oligonucleotide
  Antisense strand to SEQ ID NO: 843082
auuguccgaguucaagcug

SEQ ID NO: 843084 - RNA, 19 nt, Artificial Sequence
  Description of Artificial Sequence: Synthetic oligonucleotide
  Sense strand starting at position 1428 of SEQ ID NO: 588114
gcgauaguggcguccaugu

SEQ ID NO: 843085 - RNA, 19 nt, Artificial Sequence
  Description of Artificial Sequence: Synthetic oligonucleotide
  Antisense strand to SEQ ID NO: 843084
acauggacgccacuaucgc

SEQ ID NO: 843086 - RNA, 19 nt, Artificial Sequence
  Description of Artificial Sequence: Synthetic oligonucleotide
  Sense strand starting at position 1657 of SEQ ID NO: 588114
uucccauuugcgcaucuua

SEQ ID NO: 843087 - RNA, 19 nt, Artificial Sequence
  Description of Artificial Sequence: Synthetic oligonucleotide
  Antisense strand to SEQ ID NO: 843086
uaagaugcgcaaaugggaa

SEQ ID NO: 843088 - RNA, 19 nt, Artificial Sequence
  Description of Artificial Sequence: Synthetic oligonucleotide
  Sense strand starting at position 1918 of SEQ ID NO: 588114
ucgaggaucggguggaaau

SEQ ID NO: 843089 - RNA, 19 nt, Artificial Sequence
  Description of Artificial Sequence: Synthetic oligonucleotide
  Antisense strand to SEQ ID NO: 843088
auuuccacccgauccucga

SEQ ID NO: 843090 - RNA, 19 nt, Artificial Sequence
  Description of Artificial Sequence: Synthetic oligonucleotide
  Sense strand starting at position 1928 of SEQ ID NO: 588114
gguggaaauccucagccca

SEQ ID NO: 843091 - RNA, 19 nt, Artificial Sequence
  Description of Artificial Sequence: Synthetic oligonucleotide
  Antisense strand to SEQ ID NO: 843090
ugggcugaggauuuccacc

SEQ ID NO: 843092 - RNA, 19 nt, Artificial Sequence
  Description of Artificial Sequence: Synthetic oligonucleotide
  Sense strand starting at position 2456 of SEQ ID NO: 588114
uugucuguugccguuaauc

SEQ ID NO: 843093 - RNA, 19 nt, Artificial Sequence
  Description of Artificial Sequence: Synthetic oligonucleotide
  Antisense strand to SEQ ID NO: 843092
gauuaacggcaacagacaa

SEQ ID NO: 843094 - RNA, 19 nt, Artificial Sequence
  Description of Artificial Sequence: Synthetic oligonucleotide
  Sense strand starting at position 2465 of SEQ ID NO: 588114
gccguuaaucguaggagcu

SEQ ID NO: 843095 - RNA, 19 nt, Artificial Sequence
  Description of Artificial Sequence: Synthetic oligonucleotide
  Antisense strand to SEQ ID NO: 843094
agcuccuacgauuaacggc

SEQ ID NO: 843096 - RNA, 19 nt, Artificial Sequence
  Description of Artificial Sequence: Synthetic oligonucleotide
  Sense strand starting at position 2471 of SEQ ID NO: 588114
aaucguaggagcuguaaga

SEQ ID NO: 843097 - RNA, 19 nt, Artificial Sequence
  Description of Artificial Sequence: Synthetic oligonucleotide
  Antisense strand to SEQ ID NO: 843096
ucuuacagcuccuacgauu

SEQ ID NO: 843098 - RNA, 19 nt, Artificial Sequence
  Description of Artificial Sequence: Synthetic oligonucleotide
  Sense strand starting at position 2481 of SEQ ID NO: 588114
gcuguaagaguuuguugaa

SEQ ID NO: 843099 - RNA, 19 nt, Artificial Sequence
  Description of Artificial Sequence: Synthetic oligonucleotide
  Antisense strand to SEQ ID NO: 843098
uucaacaaacucuuacagc

SEQ ID NO: 843100 - RNA, 19 nt, Artificial Sequence
  Description of Artificial Sequence: Synthetic oligonucleotide
  Sense strand starting at position 2482 of SEQ ID NO: 588114
cuguaagaguuuguugaac

SEQ ID NO: 843101 - RNA, 19 nt, Artificial Sequence
  Description of Artificial Sequence: Synthetic oligonucleotide
  Antisense strand to SEQ ID NO: 843100
guucaacaaacucuuacag

SEQ ID NO: 843102 - RNA, 19 nt, Artificial Sequence
  Description of Artificial Sequence: Synthetic oligonucleotide
  Sense strand starting at position 2500 of SEQ ID NO: 588114
cucuuugugcucucggcaa

SEQ ID NO: 843103 - RNA, 19 nt, Artificial Sequence
  Description of Artificial Sequence: Synthetic oligonucleotide
  Antisense strand to SEQ ID NO: 843102
uugccgagagcacaaagag

SEQ ID NO: 843104 - RNA, 19 nt, Artificial Sequence
  Description of Artificial Sequence: Synthetic oligonucleotide
  Sense strand starting at position 2690 of SEQ ID NO: 588114
agcuaauguauuggagagu

SEQ ID NO: 843105 - RNA, 19 nt, Artificial Sequence
  Description of Artificial Sequence: Synthetic oligonucleotide
  Antisense strand to SEQ ID NO: 843104
acucuccaauacauuagcu

SEQ ID NO: 843106 - RNA, 19 nt, Artificial Sequence
  Description of Artificial Sequence: Synthetic oligonucleotide
  Sense strand starting at position 2699 of SEQ ID NO: 588114
auuggagaguaauuggcau

SEQ ID NO: 843107 - RNA, 19 nt, Artificial Sequence
  Description of Artificial Sequence: Synthetic oligonucleotide
  Antisense strand to SEQ ID NO: 843106
augccaauuacucuccaau

SEQ ID NO: 843108 - RNA, 19 nt, Artificial Sequence
  Description of Artificial Sequence: Synthetic oligonucleotide
  Sense strand starting at position 2705 of SEQ ID NO: 588114
gaguaauuggcaugcagua

SEQ ID NO: 843109 - RNA, 19 nt, Artificial Sequence
  Description of Artificial Sequence: Synthetic oligonucleotide
  Antisense strand to SEQ ID NO: 843108
uacugcaugccaauuacuc

SEQ ID NO: 843110 - RNA, 19 nt, Artificial Sequence
  Description of Artificial Sequence: Synthetic oligonucleotide
  Sense strand starting at position 2751 of SEQ ID NO: 588114
guaguaguaucucauuuaa

SEQ ID NO: 843111 - RNA, 19 nt, Artificial Sequence
  Description of Artificial Sequence: Synthetic oligonucleotide
  Antisense strand to SEQ ID NO: 843110
uuaaaugagauacuacuac

SEQ ID NO: 843112 - RNA, 19 nt, Artificial Sequence
  Description of Artificial Sequence: Synthetic oligonucleotide
  Sense strand starting at position 2825 of SEQ ID NO: 588114
guuggaggauuagaacaau

SEQ ID NO: 843113 - RNA, 19 nt, Artificial Sequence
  Description of Artificial Sequence: Synthetic oligonucleotide
  Antisense strand to SEQ ID NO: 843112
auuguucuaauccuccaac

SEQ ID NO: 843114 - RNA, 19 nt, Artificial Sequence
  Description of Artificial Sequence: Synthetic oligonucleotide
  Sense strand starting at position 2860 of SEQ ID NO: 588114
gguaacuuugggugaguca

SEQ ID NO: 843115 - RNA, 19 nt, Artificial Sequence
  Description of Artificial Sequence: Synthetic oligonucleotide
  Antisense strand to SEQ ID NO: 843114
ugacucacccaaaguuacc

SEQ ID NO: 843116 - RNA, 19 nt, Artificial Sequence
  Description of Artificial Sequence: Synthetic oligonucleotide
  Sense strand starting at position 2903 of SEQ ID NO: 588114
ucaucaguuguugaucaua

SEQ ID NO: 843117 - RNA, 19 nt, Artificial Sequence
  Description of Artificial Sequence: Synthetic oligonucleotide
  Antisense strand to SEQ ID NO: 843116
uaugaucaacaacugauga

SEQ ID NO: 843118 - RNA, 19 nt, Artificial Sequence
  Description of Artificial Sequence: Synthetic oligonucleotide
  Sense strand starting at position 2905 of SEQ ID NO: 588114
aucaguuguugaucauaca

SEQ ID NO: 843119 - RNA, 19 nt, Artificial Sequence
  Description of Artificial Sequence: Synthetic oligonucleotide
  Antisense strand to SEQ ID NO: 843118
uguaugaucaacaacugau

SEQ ID NO: 843120 - RNA, 19 nt, Artificial Sequence
  Description of Artificial Sequence: Synthetic oligonucleotide
  Sense strand starting at position 3022 of SEQ ID NO: 588114
uagggccacugguuagauu

SEQ ID NO: 843121 - RNA, 19 nt, Artificial Sequence
  Description of Artificial Sequence: Synthetic oligonucleotide
  Antisense strand to SEQ ID NO: 843120
aaucuaaccaguggcccua

SEQ ID NO: 843122 - RNA, 19 nt, Artificial Sequence
  Description of Artificial Sequence: Synthetic oligonucleotide
  Sense strand starting at position 3029 of SEQ ID NO: 588114
acugguuagauugggcaga

SEQ ID NO: 843123 - RNA, 19 nt, Artificial Sequence
  Description of Artificial Sequence: Synthetic oligonucleotide
  Antisense strand to SEQ ID NO: 843122
ucugcccaaucuaaccagu

SEQ ID NO: 843124 - RNA, 19 nt, Artificial Sequence
  Description of Artificial Sequence: Synthetic oligonucleotide
  Sense strand starting at position 3099 of SEQ ID NO: 588114
gccaucagcccagagacau

SEQ ID NO: 843125 - RNA, 19 nt, Artificial Sequence
  Description of Artificial Sequence: Synthetic oligonucleotide
  Antisense strand to SEQ ID NO: 843124
augucucugggcugauggc

SEQ ID NO: 843126 - RNA, 19 nt, Artificial Sequence
  Description of Artificial Sequence: Synthetic oligonucleotide
  Sense strand starting at position 3309 of SEQ ID NO: 588114
ccuggacauuucugaaaug

SEQ ID NO: 843127 - RNA, 19 nt, Artificial Sequence
  Description of Artificial Sequence: Synthetic oligonucleotide
  Antisense strand to SEQ ID NO: 843126
cauuucagaaauguccagg

SEQ ID NO: 843128 - RNA, 19 nt, Artificial Sequence
  Description of Artificial Sequence: Synthetic oligonucleotide
  Sense strand starting at position 3310 of SEQ ID NO: 588114
cuggacauuucugaaauga

SEQ ID NO: 843129 - RNA, 19 nt, Artificial Sequence
  Description of Artificial Sequence: Synthetic oligonucleotide
  Antisense strand to SEQ ID NO: 843128
ucauuucagaaauguccag

SEQ ID NO: 843130 - RNA, 19 nt, Artificial Sequence
  Description of Artificial Sequence: Synthetic oligonucleotide
  Sense strand starting at position 3536 of SEQ ID NO: 588114
ggacgaucacuucggauag

SEQ ID NO: 843131 - RNA, 19 nt, Artificial Sequence
  Description of Artificial Sequence: Synthetic oligonucleotide
  Antisense strand to SEQ ID NO: 843130
cuauccgaagugaucgucc

SEQ ID NO: 843132 - RNA, 19 nt, Artificial Sequence
  Description of Artificial Sequence: Synthetic oligonucleotide
  Sense strand starting at position 3540 of SEQ ID NO: 588114
gaucacuucggauagcuua

SEQ ID NO: 843133 - RNA, 19 nt, Artificial Sequence
  Description of Artificial Sequence: Synthetic oligonucleotide
  Antisense strand to SEQ ID NO: 843132
uaagcuauccgaagugauc

SEQ ID NO: 843134 - RNA, 19 nt, Artificial Sequence
  Description of Artificial Sequence: Synthetic oligonucleotide
  Sense strand starting at position 3618 of SEQ ID NO: 588114
agagucaguuccucucaac

SEQ ID NO: 843135 - RNA, 19 nt, Artificial Sequence
  Description of Artificial Sequence: Synthetic oligonucleotide
  Antisense strand to SEQ ID NO: 843134
guugagaggaacugacucu

SEQ ID NO: 843136 - RNA, 19 nt, Artificial Sequence
  Description of Artificial Sequence: Synthetic oligonucleotide
  Sense strand starting at position 3694 of SEQ ID NO: 588114
gcccuuucucccuggaacu

SEQ ID NO: 843137 - RNA, 19 nt, Artificial Sequence
  Description of Artificial Sequence: Synthetic oligonucleotide
  Antisense strand to SEQ ID NO: 843136
aguuccagggagaaagggc

SEQ ID NO: 843138 - RNA, 19 nt, Artificial Sequence
  Description of Artificial Sequence: Synthetic oligonucleotide
  Sense strand starting at position 3839 of SEQ ID NO: 588114
caaucauugagguggaugu

SEQ ID NO: 843139 - RNA, 19 nt, Artificial Sequence
  Description of Artificial Sequence: Synthetic oligonucleotide
  Antisense strand to SEQ ID NO: 843138
acauccaccucaaugauug

SEQ ID NO: 843140 - RNA, 19 nt, Artificial Sequence
  Description of Artificial Sequence: Synthetic oligonucleotide
  Sense strand starting at position 3951 of SEQ ID NO: 588114
ggcucaguguuacugauuu

SEQ ID NO: 843141 - RNA, 19 nt, Artificial Sequence
  Description of Artificial Sequence: Synthetic oligonucleotide
  Antisense strand to SEQ ID NO: 843140
aaaucaguaacacugagcc

SEQ ID NO: 843142 - RNA, 19 nt, Artificial Sequence
  Description of Artificial Sequence: Synthetic oligonucleotide
  Sense strand starting at position 249 of SEQ ID NO: 588116
uugguuugccuccauggau

SEQ ID NO: 843143 - RNA, 19 nt, Artificial Sequence
  Description of Artificial Sequence: Synthetic oligonucleotide
  Antisense strand to SEQ ID NO: 843142
auccauggaggcaaaccaa

SEQ ID NO: 843144 - RNA, 19 nt, Artificial Sequence
  Description of Artificial Sequence: Synthetic oligonucleotide
  Sense strand starting at position 408 of SEQ ID NO: 588116
aagaguaaucacuguucug

SEQ ID NO: 843145 - RNA, 19 nt, Artificial Sequence
  Description of Artificial Sequence: Synthetic oligonucleotide
  Antisense strand to SEQ ID NO: 843144
cagaacagugauuacucuu

SEQ ID NO: 843146 - RNA, 19 nt, Artificial Sequence
  Description of Artificial Sequence: Synthetic oligonucleotide
  Sense strand starting at position 555 of SEQ ID NO: 588116
uggucaauuucucauagaa

SEQ ID NO: 843147 - RNA, 19 nt, Artificial Sequence
  Description of Artificial Sequence: Synthetic oligonucleotide
  Antisense strand to SEQ ID NO: 843146
uucuaugagaaauugacca

SEQ ID NO: 843148 - RNA, 19 nt, Artificial Sequence
  Description of Artificial Sequence: Synthetic oligonucleotide
  Sense strand starting at position 699 of SEQ ID NO: 588116
uugggcuuucugugaaaga

SEQ ID NO: 843149 - RNA, 19 nt, Artificial Sequence
  Description of Artificial Sequence: Synthetic oligonucleotide
  Antisense strand to SEQ ID NO: 843148
ucuuucacagaaagcccaa

SEQ ID NO: 843150 - RNA, 19 nt, Artificial Sequence
  Description of Artificial Sequence: Synthetic oligonucleotide
  Sense strand starting at position 802 of SEQ ID NO: 588116
ugaugaaaggguuguuucu

SEQ ID NO: 843151 - RNA, 19 nt, Artificial Sequence
  Description of Artificial Sequence: Synthetic oligonucleotide
  Antisense strand to SEQ ID NO: 843150
agaaacaacccuuucauca

SEQ ID NO: 843152 - RNA, 19 nt, Artificial Sequence
  Description of Artificial Sequence: Synthetic oligonucleotide
  Sense strand starting at position 804 of SEQ ID NO: 588116
augaaaggguuguuucuuu

SEQ ID NO: 843153 - RNA, 19 nt, Artificial Sequence
  Description of Artificial Sequence: Synthetic oligonucleotide
  Antisense strand to SEQ ID NO: 843152
aaagaaacaacccuuucau

SEQ ID NO: 843154 - RNA, 19 nt, Artificial Sequence
  Description of Artificial Sequence: Synthetic oligonucleotide
  Sense strand starting at position 884 of SEQ ID NO: 588116
uaaggagagaugugaguuu

SEQ ID NO: 843155 - RNA, 19 nt, Artificial Sequence
  Description of Artificial Sequence: Synthetic oligonucleotide
  Antisense strand to SEQ ID NO: 843154
aaacucacaucucuccuua

SEQ ID NO: 843156 - RNA, 19 nt, Artificial Sequence
  Description of Artificial Sequence: Synthetic oligonucleotide
  Sense strand starting at position 1060 of SEQ ID NO: 588116
aggugagauuucuagggua

SEQ ID NO: 843157 - RNA, 19 nt, Artificial Sequence
  Description of Artificial Sequence: Synthetic oligonucleotide
  Antisense strand to SEQ ID NO: 843156
uacccuagaaaucucaccu

SEQ ID NO: 843158 - RNA, 19 nt, Artificial Sequence
  Description of Artificial Sequence: Synthetic oligonucleotide
  Sense strand starting at position 1280 of SEQ ID NO: 588116
gccagaugcauuugugguu

SEQ ID NO: 843159 - RNA, 19 nt, Artificial Sequence
  Description of Artificial Sequence: Synthetic oligonucleotide
  Antisense strand to SEQ ID NO: 843158
aaccacaaaugcaucuggc

SEQ ID NO: 843160 - RNA, 19 nt, Artificial Sequence
  Description of Artificial Sequence: Synthetic oligonucleotide
  Sense strand starting at position 1281 of SEQ ID NO: 588116
ccagaugcauuugugguua

SEQ ID NO: 843161 - RNA, 19 nt, Artificial Sequence
  Description of Artificial Sequence: Synthetic oligonucleotide
  Antisense strand to SEQ ID NO: 843160
uaaccacaaaugcaucugg

SEQ ID NO: 843162 - RNA, 19 nt, Artificial Sequence
  Description of Artificial Sequence: Synthetic oligonucleotide
  Sense strand starting at position 1300 of SEQ ID NO: 588116
acccucugucuacagauga

SEQ ID NO: 843163 - RNA, 19 nt, Artificial Sequence
  Description of Artificial Sequence: Synthetic oligonucleotide
  Antisense strand to SEQ ID NO: 843162
ucaucuguagacagagggu

SEQ ID NO: 843164 - RNA, 19 nt, Artificial Sequence
  Description of Artificial Sequence: Synthetic oligonucleotide
  Sense strand starting at position 1316 of SEQ ID NO: 588116
ugauucugugccuaugaac

SEQ ID NO: 843165 - RNA, 19 nt, Artificial Sequence
  Description of Artificial Sequence: Synthetic oligonucleotide
  Antisense strand to SEQ ID NO: 843164
guucauaggcacagaauca

SEQ ID NO: 843166 - RNA, 19 nt, Artificial Sequence
  Description of Artificial Sequence: Synthetic oligonucleotide
  Sense strand starting at position 1435 of SEQ ID NO: 588116
uggugaguuccacagcaug

SEQ ID NO: 843167 - RNA, 19 nt, Artificial Sequence
  Description of Artificial Sequence: Synthetic oligonucleotide
  Antisense strand to SEQ ID NO: 843166
caugcuguggaacucacca

SEQ ID NO: 843168 - RNA, 19 nt, Artificial Sequence
  Description of Artificial Sequence: Synthetic oligonucleotide
  Sense strand starting at position 1480 of SEQ ID NO: 588116
aagacugagucucuugaac

SEQ ID NO: 843169 - RNA, 19 nt, Artificial Sequence
  Description of Artificial Sequence: Synthetic oligonucleotide
  Antisense strand to SEQ ID NO: 843168
guucaagagacucagucuu

SEQ ID NO: 843170 - RNA, 19 nt, Artificial Sequence
  Description of Artificial Sequence: Synthetic oligonucleotide
  Sense strand starting at position 1566 of SEQ ID NO: 588116
gcacacagauucucacaga

SEQ ID NO: 843171 - RNA, 19 nt, Artificial Sequence
  Description of Artificial Sequence: Synthetic oligonucleotide
  Antisense strand to SEQ ID NO: 843170
ucugugagaaucugugugc

SEQ ID NO: 843172 - RNA, 19 nt, Artificial Sequence
  Description of Artificial Sequence: Synthetic oligonucleotide
  Sense strand starting at position 1639 of SEQ ID NO: 588116
gcacuauaugugcaggacu

SEQ ID NO: 843173 - RNA, 19 nt, Artificial Sequence
  Description of Artificial Sequence: Synthetic oligonucleotide
  Antisense strand to SEQ ID NO: 843172
aguccugcacauauagugc

SEQ ID NO: 843174 - RNA, 19 nt, Artificial Sequence
  Description of Artificial Sequence: Synthetic oligonucleotide
  Sense strand starting at position 1641 of SEQ ID NO: 588116
acuauaugugcaggacuga

SEQ ID NO: 843175 - RNA, 19 nt, Artificial Sequence
  Description of Artificial Sequence: Synthetic oligonucleotide
  Antisense strand to SEQ ID NO: 843174
ucaguccugcacauauagu

SEQ ID NO: 843176 - RNA, 19 nt, Artificial Sequence
  Description of Artificial Sequence: Synthetic oligonucleotide
  Sense strand starting at position 1879 of SEQ ID NO: 588116
gaagauaagucagcagacu

SEQ ID NO: 843177 - RNA, 19 nt, Artificial Sequence
  Description of Artificial Sequence: Synthetic oligonucleotide
  Antisense strand to SEQ ID NO: 843176
agucugcugacuuaucuuc

SEQ ID NO: 843178 - RNA, 19 nt, Artificial Sequence
  Description of Artificial Sequence: Synthetic oligonucleotide
  Sense strand starting at position 2014 of SEQ ID NO: 588116
gacggaagacugugauguc

SEQ ID NO: 843179 - RNA, 19 nt, Artificial Sequence
  Description of Artificial Sequence: Synthetic oligonucleotide
  Antisense strand to SEQ ID NO: 843178
gacaucacagucuuccguc

SEQ ID NO: 843180 - RNA, 19 nt, Artificial Sequence
  Description of Artificial Sequence: Synthetic oligonucleotide
  Sense strand starting at position 2219 of SEQ ID NO: 588116
ugaggugaaucaguuagca

SEQ ID NO: 843181 - RNA, 19 nt, Artificial Sequence
  Description of Artificial Sequence: Synthetic oligonucleotide
  Antisense strand to SEQ ID NO: 843180
ugcuaacugauucaccuca

SEQ ID NO: 843182 - RNA, 19 nt, Artificial Sequence
  Description of Artificial Sequence: Synthetic oligonucleotide
  Sense strand starting at position 2221 of SEQ ID NO: 588116
aggugaaucaguuagcauu

SEQ ID NO: 843183 - RNA, 19 nt, Artificial Sequence
  Description of Artificial Sequence: Synthetic oligonucleotide
  Antisense strand to SEQ ID NO: 843182
aaugcuaacugauucaccu

SEQ ID NO: 843184 - RNA, 19 nt, Artificial Sequence
  Description of Artificial Sequence: Synthetic oligonucleotide
  Sense strand starting at position 2228 of SEQ ID NO: 588116
ucaguuagcauugauguga

SEQ ID NO: 843185 - RNA, 19 nt, Artificial Sequence
  Description of Artificial Sequence: Synthetic oligonucleotide
  Antisense strand to SEQ ID NO: 843184
ucacaucaaugcuaacuga

SEQ ID NO: 843186 - RNA, 19 nt, Artificial Sequence
  Description of Artificial Sequence: Synthetic oligonucleotide
  Sense strand starting at position 2239 of SEQ ID NO: 588116
ugaugugaaucagcuacca

SEQ ID NO: 843187 - RNA, 19 nt, Artificial Sequence
  Description of Artificial Sequence: Synthetic oligonucleotide
  Antisense strand to SEQ ID NO: 843186
ugguagcugauucacauca

SEQ ID NO: 843188 - RNA, 19 nt, Artificial Sequence
  Description of Artificial Sequence: Synthetic oligonucleotide
  Sense strand starting at position 2721 of SEQ ID NO: 588116
gcaucugaagucugagaug

SEQ ID NO: 843189 - RNA, 19 nt, Artificial Sequence
  Description of Artificial Sequence: Synthetic oligonucleotide
  Antisense strand to SEQ ID NO: 843188
caucucagacuucagaugc

SEQ ID NO: 843190 - RNA, 19 nt, Artificial Sequence
  Description of Artificial Sequence: Synthetic oligonucleotide
  Sense strand starting at position 2733 of SEQ ID NO: 588116
ugagaugagugcucuaauu

SEQ ID NO: 843191 - RNA, 19 nt, Artificial Sequence
  Description of Artificial Sequence: Synthetic oligonucleotide
  Antisense strand to SEQ ID NO: 843190
aauuagagcacucaucuca

SEQ ID NO: 843192 - RNA, 19 nt, Artificial Sequence
  Description of Artificial Sequence: Synthetic oligonucleotide
  Sense strand starting at position 2801 of SEQ ID NO: 588116
guccucugccaucaagaaa

SEQ ID NO: 843193 - RNA, 19 nt, Artificial Sequence
  Description of Artificial Sequence: Synthetic oligonucleotide
  Antisense strand to SEQ ID NO: 843192
uuucuugauggcagaggac

SEQ ID NO: 843194 - RNA, 19 nt, Artificial Sequence
  Description of Artificial Sequence: Synthetic oligonucleotide
  Sense strand starting at position 2832 of SEQ ID NO: 588116
uugccuugaguagagacau

SEQ ID NO: 843195 - RNA, 19 nt, Artificial Sequence
  Description of Artificial Sequence: Synthetic oligonucleotide
  Antisense strand to SEQ ID NO: 843194
augucucuacucaaggcaa

SEQ ID NO: 843196 - RNA, 19 nt, Artificial Sequence
  Description of Artificial Sequence: Synthetic oligonucleotide
  Sense strand starting at position 2847 of SEQ ID NO: 588116
acaucagugucaccucaga

SEQ ID NO: 843197 - RNA, 19 nt, Artificial Sequence
  Description of Artificial Sequence: Synthetic oligonucleotide
  Antisense strand to SEQ ID NO: 843196
ucugaggugacacugaugu

SEQ ID NO: 843198 - RNA, 19 nt, Artificial Sequence
  Description of Artificial Sequence: Synthetic oligonucleotide
  Sense strand starting at position 2886 of SEQ ID NO: 588116
cuaagucuaacagggaguu

SEQ ID NO: 843199 - RNA, 19 nt, Artificial Sequence
  Description of Artificial Sequence: Synthetic oligonucleotide
  Antisense strand to SEQ ID NO: 843198
aacucccuguuagacuuag

SEQ ID NO: 843200 - RNA, 19 nt, Artificial Sequence
  Description of Artificial Sequence: Synthetic oligonucleotide
  Sense strand starting at position 3211 of SEQ ID NO: 588116
uggugagcagcugaaagau

SEQ ID NO: 843201 - RNA, 19 nt, Artificial Sequence
  Description of Artificial Sequence: Synthetic oligonucleotide
  Antisense strand to SEQ ID NO: 843200
aucuuucagcugcucacca

SEQ ID NO: 843202 - RNA, 19 nt, Artificial Sequence
  Description of Artificial Sequence: Synthetic oligonucleotide
  Sense strand starting at position 3449 of SEQ ID NO: 588116
ggaguuccucaaugacuga

SEQ ID NO: 843203 - RNA, 19 nt, Artificial Sequence
  Description of Artificial Sequence: Synthetic oligonucleotide
  Antisense strand to SEQ ID NO: 843202
ucagucauugaggaacucc

SEQ ID NO: 843204 - RNA, 19 nt, Artificial Sequence
  Description of Artificial Sequence: Synthetic oligonucleotide
  Sense strand starting at position 3462 of SEQ ID NO: 588116
gacugacuuggugguauca

SEQ ID NO: 843205 - RNA, 19 nt, Artificial Sequence
  Description of Artificial Sequence: Synthetic oligonucleotide
  Antisense strand to SEQ ID NO: 843204
ugauaccaccaagucaguc

SEQ ID NO: 843206 - RNA, 19 nt, Artificial Sequence
  Description of Artificial Sequence: Synthetic oligonucleotide
  Sense strand starting at position 3524 of SEQ ID NO: 588116
uguggaauaauuggaaugu

SEQ ID NO: 843207 - RNA, 19 nt, Artificial Sequence
  Description of Artificial Sequence: Synthetic oligonucleotide
  Antisense strand to SEQ ID NO: 843206
acauuccaauuauuccaca

SEQ ID NO: 843208 - RNA, 19 nt, Artificial Sequence
  Description of Artificial Sequence: Synthetic oligonucleotide
  Sense strand starting at position 3528 of SEQ ID NO: 588116
gaauaauuggaauguucug

SEQ ID NO: 843209 - RNA, 19 nt, Artificial Sequence
  Description of Artificial Sequence: Synthetic oligonucleotide
  Antisense strand to SEQ ID NO: 843208
cagaacauuccaauuauuc

SEQ ID NO: 843210 - RNA, 19 nt, Artificial Sequence
  Description of Artificial Sequence: Synthetic oligonucleotide
  Sense strand starting at position 3623 of SEQ ID NO: 588116
auugcucugcuugagaaug

SEQ ID NO: 843211 - RNA, 19 nt, Artificial Sequence
  Description of Artificial Sequence: Synthetic oligonucleotide
  Antisense strand to SEQ ID NO: 843210
cauucucaagcagagcaau

SEQ ID NO: 843212 - RNA, 19 nt, Artificial Sequence
  Description of Artificial Sequence: Synthetic oligonucleotide
  Sense strand starting at position 3628 of SEQ ID NO: 588116
ucugcuugagaaugaagaa

SEQ ID NO: 843213 - RNA, 19 nt, Artificial Sequence
  Description of Artificial Sequence: Synthetic oligonucleotide
  Antisense strand to SEQ ID NO: 843212
uucuucauucucaagcaga

SEQ ID NO: 843214 - RNA, 19 nt, Artificial Sequence
  Description of Artificial Sequence: Synthetic oligonucleotide
  Sense strand starting at position 3829 of SEQ ID NO: 588116
aggaguagguuugcaaaug

SEQ ID NO: 843215 - RNA, 19 nt, Artificial Sequence
  Description of Artificial Sequence: Synthetic oligonucleotide
  Antisense strand to SEQ ID NO: 843214
cauuugcaaaccuacuccu

SEQ ID NO: 843216 - RNA, 19 nt, Artificial Sequence
  Description of Artificial Sequence: Synthetic oligonucleotide
  Sense strand starting at position 3932 of SEQ ID NO: 588116
ugacuugagucaucuccac

SEQ ID NO: 843217 - RNA, 19 nt, Artificial Sequence
  Description of Artificial Sequence: Synthetic oligonucleotide
  Antisense strand to SEQ ID NO: 843216
guggagaugacucaaguca

SEQ ID NO: 843218 - RNA, 19 nt, Artificial Sequence
  Description of Artificial Sequence: Synthetic oligonucleotide
  Sense strand starting at position 3936 of SEQ ID NO: 588116
uugagucaucuccacaagu

SEQ ID NO: 843219 - RNA, 19 nt, Artificial Sequence
  Description of Artificial Sequence: Synthetic oligonucleotide
  Antisense strand to SEQ ID NO: 843218
acuuguggagaugacucaa

SEQ ID NO: 843220 - RNA, 19 nt, Artificial Sequence
  Description of Artificial Sequence: Synthetic oligonucleotide
  Sense strand starting at position 3949 of SEQ ID NO: 588116
acaaguucuuauguugaac

SEQ ID NO: 843221 - RNA, 19 nt, Artificial Sequence
  Description of Artificial Sequence: Synthetic oligonucleotide
  Antisense strand to SEQ ID NO: 843220
guucaacauaagaacuugu

SEQ ID NO: 843222 - RNA, 19 nt, Artificial Sequence
  Description of Artificial Sequence: Synthetic oligonucleotide
  Sense strand starting at position 10 of SEQ ID NO: 588117
ugggcuuugugggcaaaca

SEQ ID NO: 843223 - RNA, 19 nt, Artificial Sequence
  Description of Artificial Sequence: Synthetic oligonucleotide
  Antisense strand to SEQ ID NO: 843222
uguuugcccacaaagccca

SEQ ID NO: 843224 - RNA, 19 nt, Artificial Sequence
  Description of Artificial Sequence: Synthetic oligonucleotide
  Sense strand starting at position 136 of SEQ ID NO: 588117
ggguucuugggaugacgga

SEQ ID NO: 843225 - RNA, 19 nt, Artificial Sequence
  Description of Artificial Sequence: Synthetic oligonucleotide
  Antisense strand to SEQ ID NO: 843224
uccgucaucccaagaaccc

SEQ ID NO: 843226 - RNA, 19 nt, Artificial Sequence
  Description of Artificial Sequence: Synthetic oligonucleotide
  Sense strand starting at position 152 of SEQ ID NO: 588117
ggaugagacuaugugccaa

SEQ ID NO: 843227 - RNA, 19 nt, Artificial Sequence
  Description of Artificial Sequence: Synthetic oligonucleotide
  Antisense strand to SEQ ID NO: 843226
uuggcacauagucucaucc

SEQ ID NO: 843228 - RNA, 19 nt, Artificial Sequence
  Description of Artificial Sequence: Synthetic oligonucleotide
  Sense strand starting at position 377 of SEQ ID NO: 588117
ugcugacauuucccuguga

SEQ ID NO: 843229 - RNA, 19 nt, Artificial Sequence
  Description of Artificial Sequence: Synthetic oligonucleotide
  Antisense strand to SEQ ID NO: 843228
ucacagggaaaugucagca

SEQ ID NO: 843230 - RNA, 19 nt, Artificial Sequence
  Description of Artificial Sequence: Synthetic oligonucleotide
  Sense strand starting at position 443 of SEQ ID NO: 588117
gcuagaaacucuguccuca

SEQ ID NO: 843231 - RNA, 19 nt, Artificial Sequence
  Description of Artificial Sequence: Synthetic oligonucleotide
  Antisense strand to SEQ ID NO: 843230
ugaggacagaguuucuagc

SEQ ID NO: 843232 - RNA, 19 nt, Artificial Sequence
  Description of Artificial Sequence: Synthetic oligonucleotide
  Sense strand starting at position 456 of SEQ ID NO: 588117
uccucacucugaguaguua

SEQ ID NO: 843233 - RNA, 19 nt, Artificial Sequence
  Description of Artificial Sequence: Synthetic oligonucleotide
  Antisense strand to SEQ ID NO: 843232
uaacuacucagagugagga

SEQ ID NO: 843234 - RNA, 19 nt, Artificial Sequence
  Description of Artificial Sequence: Synthetic oligonucleotide
  Sense strand starting at position 457 of SEQ ID NO: 588117
ccucacucugaguaguuaa

SEQ ID NO: 843235 - RNA, 19 nt, Artificial Sequence
  Description of Artificial Sequence: Synthetic oligonucleotide
  Antisense strand to SEQ ID NO: 843234
uuaacuacucagagugagg

SEQ ID NO: 843236 - RNA, 19 nt, Artificial Sequence
  Description of Artificial Sequence: Synthetic oligonucleotide
  Sense strand starting at position 460 of SEQ ID NO: 588117
cacucugaguaguuaagga

SEQ ID NO: 843237 - RNA, 19 nt, Artificial Sequence
  Description of Artificial Sequence: Synthetic oligonucleotide
  Antisense strand to SEQ ID NO: 843236
uccuuaacuacucagagug

SEQ ID NO: 843238 - RNA, 19 nt, Artificial Sequence
  Description of Artificial Sequence: Synthetic oligonucleotide
  Sense strand starting at position 465 of SEQ ID NO: 588117
ugaguaguuaaggagcaga

SEQ ID NO: 843239 - RNA, 19 nt, Artificial Sequence
  Description of Artificial Sequence: Synthetic oligonucleotide
  Antisense strand to SEQ ID NO: 843238
ucugcuccuuaacuacuca

SEQ ID NO: 843240 - RNA, 19 nt, Artificial Sequence
  Description of Artificial Sequence: Synthetic oligonucleotide
  Sense strand starting at position 654 of SEQ ID NO: 588117
ugugucaaauaccuuauaa

SEQ ID NO: 843241 - RNA, 19 nt, Artificial Sequence
  Description of Artificial Sequence: Synthetic oligonucleotide
  Antisense strand to SEQ ID NO: 843240
uuauaagguauuugacaca

SEQ ID NO: 843242 - RNA, 19 nt, Artificial Sequence
  Description of Artificial Sequence: Synthetic oligonucleotide
  Sense strand starting at position 761 of SEQ ID NO: 588117
ugaggaagcugguuugaac

SEQ ID NO: 843243 - RNA, 19 nt, Artificial Sequence
  Description of Artificial Sequence: Synthetic oligonucleotide
  Antisense strand to SEQ ID NO: 843242
guucaaaccagcuuccuca

SEQ ID NO: 843244 - RNA, 19 nt, Artificial Sequence
  Description of Artificial Sequence: Synthetic oligonucleotide
  Sense strand starting at position 1121 of SEQ ID NO: 588117
uggacagugugaucuuaau

SEQ ID NO: 843245 - RNA, 19 nt, Artificial Sequence
  Description of Artificial Sequence: Synthetic oligonucleotide
  Antisense strand to SEQ ID NO: 843244
auuaagaucacacugucca

SEQ ID NO: 843246 - RNA, 19 nt, Artificial Sequence
  Description of Artificial Sequence: Synthetic oligonucleotide
  Sense strand starting at position 1127 of SEQ ID NO: 588117
gugugaucuuaaucacuuu

SEQ ID NO: 843247 - RNA, 19 nt, Artificial Sequence
  Description of Artificial Sequence: Synthetic oligonucleotide
  Antisense strand to SEQ ID NO: 843246
aaagugauuaagaucacac

SEQ ID NO: 843248 - RNA, 19 nt, Artificial Sequence
  Description of Artificial Sequence: Synthetic oligonucleotide
  Sense strand starting at position 1193 of SEQ ID NO: 588117
ucccguaacaggugaucau

SEQ ID NO: 843249 - RNA, 19 nt, Artificial Sequence
  Description of Artificial Sequence: Synthetic oligonucleotide
  Antisense strand to SEQ ID NO: 843248
augaucaccuguuacggga

SEQ ID NO: 843250 - RNA, 19 nt, Artificial Sequence
  Description of Artificial Sequence: Synthetic oligonucleotide
  Sense strand starting at position 1194 of SEQ ID NO: 588117
cccguaacaggugaucauu

SEQ ID NO: 843251 - RNA, 19 nt, Artificial Sequence
  Description of Artificial Sequence: Synthetic oligonucleotide
  Antisense strand to SEQ ID NO: 843250
aaugaucaccuguuacggg

SEQ ID NO: 843252 - RNA, 19 nt, Artificial Sequence
  Description of Artificial Sequence: Synthetic oligonucleotide
  Sense strand starting at position 1196 of SEQ ID NO: 588117
cguaacaggugaucauuga

SEQ ID NO: 843253 - RNA, 19 nt, Artificial Sequence
  Description of Artificial Sequence: Synthetic oligonucleotide
  Antisense strand to SEQ ID NO: 843252
ucaaugaucaccuguuacg

SEQ ID NO: 843254 - RNA, 19 nt, Artificial Sequence
  Description of Artificial Sequence: Synthetic oligonucleotide
  Sense strand starting at position 1303 of SEQ ID NO: 588117
uuguuauguuaaguggaca

SEQ ID NO: 843255 - RNA, 19 nt, Artificial Sequence
  Description of Artificial Sequence: Synthetic oligonucleotide
  Antisense strand to SEQ ID NO: 843254
uguccacuuaacauaacaa

SEQ ID NO: 843256 - RNA, 19 nt, Artificial Sequence
  Description of Artificial Sequence: Synthetic oligonucleotide
  Sense strand starting at position 1304 of SEQ ID NO: 588117
uguuauguuaaguggacaa

SEQ ID NO: 843257 - RNA, 19 nt, Artificial Sequence
  Description of Artificial Sequence: Synthetic oligonucleotide
  Antisense strand to SEQ ID NO: 843256
uuguccacuuaacauaaca

SEQ ID NO: 843258 - RNA, 19 nt, Artificial Sequence
  Description of Artificial Sequence: Synthetic oligonucleotide
  Sense strand starting at position 1346 of SEQ ID NO: 588117
cuaguuugaguccacuuaa

SEQ ID NO: 843259 - RNA, 19 nt, Artificial Sequence
  Description of Artificial Sequence: Synthetic oligonucleotide
  Antisense strand to SEQ ID NO: 843258
uuaaguggacucaaacuag

SEQ ID NO: 843260 - RNA, 19 nt, Artificial Sequence
  Description of Artificial Sequence: Synthetic oligonucleotide
  Sense strand starting at position 1743 of SEQ ID NO: 588117
aggcgaugacagugaaacu

SEQ ID NO: 843261 - RNA, 19 nt, Artificial Sequence
  Description of Artificial Sequence: Synthetic oligonucleotide
  Antisense strand to SEQ ID NO: 843260
aguuucacugucaucgccu

SEQ ID NO: 843262 - RNA, 19 nt, Artificial Sequence
  Description of Artificial Sequence: Synthetic oligonucleotide
  Sense strand starting at position 1792 of SEQ ID NO: 588117
ucauuaucacuagguagua

SEQ ID NO: 843263 - RNA, 19 nt, Artificial Sequence
  Description of Artificial Sequence: Synthetic oligonucleotide
  Antisense strand to SEQ ID NO: 843262
uacuaccuagugauaauga

SEQ ID NO: 843264 - RNA, 19 nt, Artificial Sequence
  Description of Artificial Sequence: Synthetic oligonucleotide
  Sense strand starting at position 1807 of SEQ ID NO: 588117
aguagaauuauaggcaagu

SEQ ID NO: 843265 - RNA, 19 nt, Artificial Sequence
  Description of Artificial Sequence: Synthetic oligonucleotide
  Antisense strand to SEQ ID NO: 843264
acuugccuauaauucuacu

SEQ ID NO: 843266 - RNA, 19 nt, Artificial Sequence
  Description of Artificial Sequence: Synthetic oligonucleotide
  Sense strand starting at position 1808 of SEQ ID NO: 588117
guagaauuauaggcaaguu

SEQ ID NO: 843267 - RNA, 19 nt, Artificial Sequence
  Description of Artificial Sequence: Synthetic oligonucleotide
  Antisense strand to SEQ ID NO: 843266
aacuugccuauaauucuac

SEQ ID NO: 843268 - RNA, 19 nt, Artificial Sequence
  Description of Artificial Sequence: Synthetic oligonucleotide
  Sense strand starting at position 2015 of SEQ ID NO: 588117
gcgaaauguaucguugggu

SEQ ID NO: 843269 - RNA, 19 nt, Artificial Sequence
  Description of Artificial Sequence: Synthetic oligonucleotide
  Antisense strand to SEQ ID NO: 843268
acccaacgauacauuucgc

SEQ ID NO: 843270 - RNA, 19 nt, Artificial Sequence
  Description of Artificial Sequence: Synthetic oligonucleotide
  Sense strand starting at position 2268 of SEQ ID NO: 588117
uuaggcauuuaacagauga

SEQ ID NO: 843271 - RNA, 19 nt, Artificial Sequence
  Description of Artificial Sequence: Synthetic oligonucleotide
  Antisense strand to SEQ ID NO: 843270
ucaucuguuaaaugccuaa

SEQ ID NO: 843272 - RNA, 19 nt, Artificial Sequence
  Description of Artificial Sequence: Synthetic oligonucleotide
  Sense strand starting at position 2346 of SEQ ID NO: 588117
uugggucuguacccacaaa

SEQ ID NO: 843273 - RNA, 19 nt, Artificial Sequence
  Description of Artificial Sequence: Synthetic oligonucleotide
  Antisense strand to SEQ ID NO: 843272
uuuguggguacagacccaa

SEQ ID NO: 843274 - RNA, 19 nt, Artificial Sequence
  Description of Artificial Sequence: Synthetic oligonucleotide
  Sense strand starting at position 2368 of SEQ ID NO: 588117
agcauuauccuccagauga

SEQ ID NO: 843275 - RNA, 19 nt, Artificial Sequence
  Description of Artificial Sequence: Synthetic oligonucleotide
  Antisense strand to SEQ ID NO: 843274
ucaucuggaggauaaugcu

SEQ ID NO: 843276 - RNA, 19 nt, Artificial Sequence
  Description of Artificial Sequence: Synthetic oligonucleotide
  Sense strand starting at position 2647 of SEQ ID NO: 588117
ccugacauuuggcaaggaa

SEQ ID NO: 843277 - RNA, 19 nt, Artificial Sequence
  Description of Artificial Sequence: Synthetic oligonucleotide
  Antisense strand to SEQ ID NO: 843276
uuccuugccaaaugucagg

SEQ ID NO: 843278 - RNA, 19 nt, Artificial Sequence
  Description of Artificial Sequence: Synthetic oligonucleotide
  Sense strand starting at position 2738 of SEQ ID NO: 588117
gcaggaagccuggguagau

SEQ ID NO: 843279 - RNA, 19 nt, Artificial Sequence
  Description of Artificial Sequence: Synthetic oligonucleotide
  Antisense strand to SEQ ID NO: 843278
aucuacccaggcuuccugc

SEQ ID NO: 843280 - RNA, 19 nt, Artificial Sequence
  Description of Artificial Sequence: Synthetic oligonucleotide
  Sense strand starting at position 2834 of SEQ ID NO: 588117
gcauguguaaaguaacaag

SEQ ID NO: 843281 - RNA, 19 nt, Artificial Sequence
  Description of Artificial Sequence: Synthetic oligonucleotide
  Antisense strand to SEQ ID NO: 843280
cuuguuacuuuacacaugc

SEQ ID NO: 843282 - RNA, 19 nt, Artificial Sequence
  Description of Artificial Sequence: Synthetic oligonucleotide
  Sense strand starting at position 2848 of SEQ ID NO: 588117
acaagauaauguguuugua

SEQ ID NO: 843283 - RNA, 19 nt, Artificial Sequence
  Description of Artificial Sequence: Synthetic oligonucleotide
  Antisense strand to SEQ ID NO: 843282
uacaaacacauuaucuugu

SEQ ID NO: 843284 - RNA, 19 nt, Artificial Sequence
  Description of Artificial Sequence: Synthetic oligonucleotide
  Sense strand starting at position 3369 of SEQ ID NO: 588117
cugauuuguggugguuacu

SEQ ID NO: 843285 - RNA, 19 nt, Artificial Sequence
  Description of Artificial Sequence: Synthetic oligonucleotide
  Antisense strand to SEQ ID NO: 843284
aguaaccaccacaaaucag

SEQ ID NO: 843286 - RNA, 19 nt, Artificial Sequence
  Description of Artificial Sequence: Synthetic oligonucleotide
  Sense strand starting at position 3397 of SEQ ID NO: 588117
gguguuaaauacccuuacu

SEQ ID NO: 843287 - RNA, 19 nt, Artificial Sequence
  Description of Artificial Sequence: Synthetic oligonucleotide
  Antisense strand to SEQ ID NO: 843286
aguaaggguauuuaacacc

SEQ ID NO: 843288 - RNA, 19 nt, Artificial Sequence
  Description of Artificial Sequence: Synthetic oligonucleotide
  Sense strand starting at position 3415 of SEQ ID NO: 588117
ugaaauuggccaugccaau

SEQ ID NO: 843289 - RNA, 19 nt, Artificial Sequence
  Description of Artificial Sequence: Synthetic oligonucleotide
  Antisense strand to SEQ ID NO: 843288
auuggcauggccaauuuca

SEQ ID NO: 843290 - RNA, 19 nt, Artificial Sequence
  Description of Artificial Sequence: Synthetic oligonucleotide
  Sense strand starting at position 3454 of SEQ ID NO: 588117
gaaugcugcacugggaaga

SEQ ID NO: 843291 - RNA, 19 nt, Artificial Sequence
  Description of Artificial Sequence: Synthetic oligonucleotide
  Antisense strand to SEQ ID NO: 843290
ucuucccagugcagcauuc

SEQ ID NO: 843292 - RNA, 19 nt, Artificial Sequence
  Description of Artificial Sequence: Synthetic oligonucleotide
  Sense strand starting at position 3537 of SEQ ID NO: 588117
cgcuaacaccagugagaag

SEQ ID NO: 843293 - RNA, 19 nt, Artificial Sequence
  Description of Artificial Sequence: Synthetic oligonucleotide
  Antisense strand to SEQ ID NO: 843292
cuucucacugguguuagcg

SEQ ID NO: 843294 - RNA, 19 nt, Artificial Sequence
  Description of Artificial Sequence: Synthetic oligonucleotide
  Sense strand starting at position 3598 of SEQ ID NO: 588117
ggcuuucuaucuguacaag

SEQ ID NO: 843295 - RNA, 19 nt, Artificial Sequence
  Description of Artificial Sequence: Synthetic oligonucleotide
  Antisense strand to SEQ ID NO: 843294
cuuguacagauagaaagcc

SEQ ID NO: 843296 - RNA, 19 nt, Artificial Sequence
  Description of Artificial Sequence: Synthetic oligonucleotide
  Sense strand starting at position 3599 of SEQ ID NO: 588117
gcuuucuaucuguacaaga

SEQ ID NO: 843297 - RNA, 19 nt, Artificial Sequence
  Description of Artificial Sequence: Synthetic oligonucleotide
  Antisense strand to SEQ ID NO: 843296
ucuuguacagauagaaagc

SEQ ID NO: 843298 - RNA, 19 nt, Artificial Sequence
  Description of Artificial Sequence: Synthetic oligonucleotide
  Sense strand starting at position 3821 of SEQ ID NO: 588117
ugucgcacucaauaaauau

SEQ ID NO: 843299 - RNA, 19 nt, Artificial Sequence
  Description of Artificial Sequence: Synthetic oligonucleotide
  Antisense strand to SEQ ID NO: 843298
auauuuauugagugcgaca

SEQ ID NO: 843300 - RNA, 19 nt, Artificial Sequence
  Description of Artificial Sequence: Synthetic oligonucleotide
  Sense strand starting at position 3867 of SEQ ID NO: 588117
augguauuauuguugucau

SEQ ID NO: 843301 - RNA, 19 nt, Artificial Sequence
  Description of Artificial Sequence: Synthetic oligonucleotide
  Antisense strand to SEQ ID NO: 843300
augacaacaauaauaccau

SEQ ID NO: 843302 - RNA, 19 nt, Artificial Sequence
  Description of Artificial Sequence: Synthetic oligonucleotide
  Sense strand starting at position 8 of SEQ ID NO: 588118
acgagauguccuggcacag

SEQ ID NO: 843303 - RNA, 19 nt, Artificial Sequence
  Description of Artificial Sequence: Synthetic oligonucleotide
  Antisense strand to SEQ ID NO: 843302
cugugccaggacaucucgu

SEQ ID NO: 843304 - RNA, 19 nt, Artificial Sequence
  Description of Artificial Sequence: Synthetic oligonucleotide
  Sense strand starting at position 128 of SEQ ID NO: 588118
agguuaugugguggaggaa

SEQ ID NO: 843305 - RNA, 19 nt, Artificial Sequence
  Description of Artificial Sequence: Synthetic oligonucleotide
  Antisense strand to SEQ ID NO: 843304
uuccuccaccacauaaccu

SEQ ID NO: 843306 - RNA, 19 nt, Artificial Sequence
  Description of Artificial Sequence: Synthetic oligonucleotide
  Sense strand starting at position 129 of SEQ ID NO: 588118
gguuaugugguggaggaaa

SEQ ID NO: 843307 - RNA, 19 nt, Artificial Sequence
  Description of Artificial Sequence: Synthetic oligonucleotide
  Antisense strand to SEQ ID NO: 843306
uuuccuccaccacauaacc

SEQ ID NO: 843308 - RNA, 19 nt, Artificial Sequence
  Description of Artificial Sequence: Synthetic oligonucleotide
  Sense strand starting at position 402 of SEQ ID NO: 588118
uuguacuaugcugaggauu

SEQ ID NO: 843309 - RNA, 19 nt, Artificial Sequence
  Description of Artificial Sequence: Synthetic oligonucleotide
  Antisense strand to SEQ ID NO: 843308
aauccucagcauaguacaa

SEQ ID NO: 843310 - RNA, 19 nt, Artificial Sequence
  Description of Artificial Sequence: Synthetic oligonucleotide
  Sense strand starting at position 658 of SEQ ID NO: 588118
gugcuagacacagggauua

SEQ ID NO: 843311 - RNA, 19 nt, Artificial Sequence
  Description of Artificial Sequence: Synthetic oligonucleotide
  Antisense strand to SEQ ID NO: 843310
uaaucccugugucuagcac

SEQ ID NO: 843312 - RNA, 19 nt, Artificial Sequence
  Description of Artificial Sequence: Synthetic oligonucleotide
  Sense strand starting at position 779 of SEQ ID NO: 588118
cuagaauaucuuggcuaag

SEQ ID NO: 843313 - RNA, 19 nt, Artificial Sequence
  Description of Artificial Sequence: Synthetic oligonucleotide
  Antisense strand to SEQ ID NO: 843312
cuuagccaagauauucuag

SEQ ID NO: 843314 - RNA, 19 nt, Artificial Sequence
  Description of Artificial Sequence: Synthetic oligonucleotide
  Sense strand starting at position 781 of SEQ ID NO: 588118
agaauaucuuggcuaagag

SEQ ID NO: 843315 - RNA, 19 nt, Artificial Sequence
  Description of Artificial Sequence: Synthetic oligonucleotide
  Antisense strand to SEQ ID NO: 843314
cucuuagccaagauauucu

SEQ ID NO: 843316 - RNA, 19 nt, Artificial Sequence
  Description of Artificial Sequence: Synthetic oligonucleotide
  Sense strand starting at position 782 of SEQ ID NO: 588118
gaauaucuuggcuaagagu

SEQ ID NO: 843317 - RNA, 19 nt, Artificial Sequence
  Description of Artificial Sequence: Synthetic oligonucleotide
  Antisense strand to SEQ ID NO: 843316
acucuuagccaagauauuc

SEQ ID NO: 843318 - RNA, 19 nt, Artificial Sequence
  Description of Artificial Sequence: Synthetic oligonucleotide
  Sense strand starting at position 791 of SEQ ID NO: 588118
ggcuaagagucuucuuaaa

SEQ ID NO: 843319 - RNA, 19 nt, Artificial Sequence
  Description of Artificial Sequence: Synthetic oligonucleotide
  Antisense strand to SEQ ID NO: 843318
uuuaagaagacucuuagcc

SEQ ID NO: 843320 - RNA, 19 nt, Artificial Sequence
  Description of Artificial Sequence: Synthetic oligonucleotide
  Sense strand starting at position 793 of SEQ ID NO: 588118
cuaagagucuucuuaaagu

SEQ ID NO: 843321 - RNA, 19 nt, Artificial Sequence
  Description of Artificial Sequence: Synthetic oligonucleotide
  Antisense strand to SEQ ID NO: 843320
acuuuaagaagacucuuag

SEQ ID NO: 843322 - RNA, 19 nt, Artificial Sequence
  Description of Artificial Sequence: Synthetic oligonucleotide
  Sense strand starting at position 815 of SEQ ID NO: 588118
cugauuguaucacugaaac

SEQ ID NO: 843323 - RNA, 19 nt, Artificial Sequence
  Description of Artificial Sequence: Synthetic oligonucleotide
  Antisense strand to SEQ ID NO: 843322
guuucagugauacaaucag

SEQ ID NO: 843324 - RNA, 19 nt, Artificial Sequence
  Description of Artificial Sequence: Synthetic oligonucleotide
  Sense strand starting at position 836 of SEQ ID NO: 588118
gggugaaacugggcucaga

SEQ ID NO: 843325 - RNA, 19 nt, Artificial Sequence
  Description of Artificial Sequence: Synthetic oligonucleotide
  Antisense strand to SEQ ID NO: 843324
ucugagcccaguuucaccc

SEQ ID NO: 843326 - RNA, 19 nt, Artificial Sequence
  Description of Artificial Sequence: Synthetic oligonucleotide
  Sense strand starting at position 1046 of SEQ ID NO: 588118
guagcaggaugguuaagua

SEQ ID NO: 843327 - RNA, 19 nt, Artificial Sequence
  Description of Artificial Sequence: Synthetic oligonucleotide
  Antisense strand to SEQ ID NO: 843326
uacuuaaccauccugcuac

SEQ ID NO: 843328 - RNA, 19 nt, Artificial Sequence
  Description of Artificial Sequence: Synthetic oligonucleotide
  Sense strand starting at position 1069 of SEQ ID NO: 588118
ggcucuggagucugauaga

SEQ ID NO: 843329 - RNA, 19 nt, Artificial Sequence
  Description of Artificial Sequence: Synthetic oligonucleotide
  Antisense strand to SEQ ID NO: 843328
ucuaucagacuccagagcc

SEQ ID NO: 843330 - RNA, 19 nt, Artificial Sequence
  Description of Artificial Sequence: Synthetic oligonucleotide
  Sense strand starting at position 1076 of SEQ ID NO: 588118
gagucugauagaugugggu

SEQ ID NO: 843331 - RNA, 19 nt, Artificial Sequence
  Description of Artificial Sequence: Synthetic oligonucleotide
  Antisense strand to SEQ ID NO: 843330
acccacaucuaucagacuc

SEQ ID NO: 843332 - RNA, 19 nt, Artificial Sequence
  Description of Artificial Sequence: Synthetic oligonucleotide
  Sense strand starting at position 1078 of SEQ ID NO: 588118
gucugauagauguggguac

SEQ ID NO: 843333 - RNA, 19 nt, Artificial Sequence
  Description of Artificial Sequence: Synthetic oligonucleotide
  Antisense strand to SEQ ID NO: 843332
guacccacaucuaucagac

SEQ ID NO: 843334 - RNA, 19 nt, Artificial Sequence
  Description of Artificial Sequence: Synthetic oligonucleotide
  Sense strand starting at position 1080 of SEQ ID NO: 588118
cugauagauguggguacaa

SEQ ID NO: 843335 - RNA, 19 nt, Artificial Sequence
  Description of Artificial Sequence: Synthetic oligonucleotide
  Antisense strand to SEQ ID NO: 843334
uuguacccacaucuaucag

SEQ ID NO: 843336 - RNA, 19 nt, Artificial Sequence
  Description of Artificial Sequence: Synthetic oligonucleotide
  Sense strand starting at position 1600 of SEQ ID NO: 588118
gguucugcaucgauggagu

SEQ ID NO: 843337 - RNA, 19 nt, Artificial Sequence
  Description of Artificial Sequence: Synthetic oligonucleotide
  Antisense strand to SEQ ID NO: 843336
acuccaucgaugcagaacc

SEQ ID NO: 843338 - RNA, 19 nt, Artificial Sequence
  Description of Artificial Sequence: Synthetic oligonucleotide
  Sense strand starting at position 1627 of SEQ ID NO: 588118
gcgguauccgagaggguga

SEQ ID NO: 843339 - RNA, 19 nt, Artificial Sequence
  Description of Artificial Sequence: Synthetic oligonucleotide
  Antisense strand to SEQ ID NO: 843338
ucacccucucggauaccgc

SEQ ID NO: 843340 - RNA, 19 nt, Artificial Sequence
  Description of Artificial Sequence: Synthetic oligonucleotide
  Sense strand starting at position 2279 of SEQ ID NO: 588118
caaacuuggcucugguuaa

SEQ ID NO: 843341 - RNA, 19 nt, Artificial Sequence
  Description of Artificial Sequence: Synthetic oligonucleotide
  Antisense strand to SEQ ID NO: 843340
uuaaccagagccaaguuug

SEQ ID NO: 843342 - RNA, 19 nt, Artificial Sequence
  Description of Artificial Sequence: Synthetic oligonucleotide
  Sense strand starting at position 2291 of SEQ ID NO: 588118
ugguuaauggcuuggugaa

SEQ ID NO: 843343 - RNA, 19 nt, Artificial Sequence
  Description of Artificial Sequence: Synthetic oligonucleotide
  Antisense strand to SEQ ID NO: 843342
uucaccaagccauuaacca

SEQ ID NO: 843344 - RNA, 19 nt, Artificial Sequence
  Description of Artificial Sequence: Synthetic oligonucleotide
  Sense strand starting at position 2292 of SEQ ID NO: 588118
gguuaauggcuuggugaaa

SEQ ID NO: 843345 - RNA, 19 nt, Artificial Sequence
  Description of Artificial Sequence: Synthetic oligonucleotide
  Antisense strand to SEQ ID NO: 843344
uuucaccaagccauuaacc

SEQ ID NO: 843346 - RNA, 19 nt, Artificial Sequence
  Description of Artificial Sequence: Synthetic oligonucleotide
  Sense strand starting at position 2293 of SEQ ID NO: 588118
guuaauggcuuggugaaag

SEQ ID NO: 843347 - RNA, 19 nt, Artificial Sequence
  Description of Artificial Sequence: Synthetic oligonucleotide
  Antisense strand to SEQ ID NO: 843346
cuuucaccaagccauuaac

SEQ ID NO: 843348 - RNA, 19 nt, Artificial Sequence
  Description of Artificial Sequence: Synthetic oligonucleotide
  Sense strand starting at position 2481 of SEQ ID NO: 588118
ugaguugagagaugugaug

SEQ ID NO: 843349 - RNA, 19 nt, Artificial Sequence
  Description of Artificial Sequence: Synthetic oligonucleotide
  Antisense strand to SEQ ID NO: 843348
caucacaucucucaacuca

SEQ ID NO: 843350 - RNA, 19 nt, Artificial Sequence
  Description of Artificial Sequence: Synthetic oligonucleotide
  Sense strand starting at position 2543 of SEQ ID NO: 588118
gcaucagaccuaugauagg

SEQ ID NO: 843351 - RNA, 19 nt, Artificial Sequence
  Description of Artificial Sequence: Synthetic oligonucleotide
  Antisense strand to SEQ ID NO: 843350
ccuaucauaggucugaugc

SEQ ID NO: 843352 - RNA, 19 nt, Artificial Sequence
  Description of Artificial Sequence: Synthetic oligonucleotide
  Sense strand starting at position 2549 of SEQ ID NO: 588118
gaccuaugauagguacaau

SEQ ID NO: 843353 - RNA, 19 nt, Artificial Sequence
  Description of Artificial Sequence: Synthetic oligonucleotide
  Antisense strand to SEQ ID NO: 843352
auuguaccuaucauagguc

SEQ ID NO: 843354 - RNA, 19 nt, Artificial Sequence
  Description of Artificial Sequence: Synthetic oligonucleotide
  Sense strand starting at position 2577 of SEQ ID NO: 588118
gaucaaaggucuuuaugga

SEQ ID NO: 843355 - RNA, 19 nt, Artificial Sequence
  Description of Artificial Sequence: Synthetic oligonucleotide
  Antisense strand to SEQ ID NO: 843354
uccauaaagaccuuugauc

SEQ ID NO: 843356 - RNA, 19 nt, Artificial Sequence
  Description of Artificial Sequence: Synthetic oligonucleotide
  Sense strand starting at position 2618 of SEQ ID NO: 588118
gagggaucuggugaggcuu

SEQ ID NO: 843357 - RNA, 19 nt, Artificial Sequence
  Description of Artificial Sequence: Synthetic oligonucleotide
  Antisense strand to SEQ ID NO: 843356
aagccucaccagaucccuc

SEQ ID NO: 843358 - RNA, 19 nt, Artificial Sequence
  Description of Artificial Sequence: Synthetic oligonucleotide
  Sense strand starting at position 2719 of SEQ ID NO: 588118
gugguucuucagggauuau

SEQ ID NO: 843359 - RNA, 19 nt, Artificial Sequence
  Description of Artificial Sequence: Synthetic oligonucleotide
  Antisense strand to SEQ ID NO: 843358
auaaucccugaagaaccac

SEQ ID NO: 843360 - RNA, 19 nt, Artificial Sequence
  Description of Artificial Sequence: Synthetic oligonucleotide
  Sense strand starting at position 2763 of SEQ ID NO: 588118
ggacacuaguggguuacau

SEQ ID NO: 843361 - RNA, 19 nt, Artificial Sequence
  Description of Artificial Sequence: Synthetic oligonucleotide
  Antisense strand to SEQ ID NO: 843360
auguaacccacuagugucc

SEQ ID NO: 843362 - RNA, 19 nt, Artificial Sequence
  Description of Artificial Sequence: Synthetic oligonucleotide
  Sense strand starting at position 2765 of SEQ ID NO: 588118
acacuaguggguuacauua

SEQ ID NO: 843363 - RNA, 19 nt, Artificial Sequence
  Description of Artificial Sequence: Synthetic oligonucleotide
  Antisense strand to SEQ ID NO: 843362
uaauguaacccacuagugu

SEQ ID NO: 843364 - RNA, 19 nt, Artificial Sequence
  Description of Artificial Sequence: Synthetic oligonucleotide
  Sense strand starting at position 3193 of SEQ ID NO: 588118
auaugacacugcuuaguuu

SEQ ID NO: 843365 - RNA, 19 nt, Artificial Sequence
  Description of Artificial Sequence: Synthetic oligonucleotide
  Antisense strand to SEQ ID NO: 843364
aaacuaagcagugucauau

SEQ ID NO: 843366 - RNA, 19 nt, Artificial Sequence
  Description of Artificial Sequence: Synthetic oligonucleotide
  Sense strand starting at position 3221 of SEQ ID NO: 588118
ggaguucugaucuguauuc

SEQ ID NO: 843367 - RNA, 19 nt, Artificial Sequence
  Description of Artificial Sequence: Synthetic oligonucleotide
  Antisense strand to SEQ ID NO: 843366
gaauacagaucagaacucc

SEQ ID NO: 843368 - RNA, 19 nt, Artificial Sequence
  Description of Artificial Sequence: Synthetic oligonucleotide
  Sense strand starting at position 3348 of SEQ ID NO: 588118
cuauucucacuuuacggau

SEQ ID NO: 843369 - RNA, 19 nt, Artificial Sequence
  Description of Artificial Sequence: Synthetic oligonucleotide
  Antisense strand to SEQ ID NO: 843368
auccguaaagugagaauag

SEQ ID NO: 843370 - RNA, 19 nt, Artificial Sequence
  Description of Artificial Sequence: Synthetic oligonucleotide
  Sense strand starting at position 3355 of SEQ ID NO: 588118
cacuuuacggauugggaaa

SEQ ID NO: 843371 - RNA, 19 nt, Artificial Sequence
  Description of Artificial Sequence: Synthetic oligonucleotide
  Antisense strand to SEQ ID NO: 843370
uuucccaauccguaaagug

SEQ ID NO: 843372 - RNA, 19 nt, Artificial Sequence
  Description of Artificial Sequence: Synthetic oligonucleotide
  Sense strand starting at position 3632 of SEQ ID NO: 588118
ucuucuucuugacugaaag

SEQ ID NO: 843373 - RNA, 19 nt, Artificial Sequence
  Description of Artificial Sequence: Synthetic oligonucleotide
  Antisense strand to SEQ ID NO: 843372
cuuucagucaagaagaaga

SEQ ID NO: 843374 - RNA, 19 nt, Artificial Sequence
  Description of Artificial Sequence: Synthetic oligonucleotide
  Sense strand starting at position 3633 of SEQ ID NO: 588118
cuucuucuugacugaaaga

SEQ ID NO: 843375 - RNA, 19 nt, Artificial Sequence
  Description of Artificial Sequence: Synthetic oligonucleotide
  Antisense strand to SEQ ID NO: 843374
ucuuucagucaagaagaag

SEQ ID NO: 843376 - RNA, 19 nt, Artificial Sequence
  Description of Artificial Sequence: Synthetic oligonucleotide
  Sense strand starting at position 3708 of SEQ ID NO: 588118
caguauugugaaugcaaua

SEQ ID NO: 843377 - RNA, 19 nt, Artificial Sequence
  Description of Artificial Sequence: Synthetic oligonucleotide
  Antisense strand to SEQ ID NO: 843376
uauugcauucacaauacug

SEQ ID NO: 843378 - RNA, 19 nt, Artificial Sequence
  Description of Artificial Sequence: Synthetic oligonucleotide
  Sense strand starting at position 3713 of SEQ ID NO: 588118
uugugaaugcaauaauaug

SEQ ID NO: 843379 - RNA, 19 nt, Artificial Sequence
  Description of Artificial Sequence: Synthetic oligonucleotide
  Antisense strand to SEQ ID NO: 843378
cauauuauugcauucacaa

SEQ ID NO: 843380 - RNA, 19 nt, Artificial Sequence
  Description of Artificial Sequence: Synthetic oligonucleotide
  Sense strand starting at position 3888 of SEQ ID NO: 588118
gggagauuaggcugggugu

SEQ ID NO: 843381 - RNA, 19 nt, Artificial Sequence
  Description of Artificial Sequence: Synthetic oligonucleotide
  Antisense strand to SEQ ID NO: 843380
acacccagccuaaucuccc

SEQ ID NO: 843382 - RNA, 19 nt, Artificial Sequence
  Description of Artificial Sequence: Synthetic oligonucleotide
  Sense strand starting at position 63 of SEQ ID NO: 588119
gaagguuauuuacauuaga

SEQ ID NO: 843383 - RNA, 19 nt, Artificial Sequence
  Description of Artificial Sequence: Synthetic oligonucleotide
  Antisense strand to SEQ ID NO: 843382
ucuaauguaaauaaccuuc

SEQ ID NO: 843384 - RNA, 19 nt, Artificial Sequence
  Description of Artificial Sequence: Synthetic oligonucleotide
  Sense strand starting at position 76 of SEQ ID NO: 588119
auuagagcuuccuugaaau

SEQ ID NO: 843385 - RNA, 19 nt, Artificial Sequence
  Description of Artificial Sequence: Synthetic oligonucleotide
  Antisense strand to SEQ ID NO: 843384
auuucaaggaagcucuaau

SEQ ID NO: 843386 - RNA, 19 nt, Artificial Sequence
  Description of Artificial Sequence: Synthetic oligonucleotide
  Sense strand starting at position 222 of SEQ ID NO: 588119
acaauaaucugagcauugu

SEQ ID NO: 843387 - RNA, 19 nt, Artificial Sequence
  Description of Artificial Sequence: Synthetic oligonucleotide
  Antisense strand to SEQ ID NO: 843386
acaaugcucagauuauugu

SEQ ID NO: 843388 - RNA, 19 nt, Artificial Sequence
  Description of Artificial Sequence: Synthetic oligonucleotide
  Sense strand starting at position 293 of SEQ ID NO: 588119
gaaauuucuugugaaugac

SEQ ID NO: 843389 - RNA, 19 nt, Artificial Sequence
  Description of Artificial Sequence: Synthetic oligonucleotide
  Antisense strand to SEQ ID NO: 843388
gucauucacaagaaauuuc

SEQ ID NO: 843390 - RNA, 19 nt, Artificial Sequence
  Description of Artificial Sequence: Synthetic oligonucleotide
  Sense strand starting at position 358 of SEQ ID NO: 588119
uggacauaccuuugccaaa

SEQ ID NO: 843391 - RNA, 19 nt, Artificial Sequence
  Description of Artificial Sequence: Synthetic oligonucleotide
  Antisense strand to SEQ ID NO: 843390
uuuggcaaagguaugucca

SEQ ID NO: 843392 - RNA, 19 nt, Artificial Sequence
  Description of Artificial Sequence: Synthetic oligonucleotide
  Sense strand starting at position 359 of SEQ ID NO: 588119
ggacauaccuuugccaaau

SEQ ID NO: 843393 - RNA, 19 nt, Artificial Sequence
  Description of Artificial Sequence: Synthetic oligonucleotide
  Antisense strand to SEQ ID NO: 843392
auuuggcaaagguaugucc

SEQ ID NO: 843394 - RNA, 19 nt, Artificial Sequence
  Description of Artificial Sequence: Synthetic oligonucleotide
  Sense strand starting at position 382 of SEQ ID NO: 588119
auuguuugacgguauggau

SEQ ID NO: 843395 - RNA, 19 nt, Artificial Sequence
  Description of Artificial Sequence: Synthetic oligonucleotide
  Antisense strand to SEQ ID NO: 843394
auccauaccgucaaacaau

SEQ ID NO: 843396 - RNA, 19 nt, Artificial Sequence
  Description of Artificial Sequence: Synthetic oligonucleotide
  Sense strand starting at position 471 of SEQ ID NO: 588119
ucgugauaacaauaccuua

SEQ ID NO: 843397 - RNA, 19 nt, Artificial Sequence
  Description of Artificial Sequence: Synthetic oligonucleotide
  Antisense strand to SEQ ID NO: 843396
uaagguauuguuaucacga

SEQ ID NO: 843398 - RNA, 19 nt, Artificial Sequence
  Description of Artificial Sequence: Synthetic oligonucleotide
  Sense strand starting at position 545 of SEQ ID NO: 588119
ugcuacuuuccugaggaaa

SEQ ID NO: 843399 - RNA, 19 nt, Artificial Sequence
  Description of Artificial Sequence: Synthetic oligonucleotide
  Antisense strand to SEQ ID NO: 843398
uuuccucaggaaaguagca

SEQ ID NO: 843400 - RNA, 19 nt, Artificial Sequence
  Description of Artificial Sequence: Synthetic oligonucleotide
  Sense strand starting at position 618 of SEQ ID NO: 588119
ugcaacagaccuugggauu

SEQ ID NO: 843401 - RNA, 19 nt, Artificial Sequence
  Description of Artificial Sequence: Synthetic oligonucleotide
  Antisense strand to SEQ ID NO: 843400
aaucccaaggucuguugca

SEQ ID NO: 843402 - RNA, 19 nt, Artificial Sequence
  Description of Artificial Sequence: Synthetic oligonucleotide
  Sense strand starting at position 881 of SEQ ID NO: 588119
acaggaaagcagugugaaa

SEQ ID NO: 843403 - RNA, 19 nt, Artificial Sequence
  Description of Artificial Sequence: Synthetic oligonucleotide
  Antisense strand to SEQ ID NO: 843402
uuucacacugcuuuccugu

SEQ ID NO: 843404 - RNA, 19 nt, Artificial Sequence
  Description of Artificial Sequence: Synthetic oligonucleotide
  Sense strand starting at position 892 of SEQ ID NO: 588119
gugugaaacaggcaaaguu

SEQ ID NO: 843405 - RNA, 19 nt, Artificial Sequence
  Description of Artificial Sequence: Synthetic oligonucleotide
  Antisense strand to SEQ ID NO: 843404
aacuuugccuguuucacac

SEQ ID NO: 843406 - RNA, 19 nt, Artificial Sequence
  Description of Artificial Sequence: Synthetic oligonucleotide
  Sense strand starting at position 1130 of SEQ ID NO: 588119
cgaauccaauuaucagacu

SEQ ID NO: 843407 - RNA, 19 nt, Artificial Sequence
  Description of Artificial Sequence: Synthetic oligonucleotide
  Antisense strand to SEQ ID NO: 843406
agucugauaauuggauucg

SEQ ID NO: 843408 - RNA, 19 nt, Artificial Sequence
  Description of Artificial Sequence: Synthetic oligonucleotide
  Sense strand starting at position 1325 of SEQ ID NO: 588119
aauagaagugcuuaguaaa

SEQ ID NO: 843409 - RNA, 19 nt, Artificial Sequence
  Description of Artificial Sequence: Synthetic oligonucleotide
  Antisense strand to SEQ ID NO: 843408
uuuacuaagcacuucuauu

SEQ ID NO: 843410 - RNA, 19 nt, Artificial Sequence
  Description of Artificial Sequence: Synthetic oligonucleotide
  Sense strand starting at position 1423 of SEQ ID NO: 588119
uaugaaagauugucugaua

SEQ ID NO: 843411 - RNA, 19 nt, Artificial Sequence
  Description of Artificial Sequence: Synthetic oligonucleotide
  Antisense strand to SEQ ID NO: 843410
uaucagacaaucuuucaua

SEQ ID NO: 843412 - RNA, 19 nt, Artificial Sequence
  Description of Artificial Sequence: Synthetic oligonucleotide
  Sense strand starting at position 1424 of SEQ ID NO: 588119
augaaagauugucugauau

SEQ ID NO: 843413 - RNA, 19 nt, Artificial Sequence
  Description of Artificial Sequence: Synthetic oligonucleotide
  Antisense strand to SEQ ID NO: 843412
auaucagacaaucuuucau

SEQ ID NO: 843414 - RNA, 19 nt, Artificial Sequence
  Description of Artificial Sequence: Synthetic oligonucleotide
  Sense strand starting at position 1678 of SEQ ID NO: 588119
ugacauuucugauucggcu

SEQ ID NO: 843415 - RNA, 19 nt, Artificial Sequence
  Description of Artificial Sequence: Synthetic oligonucleotide
  Antisense strand to SEQ ID NO: 843414
agccgaaucagaaauguca

SEQ ID NO: 843416 - RNA, 19 nt, Artificial Sequence
  Description of Artificial Sequence: Synthetic oligonucleotide
  Sense strand starting at position 1709 of SEQ ID NO: 588119
gugacuggcucagcaauuu

SEQ ID NO: 843417 - RNA, 19 nt, Artificial Sequence
  Description of Artificial Sequence: Synthetic oligonucleotide
  Antisense strand to SEQ ID NO: 843416
aaauugcugagccagucac

SEQ ID NO: 843418 - RNA, 19 nt, Artificial Sequence
  Description of Artificial Sequence: Synthetic oligonucleotide
  Sense strand starting at position 1776 of SEQ ID NO: 588119
ggcuaaaguuuauuugcau

SEQ ID NO: 843419 - RNA, 19 nt, Artificial Sequence
  Description of Artificial Sequence: Synthetic oligonucleotide
  Antisense strand to SEQ ID NO: 843418
augcaaauaaacuuuagcc

SEQ ID NO: 843420 - RNA, 19 nt, Artificial Sequence
  Description of Artificial Sequence: Synthetic oligonucleotide
  Sense strand starting at position 1777 of SEQ ID NO: 588119
gcuaaaguuuauuugcaua

SEQ ID NO: 843421 - RNA, 19 nt, Artificial Sequence
  Description of Artificial Sequence: Synthetic oligonucleotide
  Antisense strand to SEQ ID NO: 843420
uaugcaaauaaacuuuagc

SEQ ID NO: 843422 - RNA, 19 nt, Artificial Sequence
  Description of Artificial Sequence: Synthetic oligonucleotide
  Sense strand starting at position 1796 of SEQ ID NO: 588119
cucggauacgauuggauga

SEQ ID NO: 843423 - RNA, 19 nt, Artificial Sequence
  Description of Artificial Sequence: Synthetic oligonucleotide
  Antisense strand to SEQ ID NO: 843422
ucauccaaucguauccgag

SEQ ID NO: 843424 - RNA, 19 nt, Artificial Sequence
  Description of Artificial Sequence: Synthetic oligonucleotide
  Sense strand starting at position 1797 of SEQ ID NO: 588119
ucggauacgauuggaugaa

SEQ ID NO: 843425 - RNA, 19 nt, Artificial Sequence
  Description of Artificial Sequence: Synthetic oligonucleotide
  Antisense strand to SEQ ID NO: 843424
uucauccaaucguauccga

SEQ ID NO: 843426 - RNA, 19 nt, Artificial Sequence
  Description of Artificial Sequence: Synthetic oligonucleotide
  Sense strand starting at position 1870 of SEQ ID NO: 588119
ggaagccuuugacuuuaaa

SEQ ID NO: 843427 - RNA, 19 nt, Artificial Sequence
  Description of Artificial Sequence: Synthetic oligonucleotide
  Antisense strand to SEQ ID NO: 843426
uuuaaagucaaaggcuucc

SEQ ID NO: 843428 - RNA, 19 nt, Artificial Sequence
  Description of Artificial Sequence: Synthetic oligonucleotide
  Sense strand starting at position 2270 of SEQ ID NO: 588119
uaucguaucagucuugugu

SEQ ID NO: 843429 - RNA, 19 nt, Artificial Sequence
  Description of Artificial Sequence: Synthetic oligonucleotide
  Antisense strand to SEQ ID NO: 843428
acacaagacugauacgaua

SEQ ID NO: 843430 - RNA, 19 nt, Artificial Sequence
  Description of Artificial Sequence: Synthetic oligonucleotide
  Sense strand starting at position 2273 of SEQ ID NO: 588119
cguaucagucuuguguauu

SEQ ID NO: 843431 - RNA, 19 nt, Artificial Sequence
  Description of Artificial Sequence: Synthetic oligonucleotide
  Antisense strand to SEQ ID NO: 843430
aauacacaagacugauacg

SEQ ID NO: 843432 - RNA, 19 nt, Artificial Sequence
  Description of Artificial Sequence: Synthetic oligonucleotide
  Sense strand starting at position 2310 of SEQ ID NO: 588119
gaccuacugugaucucaga

SEQ ID NO: 843433 - RNA, 19 nt, Artificial Sequence
  Description of Artificial Sequence: Synthetic oligonucleotide
  Antisense strand to SEQ ID NO: 843432
ucugagaucacaguagguc

SEQ ID NO: 843434 - RNA, 19 nt, Artificial Sequence
  Description of Artificial Sequence: Synthetic oligonucleotide
  Sense strand starting at position 2481 of SEQ ID NO: 588119
uuggaaguugucuguauuu

SEQ ID NO: 843435 - RNA, 19 nt, Artificial Sequence
  Description of Artificial Sequence: Synthetic oligonucleotide
  Antisense strand to SEQ ID NO: 843434
aaauacagacaacuuccaa

SEQ ID NO: 843436 - RNA, 19 nt, Artificial Sequence
  Description of Artificial Sequence: Synthetic oligonucleotide
  Sense strand starting at position 2486 of SEQ ID NO: 588119
aguugucuguauuuaucaa

SEQ ID NO: 843437 - RNA, 19 nt, Artificial Sequence
  Description of Artificial Sequence: Synthetic oligonucleotide
  Antisense strand to SEQ ID NO: 843436
uugauaaauacagacaacu

SEQ ID NO: 843438 - RNA, 19 nt, Artificial Sequence
  Description of Artificial Sequence: Synthetic oligonucleotide
  Sense strand starting at position 2641 of SEQ ID NO: 588119
ucuagcaaacguuacaaua

SEQ ID NO: 843439 - RNA, 19 nt, Artificial Sequence
  Description of Artificial Sequence: Synthetic oligonucleotide
  Antisense strand to SEQ ID NO: 843438
uauuguaacguuugcuaga

SEQ ID NO: 843440 - RNA, 19 nt, Artificial Sequence
  Description of Artificial Sequence: Synthetic oligonucleotide
  Sense strand starting at position 2870 of SEQ ID NO: 588119
cuuacuuauggucacagau

SEQ ID NO: 843441 - RNA, 19 nt, Artificial Sequence
  Description of Artificial Sequence: Synthetic oligonucleotide
  Antisense strand to SEQ ID NO: 843440
aucugugaccauaaguaag

SEQ ID NO: 843442 - RNA, 19 nt, Artificial Sequence
  Description of Artificial Sequence: Synthetic oligonucleotide
  Sense strand starting at position 3173 of SEQ ID NO: 588119
uguagaugauagguaaauu

SEQ ID NO: 843443 - RNA, 19 nt, Artificial Sequence
  Description of Artificial Sequence: Synthetic oligonucleotide
  Antisense strand to SEQ ID NO: 843442
aauuuaccuaucaucuaca

SEQ ID NO: 843444 - RNA, 19 nt, Artificial Sequence
  Description of Artificial Sequence: Synthetic oligonucleotide
  Sense strand starting at position 3183 of SEQ ID NO: 588119
agguaaauuaaugggugua

SEQ ID NO: 843445 - RNA, 19 nt, Artificial Sequence
  Description of Artificial Sequence: Synthetic oligonucleotide
  Antisense strand to SEQ ID NO: 843444
uacacccauuaauuuaccu

SEQ ID NO: 843446 - RNA, 19 nt, Artificial Sequence
  Description of Artificial Sequence: Synthetic oligonucleotide
  Sense strand starting at position 3184 of SEQ ID NO: 588119
gguaaauuaauggguguag

SEQ ID NO: 843447 - RNA, 19 nt, Artificial Sequence
  Description of Artificial Sequence: Synthetic oligonucleotide
  Antisense strand to SEQ ID NO: 843446
cuacacccauuaauuuacc

SEQ ID NO: 843448 - RNA, 19 nt, Artificial Sequence
  Description of Artificial Sequence: Synthetic oligonucleotide
  Sense strand starting at position 3260 of SEQ ID NO: 588119
gggccaacucccuagauuc

SEQ ID NO: 843449 - RNA, 19 nt, Artificial Sequence
  Description of Artificial Sequence: Synthetic oligonucleotide
  Antisense strand to SEQ ID NO: 843448
gaaucuagggaguuggccc

SEQ ID NO: 843450 - RNA, 19 nt, Artificial Sequence
  Description of Artificial Sequence: Synthetic oligonucleotide
  Sense strand starting at position 3553 of SEQ ID NO: 588119
auuugauguccaggcgaug

SEQ ID NO: 843451 - RNA, 19 nt, Artificial Sequence
  Description of Artificial Sequence: Synthetic oligonucleotide
  Antisense strand to SEQ ID NO: 843450
caucgccuggacaucaaau

SEQ ID NO: 843452 - RNA, 19 nt, Artificial Sequence
  Description of Artificial Sequence: Synthetic oligonucleotide
  Sense strand starting at position 3556 of SEQ ID NO: 588119
ugauguccaggcgaugaaa

SEQ ID NO: 843453 - RNA, 19 nt, Artificial Sequence
  Description of Artificial Sequence: Synthetic oligonucleotide
  Antisense strand to SEQ ID NO: 843452
uuucaucgccuggacauca

SEQ ID NO: 843454 - RNA, 19 nt, Artificial Sequence
  Description of Artificial Sequence: Synthetic oligonucleotide
  Sense strand starting at position 3676 of SEQ ID NO: 588119
ccaggcauuccugaaugua

SEQ ID NO: 843455 - RNA, 19 nt, Artificial Sequence
  Description of Artificial Sequence: Synthetic oligonucleotide
  Antisense strand to SEQ ID NO: 843454
uacauucaggaaugccugg

SEQ ID NO: 843456 - RNA, 19 nt, Artificial Sequence
  Description of Artificial Sequence: Synthetic oligonucleotide
  Sense strand starting at position 3706 of SEQ ID NO: 588119
uugcuuuggagacagguua

SEQ ID NO: 843457 - RNA, 19 nt, Artificial Sequence
  Description of Artificial Sequence: Synthetic oligonucleotide
  Antisense strand to SEQ ID NO: 843456
uaaccugucuccaaagcaa

SEQ ID NO: 843458 - RNA, 19 nt, Artificial Sequence
  Description of Artificial Sequence: Synthetic oligonucleotide
  Sense strand starting at position 3863 of SEQ ID NO: 588119
acaucauccugcccugaga

SEQ ID NO: 843459 - RNA, 19 nt, Artificial Sequence
  Description of Artificial Sequence: Synthetic oligonucleotide
  Antisense strand to SEQ ID NO: 843458
ucucagggcaggaugaugu

SEQ ID NO: 843460 - RNA, 19 nt, Artificial Sequence
  Description of Artificial Sequence: Synthetic oligonucleotide
  Sense strand starting at position 3908 of SEQ ID NO: 588119
ugggaauugcugcauauga

SEQ ID NO: 843461 - RNA, 19 nt, Artificial Sequence
  Description of Artificial Sequence: Synthetic oligonucleotide
  Antisense strand to SEQ ID NO: 843460
ucauaugcagcaauuccca

SEQ ID NO: 843462 - RNA, 19 nt, Artificial Sequence
  Description of Artificial Sequence: Synthetic oligonucleotide
  Sense strand starting at position 411 of SEQ ID NO: 588120
ggguguuaggaauaaugcu

SEQ ID NO: 843463 - RNA, 19 nt, Artificial Sequence
  Description of Artificial Sequence: Synthetic oligonucleotide
  Antisense strand to SEQ ID NO: 843462
agcauuauuccuaacaccc

SEQ ID NO: 843464 - RNA, 19 nt, Artificial Sequence
  Description of Artificial Sequence: Synthetic oligonucleotide
  Sense strand starting at position 958 of SEQ ID NO: 588120
ccauuuagcucaggacuuu

SEQ ID NO: 843465 - RNA, 19 nt, Artificial Sequence
  Description of Artificial Sequence: Synthetic oligonucleotide
  Antisense strand to SEQ ID NO: 843464
aaaguccugagcuaaaugg

SEQ ID NO: 843466 - RNA, 19 nt, Artificial Sequence
  Description of Artificial Sequence: Synthetic oligonucleotide
  Sense strand starting at position 964 of SEQ ID NO: 588120
agcucaggacuuugccaua

SEQ ID NO: 843467 - RNA, 19 nt, Artificial Sequence
  Description of Artificial Sequence: Synthetic oligonucleotide
  Antisense strand to SEQ ID NO: 843466
uauggcaaaguccugagcu

SEQ ID NO: 843468 - RNA, 19 nt, Artificial Sequence
  Description of Artificial Sequence: Synthetic oligonucleotide
  Sense strand starting at position 1232 of SEQ ID NO: 588120
agcaucaugcuuuacaguu

SEQ ID NO: 843469 - RNA, 19 nt, Artificial Sequence
  Description of Artificial Sequence: Synthetic oligonucleotide
  Antisense strand to SEQ ID NO: 843468
aacuguaaagcaugaugcu

SEQ ID NO: 843470 - RNA, 19 nt, Artificial Sequence
  Description of Artificial Sequence: Synthetic oligonucleotide
  Sense strand starting at position 1257 of SEQ ID NO: 588120
cugucuucucacgggaaau

SEQ ID NO: 843471 - RNA, 19 nt, Artificial Sequence
  Description of Artificial Sequence: Synthetic oligonucleotide
  Antisense strand to SEQ ID NO: 843470
auuucccgugagaagacag

SEQ ID NO: 843472 - RNA, 19 nt, Artificial Sequence
  Description of Artificial Sequence: Synthetic oligonucleotide
  Sense strand starting at position 1258 of SEQ ID NO: 588120
ugucuucucacgggaaauu

SEQ ID NO: 843473 - RNA, 19 nt, Artificial Sequence
  Description of Artificial Sequence: Synthetic oligonucleotide
  Antisense strand to SEQ ID NO: 843472
aauuucccgugagaagaca

SEQ ID NO: 843474 - RNA, 19 nt, Artificial Sequence
  Description of Artificial Sequence: Synthetic oligonucleotide
  Sense strand starting at position 1268 of SEQ ID NO: 588120
cgggaaauuugccaagccu

SEQ ID NO: 843475 - RNA, 19 nt, Artificial Sequence
  Description of Artificial Sequence: Synthetic oligonucleotide
  Antisense strand to SEQ ID NO: 843474
aggcuuggcaaauuucccg

SEQ ID NO: 843476 - RNA, 19 nt, Artificial Sequence
  Description of Artificial Sequence: Synthetic oligonucleotide
  Sense strand starting at position 1301 of SEQ ID NO: 588120
gguggucaggguugaugau

SEQ ID NO: 843477 - RNA, 19 nt, Artificial Sequence
  Description of Artificial Sequence: Synthetic oligonucleotide
  Antisense strand to SEQ ID NO: 843476
aucaucaacccugaccacc

SEQ ID NO: 843478 - RNA, 19 nt, Artificial Sequence
  Description of Artificial Sequence: Synthetic oligonucleotide
  Sense strand starting at position 1552 of SEQ ID NO: 588120
aaccuuugggcuuguccaa

SEQ ID NO: 843479 - RNA, 19 nt, Artificial Sequence
  Description of Artificial Sequence: Synthetic oligonucleotide
  Antisense strand to SEQ ID NO: 843478
uuggacaagcccaaagguu

SEQ ID NO: 843480 - RNA, 19 nt, Artificial Sequence
  Description of Artificial Sequence: Synthetic oligonucleotide
  Sense strand starting at position 1622 of SEQ ID NO: 588120
gaguguugaggucgagcua

SEQ ID NO: 843481 - RNA, 19 nt, Artificial Sequence
  Description of Artificial Sequence: Synthetic oligonucleotide
  Antisense strand to SEQ ID NO: 843480
uagcucgaccucaacacuc

SEQ ID NO: 843482 - RNA, 19 nt, Artificial Sequence
  Description of Artificial Sequence: Synthetic oligonucleotide
  Sense strand starting at position 1623 of SEQ ID NO: 588120
aguguugaggucgagcuaa

SEQ ID NO: 843483 - RNA, 19 nt, Artificial Sequence
  Description of Artificial Sequence: Synthetic oligonucleotide
  Antisense strand to SEQ ID NO: 843482
uuagcucgaccucaacacu

SEQ ID NO: 843484 - RNA, 19 nt, Artificial Sequence
  Description of Artificial Sequence: Synthetic oligonucleotide
  Sense strand starting at position 1723 of SEQ ID NO: 588120
gagagaguccuacagugca

SEQ ID NO: 843485 - RNA, 19 nt, Artificial Sequence
  Description of Artificial Sequence: Synthetic oligonucleotide
  Antisense strand to SEQ ID NO: 843484
ugcacuguaggacucucuc

SEQ ID NO: 843486 - RNA, 19 nt, Artificial Sequence
  Description of Artificial Sequence: Synthetic oligonucleotide
  Sense strand starting at position 2288 of SEQ ID NO: 588120
gcugcaagacgcugcuuaa

SEQ ID NO: 843487 - RNA, 19 nt, Artificial Sequence
  Description of Artificial Sequence: Synthetic oligonucleotide
  Antisense strand to SEQ ID NO: 843486
uuaagcagcgucuugcagc

SEQ ID NO: 843488 - RNA, 19 nt, Artificial Sequence
  Description of Artificial Sequence: Synthetic oligonucleotide
  Sense strand starting at position 2300 of SEQ ID NO: 588120
ugcuuaaucgacugccauc

SEQ ID NO: 843489 - RNA, 19 nt, Artificial Sequence
  Description of Artificial Sequence: Synthetic oligonucleotide
  Antisense strand to SEQ ID NO: 843488
gauggcagucgauuaagca

SEQ ID NO: 843490 - RNA, 19 nt, Artificial Sequence
  Description of Artificial Sequence: Synthetic oligonucleotide
  Sense strand starting at position 2309 of SEQ ID NO: 588120
gacugccauccuugagacu

SEQ ID NO: 843491 - RNA, 19 nt, Artificial Sequence
  Description of Artificial Sequence: Synthetic oligonucleotide
  Antisense strand to SEQ ID NO: 843490
agucucaaggauggcaguc

SEQ ID NO: 843492 - RNA, 19 nt, Artificial Sequence
  Description of Artificial Sequence: Synthetic oligonucleotide
  Sense strand starting at position 2488 of SEQ ID NO: 588120
auguaugcacaguguagaa

SEQ ID NO: 843493 - RNA, 19 nt, Artificial Sequence
  Description of Artificial Sequence: Synthetic oligonucleotide
  Antisense strand to SEQ ID NO: 843492
uucuacacugugcauacau

SEQ ID NO: 843494 - RNA, 19 nt, Artificial Sequence
  Description of Artificial Sequence: Synthetic oligonucleotide
  Sense strand starting at position 2577 of SEQ ID NO: 588120
ccauuauuacgguguucgu

SEQ ID NO: 843495 - RNA, 19 nt, Artificial Sequence
  Description of Artificial Sequence: Synthetic oligonucleotide
  Antisense strand to SEQ ID NO: 843494
acgaacaccguaauaaugg

SEQ ID NO: 843496 - RNA, 19 nt, Artificial Sequence
  Description of Artificial Sequence: Synthetic oligonucleotide
  Sense strand starting at position 2587 of SEQ ID NO: 588120
gguguucguccugcuagua

SEQ ID NO: 843497 - RNA, 19 nt, Artificial Sequence
  Description of Artificial Sequence: Synthetic oligonucleotide
  Antisense strand to SEQ ID NO: 843496
uacuagcaggacgaacacc

SEQ ID NO: 843498 - RNA, 19 nt, Artificial Sequence
  Description of Artificial Sequence: Synthetic oligonucleotide
  Sense strand starting at position 2588 of SEQ ID NO: 588120
guguucguccugcuaguau

SEQ ID NO: 843499 - RNA, 19 nt, Artificial Sequence
  Description of Artificial Sequence: Synthetic oligonucleotide
  Antisense strand to SEQ ID NO: 843498
auacuagcaggacgaacac

SEQ ID NO: 843500 - RNA, 19 nt, Artificial Sequence
  Description of Artificial Sequence: Synthetic oligonucleotide
  Sense strand starting at position 2602 of SEQ ID NO: 588120
aguauuguuuccucugcau

SEQ ID NO: 843501 - RNA, 19 nt, Artificial Sequence
  Description of Artificial Sequence: Synthetic oligonucleotide
  Antisense strand to SEQ ID NO: 843500
augcagaggaaacaauacu

SEQ ID NO: 843502 - RNA, 19 nt, Artificial Sequence
  Description of Artificial Sequence: Synthetic oligonucleotide
  Sense strand starting at position 2662 of SEQ ID NO: 588120
cucuguugugcugcuuuaa

SEQ ID NO: 843503 - RNA, 19 nt, Artificial Sequence
  Description of Artificial Sequence: Synthetic oligonucleotide
  Antisense strand to SEQ ID NO: 843502
uuaaagcagcacaacagag

SEQ ID NO: 843504 - RNA, 19 nt, Artificial Sequence
  Description of Artificial Sequence: Synthetic oligonucleotide
  Sense strand starting at position 2663 of SEQ ID NO: 588120
ucuguugugcugcuuuaaa

SEQ ID NO: 843505 - RNA, 19 nt, Artificial Sequence
  Description of Artificial Sequence: Synthetic oligonucleotide
  Antisense strand to SEQ ID NO: 843504
uuuaaagcagcacaacaga

SEQ ID NO: 843506 - RNA, 19 nt, Artificial Sequence
  Description of Artificial Sequence: Synthetic oligonucleotide
  Sense strand starting at position 2780 of SEQ ID NO: 588120
ggguaaacuguuggacauu

SEQ ID NO: 843507 - RNA, 19 nt, Artificial Sequence
  Description of Artificial Sequence: Synthetic oligonucleotide
  Antisense strand to SEQ ID NO: 843506
aauguccaacaguuuaccc

SEQ ID NO: 843508 - RNA, 19 nt, Artificial Sequence
  Description of Artificial Sequence: Synthetic oligonucleotide
  Sense strand starting at position 2781 of SEQ ID NO: 588120
gguaaacuguuggacauuu

SEQ ID NO: 843509 - RNA, 19 nt, Artificial Sequence
  Description of Artificial Sequence: Synthetic oligonucleotide
  Antisense strand to SEQ ID NO: 843508
aaauguccaacaguuuacc

SEQ ID NO: 843510 - RNA, 19 nt, Artificial Sequence
  Description of Artificial Sequence: Synthetic oligonucleotide
  Sense strand starting at position 2819 of SEQ ID NO: 588120
cuauaaagguugccaagau

SEQ ID NO: 843511 - RNA, 19 nt, Artificial Sequence
  Description of Artificial Sequence: Synthetic oligonucleotide
  Antisense strand to SEQ ID NO: 843510
aucuuggcaaccuuuauag

SEQ ID NO: 843512 - RNA, 19 nt, Artificial Sequence
  Description of Artificial Sequence: Synthetic oligonucleotide
  Sense strand starting at position 2944 of SEQ ID NO: 588120
gaguucuggauguggacua

SEQ ID NO: 843513 - RNA, 19 nt, Artificial Sequence
  Description of Artificial Sequence: Synthetic oligonucleotide
  Antisense strand to SEQ ID NO: 843512
uaguccacauccagaacuc

SEQ ID NO: 843514 - RNA, 19 nt, Artificial Sequence
  Description of Artificial Sequence: Synthetic oligonucleotide
  Sense strand starting at position 3068 of SEQ ID NO: 588120
agauguucugcggcagcau

SEQ ID NO: 843515 - RNA, 19 nt, Artificial Sequence
  Description of Artificial Sequence: Synthetic oligonucleotide
  Antisense strand to SEQ ID NO: 843514
augcugccgcagaacaucu

SEQ ID NO: 843516 - RNA, 19 nt, Artificial Sequence
  Description of Artificial Sequence: Synthetic oligonucleotide
  Sense strand starting at position 3229 of SEQ ID NO: 588120
cguccauauuguccugaga

SEQ ID NO: 843517 - RNA, 19 nt, Artificial Sequence
  Description of Artificial Sequence: Synthetic oligonucleotide
  Antisense strand to SEQ ID NO: 843516
ucucaggacaauauggacg

SEQ ID NO: 843518 - RNA, 19 nt, Artificial Sequence
  Description of Artificial Sequence: Synthetic oligonucleotide
  Sense strand starting at position 3232 of SEQ ID NO: 588120
ccauauuguccugagaguu

SEQ ID NO: 843519 - RNA, 19 nt, Artificial Sequence
  Description of Artificial Sequence: Synthetic oligonucleotide
  Antisense strand to SEQ ID NO: 843518
aacucucaggacaauaugg

SEQ ID NO: 843520 - RNA, 19 nt, Artificial Sequence
  Description of Artificial Sequence: Synthetic oligonucleotide
  Sense strand starting at position 3307 of SEQ ID NO: 588120
gcacccaguuccuuguauu

SEQ ID NO: 843521 - RNA, 19 nt, Artificial Sequence
  Description of Artificial Sequence: Synthetic oligonucleotide
  Antisense strand to SEQ ID NO: 843520
aauacaaggaacugggugc

SEQ ID NO: 843522 - RNA, 19 nt, Artificial Sequence
  Description of Artificial Sequence: Synthetic oligonucleotide
  Sense strand starting at position 3310 of SEQ ID NO: 588120
cccaguuccuuguauuaaa

SEQ ID NO: 843523 - RNA, 19 nt, Artificial Sequence
  Description of Artificial Sequence: Synthetic oligonucleotide
  Antisense strand to SEQ ID NO: 843522
uuuaauacaaggaacuggg

SEQ ID NO: 843524 - RNA, 19 nt, Artificial Sequence
  Description of Artificial Sequence: Synthetic oligonucleotide
  Sense strand starting at position 3402 of SEQ ID NO: 588120
gcuacaucucuauggaauc

SEQ ID NO: 843525 - RNA, 19 nt, Artificial Sequence
  Description of Artificial Sequence: Synthetic oligonucleotide
  Antisense strand to SEQ ID NO: 843524
gauuccauagagauguagc

SEQ ID NO: 843526 - RNA, 19 nt, Artificial Sequence
  Description of Artificial Sequence: Synthetic oligonucleotide
  Sense strand starting at position 3431 of SEQ ID NO: 588120
auaucauccuuagcauguu

SEQ ID NO: 843527 - RNA, 19 nt, Artificial Sequence
  Description of Artificial Sequence: Synthetic oligonucleotide
  Antisense strand to SEQ ID NO: 843526
aacaugcuaaggaugauau

SEQ ID NO: 843528 - RNA, 19 nt, Artificial Sequence
  Description of Artificial Sequence: Synthetic oligonucleotide
  Sense strand starting at position 3486 of SEQ ID NO: 588120
gcacuaugauuggcaucuu

SEQ ID NO: 843529 - RNA, 19 nt, Artificial Sequence
  Description of Artificial Sequence: Synthetic oligonucleotide
  Antisense strand to SEQ ID NO: 843528
aagaugccaaucauagugc

SEQ ID NO: 843530 - RNA, 19 nt, Artificial Sequence
  Description of Artificial Sequence: Synthetic oligonucleotide
  Sense strand starting at position 3497 of SEQ ID NO: 588120
ggcaucuuaucaccuugau

SEQ ID NO: 843531 - RNA, 19 nt, Artificial Sequence
  Description of Artificial Sequence: Synthetic oligonucleotide
  Antisense strand to SEQ ID NO: 843530
aucaaggugauaagaugcc

SEQ ID NO: 843532 - RNA, 19 nt, Artificial Sequence
  Description of Artificial Sequence: Synthetic oligonucleotide
  Sense strand starting at position 3711 of SEQ ID NO: 588120
gaguaucaguccucguguu

SEQ ID NO: 843533 - RNA, 19 nt, Artificial Sequence
  Description of Artificial Sequence: Synthetic oligonucleotide
  Antisense strand to SEQ ID NO: 843532
aacacgaggacugauacuc

SEQ ID NO: 843534 - RNA, 19 nt, Artificial Sequence
  Description of Artificial Sequence: Synthetic oligonucleotide
  Sense strand starting at position 3712 of SEQ ID NO: 588120
aguaucaguccucguguua

SEQ ID NO: 843535 - RNA, 19 nt, Artificial Sequence
  Description of Artificial Sequence: Synthetic oligonucleotide
  Antisense strand to SEQ ID NO: 843534
uaacacgaggacugauacu

SEQ ID NO: 843536 - RNA, 19 nt, Artificial Sequence
  Description of Artificial Sequence: Synthetic oligonucleotide
  Sense strand starting at position 3721 of SEQ ID NO: 588120
ccucguguuagagugcauu

SEQ ID NO: 843537 - RNA, 19 nt, Artificial Sequence
  Description of Artificial Sequence: Synthetic oligonucleotide
  Antisense strand to SEQ ID NO: 843536
aaugcacucuaacacgagg

SEQ ID NO: 843538 - RNA, 19 nt, Artificial Sequence
  Description of Artificial Sequence: Synthetic oligonucleotide
  Sense strand starting at position 3727 of SEQ ID NO: 588120
guuagagugcauuggaaac

SEQ ID NO: 843539 - RNA, 19 nt, Artificial Sequence
  Description of Artificial Sequence: Synthetic oligonucleotide
  Antisense strand to SEQ ID NO: 843538
guuuccaaugcacucuaac

SEQ ID NO: 843540 - RNA, 19 nt, Artificial Sequence
  Description of Artificial Sequence: Synthetic oligonucleotide
  Sense strand starting at position 3871 of SEQ ID NO: 588120
ggcugugccguccaaaucu

SEQ ID NO: 843541 - RNA, 19 nt, Artificial Sequence
  Description of Artificial Sequence: Synthetic oligonucleotide
  Antisense strand to SEQ ID NO: 843540
agauuuggacggcacagcc

SEQ ID NO: 843542 - RNA, 19 nt, Artificial Sequence
  Description of Artificial Sequence: Synthetic oligonucleotide
  Sense strand starting at position 474 of SEQ ID NO: 588121
cagagagacuaugucugau

SEQ ID NO: 843543 - RNA, 19 nt, Artificial Sequence
  Description of Artificial Sequence: Synthetic oligonucleotide
  Antisense strand to SEQ ID NO: 843542
aucagacauagucucucug

SEQ ID NO: 843544 - RNA, 19 nt, Artificial Sequence
  Description of Artificial Sequence: Synthetic oligonucleotide
  Sense strand starting at position 476 of SEQ ID NO: 588121
gagagacuaugucugaugu

SEQ ID NO: 843545 - RNA, 19 nt, Artificial Sequence
  Description of Artificial Sequence: Synthetic oligonucleotide
  Antisense strand to SEQ ID NO: 843544
acaucagacauagucucuc

SEQ ID NO: 843546 - RNA, 19 nt, Artificial Sequence
  Description of Artificial Sequence: Synthetic oligonucleotide
  Sense strand starting at position 532 of SEQ ID NO: 588121
auccuauuggcuuaugacu

SEQ ID NO: 843547 - RNA, 19 nt, Artificial Sequence
  Description of Artificial Sequence: Synthetic oligonucleotide
  Antisense strand to SEQ ID NO: 843546
agucauaagccaauaggau

SEQ ID NO: 843548 - RNA, 19 nt, Artificial Sequence
  Description of Artificial Sequence: Synthetic oligonucleotide
  Sense strand starting at position 537 of SEQ ID NO: 588121
auuggcuuaugacuuagaa

SEQ ID NO: 843549 - RNA, 19 nt, Artificial Sequence
  Description of Artificial Sequence: Synthetic oligonucleotide
  Antisense strand to SEQ ID NO: 843548
uucuaagucauaagccaau

SEQ ID NO: 843550 - RNA, 19 nt, Artificial Sequence
  Description of Artificial Sequence: Synthetic oligonucleotide
  Sense strand starting at position 586 of SEQ ID NO: 588121
gguagaauccuaugguaug

SEQ ID NO: 843551 - RNA, 19 nt, Artificial Sequence
  Description of Artificial Sequence: Synthetic oligonucleotide
  Antisense strand to SEQ ID NO: 843550
cauaccauaggauucuacc

SEQ ID NO: 843552 - RNA, 19 nt, Artificial Sequence
  Description of Artificial Sequence: Synthetic oligonucleotide
  Sense strand starting at position 619 of SEQ ID NO: 588121
ccuugaagauguucuguga

SEQ ID NO: 843553 - RNA, 19 nt, Artificial Sequence
  Description of Artificial Sequence: Synthetic oligonucleotide
  Antisense strand to SEQ ID NO: 843552
ucacagaacaucuucaagg

SEQ ID NO: 843554 - RNA, 19 nt, Artificial Sequence
  Description of Artificial Sequence: Synthetic oligonucleotide
  Sense strand starting at position 661 of SEQ ID NO: 588121
auauuuaauuccuggagaa

SEQ ID NO: 843555 - RNA, 19 nt, Artificial Sequence
  Description of Artificial Sequence: Synthetic oligonucleotide
  Antisense strand to SEQ ID NO: 843554
uucuccaggaauuaaauau

SEQ ID NO: 843556 - RNA, 19 nt, Artificial Sequence
  Description of Artificial Sequence: Synthetic oligonucleotide
  Sense strand starting at position 738 of SEQ ID NO: 588121
ggcaaauaugaggaggcuu

SEQ ID NO: 843557 - RNA, 19 nt, Artificial Sequence
  Description of Artificial Sequence: Synthetic oligonucleotide
  Antisense strand to SEQ ID NO: 843556
aagccuccucauauuugcc

SEQ ID NO: 843558 - RNA, 19 nt, Artificial Sequence
  Description of Artificial Sequence: Synthetic oligonucleotide
  Sense strand starting at position 740 of SEQ ID NO: 588121
caaauaugaggaggcuuau

SEQ ID NO: 843559 - RNA, 19 nt, Artificial Sequence
  Description of Artificial Sequence: Synthetic oligonucleotide
  Antisense strand to SEQ ID NO: 843558
auaagccuccucauauuug

SEQ ID NO: 843560 - RNA, 19 nt, Artificial Sequence
  Description of Artificial Sequence: Synthetic oligonucleotide
  Sense strand starting at position 803 of SEQ ID NO: 588121
guacaugaugcuuaaagcu

SEQ ID NO: 843561 - RNA, 19 nt, Artificial Sequence
  Description of Artificial Sequence: Synthetic oligonucleotide
  Antisense strand to SEQ ID NO: 843560
agcuuuaagcaucauguac

SEQ ID NO: 843562 - RNA, 19 nt, Artificial Sequence
  Description of Artificial Sequence: Synthetic oligonucleotide
  Sense strand starting at position 868 of SEQ ID NO: 588121
ugggaugaucuagggcagu

SEQ ID NO: 843563 - RNA, 19 nt, Artificial Sequence
  Description of Artificial Sequence: Synthetic oligonucleotide
  Antisense strand to SEQ ID NO: 843562
acugcccuagaucauccca

SEQ ID NO: 843564 - RNA, 19 nt, Artificial Sequence
  Description of Artificial Sequence: Synthetic oligonucleotide
  Sense strand starting at position 961 of SEQ ID NO: 588121
uccucuaaacuuggaauga

SEQ ID NO: 843565 - RNA, 19 nt, Artificial Sequence
  Description of Artificial Sequence: Synthetic oligonucleotide
  Antisense strand to SEQ ID NO: 843564
ucauuccaaguuuagagga

SEQ ID NO: 843566 - RNA, 19 nt, Artificial Sequence
  Description of Artificial Sequence: Synthetic oligonucleotide
  Sense strand starting at position 1353 of SEQ ID NO: 588121
augacuaugcucugugaag

SEQ ID NO: 843567 - RNA, 19 nt, Artificial Sequence
  Description of Artificial Sequence: Synthetic oligonucleotide
  Antisense strand to SEQ ID NO: 843566
cuucacagagcauagucau

SEQ ID NO: 843568 - RNA, 19 nt, Artificial Sequence
  Description of Artificial Sequence: Synthetic oligonucleotide
  Sense strand starting at position 1512 of SEQ ID NO: 588121
ggcaguagauauguaaaua

SEQ ID NO: 843569 - RNA, 19 nt, Artificial Sequence
  Description of Artificial Sequence: Synthetic oligonucleotide
  Antisense strand to SEQ ID NO: 843568
uauuuacauaucuacugcc

SEQ ID NO: 843570 - RNA, 19 nt, Artificial Sequence
  Description of Artificial Sequence: Synthetic oligonucleotide
  Sense strand starting at position 1562 of SEQ ID NO: 588121
agaguugagaguugaaaug

SEQ ID NO: 843571 - RNA, 19 nt, Artificial Sequence
  Description of Artificial Sequence: Synthetic oligonucleotide
  Antisense strand to SEQ ID NO: 843570
cauuucaacucucaacucu

SEQ ID NO: 843572 - RNA, 19 nt, Artificial Sequence
  Description of Artificial Sequence: Synthetic oligonucleotide
  Sense strand starting at position 1724 of SEQ ID NO: 588121
ucaggaaaggugugaauga

SEQ ID NO: 843573 - RNA, 19 nt, Artificial Sequence
  Description of Artificial Sequence: Synthetic oligonucleotide
  Antisense strand to SEQ ID NO: 843572
ucauucacaccuuuccuga

SEQ ID NO: 843574 - RNA, 19 nt, Artificial Sequence
  Description of Artificial Sequence: Synthetic oligonucleotide
  Sense strand starting at position 1921 of SEQ ID NO: 588121
uuacuuacaguuugggaga

SEQ ID NO: 843575 - RNA, 19 nt, Artificial Sequence
  Description of Artificial Sequence: Synthetic oligonucleotide
  Antisense strand to SEQ ID NO: 843574
ucucccaaacuguaaguaa

SEQ ID NO: 843576 - RNA, 19 nt, Artificial Sequence
  Description of Artificial Sequence: Synthetic oligonucleotide
  Sense strand starting at position 1994 of SEQ ID NO: 588121
gacagaucuuugguagcac

SEQ ID NO: 843577 - RNA, 19 nt, Artificial Sequence
  Description of Artificial Sequence: Synthetic oligonucleotide
  Antisense strand to SEQ ID NO: 843576
gugcuaccaaagaucuguc

SEQ ID NO: 843578 - RNA, 19 nt, Artificial Sequence
  Description of Artificial Sequence: Synthetic oligonucleotide
  Sense strand starting at position 2022 of SEQ ID NO: 588121
auagacuucucaucauguu

SEQ ID NO: 843579 - RNA, 19 nt, Artificial Sequence
  Description of Artificial Sequence: Synthetic oligonucleotide
  Antisense strand to SEQ ID NO: 843578
aacaugaugagaagucuau

SEQ ID NO: 843580 - RNA, 19 nt, Artificial Sequence
  Description of Artificial Sequence: Synthetic oligonucleotide
  Sense strand starting at position 2104 of SEQ ID NO: 588121
accucugauuggcucauaa

SEQ ID NO: 843581 - RNA, 19 nt, Artificial Sequence
  Description of Artificial Sequence: Synthetic oligonucleotide
  Antisense strand to SEQ ID NO: 843580
uuaugagccaaucagaggu

SEQ ID NO: 843582 - RNA, 19 nt, Artificial Sequence
  Description of Artificial Sequence: Synthetic oligonucleotide
  Sense strand starting at position 2106 of SEQ ID NO: 588121
cucugauuggcucauaaac

SEQ ID NO: 843583 - RNA, 19 nt, Artificial Sequence
  Description of Artificial Sequence: Synthetic oligonucleotide
  Antisense strand to SEQ ID NO: 843582
guuuaugagccaaucagag

SEQ ID NO: 843584 - RNA, 19 nt, Artificial Sequence
  Description of Artificial Sequence: Synthetic oligonucleotide
  Sense strand starting at position 2159 of SEQ ID NO: 588121
augcucauagaauguuaaa

SEQ ID NO: 843585 - RNA, 19 nt, Artificial Sequence
  Description of Artificial Sequence: Synthetic oligonucleotide
  Antisense strand to SEQ ID NO: 843584
uuuaacauucuaugagcau

SEQ ID NO: 843586 - RNA, 19 nt, Artificial Sequence
  Description of Artificial Sequence: Synthetic oligonucleotide
  Sense strand starting at position 2170 of SEQ ID NO: 588121
auguuaaagcugcaaggaa

SEQ ID NO: 843587 - RNA, 19 nt, Artificial Sequence
  Description of Artificial Sequence: Synthetic oligonucleotide
  Antisense strand to SEQ ID NO: 843586
uuccuugcagcuuuaacau

SEQ ID NO: 843588 - RNA, 19 nt, Artificial Sequence
  Description of Artificial Sequence: Synthetic oligonucleotide
  Sense strand starting at position 2182 of SEQ ID NO: 588121
caaggaaugucuuuagacc

SEQ ID NO: 843589 - RNA, 19 nt, Artificial Sequence
  Description of Artificial Sequence: Synthetic oligonucleotide
  Antisense strand to SEQ ID NO: 843588
ggucuaaagacauuccuug

SEQ ID NO: 843590 - RNA, 19 nt, Artificial Sequence
  Description of Artificial Sequence: Synthetic oligonucleotide
  Sense strand starting at position 2259 of SEQ ID NO: 588121
uaaggagguucccuuaagu

SEQ ID NO: 843591 - RNA, 19 nt, Artificial Sequence
  Description of Artificial Sequence: Synthetic oligonucleotide
  Antisense strand to SEQ ID NO: 843590
acuuaagggaaccuccuua

SEQ ID NO: 843592 - RNA, 19 nt, Artificial Sequence
  Description of Artificial Sequence: Synthetic oligonucleotide
  Sense strand starting at position 2277 of SEQ ID NO: 588121
ucauacagcuagucaauga

SEQ ID NO: 843593 - RNA, 19 nt, Artificial Sequence
  Description of Artificial Sequence: Synthetic oligonucleotide
  Antisense strand to SEQ ID NO: 843592
ucauugacuagcuguauga

SEQ ID NO: 843594 - RNA, 19 nt, Artificial Sequence
  Description of Artificial Sequence: Synthetic oligonucleotide
  Sense strand starting at position 2281 of SEQ ID NO: 588121
acagcuagucaaugaugga

SEQ ID NO: 843595 - RNA, 19 nt, Artificial Sequence
  Description of Artificial Sequence: Synthetic oligonucleotide
  Antisense strand to SEQ ID NO: 843594
uccaucauugacuagcugu

SEQ ID NO: 843596 - RNA, 19 nt, Artificial Sequence
  Description of Artificial Sequence: Synthetic oligonucleotide
  Sense strand starting at position 2299 of SEQ ID NO: 588121
agcucuaggguccauuaaa

SEQ ID NO: 843597 - RNA, 19 nt, Artificial Sequence
  Description of Artificial Sequence: Synthetic oligonucleotide
  Antisense strand to SEQ ID NO: 843596
uuuaauggacccuagagcu

SEQ ID NO: 843598 - RNA, 19 nt, Artificial Sequence
  Description of Artificial Sequence: Synthetic oligonucleotide
  Sense strand starting at position 2451 of SEQ ID NO: 588121
ggagcauuaagugaguugu

SEQ ID NO: 843599 - RNA, 19 nt, Artificial Sequence
  Description of Artificial Sequence: Synthetic oligonucleotide
  Antisense strand to SEQ ID NO: 843598
acaacucacuuaaugcucc

SEQ ID NO: 843600 - RNA, 19 nt, Artificial Sequence
  Description of Artificial Sequence: Synthetic oligonucleotide
  Sense strand starting at position 2515 of SEQ ID NO: 588121
uuagguaaucaaugcuaua

SEQ ID NO: 843601 - RNA, 19 nt, Artificial Sequence
  Description of Artificial Sequence: Synthetic oligonucleotide
  Antisense strand to SEQ ID NO: 843600
uauagcauugauuaccuaa

SEQ ID NO: 843602 - RNA, 19 nt, Artificial Sequence
  Description of Artificial Sequence: Synthetic oligonucleotide
  Sense strand starting at position 2550 of SEQ ID NO: 588121
ucaguauaucauuaguagu

SEQ ID NO: 843603 - RNA, 19 nt, Artificial Sequence
  Description of Artificial Sequence: Synthetic oligonucleotide
  Antisense strand to SEQ ID NO: 843602
acuacuaaugauauacuga

SEQ ID NO: 843604 - RNA, 19 nt, Artificial Sequence
  Description of Artificial Sequence: Synthetic oligonucleotide
  Sense strand starting at position 3077 of SEQ ID NO: 588121
ugaacauguuccucuggaa

SEQ ID NO: 843605 - RNA, 19 nt, Artificial Sequence
  Description of Artificial Sequence: Synthetic oligonucleotide
  Antisense strand to SEQ ID NO: 843604
uuccagaggaacauguuca

SEQ ID NO: 843606 - RNA, 19 nt, Artificial Sequence
  Description of Artificial Sequence: Synthetic oligonucleotide
  Sense strand starting at position 3118 of SEQ ID NO: 588121
aacuaagaugcuugauugu

SEQ ID NO: 843607 - RNA, 19 nt, Artificial Sequence
  Description of Artificial Sequence: Synthetic oligonucleotide
  Antisense strand to SEQ ID NO: 843606
acaaucaagcaucuuaguu

SEQ ID NO: 843608 - RNA, 19 nt, Artificial Sequence
  Description of Artificial Sequence: Synthetic oligonucleotide
  Sense strand starting at position 3339 of SEQ ID NO: 588121
ccaggaaaggugugaauga

SEQ ID NO: 843609 - RNA, 19 nt, Artificial Sequence
  Description of Artificial Sequence: Synthetic oligonucleotide
  Antisense strand to SEQ ID NO: 843608
ucauucacaccuuuccugg

SEQ ID NO: 843610 - RNA, 19 nt, Artificial Sequence
  Description of Artificial Sequence: Synthetic oligonucleotide
  Sense strand starting at position 3557 of SEQ ID NO: 588121
cccuguccugaggauagua

SEQ ID NO: 843611 - RNA, 19 nt, Artificial Sequence
  Description of Artificial Sequence: Synthetic oligonucleotide
  Antisense strand to SEQ ID NO: 843610
uacuauccucaggacaggg

SEQ ID NO: 843612 - RNA, 19 nt, Artificial Sequence
  Description of Artificial Sequence: Synthetic oligonucleotide
  Sense strand starting at position 3565 of SEQ ID NO: 588121
ugaggauaguagagggaua

SEQ ID NO: 843613 - RNA, 19 nt, Artificial Sequence
  Description of Artificial Sequence: Synthetic oligonucleotide
  Antisense strand to SEQ ID NO: 843612
uaucccucuacuauccuca

SEQ ID NO: 843614 - RNA, 19 nt, Artificial Sequence
  Description of Artificial Sequence: Synthetic oligonucleotide
  Sense strand starting at position 3698 of SEQ ID NO: 588121
gaccaaugugaccagcuuu

SEQ ID NO: 843615 - RNA, 19 nt, Artificial Sequence
  Description of Artificial Sequence: Synthetic oligonucleotide
  Antisense strand to SEQ ID NO: 843614
aaagcuggucacauugguc

SEQ ID NO: 843616 - RNA, 19 nt, Artificial Sequence
  Description of Artificial Sequence: Synthetic oligonucleotide
  Sense strand starting at position 3794 of SEQ ID NO: 588121
aauagagaguggguguaau

SEQ ID NO: 843617 - RNA, 19 nt, Artificial Sequence
  Description of Artificial Sequence: Synthetic oligonucleotide
  Antisense strand to SEQ ID NO: 843616
auuacacccacucucuauu

SEQ ID NO: 843618 - RNA, 19 nt, Artificial Sequence
  Description of Artificial Sequence: Synthetic oligonucleotide
  Sense strand starting at position 3809 of SEQ ID NO: 588121
uaaugaaaguuguuaggag

SEQ ID NO: 843619 - RNA, 19 nt, Artificial Sequence
  Description of Artificial Sequence: Synthetic oligonucleotide
  Antisense strand to SEQ ID NO: 843618
cuccuaacaacuuucauua

SEQ ID NO: 843620 - RNA, 19 nt, Artificial Sequence
  Description of Artificial Sequence: Synthetic oligonucleotide
  Sense strand starting at position 3862 of SEQ ID NO: 588121
auucuaccugcugagagau

SEQ ID NO: 843621 - RNA, 19 nt, Artificial Sequence
  Description of Artificial Sequence: Synthetic oligonucleotide
  Antisense strand to SEQ ID NO: 843620
aucucucagcagguagaau

SEQ ID NO: 843622 - RNA, 19 nt, Artificial Sequence
  Description of Artificial Sequence: Synthetic oligonucleotide
  Sense strand starting at position 312 of SEQ ID NO: 588122
acauuaguguccuuuaagg

SEQ ID NO: 843623 - RNA, 19 nt, Artificial Sequence
  Description of Artificial Sequence: Synthetic oligonucleotide
  Antisense strand to SEQ ID NO: 843622
ccuuaaaggacacuaaugu

SEQ ID NO: 843624 - RNA, 19 nt, Artificial Sequence
  Description of Artificial Sequence: Synthetic oligonucleotide
  Sense strand starting at position 314 of SEQ ID NO: 588122
auuaguguccuuuaaggag

SEQ ID NO: 843625 - RNA, 19 nt, Artificial Sequence
  Description of Artificial Sequence: Synthetic oligonucleotide
  Antisense strand to SEQ ID NO: 843624
cuccuuaaaggacacuaau

SEQ ID NO: 843626 - RNA, 19 nt, Artificial Sequence
  Description of Artificial Sequence: Synthetic oligonucleotide
  Sense strand starting at position 320 of SEQ ID NO: 588122
guccuuuaaggagaauguu

SEQ ID NO: 843627 - RNA, 19 nt, Artificial Sequence
  Description of Artificial Sequence: Synthetic oligonucleotide
  Antisense strand to SEQ ID NO: 843626
aacauucuccuuaaaggac

SEQ ID NO: 843628 - RNA, 19 nt, Artificial Sequence
  Description of Artificial Sequence: Synthetic oligonucleotide
  Sense strand starting at position 323 of SEQ ID NO: 588122
cuuuaaggagaauguuuaa

SEQ ID NO: 843629 - RNA, 19 nt, Artificial Sequence
  Description of Artificial Sequence: Synthetic oligonucleotide
  Antisense strand to SEQ ID NO: 843628
uuaaacauucuccuuaaag

SEQ ID NO: 843630 - RNA, 19 nt, Artificial Sequence
  Description of Artificial Sequence: Synthetic oligonucleotide
  Sense strand starting at position 330 of SEQ ID NO: 588122
gagaauguuuaauuaugac

SEQ ID NO: 843631 - RNA, 19 nt, Artificial Sequence
  Description of Artificial Sequence: Synthetic oligonucleotide
  Antisense strand to SEQ ID NO: 843630
gucauaauuaaacauucuc

SEQ ID NO: 843632 - RNA, 19 nt, Artificial Sequence
  Description of Artificial Sequence: Synthetic oligonucleotide
  Sense strand starting at position 389 of SEQ ID NO: 588122
ugaagugaaucucuaauau

SEQ ID NO: 843633 - RNA, 19 nt, Artificial Sequence
  Description of Artificial Sequence: Synthetic oligonucleotide
  Antisense strand to SEQ ID NO: 843632
auauuagagauucacuuca

SEQ ID NO: 843634 - RNA, 19 nt, Artificial Sequence
  Description of Artificial Sequence: Synthetic oligonucleotide
  Sense strand starting at position 717 of SEQ ID NO: 588122
ccuaauaguagguauguca

SEQ ID NO: 843635 - RNA, 19 nt, Artificial Sequence
  Description of Artificial Sequence: Synthetic oligonucleotide
  Antisense strand to SEQ ID NO: 843634
ugacauaccuacuauuagg

SEQ ID NO: 843636 - RNA, 19 nt, Artificial Sequence
  Description of Artificial Sequence: Synthetic oligonucleotide
  Sense strand starting at position 720 of SEQ ID NO: 588122
aauaguagguaugucauaa

SEQ ID NO: 843637 - RNA, 19 nt, Artificial Sequence
  Description of Artificial Sequence: Synthetic oligonucleotide
  Antisense strand to SEQ ID NO: 843636
uuaugacauaccuacuauu

SEQ ID NO: 843638 - RNA, 19 nt, Artificial Sequence
  Description of Artificial Sequence: Synthetic oligonucleotide
  Sense strand starting at position 826 of SEQ ID NO: 588122
gaaacuuaacgguggcuau

SEQ ID NO: 843639 - RNA, 19 nt, Artificial Sequence
  Description of Artificial Sequence: Synthetic oligonucleotide
  Antisense strand to SEQ ID NO: 843638
auagccaccguuaaguuuc

SEQ ID NO: 843640 - RNA, 19 nt, Artificial Sequence
  Description of Artificial Sequence: Synthetic oligonucleotide
  Sense strand starting at position 839 of SEQ ID NO: 588122
ggcuaucuucagggaguag

SEQ ID NO: 843641 - RNA, 19 nt, Artificial Sequence
  Description of Artificial Sequence: Synthetic oligonucleotide
  Antisense strand to SEQ ID NO: 843640
cuacucccugaagauagcc

SEQ ID NO: 843642 - RNA, 19 nt, Artificial Sequence
  Description of Artificial Sequence: Synthetic oligonucleotide
  Sense strand starting at position 989 of SEQ ID NO: 588122
ggcagauccagguggacau

SEQ ID NO: 843643 - RNA, 19 nt, Artificial Sequence
  Description of Artificial Sequence: Synthetic oligonucleotide
  Antisense strand to SEQ ID NO: 843642
auguccaccuggaucugcc

SEQ ID NO: 843644 - RNA, 19 nt, Artificial Sequence
  Description of Artificial Sequence: Synthetic oligonucleotide
  Sense strand starting at position 1210 of SEQ ID NO: 588122
gaagacaacacgcgaguua

SEQ ID NO: 843645 - RNA, 19 nt, Artificial Sequence
  Description of Artificial Sequence: Synthetic oligonucleotide
  Antisense strand to SEQ ID NO: 843644
uaacucgcguguugucuuc

SEQ ID NO: 843646 - RNA, 19 nt, Artificial Sequence
  Description of Artificial Sequence: Synthetic oligonucleotide
  Sense strand starting at position 1222 of SEQ ID NO: 588122
cgaguuacucauuaguaaa

SEQ ID NO: 843647 - RNA, 19 nt, Artificial Sequence
  Description of Artificial Sequence: Synthetic oligonucleotide
  Antisense strand to SEQ ID NO: 843646
uuuacuaaugaguaacucg

SEQ ID NO: 843648 - RNA, 19 nt, Artificial Sequence
  Description of Artificial Sequence: Synthetic oligonucleotide
  Sense strand starting at position 1290 of SEQ ID NO: 588122
acuaucuaccucggaauca

SEQ ID NO: 843649 - RNA, 19 nt, Artificial Sequence
  Description of Artificial Sequence: Synthetic oligonucleotide
  Antisense strand to SEQ ID NO: 843648
ugauuccgagguagauagu

SEQ ID NO: 843650 - RNA, 19 nt, Artificial Sequence
  Description of Artificial Sequence: Synthetic oligonucleotide
  Sense strand starting at position 1451 of SEQ ID NO: 588122
cccugacuucuccauguca

SEQ ID NO: 843651 - RNA, 19 nt, Artificial Sequence
  Description of Artificial Sequence: Synthetic oligonucleotide
  Antisense strand to SEQ ID NO: 843650
ugacauggagaagucaggg

SEQ ID NO: 843652 - RNA, 19 nt, Artificial Sequence
  Description of Artificial Sequence: Synthetic oligonucleotide
  Sense strand starting at position 1494 of SEQ ID NO: 588122
cagggaaggucuucucuca

SEQ ID NO: 843653 - RNA, 19 nt, Artificial Sequence
  Description of Artificial Sequence: Synthetic oligonucleotide
  Antisense strand to SEQ ID NO: 843652
ugagagaagaccuucccug

SEQ ID NO: 843654 - RNA, 19 nt, Artificial Sequence
  Description of Artificial Sequence: Synthetic oligonucleotide
  Sense strand starting at position 1740 of SEQ ID NO: 588122
cggcucucggcgaaacagu

SEQ ID NO: 843655 - RNA, 19 nt, Artificial Sequence
  Description of Artificial Sequence: Synthetic oligonucleotide
  Antisense strand to SEQ ID NO: 843654
acuguuucgccgagagccg

SEQ ID NO: 843656 - RNA, 19 nt, Artificial Sequence
  Description of Artificial Sequence: Synthetic oligonucleotide
  Sense strand starting at position 1768 of SEQ ID NO: 588122
cguagugcgcuguccagau

SEQ ID NO: 843657 - RNA, 19 nt, Artificial Sequence
  Description of Artificial Sequence: Synthetic oligonucleotide
  Antisense strand to SEQ ID NO: 843656
aucuggacagcgcacuacg

SEQ ID NO: 843658 - RNA, 19 nt, Artificial Sequence
  Description of Artificial Sequence: Synthetic oligonucleotide
  Sense strand starting at position 2078 of SEQ ID NO: 588122
ucuaguaacugccugagaa

SEQ ID NO: 843659 - RNA, 19 nt, Artificial Sequence
  Description of Artificial Sequence: Synthetic oligonucleotide
  Antisense strand to SEQ ID NO: 843658
uucucaggcaguuacuaga

SEQ ID NO: 843660 - RNA, 19 nt, Artificial Sequence
  Description of Artificial Sequence: Synthetic oligonucleotide
  Sense strand starting at position 2079 of SEQ ID NO: 588122
cuaguaacugccugagaaa

SEQ ID NO: 843661 - RNA, 19 nt, Artificial Sequence
  Description of Artificial Sequence: Synthetic oligonucleotide
  Antisense strand to SEQ ID NO: 843660
uuucucaggcaguuacuag

SEQ ID NO: 843662 - RNA, 19 nt, Artificial Sequence
  Description of Artificial Sequence: Synthetic oligonucleotide
  Sense strand starting at position 2142 of SEQ ID NO: 588122
ggacuuucugaaggacguu

SEQ ID NO: 843663 - RNA, 19 nt, Artificial Sequence
  Description of Artificial Sequence: Synthetic oligonucleotide
  Antisense strand to SEQ ID NO: 843662
aacguccuucagaaagucc

SEQ ID NO: 843664 - RNA, 19 nt, Artificial Sequence
  Description of Artificial Sequence: Synthetic oligonucleotide
  Sense strand starting at position 2155 of SEQ ID NO: 588122
gacguugugauccaaagga

SEQ ID NO: 843665 - RNA, 19 nt, Artificial Sequence
  Description of Artificial Sequence: Synthetic oligonucleotide
  Antisense strand to SEQ ID NO: 843664
uccuuuggaucacaacguc

SEQ ID NO: 843666 - RNA, 19 nt, Artificial Sequence
  Description of Artificial Sequence: Synthetic oligonucleotide
  Sense strand starting at position 2182 of SEQ ID NO: 588122
ggaggucucuacuucccau

SEQ ID NO: 843667 - RNA, 19 nt, Artificial Sequence
  Description of Artificial Sequence: Synthetic oligonucleotide
  Antisense strand to SEQ ID NO: 843666
augggaaguagagaccucc

SEQ ID NO: 843668 - RNA, 19 nt, Artificial Sequence
  Description of Artificial Sequence: Synthetic oligonucleotide
  Sense strand starting at position 2185 of SEQ ID NO: 588122
ggucucuacuucccauaca

SEQ ID NO: 843669 - RNA, 19 nt, Artificial Sequence
  Description of Artificial Sequence: Synthetic oligonucleotide
  Antisense strand to SEQ ID NO: 843668
uguaugggaaguagagacc

SEQ ID NO: 843670 - RNA, 19 nt, Artificial Sequence
  Description of Artificial Sequence: Synthetic oligonucleotide
  Sense strand starting at position 2212 of SEQ ID NO: 588122
cuaaguugucuguagcaga

SEQ ID NO: 843671 - RNA, 19 nt, Artificial Sequence
  Description of Artificial Sequence: Synthetic oligonucleotide
  Antisense strand to SEQ ID NO: 843670
ucugcuacagacaacuuag

SEQ ID NO: 843672 - RNA, 19 nt, Artificial Sequence
  Description of Artificial Sequence: Synthetic oligonucleotide
  Sense strand starting at position 2238 of SEQ ID NO: 588122
caggcauaucgugagacga

SEQ ID NO: 843673 - RNA, 19 nt, Artificial Sequence
  Description of Artificial Sequence: Synthetic oligonucleotide
  Antisense strand to SEQ ID NO: 843672
ucgucucacgauaugccug

SEQ ID NO: 843674 - RNA, 19 nt, Artificial Sequence
  Description of Artificial Sequence: Synthetic oligonucleotide
  Sense strand starting at position 2693 of SEQ ID NO: 588122
caguucguucgcuuccaga

SEQ ID NO: 843675 - RNA, 19 nt, Artificial Sequence
  Description of Artificial Sequence: Synthetic oligonucleotide
  Antisense strand to SEQ ID NO: 843674
ucuggaagcgaacgaacug

SEQ ID NO: 843676 - RNA, 19 nt, Artificial Sequence
  Description of Artificial Sequence: Synthetic oligonucleotide
  Sense strand starting at position 2695 of SEQ ID NO: 588122
guucguucgcuuccagacu

SEQ ID NO: 843677 - RNA, 19 nt, Artificial Sequence
  Description of Artificial Sequence: Synthetic oligonucleotide
  Antisense strand to SEQ ID NO: 843676
agucuggaagcgaacgaac

SEQ ID NO: 843678 - RNA, 19 nt, Artificial Sequence
  Description of Artificial Sequence: Synthetic oligonucleotide
  Sense strand starting at position 2703 of SEQ ID NO: 588122
gcuuccagacucggagaua

SEQ ID NO: 843679 - RNA, 19 nt, Artificial Sequence
  Description of Artificial Sequence: Synthetic oligonucleotide
  Antisense strand to SEQ ID NO: 843678
uaucuccgagucuggaagc

SEQ ID NO: 843680 - RNA, 19 nt, Artificial Sequence
  Description of Artificial Sequence: Synthetic oligonucleotide
  Sense strand starting at position 2760 of SEQ ID NO: 588122
gcaugugaagauugacaaa

SEQ ID NO: 843681 - RNA, 19 nt, Artificial Sequence
  Description of Artificial Sequence: Synthetic oligonucleotide
  Antisense strand to SEQ ID NO: 843680
uuugucaaucuucacaugc

SEQ ID NO: 843682 - RNA, 19 nt, Artificial Sequence
  Description of Artificial Sequence: Synthetic oligonucleotide
  Sense strand starting at position 2904 of SEQ ID NO: 588122
ggaauagagucagagauaa

SEQ ID NO: 843683 - RNA, 19 nt, Artificial Sequence
  Description of Artificial Sequence: Synthetic oligonucleotide
  Antisense strand to SEQ ID NO: 843682
uuaucucugacucuauucc

SEQ ID NO: 843684 - RNA, 19 nt, Artificial Sequence
  Description of Artificial Sequence: Synthetic oligonucleotide
  Sense strand starting at position 2932 of SEQ ID NO: 588122
aaccgaugucauuaaacug

SEQ ID NO: 843685 - RNA, 19 nt, Artificial Sequence
  Description of Artificial Sequence: Synthetic oligonucleotide
  Antisense strand to SEQ ID NO: 843684
caguuuaaugacaucgguu

SEQ ID NO: 843686 - RNA, 19 nt, Artificial Sequence
  Description of Artificial Sequence: Synthetic oligonucleotide
  Sense strand starting at position 3015 of SEQ ID NO: 588122
acagauaacucguccuaca

SEQ ID NO: 843687 - RNA, 19 nt, Artificial Sequence
  Description of Artificial Sequence: Synthetic oligonucleotide
  Antisense strand to SEQ ID NO: 843686
uguaggacgaguuaucugu

SEQ ID NO: 843688 - RNA, 19 nt, Artificial Sequence
  Description of Artificial Sequence: Synthetic oligonucleotide
  Sense strand starting at position 3176 of SEQ ID NO: 588122
agucauaugccagacuuua

SEQ ID NO: 843689 - RNA, 19 nt, Artificial Sequence
  Description of Artificial Sequence: Synthetic oligonucleotide
  Antisense strand to SEQ ID NO: 843688
uaaagucuggcauaugacu

SEQ ID NO: 843690 - RNA, 19 nt, Artificial Sequence
  Description of Artificial Sequence: Synthetic oligonucleotide
  Sense strand starting at position 3191 of SEQ ID NO: 588122
uuuaaacucugcuugaaag

SEQ ID NO: 843691 - RNA, 19 nt, Artificial Sequence
  Description of Artificial Sequence: Synthetic oligonucleotide
  Antisense strand to SEQ ID NO: 843690
cuuucaagcagaguuuaaa

SEQ ID NO: 843692 - RNA, 19 nt, Artificial Sequence
  Description of Artificial Sequence: Synthetic oligonucleotide
  Sense strand starting at position 3203 of SEQ ID NO: 588122
uugaaagcuuucucauaag

SEQ ID NO: 843693 - RNA, 19 nt, Artificial Sequence
  Description of Artificial Sequence: Synthetic oligonucleotide
  Antisense strand to SEQ ID NO: 843692
cuuaugagaaagcuuucaa

SEQ ID NO: 843694 - RNA, 19 nt, Artificial Sequence
  Description of Artificial Sequence: Synthetic oligonucleotide
  Sense strand starting at position 3309 of SEQ ID NO: 588122
gcuguuacucuucugcgua

SEQ ID NO: 843695 - RNA, 19 nt, Artificial Sequence
  Description of Artificial Sequence: Synthetic oligonucleotide
  Antisense strand to SEQ ID NO: 843694
uacgcagaagaguaacagc

SEQ ID NO: 843696 - RNA, 19 nt, Artificial Sequence
  Description of Artificial Sequence: Synthetic oligonucleotide
  Sense strand starting at position 3335 of SEQ ID NO: 588122
uuacuuguugcugaacuaa

SEQ ID NO: 843697 - RNA, 19 nt, Artificial Sequence
  Description of Artificial Sequence: Synthetic oligonucleotide
  Antisense strand to SEQ ID NO: 843696
uuaguucagcaacaaguaa

SEQ ID NO: 843698 - RNA, 19 nt, Artificial Sequence
  Description of Artificial Sequence: Synthetic oligonucleotide
  Sense strand starting at position 3767 of SEQ ID NO: 588122
ucgugaacccauuacuguu

SEQ ID NO: 843699 - RNA, 19 nt, Artificial Sequence
  Description of Artificial Sequence: Synthetic oligonucleotide
  Antisense strand to SEQ ID NO: 843698
aacaguaauggguucacga

SEQ ID NO: 843700 - RNA, 19 nt, Artificial Sequence
  Description of Artificial Sequence: Synthetic oligonucleotide
  Sense strand starting at position 3944 of SEQ ID NO: 588122
uuauaagaccagugauguu

SEQ ID NO: 843701 - RNA, 19 nt, Artificial Sequence
  Description of Artificial Sequence: Synthetic oligonucleotide
  Antisense strand to SEQ ID NO: 843700
aacaucacuggucuuauaa

SEQ ID NO: 843702 - RNA, 19 nt, Artificial Sequence
  Description of Artificial Sequence: Synthetic oligonucleotide
  Sense strand starting at position 32 of SEQ ID NO: 588123
agcagagaucugcaacuuc

SEQ ID NO: 843703 - RNA, 19 nt, Artificial Sequence
  Description of Artificial Sequence: Synthetic oligonucleotide
  Antisense strand to SEQ ID NO: 843702
gaaguugcagaucucugcu

SEQ ID NO: 843704 - RNA, 19 nt, Artificial Sequence
  Description of Artificial Sequence: Synthetic oligonucleotide
  Sense strand starting at position 445 of SEQ ID NO: 588123
aggccagaucccuaagagu

SEQ ID NO: 843705 - RNA, 19 nt, Artificial Sequence
  Description of Artificial Sequence: Synthetic oligonucleotide
  Antisense strand to SEQ ID NO: 843704
acucuuagggaucuggccu

SEQ ID NO: 843706 - RNA, 19 nt, Artificial Sequence
  Description of Artificial Sequence: Synthetic oligonucleotide
  Sense strand starting at position 532 of SEQ ID NO: 588123
agggcuaacucucucaaga

SEQ ID NO: 843707 - RNA, 19 nt, Artificial Sequence
  Description of Artificial Sequence: Synthetic oligonucleotide
  Antisense strand to SEQ ID NO: 843706
ucuugagagaguuagcccu

SEQ ID NO: 843708 - RNA, 19 nt, Artificial Sequence
  Description of Artificial Sequence: Synthetic oligonucleotide
  Sense strand starting at position 548 of SEQ ID NO: 588123
agaugugggaucuguccau

SEQ ID NO: 843709 - RNA, 19 nt, Artificial Sequence
  Description of Artificial Sequence: Synthetic oligonucleotide
  Antisense strand to SEQ ID NO: 843708
auggacagaucccacaucu

SEQ ID NO: 843710 - RNA, 19 nt, Artificial Sequence
  Description of Artificial Sequence: Synthetic oligonucleotide
  Sense strand starting at position 552 of SEQ ID NO: 588123
gugggaucuguccauagcu

SEQ ID NO: 843711 - RNA, 19 nt, Artificial Sequence
  Description of Artificial Sequence: Synthetic oligonucleotide
  Antisense strand to SEQ ID NO: 843710
agcuauggacagaucccac

SEQ ID NO: 843712 - RNA, 19 nt, Artificial Sequence
  Description of Artificial Sequence: Synthetic oligonucleotide
  Sense strand starting at position 951 of SEQ ID NO: 588123
gggcaaggguauucucaaa

SEQ ID NO: 843713 - RNA, 19 nt, Artificial Sequence
  Description of Artificial Sequence: Synthetic oligonucleotide
  Antisense strand to SEQ ID NO: 843712
uuugagaauacccuugccc

SEQ ID NO: 843714 - RNA, 19 nt, Artificial Sequence
  Description of Artificial Sequence: Synthetic oligonucleotide
  Sense strand starting at position 1260 of SEQ ID NO: 588123
gggagucauuagagaagga

SEQ ID NO: 843715 - RNA, 19 nt, Artificial Sequence
  Description of Artificial Sequence: Synthetic oligonucleotide
  Antisense strand to SEQ ID NO: 843714
uccuucucuaaugacuccc

SEQ ID NO: 843716 - RNA, 19 nt, Artificial Sequence
  Description of Artificial Sequence: Synthetic oligonucleotide
  Sense strand starting at position 1356 of SEQ ID NO: 588123
uggagcagguucccauuaa

SEQ ID NO: 843717 - RNA, 19 nt, Artificial Sequence
  Description of Artificial Sequence: Synthetic oligonucleotide
  Antisense strand to SEQ ID NO: 843716
uuaaugggaaccugcucca

SEQ ID NO: 843718 - RNA, 19 nt, Artificial Sequence
  Description of Artificial Sequence: Synthetic oligonucleotide
  Sense strand starting at position 1360 of SEQ ID NO: 588123
gcagguucccauuaacaca

SEQ ID NO: 843719 - RNA, 19 nt, Artificial Sequence
  Description of Artificial Sequence: Synthetic oligonucleotide
  Antisense strand to SEQ ID NO: 843718
uguguuaaugggaaccugc

SEQ ID NO: 843720 - RNA, 19 nt, Artificial Sequence
  Description of Artificial Sequence: Synthetic oligonucleotide
  Sense strand starting at position 1418 of SEQ ID NO: 588123
gaggauguuugacucauag

SEQ ID NO: 843721 - RNA, 19 nt, Artificial Sequence
  Description of Artificial Sequence: Synthetic oligonucleotide
  Antisense strand to SEQ ID NO: 843720
cuaugagucaaacauccuc

SEQ ID NO: 843722 - RNA, 19 nt, Artificial Sequence
  Description of Artificial Sequence: Synthetic oligonucleotide
  Sense strand starting at position 1432 of SEQ ID NO: 588123
cauagaaugucagccaaga

SEQ ID NO: 843723 - RNA, 19 nt, Artificial Sequence
  Description of Artificial Sequence: Synthetic oligonucleotide
  Antisense strand to SEQ ID NO: 843722
ucuuggcugacauucuaug

SEQ ID NO: 843724 - RNA, 19 nt, Artificial Sequence
  Description of Artificial Sequence: Synthetic oligonucleotide
  Sense strand starting at position 1611 of SEQ ID NO: 588123
gcagccuuacccgagagau

SEQ ID NO: 843725 - RNA, 19 nt, Artificial Sequence
  Description of Artificial Sequence: Synthetic oligonucleotide
  Antisense strand to SEQ ID NO: 843724
aucucucggguaaggcugc

SEQ ID NO: 843726 - RNA, 19 nt, Artificial Sequence
  Description of Artificial Sequence: Synthetic oligonucleotide
  Sense strand starting at position 1613 of SEQ ID NO: 588123
agccuuacccgagagauau

SEQ ID NO: 843727 - RNA, 19 nt, Artificial Sequence
  Description of Artificial Sequence: Synthetic oligonucleotide
  Antisense strand to SEQ ID NO: 843726
auaucucucggguaaggcu

SEQ ID NO: 843728 - RNA, 19 nt, Artificial Sequence
  Description of Artificial Sequence: Synthetic oligonucleotide
  Sense strand starting at position 2147 of SEQ ID NO: 588123
gcccauuucucacaggaaa

SEQ ID NO: 843729 - RNA, 19 nt, Artificial Sequence
  Description of Artificial Sequence: Synthetic oligonucleotide
  Antisense strand to SEQ ID NO: 843728
uuuccugugagaaaugggc

SEQ ID NO: 843730 - RNA, 19 nt, Artificial Sequence
  Description of Artificial Sequence: Synthetic oligonucleotide
  Sense strand starting at position 2183 of SEQ ID NO: 588123
gaggaagugacuugccaga

SEQ ID NO: 843731 - RNA, 19 nt, Artificial Sequence
  Description of Artificial Sequence: Synthetic oligonucleotide
  Antisense strand to SEQ ID NO: 843730
ucuggcaagucacuuccuc

SEQ ID NO: 843732 - RNA, 19 nt, Artificial Sequence
  Description of Artificial Sequence: Synthetic oligonucleotide
  Sense strand starting at position 2185 of SEQ ID NO: 588123
ggaagugacuugccagaga

SEQ ID NO: 843733 - RNA, 19 nt, Artificial Sequence
  Description of Artificial Sequence: Synthetic oligonucleotide
  Antisense strand to SEQ ID NO: 843732
ucucuggcaagucacuucc

SEQ ID NO: 843734 - RNA, 19 nt, Artificial Sequence
  Description of Artificial Sequence: Synthetic oligonucleotide
  Sense strand starting at position 2242 of SEQ ID NO: 588123
cagguauccugucuccaga

SEQ ID NO: 843735 - RNA, 19 nt, Artificial Sequence
  Description of Artificial Sequence: Synthetic oligonucleotide
  Antisense strand to SEQ ID NO: 843734
ucuggagacaggauaccug

SEQ ID NO: 843736 - RNA, 19 nt, Artificial Sequence
  Description of Artificial Sequence: Synthetic oligonucleotide
  Sense strand starting at position 2392 of SEQ ID NO: 588123
gccacagguguccaguaaa

SEQ ID NO: 843737 - RNA, 19 nt, Artificial Sequence
  Description of Artificial Sequence: Synthetic oligonucleotide
  Antisense strand to SEQ ID NO: 843736
uuuacuggacaccuguggc

SEQ ID NO: 843738 - RNA, 19 nt, Artificial Sequence
  Description of Artificial Sequence: Synthetic oligonucleotide
  Sense strand starting at position 2463 of SEQ ID NO: 588123
ggaguugagucuccaagaa

SEQ ID NO: 843739 - RNA, 19 nt, Artificial Sequence
  Description of Artificial Sequence: Synthetic oligonucleotide
  Antisense strand to SEQ ID NO: 843738
uucuuggagacucaacucc

SEQ ID NO: 843740 - RNA, 19 nt, Artificial Sequence
  Description of Artificial Sequence: Synthetic oligonucleotide
  Sense strand starting at position 2525 of SEQ ID NO: 588123
cugggaaaggcgugguaga

SEQ ID NO: 843741 - RNA, 19 nt, Artificial Sequence
  Description of Artificial Sequence: Synthetic oligonucleotide
  Antisense strand to SEQ ID NO: 843740
ucuaccacgccuuucccag

SEQ ID NO: 843742 - RNA, 19 nt, Artificial Sequence
  Description of Artificial Sequence: Synthetic oligonucleotide
  Sense strand starting at position 2722 of SEQ ID NO: 588123
agaguaagagcugaguguu

SEQ ID NO: 843743 - RNA, 19 nt, Artificial Sequence
  Description of Artificial Sequence: Synthetic oligonucleotide
  Antisense strand to SEQ ID NO: 843742
aacacucagcucuuacucu

SEQ ID NO: 843744 - RNA, 19 nt, Artificial Sequence
  Description of Artificial Sequence: Synthetic oligonucleotide
  Sense strand starting at position 2808 of SEQ ID NO: 588123
ugcagaugugauuaguuag

SEQ ID NO: 843745 - RNA, 19 nt, Artificial Sequence
  Description of Artificial Sequence: Synthetic oligonucleotide
  Antisense strand to SEQ ID NO: 843744
cuaacuaaucacaucugca

SEQ ID NO: 843746 - RNA, 19 nt, Artificial Sequence
  Description of Artificial Sequence: Synthetic oligonucleotide
  Sense strand starting at position 2811 of SEQ ID NO: 588123
agaugugauuaguuagaug

SEQ ID NO: 843747 - RNA, 19 nt, Artificial Sequence
  Description of Artificial Sequence: Synthetic oligonucleotide
  Antisense strand to SEQ ID NO: 843746
caucuaacuaaucacaucu

SEQ ID NO: 843748 - RNA, 19 nt, Artificial Sequence
  Description of Artificial Sequence: Synthetic oligonucleotide
  Sense strand starting at position 2816 of SEQ ID NO: 588123
ugauuaguuagaugagguu

SEQ ID NO: 843749 - RNA, 19 nt, Artificial Sequence
  Description of Artificial Sequence: Synthetic oligonucleotide
  Antisense strand to SEQ ID NO: 843748
aaccucaucuaacuaauca

SEQ ID NO: 843750 - RNA, 19 nt, Artificial Sequence
  Description of Artificial Sequence: Synthetic oligonucleotide
  Sense strand starting at position 2859 of SEQ ID NO: 588123
uccaaugaccgguaucuuu

SEQ ID NO: 843751 - RNA, 19 nt, Artificial Sequence
  Description of Artificial Sequence: Synthetic oligonucleotide
  Antisense strand to SEQ ID NO: 843750
aaagauaccggucauugga

SEQ ID NO: 843752 - RNA, 19 nt, Artificial Sequence
  Description of Artificial Sequence: Synthetic oligonucleotide
  Sense strand starting at position 2862 of SEQ ID NO: 588123
aaugaccgguaucuuuaua

SEQ ID NO: 843753 - RNA, 19 nt, Artificial Sequence
  Description of Artificial Sequence: Synthetic oligonucleotide
  Antisense strand to SEQ ID NO: 843752
uauaaagauaccggucauu

SEQ ID NO: 843754 - RNA, 19 nt, Artificial Sequence
  Description of Artificial Sequence: Synthetic oligonucleotide
  Sense strand starting at position 3062 of SEQ ID NO: 588123
ggaacauggcucugcugaa

SEQ ID NO: 843755 - RNA, 19 nt, Artificial Sequence
  Description of Artificial Sequence: Synthetic oligonucleotide
  Antisense strand to SEQ ID NO: 843754
uucagcagagccauguucc

SEQ ID NO: 843756 - RNA, 19 nt, Artificial Sequence
  Description of Artificial Sequence: Synthetic oligonucleotide
  Sense strand starting at position 3063 of SEQ ID NO: 588123
gaacauggcucugcugaaa

SEQ ID NO: 843757 - RNA, 19 nt, Artificial Sequence
  Description of Artificial Sequence: Synthetic oligonucleotide
  Antisense strand to SEQ ID NO: 843756
uuucagcagagccauguuc

SEQ ID NO: 843758 - RNA, 19 nt, Artificial Sequence
  Description of Artificial Sequence: Synthetic oligonucleotide
  Sense strand starting at position 3621 of SEQ ID NO: 588123
gcucuuggcauggaacauu

SEQ ID NO: 843759 - RNA, 19 nt, Artificial Sequence
  Description of Artificial Sequence: Synthetic oligonucleotide
  Antisense strand to SEQ ID NO: 843758
aauguuccaugccaagagc

SEQ ID NO: 843760 - RNA, 19 nt, Artificial Sequence
  Description of Artificial Sequence: Synthetic oligonucleotide
  Sense strand starting at position 3658 of SEQ ID NO: 588123
cucuguuagagcugggaau

SEQ ID NO: 843761 - RNA, 19 nt, Artificial Sequence
  Description of Artificial Sequence: Synthetic oligonucleotide
  Antisense strand to SEQ ID NO: 843760
auucccagcucuaacagag

SEQ ID NO: 843762 - RNA, 19 nt, Artificial Sequence
  Description of Artificial Sequence: Synthetic oligonucleotide
  Sense strand starting at position 3660 of SEQ ID NO: 588123
cuguuagagcugggaauga

SEQ ID NO: 843763 - RNA, 19 nt, Artificial Sequence
  Description of Artificial Sequence: Synthetic oligonucleotide
  Antisense strand to SEQ ID NO: 843762
ucauucccagcucuaacag

SEQ ID NO: 843764 - RNA, 19 nt, Artificial Sequence
  Description of Artificial Sequence: Synthetic oligonucleotide
  Sense strand starting at position 3745 of SEQ ID NO: 588123
guagucagugcagaaacaa

SEQ ID NO: 843765 - RNA, 19 nt, Artificial Sequence
  Description of Artificial Sequence: Synthetic oligonucleotide
  Antisense strand to SEQ ID NO: 843764
uuguuucugcacugacuac

SEQ ID NO: 843766 - RNA, 19 nt, Artificial Sequence
  Description of Artificial Sequence: Synthetic oligonucleotide
  Sense strand starting at position 3753 of SEQ ID NO: 588123
ugcagaaacaaauggugua

SEQ ID NO: 843767 - RNA, 19 nt, Artificial Sequence
  Description of Artificial Sequence: Synthetic oligonucleotide
  Antisense strand to SEQ ID NO: 843766
uacaccauuuguuucugca

SEQ ID NO: 843768 - RNA, 19 nt, Artificial Sequence
  Description of Artificial Sequence: Synthetic oligonucleotide
  Sense strand starting at position 3754 of SEQ ID NO: 588123
gcagaaacaaaugguguau

SEQ ID NO: 843769 - RNA, 19 nt, Artificial Sequence
  Description of Artificial Sequence: Synthetic oligonucleotide
  Antisense strand to SEQ ID NO: 843768
auacaccauuuguuucugc

SEQ ID NO: 843770 - RNA, 19 nt, Artificial Sequence
  Description of Artificial Sequence: Synthetic oligonucleotide
  Sense strand starting at position 3774 of SEQ ID NO: 588123
augucccuucuguaagauu

SEQ ID NO: 843771 - RNA, 19 nt, Artificial Sequence
  Description of Artificial Sequence: Synthetic oligonucleotide
  Antisense strand to SEQ ID NO: 843770
aaucuuacagaagggacau

SEQ ID NO: 843772 - RNA, 19 nt, Artificial Sequence
  Description of Artificial Sequence: Synthetic oligonucleotide
  Sense strand starting at position 3875 of SEQ ID NO: 588123
aaccuuggccagugauuau

SEQ ID NO: 843773 - RNA, 19 nt, Artificial Sequence
  Description of Artificial Sequence: Synthetic oligonucleotide
  Antisense strand to SEQ ID NO: 843772
auaaucacuggccaagguu

SEQ ID NO: 843774 - RNA, 19 nt, Artificial Sequence
  Description of Artificial Sequence: Synthetic oligonucleotide
  Sense strand starting at position 3886 of SEQ ID NO: 588123
gugauuauauucccuucuu

SEQ ID NO: 843775 - RNA, 19 nt, Artificial Sequence
  Description of Artificial Sequence: Synthetic oligonucleotide
  Antisense strand to SEQ ID NO: 843774
aagaagggaauauaaucac

SEQ ID NO: 843776 - RNA, 19 nt, Artificial Sequence
  Description of Artificial Sequence: Synthetic oligonucleotide
  Sense strand starting at position 3922 of SEQ ID NO: 588123
gcucaaagccaugauguaa

SEQ ID NO: 843777 - RNA, 19 nt, Artificial Sequence
  Description of Artificial Sequence: Synthetic oligonucleotide
  Antisense strand to SEQ ID NO: 843776
uuacaucauggcuuugagc

SEQ ID NO: 843778 - RNA, 19 nt, Artificial Sequence
  Description of Artificial Sequence: Synthetic oligonucleotide
  Sense strand starting at position 3968 of SEQ ID NO: 588123
agcuuucugggacaguuau

SEQ ID NO: 843779 - RNA, 19 nt, Artificial Sequence
  Description of Artificial Sequence: Synthetic oligonucleotide
  Antisense strand to SEQ ID NO: 843778
auaacugucccagaaagcu

SEQ ID NO: 843780 - RNA, 19 nt, Artificial Sequence
  Description of Artificial Sequence: Synthetic oligonucleotide
  Sense strand starting at position 3981 of SEQ ID NO: 588123
aguuaucuucguguuccuu

SEQ ID NO: 843781 - RNA, 19 nt, Artificial Sequence
  Description of Artificial Sequence: Synthetic oligonucleotide
  Antisense strand to SEQ ID NO: 843780
aaggaacacgaagauaacu

SEQ ID NO: 843782 - RNA, 19 nt, Artificial Sequence
  Description of Artificial Sequence: Synthetic oligonucleotide
  Sense strand starting at position 70 of SEQ ID NO: 588124
aggaucaacucugaaacga

SEQ ID NO: 843783 - RNA, 19 nt, Artificial Sequence
  Description of Artificial Sequence: Synthetic oligonucleotide
  Antisense strand to SEQ ID NO: 843782
ucguuucagaguugauccu

SEQ ID NO: 843784 - RNA, 19 nt, Artificial Sequence
  Description of Artificial Sequence: Synthetic oligonucleotide
  Sense strand starting at position 157 of SEQ ID NO: 588124
ucuggucuacagugacaaa

SEQ ID NO: 843785 - RNA, 19 nt, Artificial Sequence
  Description of Artificial Sequence: Synthetic oligonucleotide
  Antisense strand to SEQ ID NO: 843784
uuugucacuguagaccaga

SEQ ID NO: 843786 - RNA, 19 nt, Artificial Sequence
  Description of Artificial Sequence: Synthetic oligonucleotide
  Sense strand starting at position 198 of SEQ ID NO: 588124
aaaguugccguguaacuuu

SEQ ID NO: 843787 - RNA, 19 nt, Artificial Sequence
  Description of Artificial Sequence: Synthetic oligonucleotide
  Antisense strand to SEQ ID NO: 843786
aaaguuacacggcaacuuu

SEQ ID NO: 843788 - RNA, 19 nt, Artificial Sequence
  Description of Artificial Sequence: Synthetic oligonucleotide
  Sense strand starting at position 274 of SEQ ID NO: 588124
ggagcacuccuuuagucca

SEQ ID NO: 843789 - RNA, 19 nt, Artificial Sequence
  Description of Artificial Sequence: Synthetic oligonucleotide
  Antisense strand to SEQ ID NO: 843788
uggacuaaaggagugcucc

SEQ ID NO: 843790 - RNA, 19 nt, Artificial Sequence
  Description of Artificial Sequence: Synthetic oligonucleotide
  Sense strand starting at position 367 of SEQ ID NO: 588124
uggccaaggguaugacaau

SEQ ID NO: 843791 - RNA, 19 nt, Artificial Sequence
  Description of Artificial Sequence: Synthetic oligonucleotide
  Antisense strand to SEQ ID NO: 843790
auugucauacccuuggcca

SEQ ID NO: 843792 - RNA, 19 nt, Artificial Sequence
  Description of Artificial Sequence: Synthetic oligonucleotide
  Sense strand starting at position 368 of SEQ ID NO: 588124
ggccaaggguaugacaauu

SEQ ID NO: 843793 - RNA, 19 nt, Artificial Sequence
  Description of Artificial Sequence: Synthetic oligonucleotide
  Antisense strand to SEQ ID NO: 843792
aauugucauacccuuggcc

SEQ ID NO: 843794 - RNA, 19 nt, Artificial Sequence
  Description of Artificial Sequence: Synthetic oligonucleotide
  Sense strand starting at position 374 of SEQ ID NO: 588124
ggguaugacaauugcuaga

SEQ ID NO: 843795 - RNA, 19 nt, Artificial Sequence
  Description of Artificial Sequence: Synthetic oligonucleotide
  Antisense strand to SEQ ID NO: 843794
ucuagcaauugucauaccc

SEQ ID NO: 843796 - RNA, 19 nt, Artificial Sequence
  Description of Artificial Sequence: Synthetic oligonucleotide
  Sense strand starting at position 376 of SEQ ID NO: 588124
guaugacaauugcuagaga

SEQ ID NO: 843797 - RNA, 19 nt, Artificial Sequence
  Description of Artificial Sequence: Synthetic oligonucleotide
  Antisense strand to SEQ ID NO: 843796
ucucuagcaauugucauac

SEQ ID NO: 843798 - RNA, 19 nt, Artificial Sequence
  Description of Artificial Sequence: Synthetic oligonucleotide
  Sense strand starting at position 404 of SEQ ID NO: 588124
ggaccugucucucacaaca

SEQ ID NO: 843799 - RNA, 19 nt, Artificial Sequence
  Description of Artificial Sequence: Synthetic oligonucleotide
  Antisense strand to SEQ ID NO: 843798
uguugugagagacaggucc

SEQ ID NO: 843800 - RNA, 19 nt, Artificial Sequence
  Description of Artificial Sequence: Synthetic oligonucleotide
  Sense strand starting at position 449 of SEQ ID NO: 588124
gagacugcuugcccucaca

SEQ ID NO: 843801 - RNA, 19 nt, Artificial Sequence
  Description of Artificial Sequence: Synthetic oligonucleotide
  Antisense strand to SEQ ID NO: 843800
ugugagggcaagcagucuc

SEQ ID NO: 843802 - RNA, 19 nt, Artificial Sequence
  Description of Artificial Sequence: Synthetic oligonucleotide
  Sense strand starting at position 471 of SEQ ID NO: 588124
accugaucuuccuggagag

SEQ ID NO: 843803 - RNA, 19 nt, Artificial Sequence
  Description of Artificial Sequence: Synthetic oligonucleotide
  Antisense strand to SEQ ID NO: 843802
cucuccaggaagaucaggu

SEQ ID NO: 843804 - RNA, 19 nt, Artificial Sequence
  Description of Artificial Sequence: Synthetic oligonucleotide
  Sense strand starting at position 472 of SEQ ID NO: 588124
ccugaucuuccuggagaga

SEQ ID NO: 843805 - RNA, 19 nt, Artificial Sequence
  Description of Artificial Sequence: Synthetic oligonucleotide
  Antisense strand to SEQ ID NO: 843804
ucucuccaggaagaucagg

SEQ ID NO: 843806 - RNA, 19 nt, Artificial Sequence
  Description of Artificial Sequence: Synthetic oligonucleotide
  Sense strand starting at position 534 of SEQ ID NO: 588124
cgacgagggugagaaucau

SEQ ID NO: 843807 - RNA, 19 nt, Artificial Sequence
  Description of Artificial Sequence: Synthetic oligonucleotide
  Antisense strand to SEQ ID NO: 843806
augauucucacccucgucg

SEQ ID NO: 843808 - RNA, 19 nt, Artificial Sequence
  Description of Artificial Sequence: Synthetic oligonucleotide
  Sense strand starting at position 579 of SEQ ID NO: 588124
aguggaauucugcagaguc

SEQ ID NO: 843809 - RNA, 19 nt, Artificial Sequence
  Description of Artificial Sequence: Synthetic oligonucleotide
  Antisense strand to SEQ ID NO: 843808
gacucugcagaauuccacu

SEQ ID NO: 843810 - RNA, 19 nt, Artificial Sequence
  Description of Artificial Sequence: Synthetic oligonucleotide
  Sense strand starting at position 581 of SEQ ID NO: 588124
uggaauucugcagagucca

SEQ ID NO: 843811 - RNA, 19 nt, Artificial Sequence
  Description of Artificial Sequence: Synthetic oligonucleotide
  Antisense strand to SEQ ID NO: 843810
uggacucugcagaauucca

SEQ ID NO: 843812 - RNA, 19 nt, Artificial Sequence
  Description of Artificial Sequence: Synthetic oligonucleotide
  Sense strand starting at position 589 of SEQ ID NO: 588124
ugcagaguccaggaaguuu

SEQ ID NO: 843813 - RNA, 19 nt, Artificial Sequence
  Description of Artificial Sequence: Synthetic oligonucleotide
  Antisense strand to SEQ ID NO: 843812
aaacuuccuggacucugca

SEQ ID NO: 843814 - RNA, 19 nt, Artificial Sequence
  Description of Artificial Sequence: Synthetic oligonucleotide
  Sense strand starting at position 601 of SEQ ID NO: 588124
gaaguuuggaguugcuaag

SEQ ID NO: 843815 - RNA, 19 nt, Artificial Sequence
  Description of Artificial Sequence: Synthetic oligonucleotide
  Antisense strand to SEQ ID NO: 843814
cuuagcaacuccaaacuuc

SEQ ID NO: 843816 - RNA, 19 nt, Artificial Sequence
  Description of Artificial Sequence: Synthetic oligonucleotide
  Sense strand starting at position 607 of SEQ ID NO: 588124
uggaguugcuaagaaauuu

SEQ ID NO: 843817 - RNA, 19 nt, Artificial Sequence
  Description of Artificial Sequence: Synthetic oligonucleotide
  Antisense strand to SEQ ID NO: 843816
aaauuucuuagcaacucca

SEQ ID NO: 843818 - RNA, 19 nt, Artificial Sequence
  Description of Artificial Sequence: Synthetic oligonucleotide
  Sense strand starting at position 619 of SEQ ID NO: 588124
gaaauuugcugcugcagac

SEQ ID NO: 843819 - RNA, 19 nt, Artificial Sequence
  Description of Artificial Sequence: Synthetic oligonucleotide
  Antisense strand to SEQ ID NO: 843818
gucugcagcagcaaauuuc

SEQ ID NO: 843820 - RNA, 19 nt, Artificial Sequence
  Description of Artificial Sequence: Synthetic oligonucleotide
  Sense strand starting at position 670 of SEQ ID NO: 588124
caugaaucugugggacuga

SEQ ID NO: 843821 - RNA, 19 nt, Artificial Sequence
  Description of Artificial Sequence: Synthetic oligonucleotide
  Antisense strand to SEQ ID NO: 843820
ucagucccacagauucaug

SEQ ID NO: 843822 - RNA, 19 nt, Artificial Sequence
  Description of Artificial Sequence: Synthetic oligonucleotide
  Sense strand starting at position 671 of SEQ ID NO: 588124
augaaucugugggacugaa

SEQ ID NO: 843823 - RNA, 19 nt, Artificial Sequence
  Description of Artificial Sequence: Synthetic oligonucleotide
  Antisense strand to SEQ ID NO: 843822
uucagucccacagauucau

SEQ ID NO: 843824 - RNA, 19 nt, Artificial Sequence
  Description of Artificial Sequence: Synthetic oligonucleotide
  Sense strand starting at position 756 of SEQ ID NO: 588124
ucugucauguuccugguua

SEQ ID NO: 843825 - RNA, 19 nt, Artificial Sequence
  Description of Artificial Sequence: Synthetic oligonucleotide
  Antisense strand to SEQ ID NO: 843824
uaaccaggaacaugacaga

SEQ ID NO: 843826 - RNA, 19 nt, Artificial Sequence
  Description of Artificial Sequence: Synthetic oligonucleotide
  Sense strand starting at position 758 of SEQ ID NO: 588124
ugucauguuccugguuauc

SEQ ID NO: 843827 - RNA, 19 nt, Artificial Sequence
  Description of Artificial Sequence: Synthetic oligonucleotide
  Antisense strand to SEQ ID NO: 843826
gauaaccaggaacaugaca

SEQ ID NO: 843828 - RNA, 19 nt, Artificial Sequence
  Description of Artificial Sequence: Synthetic oligonucleotide
  Sense strand starting at position 760 of SEQ ID NO: 588124
ucauguuccugguuaucag

SEQ ID NO: 843829 - RNA, 19 nt, Artificial Sequence
  Description of Artificial Sequence: Synthetic oligonucleotide
  Antisense strand to SEQ ID NO: 843828
cugauaaccaggaacauga

SEQ ID NO: 843830 - RNA, 19 nt, Artificial Sequence
  Description of Artificial Sequence: Synthetic oligonucleotide
  Sense strand starting at position 1093 of SEQ ID NO: 588124
gcuggaucaucucuuggaa

SEQ ID NO: 843831 - RNA, 19 nt, Artificial Sequence
  Description of Artificial Sequence: Synthetic oligonucleotide
  Antisense strand to SEQ ID NO: 843830
uuccaagagaugauccagc

SEQ ID NO: 843832 - RNA, 19 nt, Artificial Sequence
  Description of Artificial Sequence: Synthetic oligonucleotide
  Sense strand starting at position 1096 of SEQ ID NO: 588124
ggaucaucucuuggaaggu

SEQ ID NO: 843833 - RNA, 19 nt, Artificial Sequence
  Description of Artificial Sequence: Synthetic oligonucleotide
  Antisense strand to SEQ ID NO: 843832
accuuccaagagaugaucc

SEQ ID NO: 843834 - RNA, 19 nt, Artificial Sequence
  Description of Artificial Sequence: Synthetic oligonucleotide
  Sense strand starting at position 1097 of SEQ ID NO: 588124
gaucaucucuuggaagguu

SEQ ID NO: 843835 - RNA, 19 nt, Artificial Sequence
  Description of Artificial Sequence: Synthetic oligonucleotide
  Antisense strand to SEQ ID NO: 843834
aaccuuccaagagaugauc

SEQ ID NO: 843836 - RNA, 19 nt, Artificial Sequence
  Description of Artificial Sequence: Synthetic oligonucleotide
  Sense strand starting at position 1133 of SEQ ID NO: 588124
caagacuccgcgcaacaua

SEQ ID NO: 843837 - RNA, 19 nt, Artificial Sequence
  Description of Artificial Sequence: Synthetic oligonucleotide
  Antisense strand to SEQ ID NO: 843836
uauguugcgcggagucuug

SEQ ID NO: 843838 - RNA, 19 nt, Artificial Sequence
  Description of Artificial Sequence: Synthetic oligonucleotide
  Sense strand starting at position 1302 of SEQ ID NO: 588124
ggcucauccgcagaguucu

SEQ ID NO: 843839 - RNA, 19 nt, Artificial Sequence
  Description of Artificial Sequence: Synthetic oligonucleotide
  Antisense strand to SEQ ID NO: 843838
agaacucugcggaugagcc

SEQ ID NO: 843840 - RNA, 19 nt, Artificial Sequence
  Description of Artificial Sequence: Synthetic oligonucleotide
  Sense strand starting at position 1314 of SEQ ID NO: 588124
gaguucucgcauugggaga

SEQ ID NO: 843841 - RNA, 19 nt, Artificial Sequence
  Description of Artificial Sequence: Synthetic oligonucleotide
  Antisense strand to SEQ ID NO: 843840
ucucccaaugcgagaacuc

SEQ ID NO: 843842 - RNA, 19 nt, Artificial Sequence
  Description of Artificial Sequence: Synthetic oligonucleotide
  Sense strand starting at position 1315 of SEQ ID NO: 588124
aguucucgcauugggagau

SEQ ID NO: 843843 - RNA, 19 nt, Artificial Sequence
  Description of Artificial Sequence: Synthetic oligonucleotide
  Antisense strand to SEQ ID NO: 843842
aucucccaaugcgagaacu

SEQ ID NO: 843844 - RNA, 19 nt, Artificial Sequence
  Description of Artificial Sequence: Synthetic oligonucleotide
  Sense strand starting at position 2894 of SEQ ID NO: 588124
ucgcuagccaugugguuau

SEQ ID NO: 843845 - RNA, 19 nt, Artificial Sequence
  Description of Artificial Sequence: Synthetic oligonucleotide
  Antisense strand to SEQ ID NO: 843844
auaaccacauggcuagcga

SEQ ID NO: 843846 - RNA, 19 nt, Artificial Sequence
  Description of Artificial Sequence: Synthetic oligonucleotide
  Sense strand starting at position 2905 of SEQ ID NO: 588124
gugguuauuucugcucagu

SEQ ID NO: 843847 - RNA, 19 nt, Artificial Sequence
  Description of Artificial Sequence: Synthetic oligonucleotide
  Antisense strand to SEQ ID NO: 843846
acugagcagaaauaaccac

SEQ ID NO: 843848 - RNA, 19 nt, Artificial Sequence
  Description of Artificial Sequence: Synthetic oligonucleotide
  Sense strand starting at position 2907 of SEQ ID NO: 588124
gguuauuucugcucagugu

SEQ ID NO: 843849 - RNA, 19 nt, Artificial Sequence
  Description of Artificial Sequence: Synthetic oligonucleotide
  Antisense strand to SEQ ID NO: 843848
acacugagcagaaauaacc

SEQ ID NO: 843850 - RNA, 19 nt, Artificial Sequence
  Description of Artificial Sequence: Synthetic oligonucleotide
  Sense strand starting at position 2910 of SEQ ID NO: 588124
uauuucugcucagugugaa

SEQ ID NO: 843851 - RNA, 19 nt, Artificial Sequence
  Description of Artificial Sequence: Synthetic oligonucleotide
  Antisense strand to SEQ ID NO: 843850
uucacacugagcagaaaua

SEQ ID NO: 843852 - RNA, 19 nt, Artificial Sequence
  Description of Artificial Sequence: Synthetic oligonucleotide
  Sense strand starting at position 2911 of SEQ ID NO: 588124
auuucugcucagugugaag

SEQ ID NO: 843853 - RNA, 19 nt, Artificial Sequence
  Description of Artificial Sequence: Synthetic oligonucleotide
  Antisense strand to SEQ ID NO: 843852
cuucacacugagcagaaau

SEQ ID NO: 843854 - RNA, 19 nt, Artificial Sequence
  Description of Artificial Sequence: Synthetic oligonucleotide
  Sense strand starting at position 3008 of SEQ ID NO: 588124
gggucagauuccggaggga

SEQ ID NO: 843855 - RNA, 19 nt, Artificial Sequence
  Description of Artificial Sequence: Synthetic oligonucleotide
  Antisense strand to SEQ ID NO: 843854
ucccuccggaaucugaccc

SEQ ID NO: 843856 - RNA, 19 nt, Artificial Sequence
  Description of Artificial Sequence: Synthetic oligonucleotide
  Sense strand starting at position 3754 of SEQ ID NO: 588124
uuuguaaagauccgugcca

SEQ ID NO: 843857 - RNA, 19 nt, Artificial Sequence
  Description of Artificial Sequence: Synthetic oligonucleotide
  Antisense strand to SEQ ID NO: 843856
uggcacggaucuuuacaaa

SEQ ID NO: 843858 - RNA, 19 nt, Artificial Sequence
  Description of Artificial Sequence: Synthetic oligonucleotide
  Sense strand starting at position 3776 of SEQ ID NO: 588124
ugcugcuugcccguaucaa

SEQ ID NO: 843859 - RNA, 19 nt, Artificial Sequence
  Description of Artificial Sequence: Synthetic oligonucleotide
  Antisense strand to SEQ ID NO: 843858
uugauacgggcaagcagca

SEQ ID NO: 843860 - RNA, 19 nt, Artificial Sequence
  Description of Artificial Sequence: Synthetic oligonucleotide
  Sense strand starting at position 3777 of SEQ ID NO: 588124
gcugcuugcccguaucaac

SEQ ID NO: 843861 - RNA, 19 nt, Artificial Sequence
  Description of Artificial Sequence: Synthetic oligonucleotide
  Antisense strand to SEQ ID NO: 843860
guugauacgggcaagcagc

SEQ ID NO: 843862 - RNA, 19 nt, Artificial Sequence
  Description of Artificial Sequence: Synthetic oligonucleotide
  Sense strand starting at position 130 of SEQ ID NO: 588125
guuuguaaucaucagugac

SEQ ID NO: 843863 - RNA, 19 nt, Artificial Sequence
  Description of Artificial Sequence: Synthetic oligonucleotide
  Antisense strand to SEQ ID NO: 843862
gucacugaugauuacaaac

SEQ ID NO: 843864 - RNA, 19 nt, Artificial Sequence
  Description of Artificial Sequence: Synthetic oligonucleotide
  Sense strand starting at position 132 of SEQ ID NO: 588125
uuguaaucaucagugacca

SEQ ID NO: 843865 - RNA, 19 nt, Artificial Sequence
  Description of Artificial Sequence: Synthetic oligonucleotide
  Antisense strand to SEQ ID NO: 843864
uggucacugaugauuacaa

SEQ ID NO: 843866 - RNA, 19 nt, Artificial Sequence
  Description of Artificial Sequence: Synthetic oligonucleotide
  Sense strand starting at position 215 of SEQ ID NO: 588125
agcuuucuccuagaaagca

SEQ ID NO: 843867 - RNA, 19 nt, Artificial Sequence
  Description of Artificial Sequence: Synthetic oligonucleotide
  Antisense strand to SEQ ID NO: 843866
ugcuuucuaggagaaagcu

SEQ ID NO: 843868 - RNA, 19 nt, Artificial Sequence
  Description of Artificial Sequence: Synthetic oligonucleotide
  Sense strand starting at position 382 of SEQ ID NO: 588125
gguggucaugaggauucua

SEQ ID NO: 843869 - RNA, 19 nt, Artificial Sequence
  Description of Artificial Sequence: Synthetic oligonucleotide
  Antisense strand to SEQ ID NO: 843868
uagaauccucaugaccacc

SEQ ID NO: 843870 - RNA, 19 nt, Artificial Sequence
  Description of Artificial Sequence: Synthetic oligonucleotide
  Sense strand starting at position 405 of SEQ ID NO: 588125
uugagucuggcauagagua

SEQ ID NO: 843871 - RNA, 19 nt, Artificial Sequence
  Description of Artificial Sequence: Synthetic oligonucleotide
  Antisense strand to SEQ ID NO: 843870
uacucuaugccagacucaa

SEQ ID NO: 843872 - RNA, 19 nt, Artificial Sequence
  Description of Artificial Sequence: Synthetic oligonucleotide
  Sense strand starting at position 419 of SEQ ID NO: 588125
gaguaagugcaauauaagu

SEQ ID NO: 843873 - RNA, 19 nt, Artificial Sequence
  Description of Artificial Sequence: Synthetic oligonucleotide
  Antisense strand to SEQ ID NO: 843872
acuuauauugcacuuacuc

SEQ ID NO: 843874 - RNA, 19 nt, Artificial Sequence
  Description of Artificial Sequence: Synthetic oligonucleotide
  Sense strand starting at position 751 of SEQ ID NO: 588125
agagcugacccaugacaca

SEQ ID NO: 843875 - RNA, 19 nt, Artificial Sequence
  Description of Artificial Sequence: Synthetic oligonucleotide
  Antisense strand to SEQ ID NO: 843874
ugugucaugggucagcucu

SEQ ID NO: 843876 - RNA, 19 nt, Artificial Sequence
  Description of Artificial Sequence: Synthetic oligonucleotide
  Sense strand starting at position 802 of SEQ ID NO: 588125
aagaauuuguuuggaaaug

SEQ ID NO: 843877 - RNA, 19 nt, Artificial Sequence
  Description of Artificial Sequence: Synthetic oligonucleotide
  Antisense strand to SEQ ID NO: 843876
cauuuccaaacaaauucuu

SEQ ID NO: 843878 - RNA, 19 nt, Artificial Sequence
  Description of Artificial Sequence: Synthetic oligonucleotide
  Sense strand starting at position 803 of SEQ ID NO: 588125
agaauuuguuuggaaaugu

SEQ ID NO: 843879 - RNA, 19 nt, Artificial Sequence
  Description of Artificial Sequence: Synthetic oligonucleotide
  Antisense strand to SEQ ID NO: 843878
acauuuccaaacaaauucu

SEQ ID NO: 843880 - RNA, 19 nt, Artificial Sequence
  Description of Artificial Sequence: Synthetic oligonucleotide
  Sense strand starting at position 813 of SEQ ID NO: 588125
uggaaauguuaucuaauac

SEQ ID NO: 843881 - RNA, 19 nt, Artificial Sequence
  Description of Artificial Sequence: Synthetic oligonucleotide
  Antisense strand to SEQ ID NO: 843880
guauuagauaacauuucca

SEQ ID NO: 843882 - RNA, 19 nt, Artificial Sequence
  Description of Artificial Sequence: Synthetic oligonucleotide
  Sense strand starting at position 1300 of SEQ ID NO: 588125
gagagugaggcuuacucau

SEQ ID NO: 843883 - RNA, 19 nt, Artificial Sequence
  Description of Artificial Sequence: Synthetic oligonucleotide
  Antisense strand to SEQ ID NO: 843882
augaguaagccucacucuc

SEQ ID NO: 843884 - RNA, 19 nt, Artificial Sequence
  Description of Artificial Sequence: Synthetic oligonucleotide
  Sense strand starting at position 1302 of SEQ ID NO: 588125
gagugaggcuuacucauga

SEQ ID NO: 843885 - RNA, 19 nt, Artificial Sequence
  Description of Artificial Sequence: Synthetic oligonucleotide
  Antisense strand to SEQ ID NO: 843884
ucaugaguaagccucacuc

SEQ ID NO: 843886 - RNA, 19 nt, Artificial Sequence
  Description of Artificial Sequence: Synthetic oligonucleotide
  Sense strand starting at position 1315 of SEQ ID NO: 588125
ucaugaaguccucgagaug

SEQ ID NO: 843887 - RNA, 19 nt, Artificial Sequence
  Description of Artificial Sequence: Synthetic oligonucleotide
  Antisense strand to SEQ ID NO: 843886
caucucgaggacuucauga

SEQ ID NO: 843888 - RNA, 19 nt, Artificial Sequence
  Description of Artificial Sequence: Synthetic oligonucleotide
  Sense strand starting at position 1318 of SEQ ID NO: 588125
ugaaguccucgagaugcca

SEQ ID NO: 843889 - RNA, 19 nt, Artificial Sequence
  Description of Artificial Sequence: Synthetic oligonucleotide
  Antisense strand to SEQ ID NO: 843888
uggcaucucgaggacuuca

SEQ ID NO: 843890 - RNA, 19 nt, Artificial Sequence
  Description of Artificial Sequence: Synthetic oligonucleotide
  Sense strand starting at position 1855 of SEQ ID NO: 588125
gcagcagccucauuugaac

SEQ ID NO: 843891 - RNA, 19 nt, Artificial Sequence
  Description of Artificial Sequence: Synthetic oligonucleotide
  Antisense strand to SEQ ID NO: 843890
guucaaaugaggcugcugc

SEQ ID NO: 843892 - RNA, 19 nt, Artificial Sequence
  Description of Artificial Sequence: Synthetic oligonucleotide
  Sense strand starting at position 2494 of SEQ ID NO: 588125
ggcuuaggacaguggaaau

SEQ ID NO: 843893 - RNA, 19 nt, Artificial Sequence
  Description of Artificial Sequence: Synthetic oligonucleotide
  Antisense strand to SEQ ID NO: 843892
auuuccacuguccuaagcc

SEQ ID NO: 843894 - RNA, 19 nt, Artificial Sequence
  Description of Artificial Sequence: Synthetic oligonucleotide
  Sense strand starting at position 2541 of SEQ ID NO: 588125
ggaggaaagcucugugacu

SEQ ID NO: 843895 - RNA, 19 nt, Artificial Sequence
  Description of Artificial Sequence: Synthetic oligonucleotide
  Antisense strand to SEQ ID NO: 843894
agucacagagcuuuccucc

SEQ ID NO: 843896 - RNA, 19 nt, Artificial Sequence
  Description of Artificial Sequence: Synthetic oligonucleotide
  Sense strand starting at position 2542 of SEQ ID NO: 588125
gaggaaagcucugugacuu

SEQ ID NO: 843897 - RNA, 19 nt, Artificial Sequence
  Description of Artificial Sequence: Synthetic oligonucleotide
  Antisense strand to SEQ ID NO: 843896
aagucacagagcuuuccuc

SEQ ID NO: 843898 - RNA, 19 nt, Artificial Sequence
  Description of Artificial Sequence: Synthetic oligonucleotide
  Sense strand starting at position 2543 of SEQ ID NO: 588125
aggaaagcucugugacuuc

SEQ ID NO: 843899 - RNA, 19 nt, Artificial Sequence
  Description of Artificial Sequence: Synthetic oligonucleotide
  Antisense strand to SEQ ID NO: 843898
gaagucacagagcuuuccu

SEQ ID NO: 843900 - RNA, 19 nt, Artificial Sequence
  Description of Artificial Sequence: Synthetic oligonucleotide
  Sense strand starting at position 2617 of SEQ ID NO: 588125
aucgguaaaugagcuaauu

SEQ ID NO: 843901 - RNA, 19 nt, Artificial Sequence
  Description of Artificial Sequence: Synthetic oligonucleotide
  Antisense strand to SEQ ID NO: 843900
aauuagcucauuuaccgau

SEQ ID NO: 843902 - RNA, 19 nt, Artificial Sequence
  Description of Artificial Sequence: Synthetic oligonucleotide
  Sense strand starting at position 2619 of SEQ ID NO: 588125
cgguaaaugagcuaauuaa

SEQ ID NO: 843903 - RNA, 19 nt, Artificial Sequence
  Description of Artificial Sequence: Synthetic oligonucleotide
  Antisense strand to SEQ ID NO: 843902
uuaauuagcucauuuaccg

SEQ ID NO: 843904 - RNA, 19 nt, Artificial Sequence
  Description of Artificial Sequence: Synthetic oligonucleotide
  Sense strand starting at position 2732 of SEQ ID NO: 588125
agcuuaggacucuggagau

SEQ ID NO: 843905 - RNA, 19 nt, Artificial Sequence
  Description of Artificial Sequence: Synthetic oligonucleotide
  Antisense strand to SEQ ID NO: 843904
aucuccagaguccuaagcu

SEQ ID NO: 843906 - RNA, 19 nt, Artificial Sequence
  Description of Artificial Sequence: Synthetic oligonucleotide
  Sense strand starting at position 2836 of SEQ ID NO: 588125
ugggcucuucuaggaacaa

SEQ ID NO: 843907 - RNA, 19 nt, Artificial Sequence
  Description of Artificial Sequence: Synthetic oligonucleotide
  Antisense strand to SEQ ID NO: 843906
uuguuccuagaagagccca

SEQ ID NO: 843908 - RNA, 19 nt, Artificial Sequence
  Description of Artificial Sequence: Synthetic oligonucleotide
  Sense strand starting at position 3137 of SEQ ID NO: 588125
augugaaauauugguggua

SEQ ID NO: 843909 - RNA, 19 nt, Artificial Sequence
  Description of Artificial Sequence: Synthetic oligonucleotide
  Antisense strand to SEQ ID NO: 843908
uaccaccaauauuucacau

SEQ ID NO: 843910 - RNA, 19 nt, Artificial Sequence
  Description of Artificial Sequence: Synthetic oligonucleotide
  Sense strand starting at position 3138 of SEQ ID NO: 588125
ugugaaauauuggugguau

SEQ ID NO: 843911 - RNA, 19 nt, Artificial Sequence
  Description of Artificial Sequence: Synthetic oligonucleotide
  Antisense strand to SEQ ID NO: 843910
auaccaccaauauuucaca

SEQ ID NO: 843912 - RNA, 19 nt, Artificial Sequence
  Description of Artificial Sequence: Synthetic oligonucleotide
  Sense strand starting at position 3140 of SEQ ID NO: 588125
ugaaauauuggugguaucu

SEQ ID NO: 843913 - RNA, 19 nt, Artificial Sequence
  Description of Artificial Sequence: Synthetic oligonucleotide
  Antisense strand to SEQ ID NO: 843912
agauaccaccaauauuuca

SEQ ID NO: 843914 - RNA, 19 nt, Artificial Sequence
  Description of Artificial Sequence: Synthetic oligonucleotide
  Sense strand starting at position 3171 of SEQ ID NO: 588125
aaagguguuagugaugaug

SEQ ID NO: 843915 - RNA, 19 nt, Artificial Sequence
  Description of Artificial Sequence: Synthetic oligonucleotide
  Antisense strand to SEQ ID NO: 843914
caucaucacuaacaccuuu

SEQ ID NO: 843916 - RNA, 19 nt, Artificial Sequence
  Description of Artificial Sequence: Synthetic oligonucleotide
  Sense strand starting at position 3191 of SEQ ID NO: 588125
uggugaugauguuugggaa

SEQ ID NO: 843917 - RNA, 19 nt, Artificial Sequence
  Description of Artificial Sequence: Synthetic oligonucleotide
  Antisense strand to SEQ ID NO: 843916
uucccaaacaucaucacca

SEQ ID NO: 843918 - RNA, 19 nt, Artificial Sequence
  Description of Artificial Sequence: Synthetic oligonucleotide
  Sense strand starting at position 3192 of SEQ ID NO: 588125
ggugaugauguuugggaac

SEQ ID NO: 843919 - RNA, 19 nt, Artificial Sequence
  Description of Artificial Sequence: Synthetic oligonucleotide
  Antisense strand to SEQ ID NO: 843918
guucccaaacaucaucacc

SEQ ID NO: 843920 - RNA, 19 nt, Artificial Sequence
  Description of Artificial Sequence: Synthetic oligonucleotide
  Sense strand starting at position 3389 of SEQ ID NO: 588125
ccuugaacccgagaggguu

SEQ ID NO: 843921 - RNA, 19 nt, Artificial Sequence
  Description of Artificial Sequence: Synthetic oligonucleotide
  Antisense strand to SEQ ID NO: 843920
aacccucucggguucaagg

SEQ ID NO: 843922 - RNA, 19 nt, Artificial Sequence
  Description of Artificial Sequence: Synthetic oligonucleotide
  Sense strand starting at position 3455 of SEQ ID NO: 588125
gacuucugaggcugggaga

SEQ ID NO: 843923 - RNA, 19 nt, Artificial Sequence
  Description of Artificial Sequence: Synthetic oligonucleotide
  Antisense strand to SEQ ID NO: 843922
ucucccagccucagaaguc

SEQ ID NO: 843924 - RNA, 19 nt, Artificial Sequence
  Description of Artificial Sequence: Synthetic oligonucleotide
  Sense strand starting at position 3618 of SEQ ID NO: 588125
aaggaaagaugccuguaga

SEQ ID NO: 843925 - RNA, 19 nt, Artificial Sequence
  Description of Artificial Sequence: Synthetic oligonucleotide
  Antisense strand to SEQ ID NO: 843924
ucuacaggcaucuuuccuu

SEQ ID NO: 843926 - RNA, 19 nt, Artificial Sequence
  Description of Artificial Sequence: Synthetic oligonucleotide
  Sense strand starting at position 3619 of SEQ ID NO: 588125
aggaaagaugccuguagau

SEQ ID NO: 843927 - RNA, 19 nt, Artificial Sequence
  Description of Artificial Sequence: Synthetic oligonucleotide
  Antisense strand to SEQ ID NO: 843926
aucuacaggcaucuuuccu

SEQ ID NO: 843928 - RNA, 19 nt, Artificial Sequence
  Description of Artificial Sequence: Synthetic oligonucleotide
  Sense strand starting at position 3783 of SEQ ID NO: 588125
guauaauaagauggugguu

SEQ ID NO: 843929 - RNA, 19 nt, Artificial Sequence
  Description of Artificial Sequence: Synthetic oligonucleotide
  Antisense strand to SEQ ID NO: 843928
aaccaccaucuuauuauac

SEQ ID NO: 843930 - RNA, 19 nt, Artificial Sequence
  Description of Artificial Sequence: Synthetic oligonucleotide
  Sense strand starting at position 3836 of SEQ ID NO: 588125
cagcauuaguaacugggau

SEQ ID NO: 843931 - RNA, 19 nt, Artificial Sequence
  Description of Artificial Sequence: Synthetic oligonucleotide
  Antisense strand to SEQ ID NO: 843930
aucccaguuacuaaugcug

SEQ ID NO: 843932 - RNA, 19 nt, Artificial Sequence
  Description of Artificial Sequence: Synthetic oligonucleotide
  Sense strand starting at position 3837 of SEQ ID NO: 588125
agcauuaguaacugggaua

SEQ ID NO: 843933 - RNA, 19 nt, Artificial Sequence
  Description of Artificial Sequence: Synthetic oligonucleotide
  Antisense strand to SEQ ID NO: 843932
uaucccaguuacuaaugcu

SEQ ID NO: 843934 - RNA, 19 nt, Artificial Sequence
  Description of Artificial Sequence: Synthetic oligonucleotide
  Sense strand starting at position 3838 of SEQ ID NO: 588125
gcauuaguaacugggauag

SEQ ID NO: 843935 - RNA, 19 nt, Artificial Sequence
  Description of Artificial Sequence: Synthetic oligonucleotide
  Antisense strand to SEQ ID NO: 843934
cuaucccaguuacuaaugc

SEQ ID NO: 843936 - RNA, 19 nt, Artificial Sequence
  Description of Artificial Sequence: Synthetic oligonucleotide
  Sense strand starting at position 3937 of SEQ ID NO: 588125
uuguuagagagguggaacu

SEQ ID NO: 843937 - RNA, 19 nt, Artificial Sequence
  Description of Artificial Sequence: Synthetic oligonucleotide
  Antisense strand to SEQ ID NO: 843936
aguuccaccucucuaacaa

SEQ ID NO: 843938 - RNA, 19 nt, Artificial Sequence
  Description of Artificial Sequence: Synthetic oligonucleotide
  Sense strand starting at position 3947 of SEQ ID NO: 588125
gguggaacuuuauuccaaa

SEQ ID NO: 843939 - RNA, 19 nt, Artificial Sequence
  Description of Artificial Sequence: Synthetic oligonucleotide
  Antisense strand to SEQ ID NO: 843938
uuuggaauaaaguuccacc

SEQ ID NO: 843940 - RNA, 19 nt, Artificial Sequence
  Description of Artificial Sequence: Synthetic oligonucleotide
  Sense strand starting at position 3948 of SEQ ID NO: 588125
guggaacuuuauuccaaag

SEQ ID NO: 843941 - RNA, 19 nt, Artificial Sequence
  Description of Artificial Sequence: Synthetic oligonucleotide
  Antisense strand to SEQ ID NO: 843940
cuuuggaauaaaguuccac

SEQ ID NO: 843942 - RNA, 19 nt, Artificial Sequence
  Description of Artificial Sequence: Synthetic oligonucleotide
  Sense strand starting at position 382 of SEQ ID NO: 588126
auaaguaacuugugaaucu

SEQ ID NO: 843943 - RNA, 19 nt, Artificial Sequence
  Description of Artificial Sequence: Synthetic oligonucleotide
  Antisense strand to SEQ ID NO: 843942
agauucacaaguuacuuau

SEQ ID NO: 843944 - RNA, 19 nt, Artificial Sequence
  Description of Artificial Sequence: Synthetic oligonucleotide
  Sense strand starting at position 412 of SEQ ID NO: 588126
uuugcucacuucuagaguu

SEQ ID NO: 843945 - RNA, 19 nt, Artificial Sequence
  Description of Artificial Sequence: Synthetic oligonucleotide
  Antisense strand to SEQ ID NO: 843944
aacucuagaagugagcaaa

SEQ ID NO: 843946 - RNA, 19 nt, Artificial Sequence
  Description of Artificial Sequence: Synthetic oligonucleotide
  Sense strand starting at position 673 of SEQ ID NO: 588126
uuucgaguguguuaucuuu

SEQ ID NO: 843947 - RNA, 19 nt, Artificial Sequence
  Description of Artificial Sequence: Synthetic oligonucleotide
  Antisense strand to SEQ ID NO: 843946
aaagauaacacacucgaaa

SEQ ID NO: 843948 - RNA, 19 nt, Artificial Sequence
  Description of Artificial Sequence: Synthetic oligonucleotide
  Sense strand starting at position 756 of SEQ ID NO: 588126
gccugcuugcgaggucauu

SEQ ID NO: 843949 - RNA, 19 nt, Artificial Sequence
  Description of Artificial Sequence: Synthetic oligonucleotide
  Antisense strand to SEQ ID NO: 843948
aaugaccucgcaagcaggc

SEQ ID NO: 843950 - RNA, 19 nt, Artificial Sequence
  Description of Artificial Sequence: Synthetic oligonucleotide
  Sense strand starting at position 765 of SEQ ID NO: 588126
cgaggucauucuuacgaag

SEQ ID NO: 843951 - RNA, 19 nt, Artificial Sequence
  Description of Artificial Sequence: Synthetic oligonucleotide
  Antisense strand to SEQ ID NO: 843950
cuucguaagaaugaccucg

SEQ ID NO: 843952 - RNA, 19 nt, Artificial Sequence
  Description of Artificial Sequence: Synthetic oligonucleotide
  Sense strand starting at position 777 of SEQ ID NO: 588126
uacgaaggccuuuguuaac

SEQ ID NO: 843953 - RNA, 19 nt, Artificial Sequence
  Description of Artificial Sequence: Synthetic oligonucleotide
  Antisense strand to SEQ ID NO: 843952
guuaacaaaggccuucgua

SEQ ID NO: 843954 - RNA, 19 nt, Artificial Sequence
  Description of Artificial Sequence: Synthetic oligonucleotide
  Sense strand starting at position 780 of SEQ ID NO: 588126
gaaggccuuuguuaacaua

SEQ ID NO: 843955 - RNA, 19 nt, Artificial Sequence
  Description of Artificial Sequence: Synthetic oligonucleotide
  Antisense strand to SEQ ID NO: 843954
uauguuaacaaaggccuuc

SEQ ID NO: 843956 - RNA, 19 nt, Artificial Sequence
  Description of Artificial Sequence: Synthetic oligonucleotide
  Sense strand starting at position 811 of SEQ ID NO: 588126
auaaauaagucuuugcguu

SEQ ID NO: 843957 - RNA, 19 nt, Artificial Sequence
  Description of Artificial Sequence: Synthetic oligonucleotide
  Antisense strand to SEQ ID NO: 843956
aacgcaaagacuuauuuau

SEQ ID NO: 843958 - RNA, 19 nt, Artificial Sequence
  Description of Artificial Sequence: Synthetic oligonucleotide
  Sense strand starting at position 812 of SEQ ID NO: 588126
uaaauaagucuuugcguuu

SEQ ID NO: 843959 - RNA, 19 nt, Artificial Sequence
  Description of Artificial Sequence: Synthetic oligonucleotide
  Antisense strand to SEQ ID NO: 843958
aaacgcaaagacuuauuua

SEQ ID NO: 843960 - RNA, 19 nt, Artificial Sequence
  Description of Artificial Sequence: Synthetic oligonucleotide
  Sense strand starting at position 971 of SEQ ID NO: 588126
ucugaaacguuaccauuau

SEQ ID NO: 843961 - RNA, 19 nt, Artificial Sequence
  Description of Artificial Sequence: Synthetic oligonucleotide
  Antisense strand to SEQ ID NO: 843960
auaaugguaacguuucaga

SEQ ID NO: 843962 - RNA, 19 nt, Artificial Sequence
  Description of Artificial Sequence: Synthetic oligonucleotide
  Sense strand starting at position 1167 of SEQ ID NO: 588126
ucacaaugguaagauagau

SEQ ID NO: 843963 - RNA, 19 nt, Artificial Sequence
  Description of Artificial Sequence: Synthetic oligonucleotide
  Antisense strand to SEQ ID NO: 843962
aucuaucuuaccauuguga

SEQ ID NO: 843964 - RNA, 19 nt, Artificial Sequence
  Description of Artificial Sequence: Synthetic oligonucleotide
  Sense strand starting at position 1180 of SEQ ID NO: 588126
auagauagcaagugucaug

SEQ ID NO: 843965 - RNA, 19 nt, Artificial Sequence
  Description of Artificial Sequence: Synthetic oligonucleotide
  Antisense strand to SEQ ID NO: 843964
caugacacuugcuaucuau

SEQ ID NO: 843966 - RNA, 19 nt, Artificial Sequence
  Description of Artificial Sequence: Synthetic oligonucleotide
  Sense strand starting at position 1183 of SEQ ID NO: 588126
gauagcaagugucaugcaa

SEQ ID NO: 843967 - RNA, 19 nt, Artificial Sequence
  Description of Artificial Sequence: Synthetic oligonucleotide
  Antisense strand to SEQ ID NO: 843966
uugcaugacacuugcuauc

SEQ ID NO: 843968 - RNA, 19 nt, Artificial Sequence
  Description of Artificial Sequence: Synthetic oligonucleotide
  Sense strand starting at position 1499 of SEQ ID NO: 588126
cguggauaugccuaacuuu

SEQ ID NO: 843969 - RNA, 19 nt, Artificial Sequence
  Description of Artificial Sequence: Synthetic oligonucleotide
  Antisense strand to SEQ ID NO: 843968
aaaguuaggcauauccacg

SEQ ID NO: 843970 - RNA, 19 nt, Artificial Sequence
  Description of Artificial Sequence: Synthetic oligonucleotide
  Sense strand starting at position 1506 of SEQ ID NO: 588126
augccuaacuuugugaguu

SEQ ID NO: 843971 - RNA, 19 nt, Artificial Sequence
  Description of Artificial Sequence: Synthetic oligonucleotide
  Antisense strand to SEQ ID NO: 843970
aacucacaaaguuaggcau

SEQ ID NO: 843972 - RNA, 19 nt, Artificial Sequence
  Description of Artificial Sequence: Synthetic oligonucleotide
  Sense strand starting at position 1507 of SEQ ID NO: 588126
ugccuaacuuugugaguua

SEQ ID NO: 843973 - RNA, 19 nt, Artificial Sequence
  Description of Artificial Sequence: Synthetic oligonucleotide
  Antisense strand to SEQ ID NO: 843972
uaacucacaaaguuaggca

SEQ ID NO: 843974 - RNA, 19 nt, Artificial Sequence
  Description of Artificial Sequence: Synthetic oligonucleotide
  Sense strand starting at position 1508 of SEQ ID NO: 588126
gccuaacuuugugaguuaa

SEQ ID NO: 843975 - RNA, 19 nt, Artificial Sequence
  Description of Artificial Sequence: Synthetic oligonucleotide
  Antisense strand to SEQ ID NO: 843974
uuaacucacaaaguuaggc

SEQ ID NO: 843976 - RNA, 19 nt, Artificial Sequence
  Description of Artificial Sequence: Synthetic oligonucleotide
  Sense strand starting at position 1510 of SEQ ID NO: 588126
cuaacuuugugaguuaaau

SEQ ID NO: 843977 - RNA, 19 nt, Artificial Sequence
  Description of Artificial Sequence: Synthetic oligonucleotide
  Antisense strand to SEQ ID NO: 843976
auuuaacucacaaaguuag

SEQ ID NO: 843978 - RNA, 19 nt, Artificial Sequence
  Description of Artificial Sequence: Synthetic oligonucleotide
  Sense strand starting at position 1560 of SEQ ID NO: 588126
gggaauugccagcgacgga

SEQ ID NO: 843979 - RNA, 19 nt, Artificial Sequence
  Description of Artificial Sequence: Synthetic oligonucleotide
  Antisense strand to SEQ ID NO: 843978
uccgucgcuggcaauuccc

SEQ ID NO: 843980 - RNA, 19 nt, Artificial Sequence
  Description of Artificial Sequence: Synthetic oligonucleotide
  Sense strand starting at position 1907 of SEQ ID NO: 588126
ugaagagcuuccucauggu

SEQ ID NO: 843981 - RNA, 19 nt, Artificial Sequence
  Description of Artificial Sequence: Synthetic oligonucleotide
  Antisense strand to SEQ ID NO: 843980
accaugaggaagcucuuca

SEQ ID NO: 843982 - RNA, 19 nt, Artificial Sequence
  Description of Artificial Sequence: Synthetic oligonucleotide
  Sense strand starting at position 2084 of SEQ ID NO: 588126
cgcaauguagcucagaauc

SEQ ID NO: 843983 - RNA, 19 nt, Artificial Sequence
  Description of Artificial Sequence: Synthetic oligonucleotide
  Antisense strand to SEQ ID NO: 843982
gauucugagcuacauugcg

SEQ ID NO: 843984 - RNA, 19 nt, Artificial Sequence
  Description of Artificial Sequence: Synthetic oligonucleotide
  Sense strand starting at position 324 of SEQ ID NO: 588128
accauaguauguuugugua

SEQ ID NO: 843985 - RNA, 19 nt, Artificial Sequence
  Description of Artificial Sequence: Synthetic oligonucleotide
  Antisense strand to SEQ ID NO: 843984
uacacaaacauacuauggu

SEQ ID NO: 843986 - RNA, 19 nt, Artificial Sequence
  Description of Artificial Sequence: Synthetic oligonucleotide
  Sense strand starting at position 327 of SEQ ID NO: 588128
auaguauguuuguguaugu

SEQ ID NO: 843987 - RNA, 19 nt, Artificial Sequence
  Description of Artificial Sequence: Synthetic oligonucleotide
  Antisense strand to SEQ ID NO: 843986
acauacacaaacauacuau

SEQ ID NO: 843988 - RNA, 19 nt, Artificial Sequence
  Description of Artificial Sequence: Synthetic oligonucleotide
  Sense strand starting at position 328 of SEQ ID NO: 588128
uaguauguuuguguaugua

SEQ ID NO: 843989 - RNA, 19 nt, Artificial Sequence
  Description of Artificial Sequence: Synthetic oligonucleotide
  Antisense strand to SEQ ID NO: 843988
uacauacacaaacauacua

SEQ ID NO: 843990 - RNA, 19 nt, Artificial Sequence
  Description of Artificial Sequence: Synthetic oligonucleotide
  Sense strand starting at position 489 of SEQ ID NO: 588128
uucuauggguucucuuuaa

SEQ ID NO: 843991 - RNA, 19 nt, Artificial Sequence
  Description of Artificial Sequence: Synthetic oligonucleotide
  Antisense strand to SEQ ID NO: 843990
uuaaagagaacccauagaa

SEQ ID NO: 843992 - RNA, 19 nt, Artificial Sequence
  Description of Artificial Sequence: Synthetic oligonucleotide
  Sense strand starting at position 493 of SEQ ID NO: 588128
auggguucucuuuaaagua

SEQ ID NO: 843993 - RNA, 19 nt, Artificial Sequence
  Description of Artificial Sequence: Synthetic oligonucleotide
  Antisense strand to SEQ ID NO: 843992
uacuuuaaagagaacccau

SEQ ID NO: 843994 - RNA, 19 nt, Artificial Sequence
  Description of Artificial Sequence: Synthetic oligonucleotide
  Sense strand starting at position 1375 of SEQ ID NO: 588128
ugaaacaacucacgguuau

SEQ ID NO: 843995 - RNA, 19 nt, Artificial Sequence
  Description of Artificial Sequence: Synthetic oligonucleotide
  Antisense strand to SEQ ID NO: 843994
auaaccgugaguuguuuca

SEQ ID NO: 843996 - RNA, 19 nt, Artificial Sequence
  Description of Artificial Sequence: Synthetic oligonucleotide
  Sense strand starting at position 1376 of SEQ ID NO: 588128
gaaacaacucacgguuauu

SEQ ID NO: 843997 - RNA, 19 nt, Artificial Sequence
  Description of Artificial Sequence: Synthetic oligonucleotide
  Antisense strand to SEQ ID NO: 843996
aauaaccgugaguuguuuc

SEQ ID NO: 843998 - RNA, 19 nt, Artificial Sequence
  Description of Artificial Sequence: Synthetic oligonucleotide
  Sense strand starting at position 1403 of SEQ ID NO: 588128
gggaacaaguacucucauu

SEQ ID NO: 843999 - RNA, 19 nt, Artificial Sequence
  Description of Artificial Sequence: Synthetic oligonucleotide
  Antisense strand to SEQ ID NO: 843998
aaugagaguacuuguuccc

SEQ ID NO: 844000 - RNA, 19 nt, Artificial Sequence
  Description of Artificial Sequence: Synthetic oligonucleotide
  Sense strand starting at position 2494 of SEQ ID NO: 588128
aggcucuggcccugaaauc

SEQ ID NO: 844001 - RNA, 19 nt, Artificial Sequence
  Description of Artificial Sequence: Synthetic oligonucleotide
  Antisense strand to SEQ ID NO: 844000
gauuucagggccagagccu

SEQ ID NO: 844002 - RNA, 19 nt, Artificial Sequence
  Description of Artificial Sequence: Synthetic oligonucleotide
  Sense strand starting at position 2495 of SEQ ID NO: 588128
ggcucuggcccugaaaucu

SEQ ID NO: 844003 - RNA, 19 nt, Artificial Sequence
  Description of Artificial Sequence: Synthetic oligonucleotide
  Antisense strand to SEQ ID NO: 844002
agauuucagggccagagcc

SEQ ID NO: 844004 - RNA, 19 nt, Artificial Sequence
  Description of Artificial Sequence: Synthetic oligonucleotide
  Sense strand starting at position 2504 of SEQ ID NO: 588128
ccugaaaucuguguggcua

SEQ ID NO: 844005 - RNA, 19 nt, Artificial Sequence
  Description of Artificial Sequence: Synthetic oligonucleotide
  Antisense strand to SEQ ID NO: 844004
uagccacacagauuucagg

SEQ ID NO: 844006 - RNA, 19 nt, Artificial Sequence
  Description of Artificial Sequence: Synthetic oligonucleotide
  Sense strand starting at position 2505 of SEQ ID NO: 588128
cugaaaucuguguggcuag

SEQ ID NO: 844007 - RNA, 19 nt, Artificial Sequence
  Description of Artificial Sequence: Synthetic oligonucleotide
  Antisense strand to SEQ ID NO: 844006
cuagccacacagauuucag

SEQ ID NO: 844008 - RNA, 19 nt, Artificial Sequence
  Description of Artificial Sequence: Synthetic oligonucleotide
  Sense strand starting at position 2506 of SEQ ID NO: 588128
ugaaaucuguguggcuagu

SEQ ID NO: 844009 - RNA, 19 nt, Artificial Sequence
  Description of Artificial Sequence: Synthetic oligonucleotide
  Antisense strand to SEQ ID NO: 844008
acuagccacacagauuuca

SEQ ID NO: 844010 - RNA, 19 nt, Artificial Sequence
  Description of Artificial Sequence: Synthetic oligonucleotide
  Sense strand starting at position 2608 of SEQ ID NO: 588128
gcgguuugcagcugcagau

SEQ ID NO: 844011 - RNA, 19 nt, Artificial Sequence
  Description of Artificial Sequence: Synthetic oligonucleotide
  Antisense strand to SEQ ID NO: 844010
aucugcagcugcaaaccgc

SEQ ID NO: 844012 - RNA, 19 nt, Artificial Sequence
  Description of Artificial Sequence: Synthetic oligonucleotide
  Sense strand starting at position 2645 of SEQ ID NO: 588128
ggcggagcuuccuuuggau

SEQ ID NO: 844013 - RNA, 19 nt, Artificial Sequence
  Description of Artificial Sequence: Synthetic oligonucleotide
  Antisense strand to SEQ ID NO: 844012
auccaaaggaagcuccgcc

SEQ ID NO: 844014 - RNA, 19 nt, Artificial Sequence
  Description of Artificial Sequence: Synthetic oligonucleotide
  Sense strand starting at position 2758 of SEQ ID NO: 588128
uguguccacacggaugaaa

SEQ ID NO: 844015 - RNA, 19 nt, Artificial Sequence
  Description of Artificial Sequence: Synthetic oligonucleotide
  Antisense strand to SEQ ID NO: 844014
uuucauccguguggacaca

SEQ ID NO: 844016 - RNA, 19 nt, Artificial Sequence
  Description of Artificial Sequence: Synthetic oligonucleotide
  Sense strand starting at position 2987 of SEQ ID NO: 588128
uugagagguugcucugacu

SEQ ID NO: 844017 - RNA, 19 nt, Artificial Sequence
  Description of Artificial Sequence: Synthetic oligonucleotide
  Antisense strand to SEQ ID NO: 844016
agucagagcaaccucucaa

SEQ ID NO: 844018 - RNA, 19 nt, Artificial Sequence
  Description of Artificial Sequence: Synthetic oligonucleotide
  Sense strand starting at position 3352 of SEQ ID NO: 588128
gguugaguucucuguggaa

SEQ ID NO: 844019 - RNA, 19 nt, Artificial Sequence
  Description of Artificial Sequence: Synthetic oligonucleotide
  Antisense strand to SEQ ID NO: 844018
uuccacagagaacucaacc

SEQ ID NO: 844020 - RNA, 19 nt, Artificial Sequence
  Description of Artificial Sequence: Synthetic oligonucleotide
  Sense strand starting at position 3354 of SEQ ID NO: 588128
uugaguucucuguggaacu

SEQ ID NO: 844021 - RNA, 19 nt, Artificial Sequence
  Description of Artificial Sequence: Synthetic oligonucleotide
  Antisense strand to SEQ ID NO: 844020
aguuccacagagaacucaa

SEQ ID NO: 844022 - RNA, 19 nt, Artificial Sequence
  Description of Artificial Sequence: Synthetic oligonucleotide
  Sense strand starting at position 3355 of SEQ ID NO: 588128
ugaguucucuguggaacug

SEQ ID NO: 844023 - RNA, 19 nt, Artificial Sequence
  Description of Artificial Sequence: Synthetic oligonucleotide
  Antisense strand to SEQ ID NO: 844022
caguuccacagagaacuca

SEQ ID NO: 844024 - RNA, 19 nt, Artificial Sequence
  Description of Artificial Sequence: Synthetic oligonucleotide
  Sense strand starting at position 3463 of SEQ ID NO: 588128
ugccacuacuuggguagaa

SEQ ID NO: 844025 - RNA, 19 nt, Artificial Sequence
  Description of Artificial Sequence: Synthetic oligonucleotide
  Antisense strand to SEQ ID NO: 844024
uucuacccaaguaguggca

SEQ ID NO: 844026 - RNA, 19 nt, Artificial Sequence
  Description of Artificial Sequence: Synthetic oligonucleotide
  Sense strand starting at position 3465 of SEQ ID NO: 588128
ccacuacuuggguagaagu

SEQ ID NO: 844027 - RNA, 19 nt, Artificial Sequence
  Description of Artificial Sequence: Synthetic oligonucleotide
  Antisense strand to SEQ ID NO: 844026
acuucuacccaaguagugg

SEQ ID NO: 844028 - RNA, 19 nt, Artificial Sequence
  Description of Artificial Sequence: Synthetic oligonucleotide
  Sense strand starting at position 811 of SEQ ID NO: 588130
uagaguguuugauaauuug

SEQ ID NO: 844029 - RNA, 19 nt, Artificial Sequence
  Description of Artificial Sequence: Synthetic oligonucleotide
  Antisense strand to SEQ ID NO: 844028
caaauuaucaaacacucua

SEQ ID NO: 844030 - RNA, 19 nt, Artificial Sequence
  Description of Artificial Sequence: Synthetic oligonucleotide
  Sense strand starting at position 3650 of SEQ ID NO: 588130
ucuaucuucucuugaguua

SEQ ID NO: 844031 - RNA, 19 nt, Artificial Sequence
  Description of Artificial Sequence: Synthetic oligonucleotide
  Antisense strand to SEQ ID NO: 844030
uaacucaagagaagauaga

SEQ ID NO: 844032 - RNA, 19 nt, Artificial Sequence
  Description of Artificial Sequence: Synthetic oligonucleotide
  Sense strand starting at position 3651 of SEQ ID NO: 588130
cuaucuucucuugaguuau

SEQ ID NO: 844033 - RNA, 19 nt, Artificial Sequence
  Description of Artificial Sequence: Synthetic oligonucleotide
  Antisense strand to SEQ ID NO: 844032
auaacucaagagaagauag

SEQ ID NO: 844034 - RNA, 19 nt, Artificial Sequence
  Description of Artificial Sequence: Synthetic oligonucleotide
  Sense strand starting at position 324 of SEQ ID NO: 588131
accauaguauguuugugua

SEQ ID NO: 844035 - RNA, 19 nt, Artificial Sequence
  Description of Artificial Sequence: Synthetic oligonucleotide
  Antisense strand to SEQ ID NO: 844034
uacacaaacauacuauggu

SEQ ID NO: 844036 - RNA, 19 nt, Artificial Sequence
  Description of Artificial Sequence: Synthetic oligonucleotide
  Sense strand starting at position 327 of SEQ ID NO: 588131
auaguauguuuguguaugu

SEQ ID NO: 844037 - RNA, 19 nt, Artificial Sequence
  Description of Artificial Sequence: Synthetic oligonucleotide
  Antisense strand to SEQ ID NO: 844036
acauacacaaacauacuau

SEQ ID NO: 844038 - RNA, 19 nt, Artificial Sequence
  Description of Artificial Sequence: Synthetic oligonucleotide
  Sense strand starting at position 328 of SEQ ID NO: 588131
uaguauguuuguguaugua

SEQ ID NO: 844039 - RNA, 19 nt, Artificial Sequence
  Description of Artificial Sequence: Synthetic oligonucleotide
  Antisense strand to SEQ ID NO: 844038
uacauacacaaacauacua

SEQ ID NO: 844040 - RNA, 19 nt, Artificial Sequence
  Description of Artificial Sequence: Synthetic oligonucleotide
  Sense strand starting at position 489 of SEQ ID NO: 588131
uucuauggguucucuuuaa

SEQ ID NO: 844041 - RNA, 19 nt, Artificial Sequence
  Description of Artificial Sequence: Synthetic oligonucleotide
  Antisense strand to SEQ ID NO: 844040
uuaaagagaacccauagaa

SEQ ID NO: 844042 - RNA, 19 nt, Artificial Sequence
  Description of Artificial Sequence: Synthetic oligonucleotide
  Sense strand starting at position 493 of SEQ ID NO: 588131
auggguucucuuuaaagua

SEQ ID NO: 844043 - RNA, 19 nt, Artificial Sequence
  Description of Artificial Sequence: Synthetic oligonucleotide
  Antisense strand to SEQ ID NO: 844042
uacuuuaaagagaacccau

SEQ ID NO: 844044 - RNA, 19 nt, Artificial Sequence
  Description of Artificial Sequence: Synthetic oligonucleotide
  Sense strand starting at position 1375 of SEQ ID NO: 588131
ugaaacaacucacgguuau

SEQ ID NO: 844045 - RNA, 19 nt, Artificial Sequence
  Description of Artificial Sequence: Synthetic oligonucleotide
  Antisense strand to SEQ ID NO: 844044
auaaccgugaguuguuuca

SEQ ID NO: 844046 - RNA, 19 nt, Artificial Sequence
  Description of Artificial Sequence: Synthetic oligonucleotide
  Sense strand starting at position 1376 of SEQ ID NO: 588131
gaaacaacucacgguuauu

SEQ ID NO: 844047 - RNA, 19 nt, Artificial Sequence
  Description of Artificial Sequence: Synthetic oligonucleotide
  Antisense strand to SEQ ID NO: 844046
aauaaccgugaguuguuuc

SEQ ID NO: 844048 - RNA, 19 nt, Artificial Sequence
  Description of Artificial Sequence: Synthetic oligonucleotide
  Sense strand starting at position 1403 of SEQ ID NO: 588131
gggaacaaguacucucauu

SEQ ID NO: 844049 - RNA, 19 nt, Artificial Sequence
  Description of Artificial Sequence: Synthetic oligonucleotide
  Antisense strand to SEQ ID NO: 844048
aaugagaguacuuguuccc

SEQ ID NO: 844050 - RNA, 19 nt, Artificial Sequence
  Description of Artificial Sequence: Synthetic oligonucleotide
  Sense strand starting at position 2494 of SEQ ID NO: 588131
aggcucuggcccugaaauc

SEQ ID NO: 844051 - RNA, 19 nt, Artificial Sequence
  Description of Artificial Sequence: Synthetic oligonucleotide
  Antisense strand to SEQ ID NO: 844050
gauuucagggccagagccu

SEQ ID NO: 844052 - RNA, 19 nt, Artificial Sequence
  Description of Artificial Sequence: Synthetic oligonucleotide
  Sense strand starting at position 2495 of SEQ ID NO: 588131
ggcucuggcccugaaaucu

SEQ ID NO: 844053 - RNA, 19 nt, Artificial Sequence
  Description of Artificial Sequence: Synthetic oligonucleotide
  Antisense strand to SEQ ID NO: 844052
agauuucagggccagagcc

SEQ ID NO: 844054 - RNA, 19 nt, Artificial Sequence
  Description of Artificial Sequence: Synthetic oligonucleotide
  Sense strand starting at position 2504 of SEQ ID NO: 588131
ccugaaaucuguguggcua

SEQ ID NO: 844055 - RNA, 19 nt, Artificial Sequence
  Description of Artificial Sequence: Synthetic oligonucleotide
  Antisense strand to SEQ ID NO: 844054
uagccacacagauuucagg

SEQ ID NO: 844056 - RNA, 19 nt, Artificial Sequence
  Description of Artificial Sequence: Synthetic oligonucleotide
  Sense strand starting at position 2505 of SEQ ID NO: 588131
cugaaaucuguguggcuag

SEQ ID NO: 844057 - RNA, 19 nt, Artificial Sequence
  Description of Artificial Sequence: Synthetic oligonucleotide
  Antisense strand to SEQ ID NO: 844056
cuagccacacagauuucag

SEQ ID NO: 844058 - RNA, 19 nt, Artificial Sequence
  Description of Artificial Sequence: Synthetic oligonucleotide
  Sense strand starting at position 2506 of SEQ ID NO: 588131
ugaaaucuguguggcuagu

SEQ ID NO: 844059 - RNA, 19 nt, Artificial Sequence
  Description of Artificial Sequence: Synthetic oligonucleotide
  Antisense strand to SEQ ID NO: 844058
acuagccacacagauuuca

SEQ ID NO: 844060 - RNA, 19 nt, Artificial Sequence
  Description of Artificial Sequence: Synthetic oligonucleotide
  Sense strand starting at position 2608 of SEQ ID NO: 588131
gcgguuugcagcugcagau

SEQ ID NO: 844061 - RNA, 19 nt, Artificial Sequence
  Description of Artificial Sequence: Synthetic oligonucleotide
  Antisense strand to SEQ ID NO: 844060
aucugcagcugcaaaccgc

SEQ ID NO: 844062 - RNA, 19 nt, Artificial Sequence
  Description of Artificial Sequence: Synthetic oligonucleotide
  Sense strand starting at position 2645 of SEQ ID NO: 588131
ggcggagcuuccuuuggau

SEQ ID NO: 844063 - RNA, 19 nt, Artificial Sequence
  Description of Artificial Sequence: Synthetic oligonucleotide
  Antisense strand to SEQ ID NO: 844062
auccaaaggaagcuccgcc

SEQ ID NO: 844064 - RNA, 19 nt, Artificial Sequence
  Description of Artificial Sequence: Synthetic oligonucleotide
  Sense strand starting at position 2758 of SEQ ID NO: 588131
uguguccacacggaugaaa

SEQ ID NO: 844065 - RNA, 19 nt, Artificial Sequence
  Description of Artificial Sequence: Synthetic oligonucleotide
  Antisense strand to SEQ ID NO: 844064
uuucauccguguggacaca

SEQ ID NO: 844066 - RNA, 19 nt, Artificial Sequence
  Description of Artificial Sequence: Synthetic oligonucleotide
  Sense strand starting at position 2987 of SEQ ID NO: 588131
uugagagguugcucugacu

SEQ ID NO: 844067 - RNA, 19 nt, Artificial Sequence
  Description of Artificial Sequence: Synthetic oligonucleotide
  Antisense strand to SEQ ID NO: 844066
agucagagcaaccucucaa

SEQ ID NO: 844068 - RNA, 19 nt, Artificial Sequence
  Description of Artificial Sequence: Synthetic oligonucleotide
  Sense strand starting at position 3352 of SEQ ID NO: 588131
gguugaguucucuguggaa

SEQ ID NO: 844069 - RNA, 19 nt, Artificial Sequence
  Description of Artificial Sequence: Synthetic oligonucleotide
  Antisense strand to SEQ ID NO: 844068
uuccacagagaacucaacc

SEQ ID NO: 844070 - RNA, 19 nt, Artificial Sequence
  Description of Artificial Sequence: Synthetic oligonucleotide
  Sense strand starting at position 3354 of SEQ ID NO: 588131
uugaguucucuguggaacu

SEQ ID NO: 844071 - RNA, 19 nt, Artificial Sequence
  Description of Artificial Sequence: Synthetic oligonucleotide
  Antisense strand to SEQ ID NO: 844070
aguuccacagagaacucaa

SEQ ID NO: 844072 - RNA, 19 nt, Artificial Sequence
  Description of Artificial Sequence: Synthetic oligonucleotide
  Sense strand starting at position 3355 of SEQ ID NO: 588131
ugaguucucuguggaacug

SEQ ID NO: 844073 - RNA, 19 nt, Artificial Sequence
  Description of Artificial Sequence: Synthetic oligonucleotide
  Antisense strand to SEQ ID NO: 844072
caguuccacagagaacuca

SEQ ID NO: 844074 - RNA, 19 nt, Artificial Sequence
  Description of Artificial Sequence: Synthetic oligonucleotide
  Sense strand starting at position 3463 of SEQ ID NO: 588131
ugccacuacuuggguagaa

SEQ ID NO: 844075 - RNA, 19 nt, Artificial Sequence
  Description of Artificial Sequence: Synthetic oligonucleotide
  Antisense strand to SEQ ID NO: 844074
uucuacccaaguaguggca

SEQ ID NO: 844076 - RNA, 19 nt, Artificial Sequence
  Description of Artificial Sequence: Synthetic oligonucleotide
  Sense strand starting at position 3465 of SEQ ID NO: 588131
ccacuacuuggguagaagu

SEQ ID NO: 844077 - RNA, 19 nt, Artificial Sequence
  Description of Artificial Sequence: Synthetic oligonucleotide
  Antisense strand to SEQ ID NO: 844076
acuucuacccaaguagugg

SEQ ID NO: 844078 - RNA, 19 nt, Artificial Sequence
  Description of Artificial Sequence: Synthetic oligonucleotide
  Sense strand starting at position 3 of SEQ ID NO: 588132
gcauaaauggaacgaguau

SEQ ID NO: 844079 - RNA, 19 nt, Artificial Sequence
  Description of Artificial Sequence: Synthetic oligonucleotide
  Antisense strand to SEQ ID NO: 844078
auacucguuccauuuaugc

SEQ ID NO: 844080 - RNA, 19 nt, Artificial Sequence
  Description of Artificial Sequence: Synthetic oligonucleotide
  Sense strand starting at position 845 of SEQ ID NO: 588132
uagaguguuugauaauuug

SEQ ID NO: 844081 - RNA, 19 nt, Artificial Sequence
  Description of Artificial Sequence: Synthetic oligonucleotide
  Antisense strand to SEQ ID NO: 844080
caaauuaucaaacacucua

SEQ ID NO: 844082 - RNA, 19 nt, Artificial Sequence
  Description of Artificial Sequence: Synthetic oligonucleotide
  Sense strand starting at position 3684 of SEQ ID NO: 588132
ucuaucuucucuugaguua

SEQ ID NO: 844083 - RNA, 19 nt, Artificial Sequence
  Description of Artificial Sequence: Synthetic oligonucleotide
  Antisense strand to SEQ ID NO: 844082
uaacucaagagaagauaga

SEQ ID NO: 844084 - RNA, 19 nt, Artificial Sequence
  Description of Artificial Sequence: Synthetic oligonucleotide
  Sense strand starting at position 3685 of SEQ ID NO: 588132
cuaucuucucuugaguuau

SEQ ID NO: 844085 - RNA, 19 nt, Artificial Sequence
  Description of Artificial Sequence: Synthetic oligonucleotide
  Antisense strand to SEQ ID NO: 844084
auaacucaagagaagauag

SEQ ID NO: 844086 - RNA, 19 nt, Artificial Sequence
  Description of Artificial Sequence: Synthetic oligonucleotide
  Sense strand starting at position 358 of SEQ ID NO: 588133
accauaguauguuugugua

SEQ ID NO: 844087 - RNA, 19 nt, Artificial Sequence
  Description of Artificial Sequence: Synthetic oligonucleotide
  Antisense strand to SEQ ID NO: 844086
uacacaaacauacuauggu

SEQ ID NO: 844088 - RNA, 19 nt, Artificial Sequence
  Description of Artificial Sequence: Synthetic oligonucleotide
  Sense strand starting at position 361 of SEQ ID NO: 588133
auaguauguuuguguaugu

SEQ ID NO: 844089 - RNA, 19 nt, Artificial Sequence
  Description of Artificial Sequence: Synthetic oligonucleotide
  Antisense strand to SEQ ID NO: 844088
acauacacaaacauacuau

SEQ ID NO: 844090 - RNA, 19 nt, Artificial Sequence
  Description of Artificial Sequence: Synthetic oligonucleotide
  Sense strand starting at position 362 of SEQ ID NO: 588133
uaguauguuuguguaugua

SEQ ID NO: 844091 - RNA, 19 nt, Artificial Sequence
  Description of Artificial Sequence: Synthetic oligonucleotide
  Antisense strand to SEQ ID NO: 844090
uacauacacaaacauacua

SEQ ID NO: 844092 - RNA, 19 nt, Artificial Sequence
  Description of Artificial Sequence: Synthetic oligonucleotide
  Sense strand starting at position 523 of SEQ ID NO: 588133
uucuauggguucucuuuaa

SEQ ID NO: 844093 - RNA, 19 nt, Artificial Sequence
  Description of Artificial Sequence: Synthetic oligonucleotide
  Antisense strand to SEQ ID NO: 844092
uuaaagagaacccauagaa

SEQ ID NO: 844094 - RNA, 19 nt, Artificial Sequence
  Description of Artificial Sequence: Synthetic oligonucleotide
  Sense strand starting at position 527 of SEQ ID NO: 588133
auggguucucuuuaaagua

SEQ ID NO: 844095 - RNA, 19 nt, Artificial Sequence
  Description of Artificial Sequence: Synthetic oligonucleotide
  Antisense strand to SEQ ID NO: 844094
uacuuuaaagagaacccau

SEQ ID NO: 844096 - RNA, 19 nt, Artificial Sequence
  Description of Artificial Sequence: Synthetic oligonucleotide
  Sense strand starting at position 1409 of SEQ ID NO: 588133
ugaaacaacucacgguuau

SEQ ID NO: 844097 - RNA, 19 nt, Artificial Sequence
  Description of Artificial Sequence: Synthetic oligonucleotide
  Antisense strand to SEQ ID NO: 844096
auaaccgugaguuguuuca

SEQ ID NO: 844098 - RNA, 19 nt, Artificial Sequence
  Description of Artificial Sequence: Synthetic oligonucleotide
  Sense strand starting at position 1410 of SEQ ID NO: 588133
gaaacaacucacgguuauu

SEQ ID NO: 844099 - RNA, 19 nt, Artificial Sequence
  Description of Artificial Sequence: Synthetic oligonucleotide
  Antisense strand to SEQ ID NO: 844098
aauaaccgugaguuguuuc

SEQ ID NO: 844100 - RNA, 19 nt, Artificial Sequence
  Description of Artificial Sequence: Synthetic oligonucleotide
  Sense strand starting at position 1437 of SEQ ID NO: 588133
gggaacaaguacucucauu

SEQ ID NO: 844101 - RNA, 19 nt, Artificial Sequence
  Description of Artificial Sequence: Synthetic oligonucleotide
  Antisense strand to SEQ ID NO: 844100
aaugagaguacuuguuccc

SEQ ID NO: 844102 - RNA, 19 nt, Artificial Sequence
  Description of Artificial Sequence: Synthetic oligonucleotide
  Sense strand starting at position 2528 of SEQ ID NO: 588133
aggcucuggcccugaaauc

SEQ ID NO: 844103 - RNA, 19 nt, Artificial Sequence
  Description of Artificial Sequence: Synthetic oligonucleotide
  Antisense strand to SEQ ID NO: 844102
gauuucagggccagagccu

SEQ ID NO: 844104 - RNA, 19 nt, Artificial Sequence
  Description of Artificial Sequence: Synthetic oligonucleotide
  Sense strand starting at position 2529 of SEQ ID NO: 588133
ggcucuggcccugaaaucu

SEQ ID NO: 844105 - RNA, 19 nt, Artificial Sequence
  Description of Artificial Sequence: Synthetic oligonucleotide
  Antisense strand to SEQ ID NO: 844104
agauuucagggccagagcc

SEQ ID NO: 844106 - RNA, 19 nt, Artificial Sequence
  Description of Artificial Sequence: Synthetic oligonucleotide
  Sense strand starting at position 2538 of SEQ ID NO: 588133
ccugaaaucuguguggcua

SEQ ID NO: 844107 - RNA, 19 nt, Artificial Sequence
  Description of Artificial Sequence: Synthetic oligonucleotide
  Antisense strand to SEQ ID NO: 844106
uagccacacagauuucagg

SEQ ID NO: 844108 - RNA, 19 nt, Artificial Sequence
  Description of Artificial Sequence: Synthetic oligonucleotide
  Sense strand starting at position 2539 of SEQ ID NO: 588133
cugaaaucuguguggcuag

SEQ ID NO: 844109 - RNA, 19 nt, Artificial Sequence
  Description of Artificial Sequence: Synthetic oligonucleotide
  Antisense strand to SEQ ID NO: 844108
cuagccacacagauuucag

SEQ ID NO: 844110 - RNA, 19 nt, Artificial Sequence
  Description of Artificial Sequence: Synthetic oligonucleotide
  Sense strand starting at position 2540 of SEQ ID NO: 588133
ugaaaucuguguggcuagu

SEQ ID NO: 844111 - RNA, 19 nt, Artificial Sequence
  Description of Artificial Sequence: Synthetic oligonucleotide
  Antisense strand to SEQ ID NO: 844110
acuagccacacagauuuca

SEQ ID NO: 844112 - RNA, 19 nt, Artificial Sequence
  Description of Artificial Sequence: Synthetic oligonucleotide
  Sense strand starting at position 2642 of SEQ ID NO: 588133
gcgguuugcagcugcagau

SEQ ID NO: 844113 - RNA, 19 nt, Artificial Sequence
  Description of Artificial Sequence: Synthetic oligonucleotide
  Antisense strand to SEQ ID NO: 844112
aucugcagcugcaaaccgc

SEQ ID NO: 844114 - RNA, 19 nt, Artificial Sequence
  Description of Artificial Sequence: Synthetic oligonucleotide
  Sense strand starting at position 2679 of SEQ ID NO: 588133
ggcggagcuuccuuuggau

SEQ ID NO: 844115 - RNA, 19 nt, Artificial Sequence
  Description of Artificial Sequence: Synthetic oligonucleotide
  Antisense strand to SEQ ID NO: 844114
auccaaaggaagcuccgcc

SEQ ID NO: 844116 - RNA, 19 nt, Artificial Sequence
  Description of Artificial Sequence: Synthetic oligonucleotide
  Sense strand starting at position 2792 of SEQ ID NO: 588133
uguguccacacggaugaaa

SEQ ID NO: 844117 - RNA, 19 nt, Artificial Sequence
  Description of Artificial Sequence: Synthetic oligonucleotide
  Antisense strand to SEQ ID NO: 844116
uuucauccguguggacaca

SEQ ID NO: 844118 - RNA, 19 nt, Artificial Sequence
  Description of Artificial Sequence: Synthetic oligonucleotide
  Sense strand starting at position 3021 of SEQ ID NO: 588133
uugagagguugcucugacu

SEQ ID NO: 844119 - RNA, 19 nt, Artificial Sequence
  Description of Artificial Sequence: Synthetic oligonucleotide
  Antisense strand to SEQ ID NO: 844118
agucagagcaaccucucaa

SEQ ID NO: 844120 - RNA, 19 nt, Artificial Sequence
  Description of Artificial Sequence: Synthetic oligonucleotide
  Sense strand starting at position 3386 of SEQ ID NO: 588133
gguugaguucucuguggaa

SEQ ID NO: 844121 - RNA, 19 nt, Artificial Sequence
  Description of Artificial Sequence: Synthetic oligonucleotide
  Antisense strand to SEQ ID NO: 844120
uuccacagagaacucaacc

SEQ ID NO: 844122 - RNA, 19 nt, Artificial Sequence
  Description of Artificial Sequence: Synthetic oligonucleotide
  Sense strand starting at position 3388 of SEQ ID NO: 588133
uugaguucucuguggaacu

SEQ ID NO: 844123 - RNA, 19 nt, Artificial Sequence
  Description of Artificial Sequence: Synthetic oligonucleotide
  Antisense strand to SEQ ID NO: 844122
aguuccacagagaacucaa

SEQ ID NO: 844124 - RNA, 19 nt, Artificial Sequence
  Description of Artificial Sequence: Synthetic oligonucleotide
  Sense strand starting at position 3389 of SEQ ID NO: 588133
ugaguucucuguggaacug

SEQ ID NO: 844125 - RNA, 19 nt, Artificial Sequence
  Description of Artificial Sequence: Synthetic oligonucleotide
  Antisense strand to SEQ ID NO: 844124
caguuccacagagaacuca

SEQ ID NO: 844126 - RNA, 19 nt, Artificial Sequence
  Description of Artificial Sequence: Synthetic oligonucleotide
  Sense strand starting at position 3497 of SEQ ID NO: 588133
ugccacuacuuggguagaa

SEQ ID NO: 844127 - RNA, 19 nt, Artificial Sequence
  Description of Artificial Sequence: Synthetic oligonucleotide
  Antisense strand to SEQ ID NO: 844126
uucuacccaaguaguggca

SEQ ID NO: 844128 - RNA, 19 nt, Artificial Sequence
  Description of Artificial Sequence: Synthetic oligonucleotide
  Sense strand starting at position 3499 of SEQ ID NO: 588133
ccacuacuuggguagaagu

SEQ ID NO: 844129 - RNA, 19 nt, Artificial Sequence
  Description of Artificial Sequence: Synthetic oligonucleotide
  Antisense strand to SEQ ID NO: 844128
acuucuacccaaguagugg

SEQ ID NO: 844130 - RNA, 19 nt, Artificial Sequence
  Description of Artificial Sequence: Synthetic oligonucleotide
  Sense strand starting at position 2991 of SEQ ID NO: 588135
agagguugcucugacuugu

SEQ ID NO: 844131 - RNA, 19 nt, Artificial Sequence
  Description of Artificial Sequence: Synthetic oligonucleotide
  Antisense strand to SEQ ID NO: 844130
acaagucagagcaaccucu

SEQ ID NO: 844132 - RNA, 19 nt, Artificial Sequence
  Description of Artificial Sequence: Synthetic oligonucleotide
  Sense strand starting at position 3281 of SEQ ID NO: 588135
ccuggauggcgucaaguuu

SEQ ID NO: 844133 - RNA, 19 nt, Artificial Sequence
  Description of Artificial Sequence: Synthetic oligonucleotide
  Antisense strand to SEQ ID NO: 844132
aaacuugacgccauccagg

SEQ ID NO: 844134 - RNA, 19 nt, Artificial Sequence
  Description of Artificial Sequence: Synthetic oligonucleotide
  Sense strand starting at position 3464 of SEQ ID NO: 588135
ugccacuacuuggguagaa

SEQ ID NO: 844135 - RNA, 19 nt, Artificial Sequence
  Description of Artificial Sequence: Synthetic oligonucleotide
  Antisense strand to SEQ ID NO: 844134
uucuacccaaguaguggca

SEQ ID NO: 844136 - RNA, 19 nt, Artificial Sequence
  Description of Artificial Sequence: Synthetic oligonucleotide
  Sense strand starting at position 39 of SEQ ID NO: 588136
gaauauagagucgguguca

SEQ ID NO: 844137 - RNA, 19 nt, Artificial Sequence
  Description of Artificial Sequence: Synthetic oligonucleotide
  Antisense strand to SEQ ID NO: 844136
ugacaccgacucuauauuc

SEQ ID NO: 844138 - RNA, 19 nt, Artificial Sequence
  Description of Artificial Sequence: Synthetic oligonucleotide
  Sense strand starting at position 106 of SEQ ID NO: 588136
ccugcagaacuugguuaaa

SEQ ID NO: 844139 - RNA, 19 nt, Artificial Sequence
  Description of Artificial Sequence: Synthetic oligonucleotide
  Antisense strand to SEQ ID NO: 844138
uuuaaccaaguucugcagg

SEQ ID NO: 844140 - RNA, 19 nt, Artificial Sequence
  Description of Artificial Sequence: Synthetic oligonucleotide
  Sense strand starting at position 155 of SEQ ID NO: 588136
gaggcaugucagugcugua

SEQ ID NO: 844141 - RNA, 19 nt, Artificial Sequence
  Description of Artificial Sequence: Synthetic oligonucleotide
  Antisense strand to SEQ ID NO: 844140
uacagcacugacaugccuc

SEQ ID NO: 844142 - RNA, 19 nt, Artificial Sequence
  Description of Artificial Sequence: Synthetic oligonucleotide
  Sense strand starting at position 232 of SEQ ID NO: 588136
cuugguggauugcagagau

SEQ ID NO: 844143 - RNA, 19 nt, Artificial Sequence
  Description of Artificial Sequence: Synthetic oligonucleotide
  Antisense strand to SEQ ID NO: 844142
aucucugcaauccaccaag

SEQ ID NO: 844144 - RNA, 19 nt, Artificial Sequence
  Description of Artificial Sequence: Synthetic oligonucleotide
  Sense strand starting at position 413 of SEQ ID NO: 588136
gcauccuggugauucugau

SEQ ID NO: 844145 - RNA, 19 nt, Artificial Sequence
  Description of Artificial Sequence: Synthetic oligonucleotide
  Antisense strand to SEQ ID NO: 844144
aucagaaucaccaggaugc

SEQ ID NO: 844146 - RNA, 19 nt, Artificial Sequence
  Description of Artificial Sequence: Synthetic oligonucleotide
  Sense strand starting at position 440 of SEQ ID NO: 588136
agguuuggguacugaggaa

SEQ ID NO: 844147 - RNA, 19 nt, Artificial Sequence
  Description of Artificial Sequence: Synthetic oligonucleotide
  Antisense strand to SEQ ID NO: 844146
uuccucaguacccaaaccu

SEQ ID NO: 844148 - RNA, 19 nt, Artificial Sequence
  Description of Artificial Sequence: Synthetic oligonucleotide
  Sense strand starting at position 459 of SEQ ID NO: 588136
gccagucagcauuaacaug

SEQ ID NO: 844149 - RNA, 19 nt, Artificial Sequence
  Description of Artificial Sequence: Synthetic oligonucleotide
  Antisense strand to SEQ ID NO: 844148
cauguuaaugcugacuggc

SEQ ID NO: 844150 - RNA, 19 nt, Artificial Sequence
  Description of Artificial Sequence: Synthetic oligonucleotide
  Sense strand starting at position 465 of SEQ ID NO: 588136
cagcauuaacaugguguga

SEQ ID NO: 844151 - RNA, 19 nt, Artificial Sequence
  Description of Artificial Sequence: Synthetic oligonucleotide
  Antisense strand to SEQ ID NO: 844150
ucacaccauguuaaugcug

SEQ ID NO: 844152 - RNA, 19 nt, Artificial Sequence
  Description of Artificial Sequence: Synthetic oligonucleotide
  Sense strand starting at position 470 of SEQ ID NO: 588136
uuaacauggugugauggau

SEQ ID NO: 844153 - RNA, 19 nt, Artificial Sequence
  Description of Artificial Sequence: Synthetic oligonucleotide
  Antisense strand to SEQ ID NO: 844152
auccaucacaccauguuaa

SEQ ID NO: 844154 - RNA, 19 nt, Artificial Sequence
  Description of Artificial Sequence: Synthetic oligonucleotide
  Sense strand starting at position 474 of SEQ ID NO: 588136
cauggugugauggaugcua

SEQ ID NO: 844155 - RNA, 19 nt, Artificial Sequence
  Description of Artificial Sequence: Synthetic oligonucleotide
  Antisense strand to SEQ ID NO: 844154
uagcauccaucacaccaug

SEQ ID NO: 844156 - RNA, 19 nt, Artificial Sequence
  Description of Artificial Sequence: Synthetic oligonucleotide
  Sense strand starting at position 559 of SEQ ID NO: 588136
gccagaucucuagaugcca

SEQ ID NO: 844157 - RNA, 19 nt, Artificial Sequence
  Description of Artificial Sequence: Synthetic oligonucleotide
  Antisense strand to SEQ ID NO: 844156
uggcaucuagagaucuggc

SEQ ID NO: 844158 - RNA, 19 nt, Artificial Sequence
  Description of Artificial Sequence: Synthetic oligonucleotide
  Sense strand starting at position 756 of SEQ ID NO: 588136
ucuagcuuacccuagagua

SEQ ID NO: 844159 - RNA, 19 nt, Artificial Sequence
  Description of Artificial Sequence: Synthetic oligonucleotide
  Antisense strand to SEQ ID NO: 844158
uacucuaggguaagcuaga

SEQ ID NO: 844160 - RNA, 19 nt, Artificial Sequence
  Description of Artificial Sequence: Synthetic oligonucleotide
  Sense strand starting at position 833 of SEQ ID NO: 588136
gucacucauucugccuaga

SEQ ID NO: 844161 - RNA, 19 nt, Artificial Sequence
  Description of Artificial Sequence: Synthetic oligonucleotide
  Antisense strand to SEQ ID NO: 844160
ucuaggcagaaugagugac

SEQ ID NO: 844162 - RNA, 19 nt, Artificial Sequence
  Description of Artificial Sequence: Synthetic oligonucleotide
  Sense strand starting at position 1079 of SEQ ID NO: 588136
uuguaauguccuggcuaau

SEQ ID NO: 844163 - RNA, 19 nt, Artificial Sequence
  Description of Artificial Sequence: Synthetic oligonucleotide
  Antisense strand to SEQ ID NO: 844162
auuagccaggacauuacaa

SEQ ID NO: 844164 - RNA, 19 nt, Artificial Sequence
  Description of Artificial Sequence: Synthetic oligonucleotide
  Sense strand starting at position 1088 of SEQ ID NO: 588136
ccuggcuaauucucaggua

SEQ ID NO: 844165 - RNA, 19 nt, Artificial Sequence
  Description of Artificial Sequence: Synthetic oligonucleotide
  Antisense strand to SEQ ID NO: 844164
uaccugagaauuagccagg

SEQ ID NO: 844166 - RNA, 19 nt, Artificial Sequence
  Description of Artificial Sequence: Synthetic oligonucleotide
  Sense strand starting at position 1111 of SEQ ID NO: 588136
caggucuccacguggauau

SEQ ID NO: 844167 - RNA, 19 nt, Artificial Sequence
  Description of Artificial Sequence: Synthetic oligonucleotide
  Antisense strand to SEQ ID NO: 844166
auauccacguggagaccug

SEQ ID NO: 844168 - RNA, 19 nt, Artificial Sequence
  Description of Artificial Sequence: Synthetic oligonucleotide
  Sense strand starting at position 1112 of SEQ ID NO: 588136
aggucuccacguggauaua

SEQ ID NO: 844169 - RNA, 19 nt, Artificial Sequence
  Description of Artificial Sequence: Synthetic oligonucleotide
  Antisense strand to SEQ ID NO: 844168
uauauccacguggagaccu

SEQ ID NO: 844170 - RNA, 19 nt, Artificial Sequence
  Description of Artificial Sequence: Synthetic oligonucleotide
  Sense strand starting at position 1113 of SEQ ID NO: 588136
ggucuccacguggauauaa

SEQ ID NO: 844171 - RNA, 19 nt, Artificial Sequence
  Description of Artificial Sequence: Synthetic oligonucleotide
  Antisense strand to SEQ ID NO: 844170
uuauauccacguggagacc

SEQ ID NO: 844172 - RNA, 19 nt, Artificial Sequence
  Description of Artificial Sequence: Synthetic oligonucleotide
  Sense strand starting at position 1303 of SEQ ID NO: 588136
aaggcagguucugaggaaa

SEQ ID NO: 844173 - RNA, 19 nt, Artificial Sequence
  Description of Artificial Sequence: Synthetic oligonucleotide
  Antisense strand to SEQ ID NO: 844172
uuuccucagaaccugccuu

SEQ ID NO: 844174 - RNA, 19 nt, Artificial Sequence
  Description of Artificial Sequence: Synthetic oligonucleotide
  Sense strand starting at position 1314 of SEQ ID NO: 588136
ugaggaaacucuuacugca

SEQ ID NO: 844175 - RNA, 19 nt, Artificial Sequence
  Description of Artificial Sequence: Synthetic oligonucleotide
  Antisense strand to SEQ ID NO: 844174
ugcaguaagaguuuccuca

SEQ ID NO: 844176 - RNA, 19 nt, Artificial Sequence
  Description of Artificial Sequence: Synthetic oligonucleotide
  Sense strand starting at position 1316 of SEQ ID NO: 588136
aggaaacucuuacugcaau

SEQ ID NO: 844177 - RNA, 19 nt, Artificial Sequence
  Description of Artificial Sequence: Synthetic oligonucleotide
  Antisense strand to SEQ ID NO: 844176
auugcaguaagaguuuccu

SEQ ID NO: 844178 - RNA, 19 nt, Artificial Sequence
  Description of Artificial Sequence: Synthetic oligonucleotide
  Sense strand starting at position 1357 of SEQ ID NO: 588136
gguucuaagucucuacaau

SEQ ID NO: 844179 - RNA, 19 nt, Artificial Sequence
  Description of Artificial Sequence: Synthetic oligonucleotide
  Antisense strand to SEQ ID NO: 844178
auuguagagacuuagaacc

SEQ ID NO: 844180 - RNA, 19 nt, Artificial Sequence
  Description of Artificial Sequence: Synthetic oligonucleotide
  Sense strand starting at position 1358 of SEQ ID NO: 588136
guucuaagucucuacaauu

SEQ ID NO: 844181 - RNA, 19 nt, Artificial Sequence
  Description of Artificial Sequence: Synthetic oligonucleotide
  Antisense strand to SEQ ID NO: 844180
aauuguagagacuuagaac

SEQ ID NO: 844182 - RNA, 19 nt, Artificial Sequence
  Description of Artificial Sequence: Synthetic oligonucleotide
  Sense strand starting at position 1455 of SEQ ID NO: 588136
ccacgucuaugcucaaagu

SEQ ID NO: 844183 - RNA, 19 nt, Artificial Sequence
  Description of Artificial Sequence: Synthetic oligonucleotide
  Antisense strand to SEQ ID NO: 844182
acuuugagcauagacgugg

SEQ ID NO: 844184 - RNA, 19 nt, Artificial Sequence
  Description of Artificial Sequence: Synthetic oligonucleotide
  Sense strand starting at position 1456 of SEQ ID NO: 588136
cacgucuaugcucaaaguu

SEQ ID NO: 844185 - RNA, 19 nt, Artificial Sequence
  Description of Artificial Sequence: Synthetic oligonucleotide
  Antisense strand to SEQ ID NO: 844184
aacuuugagcauagacgug

SEQ ID NO: 844186 - RNA, 19 nt, Artificial Sequence
  Description of Artificial Sequence: Synthetic oligonucleotide
  Sense strand starting at position 2179 of SEQ ID NO: 588136
gcccguauucgggagucca

SEQ ID NO: 844187 - RNA, 19 nt, Artificial Sequence
  Description of Artificial Sequence: Synthetic oligonucleotide
  Antisense strand to SEQ ID NO: 844186
uggacucccgaauacgggc

SEQ ID NO: 844188 - RNA, 19 nt, Artificial Sequence
  Description of Artificial Sequence: Synthetic oligonucleotide
  Sense strand starting at position 2285 of SEQ ID NO: 588136
gaaacuuccugucagggca

SEQ ID NO: 844189 - RNA, 19 nt, Artificial Sequence
  Description of Artificial Sequence: Synthetic oligonucleotide
  Antisense strand to SEQ ID NO: 844188
ugcccugacaggaaguuuc

SEQ ID NO: 844190 - RNA, 19 nt, Artificial Sequence
  Description of Artificial Sequence: Synthetic oligonucleotide
  Sense strand starting at position 2453 of SEQ ID NO: 588136
uaaggaagcggcugaauua

SEQ ID NO: 844191 - RNA, 19 nt, Artificial Sequence
  Description of Artificial Sequence: Synthetic oligonucleotide
  Antisense strand to SEQ ID NO: 844190
uaauucagccgcuuccuua

SEQ ID NO: 844192 - RNA, 19 nt, Artificial Sequence
  Description of Artificial Sequence: Synthetic oligonucleotide
  Sense strand starting at position 2454 of SEQ ID NO: 588136
aaggaagcggcugaauuaa

SEQ ID NO: 844193 - RNA, 19 nt, Artificial Sequence
  Description of Artificial Sequence: Synthetic oligonucleotide
  Antisense strand to SEQ ID NO: 844192
uuaauucagccgcuuccuu

SEQ ID NO: 844194 - RNA, 19 nt, Artificial Sequence
  Description of Artificial Sequence: Synthetic oligonucleotide
  Sense strand starting at position 2479 of SEQ ID NO: 588136
aacggauuguuuccucaca

SEQ ID NO: 844195 - RNA, 19 nt, Artificial Sequence
  Description of Artificial Sequence: Synthetic oligonucleotide
  Antisense strand to SEQ ID NO: 844194
ugugaggaaacaauccguu

SEQ ID NO: 844196 - RNA, 19 nt, Artificial Sequence
  Description of Artificial Sequence: Synthetic oligonucleotide
  Sense strand starting at position 2481 of SEQ ID NO: 588136
cggauuguuuccucacagu

SEQ ID NO: 844197 - RNA, 19 nt, Artificial Sequence
  Description of Artificial Sequence: Synthetic oligonucleotide
  Antisense strand to SEQ ID NO: 844196
acugugaggaaacaauccg

SEQ ID NO: 844198 - RNA, 19 nt, Artificial Sequence
  Description of Artificial Sequence: Synthetic oligonucleotide
  Sense strand starting at position 2920 of SEQ ID NO: 588136
agggcaugauuucguucau

SEQ ID NO: 844199 - RNA, 19 nt, Artificial Sequence
  Description of Artificial Sequence: Synthetic oligonucleotide
  Antisense strand to SEQ ID NO: 844198
augaacgaaaucaugcccu

SEQ ID NO: 844200 - RNA, 19 nt, Artificial Sequence
  Description of Artificial Sequence: Synthetic oligonucleotide
  Sense strand starting at position 2921 of SEQ ID NO: 588136
gggcaugauuucguucauu

SEQ ID NO: 844201 - RNA, 19 nt, Artificial Sequence
  Description of Artificial Sequence: Synthetic oligonucleotide
  Antisense strand to SEQ ID NO: 844200
aaugaacgaaaucaugccc

SEQ ID NO: 844202 - RNA, 19 nt, Artificial Sequence
  Description of Artificial Sequence: Synthetic oligonucleotide
  Sense strand starting at position 2950 of SEQ ID NO: 588136
cauaguauuccguaguauu

SEQ ID NO: 844203 - RNA, 19 nt, Artificial Sequence
  Description of Artificial Sequence: Synthetic oligonucleotide
  Antisense strand to SEQ ID NO: 844202
aauacuacggaauacuaug

SEQ ID NO: 844204 - RNA, 19 nt, Artificial Sequence
  Description of Artificial Sequence: Synthetic oligonucleotide
  Sense strand starting at position 3516 of SEQ ID NO: 588136
ggguauauaccugguagua

SEQ ID NO: 844205 - RNA, 19 nt, Artificial Sequence
  Description of Artificial Sequence: Synthetic oligonucleotide
  Antisense strand to SEQ ID NO: 844204
uacuaccagguauauaccc

SEQ ID NO: 844206 - RNA, 19 nt, Artificial Sequence
  Description of Artificial Sequence: Synthetic oligonucleotide
  Sense strand starting at position 3542 of SEQ ID NO: 588136
ugggucaaauaguucuauu

SEQ ID NO: 844207 - RNA, 19 nt, Artificial Sequence
  Description of Artificial Sequence: Synthetic oligonucleotide
  Antisense strand to SEQ ID NO: 844206
aauagaacuauuugaccca

SEQ ID NO: 844208 - RNA, 19 nt, Artificial Sequence
  Description of Artificial Sequence: Synthetic oligonucleotide
  Sense strand starting at position 3684 of SEQ ID NO: 588136
ugacauucugacuggugua

SEQ ID NO: 844209 - RNA, 19 nt, Artificial Sequence
  Description of Artificial Sequence: Synthetic oligonucleotide
  Antisense strand to SEQ ID NO: 844208
uacaccagucagaauguca

SEQ ID NO: 844210 - RNA, 19 nt, Artificial Sequence
  Description of Artificial Sequence: Synthetic oligonucleotide
  Sense strand starting at position 3685 of SEQ ID NO: 588136
gacauucugacugguguag

SEQ ID NO: 844211 - RNA, 19 nt, Artificial Sequence
  Description of Artificial Sequence: Synthetic oligonucleotide
  Antisense strand to SEQ ID NO: 844210
cuacaccagucagaauguc

SEQ ID NO: 844212 - RNA, 19 nt, Artificial Sequence
  Description of Artificial Sequence: Synthetic oligonucleotide
  Sense strand starting at position 3689 of SEQ ID NO: 588136
uucugacugguguagauga

SEQ ID NO: 844213 - RNA, 19 nt, Artificial Sequence
  Description of Artificial Sequence: Synthetic oligonucleotide
  Antisense strand to SEQ ID NO: 844212
ucaucuacaccagucagaa

SEQ ID NO: 844214 - RNA, 19 nt, Artificial Sequence
  Description of Artificial Sequence: Synthetic oligonucleotide
  Sense strand starting at position 3691 of SEQ ID NO: 588136
cugacugguguagaugaua

SEQ ID NO: 844215 - RNA, 19 nt, Artificial Sequence
  Description of Artificial Sequence: Synthetic oligonucleotide
  Antisense strand to SEQ ID NO: 844214
uaucaucuacaccagucag

SEQ ID NO: 844216 - RNA, 19 nt, Artificial Sequence
  Description of Artificial Sequence: Synthetic oligonucleotide
  Sense strand starting at position 1344 of SEQ ID NO: 588137
gggcgaagcgcucaaaguu

SEQ ID NO: 844217 - RNA, 19 nt, Artificial Sequence
  Description of Artificial Sequence: Synthetic oligonucleotide
  Antisense strand to SEQ ID NO: 844216
aacuuugagcgcuucgccc

SEQ ID NO: 844218 - RNA, 19 nt, Artificial Sequence
  Description of Artificial Sequence: Synthetic oligonucleotide
  Sense strand starting at position 1413 of SEQ ID NO: 588137
gcggcaaagaguuaauccu

SEQ ID NO: 844219 - RNA, 19 nt, Artificial Sequence
  Description of Artificial Sequence: Synthetic oligonucleotide
  Antisense strand to SEQ ID NO: 844218
aggauuaacucuuugccgc

SEQ ID NO: 844220 - RNA, 19 nt, Artificial Sequence
  Description of Artificial Sequence: Synthetic oligonucleotide
  Sense strand starting at position 1421 of SEQ ID NO: 588137
gaguuaauccucgcgcgcu

SEQ ID NO: 844221 - RNA, 19 nt, Artificial Sequence
  Description of Artificial Sequence: Synthetic oligonucleotide
  Antisense strand to SEQ ID NO: 844220
agcgcgcgaggauuaacuc

SEQ ID NO: 844222 - RNA, 19 nt, Artificial Sequence
  Description of Artificial Sequence: Synthetic oligonucleotide
  Sense strand starting at position 2172 of SEQ ID NO: 588137
cgcgcugagacuccuucua

SEQ ID NO: 844223 - RNA, 19 nt, Artificial Sequence
  Description of Artificial Sequence: Synthetic oligonucleotide
  Antisense strand to SEQ ID NO: 844222
uagaaggagucucagcgcg

SEQ ID NO: 844224 - RNA, 19 nt, Artificial Sequence
  Description of Artificial Sequence: Synthetic oligonucleotide
  Sense strand starting at position 2573 of SEQ ID NO: 588137
aggagagucucccucgguu

SEQ ID NO: 844225 - RNA, 19 nt, Artificial Sequence
  Description of Artificial Sequence: Synthetic oligonucleotide
  Antisense strand to SEQ ID NO: 844224
aaccgagggagacucuccu

SEQ ID NO: 844226 - RNA, 19 nt, Artificial Sequence
  Description of Artificial Sequence: Synthetic oligonucleotide
  Sense strand starting at position 2701 of SEQ ID NO: 588137
cccugugaaguguguaaau

SEQ ID NO: 844227 - RNA, 19 nt, Artificial Sequence
  Description of Artificial Sequence: Synthetic oligonucleotide
  Antisense strand to SEQ ID NO: 844226
auuuacacacuucacaggg

SEQ ID NO: 844228 - RNA, 19 nt, Artificial Sequence
  Description of Artificial Sequence: Synthetic oligonucleotide
  Sense strand starting at position 2703 of SEQ ID NO: 588137
cugugaaguguguaaauuc

SEQ ID NO: 844229 - RNA, 19 nt, Artificial Sequence
  Description of Artificial Sequence: Synthetic oligonucleotide
  Antisense strand to SEQ ID NO: 844228
gaauuuacacacuucacag

SEQ ID NO: 844230 - RNA, 19 nt, Artificial Sequence
  Description of Artificial Sequence: Synthetic oligonucleotide
  Sense strand starting at position 2712 of SEQ ID NO: 588137
guguaaauucuuggugguc

SEQ ID NO: 844231 - RNA, 19 nt, Artificial Sequence
  Description of Artificial Sequence: Synthetic oligonucleotide
  Antisense strand to SEQ ID NO: 844230
gaccaccaagaauuuacac

SEQ ID NO: 844232 - RNA, 19 nt, Artificial Sequence
  Description of Artificial Sequence: Synthetic oligonucleotide
  Sense strand starting at position 2713 of SEQ ID NO: 588137
uguaaauucuugguggucu

SEQ ID NO: 844233 - RNA, 19 nt, Artificial Sequence
  Description of Artificial Sequence: Synthetic oligonucleotide
  Antisense strand to SEQ ID NO: 844232
agaccaccaagaauuuaca

SEQ ID NO: 844234 - RNA, 19 nt, Artificial Sequence
  Description of Artificial Sequence: Synthetic oligonucleotide
  Sense strand starting at position 2715 of SEQ ID NO: 588137
uaaauucuugguggucuaa

SEQ ID NO: 844235 - RNA, 19 nt, Artificial Sequence
  Description of Artificial Sequence: Synthetic oligonucleotide
  Antisense strand to SEQ ID NO: 844234
uuagaccaccaagaauuua

SEQ ID NO: 844236 - RNA, 19 nt, Artificial Sequence
  Description of Artificial Sequence: Synthetic oligonucleotide
  Sense strand starting at position 2717 of SEQ ID NO: 588137
aauucuugguggucuaagu

SEQ ID NO: 844237 - RNA, 19 nt, Artificial Sequence
  Description of Artificial Sequence: Synthetic oligonucleotide
  Antisense strand to SEQ ID NO: 844236
acuuagaccaccaagaauu

SEQ ID NO: 844238 - RNA, 19 nt, Artificial Sequence
  Description of Artificial Sequence: Synthetic oligonucleotide
  Sense strand starting at position 2727 of SEQ ID NO: 588137
ggucuaaguuucgcugaaa

SEQ ID NO: 844239 - RNA, 19 nt, Artificial Sequence
  Description of Artificial Sequence: Synthetic oligonucleotide
  Antisense strand to SEQ ID NO: 844238
uuucagcgaaacuuagacc

SEQ ID NO: 844240 - RNA, 19 nt, Artificial Sequence
  Description of Artificial Sequence: Synthetic oligonucleotide
  Sense strand starting at position 2728 of SEQ ID NO: 588137
gucuaaguuucgcugaaac

SEQ ID NO: 844241 - RNA, 19 nt, Artificial Sequence
  Description of Artificial Sequence: Synthetic oligonucleotide
  Antisense strand to SEQ ID NO: 844240
guuucagcgaaacuuagac

SEQ ID NO: 844242 - RNA, 19 nt, Artificial Sequence
  Description of Artificial Sequence: Synthetic oligonucleotide
  Sense strand starting at position 2730 of SEQ ID NO: 588137
cuaaguuucgcugaaaccu

SEQ ID NO: 844243 - RNA, 19 nt, Artificial Sequence
  Description of Artificial Sequence: Synthetic oligonucleotide
  Antisense strand to SEQ ID NO: 844242
agguuucagcgaaacuuag

SEQ ID NO: 844244 - RNA, 19 nt, Artificial Sequence
  Description of Artificial Sequence: Synthetic oligonucleotide
  Sense strand starting at position 2798 of SEQ ID NO: 588137
gcaccagaucgggaugagu

SEQ ID NO: 844245 - RNA, 19 nt, Artificial Sequence
  Description of Artificial Sequence: Synthetic oligonucleotide
  Antisense strand to SEQ ID NO: 844244
acucaucccgaucuggugc

SEQ ID NO: 844246 - RNA, 19 nt, Artificial Sequence
  Description of Artificial Sequence: Synthetic oligonucleotide
  Sense strand starting at position 2800 of SEQ ID NO: 588137
accagaucgggaugagugu

SEQ ID NO: 844247 - RNA, 19 nt, Artificial Sequence
  Description of Artificial Sequence: Synthetic oligonucleotide
  Antisense strand to SEQ ID NO: 844246
acacucaucccgaucuggu

SEQ ID NO: 844248 - RNA, 19 nt, Artificial Sequence
  Description of Artificial Sequence: Synthetic oligonucleotide
  Sense strand starting at position 2811 of SEQ ID NO: 588137
augaguguugugcuuugca

SEQ ID NO: 844249 - RNA, 19 nt, Artificial Sequence
  Description of Artificial Sequence: Synthetic oligonucleotide
  Antisense strand to SEQ ID NO: 844248
ugcaaagcacaacacucau

SEQ ID NO: 844250 - RNA, 19 nt, Artificial Sequence
  Description of Artificial Sequence: Synthetic oligonucleotide
  Sense strand starting at position 2856 of SEQ ID NO: 588137
agcguacaauaaguaaaua

SEQ ID NO: 844251 - RNA, 19 nt, Artificial Sequence
  Description of Artificial Sequence: Synthetic oligonucleotide
  Antisense strand to SEQ ID NO: 844250
uauuuacuuauuguacgcu

SEQ ID NO: 844252 - RNA, 19 nt, Artificial Sequence
  Description of Artificial Sequence: Synthetic oligonucleotide
  Sense strand starting at position 3087 of SEQ ID NO: 588137
aauacugagugaguuaaca

SEQ ID NO: 844253 - RNA, 19 nt, Artificial Sequence
  Description of Artificial Sequence: Synthetic oligonucleotide
  Antisense strand to SEQ ID NO: 844252
uguuaacucacucaguauu

SEQ ID NO: 844254 - RNA, 19 nt, Artificial Sequence
  Description of Artificial Sequence: Synthetic oligonucleotide
  Sense strand starting at position 3097 of SEQ ID NO: 588137
gaguuaacauuugaagaug

SEQ ID NO: 844255 - RNA, 19 nt, Artificial Sequence
  Description of Artificial Sequence: Synthetic oligonucleotide
  Antisense strand to SEQ ID NO: 844254
caucuucaaauguuaacuc

SEQ ID NO: 844256 - RNA, 19 nt, Artificial Sequence
  Description of Artificial Sequence: Synthetic oligonucleotide
  Sense strand starting at position 3154 of SEQ ID NO: 588137
gguaguaguucccugacuc

SEQ ID NO: 844257 - RNA, 19 nt, Artificial Sequence
  Description of Artificial Sequence: Synthetic oligonucleotide
  Antisense strand to SEQ ID NO: 844256
gagucagggaacuacuacc

SEQ ID NO: 844258 - RNA, 19 nt, Artificial Sequence
  Description of Artificial Sequence: Synthetic oligonucleotide
  Sense strand starting at position 3186 of SEQ ID NO: 588137
agcagacgucuuuaugaca

SEQ ID NO: 844259 - RNA, 19 nt, Artificial Sequence
  Description of Artificial Sequence: Synthetic oligonucleotide
  Antisense strand to SEQ ID NO: 844258
ugucauaaagacgucugcu

SEQ ID NO: 844260 - RNA, 19 nt, Artificial Sequence
  Description of Artificial Sequence: Synthetic oligonucleotide
  Sense strand starting at position 3191 of SEQ ID NO: 588137
acgucuuuaugacaaggga

SEQ ID NO: 844261 - RNA, 19 nt, Artificial Sequence
  Description of Artificial Sequence: Synthetic oligonucleotide
  Antisense strand to SEQ ID NO: 844260
ucccuugucauaaagacgu

SEQ ID NO: 844262 - RNA, 19 nt, Artificial Sequence
  Description of Artificial Sequence: Synthetic oligonucleotide
  Sense strand starting at position 3220 of SEQ ID NO: 588137
agauguucucaggguuaca

SEQ ID NO: 844263 - RNA, 19 nt, Artificial Sequence
  Description of Artificial Sequence: Synthetic oligonucleotide
  Antisense strand to SEQ ID NO: 844262
uguaacccugagaacaucu

SEQ ID NO: 844264 - RNA, 19 nt, Artificial Sequence
  Description of Artificial Sequence: Synthetic oligonucleotide
  Sense strand starting at position 3391 of SEQ ID NO: 588137
ucagacaacuuucugaagu

SEQ ID NO: 844265 - RNA, 19 nt, Artificial Sequence
  Description of Artificial Sequence: Synthetic oligonucleotide
  Antisense strand to SEQ ID NO: 844264
acuucagaaaguugucuga

SEQ ID NO: 844266 - RNA, 19 nt, Artificial Sequence
  Description of Artificial Sequence: Synthetic oligonucleotide
  Sense strand starting at position 3393 of SEQ ID NO: 588137
agacaacuuucugaaguag

SEQ ID NO: 844267 - RNA, 19 nt, Artificial Sequence
  Description of Artificial Sequence: Synthetic oligonucleotide
  Antisense strand to SEQ ID NO: 844266
cuacuucagaaaguugucu

SEQ ID NO: 844268 - RNA, 19 nt, Artificial Sequence
  Description of Artificial Sequence: Synthetic oligonucleotide
  Sense strand starting at position 3399 of SEQ ID NO: 588137
cuuucugaaguaggugaua

SEQ ID NO: 844269 - RNA, 19 nt, Artificial Sequence
  Description of Artificial Sequence: Synthetic oligonucleotide
  Antisense strand to SEQ ID NO: 844268
uaucaccuacuucagaaag

SEQ ID NO: 844270 - RNA, 19 nt, Artificial Sequence
  Description of Artificial Sequence: Synthetic oligonucleotide
  Sense strand starting at position 3404 of SEQ ID NO: 588137
ugaaguaggugauaauuua

SEQ ID NO: 844271 - RNA, 19 nt, Artificial Sequence
  Description of Artificial Sequence: Synthetic oligonucleotide
  Antisense strand to SEQ ID NO: 844270
uaaauuaucaccuacuuca

SEQ ID NO: 844272 - RNA, 19 nt, Artificial Sequence
  Description of Artificial Sequence: Synthetic oligonucleotide
  Sense strand starting at position 3495 of SEQ ID NO: 588137
ccagauaggucugacucca

SEQ ID NO: 844273 - RNA, 19 nt, Artificial Sequence
  Description of Artificial Sequence: Synthetic oligonucleotide
  Antisense strand to SEQ ID NO: 844272
uggagucagaccuaucugg

SEQ ID NO: 844274 - RNA, 19 nt, Artificial Sequence
  Description of Artificial Sequence: Synthetic oligonucleotide
  Sense strand starting at position 3518 of SEQ ID NO: 588137
ccaccaucuugugcuacau

SEQ ID NO: 844275 - RNA, 19 nt, Artificial Sequence
  Description of Artificial Sequence: Synthetic oligonucleotide
  Antisense strand to SEQ ID NO: 844274
auguagcacaagauggugg

SEQ ID NO: 844276 - RNA, 19 nt, Artificial Sequence
  Description of Artificial Sequence: Synthetic oligonucleotide
  Sense strand starting at position 3536 of SEQ ID NO: 588137
ucaucagucuggcuagagu

SEQ ID NO: 844277 - RNA, 19 nt, Artificial Sequence
  Description of Artificial Sequence: Synthetic oligonucleotide
  Antisense strand to SEQ ID NO: 844276
acucuagccagacugauga

SEQ ID NO: 844278 - RNA, 19 nt, Artificial Sequence
  Description of Artificial Sequence: Synthetic oligonucleotide
  Sense strand starting at position 3638 of SEQ ID NO: 588137
aguguccucgugcaggaaa

SEQ ID NO: 844279 - RNA, 19 nt, Artificial Sequence
  Description of Artificial Sequence: Synthetic oligonucleotide
  Antisense strand to SEQ ID NO: 844278
uuuccugcacgaggacacu

SEQ ID NO: 844280 - RNA, 19 nt, Artificial Sequence
  Description of Artificial Sequence: Synthetic oligonucleotide
  Sense strand starting at position 3674 of SEQ ID NO: 588137
aggagucuuaaacguggua

SEQ ID NO: 844281 - RNA, 19 nt, Artificial Sequence
  Description of Artificial Sequence: Synthetic oligonucleotide
  Antisense strand to SEQ ID NO: 844280
uaccacguuuaagacuccu

SEQ ID NO: 844282 - RNA, 19 nt, Artificial Sequence
  Description of Artificial Sequence: Synthetic oligonucleotide
  Sense strand starting at position 3736 of SEQ ID NO: 588137
ugguauuaauccuuagcau

SEQ ID NO: 844283 - RNA, 19 nt, Artificial Sequence
  Description of Artificial Sequence: Synthetic oligonucleotide
  Antisense strand to SEQ ID NO: 844282
augcuaaggauuaauacca

SEQ ID NO: 844284 - RNA, 19 nt, Artificial Sequence
  Description of Artificial Sequence: Synthetic oligonucleotide
  Sense strand starting at position 3737 of SEQ ID NO: 588137
gguauuaauccuuagcauc

SEQ ID NO: 844285 - RNA, 19 nt, Artificial Sequence
  Description of Artificial Sequence: Synthetic oligonucleotide
  Antisense strand to SEQ ID NO: 844284
gaugcuaaggauuaauacc

SEQ ID NO: 844286 - RNA, 19 nt, Artificial Sequence
  Description of Artificial Sequence: Synthetic oligonucleotide
  Sense strand starting at position 3809 of SEQ ID NO: 588137
ggacucuuucccuagggua

SEQ ID NO: 844287 - RNA, 19 nt, Artificial Sequence
  Description of Artificial Sequence: Synthetic oligonucleotide
  Antisense strand to SEQ ID NO: 844286
uacccuagggaaagagucc

SEQ ID NO: 844288 - RNA, 19 nt, Artificial Sequence
  Description of Artificial Sequence: Synthetic oligonucleotide
  Sense strand starting at position 3811 of SEQ ID NO: 588137
acucuuucccuaggguaca

SEQ ID NO: 844289 - RNA, 19 nt, Artificial Sequence
  Description of Artificial Sequence: Synthetic oligonucleotide
  Antisense strand to SEQ ID NO: 844288
uguacccuagggaaagagu

SEQ ID NO: 844290 - RNA, 19 nt, Artificial Sequence
  Description of Artificial Sequence: Synthetic oligonucleotide
  Sense strand starting at position 3836 of SEQ ID NO: 588137
acaggauagauguguguuu

SEQ ID NO: 844291 - RNA, 19 nt, Artificial Sequence
  Description of Artificial Sequence: Synthetic oligonucleotide
  Antisense strand to SEQ ID NO: 844290
aaacacacaucuauccugu

SEQ ID NO: 844292 - RNA, 19 nt, Artificial Sequence
  Description of Artificial Sequence: Synthetic oligonucleotide
  Sense strand starting at position 3858 of SEQ ID NO: 588137
aguauuaagccacaaagua

SEQ ID NO: 844293 - RNA, 19 nt, Artificial Sequence
  Description of Artificial Sequence: Synthetic oligonucleotide
  Antisense strand to SEQ ID NO: 844292
uacuuuguggcuuaauacu

SEQ ID NO: 844294 - RNA, 19 nt, Artificial Sequence
  Description of Artificial Sequence: Synthetic oligonucleotide
  Sense strand starting at position 3979 of SEQ ID NO: 588137
gcaugcaccucugugaaca

SEQ ID NO: 844295 - RNA, 19 nt, Artificial Sequence
  Description of Artificial Sequence: Synthetic oligonucleotide
  Antisense strand to SEQ ID NO: 844294
uguucacagaggugcaugc

SEQ ID NO: 844296 - RNA, 19 nt, Artificial Sequence
  Description of Artificial Sequence: Synthetic oligonucleotide
  Sense strand starting at position 91 of SEQ ID NO: 588138
ccuggaauuuaggauguua

SEQ ID NO: 844297 - RNA, 19 nt, Artificial Sequence
  Description of Artificial Sequence: Synthetic oligonucleotide
  Antisense strand to SEQ ID NO: 844296
uaacauccuaaauuccagg

SEQ ID NO: 844298 - RNA, 19 nt, Artificial Sequence
  Description of Artificial Sequence: Synthetic oligonucleotide
  Sense strand starting at position 222 of SEQ ID NO: 588138
gaaguauacugguucuuga

SEQ ID NO: 844299 - RNA, 19 nt, Artificial Sequence
  Description of Artificial Sequence: Synthetic oligonucleotide
  Antisense strand to SEQ ID NO: 844298
ucaagaaccaguauacuuc

SEQ ID NO: 844300 - RNA, 19 nt, Artificial Sequence
  Description of Artificial Sequence: Synthetic oligonucleotide
  Sense strand starting at position 238 of SEQ ID NO: 588138
ugauuaucuggcgaucuga

SEQ ID NO: 844301 - RNA, 19 nt, Artificial Sequence
  Description of Artificial Sequence: Synthetic oligonucleotide
  Antisense strand to SEQ ID NO: 844300
ucagaucgccagauaauca

SEQ ID NO: 844302 - RNA, 19 nt, Artificial Sequence
  Description of Artificial Sequence: Synthetic oligonucleotide
  Sense strand starting at position 248 of SEQ ID NO: 588138
gcgaucugaccucaagaaa

SEQ ID NO: 844303 - RNA, 19 nt, Artificial Sequence
  Description of Artificial Sequence: Synthetic oligonucleotide
  Antisense strand to SEQ ID NO: 844302
uuucuugaggucagaucgc

SEQ ID NO: 844304 - RNA, 19 nt, Artificial Sequence
  Description of Artificial Sequence: Synthetic oligonucleotide
  Sense strand starting at position 447 of SEQ ID NO: 588138
ugaugaaauucuguccaau

SEQ ID NO: 844305 - RNA, 19 nt, Artificial Sequence
  Description of Artificial Sequence: Synthetic oligonucleotide
  Antisense strand to SEQ ID NO: 844304
auuggacagaauuucauca

SEQ ID NO: 844306 - RNA, 19 nt, Artificial Sequence
  Description of Artificial Sequence: Synthetic oligonucleotide
  Sense strand starting at position 562 of SEQ ID NO: 588138
guaaauuaauaggucuaga

SEQ ID NO: 844307 - RNA, 19 nt, Artificial Sequence
  Description of Artificial Sequence: Synthetic oligonucleotide
  Antisense strand to SEQ ID NO: 844306
ucuagaccuauuaauuuac

SEQ ID NO: 844308 - RNA, 19 nt, Artificial Sequence
  Description of Artificial Sequence: Synthetic oligonucleotide
  Sense strand starting at position 581 of SEQ ID NO: 588138
gagagcuaacgucauauuc

SEQ ID NO: 844309 - RNA, 19 nt, Artificial Sequence
  Description of Artificial Sequence: Synthetic oligonucleotide
  Antisense strand to SEQ ID NO: 844308
gaauaugacguuagcucuc

SEQ ID NO: 844310 - RNA, 19 nt, Artificial Sequence
  Description of Artificial Sequence: Synthetic oligonucleotide
  Sense strand starting at position 816 of SEQ ID NO: 588138
agucauuugcaaugugcau

SEQ ID NO: 844311 - RNA, 19 nt, Artificial Sequence
  Description of Artificial Sequence: Synthetic oligonucleotide
  Antisense strand to SEQ ID NO: 844310
augcacauugcaaaugacu

SEQ ID NO: 844312 - RNA, 19 nt, Artificial Sequence
  Description of Artificial Sequence: Synthetic oligonucleotide
  Sense strand starting at position 948 of SEQ ID NO: 588138
gcuagcagugaacauaaga

SEQ ID NO: 844313 - RNA, 19 nt, Artificial Sequence
  Description of Artificial Sequence: Synthetic oligonucleotide
  Antisense strand to SEQ ID NO: 844312
ucuuauguucacugcuagc

SEQ ID NO: 844314 - RNA, 19 nt, Artificial Sequence
  Description of Artificial Sequence: Synthetic oligonucleotide
  Sense strand starting at position 1203 of SEQ ID NO: 588138
aggauaauguaucugacac

SEQ ID NO: 844315 - RNA, 19 nt, Artificial Sequence
  Description of Artificial Sequence: Synthetic oligonucleotide
  Antisense strand to SEQ ID NO: 844314
gugucagauacauuauccu

SEQ ID NO: 844316 - RNA, 19 nt, Artificial Sequence
  Description of Artificial Sequence: Synthetic oligonucleotide
  Sense strand starting at position 1422 of SEQ ID NO: 588138
cacuuugaggucugaaucu

SEQ ID NO: 844317 - RNA, 19 nt, Artificial Sequence
  Description of Artificial Sequence: Synthetic oligonucleotide
  Antisense strand to SEQ ID NO: 844316
agauucagaccucaaagug

SEQ ID NO: 844318 - RNA, 19 nt, Artificial Sequence
  Description of Artificial Sequence: Synthetic oligonucleotide
  Sense strand starting at position 1575 of SEQ ID NO: 588138
cacacagcucuugggaaga

SEQ ID NO: 844319 - RNA, 19 nt, Artificial Sequence
  Description of Artificial Sequence: Synthetic oligonucleotide
  Antisense strand to SEQ ID NO: 844318
ucuucccaagagcugugug

SEQ ID NO: 844320 - RNA, 19 nt, Artificial Sequence
  Description of Artificial Sequence: Synthetic oligonucleotide
  Sense strand starting at position 1736 of SEQ ID NO: 588138
uuuguuaacuaaguagaac

SEQ ID NO: 844321 - RNA, 19 nt, Artificial Sequence
  Description of Artificial Sequence: Synthetic oligonucleotide
  Antisense strand to SEQ ID NO: 844320
guucuacuuaguuaacaaa

SEQ ID NO: 844322 - RNA, 19 nt, Artificial Sequence
  Description of Artificial Sequence: Synthetic oligonucleotide
  Sense strand starting at position 1818 of SEQ ID NO: 588138
augaaugacuuaucauguu

SEQ ID NO: 844323 - RNA, 19 nt, Artificial Sequence
  Description of Artificial Sequence: Synthetic oligonucleotide
  Antisense strand to SEQ ID NO: 844322
aacaugauaagucauucau

SEQ ID NO: 844324 - RNA, 19 nt, Artificial Sequence
  Description of Artificial Sequence: Synthetic oligonucleotide
  Sense strand starting at position 1849 of SEQ ID NO: 588138
ccauaaauccuguagaagc

SEQ ID NO: 844325 - RNA, 19 nt, Artificial Sequence
  Description of Artificial Sequence: Synthetic oligonucleotide
  Antisense strand to SEQ ID NO: 844324
gcuucuacaggauuuaugg

SEQ ID NO: 844326 - RNA, 19 nt, Artificial Sequence
  Description of Artificial Sequence: Synthetic oligonucleotide
  Sense strand starting at position 2318 of SEQ ID NO: 588138
aguuaaauagguuguagac

SEQ ID NO: 844327 - RNA, 19 nt, Artificial Sequence
  Description of Artificial Sequence: Synthetic oligonucleotide
  Antisense strand to SEQ ID NO: 844326
gucuacaaccuauuuaacu

SEQ ID NO: 844328 - RNA, 19 nt, Artificial Sequence
  Description of Artificial Sequence: Synthetic oligonucleotide
  Sense strand starting at position 2405 of SEQ ID NO: 588138
aucacuuauuauucuguga

SEQ ID NO: 844329 - RNA, 19 nt, Artificial Sequence
  Description of Artificial Sequence: Synthetic oligonucleotide
  Antisense strand to SEQ ID NO: 844328
ucacagaauaauaagugau

SEQ ID NO: 844330 - RNA, 19 nt, Artificial Sequence
  Description of Artificial Sequence: Synthetic oligonucleotide
  Sense strand starting at position 2408 of SEQ ID NO: 588138
acuuauuauucugugacuu

SEQ ID NO: 844331 - RNA, 19 nt, Artificial Sequence
  Description of Artificial Sequence: Synthetic oligonucleotide
  Antisense strand to SEQ ID NO: 844330
aagucacagaauaauaagu

SEQ ID NO: 844332 - RNA, 19 nt, Artificial Sequence
  Description of Artificial Sequence: Synthetic oligonucleotide
  Sense strand starting at position 2571 of SEQ ID NO: 588138
ucccuaagaguuggaauca

SEQ ID NO: 844333 - RNA, 19 nt, Artificial Sequence
  Description of Artificial Sequence: Synthetic oligonucleotide
  Antisense strand to SEQ ID NO: 844332
ugauuccaacucuuaggga

SEQ ID NO: 844334 - RNA, 19 nt, Artificial Sequence
  Description of Artificial Sequence: Synthetic oligonucleotide
  Sense strand starting at position 2626 of SEQ ID NO: 588138
uguauauaggagcauuauc

SEQ ID NO: 844335 - RNA, 19 nt, Artificial Sequence
  Description of Artificial Sequence: Synthetic oligonucleotide
  Antisense strand to SEQ ID NO: 844334
gauaaugcuccuauauaca

SEQ ID NO: 844336 - RNA, 19 nt, Artificial Sequence
  Description of Artificial Sequence: Synthetic oligonucleotide
  Sense strand starting at position 2631 of SEQ ID NO: 588138
auaggagcauuaucuaagu

SEQ ID NO: 844337 - RNA, 19 nt, Artificial Sequence
  Description of Artificial Sequence: Synthetic oligonucleotide
  Antisense strand to SEQ ID NO: 844336
acuuagauaaugcuccuau

SEQ ID NO: 844338 - RNA, 19 nt, Artificial Sequence
  Description of Artificial Sequence: Synthetic oligonucleotide
  Sense strand starting at position 2657 of SEQ ID NO: 588138
ccacuagaauucuugugac

SEQ ID NO: 844339 - RNA, 19 nt, Artificial Sequence
  Description of Artificial Sequence: Synthetic oligonucleotide
  Antisense strand to SEQ ID NO: 844338
gucacaagaauucuagugg

SEQ ID NO: 844340 - RNA, 19 nt, Artificial Sequence
  Description of Artificial Sequence: Synthetic oligonucleotide
  Sense strand starting at position 2711 of SEQ ID NO: 588138
uuacacagugccgaauaau

SEQ ID NO: 844341 - RNA, 19 nt, Artificial Sequence
  Description of Artificial Sequence: Synthetic oligonucleotide
  Antisense strand to SEQ ID NO: 844340
auuauucggcacuguguaa

SEQ ID NO: 844342 - RNA, 19 nt, Artificial Sequence
  Description of Artificial Sequence: Synthetic oligonucleotide
  Sense strand starting at position 3013 of SEQ ID NO: 588138
auuguagacuaguugaaca

SEQ ID NO: 844343 - RNA, 19 nt, Artificial Sequence
  Description of Artificial Sequence: Synthetic oligonucleotide
  Antisense strand to SEQ ID NO: 844342
uguucaacuagucuacaau

SEQ ID NO: 844344 - RNA, 19 nt, Artificial Sequence
  Description of Artificial Sequence: Synthetic oligonucleotide
  Sense strand starting at position 3138 of SEQ ID NO: 588138
ugguaacuuccauaguggu

SEQ ID NO: 844345 - RNA, 19 nt, Artificial Sequence
  Description of Artificial Sequence: Synthetic oligonucleotide
  Antisense strand to SEQ ID NO: 844344
accacuauggaaguuacca

SEQ ID NO: 844346 - RNA, 19 nt, Artificial Sequence
  Description of Artificial Sequence: Synthetic oligonucleotide
  Sense strand starting at position 3195 of SEQ ID NO: 588138
ugauguuuccauuaaagug

SEQ ID NO: 844347 - RNA, 19 nt, Artificial Sequence
  Description of Artificial Sequence: Synthetic oligonucleotide
  Antisense strand to SEQ ID NO: 844346
cacuuuaauggaaacauca

SEQ ID NO: 844348 - RNA, 19 nt, Artificial Sequence
  Description of Artificial Sequence: Synthetic oligonucleotide
  Sense strand starting at position 3241 of SEQ ID NO: 588138
ggcucaauuuaugcugcau

SEQ ID NO: 844349 - RNA, 19 nt, Artificial Sequence
  Description of Artificial Sequence: Synthetic oligonucleotide
  Antisense strand to SEQ ID NO: 844348
augcagcauaaauugagcc

SEQ ID NO: 844350 - RNA, 19 nt, Artificial Sequence
  Description of Artificial Sequence: Synthetic oligonucleotide
  Sense strand starting at position 3257 of SEQ ID NO: 588138
cauuuagugguuuguucuu

SEQ ID NO: 844351 - RNA, 19 nt, Artificial Sequence
  Description of Artificial Sequence: Synthetic oligonucleotide
  Antisense strand to SEQ ID NO: 844350
aagaacaaaccacuaaaug

SEQ ID NO: 844352 - RNA, 19 nt, Artificial Sequence
  Description of Artificial Sequence: Synthetic oligonucleotide
  Sense strand starting at position 3380 of SEQ ID NO: 588138
gcucgaugccaauaucaau

SEQ ID NO: 844353 - RNA, 19 nt, Artificial Sequence
  Description of Artificial Sequence: Synthetic oligonucleotide
  Antisense strand to SEQ ID NO: 844352
auugauauuggcaucgagc

SEQ ID NO: 844354 - RNA, 19 nt, Artificial Sequence
  Description of Artificial Sequence: Synthetic oligonucleotide
  Sense strand starting at position 3386 of SEQ ID NO: 588138
ugccaauaucaaugaaguc

SEQ ID NO: 844355 - RNA, 19 nt, Artificial Sequence
  Description of Artificial Sequence: Synthetic oligonucleotide
  Antisense strand to SEQ ID NO: 844354
gacuucauugauauuggca

SEQ ID NO: 844356 - RNA, 19 nt, Artificial Sequence
  Description of Artificial Sequence: Synthetic oligonucleotide
  Sense strand starting at position 3418 of SEQ ID NO: 588138
guaggaugaucaucuaauc

SEQ ID NO: 844357 - RNA, 19 nt, Artificial Sequence
  Description of Artificial Sequence: Synthetic oligonucleotide
  Antisense strand to SEQ ID NO: 844356
gauuagaugaucauccuac

SEQ ID NO: 844358 - RNA, 19 nt, Artificial Sequence
  Description of Artificial Sequence: Synthetic oligonucleotide
  Sense strand starting at position 3468 of SEQ ID NO: 588138
uuacuaucauauguguaag

SEQ ID NO: 844359 - RNA, 19 nt, Artificial Sequence
  Description of Artificial Sequence: Synthetic oligonucleotide
  Antisense strand to SEQ ID NO: 844358
cuuacacauaugauaguaa

SEQ ID NO: 844360 - RNA, 19 nt, Artificial Sequence
  Description of Artificial Sequence: Synthetic oligonucleotide
  Sense strand starting at position 3471 of SEQ ID NO: 588138
cuaucauauguguaaguug

SEQ ID NO: 844361 - RNA, 19 nt, Artificial Sequence
  Description of Artificial Sequence: Synthetic oligonucleotide
  Antisense strand to SEQ ID NO: 844360
caacuuacacauaugauag

SEQ ID NO: 844362 - RNA, 19 nt, Artificial Sequence
  Description of Artificial Sequence: Synthetic oligonucleotide
  Sense strand starting at position 3474 of SEQ ID NO: 588138
ucauauguguaaguugaaa

SEQ ID NO: 844363 - RNA, 19 nt, Artificial Sequence
  Description of Artificial Sequence: Synthetic oligonucleotide
  Antisense strand to SEQ ID NO: 844362
uuucaacuuacacauauga

SEQ ID NO: 844364 - RNA, 19 nt, Artificial Sequence
  Description of Artificial Sequence: Synthetic oligonucleotide
  Sense strand starting at position 3583 of SEQ ID NO: 588138
uaugucaucaggugagaag

SEQ ID NO: 844365 - RNA, 19 nt, Artificial Sequence
  Description of Artificial Sequence: Synthetic oligonucleotide
  Antisense strand to SEQ ID NO: 844364
cuucucaccugaugacaua

SEQ ID NO: 844366 - RNA, 19 nt, Artificial Sequence
  Description of Artificial Sequence: Synthetic oligonucleotide
  Sense strand starting at position 3639 of SEQ ID NO: 588138
ucuuuaauuugcguuugua

SEQ ID NO: 844367 - RNA, 19 nt, Artificial Sequence
  Description of Artificial Sequence: Synthetic oligonucleotide
  Antisense strand to SEQ ID NO: 844366
uacaaacgcaaauuaaaga

SEQ ID NO: 844368 - RNA, 19 nt, Artificial Sequence
  Description of Artificial Sequence: Synthetic oligonucleotide
  Sense strand starting at position 3684 of SEQ ID NO: 588138
ggaacauuccugcacagug

SEQ ID NO: 844369 - RNA, 19 nt, Artificial Sequence
  Description of Artificial Sequence: Synthetic oligonucleotide
  Antisense strand to SEQ ID NO: 844368
cacugugcaggaauguucc

SEQ ID NO: 844370 - RNA, 19 nt, Artificial Sequence
  Description of Artificial Sequence: Synthetic oligonucleotide
  Sense strand starting at position 3705 of SEQ ID NO: 588138
gcucuugugaaaugaagaa

SEQ ID NO: 844371 - RNA, 19 nt, Artificial Sequence
  Description of Artificial Sequence: Synthetic oligonucleotide
  Antisense strand to SEQ ID NO: 844370
uucuucauuucacaagagc

SEQ ID NO: 844372 - RNA, 19 nt, Artificial Sequence
  Description of Artificial Sequence: Synthetic oligonucleotide
  Sense strand starting at position 3783 of SEQ ID NO: 588138
ugcuuuguugcugcuauua

SEQ ID NO: 844373 - RNA, 19 nt, Artificial Sequence
  Description of Artificial Sequence: Synthetic oligonucleotide
  Antisense strand to SEQ ID NO: 844372
uaauagcagcaacaaagca

SEQ ID NO: 844374 - RNA, 19 nt, Artificial Sequence
  Description of Artificial Sequence: Synthetic oligonucleotide
  Sense strand starting at position 3838 of SEQ ID NO: 588138
uuggauuuguaauacauag

SEQ ID NO: 844375 - RNA, 19 nt, Artificial Sequence
  Description of Artificial Sequence: Synthetic oligonucleotide
  Antisense strand to SEQ ID NO: 844374
cuauguauuacaaauccaa

SEQ ID NO: 844376 - RNA, 19 nt, Artificial Sequence
  Description of Artificial Sequence: Synthetic oligonucleotide
  Sense strand starting at position 5 of SEQ ID NO: 588139
uguauauuuacuuguguag

SEQ ID NO: 844377 - RNA, 19 nt, Artificial Sequence
  Description of Artificial Sequence: Synthetic oligonucleotide
  Antisense strand to SEQ ID NO: 844376
cuacacaaguaaauauaca

SEQ ID NO: 844378 - RNA, 19 nt, Artificial Sequence
  Description of Artificial Sequence: Synthetic oligonucleotide
  Sense strand starting at position 66 of SEQ ID NO: 588139
uuuggauuccgacaaugca

SEQ ID NO: 844379 - RNA, 19 nt, Artificial Sequence
  Description of Artificial Sequence: Synthetic oligonucleotide
  Antisense strand to SEQ ID NO: 844378
ugcauugucggaauccaaa

SEQ ID NO: 844380 - RNA, 19 nt, Artificial Sequence
  Description of Artificial Sequence: Synthetic oligonucleotide
  Sense strand starting at position 74 of SEQ ID NO: 588139
ccgacaaugcaguagaauu

SEQ ID NO: 844381 - RNA, 19 nt, Artificial Sequence
  Description of Artificial Sequence: Synthetic oligonucleotide
  Antisense strand to SEQ ID NO: 844380
aauucuacugcauugucgg

SEQ ID NO: 844382 - RNA, 19 nt, Artificial Sequence
  Description of Artificial Sequence: Synthetic oligonucleotide
  Sense strand starting at position 124 of SEQ ID NO: 588139
agauuaagcuagucauaca

SEQ ID NO: 844383 - RNA, 19 nt, Artificial Sequence
  Description of Artificial Sequence: Synthetic oligonucleotide
  Antisense strand to SEQ ID NO: 844382
uguaugacuagcuuaaucu

SEQ ID NO: 844384 - RNA, 19 nt, Artificial Sequence
  Description of Artificial Sequence: Synthetic oligonucleotide
  Sense strand starting at position 162 of SEQ ID NO: 588139
ucgagauauuaaguguaaa

SEQ ID NO: 844385 - RNA, 19 nt, Artificial Sequence
  Description of Artificial Sequence: Synthetic oligonucleotide
  Antisense strand to SEQ ID NO: 844384
uuuacacuuaauaucucga

SEQ ID NO: 844386 - RNA, 19 nt, Artificial Sequence
  Description of Artificial Sequence: Synthetic oligonucleotide
  Sense strand starting at position 163 of SEQ ID NO: 588139
cgagauauuaaguguaaag

SEQ ID NO: 844387 - RNA, 19 nt, Artificial Sequence
  Description of Artificial Sequence: Synthetic oligonucleotide
  Antisense strand to SEQ ID NO: 844386
cuuuacacuuaauaucucg

SEQ ID NO: 844388 - RNA, 19 nt, Artificial Sequence
  Description of Artificial Sequence: Synthetic oligonucleotide
  Sense strand starting at position 195 of SEQ ID NO: 588139
augaauaccgcaggagaaa

SEQ ID NO: 844389 - RNA, 19 nt, Artificial Sequence
  Description of Artificial Sequence: Synthetic oligonucleotide
  Antisense strand to SEQ ID NO: 844388
uuucuccugcgguauucau

SEQ ID NO: 844390 - RNA, 19 nt, Artificial Sequence
  Description of Artificial Sequence: Synthetic oligonucleotide
  Sense strand starting at position 521 of SEQ ID NO: 588139
uauugugacagcugggaga

SEQ ID NO: 844391 - RNA, 19 nt, Artificial Sequence
  Description of Artificial Sequence: Synthetic oligonucleotide
  Antisense strand to SEQ ID NO: 844390
ucucccagcugucacaaua

SEQ ID NO: 844392 - RNA, 19 nt, Artificial Sequence
  Description of Artificial Sequence: Synthetic oligonucleotide
  Sense strand starting at position 542 of SEQ ID NO: 588139
ggaugucaccagcaguaga

SEQ ID NO: 844393 - RNA, 19 nt, Artificial Sequence
  Description of Artificial Sequence: Synthetic oligonucleotide
  Antisense strand to SEQ ID NO: 844392
ucuacugcuggugacaucc

SEQ ID NO: 844394 - RNA, 19 nt, Artificial Sequence
  Description of Artificial Sequence: Synthetic oligonucleotide
  Sense strand starting at position 545 of SEQ ID NO: 588139
ugucaccagcaguagaaau

SEQ ID NO: 844395 - RNA, 19 nt, Artificial Sequence
  Description of Artificial Sequence: Synthetic oligonucleotide
  Antisense strand to SEQ ID NO: 844394
auuucuacugcuggugaca

SEQ ID NO: 844396 - RNA, 19 nt, Artificial Sequence
  Description of Artificial Sequence: Synthetic oligonucleotide
  Sense strand starting at position 567 of SEQ ID NO: 588139
guauccuguuuccugagga

SEQ ID NO: 844397 - RNA, 19 nt, Artificial Sequence
  Description of Artificial Sequence: Synthetic oligonucleotide
  Antisense strand to SEQ ID NO: 844396
uccucaggaaacaggauac

SEQ ID NO: 844398 - RNA, 19 nt, Artificial Sequence
  Description of Artificial Sequence: Synthetic oligonucleotide
  Sense strand starting at position 623 of SEQ ID NO: 588139
caaacauuucuccguguga

SEQ ID NO: 844399 - RNA, 19 nt, Artificial Sequence
  Description of Artificial Sequence: Synthetic oligonucleotide
  Antisense strand to SEQ ID NO: 844398
ucacacggagaaauguuug

SEQ ID NO: 844400 - RNA, 19 nt, Artificial Sequence
  Description of Artificial Sequence: Synthetic oligonucleotide
  Sense strand starting at position 624 of SEQ ID NO: 588139
aaacauuucuccgugugau

SEQ ID NO: 844401 - RNA, 19 nt, Artificial Sequence
  Description of Artificial Sequence: Synthetic oligonucleotide
  Antisense strand to SEQ ID NO: 844400
aucacacggagaaauguuu

SEQ ID NO: 844402 - RNA, 19 nt, Artificial Sequence
  Description of Artificial Sequence: Synthetic oligonucleotide
  Sense strand starting at position 625 of SEQ ID NO: 588139
aacauuucuccgugugaua

SEQ ID NO: 844403 - RNA, 19 nt, Artificial Sequence
  Description of Artificial Sequence: Synthetic oligonucleotide
  Antisense strand to SEQ ID NO: 844402
uaucacacggagaaauguu

SEQ ID NO: 844404 - RNA, 19 nt, Artificial Sequence
  Description of Artificial Sequence: Synthetic oligonucleotide
  Sense strand starting at position 627 of SEQ ID NO: 588139
cauuucuccgugugauauu

SEQ ID NO: 844405 - RNA, 19 nt, Artificial Sequence
  Description of Artificial Sequence: Synthetic oligonucleotide
  Antisense strand to SEQ ID NO: 844404
aauaucacacggagaaaug

SEQ ID NO: 844406 - RNA, 19 nt, Artificial Sequence
  Description of Artificial Sequence: Synthetic oligonucleotide
  Sense strand starting at position 628 of SEQ ID NO: 588139
auuucuccgugugauauuu

SEQ ID NO: 844407 - RNA, 19 nt, Artificial Sequence
  Description of Artificial Sequence: Synthetic oligonucleotide
  Antisense strand to SEQ ID NO: 844406
aaauaucacacggagaaau

SEQ ID NO: 844408 - RNA, 19 nt, Artificial Sequence
  Description of Artificial Sequence: Synthetic oligonucleotide
  Sense strand starting at position 694 of SEQ ID NO: 588139
cguauacaccuccagaguu

SEQ ID NO: 844409 - RNA, 19 nt, Artificial Sequence
  Description of Artificial Sequence: Synthetic oligonucleotide
  Antisense strand to SEQ ID NO: 844408
aacucuggagguguauacg

SEQ ID NO: 844410 - RNA, 19 nt, Artificial Sequence
  Description of Artificial Sequence: Synthetic oligonucleotide
  Sense strand starting at position 744 of SEQ ID NO: 588139
auccucuagccauaagguu

SEQ ID NO: 844411 - RNA, 19 nt, Artificial Sequence
  Description of Artificial Sequence: Synthetic oligonucleotide
  Antisense strand to SEQ ID NO: 844410
aaccuuauggcuagaggau

SEQ ID NO: 844412 - RNA, 19 nt, Artificial Sequence
  Description of Artificial Sequence: Synthetic oligonucleotide
  Sense strand starting at position 848 of SEQ ID NO: 588139
uucuccuucuggucagaca

SEQ ID NO: 844413 - RNA, 19 nt, Artificial Sequence
  Description of Artificial Sequence: Synthetic oligonucleotide
  Antisense strand to SEQ ID NO: 844412
ugucugaccagaaggagaa

SEQ ID NO: 844414 - RNA, 19 nt, Artificial Sequence
  Description of Artificial Sequence: Synthetic oligonucleotide
  Sense strand starting at position 849 of SEQ ID NO: 588139
ucuccuucuggucagacaa

SEQ ID NO: 844415 - RNA, 19 nt, Artificial Sequence
  Description of Artificial Sequence: Synthetic oligonucleotide
  Antisense strand to SEQ ID NO: 844414
uugucugaccagaaggaga

SEQ ID NO: 844416 - RNA, 19 nt, Artificial Sequence
  Description of Artificial Sequence: Synthetic oligonucleotide
  Sense strand starting at position 936 of SEQ ID NO: 588139
aguaguaucacaggaugga

SEQ ID NO: 844417 - RNA, 19 nt, Artificial Sequence
  Description of Artificial Sequence: Synthetic oligonucleotide
  Antisense strand to SEQ ID NO: 844416
uccauccugugauacuacu

SEQ ID NO: 844418 - RNA, 19 nt, Artificial Sequence
  Description of Artificial Sequence: Synthetic oligonucleotide
  Sense strand starting at position 992 of SEQ ID NO: 588139
auguguaacgguuauccua

SEQ ID NO: 844419 - RNA, 19 nt, Artificial Sequence
  Description of Artificial Sequence: Synthetic oligonucleotide
  Antisense strand to SEQ ID NO: 844418
uaggauaaccguuacacau

SEQ ID NO: 844420 - RNA, 19 nt, Artificial Sequence
  Description of Artificial Sequence: Synthetic oligonucleotide
  Sense strand starting at position 1127 of SEQ ID NO: 588139
agacacugugcucagaguu

SEQ ID NO: 844421 - RNA, 19 nt, Artificial Sequence
  Description of Artificial Sequence: Synthetic oligonucleotide
  Antisense strand to SEQ ID NO: 844420
aacucugagcacagugucu

SEQ ID NO: 844422 - RNA, 19 nt, Artificial Sequence
  Description of Artificial Sequence: Synthetic oligonucleotide
  Sense strand starting at position 1206 of SEQ ID NO: 588139
gcggcagaucucuggauuu

SEQ ID NO: 844423 - RNA, 19 nt, Artificial Sequence
  Description of Artificial Sequence: Synthetic oligonucleotide
  Antisense strand to SEQ ID NO: 844422
aaauccagagaucugccgc

SEQ ID NO: 844424 - RNA, 19 nt, Artificial Sequence
  Description of Artificial Sequence: Synthetic oligonucleotide
  Sense strand starting at position 1369 of SEQ ID NO: 588139
auucuuucuccaggagagu

SEQ ID NO: 844425 - RNA, 19 nt, Artificial Sequence
  Description of Artificial Sequence: Synthetic oligonucleotide
  Antisense strand to SEQ ID NO: 844424
acucuccuggagaaagaau

SEQ ID NO: 844426 - RNA, 19 nt, Artificial Sequence
  Description of Artificial Sequence: Synthetic oligonucleotide
  Sense strand starting at position 1383 of SEQ ID NO: 588139
agagucagccgagagauga

SEQ ID NO: 844427 - RNA, 19 nt, Artificial Sequence
  Description of Artificial Sequence: Synthetic oligonucleotide
  Antisense strand to SEQ ID NO: 844426
ucaucucucggcugacucu

SEQ ID NO: 844428 - RNA, 19 nt, Artificial Sequence
  Description of Artificial Sequence: Synthetic oligonucleotide
  Sense strand starting at position 1853 of SEQ ID NO: 588139
gugccaagccugggaauaa

SEQ ID NO: 844429 - RNA, 19 nt, Artificial Sequence
  Description of Artificial Sequence: Synthetic oligonucleotide
  Antisense strand to SEQ ID NO: 844428
uuauucccaggcuuggcac

SEQ ID NO: 844430 - RNA, 19 nt, Artificial Sequence
  Description of Artificial Sequence: Synthetic oligonucleotide
  Sense strand starting at position 2846 of SEQ ID NO: 588139
gaacuuaagugucuuugag

SEQ ID NO: 844431 - RNA, 19 nt, Artificial Sequence
  Description of Artificial Sequence: Synthetic oligonucleotide
  Antisense strand to SEQ ID NO: 844430
cucaaagacacuuaaguuc

SEQ ID NO: 844432 - RNA, 19 nt, Artificial Sequence
  Description of Artificial Sequence: Synthetic oligonucleotide
  Sense strand starting at position 2934 of SEQ ID NO: 588139
guggcaagugcugugcauu

SEQ ID NO: 844433 - RNA, 19 nt, Artificial Sequence
  Description of Artificial Sequence: Synthetic oligonucleotide
  Antisense strand to SEQ ID NO: 844432
aaugcacagcacuugccac

SEQ ID NO: 844434 - RNA, 19 nt, Artificial Sequence
  Description of Artificial Sequence: Synthetic oligonucleotide
  Sense strand starting at position 2940 of SEQ ID NO: 588139
agugcugugcauuaaugaa

SEQ ID NO: 844435 - RNA, 19 nt, Artificial Sequence
  Description of Artificial Sequence: Synthetic oligonucleotide
  Antisense strand to SEQ ID NO: 844434
uucauuaaugcacagcacu

SEQ ID NO: 844436 - RNA, 19 nt, Artificial Sequence
  Description of Artificial Sequence: Synthetic oligonucleotide
  Sense strand starting at position 3121 of SEQ ID NO: 588139
acauguauucuccaguaaa

SEQ ID NO: 844437 - RNA, 19 nt, Artificial Sequence
  Description of Artificial Sequence: Synthetic oligonucleotide
  Antisense strand to SEQ ID NO: 844436
uuuacuggagaauacaugu

SEQ ID NO: 844438 - RNA, 19 nt, Artificial Sequence
  Description of Artificial Sequence: Synthetic oligonucleotide
  Sense strand starting at position 3152 of SEQ ID NO: 588139
gcugguuauccagaucccu

SEQ ID NO: 844439 - RNA, 19 nt, Artificial Sequence
  Description of Artificial Sequence: Synthetic oligonucleotide
  Antisense strand to SEQ ID NO: 844438
agggaucuggauaaccagc

SEQ ID NO: 844440 - RNA, 19 nt, Artificial Sequence
  Description of Artificial Sequence: Synthetic oligonucleotide
  Sense strand starting at position 3160 of SEQ ID NO: 588139
uccagaucccuugggaaau

SEQ ID NO: 844441 - RNA, 19 nt, Artificial Sequence
  Description of Artificial Sequence: Synthetic oligonucleotide
  Antisense strand to SEQ ID NO: 844440
auuucccaagggaucugga

SEQ ID NO: 844442 - RNA, 19 nt, Artificial Sequence
  Description of Artificial Sequence: Synthetic oligonucleotide
  Sense strand starting at position 3213 of SEQ ID NO: 588139
uaagcacgucucuagagaa

SEQ ID NO: 844443 - RNA, 19 nt, Artificial Sequence
  Description of Artificial Sequence: Synthetic oligonucleotide
  Antisense strand to SEQ ID NO: 844442
uucucuagagacgugcuua

SEQ ID NO: 844444 - RNA, 19 nt, Artificial Sequence
  Description of Artificial Sequence: Synthetic oligonucleotide
  Sense strand starting at position 3403 of SEQ ID NO: 588139
cugugacauuacucauauu

SEQ ID NO: 844445 - RNA, 19 nt, Artificial Sequence
  Description of Artificial Sequence: Synthetic oligonucleotide
  Antisense strand to SEQ ID NO: 844444
aauaugaguaaugucacag

SEQ ID NO: 844446 - RNA, 19 nt, Artificial Sequence
  Description of Artificial Sequence: Synthetic oligonucleotide
  Sense strand starting at position 3437 of SEQ ID NO: 588139
uuauuuggcauauguacga

SEQ ID NO: 844447 - RNA, 19 nt, Artificial Sequence
  Description of Artificial Sequence: Synthetic oligonucleotide
  Antisense strand to SEQ ID NO: 844446
ucguacauaugccaaauaa

SEQ ID NO: 844448 - RNA, 19 nt, Artificial Sequence
  Description of Artificial Sequence: Synthetic oligonucleotide
  Sense strand starting at position 3446 of SEQ ID NO: 588139
auauguacgagccagacau

SEQ ID NO: 844449 - RNA, 19 nt, Artificial Sequence
  Description of Artificial Sequence: Synthetic oligonucleotide
  Antisense strand to SEQ ID NO: 844448
augucuggcucguacauau

SEQ ID NO: 844450 - RNA, 19 nt, Artificial Sequence
  Description of Artificial Sequence: Synthetic oligonucleotide
  Sense strand starting at position 3492 of SEQ ID NO: 588139
cgcugaaggaaauagguau

SEQ ID NO: 844451 - RNA, 19 nt, Artificial Sequence
  Description of Artificial Sequence: Synthetic oligonucleotide
  Antisense strand to SEQ ID NO: 844450
auaccuauuuccuucagcg

SEQ ID NO: 844452 - RNA, 19 nt, Artificial Sequence
  Description of Artificial Sequence: Synthetic oligonucleotide
  Sense strand starting at position 3831 of SEQ ID NO: 588139
ugugauaaauucucaacug

SEQ ID NO: 844453 - RNA, 19 nt, Artificial Sequence
  Description of Artificial Sequence: Synthetic oligonucleotide
  Antisense strand to SEQ ID NO: 844452
caguugagaauuuaucaca

SEQ ID NO: 844454 - RNA, 19 nt, Artificial Sequence
  Description of Artificial Sequence: Synthetic oligonucleotide
  Sense strand starting at position 3897 of SEQ ID NO: 588139
agguaaggcuuucuaagga

SEQ ID NO: 844455 - RNA, 19 nt, Artificial Sequence
  Description of Artificial Sequence: Synthetic oligonucleotide
  Antisense strand to SEQ ID NO: 844454
uccuuagaaagccuuaccu

SEQ ID NO: 844456 - RNA, 19 nt, Artificial Sequence
  Description of Artificial Sequence: Synthetic oligonucleotide
  Sense strand starting at position 214 of SEQ ID NO: 588140
aguccugagccaggagaau

SEQ ID NO: 844457 - RNA, 19 nt, Artificial Sequence
  Description of Artificial Sequence: Synthetic oligonucleotide
  Antisense strand to SEQ ID NO: 844456
auucuccuggcucaggacu

SEQ ID NO: 844458 - RNA, 19 nt, Artificial Sequence
  Description of Artificial Sequence: Synthetic oligonucleotide
  Sense strand starting at position 409 of SEQ ID NO: 588140
agaucaaggucucugaagu

SEQ ID NO: 844459 - RNA, 19 nt, Artificial Sequence
  Description of Artificial Sequence: Synthetic oligonucleotide
  Antisense strand to SEQ ID NO: 844458
acuucagagaccuugaucu

SEQ ID NO: 844460 - RNA, 19 nt, Artificial Sequence
  Description of Artificial Sequence: Synthetic oligonucleotide
  Sense strand starting at position 410 of SEQ ID NO: 588140
gaucaaggucucugaaguu

SEQ ID NO: 844461 - RNA, 19 nt, Artificial Sequence
  Description of Artificial Sequence: Synthetic oligonucleotide
  Antisense strand to SEQ ID NO: 844460
aacuucagagaccuugauc

SEQ ID NO: 844462 - RNA, 19 nt, Artificial Sequence
  Description of Artificial Sequence: Synthetic oligonucleotide
  Sense strand starting at position 576 of SEQ ID NO: 588140
ggacaaaguauguaaagcu

SEQ ID NO: 844463 - RNA, 19 nt, Artificial Sequence
  Description of Artificial Sequence: Synthetic oligonucleotide
  Antisense strand to SEQ ID NO: 844462
agcuuuacauacuuugucc

SEQ ID NO: 844464 - RNA, 19 nt, Artificial Sequence
  Description of Artificial Sequence: Synthetic oligonucleotide
  Sense strand starting at position 589 of SEQ ID NO: 588140
aaagcucagugucugauaa

SEQ ID NO: 844465 - RNA, 19 nt, Artificial Sequence
  Description of Artificial Sequence: Synthetic oligonucleotide
  Antisense strand to SEQ ID NO: 844464
uuaucagacacugagcuuu

SEQ ID NO: 844466 - RNA, 19 nt, Artificial Sequence
  Description of Artificial Sequence: Synthetic oligonucleotide
  Sense strand starting at position 590 of SEQ ID NO: 588140
aagcucagugucugauaaa

SEQ ID NO: 844467 - RNA, 19 nt, Artificial Sequence
  Description of Artificial Sequence: Synthetic oligonucleotide
  Antisense strand to SEQ ID NO: 844466
uuuaucagacacugagcuu

SEQ ID NO: 844468 - RNA, 19 nt, Artificial Sequence
  Description of Artificial Sequence: Synthetic oligonucleotide
  Sense strand starting at position 632 of SEQ ID NO: 588140
cuuguuaauagcgaaggua

SEQ ID NO: 844469 - RNA, 19 nt, Artificial Sequence
  Description of Artificial Sequence: Synthetic oligonucleotide
  Antisense strand to SEQ ID NO: 844468
uaccuucgcuauuaacaag

SEQ ID NO: 844470 - RNA, 19 nt, Artificial Sequence
  Description of Artificial Sequence: Synthetic oligonucleotide
  Sense strand starting at position 1034 of SEQ ID NO: 588140
aguaauaacuguguaacua

SEQ ID NO: 844471 - RNA, 19 nt, Artificial Sequence
  Description of Artificial Sequence: Synthetic oligonucleotide
  Antisense strand to SEQ ID NO: 844470
uaguuacacaguuauuacu

SEQ ID NO: 844472 - RNA, 19 nt, Artificial Sequence
  Description of Artificial Sequence: Synthetic oligonucleotide
  Sense strand starting at position 1035 of SEQ ID NO: 588140
guaauaacuguguaacuaa

SEQ ID NO: 844473 - RNA, 19 nt, Artificial Sequence
  Description of Artificial Sequence: Synthetic oligonucleotide
  Antisense strand to SEQ ID NO: 844472
uuaguuacacaguuauuac

SEQ ID NO: 844474 - RNA, 19 nt, Artificial Sequence
  Description of Artificial Sequence: Synthetic oligonucleotide
  Sense strand starting at position 1038 of SEQ ID NO: 588140
auaacuguguaacuaagaa

SEQ ID NO: 844475 - RNA, 19 nt, Artificial Sequence
  Description of Artificial Sequence: Synthetic oligonucleotide
  Antisense strand to SEQ ID NO: 844474
uucuuaguuacacaguuau

SEQ ID NO: 844476 - RNA, 19 nt, Artificial Sequence
  Description of Artificial Sequence: Synthetic oligonucleotide
  Sense strand starting at position 1640 of SEQ ID NO: 588140
agggcccauucucuaauau

SEQ ID NO: 844477 - RNA, 19 nt, Artificial Sequence
  Description of Artificial Sequence: Synthetic oligonucleotide
  Antisense strand to SEQ ID NO: 844476
auauuagagaaugggcccu

SEQ ID NO: 844478 - RNA, 19 nt, Artificial Sequence
  Description of Artificial Sequence: Synthetic oligonucleotide
  Sense strand starting at position 1641 of SEQ ID NO: 588140
gggcccauucucuaauauu

SEQ ID NO: 844479 - RNA, 19 nt, Artificial Sequence
  Description of Artificial Sequence: Synthetic oligonucleotide
  Antisense strand to SEQ ID NO: 844478
aauauuagagaaugggccc

SEQ ID NO: 844480 - RNA, 19 nt, Artificial Sequence
  Description of Artificial Sequence: Synthetic oligonucleotide
  Sense strand starting at position 2009 of SEQ ID NO: 588140
gcuguaucgcgaccaguga

SEQ ID NO: 844481 - RNA, 19 nt, Artificial Sequence
  Description of Artificial Sequence: Synthetic oligonucleotide
  Antisense strand to SEQ ID NO: 844480
ucacuggucgcgauacagc

SEQ ID NO: 844482 - RNA, 19 nt, Artificial Sequence
  Description of Artificial Sequence: Synthetic oligonucleotide
  Sense strand starting at position 2208 of SEQ ID NO: 588140
gccucacagucucugaauu

SEQ ID NO: 844483 - RNA, 19 nt, Artificial Sequence
  Description of Artificial Sequence: Synthetic oligonucleotide
  Antisense strand to SEQ ID NO: 844482
aauucagagacugugaggc

SEQ ID NO: 844484 - RNA, 19 nt, Artificial Sequence
  Description of Artificial Sequence: Synthetic oligonucleotide
  Sense strand starting at position 2218 of SEQ ID NO: 588140
cucugaauugggugacauu

SEQ ID NO: 844485 - RNA, 19 nt, Artificial Sequence
  Description of Artificial Sequence: Synthetic oligonucleotide
  Antisense strand to SEQ ID NO: 844484
aaugucacccaauucagag

SEQ ID NO: 844486 - RNA, 19 nt, Artificial Sequence
  Description of Artificial Sequence: Synthetic oligonucleotide
  Sense strand starting at position 2279 of SEQ ID NO: 588140
gcuucucgauacuccauaa

SEQ ID NO: 844487 - RNA, 19 nt, Artificial Sequence
  Description of Artificial Sequence: Synthetic oligonucleotide
  Antisense strand to SEQ ID NO: 844486
uuauggaguaucgagaagc

SEQ ID NO: 844488 - RNA, 19 nt, Artificial Sequence
  Description of Artificial Sequence: Synthetic oligonucleotide
  Sense strand starting at position 2406 of SEQ ID NO: 588140
aaagaauggagcgguaaga

SEQ ID NO: 844489 - RNA, 19 nt, Artificial Sequence
  Description of Artificial Sequence: Synthetic oligonucleotide
  Antisense strand to SEQ ID NO: 844488
ucuuaccgcuccauucuuu

SEQ ID NO: 844490 - RNA, 19 nt, Artificial Sequence
  Description of Artificial Sequence: Synthetic oligonucleotide
  Sense strand starting at position 2446 of SEQ ID NO: 588140
uagugcuguguacacuaaa

SEQ ID NO: 844491 - RNA, 19 nt, Artificial Sequence
  Description of Artificial Sequence: Synthetic oligonucleotide
  Antisense strand to SEQ ID NO: 844490
uuuaguguacacagcacua

SEQ ID NO: 844492 - RNA, 19 nt, Artificial Sequence
  Description of Artificial Sequence: Synthetic oligonucleotide
  Sense strand starting at position 2449 of SEQ ID NO: 588140
ugcuguguacacuaaauga

SEQ ID NO: 844493 - RNA, 19 nt, Artificial Sequence
  Description of Artificial Sequence: Synthetic oligonucleotide
  Antisense strand to SEQ ID NO: 844492
ucauuuaguguacacagca

SEQ ID NO: 844494 - RNA, 19 nt, Artificial Sequence
  Description of Artificial Sequence: Synthetic oligonucleotide
  Sense strand starting at position 2508 of SEQ ID NO: 588140
auaagaugcguguacugau

SEQ ID NO: 844495 - RNA, 19 nt, Artificial Sequence
  Description of Artificial Sequence: Synthetic oligonucleotide
  Antisense strand to SEQ ID NO: 844494
aucaguacacgcaucuuau

SEQ ID NO: 844496 - RNA, 19 nt, Artificial Sequence
  Description of Artificial Sequence: Synthetic oligonucleotide
  Sense strand starting at position 2532 of SEQ ID NO: 588140
acagcaauuccagaaaguu

SEQ ID NO: 844497 - RNA, 19 nt, Artificial Sequence
  Description of Artificial Sequence: Synthetic oligonucleotide
  Antisense strand to SEQ ID NO: 844496
aacuuucuggaauugcugu

SEQ ID NO: 844498 - RNA, 19 nt, Artificial Sequence
  Description of Artificial Sequence: Synthetic oligonucleotide
  Sense strand starting at position 2540 of SEQ ID NO: 588140
uccagaaaguucccuaaga

SEQ ID NO: 844499 - RNA, 19 nt, Artificial Sequence
  Description of Artificial Sequence: Synthetic oligonucleotide
  Antisense strand to SEQ ID NO: 844498
ucuuagggaacuuucugga

SEQ ID NO: 844500 - RNA, 19 nt, Artificial Sequence
  Description of Artificial Sequence: Synthetic oligonucleotide
  Sense strand starting at position 2600 of SEQ ID NO: 588140
aaucccuaucucggaggua

SEQ ID NO: 844501 - RNA, 19 nt, Artificial Sequence
  Description of Artificial Sequence: Synthetic oligonucleotide
  Antisense strand to SEQ ID NO: 844500
uaccuccgagauagggauu

SEQ ID NO: 844502 - RNA, 19 nt, Artificial Sequence
  Description of Artificial Sequence: Synthetic oligonucleotide
  Sense strand starting at position 2674 of SEQ ID NO: 588140
ugaauuagguuucugaauu

SEQ ID NO: 844503 - RNA, 19 nt, Artificial Sequence
  Description of Artificial Sequence: Synthetic oligonucleotide
  Antisense strand to SEQ ID NO: 844502
aauucagaaaccuaauuca

SEQ ID NO: 844504 - RNA, 19 nt, Artificial Sequence
  Description of Artificial Sequence: Synthetic oligonucleotide
  Sense strand starting at position 2790 of SEQ ID NO: 588140
uuaugugguuauucucaau

SEQ ID NO: 844505 - RNA, 19 nt, Artificial Sequence
  Description of Artificial Sequence: Synthetic oligonucleotide
  Antisense strand to SEQ ID NO: 844504
auugagaauaaccacauaa

SEQ ID NO: 844506 - RNA, 19 nt, Artificial Sequence
  Description of Artificial Sequence: Synthetic oligonucleotide
  Sense strand starting at position 2796 of SEQ ID NO: 588140
gguuauucucaauaucuga

SEQ ID NO: 844507 - RNA, 19 nt, Artificial Sequence
  Description of Artificial Sequence: Synthetic oligonucleotide
  Antisense strand to SEQ ID NO: 844506
ucagauauugagaauaacc

SEQ ID NO: 844508 - RNA, 19 nt, Artificial Sequence
  Description of Artificial Sequence: Synthetic oligonucleotide
  Sense strand starting at position 2812 of SEQ ID NO: 588140
ugaucagguuccuuauucu

SEQ ID NO: 844509 - RNA, 19 nt, Artificial Sequence
  Description of Artificial Sequence: Synthetic oligonucleotide
  Antisense strand to SEQ ID NO: 844508
agaauaaggaaccugauca

SEQ ID NO: 844510 - RNA, 19 nt, Artificial Sequence
  Description of Artificial Sequence: Synthetic oligonucleotide
  Sense strand starting at position 2844 of SEQ ID NO: 588140
gaugaugucugauuaccuu

SEQ ID NO: 844511 - RNA, 19 nt, Artificial Sequence
  Description of Artificial Sequence: Synthetic oligonucleotide
  Antisense strand to SEQ ID NO: 844510
aagguaaucagacaucauc

SEQ ID NO: 844512 - RNA, 19 nt, Artificial Sequence
  Description of Artificial Sequence: Synthetic oligonucleotide
  Sense strand starting at position 2879 of SEQ ID NO: 588140
gaauccuguuagguauauu

SEQ ID NO: 844513 - RNA, 19 nt, Artificial Sequence
  Description of Artificial Sequence: Synthetic oligonucleotide
  Antisense strand to SEQ ID NO: 844512
aauauaccuaacaggauuc

SEQ ID NO: 844514 - RNA, 19 nt, Artificial Sequence
  Description of Artificial Sequence: Synthetic oligonucleotide
  Sense strand starting at position 3040 of SEQ ID NO: 588140
cguugcagugagcucuaua

SEQ ID NO: 844515 - RNA, 19 nt, Artificial Sequence
  Description of Artificial Sequence: Synthetic oligonucleotide
  Antisense strand to SEQ ID NO: 844514
uauagagcucacugcaacg

SEQ ID NO: 844516 - RNA, 19 nt, Artificial Sequence
  Description of Artificial Sequence: Synthetic oligonucleotide
  Sense strand starting at position 3043 of SEQ ID NO: 588140
ugcagugagcucuauauac

SEQ ID NO: 844517 - RNA, 19 nt, Artificial Sequence
  Description of Artificial Sequence: Synthetic oligonucleotide
  Antisense strand to SEQ ID NO: 844516
guauauagagcucacugca

SEQ ID NO: 844518 - RNA, 19 nt, Artificial Sequence
  Description of Artificial Sequence: Synthetic oligonucleotide
  Sense strand starting at position 3298 of SEQ ID NO: 588140
agagaagaugcagguuuau

SEQ ID NO: 844519 - RNA, 19 nt, Artificial Sequence
  Description of Artificial Sequence: Synthetic oligonucleotide
  Antisense strand to SEQ ID NO: 844518
auaaaccugcaucuucucu

SEQ ID NO: 844520 - RNA, 19 nt, Artificial Sequence
  Description of Artificial Sequence: Synthetic oligonucleotide
  Sense strand starting at position 3371 of SEQ ID NO: 588140
aggccuuacagcugaggaa

SEQ ID NO: 844521 - RNA, 19 nt, Artificial Sequence
  Description of Artificial Sequence: Synthetic oligonucleotide
  Antisense strand to SEQ ID NO: 844520
uuccucagcuguaaggccu

SEQ ID NO: 844522 - RNA, 19 nt, Artificial Sequence
  Description of Artificial Sequence: Synthetic oligonucleotide
  Sense strand starting at position 3372 of SEQ ID NO: 588140
ggccuuacagcugaggaau

SEQ ID NO: 844523 - RNA, 19 nt, Artificial Sequence
  Description of Artificial Sequence: Synthetic oligonucleotide
  Antisense strand to SEQ ID NO: 844522
auuccucagcuguaaggcc

SEQ ID NO: 844524 - RNA, 19 nt, Artificial Sequence
  Description of Artificial Sequence: Synthetic oligonucleotide
  Sense strand starting at position 3525 of SEQ ID NO: 588140
uggauuggaucauucuaau

SEQ ID NO: 844525 - RNA, 19 nt, Artificial Sequence
  Description of Artificial Sequence: Synthetic oligonucleotide
  Antisense strand to SEQ ID NO: 844524
auuagaaugauccaaucca

SEQ ID NO: 844526 - RNA, 19 nt, Artificial Sequence
  Description of Artificial Sequence: Synthetic oligonucleotide
  Sense strand starting at position 3608 of SEQ ID NO: 588140
guccauugucuauagugua

SEQ ID NO: 844527 - RNA, 19 nt, Artificial Sequence
  Description of Artificial Sequence: Synthetic oligonucleotide
  Antisense strand to SEQ ID NO: 844526
uacacuauagacaauggac

SEQ ID NO: 844528 - RNA, 19 nt, Artificial Sequence
  Description of Artificial Sequence: Synthetic oligonucleotide
  Sense strand starting at position 3613 of SEQ ID NO: 588140
uugucuauaguguauuagu

SEQ ID NO: 844529 - RNA, 19 nt, Artificial Sequence
  Description of Artificial Sequence: Synthetic oligonucleotide
  Antisense strand to SEQ ID NO: 844528
acuaauacacuauagacaa

SEQ ID NO: 844530 - RNA, 19 nt, Artificial Sequence
  Description of Artificial Sequence: Synthetic oligonucleotide
  Sense strand starting at position 3622 of SEQ ID NO: 588140
guguauuaguggccagaaa

SEQ ID NO: 844531 - RNA, 19 nt, Artificial Sequence
  Description of Artificial Sequence: Synthetic oligonucleotide
  Antisense strand to SEQ ID NO: 844530
uuucuggccacuaauacac

SEQ ID NO: 844532 - RNA, 19 nt, Artificial Sequence
  Description of Artificial Sequence: Synthetic oligonucleotide
  Sense strand starting at position 3642 of SEQ ID NO: 588140
gcaagaucacauggcacaa

SEQ ID NO: 844533 - RNA, 19 nt, Artificial Sequence
  Description of Artificial Sequence: Synthetic oligonucleotide
  Antisense strand to SEQ ID NO: 844532
uugugccaugugaucuugc

SEQ ID NO: 844534 - RNA, 19 nt, Artificial Sequence
  Description of Artificial Sequence: Synthetic oligonucleotide
  Sense strand starting at position 3854 of SEQ ID NO: 588140
ggcggaacucgccuguagu

SEQ ID NO: 844535 - RNA, 19 nt, Artificial Sequence
  Description of Artificial Sequence: Synthetic oligonucleotide
  Antisense strand to SEQ ID NO: 844534
acuacaggcgaguuccgcc

SEQ ID NO: 844536 - RNA, 19 nt, Artificial Sequence
  Description of Artificial Sequence: Synthetic oligonucleotide
  Sense strand starting at position 279 of SEQ ID NO: 588141
aguccugagccaggagaau

SEQ ID NO: 844537 - RNA, 19 nt, Artificial Sequence
  Description of Artificial Sequence: Synthetic oligonucleotide
  Antisense strand to SEQ ID NO: 844536
auucuccuggcucaggacu

SEQ ID NO: 844538 - RNA, 19 nt, Artificial Sequence
  Description of Artificial Sequence: Synthetic oligonucleotide
  Sense strand starting at position 474 of SEQ ID NO: 588141
agaucaaggucucugaagu

SEQ ID NO: 844539 - RNA, 19 nt, Artificial Sequence
  Description of Artificial Sequence: Synthetic oligonucleotide
  Antisense strand to SEQ ID NO: 844538
acuucagagaccuugaucu

SEQ ID NO: 844540 - RNA, 19 nt, Artificial Sequence
  Description of Artificial Sequence: Synthetic oligonucleotide
  Sense strand starting at position 475 of SEQ ID NO: 588141
gaucaaggucucugaaguu

SEQ ID NO: 844541 - RNA, 19 nt, Artificial Sequence
  Description of Artificial Sequence: Synthetic oligonucleotide
  Antisense strand to SEQ ID NO: 844540
aacuucagagaccuugauc

SEQ ID NO: 844542 - RNA, 19 nt, Artificial Sequence
  Description of Artificial Sequence: Synthetic oligonucleotide
  Sense strand starting at position 641 of SEQ ID NO: 588141
ggacaaaguauguaaagcu

SEQ ID NO: 844543 - RNA, 19 nt, Artificial Sequence
  Description of Artificial Sequence: Synthetic oligonucleotide
  Antisense strand to SEQ ID NO: 844542
agcuuuacauacuuugucc

SEQ ID NO: 844544 - RNA, 19 nt, Artificial Sequence
  Description of Artificial Sequence: Synthetic oligonucleotide
  Sense strand starting at position 654 of SEQ ID NO: 588141
aaagcucagugucugauaa

SEQ ID NO: 844545 - RNA, 19 nt, Artificial Sequence
  Description of Artificial Sequence: Synthetic oligonucleotide
  Antisense strand to SEQ ID NO: 844544
uuaucagacacugagcuuu

SEQ ID NO: 844546 - RNA, 19 nt, Artificial Sequence
  Description of Artificial Sequence: Synthetic oligonucleotide
  Sense strand starting at position 655 of SEQ ID NO: 588141
aagcucagugucugauaaa

SEQ ID NO: 844547 - RNA, 19 nt, Artificial Sequence
  Description of Artificial Sequence: Synthetic oligonucleotide
  Antisense strand to SEQ ID NO: 844546
uuuaucagacacugagcuu

SEQ ID NO: 844548 - RNA, 19 nt, Artificial Sequence
  Description of Artificial Sequence: Synthetic oligonucleotide
  Sense strand starting at position 697 of SEQ ID NO: 588141
cuuguuaauagcgaaggua

SEQ ID NO: 844549 - RNA, 19 nt, Artificial Sequence
  Description of Artificial Sequence: Synthetic oligonucleotide
  Antisense strand to SEQ ID NO: 844548
uaccuucgcuauuaacaag

SEQ ID NO: 844550 - RNA, 19 nt, Artificial Sequence
  Description of Artificial Sequence: Synthetic oligonucleotide
  Sense strand starting at position 1099 of SEQ ID NO: 588141
aguaauaacuguguaacua

SEQ ID NO: 844551 - RNA, 19 nt, Artificial Sequence
  Description of Artificial Sequence: Synthetic oligonucleotide
  Antisense strand to SEQ ID NO: 844550
uaguuacacaguuauuacu

SEQ ID NO: 844552 - RNA, 19 nt, Artificial Sequence
  Description of Artificial Sequence: Synthetic oligonucleotide
  Sense strand starting at position 1100 of SEQ ID NO: 588141
guaauaacuguguaacuaa

SEQ ID NO: 844553 - RNA, 19 nt, Artificial Sequence
  Description of Artificial Sequence: Synthetic oligonucleotide
  Antisense strand to SEQ ID NO: 844552
uuaguuacacaguuauuac

SEQ ID NO: 844554 - RNA, 19 nt, Artificial Sequence
  Description of Artificial Sequence: Synthetic oligonucleotide
  Sense strand starting at position 1103 of SEQ ID NO: 588141
auaacuguguaacuaagaa

SEQ ID NO: 844555 - RNA, 19 nt, Artificial Sequence
  Description of Artificial Sequence: Synthetic oligonucleotide
  Antisense strand to SEQ ID NO: 844554
uucuuaguuacacaguuau

SEQ ID NO: 844556 - RNA, 19 nt, Artificial Sequence
  Description of Artificial Sequence: Synthetic oligonucleotide
  Sense strand starting at position 1705 of SEQ ID NO: 588141
agggcccauucucuaauau

SEQ ID NO: 844557 - RNA, 19 nt, Artificial Sequence
  Description of Artificial Sequence: Synthetic oligonucleotide
  Antisense strand to SEQ ID NO: 844556
auauuagagaaugggcccu

SEQ ID NO: 844558 - RNA, 19 nt, Artificial Sequence
  Description of Artificial Sequence: Synthetic oligonucleotide
  Sense strand starting at position 1706 of SEQ ID NO: 588141
gggcccauucucuaauauu

SEQ ID NO: 844559 - RNA, 19 nt, Artificial Sequence
  Description of Artificial Sequence: Synthetic oligonucleotide
  Antisense strand to SEQ ID NO: 844558
aauauuagagaaugggccc

SEQ ID NO: 844560 - RNA, 19 nt, Artificial Sequence
  Description of Artificial Sequence: Synthetic oligonucleotide
  Sense strand starting at position 2074 of SEQ ID NO: 588141
gcuguaucgcgaccaguga

SEQ ID NO: 844561 - RNA, 19 nt, Artificial Sequence
  Description of Artificial Sequence: Synthetic oligonucleotide
  Antisense strand to SEQ ID NO: 844560
ucacuggucgcgauacagc

SEQ ID NO: 844562 - RNA, 19 nt, Artificial Sequence
  Description of Artificial Sequence: Synthetic oligonucleotide
  Sense strand starting at position 2273 of SEQ ID NO: 588141
gccucacagucucugaauu

SEQ ID NO: 844563 - RNA, 19 nt, Artificial Sequence
  Description of Artificial Sequence: Synthetic oligonucleotide
  Antisense strand to SEQ ID NO: 844562
aauucagagacugugaggc

SEQ ID NO: 844564 - RNA, 19 nt, Artificial Sequence
  Description of Artificial Sequence: Synthetic oligonucleotide
  Sense strand starting at position 2283 of SEQ ID NO: 588141
cucugaauugggugacauu

SEQ ID NO: 844565 - RNA, 19 nt, Artificial Sequence
  Description of Artificial Sequence: Synthetic oligonucleotide
  Antisense strand to SEQ ID NO: 844564
aaugucacccaauucagag

SEQ ID NO: 844566 - RNA, 19 nt, Artificial Sequence
  Description of Artificial Sequence: Synthetic oligonucleotide
  Sense strand starting at position 2344 of SEQ ID NO: 588141
gcuucucgauacuccauaa

SEQ ID NO: 844567 - RNA, 19 nt, Artificial Sequence
  Description of Artificial Sequence: Synthetic oligonucleotide
  Antisense strand to SEQ ID NO: 844566
uuauggaguaucgagaagc

SEQ ID NO: 844568 - RNA, 19 nt, Artificial Sequence
  Description of Artificial Sequence: Synthetic oligonucleotide
  Sense strand starting at position 2471 of SEQ ID NO: 588141
aaagaauggagcgguaaga

SEQ ID NO: 844569 - RNA, 19 nt, Artificial Sequence
  Description of Artificial Sequence: Synthetic oligonucleotide
  Antisense strand to SEQ ID NO: 844568
ucuuaccgcuccauucuuu

SEQ ID NO: 844570 - RNA, 19 nt, Artificial Sequence
  Description of Artificial Sequence: Synthetic oligonucleotide
  Sense strand starting at position 2511 of SEQ ID NO: 588141
uagugcuguguacacuaaa

SEQ ID NO: 844571 - RNA, 19 nt, Artificial Sequence
  Description of Artificial Sequence: Synthetic oligonucleotide
  Antisense strand to SEQ ID NO: 844570
uuuaguguacacagcacua

SEQ ID NO: 844572 - RNA, 19 nt, Artificial Sequence
  Description of Artificial Sequence: Synthetic oligonucleotide
  Sense strand starting at position 2514 of SEQ ID NO: 588141
ugcuguguacacuaaauga

SEQ ID NO: 844573 - RNA, 19 nt, Artificial Sequence
  Description of Artificial Sequence: Synthetic oligonucleotide
  Antisense strand to SEQ ID NO: 844572
ucauuuaguguacacagca

SEQ ID NO: 844574 - RNA, 19 nt, Artificial Sequence
  Description of Artificial Sequence: Synthetic oligonucleotide
  Sense strand starting at position 2573 of SEQ ID NO: 588141
auaagaugcguguacugau

SEQ ID NO: 844575 - RNA, 19 nt, Artificial Sequence
  Description of Artificial Sequence: Synthetic oligonucleotide
  Antisense strand to SEQ ID NO: 844574
aucaguacacgcaucuuau

SEQ ID NO: 844576 - RNA, 19 nt, Artificial Sequence
  Description of Artificial Sequence: Synthetic oligonucleotide
  Sense strand starting at position 2597 of SEQ ID NO: 588141
acagcaauuccagaaaguu

SEQ ID NO: 844577 - RNA, 19 nt, Artificial Sequence
  Description of Artificial Sequence: Synthetic oligonucleotide
  Antisense strand to SEQ ID NO: 844576
aacuuucuggaauugcugu

SEQ ID NO: 844578 - RNA, 19 nt, Artificial Sequence
  Description of Artificial Sequence: Synthetic oligonucleotide
  Sense strand starting at position 2605 of SEQ ID NO: 588141
uccagaaaguucccuaaga

SEQ ID NO: 844579 - RNA, 19 nt, Artificial Sequence
  Description of Artificial Sequence: Synthetic oligonucleotide
  Antisense strand to SEQ ID NO: 844578
ucuuagggaacuuucugga

SEQ ID NO: 844580 - RNA, 19 nt, Artificial Sequence
  Description of Artificial Sequence: Synthetic oligonucleotide
  Sense strand starting at position 2665 of SEQ ID NO: 588141
aaucccuaucucggaggua

SEQ ID NO: 844581 - RNA, 19 nt, Artificial Sequence
  Description of Artificial Sequence: Synthetic oligonucleotide
  Antisense strand to SEQ ID NO: 844580
uaccuccgagauagggauu

SEQ ID NO: 844582 - RNA, 19 nt, Artificial Sequence
  Description of Artificial Sequence: Synthetic oligonucleotide
  Sense strand starting at position 2739 of SEQ ID NO: 588141
ugaauuagguuucugaauu

SEQ ID NO: 844583 - RNA, 19 nt, Artificial Sequence
  Description of Artificial Sequence: Synthetic oligonucleotide
  Antisense strand to SEQ ID NO: 844582
aauucagaaaccuaauuca

SEQ ID NO: 844584 - RNA, 19 nt, Artificial Sequence
  Description of Artificial Sequence: Synthetic oligonucleotide
  Sense strand starting at position 2855 of SEQ ID NO: 588141
uuaugugguuauucucaau

SEQ ID NO: 844585 - RNA, 19 nt, Artificial Sequence
  Description of Artificial Sequence: Synthetic oligonucleotide
  Antisense strand to SEQ ID NO: 844584
auugagaauaaccacauaa

SEQ ID NO: 844586 - RNA, 19 nt, Artificial Sequence
  Description of Artificial Sequence: Synthetic oligonucleotide
  Sense strand starting at position 2861 of SEQ ID NO: 588141
gguuauucucaauaucuga

SEQ ID NO: 844587 - RNA, 19 nt, Artificial Sequence
  Description of Artificial Sequence: Synthetic oligonucleotide
  Antisense strand to SEQ ID NO: 844586
ucagauauugagaauaacc

SEQ ID NO: 844588 - RNA, 19 nt, Artificial Sequence
  Description of Artificial Sequence: Synthetic oligonucleotide
  Sense strand starting at position 2877 of SEQ ID NO: 588141
ugaucagguuccuuauucu

SEQ ID NO: 844589 - RNA, 19 nt, Artificial Sequence
  Description of Artificial Sequence: Synthetic oligonucleotide
  Antisense strand to SEQ ID NO: 844588
agaauaaggaaccugauca

SEQ ID NO: 844590 - RNA, 19 nt, Artificial Sequence
  Description of Artificial Sequence: Synthetic oligonucleotide
  Sense strand starting at position 2909 of SEQ ID NO: 588141
gaugaugucugauuaccuu

SEQ ID NO: 844591 - RNA, 19 nt, Artificial Sequence
  Description of Artificial Sequence: Synthetic oligonucleotide
  Antisense strand to SEQ ID NO: 844590
aagguaaucagacaucauc

SEQ ID NO: 844592 - RNA, 19 nt, Artificial Sequence
  Description of Artificial Sequence: Synthetic oligonucleotide
  Sense strand starting at position 2944 of SEQ ID NO: 588141
gaauccuguuagguauauu

SEQ ID NO: 844593 - RNA, 19 nt, Artificial Sequence
  Description of Artificial Sequence: Synthetic oligonucleotide
  Antisense strand to SEQ ID NO: 844592
aauauaccuaacaggauuc

SEQ ID NO: 844594 - RNA, 19 nt, Artificial Sequence
  Description of Artificial Sequence: Synthetic oligonucleotide
  Sense strand starting at position 3105 of SEQ ID NO: 588141
cguugcagugagcucuaua

SEQ ID NO: 844595 - RNA, 19 nt, Artificial Sequence
  Description of Artificial Sequence: Synthetic oligonucleotide
  Antisense strand to SEQ ID NO: 844594
uauagagcucacugcaacg

SEQ ID NO: 844596 - RNA, 19 nt, Artificial Sequence
  Description of Artificial Sequence: Synthetic oligonucleotide
  Sense strand starting at position 3108 of SEQ ID NO: 588141
ugcagugagcucuauauac

SEQ ID NO: 844597 - RNA, 19 nt, Artificial Sequence
  Description of Artificial Sequence: Synthetic oligonucleotide
  Antisense strand to SEQ ID NO: 844596
guauauagagcucacugca

SEQ ID NO: 844598 - RNA, 19 nt, Artificial Sequence
  Description of Artificial Sequence: Synthetic oligonucleotide
  Sense strand starting at position 3363 of SEQ ID NO: 588141
agagaagaugcagguuuau

SEQ ID NO: 844599 - RNA, 19 nt, Artificial Sequence
  Description of Artificial Sequence: Synthetic oligonucleotide
  Antisense strand to SEQ ID NO: 844598
auaaaccugcaucuucucu

SEQ ID NO: 844600 - RNA, 19 nt, Artificial Sequence
  Description of Artificial Sequence: Synthetic oligonucleotide
  Sense strand starting at position 3436 of SEQ ID NO: 588141
aggccuuacagcugaggaa

SEQ ID NO: 844601 - RNA, 19 nt, Artificial Sequence
  Description of Artificial Sequence: Synthetic oligonucleotide
  Antisense strand to SEQ ID NO: 844600
uuccucagcuguaaggccu

SEQ ID NO: 844602 - RNA, 19 nt, Artificial Sequence
  Description of Artificial Sequence: Synthetic oligonucleotide
  Sense strand starting at position 3437 of SEQ ID NO: 588141
ggccuuacagcugaggaau

SEQ ID NO: 844603 - RNA, 19 nt, Artificial Sequence
  Description of Artificial Sequence: Synthetic oligonucleotide
  Antisense strand to SEQ ID NO: 844602
auuccucagcuguaaggcc

SEQ ID NO: 844604 - RNA, 19 nt, Artificial Sequence
  Description of Artificial Sequence: Synthetic oligonucleotide
  Sense strand starting at position 3590 of SEQ ID NO: 588141
uggauuggaucauucuaau

SEQ ID NO: 844605 - RNA, 19 nt, Artificial Sequence
  Description of Artificial Sequence: Synthetic oligonucleotide
  Antisense strand to SEQ ID NO: 844604
auuagaaugauccaaucca

SEQ ID NO: 844606 - RNA, 19 nt, Artificial Sequence
  Description of Artificial Sequence: Synthetic oligonucleotide
  Sense strand starting at position 3673 of SEQ ID NO: 588141
guccauugucuauagugua

SEQ ID NO: 844607 - RNA, 19 nt, Artificial Sequence
  Description of Artificial Sequence: Synthetic oligonucleotide
  Antisense strand to SEQ ID NO: 844606
uacacuauagacaauggac

SEQ ID NO: 844608 - RNA, 19 nt, Artificial Sequence
  Description of Artificial Sequence: Synthetic oligonucleotide
  Sense strand starting at position 3678 of SEQ ID NO: 588141
uugucuauaguguauuagu

SEQ ID NO: 844609 - RNA, 19 nt, Artificial Sequence
  Description of Artificial Sequence: Synthetic oligonucleotide
  Antisense strand to SEQ ID NO: 844608
acuaauacacuauagacaa

SEQ ID NO: 844610 - RNA, 19 nt, Artificial Sequence
  Description of Artificial Sequence: Synthetic oligonucleotide
  Sense strand starting at position 3687 of SEQ ID NO: 588141
guguauuaguggccagaaa

SEQ ID NO: 844611 - RNA, 19 nt, Artificial Sequence
  Description of Artificial Sequence: Synthetic oligonucleotide
  Antisense strand to SEQ ID NO: 844610
uuucuggccacuaauacac

SEQ ID NO: 844612 - RNA, 19 nt, Artificial Sequence
  Description of Artificial Sequence: Synthetic oligonucleotide
  Sense strand starting at position 3707 of SEQ ID NO: 588141
gcaagaucacauggcacaa

SEQ ID NO: 844613 - RNA, 19 nt, Artificial Sequence
  Description of Artificial Sequence: Synthetic oligonucleotide
  Antisense strand to SEQ ID NO: 844612
uugugccaugugaucuugc

SEQ ID NO: 844614 - RNA, 19 nt, Artificial Sequence
  Description of Artificial Sequence: Synthetic oligonucleotide
  Sense strand starting at position 3919 of SEQ ID NO: 588141
ggcggaacucgccuguagu

SEQ ID NO: 844615 - RNA, 19 nt, Artificial Sequence
  Description of Artificial Sequence: Synthetic oligonucleotide
  Antisense strand to SEQ ID NO: 844614
acuacaggcgaguuccgcc

SEQ ID NO: 844616 - RNA, 19 nt, Artificial Sequence
  Description of Artificial Sequence: Synthetic oligonucleotide
  Sense strand starting at position 243 of SEQ ID NO: 588142
aguccugagccaggagaau

SEQ ID NO: 844617 - RNA, 19 nt, Artificial Sequence
  Description of Artificial Sequence: Synthetic oligonucleotide
  Antisense strand to SEQ ID NO: 844616
auucuccuggcucaggacu

SEQ ID NO: 844618 - RNA, 19 nt, Artificial Sequence
  Description of Artificial Sequence: Synthetic oligonucleotide
  Sense strand starting at position 438 of SEQ ID NO: 588142
agaucaaggucucugaagu

SEQ ID NO: 844619 - RNA, 19 nt, Artificial Sequence
  Description of Artificial Sequence: Synthetic oligonucleotide
  Antisense strand to SEQ ID NO: 844618
acuucagagaccuugaucu

SEQ ID NO: 844620 - RNA, 19 nt, Artificial Sequence
  Description of Artificial Sequence: Synthetic oligonucleotide
  Sense strand starting at position 439 of SEQ ID NO: 588142
gaucaaggucucugaaguu

SEQ ID NO: 844621 - RNA, 19 nt, Artificial Sequence
  Description of Artificial Sequence: Synthetic oligonucleotide
  Antisense strand to SEQ ID NO: 844620
aacuucagagaccuugauc

SEQ ID NO: 844622 - RNA, 19 nt, Artificial Sequence
  Description of Artificial Sequence: Synthetic oligonucleotide
  Sense strand starting at position 605 of SEQ ID NO: 588142
ggacaaaguauguaaagcu

SEQ ID NO: 844623 - RNA, 19 nt, Artificial Sequence
  Description of Artificial Sequence: Synthetic oligonucleotide
  Antisense strand to SEQ ID NO: 844622
agcuuuacauacuuugucc

SEQ ID NO: 844624 - RNA, 19 nt, Artificial Sequence
  Description of Artificial Sequence: Synthetic oligonucleotide
  Sense strand starting at position 618 of SEQ ID NO: 588142
aaagcucagugucugauaa

SEQ ID NO: 844625 - RNA, 19 nt, Artificial Sequence
  Description of Artificial Sequence: Synthetic oligonucleotide
  Antisense strand to SEQ ID NO: 844624
uuaucagacacugagcuuu

SEQ ID NO: 844626 - RNA, 19 nt, Artificial Sequence
  Description of Artificial Sequence: Synthetic oligonucleotide
  Sense strand starting at position 619 of SEQ ID NO: 588142
aagcucagugucugauaaa

SEQ ID NO: 844627 - RNA, 19 nt, Artificial Sequence
  Description of Artificial Sequence: Synthetic oligonucleotide
  Antisense strand to SEQ ID NO: 844626
uuuaucagacacugagcuu

SEQ ID NO: 844628 - RNA, 19 nt, Artificial Sequence
  Description of Artificial Sequence: Synthetic oligonucleotide
  Sense strand starting at position 661 of SEQ ID NO: 588142
cuuguuaauagcgaaggua

SEQ ID NO: 844629 - RNA, 19 nt, Artificial Sequence
  Description of Artificial Sequence: Synthetic oligonucleotide
  Antisense strand to SEQ ID NO: 844628
uaccuucgcuauuaacaag

SEQ ID NO: 844630 - RNA, 19 nt, Artificial Sequence
  Description of Artificial Sequence: Synthetic oligonucleotide
  Sense strand starting at position 1063 of SEQ ID NO: 588142
aguaauaacuguguaacua

SEQ ID NO: 844631 - RNA, 19 nt, Artificial Sequence
  Description of Artificial Sequence: Synthetic oligonucleotide
  Antisense strand to SEQ ID NO: 844630
uaguuacacaguuauuacu

SEQ ID NO: 844632 - RNA, 19 nt, Artificial Sequence
  Description of Artificial Sequence: Synthetic oligonucleotide
  Sense strand starting at position 1064 of SEQ ID NO: 588142
guaauaacuguguaacuaa

SEQ ID NO: 844633 - RNA, 19 nt, Artificial Sequence
  Description of Artificial Sequence: Synthetic oligonucleotide
  Antisense strand to SEQ ID NO: 844632
uuaguuacacaguuauuac

SEQ ID NO: 844634 - RNA, 19 nt, Artificial Sequence
  Description of Artificial Sequence: Synthetic oligonucleotide
  Sense strand starting at position 1067 of SEQ ID NO: 588142
auaacuguguaacuaagaa

SEQ ID NO: 844635 - RNA, 19 nt, Artificial Sequence
  Description of Artificial Sequence: Synthetic oligonucleotide
  Antisense strand to SEQ ID NO: 844634
uucuuaguuacacaguuau

SEQ ID NO: 844636 - RNA, 19 nt, Artificial Sequence
  Description of Artificial Sequence: Synthetic oligonucleotide
  Sense strand starting at position 1669 of SEQ ID NO: 588142
agggcccauucucuaauau

SEQ ID NO: 844637 - RNA, 19 nt, Artificial Sequence
  Description of Artificial Sequence: Synthetic oligonucleotide
  Antisense strand to SEQ ID NO: 844636
auauuagagaaugggcccu

SEQ ID NO: 844638 - RNA, 19 nt, Artificial Sequence
  Description of Artificial Sequence: Synthetic oligonucleotide
  Sense strand starting at position 1670 of SEQ ID NO: 588142
gggcccauucucuaauauu

SEQ ID NO: 844639 - RNA, 19 nt, Artificial Sequence
  Description of Artificial Sequence: Synthetic oligonucleotide
  Antisense strand to SEQ ID NO: 844638
aauauuagagaaugggccc

SEQ ID NO: 844640 - RNA, 19 nt, Artificial Sequence
  Description of Artificial Sequence: Synthetic oligonucleotide
  Sense strand starting at position 2038 of SEQ ID NO: 588142
gcuguaucgcgaccaguga

SEQ ID NO: 844641 - RNA, 19 nt, Artificial Sequence
  Description of Artificial Sequence: Synthetic oligonucleotide
  Antisense strand to SEQ ID NO: 844640
ucacuggucgcgauacagc

SEQ ID NO: 844642 - RNA, 19 nt, Artificial Sequence
  Description of Artificial Sequence: Synthetic oligonucleotide
  Sense strand starting at position 2237 of SEQ ID NO: 588142
gccucacagucucugaauu

SEQ ID NO: 844643 - RNA, 19 nt, Artificial Sequence
  Description of Artificial Sequence: Synthetic oligonucleotide
  Antisense strand to SEQ ID NO: 844642
aauucagagacugugaggc

SEQ ID NO: 844644 - RNA, 19 nt, Artificial Sequence
  Description of Artificial Sequence: Synthetic oligonucleotide
  Sense strand starting at position 2247 of SEQ ID NO: 588142
cucugaauugggugacauu

SEQ ID NO: 844645 - RNA, 19 nt, Artificial Sequence
  Description of Artificial Sequence: Synthetic oligonucleotide
  Antisense strand to SEQ ID NO: 844644
aaugucacccaauucagag

SEQ ID NO: 844646 - RNA, 19 nt, Artificial Sequence
  Description of Artificial Sequence: Synthetic oligonucleotide
  Sense strand starting at position 2308 of SEQ ID NO: 588142
gcuucucgauacuccauaa

SEQ ID NO: 844647 - RNA, 19 nt, Artificial Sequence
  Description of Artificial Sequence: Synthetic oligonucleotide
  Antisense strand to SEQ ID NO: 844646
uuauggaguaucgagaagc

SEQ ID NO: 844648 - RNA, 19 nt, Artificial Sequence
  Description of Artificial Sequence: Synthetic oligonucleotide
  Sense strand starting at position 2435 of SEQ ID NO: 588142
aaagaauggagcgguaaga

SEQ ID NO: 844649 - RNA, 19 nt, Artificial Sequence
  Description of Artificial Sequence: Synthetic oligonucleotide
  Antisense strand to SEQ ID NO: 844648
ucuuaccgcuccauucuuu

SEQ ID NO: 844650 - RNA, 19 nt, Artificial Sequence
  Description of Artificial Sequence: Synthetic oligonucleotide
  Sense strand starting at position 2475 of SEQ ID NO: 588142
uagugcuguguacacuaaa

SEQ ID NO: 844651 - RNA, 19 nt, Artificial Sequence
  Description of Artificial Sequence: Synthetic oligonucleotide
  Antisense strand to SEQ ID NO: 844650
uuuaguguacacagcacua

SEQ ID NO: 844652 - RNA, 19 nt, Artificial Sequence
  Description of Artificial Sequence: Synthetic oligonucleotide
  Sense strand starting at position 2478 of SEQ ID NO: 588142
ugcuguguacacuaaauga

SEQ ID NO: 844653 - RNA, 19 nt, Artificial Sequence
  Description of Artificial Sequence: Synthetic oligonucleotide
  Antisense strand to SEQ ID NO: 844652
ucauuuaguguacacagca

SEQ ID NO: 844654 - RNA, 19 nt, Artificial Sequence
  Description of Artificial Sequence: Synthetic oligonucleotide
  Sense strand starting at position 2537 of SEQ ID NO: 588142
auaagaugcguguacugau

SEQ ID NO: 844655 - RNA, 19 nt, Artificial Sequence
  Description of Artificial Sequence: Synthetic oligonucleotide
  Antisense strand to SEQ ID NO: 844654
aucaguacacgcaucuuau

SEQ ID NO: 844656 - RNA, 19 nt, Artificial Sequence
  Description of Artificial Sequence: Synthetic oligonucleotide
  Sense strand starting at position 2561 of SEQ ID NO: 588142
acagcaauuccagaaaguu

SEQ ID NO: 844657 - RNA, 19 nt, Artificial Sequence
  Description of Artificial Sequence: Synthetic oligonucleotide
  Antisense strand to SEQ ID NO: 844656
aacuuucuggaauugcugu

SEQ ID NO: 844658 - RNA, 19 nt, Artificial Sequence
  Description of Artificial Sequence: Synthetic oligonucleotide
  Sense strand starting at position 2569 of SEQ ID NO: 588142
uccagaaaguucccuaaga

SEQ ID NO: 844659 - RNA, 19 nt, Artificial Sequence
  Description of Artificial Sequence: Synthetic oligonucleotide
  Antisense strand to SEQ ID NO: 844658
ucuuagggaacuuucugga

SEQ ID NO: 844660 - RNA, 19 nt, Artificial Sequence
  Description of Artificial Sequence: Synthetic oligonucleotide
  Sense strand starting at position 2629 of SEQ ID NO: 588142
aaucccuaucucggaggua

SEQ ID NO: 844661 - RNA, 19 nt, Artificial Sequence
  Description of Artificial Sequence: Synthetic oligonucleotide
  Antisense strand to SEQ ID NO: 844660
uaccuccgagauagggauu

SEQ ID NO: 844662 - RNA, 19 nt, Artificial Sequence
  Description of Artificial Sequence: Synthetic oligonucleotide
  Sense strand starting at position 2703 of SEQ ID NO: 588142
ugaauuagguuucugaauu

SEQ ID NO: 844663 - RNA, 19 nt, Artificial Sequence
  Description of Artificial Sequence: Synthetic oligonucleotide
  Antisense strand to SEQ ID NO: 844662
aauucagaaaccuaauuca

SEQ ID NO: 844664 - RNA, 19 nt, Artificial Sequence
  Description of Artificial Sequence: Synthetic oligonucleotide
  Sense strand starting at position 2819 of SEQ ID NO: 588142
uuaugugguuauucucaau

SEQ ID NO: 844665 - RNA, 19 nt, Artificial Sequence
  Description of Artificial Sequence: Synthetic oligonucleotide
  Antisense strand to SEQ ID NO: 844664
auugagaauaaccacauaa

SEQ ID NO: 844666 - RNA, 19 nt, Artificial Sequence
  Description of Artificial Sequence: Synthetic oligonucleotide
  Sense strand starting at position 2825 of SEQ ID NO: 588142
gguuauucucaauaucuga

SEQ ID NO: 844667 - RNA, 19 nt, Artificial Sequence
  Description of Artificial Sequence: Synthetic oligonucleotide
  Antisense strand to SEQ ID NO: 844666
ucagauauugagaauaacc

SEQ ID NO: 844668 - RNA, 19 nt, Artificial Sequence
  Description of Artificial Sequence: Synthetic oligonucleotide
  Sense strand starting at position 2841 of SEQ ID NO: 588142
ugaucagguuccuuauucu

SEQ ID NO: 844669 - RNA, 19 nt, Artificial Sequence
  Description of Artificial Sequence: Synthetic oligonucleotide
  Antisense strand to SEQ ID NO: 844668
agaauaaggaaccugauca

SEQ ID NO: 844670 - RNA, 19 nt, Artificial Sequence
  Description of Artificial Sequence: Synthetic oligonucleotide
  Sense strand starting at position 2873 of SEQ ID NO: 588142
gaugaugucugauuaccuu

SEQ ID NO: 844671 - RNA, 19 nt, Artificial Sequence
  Description of Artificial Sequence: Synthetic oligonucleotide
  Antisense strand to SEQ ID NO: 844670
aagguaaucagacaucauc

SEQ ID NO: 844672 - RNA, 19 nt, Artificial Sequence
  Description of Artificial Sequence: Synthetic oligonucleotide
  Sense strand starting at position 2908 of SEQ ID NO: 588142
gaauccuguuagguauauu

SEQ ID NO: 844673 - RNA, 19 nt, Artificial Sequence
  Description of Artificial Sequence: Synthetic oligonucleotide
  Antisense strand to SEQ ID NO: 844672
aauauaccuaacaggauuc

SEQ ID NO: 844674 - RNA, 19 nt, Artificial Sequence
  Description of Artificial Sequence: Synthetic oligonucleotide
  Sense strand starting at position 3069 of SEQ ID NO: 588142
cguugcagugagcucuaua

SEQ ID NO: 844675 - RNA, 19 nt, Artificial Sequence
  Description of Artificial Sequence: Synthetic oligonucleotide
  Antisense strand to SEQ ID NO: 844674
uauagagcucacugcaacg

SEQ ID NO: 844676 - RNA, 19 nt, Artificial Sequence
  Description of Artificial Sequence: Synthetic oligonucleotide
  Sense strand starting at position 3072 of SEQ ID NO: 588142
ugcagugagcucuauauac

SEQ ID NO: 844677 - RNA, 19 nt, Artificial Sequence
  Description of Artificial Sequence: Synthetic oligonucleotide
  Antisense strand to SEQ ID NO: 844676
guauauagagcucacugca

SEQ ID NO: 844678 - RNA, 19 nt, Artificial Sequence
  Description of Artificial Sequence: Synthetic oligonucleotide
  Sense strand starting at position 3327 of SEQ ID NO: 588142
agagaagaugcagguuuau

SEQ ID NO: 844679 - RNA, 19 nt, Artificial Sequence
  Description of Artificial Sequence: Synthetic oligonucleotide
  Antisense strand to SEQ ID NO: 844678
auaaaccugcaucuucucu

SEQ ID NO: 844680 - RNA, 19 nt, Artificial Sequence
  Description of Artificial Sequence: Synthetic oligonucleotide
  Sense strand starting at position 3400 of SEQ ID NO: 588142
aggccuuacagcugaggaa

SEQ ID NO: 844681 - RNA, 19 nt, Artificial Sequence
  Description of Artificial Sequence: Synthetic oligonucleotide
  Antisense strand to SEQ ID NO: 844680
uuccucagcuguaaggccu

SEQ ID NO: 844682 - RNA, 19 nt, Artificial Sequence
  Description of Artificial Sequence: Synthetic oligonucleotide
  Sense strand starting at position 3401 of SEQ ID NO: 588142
ggccuuacagcugaggaau

SEQ ID NO: 844683 - RNA, 19 nt, Artificial Sequence
  Description of Artificial Sequence: Synthetic oligonucleotide
  Antisense strand to SEQ ID NO: 844682
auuccucagcuguaaggcc

SEQ ID NO: 844684 - RNA, 19 nt, Artificial Sequence
  Description of Artificial Sequence: Synthetic oligonucleotide
  Sense strand starting at position 3554 of SEQ ID NO: 588142
uggauuggaucauucuaau

SEQ ID NO: 844685 - RNA, 19 nt, Artificial Sequence
  Description of Artificial Sequence: Synthetic oligonucleotide
  Antisense strand to SEQ ID NO: 844684
auuagaaugauccaaucca

SEQ ID NO: 844686 - RNA, 19 nt, Artificial Sequence
  Description of Artificial Sequence: Synthetic oligonucleotide
  Sense strand starting at position 3637 of SEQ ID NO: 588142
guccauugucuauagugua

SEQ ID NO: 844687 - RNA, 19 nt, Artificial Sequence
  Description of Artificial Sequence: Synthetic oligonucleotide
  Antisense strand to SEQ ID NO: 844686
uacacuauagacaauggac

SEQ ID NO: 844688 - RNA, 19 nt, Artificial Sequence
  Description of Artificial Sequence: Synthetic oligonucleotide
  Sense strand starting at position 3642 of SEQ ID NO: 588142
uugucuauaguguauuagu

SEQ ID NO: 844689 - RNA, 19 nt, Artificial Sequence
  Description of Artificial Sequence: Synthetic oligonucleotide
  Antisense strand to SEQ ID NO: 844688
acuaauacacuauagacaa

SEQ ID NO: 844690 - RNA, 19 nt, Artificial Sequence
  Description of Artificial Sequence: Synthetic oligonucleotide
  Sense strand starting at position 3651 of SEQ ID NO: 588142
guguauuaguggccagaaa

SEQ ID NO: 844691 - RNA, 19 nt, Artificial Sequence
  Description of Artificial Sequence: Synthetic oligonucleotide
  Antisense strand to SEQ ID NO: 844690
uuucuggccacuaauacac

SEQ ID NO: 844692 - RNA, 19 nt, Artificial Sequence
  Description of Artificial Sequence: Synthetic oligonucleotide
  Sense strand starting at position 3671 of SEQ ID NO: 588142
gcaagaucacauggcacaa

SEQ ID NO: 844693 - RNA, 19 nt, Artificial Sequence
  Description of Artificial Sequence: Synthetic oligonucleotide
  Antisense strand to SEQ ID NO: 844692
uugugccaugugaucuugc

SEQ ID NO: 844694 - RNA, 19 nt, Artificial Sequence
  Description of Artificial Sequence: Synthetic oligonucleotide
  Sense strand starting at position 3883 of SEQ ID NO: 588142
ggcggaacucgccuguagu

SEQ ID NO: 844695 - RNA, 19 nt, Artificial Sequence
  Description of Artificial Sequence: Synthetic oligonucleotide
  Antisense strand to SEQ ID NO: 844694
acuacaggcgaguuccgcc

SEQ ID NO: 844696 - RNA, 19 nt, Artificial Sequence
  Description of Artificial Sequence: Synthetic oligonucleotide
  Sense strand starting at position 102 of SEQ ID NO: 588143
ccagguaucucagagaaag

SEQ ID NO: 844697 - RNA, 19 nt, Artificial Sequence
  Description of Artificial Sequence: Synthetic oligonucleotide
  Antisense strand to SEQ ID NO: 844696
cuuucucugagauaccugg

SEQ ID NO: 844698 - RNA, 19 nt, Artificial Sequence
  Description of Artificial Sequence: Synthetic oligonucleotide
  Sense strand starting at position 344 of SEQ ID NO: 588143
cugggauaagccugaugau

SEQ ID NO: 844699 - RNA, 19 nt, Artificial Sequence
  Description of Artificial Sequence: Synthetic oligonucleotide
  Antisense strand to SEQ ID NO: 844698
aucaucaggcuuaucccag

SEQ ID NO: 844700 - RNA, 19 nt, Artificial Sequence
  Description of Artificial Sequence: Synthetic oligonucleotide
  Sense strand starting at position 391 of SEQ ID NO: 588143
uccuuugugagagagugaa

SEQ ID NO: 844701 - RNA, 19 nt, Artificial Sequence
  Description of Artificial Sequence: Synthetic oligonucleotide
  Antisense strand to SEQ ID NO: 844700
uucacucucucacaaagga

SEQ ID NO: 844702 - RNA, 19 nt, Artificial Sequence
  Description of Artificial Sequence: Synthetic oligonucleotide
  Sense strand starting at position 502 of SEQ ID NO: 588143
ucaggacuccgauaggagu

SEQ ID NO: 844703 - RNA, 19 nt, Artificial Sequence
  Description of Artificial Sequence: Synthetic oligonucleotide
  Antisense strand to SEQ ID NO: 844702
acuccuaucggaguccuga

SEQ ID NO: 844704 - RNA, 19 nt, Artificial Sequence
  Description of Artificial Sequence: Synthetic oligonucleotide
  Sense strand starting at position 605 of SEQ ID NO: 588143
gacgacuaaucuuauggga

SEQ ID NO: 844705 - RNA, 19 nt, Artificial Sequence
  Description of Artificial Sequence: Synthetic oligonucleotide
  Antisense strand to SEQ ID NO: 844704
ucccauaagauuagucguc

SEQ ID NO: 844706 - RNA, 19 nt, Artificial Sequence
  Description of Artificial Sequence: Synthetic oligonucleotide
  Sense strand starting at position 922 of SEQ ID NO: 588143
gugggucugccagaccuaa

SEQ ID NO: 844707 - RNA, 19 nt, Artificial Sequence
  Description of Artificial Sequence: Synthetic oligonucleotide
  Antisense strand to SEQ ID NO: 844706
uuaggucuggcagacccac

SEQ ID NO: 844708 - RNA, 19 nt, Artificial Sequence
  Description of Artificial Sequence: Synthetic oligonucleotide
  Sense strand starting at position 976 of SEQ ID NO: 588143
gugaaacuggugugaccaa

SEQ ID NO: 844709 - RNA, 19 nt, Artificial Sequence
  Description of Artificial Sequence: Synthetic oligonucleotide
  Antisense strand to SEQ ID NO: 844708
uuggucacaccaguuucac

SEQ ID NO: 844710 - RNA, 19 nt, Artificial Sequence
  Description of Artificial Sequence: Synthetic oligonucleotide
  Sense strand starting at position 983 of SEQ ID NO: 588143
uggugugaccaaggaguaa

SEQ ID NO: 844711 - RNA, 19 nt, Artificial Sequence
  Description of Artificial Sequence: Synthetic oligonucleotide
  Antisense strand to SEQ ID NO: 844710
uuacuccuuggucacacca

SEQ ID NO: 844712 - RNA, 19 nt, Artificial Sequence
  Description of Artificial Sequence: Synthetic oligonucleotide
  Sense strand starting at position 1015 of SEQ ID NO: 588143
guaacucaggcagggaaau

SEQ ID NO: 844713 - RNA, 19 nt, Artificial Sequence
  Description of Artificial Sequence: Synthetic oligonucleotide
  Antisense strand to SEQ ID NO: 844712
auuucccugccugaguuac

SEQ ID NO: 844714 - RNA, 19 nt, Artificial Sequence
  Description of Artificial Sequence: Synthetic oligonucleotide
  Sense strand starting at position 1027 of SEQ ID NO: 588143
gggaaaugcucacucagag

SEQ ID NO: 844715 - RNA, 19 nt, Artificial Sequence
  Description of Artificial Sequence: Synthetic oligonucleotide
  Antisense strand to SEQ ID NO: 844714
cucugagugagcauuuccc

SEQ ID NO: 844716 - RNA, 19 nt, Artificial Sequence
  Description of Artificial Sequence: Synthetic oligonucleotide
  Sense strand starting at position 1111 of SEQ ID NO: 588143
gacagcaucugucuggaua

SEQ ID NO: 844717 - RNA, 19 nt, Artificial Sequence
  Description of Artificial Sequence: Synthetic oligonucleotide
  Antisense strand to SEQ ID NO: 844716
uauccagacagaugcuguc

SEQ ID NO: 844718 - RNA, 19 nt, Artificial Sequence
  Description of Artificial Sequence: Synthetic oligonucleotide
  Sense strand starting at position 1112 of SEQ ID NO: 588143
acagcaucugucuggauaa

SEQ ID NO: 844719 - RNA, 19 nt, Artificial Sequence
  Description of Artificial Sequence: Synthetic oligonucleotide
  Antisense strand to SEQ ID NO: 844718
uuauccagacagaugcugu

SEQ ID NO: 844720 - RNA, 19 nt, Artificial Sequence
  Description of Artificial Sequence: Synthetic oligonucleotide
  Sense strand starting at position 1114 of SEQ ID NO: 588143
agcaucugucuggauaaca

SEQ ID NO: 844721 - RNA, 19 nt, Artificial Sequence
  Description of Artificial Sequence: Synthetic oligonucleotide
  Antisense strand to SEQ ID NO: 844720
uguuauccagacagaugcu

SEQ ID NO: 844722 - RNA, 19 nt, Artificial Sequence
  Description of Artificial Sequence: Synthetic oligonucleotide
  Sense strand starting at position 1425 of SEQ ID NO: 588143
cugggauucugggaaucug

SEQ ID NO: 844723 - RNA, 19 nt, Artificial Sequence
  Description of Artificial Sequence: Synthetic oligonucleotide
  Antisense strand to SEQ ID NO: 844722
cagauucccagaaucccag

SEQ ID NO: 844724 - RNA, 19 nt, Artificial Sequence
  Description of Artificial Sequence: Synthetic oligonucleotide
  Sense strand starting at position 1516 of SEQ ID NO: 588143
ggcugagucacuuguggga

SEQ ID NO: 844725 - RNA, 19 nt, Artificial Sequence
  Description of Artificial Sequence: Synthetic oligonucleotide
  Antisense strand to SEQ ID NO: 844724
ucccacaagugacucagcc

SEQ ID NO: 844726 - RNA, 19 nt, Artificial Sequence
  Description of Artificial Sequence: Synthetic oligonucleotide
  Sense strand starting at position 1523 of SEQ ID NO: 588143
ucacuugugggaggguaaa

SEQ ID NO: 844727 - RNA, 19 nt, Artificial Sequence
  Description of Artificial Sequence: Synthetic oligonucleotide
  Antisense strand to SEQ ID NO: 844726
uuuacccucccacaaguga

SEQ ID NO: 844728 - RNA, 19 nt, Artificial Sequence
  Description of Artificial Sequence: Synthetic oligonucleotide
  Sense strand starting at position 1535 of SEQ ID NO: 588143
ggguaaacgaucggcacua

SEQ ID NO: 844729 - RNA, 19 nt, Artificial Sequence
  Description of Artificial Sequence: Synthetic oligonucleotide
  Antisense strand to SEQ ID NO: 844728
uagugccgaucguuuaccc

SEQ ID NO: 844730 - RNA, 19 nt, Artificial Sequence
  Description of Artificial Sequence: Synthetic oligonucleotide
  Sense strand starting at position 1536 of SEQ ID NO: 588143
gguaaacgaucggcacuau

SEQ ID NO: 844731 - RNA, 19 nt, Artificial Sequence
  Description of Artificial Sequence: Synthetic oligonucleotide
  Antisense strand to SEQ ID NO: 844730
auagugccgaucguuuacc

SEQ ID NO: 844732 - RNA, 19 nt, Artificial Sequence
  Description of Artificial Sequence: Synthetic oligonucleotide
  Sense strand starting at position 1560 of SEQ ID NO: 588143
gggaguaacagcugucauu

SEQ ID NO: 844733 - RNA, 19 nt, Artificial Sequence
  Description of Artificial Sequence: Synthetic oligonucleotide
  Antisense strand to SEQ ID NO: 844732
aaugacagcuguuacuccc

SEQ ID NO: 844734 - RNA, 19 nt, Artificial Sequence
  Description of Artificial Sequence: Synthetic oligonucleotide
  Sense strand starting at position 1584 of SEQ ID NO: 588143
aagagucggagcugucaga

SEQ ID NO: 844735 - RNA, 19 nt, Artificial Sequence
  Description of Artificial Sequence: Synthetic oligonucleotide
  Antisense strand to SEQ ID NO: 844734
ucugacagcuccgacucuu

SEQ ID NO: 844736 - RNA, 19 nt, Artificial Sequence
  Description of Artificial Sequence: Synthetic oligonucleotide
  Sense strand starting at position 1977 of SEQ ID NO: 588143
gguggcucccuuuauagga

SEQ ID NO: 844737 - RNA, 19 nt, Artificial Sequence
  Description of Artificial Sequence: Synthetic oligonucleotide
  Antisense strand to SEQ ID NO: 844736
uccuauaaagggagccacc

SEQ ID NO: 844738 - RNA, 19 nt, Artificial Sequence
  Description of Artificial Sequence: Synthetic oligonucleotide
  Sense strand starting at position 2207 of SEQ ID NO: 588143
gaggcuuaggcagaucuga

SEQ ID NO: 844739 - RNA, 19 nt, Artificial Sequence
  Description of Artificial Sequence: Synthetic oligonucleotide
  Antisense strand to SEQ ID NO: 844738
ucagaucugccuaagccuc

SEQ ID NO: 844740 - RNA, 19 nt, Artificial Sequence
  Description of Artificial Sequence: Synthetic oligonucleotide
  Sense strand starting at position 2238 of SEQ ID NO: 588143
ggauuauaggcaggguuca

SEQ ID NO: 844741 - RNA, 19 nt, Artificial Sequence
  Description of Artificial Sequence: Synthetic oligonucleotide
  Antisense strand to SEQ ID NO: 844740
ugaacccugccuauaaucc

SEQ ID NO: 844742 - RNA, 19 nt, Artificial Sequence
  Description of Artificial Sequence: Synthetic oligonucleotide
  Sense strand starting at position 2270 of SEQ ID NO: 588143
agaggaugcagcugucaua

SEQ ID NO: 844743 - RNA, 19 nt, Artificial Sequence
  Description of Artificial Sequence: Synthetic oligonucleotide
  Antisense strand to SEQ ID NO: 844742
uaugacagcugcauccucu

SEQ ID NO: 844744 - RNA, 19 nt, Artificial Sequence
  Description of Artificial Sequence: Synthetic oligonucleotide
  Sense strand starting at position 2277 of SEQ ID NO: 588143
gcagcugucauagagacca

SEQ ID NO: 844745 - RNA, 19 nt, Artificial Sequence
  Description of Artificial Sequence: Synthetic oligonucleotide
  Antisense strand to SEQ ID NO: 844744
uggucucuaugacagcugc

SEQ ID NO: 844746 - RNA, 19 nt, Artificial Sequence
  Description of Artificial Sequence: Synthetic oligonucleotide
  Sense strand starting at position 2335 of SEQ ID NO: 588143
ggagaccugucagaaagaa

SEQ ID NO: 844747 - RNA, 19 nt, Artificial Sequence
  Description of Artificial Sequence: Synthetic oligonucleotide
  Antisense strand to SEQ ID NO: 844746
uucuuucugacaggucucc

SEQ ID NO: 844748 - RNA, 19 nt, Artificial Sequence
  Description of Artificial Sequence: Synthetic oligonucleotide
  Sense strand starting at position 2357 of SEQ ID NO: 588143
ggccgcaucucuccaggau

SEQ ID NO: 844749 - RNA, 19 nt, Artificial Sequence
  Description of Artificial Sequence: Synthetic oligonucleotide
  Antisense strand to SEQ ID NO: 844748
auccuggagagaugcggcc

SEQ ID NO: 844750 - RNA, 19 nt, Artificial Sequence
  Description of Artificial Sequence: Synthetic oligonucleotide
  Sense strand starting at position 2361 of SEQ ID NO: 588143
gcaucucuccaggaugacu

SEQ ID NO: 844751 - RNA, 19 nt, Artificial Sequence
  Description of Artificial Sequence: Synthetic oligonucleotide
  Antisense strand to SEQ ID NO: 844750
agucauccuggagagaugc

SEQ ID NO: 844752 - RNA, 19 nt, Artificial Sequence
  Description of Artificial Sequence: Synthetic oligonucleotide
  Sense strand starting at position 2449 of SEQ ID NO: 588143
cucuucugucaggacagau

SEQ ID NO: 844753 - RNA, 19 nt, Artificial Sequence
  Description of Artificial Sequence: Synthetic oligonucleotide
  Antisense strand to SEQ ID NO: 844752
aucuguccugacagaagag

SEQ ID NO: 844754 - RNA, 19 nt, Artificial Sequence
  Description of Artificial Sequence: Synthetic oligonucleotide
  Sense strand starting at position 2881 of SEQ ID NO: 588143
caaggaagagucugucucu

SEQ ID NO: 844755 - RNA, 19 nt, Artificial Sequence
  Description of Artificial Sequence: Synthetic oligonucleotide
  Antisense strand to SEQ ID NO: 844754
agagacagacucuuccuug

SEQ ID NO: 844756 - RNA, 19 nt, Artificial Sequence
  Description of Artificial Sequence: Synthetic oligonucleotide
  Sense strand starting at position 2882 of SEQ ID NO: 588143
aaggaagagucugucucuu

SEQ ID NO: 844757 - RNA, 19 nt, Artificial Sequence
  Description of Artificial Sequence: Synthetic oligonucleotide
  Antisense strand to SEQ ID NO: 844756
aagagacagacucuuccuu

SEQ ID NO: 844758 - RNA, 19 nt, Artificial Sequence
  Description of Artificial Sequence: Synthetic oligonucleotide
  Sense strand starting at position 3222 of SEQ ID NO: 588143
gggagucagcccuaucuga

SEQ ID NO: 844759 - RNA, 19 nt, Artificial Sequence
  Description of Artificial Sequence: Synthetic oligonucleotide
  Antisense strand to SEQ ID NO: 844758
ucagauagggcugacuccc

SEQ ID NO: 844760 - RNA, 19 nt, Artificial Sequence
  Description of Artificial Sequence: Synthetic oligonucleotide
  Sense strand starting at position 3378 of SEQ ID NO: 588143
cagaauggaugggacuaua

SEQ ID NO: 844761 - RNA, 19 nt, Artificial Sequence
  Description of Artificial Sequence: Synthetic oligonucleotide
  Antisense strand to SEQ ID NO: 844760
uauagucccauccauucug

SEQ ID NO: 844762 - RNA, 19 nt, Artificial Sequence
  Description of Artificial Sequence: Synthetic oligonucleotide
  Sense strand starting at position 3617 of SEQ ID NO: 588143
gcagcauugccagaggaga

SEQ ID NO: 844763 - RNA, 19 nt, Artificial Sequence
  Description of Artificial Sequence: Synthetic oligonucleotide
  Antisense strand to SEQ ID NO: 844762
ucuccucuggcaaugcugc

SEQ ID NO: 844764 - RNA, 19 nt, Artificial Sequence
  Description of Artificial Sequence: Synthetic oligonucleotide
  Sense strand starting at position 3660 of SEQ ID NO: 588143
acuuaauccaggugggcua

SEQ ID NO: 844765 - RNA, 19 nt, Artificial Sequence
  Description of Artificial Sequence: Synthetic oligonucleotide
  Antisense strand to SEQ ID NO: 844764
uagcccaccuggauuaagu

SEQ ID NO: 844766 - RNA, 19 nt, Artificial Sequence
  Description of Artificial Sequence: Synthetic oligonucleotide
  Sense strand starting at position 3674 of SEQ ID NO: 588143
ggcuaaugacccugaggac

SEQ ID NO: 844767 - RNA, 19 nt, Artificial Sequence
  Description of Artificial Sequence: Synthetic oligonucleotide
  Antisense strand to SEQ ID NO: 844766
guccucagggucauuagcc

SEQ ID NO: 844768 - RNA, 19 nt, Artificial Sequence
  Description of Artificial Sequence: Synthetic oligonucleotide
  Sense strand starting at position 3689 of SEQ ID NO: 588143
ggacuugucccuugaggga

SEQ ID NO: 844769 - RNA, 19 nt, Artificial Sequence
  Description of Artificial Sequence: Synthetic oligonucleotide
  Antisense strand to SEQ ID NO: 844768
ucccucaagggacaagucc

SEQ ID NO: 844770 - RNA, 19 nt, Artificial Sequence
  Description of Artificial Sequence: Synthetic oligonucleotide
  Sense strand starting at position 3696 of SEQ ID NO: 588143
ucccuugagggacgaauau

SEQ ID NO: 844771 - RNA, 19 nt, Artificial Sequence
  Description of Artificial Sequence: Synthetic oligonucleotide
  Antisense strand to SEQ ID NO: 844770
auauucgucccucaaggga

SEQ ID NO: 844772 - RNA, 19 nt, Artificial Sequence
  Description of Artificial Sequence: Synthetic oligonucleotide
  Sense strand starting at position 3703 of SEQ ID NO: 588143
agggacgaauaugagaaau

SEQ ID NO: 844773 - RNA, 19 nt, Artificial Sequence
  Description of Artificial Sequence: Synthetic oligonucleotide
  Antisense strand to SEQ ID NO: 844772
auuucucauauucgucccu

SEQ ID NO: 844774 - RNA, 19 nt, Artificial Sequence
  Description of Artificial Sequence: Synthetic oligonucleotide
  Sense strand starting at position 3705 of SEQ ID NO: 588143
ggacgaauaugagaaauaa

SEQ ID NO: 844775 - RNA, 19 nt, Artificial Sequence
  Description of Artificial Sequence: Synthetic oligonucleotide
  Antisense strand to SEQ ID NO: 844774
uuauuucucauauucgucc

SEQ ID NO: 844776 - RNA, 19 nt, Artificial Sequence
  Description of Artificial Sequence: Synthetic oligonucleotide
  Sense strand starting at position 147 of SEQ ID NO: 588144
gugugcuuguaauccugua

SEQ ID NO: 844777 - RNA, 19 nt, Artificial Sequence
  Description of Artificial Sequence: Synthetic oligonucleotide
  Antisense strand to SEQ ID NO: 844776
uacaggauuacaagcacac

SEQ ID NO: 844778 - RNA, 19 nt, Artificial Sequence
  Description of Artificial Sequence: Synthetic oligonucleotide
  Sense strand starting at position 152 of SEQ ID NO: 588144
cuuguaauccuguaaucac

SEQ ID NO: 844779 - RNA, 19 nt, Artificial Sequence
  Description of Artificial Sequence: Synthetic oligonucleotide
  Antisense strand to SEQ ID NO: 844778
gugauuacaggauuacaag

SEQ ID NO: 844780 - RNA, 19 nt, Artificial Sequence
  Description of Artificial Sequence: Synthetic oligonucleotide
  Sense strand starting at position 544 of SEQ ID NO: 588144
gguggaagaugcucuucuu

SEQ ID NO: 844781 - RNA, 19 nt, Artificial Sequence
  Description of Artificial Sequence: Synthetic oligonucleotide
  Antisense strand to SEQ ID NO: 844780
aagaagagcaucuuccacc

SEQ ID NO: 844782 - RNA, 19 nt, Artificial Sequence
  Description of Artificial Sequence: Synthetic oligonucleotide
  Sense strand starting at position 547 of SEQ ID NO: 588144
ggaagaugcucuucuucug

SEQ ID NO: 844783 - RNA, 19 nt, Artificial Sequence
  Description of Artificial Sequence: Synthetic oligonucleotide
  Antisense strand to SEQ ID NO: 844782
cagaagaagagcaucuucc

SEQ ID NO: 844784 - RNA, 19 nt, Artificial Sequence
  Description of Artificial Sequence: Synthetic oligonucleotide
  Sense strand starting at position 729 of SEQ ID NO: 588144
ggaugcuugaaccauguuu

SEQ ID NO: 844785 - RNA, 19 nt, Artificial Sequence
  Description of Artificial Sequence: Synthetic oligonucleotide
  Antisense strand to SEQ ID NO: 844784
aaacaugguucaagcaucc

SEQ ID NO: 844786 - RNA, 19 nt, Artificial Sequence
  Description of Artificial Sequence: Synthetic oligonucleotide
  Sense strand starting at position 1857 of SEQ ID NO: 588144
gcugaaaugucucugauuc

SEQ ID NO: 844787 - RNA, 19 nt, Artificial Sequence
  Description of Artificial Sequence: Synthetic oligonucleotide
  Antisense strand to SEQ ID NO: 844786
gaaucagagacauuucagc

SEQ ID NO: 844788 - RNA, 19 nt, Artificial Sequence
  Description of Artificial Sequence: Synthetic oligonucleotide
  Sense strand starting at position 1859 of SEQ ID NO: 588144
ugaaaugucucugauucuc

SEQ ID NO: 844789 - RNA, 19 nt, Artificial Sequence
  Description of Artificial Sequence: Synthetic oligonucleotide
  Antisense strand to SEQ ID NO: 844788
gagaaucagagacauuuca

SEQ ID NO: 844790 - RNA, 19 nt, Artificial Sequence
  Description of Artificial Sequence: Synthetic oligonucleotide
  Sense strand starting at position 1916 of SEQ ID NO: 588144
ugaucuuguuccuccguga

SEQ ID NO: 844791 - RNA, 19 nt, Artificial Sequence
  Description of Artificial Sequence: Synthetic oligonucleotide
  Antisense strand to SEQ ID NO: 844790
ucacggaggaacaagauca

SEQ ID NO: 844792 - RNA, 19 nt, Artificial Sequence
  Description of Artificial Sequence: Synthetic oligonucleotide
  Sense strand starting at position 2608 of SEQ ID NO: 588144
uccaccuguccucgggaaa

SEQ ID NO: 844793 - RNA, 19 nt, Artificial Sequence
  Description of Artificial Sequence: Synthetic oligonucleotide
  Antisense strand to SEQ ID NO: 844792
uuucccgaggacaggugga

SEQ ID NO: 844794 - RNA, 19 nt, Artificial Sequence
  Description of Artificial Sequence: Synthetic oligonucleotide
  Sense strand starting at position 2916 of SEQ ID NO: 588144
guggguaaguccugggaac

SEQ ID NO: 844795 - RNA, 19 nt, Artificial Sequence
  Description of Artificial Sequence: Synthetic oligonucleotide
  Antisense strand to SEQ ID NO: 844794
guucccaggacuuacccac

SEQ ID NO: 844796 - RNA, 19 nt, Artificial Sequence
  Description of Artificial Sequence: Synthetic oligonucleotide
  Sense strand starting at position 2917 of SEQ ID NO: 588144
uggguaaguccugggaacu

SEQ ID NO: 844797 - RNA, 19 nt, Artificial Sequence
  Description of Artificial Sequence: Synthetic oligonucleotide
  Antisense strand to SEQ ID NO: 844796
aguucccaggacuuaccca

SEQ ID NO: 844798 - RNA, 19 nt, Artificial Sequence
  Description of Artificial Sequence: Synthetic oligonucleotide
  Sense strand starting at position 2918 of SEQ ID NO: 588144
ggguaaguccugggaacuu

SEQ ID NO: 844799 - RNA, 19 nt, Artificial Sequence
  Description of Artificial Sequence: Synthetic oligonucleotide
  Antisense strand to SEQ ID NO: 844798
aaguucccaggacuuaccc

SEQ ID NO: 844800 - RNA, 19 nt, Artificial Sequence
  Description of Artificial Sequence: Synthetic oligonucleotide
  Sense strand starting at position 2985 of SEQ ID NO: 588144
aaagcucaggucugggaau

SEQ ID NO: 844801 - RNA, 19 nt, Artificial Sequence
  Description of Artificial Sequence: Synthetic oligonucleotide
  Antisense strand to SEQ ID NO: 844800
auucccagaccugagcuuu

SEQ ID NO: 844802 - RNA, 19 nt, Artificial Sequence
  Description of Artificial Sequence: Synthetic oligonucleotide
  Sense strand starting at position 3534 of SEQ ID NO: 588144
agccuuucuuccucaggaa

SEQ ID NO: 844803 - RNA, 19 nt, Artificial Sequence
  Description of Artificial Sequence: Synthetic oligonucleotide
  Antisense strand to SEQ ID NO: 844802
uuccugaggaagaaaggcu

SEQ ID NO: 844804 - RNA, 19 nt, Artificial Sequence
  Description of Artificial Sequence: Synthetic oligonucleotide
  Sense strand starting at position 3574 of SEQ ID NO: 588144
augggagaguccugccuuu

SEQ ID NO: 844805 - RNA, 19 nt, Artificial Sequence
  Description of Artificial Sequence: Synthetic oligonucleotide
  Antisense strand to SEQ ID NO: 844804
aaaggcaggacucucccau

SEQ ID NO: 844806 - RNA, 19 nt, Artificial Sequence
  Description of Artificial Sequence: Synthetic oligonucleotide
  Sense strand starting at position 3620 of SEQ ID NO: 588144
ccgggaugaggucauguua

SEQ ID NO: 844807 - RNA, 19 nt, Artificial Sequence
  Description of Artificial Sequence: Synthetic oligonucleotide
  Antisense strand to SEQ ID NO: 844806
uaacaugaccucaucccgg

SEQ ID NO: 844808 - RNA, 19 nt, Artificial Sequence
  Description of Artificial Sequence: Synthetic oligonucleotide
  Sense strand starting at position 3631 of SEQ ID NO: 588144
ucauguuagaaguggaucu

SEQ ID NO: 844809 - RNA, 19 nt, Artificial Sequence
  Description of Artificial Sequence: Synthetic oligonucleotide
  Antisense strand to SEQ ID NO: 844808
agauccacuucuaacauga

SEQ ID NO: 844810 - RNA, 19 nt, Artificial Sequence
  Description of Artificial Sequence: Synthetic oligonucleotide
  Sense strand starting at position 3808 of SEQ ID NO: 588144
ccaucugucucacggcaga

SEQ ID NO: 844811 - RNA, 19 nt, Artificial Sequence
  Description of Artificial Sequence: Synthetic oligonucleotide
  Antisense strand to SEQ ID NO: 844810
ucugccgugagacagaugg

SEQ ID NO: 844812 - RNA, 19 nt, Artificial Sequence
  Description of Artificial Sequence: Synthetic oligonucleotide
  Sense strand starting at position 3906 of SEQ ID NO: 588144
guacaagggucuuccguua

SEQ ID NO: 844813 - RNA, 19 nt, Artificial Sequence
  Description of Artificial Sequence: Synthetic oligonucleotide
  Antisense strand to SEQ ID NO: 844812
uaacggaagacccuuguac

SEQ ID NO: 844814 - RNA, 19 nt, Artificial Sequence
  Description of Artificial Sequence: Synthetic oligonucleotide
  Sense strand starting at position 3911 of SEQ ID NO: 588144
agggucuuccguuagaggu

SEQ ID NO: 844815 - RNA, 19 nt, Artificial Sequence
  Description of Artificial Sequence: Synthetic oligonucleotide
  Antisense strand to SEQ ID NO: 844814
accucuaacggaagacccu

SEQ ID NO: 844816 - RNA, 19 nt, Artificial Sequence
  Description of Artificial Sequence: Synthetic oligonucleotide
  Sense strand starting at position 3912 of SEQ ID NO: 588144
gggucuuccguuagaggug

SEQ ID NO: 844817 - RNA, 19 nt, Artificial Sequence
  Description of Artificial Sequence: Synthetic oligonucleotide
  Antisense strand to SEQ ID NO: 844816
caccucuaacggaagaccc

SEQ ID NO: 844818 - RNA, 19 nt, Artificial Sequence
  Description of Artificial Sequence: Synthetic oligonucleotide
  Sense strand starting at position 3913 of SEQ ID NO: 588144
ggucuuccguuagagguga

SEQ ID NO: 844819 - RNA, 19 nt, Artificial Sequence
  Description of Artificial Sequence: Synthetic oligonucleotide
  Antisense strand to SEQ ID NO: 844818
ucaccucuaacggaagacc

SEQ ID NO: 844820 - RNA, 19 nt, Artificial Sequence
  Description of Artificial Sequence: Synthetic oligonucleotide
  Sense strand starting at position 3982 of SEQ ID NO: 588144
uuugaagcuugaugggauu

SEQ ID NO: 844821 - RNA, 19 nt, Artificial Sequence
  Description of Artificial Sequence: Synthetic oligonucleotide
  Antisense strand to SEQ ID NO: 844820
aaucccaucaagcuucaaa

SEQ ID NO: 844822 - RNA, 19 nt, Artificial Sequence
  Description of Artificial Sequence: Synthetic oligonucleotide
  Sense strand starting at position 934 of SEQ ID NO: 588145
agcugugcuccugagagaa

SEQ ID NO: 844823 - RNA, 19 nt, Artificial Sequence
  Description of Artificial Sequence: Synthetic oligonucleotide
  Antisense strand to SEQ ID NO: 844822
uucucucaggagcacagcu

SEQ ID NO: 844824 - RNA, 19 nt, Artificial Sequence
  Description of Artificial Sequence: Synthetic oligonucleotide
  Sense strand starting at position 948 of SEQ ID NO: 588145
gagaaacucucguuucucu

SEQ ID NO: 844825 - RNA, 19 nt, Artificial Sequence
  Description of Artificial Sequence: Synthetic oligonucleotide
  Antisense strand to SEQ ID NO: 844824
agagaaacgagaguuucuc

SEQ ID NO: 844826 - RNA, 19 nt, Artificial Sequence
  Description of Artificial Sequence: Synthetic oligonucleotide
  Sense strand starting at position 956 of SEQ ID NO: 588145
cucguuucucuacaaggaa

SEQ ID NO: 844827 - RNA, 19 nt, Artificial Sequence
  Description of Artificial Sequence: Synthetic oligonucleotide
  Antisense strand to SEQ ID NO: 844826
uuccuuguagagaaacgag

SEQ ID NO: 844828 - RNA, 19 nt, Artificial Sequence
  Description of Artificial Sequence: Synthetic oligonucleotide
  Sense strand starting at position 1004 of SEQ ID NO: 588145
ucuauaaaugcaggaaaug

SEQ ID NO: 844829 - RNA, 19 nt, Artificial Sequence
  Description of Artificial Sequence: Synthetic oligonucleotide
  Antisense strand to SEQ ID NO: 844828
cauuuccugcauuuauaga

SEQ ID NO: 844830 - RNA, 19 nt, Artificial Sequence
  Description of Artificial Sequence: Synthetic oligonucleotide
  Sense strand starting at position 1013 of SEQ ID NO: 588145
gcaggaaauguaugaaguu

SEQ ID NO: 844831 - RNA, 19 nt, Artificial Sequence
  Description of Artificial Sequence: Synthetic oligonucleotide
  Antisense strand to SEQ ID NO: 844830
aacuucauacauuuccugc

SEQ ID NO: 844832 - RNA, 19 nt, Artificial Sequence
  Description of Artificial Sequence: Synthetic oligonucleotide
  Sense strand starting at position 1027 of SEQ ID NO: 588145
aaguuugggucuccagaug

SEQ ID NO: 844833 - RNA, 19 nt, Artificial Sequence
  Description of Artificial Sequence: Synthetic oligonucleotide
  Antisense strand to SEQ ID NO: 844832
caucuggagacccaaacuu

SEQ ID NO: 844834 - RNA, 19 nt, Artificial Sequence
  Description of Artificial Sequence: Synthetic oligonucleotide
  Sense strand starting at position 1071 of SEQ ID NO: 588145
ugaggucaucuccagguua

SEQ ID NO: 844835 - RNA, 19 nt, Artificial Sequence
  Description of Artificial Sequence: Synthetic oligonucleotide
  Antisense strand to SEQ ID NO: 844834
uaaccuggagaugaccuca

SEQ ID NO: 844836 - RNA, 19 nt, Artificial Sequence
  Description of Artificial Sequence: Synthetic oligonucleotide
  Sense strand starting at position 1122 of SEQ ID NO: 588145
gcagcaaauugguuauaga

SEQ ID NO: 844837 - RNA, 19 nt, Artificial Sequence
  Description of Artificial Sequence: Synthetic oligonucleotide
  Antisense strand to SEQ ID NO: 844836
ucuauaaccaauuugcugc

SEQ ID NO: 844838 - RNA, 19 nt, Artificial Sequence
  Description of Artificial Sequence: Synthetic oligonucleotide
  Sense strand starting at position 1583 of SEQ ID NO: 588145
gaacauugguucuuagccu

SEQ ID NO: 844839 - RNA, 19 nt, Artificial Sequence
  Description of Artificial Sequence: Synthetic oligonucleotide
  Antisense strand to SEQ ID NO: 844838
aggcuaagaaccaauguuc

SEQ ID NO: 844840 - RNA, 19 nt, Artificial Sequence
  Description of Artificial Sequence: Synthetic oligonucleotide
  Sense strand starting at position 1589 of SEQ ID NO: 588145
ugguucuuagccuagagga

SEQ ID NO: 844841 - RNA, 19 nt, Artificial Sequence
  Description of Artificial Sequence: Synthetic oligonucleotide
  Antisense strand to SEQ ID NO: 844840
uccucuaggcuaagaacca

SEQ ID NO: 844842 - RNA, 19 nt, Artificial Sequence
  Description of Artificial Sequence: Synthetic oligonucleotide
  Sense strand starting at position 1591 of SEQ ID NO: 588145
guucuuagccuagaggaag

SEQ ID NO: 844843 - RNA, 19 nt, Artificial Sequence
  Description of Artificial Sequence: Synthetic oligonucleotide
  Antisense strand to SEQ ID NO: 844842
cuuccucuaggcuaagaac

SEQ ID NO: 844844 - RNA, 19 nt, Artificial Sequence
  Description of Artificial Sequence: Synthetic oligonucleotide
  Sense strand starting at position 1894 of SEQ ID NO: 588145
ggcugagggaucgacacuu

SEQ ID NO: 844845 - RNA, 19 nt, Artificial Sequence
  Description of Artificial Sequence: Synthetic oligonucleotide
  Antisense strand to SEQ ID NO: 844844
aagugucgaucccucagcc

SEQ ID NO: 844846 - RNA, 19 nt, Artificial Sequence
  Description of Artificial Sequence: Synthetic oligonucleotide
  Sense strand starting at position 2163 of SEQ ID NO: 588145
cagccugaacuuugaguca

SEQ ID NO: 844847 - RNA, 19 nt, Artificial Sequence
  Description of Artificial Sequence: Synthetic oligonucleotide
  Antisense strand to SEQ ID NO: 844846
ugacucaaaguucaggcug

SEQ ID NO: 844848 - RNA, 19 nt, Artificial Sequence
  Description of Artificial Sequence: Synthetic oligonucleotide
  Sense strand starting at position 2244 of SEQ ID NO: 588145
cggucauuacaguacacau

SEQ ID NO: 844849 - RNA, 19 nt, Artificial Sequence
  Description of Artificial Sequence: Synthetic oligonucleotide
  Antisense strand to SEQ ID NO: 844848
auguguacuguaaugaccg

SEQ ID NO: 844850 - RNA, 19 nt, Artificial Sequence
  Description of Artificial Sequence: Synthetic oligonucleotide
  Sense strand starting at position 2338 of SEQ ID NO: 588145
aaggaaugauaugaaagua

SEQ ID NO: 844851 - RNA, 19 nt, Artificial Sequence
  Description of Artificial Sequence: Synthetic oligonucleotide
  Antisense strand to SEQ ID NO: 844850
uacuuucauaucauuccuu

SEQ ID NO: 844852 - RNA, 19 nt, Artificial Sequence
  Description of Artificial Sequence: Synthetic oligonucleotide
  Sense strand starting at position 2364 of SEQ ID NO: 588145
ugguguuguaaagaagcua

SEQ ID NO: 844853 - RNA, 19 nt, Artificial Sequence
  Description of Artificial Sequence: Synthetic oligonucleotide
  Antisense strand to SEQ ID NO: 844852
uagcuucuuuacaacacca

SEQ ID NO: 844854 - RNA, 19 nt, Artificial Sequence
  Description of Artificial Sequence: Synthetic oligonucleotide
  Sense strand starting at position 2369 of SEQ ID NO: 588145
uuguaaagaagcuaucgau

SEQ ID NO: 844855 - RNA, 19 nt, Artificial Sequence
  Description of Artificial Sequence: Synthetic oligonucleotide
  Antisense strand to SEQ ID NO: 844854
aucgauagcuucuuuacaa

SEQ ID NO: 844856 - RNA, 19 nt, Artificial Sequence
  Description of Artificial Sequence: Synthetic oligonucleotide
  Sense strand starting at position 2397 of SEQ ID NO: 588145
cgcacauaguaaguauauu

SEQ ID NO: 844857 - RNA, 19 nt, Artificial Sequence
  Description of Artificial Sequence: Synthetic oligonucleotide
  Antisense strand to SEQ ID NO: 844856
aauauacuuacuaugugcg

SEQ ID NO: 844858 - RNA, 19 nt, Artificial Sequence
  Description of Artificial Sequence: Synthetic oligonucleotide
  Sense strand starting at position 2405 of SEQ ID NO: 588145
guaaguauauugcugagag

SEQ ID NO: 844859 - RNA, 19 nt, Artificial Sequence
  Description of Artificial Sequence: Synthetic oligonucleotide
  Antisense strand to SEQ ID NO: 844858
cucucagcaauauacuuac

SEQ ID NO: 844860 - RNA, 19 nt, Artificial Sequence
  Description of Artificial Sequence: Synthetic oligonucleotide
  Sense strand starting at position 2434 of SEQ ID NO: 588145
aggcuacaaagguguauaa

SEQ ID NO: 844861 - RNA, 19 nt, Artificial Sequence
  Description of Artificial Sequence: Synthetic oligonucleotide
  Antisense strand to SEQ ID NO: 844860
uuauacaccuuuguagccu

SEQ ID NO: 844862 - RNA, 19 nt, Artificial Sequence
  Description of Artificial Sequence: Synthetic oligonucleotide
  Sense strand starting at position 2436 of SEQ ID NO: 588145
gcuacaaagguguauaaua

SEQ ID NO: 844863 - RNA, 19 nt, Artificial Sequence
  Description of Artificial Sequence: Synthetic oligonucleotide
  Antisense strand to SEQ ID NO: 844862
uauuauacaccuuuguagc

SEQ ID NO: 844864 - RNA, 19 nt, Artificial Sequence
  Description of Artificial Sequence: Synthetic oligonucleotide
  Sense strand starting at position 2666 of SEQ ID NO: 588145
uuuaucuccggguaaugga

SEQ ID NO: 844865 - RNA, 19 nt, Artificial Sequence
  Description of Artificial Sequence: Synthetic oligonucleotide
  Antisense strand to SEQ ID NO: 844864
uccauuacccggagauaaa

SEQ ID NO: 844866 - RNA, 19 nt, Artificial Sequence
  Description of Artificial Sequence: Synthetic oligonucleotide
  Sense strand starting at position 2687 of SEQ ID NO: 588145
ugaagauaauguguuuaac

SEQ ID NO: 844867 - RNA, 19 nt, Artificial Sequence
  Description of Artificial Sequence: Synthetic oligonucleotide
  Antisense strand to SEQ ID NO: 844866
guuaaacacauuaucuuca

SEQ ID NO: 844868 - RNA, 19 nt, Artificial Sequence
  Description of Artificial Sequence: Synthetic oligonucleotide
  Sense strand starting at position 2697 of SEQ ID NO: 588145
guguuuaacaaauguguau

SEQ ID NO: 844869 - RNA, 19 nt, Artificial Sequence
  Description of Artificial Sequence: Synthetic oligonucleotide
  Antisense strand to SEQ ID NO: 844868
auacacauuuguuaaacac

SEQ ID NO: 844870 - RNA, 19 nt, Artificial Sequence
  Description of Artificial Sequence: Synthetic oligonucleotide
  Sense strand starting at position 2711 of SEQ ID NO: 588145
uguauuaaguaccuaaucu

SEQ ID NO: 844871 - RNA, 19 nt, Artificial Sequence
  Description of Artificial Sequence: Synthetic oligonucleotide
  Antisense strand to SEQ ID NO: 844870
agauuagguacuuaauaca

SEQ ID NO: 844872 - RNA, 19 nt, Artificial Sequence
  Description of Artificial Sequence: Synthetic oligonucleotide
  Sense strand starting at position 2715 of SEQ ID NO: 588145
uuaaguaccuaaucuguau

SEQ ID NO: 844873 - RNA, 19 nt, Artificial Sequence
  Description of Artificial Sequence: Synthetic oligonucleotide
  Antisense strand to SEQ ID NO: 844872
auacagauuagguacuuaa

SEQ ID NO: 844874 - RNA, 19 nt, Artificial Sequence
  Description of Artificial Sequence: Synthetic oligonucleotide
  Sense strand starting at position 2719 of SEQ ID NO: 588145
guaccuaaucuguaucugu

SEQ ID NO: 844875 - RNA, 19 nt, Artificial Sequence
  Description of Artificial Sequence: Synthetic oligonucleotide
  Antisense strand to SEQ ID NO: 844874
acagauacagauuagguac

SEQ ID NO: 844876 - RNA, 19 nt, Artificial Sequence
  Description of Artificial Sequence: Synthetic oligonucleotide
  Sense strand starting at position 2841 of SEQ ID NO: 588145
augcauuacuuuguaguua

SEQ ID NO: 844877 - RNA, 19 nt, Artificial Sequence
  Description of Artificial Sequence: Synthetic oligonucleotide
  Antisense strand to SEQ ID NO: 844876
uaacuacaaaguaaugcau

SEQ ID NO: 844878 - RNA, 19 nt, Artificial Sequence
  Description of Artificial Sequence: Synthetic oligonucleotide
  Sense strand starting at position 2920 of SEQ ID NO: 588145
uuuggacuccuaggaaucu

SEQ ID NO: 844879 - RNA, 19 nt, Artificial Sequence
  Description of Artificial Sequence: Synthetic oligonucleotide
  Antisense strand to SEQ ID NO: 844878
agauuccuaggaguccaaa

SEQ ID NO: 844880 - RNA, 19 nt, Artificial Sequence
  Description of Artificial Sequence: Synthetic oligonucleotide
  Sense strand starting at position 3028 of SEQ ID NO: 588145
aggaauaaugcugggcuua

SEQ ID NO: 844881 - RNA, 19 nt, Artificial Sequence
  Description of Artificial Sequence: Synthetic oligonucleotide
  Antisense strand to SEQ ID NO: 844880
uaagcccagcauuauuccu

SEQ ID NO: 844882 - RNA, 19 nt, Artificial Sequence
  Description of Artificial Sequence: Synthetic oligonucleotide
  Sense strand starting at position 3029 of SEQ ID NO: 588145
ggaauaaugcugggcuuag

SEQ ID NO: 844883 - RNA, 19 nt, Artificial Sequence
  Description of Artificial Sequence: Synthetic oligonucleotide
  Antisense strand to SEQ ID NO: 844882
cuaagcccagcauuauucc

SEQ ID NO: 844884 - RNA, 19 nt, Artificial Sequence
  Description of Artificial Sequence: Synthetic oligonucleotide
  Sense strand starting at position 3030 of SEQ ID NO: 588145
gaauaaugcugggcuuaga

SEQ ID NO: 844885 - RNA, 19 nt, Artificial Sequence
  Description of Artificial Sequence: Synthetic oligonucleotide
  Antisense strand to SEQ ID NO: 844884
ucuaagcccagcauuauuc

SEQ ID NO: 844886 - RNA, 19 nt, Artificial Sequence
  Description of Artificial Sequence: Synthetic oligonucleotide
  Sense strand starting at position 3062 of SEQ ID NO: 588145
acuugaagggcuuggauga

SEQ ID NO: 844887 - RNA, 19 nt, Artificial Sequence
  Description of Artificial Sequence: Synthetic oligonucleotide
  Antisense strand to SEQ ID NO: 844886
ucauccaagcccuucaagu

SEQ ID NO: 844888 - RNA, 19 nt, Artificial Sequence
  Description of Artificial Sequence: Synthetic oligonucleotide
  Sense strand starting at position 3127 of SEQ ID NO: 588145
aaggaaacugguggugaua

SEQ ID NO: 844889 - RNA, 19 nt, Artificial Sequence
  Description of Artificial Sequence: Synthetic oligonucleotide
  Antisense strand to SEQ ID NO: 844888
uaucaccaccaguuuccuu

SEQ ID NO: 844890 - RNA, 19 nt, Artificial Sequence
  Description of Artificial Sequence: Synthetic oligonucleotide
  Sense strand starting at position 3152 of SEQ ID NO: 588145
agguaaaggacugguuaca

SEQ ID NO: 844891 - RNA, 19 nt, Artificial Sequence
  Description of Artificial Sequence: Synthetic oligonucleotide
  Antisense strand to SEQ ID NO: 844890
uguaaccaguccuuuaccu

SEQ ID NO: 844892 - RNA, 19 nt, Artificial Sequence
  Description of Artificial Sequence: Synthetic oligonucleotide
  Sense strand starting at position 3173 of SEQ ID NO: 588145
gucucaagugaauguggga

SEQ ID NO: 844893 - RNA, 19 nt, Artificial Sequence
  Description of Artificial Sequence: Synthetic oligonucleotide
  Antisense strand to SEQ ID NO: 844892
ucccacauucacuugagac

SEQ ID NO: 844894 - RNA, 19 nt, Artificial Sequence
  Description of Artificial Sequence: Synthetic oligonucleotide
  Sense strand starting at position 3229 of SEQ ID NO: 588145
agauaaucccaugguaauu

SEQ ID NO: 844895 - RNA, 19 nt, Artificial Sequence
  Description of Artificial Sequence: Synthetic oligonucleotide
  Antisense strand to SEQ ID NO: 844894
aauuaccaugggauuaucu

SEQ ID NO: 844896 - RNA, 19 nt, Artificial Sequence
  Description of Artificial Sequence: Synthetic oligonucleotide
  Sense strand starting at position 3307 of SEQ ID NO: 588145
auggguguguuugugaaug

SEQ ID NO: 844897 - RNA, 19 nt, Artificial Sequence
  Description of Artificial Sequence: Synthetic oligonucleotide
  Antisense strand to SEQ ID NO: 844896
cauucacaaacacacccau

SEQ ID NO: 844898 - RNA, 19 nt, Artificial Sequence
  Description of Artificial Sequence: Synthetic oligonucleotide
  Sense strand starting at position 3319 of SEQ ID NO: 588145
gugaaugcugccagugugu

SEQ ID NO: 844899 - RNA, 19 nt, Artificial Sequence
  Description of Artificial Sequence: Synthetic oligonucleotide
  Antisense strand to SEQ ID NO: 844898
acacacuggcagcauucac

SEQ ID NO: 844900 - RNA, 19 nt, Artificial Sequence
  Description of Artificial Sequence: Synthetic oligonucleotide
  Sense strand starting at position 3578 of SEQ ID NO: 588145
ggaggagguucagaggaua

SEQ ID NO: 844901 - RNA, 19 nt, Artificial Sequence
  Description of Artificial Sequence: Synthetic oligonucleotide
  Antisense strand to SEQ ID NO: 844900
uauccucugaaccuccucc

SEQ ID NO: 844902 - RNA, 19 nt, Artificial Sequence
  Description of Artificial Sequence: Synthetic oligonucleotide
  Sense strand starting at position 112 of SEQ ID NO: 588146
ccacccucaugggaaauuu

SEQ ID NO: 844903 - RNA, 19 nt, Artificial Sequence
  Description of Artificial Sequence: Synthetic oligonucleotide
  Antisense strand to SEQ ID NO: 844902
aaauuucccaugagggugg

SEQ ID NO: 844904 - RNA, 19 nt, Artificial Sequence
  Description of Artificial Sequence: Synthetic oligonucleotide
  Sense strand starting at position 345 of SEQ ID NO: 588146
cucaucuucuggucugauu

SEQ ID NO: 844905 - RNA, 19 nt, Artificial Sequence
  Description of Artificial Sequence: Synthetic oligonucleotide
  Antisense strand to SEQ ID NO: 844904
aaucagaccagaagaugag

SEQ ID NO: 844906 - RNA, 19 nt, Artificial Sequence
  Description of Artificial Sequence: Synthetic oligonucleotide
  Sense strand starting at position 504 of SEQ ID NO: 588146
gcaucaacucccgaauacu

SEQ ID NO: 844907 - RNA, 19 nt, Artificial Sequence
  Description of Artificial Sequence: Synthetic oligonucleotide
  Antisense strand to SEQ ID NO: 844906
aguauucgggaguugaugc

SEQ ID NO: 844908 - RNA, 19 nt, Artificial Sequence
  Description of Artificial Sequence: Synthetic oligonucleotide
  Sense strand starting at position 513 of SEQ ID NO: 588146
cccgaauacuagucaagag

SEQ ID NO: 844909 - RNA, 19 nt, Artificial Sequence
  Description of Artificial Sequence: Synthetic oligonucleotide
  Antisense strand to SEQ ID NO: 844908
cucuugacuaguauucggg

SEQ ID NO: 844910 - RNA, 19 nt, Artificial Sequence
  Description of Artificial Sequence: Synthetic oligonucleotide
  Sense strand starting at position 557 of SEQ ID NO: 588146
gaguaacaguccuugagua

SEQ ID NO: 844911 - RNA, 19 nt, Artificial Sequence
  Description of Artificial Sequence: Synthetic oligonucleotide
  Antisense strand to SEQ ID NO: 844910
uacucaaggacuguuacuc

SEQ ID NO: 844912 - RNA, 19 nt, Artificial Sequence
  Description of Artificial Sequence: Synthetic oligonucleotide
  Sense strand starting at position 558 of SEQ ID NO: 588146
aguaacaguccuugaguaa

SEQ ID NO: 844913 - RNA, 19 nt, Artificial Sequence
  Description of Artificial Sequence: Synthetic oligonucleotide
  Antisense strand to SEQ ID NO: 844912
uuacucaaggacuguuacu

SEQ ID NO: 844914 - RNA, 19 nt, Artificial Sequence
  Description of Artificial Sequence: Synthetic oligonucleotide
  Sense strand starting at position 559 of SEQ ID NO: 588146
guaacaguccuugaguaac

SEQ ID NO: 844915 - RNA, 19 nt, Artificial Sequence
  Description of Artificial Sequence: Synthetic oligonucleotide
  Antisense strand to SEQ ID NO: 844914
guuacucaaggacuguuac

SEQ ID NO: 844916 - RNA, 19 nt, Artificial Sequence
  Description of Artificial Sequence: Synthetic oligonucleotide
  Sense strand starting at position 608 of SEQ ID NO: 588146
ccauaagaauccucagagu

SEQ ID NO: 844917 - RNA, 19 nt, Artificial Sequence
  Description of Artificial Sequence: Synthetic oligonucleotide
  Antisense strand to SEQ ID NO: 844916
acucugaggauucuuaugg

SEQ ID NO: 844918 - RNA, 19 nt, Artificial Sequence
  Description of Artificial Sequence: Synthetic oligonucleotide
  Sense strand starting at position 712 of SEQ ID NO: 588146
agauguuauuacuuagauc

SEQ ID NO: 844919 - RNA, 19 nt, Artificial Sequence
  Description of Artificial Sequence: Synthetic oligonucleotide
  Antisense strand to SEQ ID NO: 844918
gaucuaaguaauaacaucu

SEQ ID NO: 844920 - RNA, 19 nt, Artificial Sequence
  Description of Artificial Sequence: Synthetic oligonucleotide
  Sense strand starting at position 787 of SEQ ID NO: 588146
agaacagagcccugaguaa

SEQ ID NO: 844921 - RNA, 19 nt, Artificial Sequence
  Description of Artificial Sequence: Synthetic oligonucleotide
  Antisense strand to SEQ ID NO: 844920
uuacucagggcucuguucu

SEQ ID NO: 844922 - RNA, 19 nt, Artificial Sequence
  Description of Artificial Sequence: Synthetic oligonucleotide
  Sense strand starting at position 817 of SEQ ID NO: 588146
auacuaaugccagaguacu

SEQ ID NO: 844923 - RNA, 19 nt, Artificial Sequence
  Description of Artificial Sequence: Synthetic oligonucleotide
  Antisense strand to SEQ ID NO: 844922
aguacucuggcauuaguau

SEQ ID NO: 844924 - RNA, 19 nt, Artificial Sequence
  Description of Artificial Sequence: Synthetic oligonucleotide
  Sense strand starting at position 904 of SEQ ID NO: 588146
gagacacagcccuguguaa

SEQ ID NO: 844925 - RNA, 19 nt, Artificial Sequence
  Description of Artificial Sequence: Synthetic oligonucleotide
  Antisense strand to SEQ ID NO: 844924
uuacacagggcugugucuc

SEQ ID NO: 844926 - RNA, 19 nt, Artificial Sequence
  Description of Artificial Sequence: Synthetic oligonucleotide
  Sense strand starting at position 906 of SEQ ID NO: 588146
gacacagcccuguguaaca

SEQ ID NO: 844927 - RNA, 19 nt, Artificial Sequence
  Description of Artificial Sequence: Synthetic oligonucleotide
  Antisense strand to SEQ ID NO: 844926
uguuacacagggcuguguc

SEQ ID NO: 844928 - RNA, 19 nt, Artificial Sequence
  Description of Artificial Sequence: Synthetic oligonucleotide
  Sense strand starting at position 931 of SEQ ID NO: 588146
uagugacagccuugaguag

SEQ ID NO: 844929 - RNA, 19 nt, Artificial Sequence
  Description of Artificial Sequence: Synthetic oligonucleotide
  Antisense strand to SEQ ID NO: 844928
cuacucaaggcugucacua

SEQ ID NO: 844930 - RNA, 19 nt, Artificial Sequence
  Description of Artificial Sequence: Synthetic oligonucleotide
  Sense strand starting at position 943 of SEQ ID NO: 588146
ugaguaguguccuuagaau

SEQ ID NO: 844931 - RNA, 19 nt, Artificial Sequence
  Description of Artificial Sequence: Synthetic oligonucleotide
  Antisense strand to SEQ ID NO: 844930
auucuaaggacacuacuca

SEQ ID NO: 844932 - RNA, 19 nt, Artificial Sequence
  Description of Artificial Sequence: Synthetic oligonucleotide
  Sense strand starting at position 998 of SEQ ID NO: 588146
agauuaaggcccugugaau

SEQ ID NO: 844933 - RNA, 19 nt, Artificial Sequence
  Description of Artificial Sequence: Synthetic oligonucleotide
  Antisense strand to SEQ ID NO: 844932
auucacagggccuuaaucu

SEQ ID NO: 844934 - RNA, 19 nt, Artificial Sequence
  Description of Artificial Sequence: Synthetic oligonucleotide
  Sense strand starting at position 1017 of SEQ ID NO: 588146
gaagucuugucauucugag

SEQ ID NO: 844935 - RNA, 19 nt, Artificial Sequence
  Description of Artificial Sequence: Synthetic oligonucleotide
  Antisense strand to SEQ ID NO: 844934
cucagaaugacaagacuuc

SEQ ID NO: 844936 - RNA, 19 nt, Artificial Sequence
  Description of Artificial Sequence: Synthetic oligonucleotide
  Sense strand starting at position 1040 of SEQ ID NO: 588146
ggaggagcccuuuagucau

SEQ ID NO: 844937 - RNA, 19 nt, Artificial Sequence
  Description of Artificial Sequence: Synthetic oligonucleotide
  Antisense strand to SEQ ID NO: 844936
augacuaaagggcuccucc

SEQ ID NO: 844938 - RNA, 19 nt, Artificial Sequence
  Description of Artificial Sequence: Synthetic oligonucleotide
  Sense strand starting at position 1043 of SEQ ID NO: 588146
ggagcccuuuagucauacu

SEQ ID NO: 844939 - RNA, 19 nt, Artificial Sequence
  Description of Artificial Sequence: Synthetic oligonucleotide
  Antisense strand to SEQ ID NO: 844938
aguaugacuaaagggcucc

SEQ ID NO: 844940 - RNA, 19 nt, Artificial Sequence
  Description of Artificial Sequence: Synthetic oligonucleotide
  Sense strand starting at position 1088 of SEQ ID NO: 588146
ggaacuaucauccguggaa

SEQ ID NO: 844941 - RNA, 19 nt, Artificial Sequence
  Description of Artificial Sequence: Synthetic oligonucleotide
  Antisense strand to SEQ ID NO: 844940
uuccacggaugauaguucc

SEQ ID NO: 844942 - RNA, 19 nt, Artificial Sequence
  Description of Artificial Sequence: Synthetic oligonucleotide
  Sense strand starting at position 1089 of SEQ ID NO: 588146
gaacuaucauccguggaac

SEQ ID NO: 844943 - RNA, 19 nt, Artificial Sequence
  Description of Artificial Sequence: Synthetic oligonucleotide
  Antisense strand to SEQ ID NO: 844942
guuccacggaugauaguuc

SEQ ID NO: 844944 - RNA, 19 nt, Artificial Sequence
  Description of Artificial Sequence: Synthetic oligonucleotide
  Sense strand starting at position 1090 of SEQ ID NO: 588146
aacuaucauccguggaacu

SEQ ID NO: 844945 - RNA, 19 nt, Artificial Sequence
  Description of Artificial Sequence: Synthetic oligonucleotide
  Antisense strand to SEQ ID NO: 844944
aguuccacggaugauaguu

SEQ ID NO: 844946 - RNA, 19 nt, Artificial Sequence
  Description of Artificial Sequence: Synthetic oligonucleotide
  Sense strand starting at position 1092 of SEQ ID NO: 588146
cuaucauccguggaacuca

SEQ ID NO: 844947 - RNA, 19 nt, Artificial Sequence
  Description of Artificial Sequence: Synthetic oligonucleotide
  Antisense strand to SEQ ID NO: 844946
ugaguuccacggaugauag

SEQ ID NO: 844948 - RNA, 19 nt, Artificial Sequence
  Description of Artificial Sequence: Synthetic oligonucleotide
  Sense strand starting at position 1181 of SEQ ID NO: 588146
cugccaagugagugauaac

SEQ ID NO: 844949 - RNA, 19 nt, Artificial Sequence
  Description of Artificial Sequence: Synthetic oligonucleotide
  Antisense strand to SEQ ID NO: 844948
guuaucacucacuuggcag

SEQ ID NO: 844950 - RNA, 19 nt, Artificial Sequence
  Description of Artificial Sequence: Synthetic oligonucleotide
  Sense strand starting at position 1242 of SEQ ID NO: 588146
cccacuggucacuggaaua

SEQ ID NO: 844951 - RNA, 19 nt, Artificial Sequence
  Description of Artificial Sequence: Synthetic oligonucleotide
  Antisense strand to SEQ ID NO: 844950
uauuccagugaccaguggg

SEQ ID NO: 844952 - RNA, 19 nt, Artificial Sequence
  Description of Artificial Sequence: Synthetic oligonucleotide
  Sense strand starting at position 1255 of SEQ ID NO: 588146
ggaauaugaccuugugacu

SEQ ID NO: 844953 - RNA, 19 nt, Artificial Sequence
  Description of Artificial Sequence: Synthetic oligonucleotide
  Antisense strand to SEQ ID NO: 844952
agucacaaggucauauucc

SEQ ID NO: 844954 - RNA, 19 nt, Artificial Sequence
  Description of Artificial Sequence: Synthetic oligonucleotide
  Sense strand starting at position 1267 of SEQ ID NO: 588146
ugugacuugaugugugaga

SEQ ID NO: 844955 - RNA, 19 nt, Artificial Sequence
  Description of Artificial Sequence: Synthetic oligonucleotide
  Antisense strand to SEQ ID NO: 844954
ucucacacaucaagucaca

SEQ ID NO: 844956 - RNA, 19 nt, Artificial Sequence
  Description of Artificial Sequence: Synthetic oligonucleotide
  Sense strand starting at position 1268 of SEQ ID NO: 588146
gugacuugaugugugagaa

SEQ ID NO: 844957 - RNA, 19 nt, Artificial Sequence
  Description of Artificial Sequence: Synthetic oligonucleotide
  Antisense strand to SEQ ID NO: 844956
uucucacacaucaagucac

SEQ ID NO: 844958 - RNA, 19 nt, Artificial Sequence
  Description of Artificial Sequence: Synthetic oligonucleotide
  Sense strand starting at position 1269 of SEQ ID NO: 588146
ugacuugaugugugagaag

SEQ ID NO: 844959 - RNA, 19 nt, Artificial Sequence
  Description of Artificial Sequence: Synthetic oligonucleotide
  Antisense strand to SEQ ID NO: 844958
cuucucacacaucaaguca

SEQ ID NO: 844960 - RNA, 19 nt, Artificial Sequence
  Description of Artificial Sequence: Synthetic oligonucleotide
  Sense strand starting at position 1675 of SEQ ID NO: 588146
gguccuaccugcuugaauu

SEQ ID NO: 844961 - RNA, 19 nt, Artificial Sequence
  Description of Artificial Sequence: Synthetic oligonucleotide
  Antisense strand to SEQ ID NO: 844960
aauucaagcagguaggacc

SEQ ID NO: 844962 - RNA, 19 nt, Artificial Sequence
  Description of Artificial Sequence: Synthetic oligonucleotide
  Sense strand starting at position 1676 of SEQ ID NO: 588146
guccuaccugcuugaauug

SEQ ID NO: 844963 - RNA, 19 nt, Artificial Sequence
  Description of Artificial Sequence: Synthetic oligonucleotide
  Antisense strand to SEQ ID NO: 844962
caauucaagcagguaggac

SEQ ID NO: 844964 - RNA, 19 nt, Artificial Sequence
  Description of Artificial Sequence: Synthetic oligonucleotide
  Sense strand starting at position 1686 of SEQ ID NO: 588146
cuugaauuguuccucguag

SEQ ID NO: 844965 - RNA, 19 nt, Artificial Sequence
  Description of Artificial Sequence: Synthetic oligonucleotide
  Antisense strand to SEQ ID NO: 844964
cuacgaggaacaauucaag

SEQ ID NO: 844966 - RNA, 19 nt, Artificial Sequence
  Description of Artificial Sequence: Synthetic oligonucleotide
  Sense strand starting at position 2134 of SEQ ID NO: 588146
ggagguggucauggauuca

SEQ ID NO: 844967 - RNA, 19 nt, Artificial Sequence
  Description of Artificial Sequence: Synthetic oligonucleotide
  Antisense strand to SEQ ID NO: 844966
ugaauccaugaccaccucc

SEQ ID NO: 844968 - RNA, 19 nt, Artificial Sequence
  Description of Artificial Sequence: Synthetic oligonucleotide
  Sense strand starting at position 2189 of SEQ ID NO: 588146
auggcuuucccagagguga

SEQ ID NO: 844969 - RNA, 19 nt, Artificial Sequence
  Description of Artificial Sequence: Synthetic oligonucleotide
  Antisense strand to SEQ ID NO: 844968
ucaccucugggaaagccau

SEQ ID NO: 844970 - RNA, 19 nt, Artificial Sequence
  Description of Artificial Sequence: Synthetic oligonucleotide
  Sense strand starting at position 2191 of SEQ ID NO: 588146
ggcuuucccagaggugaac

SEQ ID NO: 844971 - RNA, 19 nt, Artificial Sequence
  Description of Artificial Sequence: Synthetic oligonucleotide
  Antisense strand to SEQ ID NO: 844970
guucaccucugggaaagcc

SEQ ID NO: 844972 - RNA, 19 nt, Artificial Sequence
  Description of Artificial Sequence: Synthetic oligonucleotide
  Sense strand starting at position 2239 of SEQ ID NO: 588146
uggccauugacugaggacu

SEQ ID NO: 844973 - RNA, 19 nt, Artificial Sequence
  Description of Artificial Sequence: Synthetic oligonucleotide
  Antisense strand to SEQ ID NO: 844972
aguccucagucaauggcca

SEQ ID NO: 844974 - RNA, 19 nt, Artificial Sequence
  Description of Artificial Sequence: Synthetic oligonucleotide
  Sense strand starting at position 3397 of SEQ ID NO: 588146
gugacauggucaccacagu

SEQ ID NO: 844975 - RNA, 19 nt, Artificial Sequence
  Description of Artificial Sequence: Synthetic oligonucleotide
  Antisense strand to SEQ ID NO: 844974
acuguggugaccaugucac

SEQ ID NO: 844976 - RNA, 19 nt, Artificial Sequence
  Description of Artificial Sequence: Synthetic oligonucleotide
  Sense strand starting at position 3447 of SEQ ID NO: 588146
gggaaucccucugcaagau

SEQ ID NO: 844977 - RNA, 19 nt, Artificial Sequence
  Description of Artificial Sequence: Synthetic oligonucleotide
  Antisense strand to SEQ ID NO: 844976
aucuugcagagggauuccc

SEQ ID NO: 844978 - RNA, 19 nt, Artificial Sequence
  Description of Artificial Sequence: Synthetic oligonucleotide
  Sense strand starting at position 3566 of SEQ ID NO: 588146
gcgguuugcacacaugagu

SEQ ID NO: 844979 - RNA, 19 nt, Artificial Sequence
  Description of Artificial Sequence: Synthetic oligonucleotide
  Antisense strand to SEQ ID NO: 844978
acucaugugugcaaaccgc

SEQ ID NO: 844980 - RNA, 19 nt, Artificial Sequence
  Description of Artificial Sequence: Synthetic oligonucleotide
  Sense strand starting at position 3869 of SEQ ID NO: 588146
gcuggaauuagcugggauu

SEQ ID NO: 844981 - RNA, 19 nt, Artificial Sequence
  Description of Artificial Sequence: Synthetic oligonucleotide
  Antisense strand to SEQ ID NO: 844980
aaucccagcuaauuccagc

SEQ ID NO: 844982 - RNA, 19 nt, Artificial Sequence
  Description of Artificial Sequence: Synthetic oligonucleotide
  Sense strand starting at position 72 of SEQ ID NO: 588147
cccuguccucaauggucua

SEQ ID NO: 844983 - RNA, 19 nt, Artificial Sequence
  Description of Artificial Sequence: Synthetic oligonucleotide
  Antisense strand to SEQ ID NO: 844982
uagaccauugaggacaggg

SEQ ID NO: 844984 - RNA, 19 nt, Artificial Sequence
  Description of Artificial Sequence: Synthetic oligonucleotide
  Sense strand starting at position 75 of SEQ ID NO: 588147
uguccucaauggucuaaua

SEQ ID NO: 844985 - RNA, 19 nt, Artificial Sequence
  Description of Artificial Sequence: Synthetic oligonucleotide
  Antisense strand to SEQ ID NO: 844984
uauuagaccauugaggaca

SEQ ID NO: 844986 - RNA, 19 nt, Artificial Sequence
  Description of Artificial Sequence: Synthetic oligonucleotide
  Sense strand starting at position 85 of SEQ ID NO: 588147
ggucuaauauaaguccgau

SEQ ID NO: 844987 - RNA, 19 nt, Artificial Sequence
  Description of Artificial Sequence: Synthetic oligonucleotide
  Antisense strand to SEQ ID NO: 844986
aucggacuuauauuagacc

SEQ ID NO: 844988 - RNA, 19 nt, Artificial Sequence
  Description of Artificial Sequence: Synthetic oligonucleotide
  Sense strand starting at position 88 of SEQ ID NO: 588147
cuaauauaaguccgauucu

SEQ ID NO: 844989 - RNA, 19 nt, Artificial Sequence
  Description of Artificial Sequence: Synthetic oligonucleotide
  Antisense strand to SEQ ID NO: 844988
agaaucggacuuauauuag

SEQ ID NO: 844990 - RNA, 19 nt, Artificial Sequence
  Description of Artificial Sequence: Synthetic oligonucleotide
  Sense strand starting at position 97 of SEQ ID NO: 588147
guccgauucuugguacaug

SEQ ID NO: 844991 - RNA, 19 nt, Artificial Sequence
  Description of Artificial Sequence: Synthetic oligonucleotide
  Antisense strand to SEQ ID NO: 844990
cauguaccaagaaucggac

SEQ ID NO: 844992 - RNA, 19 nt, Artificial Sequence
  Description of Artificial Sequence: Synthetic oligonucleotide
  Sense strand starting at position 100 of SEQ ID NO: 588147
cgauucuugguacaugaua

SEQ ID NO: 844993 - RNA, 19 nt, Artificial Sequence
  Description of Artificial Sequence: Synthetic oligonucleotide
  Antisense strand to SEQ ID NO: 844992
uaucauguaccaagaaucg

SEQ ID NO: 844994 - RNA, 19 nt, Artificial Sequence
  Description of Artificial Sequence: Synthetic oligonucleotide
  Sense strand starting at position 162 of SEQ ID NO: 588147
cguauuugccaggguuuca

SEQ ID NO: 844995 - RNA, 19 nt, Artificial Sequence
  Description of Artificial Sequence: Synthetic oligonucleotide
  Antisense strand to SEQ ID NO: 844994
ugaaacccuggcaaauacg

SEQ ID NO: 844996 - RNA, 19 nt, Artificial Sequence
  Description of Artificial Sequence: Synthetic oligonucleotide
  Sense strand starting at position 221 of SEQ ID NO: 588147
uggagcacucuccauggua

SEQ ID NO: 844997 - RNA, 19 nt, Artificial Sequence
  Description of Artificial Sequence: Synthetic oligonucleotide
  Antisense strand to SEQ ID NO: 844996
uaccauggagagugcucca

SEQ ID NO: 844998 - RNA, 19 nt, Artificial Sequence
  Description of Artificial Sequence: Synthetic oligonucleotide
  Sense strand starting at position 223 of SEQ ID NO: 588147
gagcacucuccaugguaac

SEQ ID NO: 844999 - RNA, 19 nt, Artificial Sequence
  Description of Artificial Sequence: Synthetic oligonucleotide
  Antisense strand to SEQ ID NO: 844998
guuaccauggagagugcuc

SEQ ID NO: 845000 - RNA, 19 nt, Artificial Sequence
  Description of Artificial Sequence: Synthetic oligonucleotide
  Sense strand starting at position 224 of SEQ ID NO: 588147
agcacucuccaugguaaca

SEQ ID NO: 845001 - RNA, 19 nt, Artificial Sequence
  Description of Artificial Sequence: Synthetic oligonucleotide
  Antisense strand to SEQ ID NO: 845000
uguuaccauggagagugcu

SEQ ID NO: 845002 - RNA, 19 nt, Artificial Sequence
  Description of Artificial Sequence: Synthetic oligonucleotide
  Sense strand starting at position 429 of SEQ ID NO: 588147
augagaguccugggccaaa

SEQ ID NO: 845003 - RNA, 19 nt, Artificial Sequence
  Description of Artificial Sequence: Synthetic oligonucleotide
  Antisense strand to SEQ ID NO: 845002
uuuggcccaggacucucau

SEQ ID NO: 845004 - RNA, 19 nt, Artificial Sequence
  Description of Artificial Sequence: Synthetic oligonucleotide
  Sense strand starting at position 474 of SEQ ID NO: 588147
acugacuguccaugaacua

SEQ ID NO: 845005 - RNA, 19 nt, Artificial Sequence
  Description of Artificial Sequence: Synthetic oligonucleotide
  Antisense strand to SEQ ID NO: 845004
uaguucauggacagucagu

SEQ ID NO: 845006 - RNA, 19 nt, Artificial Sequence
  Description of Artificial Sequence: Synthetic oligonucleotide
  Sense strand starting at position 839 of SEQ ID NO: 588147
aaauccuuccggugagaau

SEQ ID NO: 845007 - RNA, 19 nt, Artificial Sequence
  Description of Artificial Sequence: Synthetic oligonucleotide
  Antisense strand to SEQ ID NO: 845006
auucucaccggaaggauuu

SEQ ID NO: 845008 - RNA, 19 nt, Artificial Sequence
  Description of Artificial Sequence: Synthetic oligonucleotide
  Sense strand starting at position 840 of SEQ ID NO: 588147
aauccuuccggugagaaua

SEQ ID NO: 845009 - RNA, 19 nt, Artificial Sequence
  Description of Artificial Sequence: Synthetic oligonucleotide
  Antisense strand to SEQ ID NO: 845008
uauucucaccggaaggauu

SEQ ID NO: 845010 - RNA, 19 nt, Artificial Sequence
  Description of Artificial Sequence: Synthetic oligonucleotide
  Sense strand starting at position 848 of SEQ ID NO: 588147
cggugagaauaagucaguu

SEQ ID NO: 845011 - RNA, 19 nt, Artificial Sequence
  Description of Artificial Sequence: Synthetic oligonucleotide
  Antisense strand to SEQ ID NO: 845010
aacugacuuauucucaccg

SEQ ID NO: 845012 - RNA, 19 nt, Artificial Sequence
  Description of Artificial Sequence: Synthetic oligonucleotide
  Sense strand starting at position 850 of SEQ ID NO: 588147
gugagaauaagucaguuuc

SEQ ID NO: 845013 - RNA, 19 nt, Artificial Sequence
  Description of Artificial Sequence: Synthetic oligonucleotide
  Antisense strand to SEQ ID NO: 845012
gaaacugacuuauucucac

SEQ ID NO: 845014 - RNA, 19 nt, Artificial Sequence
  Description of Artificial Sequence: Synthetic oligonucleotide
  Sense strand starting at position 852 of SEQ ID NO: 588147
gagaauaagucaguuuccu

SEQ ID NO: 845015 - RNA, 19 nt, Artificial Sequence
  Description of Artificial Sequence: Synthetic oligonucleotide
  Antisense strand to SEQ ID NO: 845014
aggaaacugacuuauucuc

SEQ ID NO: 845016 - RNA, 19 nt, Artificial Sequence
  Description of Artificial Sequence: Synthetic oligonucleotide
  Sense strand starting at position 892 of SEQ ID NO: 588147
caagcaaggcugugacaau

SEQ ID NO: 845017 - RNA, 19 nt, Artificial Sequence
  Description of Artificial Sequence: Synthetic oligonucleotide
  Antisense strand to SEQ ID NO: 845016
auugucacagccuugcuug

SEQ ID NO: 845018 - RNA, 19 nt, Artificial Sequence
  Description of Artificial Sequence: Synthetic oligonucleotide
  Sense strand starting at position 2546 of SEQ ID NO: 588147
aggugacccucuuaaagga

SEQ ID NO: 845019 - RNA, 19 nt, Artificial Sequence
  Description of Artificial Sequence: Synthetic oligonucleotide
  Antisense strand to SEQ ID NO: 845018
uccuuuaagagggucaccu

SEQ ID NO: 845020 - RNA, 19 nt, Artificial Sequence
  Description of Artificial Sequence: Synthetic oligonucleotide
  Sense strand starting at position 2571 of SEQ ID NO: 588147
ggcuuuaaauacguuuagu

SEQ ID NO: 845021 - RNA, 19 nt, Artificial Sequence
  Description of Artificial Sequence: Synthetic oligonucleotide
  Antisense strand to SEQ ID NO: 845020
acuaaacguauuuaaagcc

SEQ ID NO: 845022 - RNA, 19 nt, Artificial Sequence
  Description of Artificial Sequence: Synthetic oligonucleotide
  Sense strand starting at position 2611 of SEQ ID NO: 588147
cguugaagacguugugacu

SEQ ID NO: 845023 - RNA, 19 nt, Artificial Sequence
  Description of Artificial Sequence: Synthetic oligonucleotide
  Antisense strand to SEQ ID NO: 845022
agucacaacgucuucaacg

SEQ ID NO: 845024 - RNA, 19 nt, Artificial Sequence
  Description of Artificial Sequence: Synthetic oligonucleotide
  Sense strand starting at position 2618 of SEQ ID NO: 588147
gacguugugacucgaggga

SEQ ID NO: 845025 - RNA, 19 nt, Artificial Sequence
  Description of Artificial Sequence: Synthetic oligonucleotide
  Antisense strand to SEQ ID NO: 845024
ucccucgagucacaacguc

SEQ ID NO: 845026 - RNA, 19 nt, Artificial Sequence
  Description of Artificial Sequence: Synthetic oligonucleotide
  Sense strand starting at position 2619 of SEQ ID NO: 588147
acguugugacucgagggau

SEQ ID NO: 845027 - RNA, 19 nt, Artificial Sequence
  Description of Artificial Sequence: Synthetic oligonucleotide
  Antisense strand to SEQ ID NO: 845026
aucccucgagucacaacgu

SEQ ID NO: 845028 - RNA, 19 nt, Artificial Sequence
  Description of Artificial Sequence: Synthetic oligonucleotide
  Sense strand starting at position 2622 of SEQ ID NO: 588147
uugugacucgagggauucu

SEQ ID NO: 845029 - RNA, 19 nt, Artificial Sequence
  Description of Artificial Sequence: Synthetic oligonucleotide
  Antisense strand to SEQ ID NO: 845028
agaaucccucgagucacaa

SEQ ID NO: 845030 - RNA, 19 nt, Artificial Sequence
  Description of Artificial Sequence: Synthetic oligonucleotide
  Sense strand starting at position 2858 of SEQ ID NO: 588147
ggguucuguuaauugaucu

SEQ ID NO: 845031 - RNA, 19 nt, Artificial Sequence
  Description of Artificial Sequence: Synthetic oligonucleotide
  Antisense strand to SEQ ID NO: 845030
agaucaauuaacagaaccc

SEQ ID NO: 845032 - RNA, 19 nt, Artificial Sequence
  Description of Artificial Sequence: Synthetic oligonucleotide
  Sense strand starting at position 2871 of SEQ ID NO: 588147
ugaucuuagccuuagggua

SEQ ID NO: 845033 - RNA, 19 nt, Artificial Sequence
  Description of Artificial Sequence: Synthetic oligonucleotide
  Antisense strand to SEQ ID NO: 845032
uacccuaaggcuaagauca

SEQ ID NO: 845034 - RNA, 19 nt, Artificial Sequence
  Description of Artificial Sequence: Synthetic oligonucleotide
  Sense strand starting at position 2876 of SEQ ID NO: 588147
uuagccuuaggguaaguaa

SEQ ID NO: 845035 - RNA, 19 nt, Artificial Sequence
  Description of Artificial Sequence: Synthetic oligonucleotide
  Antisense strand to SEQ ID NO: 845034
uuacuuacccuaaggcuaa

SEQ ID NO: 845036 - RNA, 19 nt, Artificial Sequence
  Description of Artificial Sequence: Synthetic oligonucleotide
  Sense strand starting at position 2959 of SEQ ID NO: 588147
gucaguaguuggaauguga

SEQ ID NO: 845037 - RNA, 19 nt, Artificial Sequence
  Description of Artificial Sequence: Synthetic oligonucleotide
  Antisense strand to SEQ ID NO: 845036
ucacauuccaacuacugac

SEQ ID NO: 845038 - RNA, 19 nt, Artificial Sequence
  Description of Artificial Sequence: Synthetic oligonucleotide
  Sense strand starting at position 3003 of SEQ ID NO: 588147
cucauugaacugugucuaa

SEQ ID NO: 845039 - RNA, 19 nt, Artificial Sequence
  Description of Artificial Sequence: Synthetic oligonucleotide
  Antisense strand to SEQ ID NO: 845038
uuagacacaguucaaugag

SEQ ID NO: 845040 - RNA, 19 nt, Artificial Sequence
  Description of Artificial Sequence: Synthetic oligonucleotide
  Sense strand starting at position 3006 of SEQ ID NO: 588147
auugaacugugucuaaaga

SEQ ID NO: 845041 - RNA, 19 nt, Artificial Sequence
  Description of Artificial Sequence: Synthetic oligonucleotide
  Antisense strand to SEQ ID NO: 845040
ucuuuagacacaguucaau

SEQ ID NO: 845042 - RNA, 19 nt, Artificial Sequence
  Description of Artificial Sequence: Synthetic oligonucleotide
  Sense strand starting at position 3007 of SEQ ID NO: 588147
uugaacugugucuaaagau

SEQ ID NO: 845043 - RNA, 19 nt, Artificial Sequence
  Description of Artificial Sequence: Synthetic oligonucleotide
  Antisense strand to SEQ ID NO: 845042
aucuuuagacacaguucaa

SEQ ID NO: 845044 - RNA, 19 nt, Artificial Sequence
  Description of Artificial Sequence: Synthetic oligonucleotide
  Sense strand starting at position 3054 of SEQ ID NO: 588147
accuuaucuucggugguaa

SEQ ID NO: 845045 - RNA, 19 nt, Artificial Sequence
  Description of Artificial Sequence: Synthetic oligonucleotide
  Antisense strand to SEQ ID NO: 845044
uuaccaccgaagauaaggu

SEQ ID NO: 845046 - RNA, 19 nt, Artificial Sequence
  Description of Artificial Sequence: Synthetic oligonucleotide
  Sense strand starting at position 3055 of SEQ ID NO: 588147
ccuuaucuucggugguaag

SEQ ID NO: 845047 - RNA, 19 nt, Artificial Sequence
  Description of Artificial Sequence: Synthetic oligonucleotide
  Antisense strand to SEQ ID NO: 845046
cuuaccaccgaagauaagg

SEQ ID NO: 845048 - RNA, 19 nt, Artificial Sequence
  Description of Artificial Sequence: Synthetic oligonucleotide
  Sense strand starting at position 3105 of SEQ ID NO: 588147
ugaagaagucucugccugu

SEQ ID NO: 845049 - RNA, 19 nt, Artificial Sequence
  Description of Artificial Sequence: Synthetic oligonucleotide
  Antisense strand to SEQ ID NO: 845048
acaggcagagacuucuuca

SEQ ID NO: 845050 - RNA, 19 nt, Artificial Sequence
  Description of Artificial Sequence: Synthetic oligonucleotide
  Sense strand starting at position 3106 of SEQ ID NO: 588147
gaagaagucucugccugua

SEQ ID NO: 845051 - RNA, 19 nt, Artificial Sequence
  Description of Artificial Sequence: Synthetic oligonucleotide
  Antisense strand to SEQ ID NO: 845050
uacaggcagagacuucuuc

SEQ ID NO: 845052 - RNA, 19 nt, Artificial Sequence
  Description of Artificial Sequence: Synthetic oligonucleotide
  Sense strand starting at position 3108 of SEQ ID NO: 588147
agaagucucugccuguaau

SEQ ID NO: 845053 - RNA, 19 nt, Artificial Sequence
  Description of Artificial Sequence: Synthetic oligonucleotide
  Antisense strand to SEQ ID NO: 845052
auuacaggcagagacuucu

SEQ ID NO: 845054 - RNA, 19 nt, Artificial Sequence
  Description of Artificial Sequence: Synthetic oligonucleotide
  Sense strand starting at position 3109 of SEQ ID NO: 588147
gaagucucugccuguaauc

SEQ ID NO: 845055 - RNA, 19 nt, Artificial Sequence
  Description of Artificial Sequence: Synthetic oligonucleotide
  Antisense strand to SEQ ID NO: 845054
gauuacaggcagagacuuc

SEQ ID NO: 845056 - RNA, 19 nt, Artificial Sequence
  Description of Artificial Sequence: Synthetic oligonucleotide
  Sense strand starting at position 3486 of SEQ ID NO: 588147
ucaggucugccacgagaca

SEQ ID NO: 845057 - RNA, 19 nt, Artificial Sequence
  Description of Artificial Sequence: Synthetic oligonucleotide
  Antisense strand to SEQ ID NO: 845056
ugucucguggcagaccuga

SEQ ID NO: 845058 - RNA, 19 nt, Artificial Sequence
  Description of Artificial Sequence: Synthetic oligonucleotide
  Sense strand starting at position 3521 of SEQ ID NO: 588147
ccagaacauccuggucaga

SEQ ID NO: 845059 - RNA, 19 nt, Artificial Sequence
  Description of Artificial Sequence: Synthetic oligonucleotide
  Antisense strand to SEQ ID NO: 845058
ucugaccaggauguucugg

SEQ ID NO: 845060 - RNA, 19 nt, Artificial Sequence
  Description of Artificial Sequence: Synthetic oligonucleotide
  Sense strand starting at position 3727 of SEQ ID NO: 588147
cugagugugccuuagauaa

SEQ ID NO: 845061 - RNA, 19 nt, Artificial Sequence
  Description of Artificial Sequence: Synthetic oligonucleotide
  Antisense strand to SEQ ID NO: 845060
uuaucuaaggcacacucag

SEQ ID NO: 845062 - RNA, 19 nt, Artificial Sequence
  Description of Artificial Sequence: Synthetic oligonucleotide
  Sense strand starting at position 44 of SEQ ID NO: 588148
caccaugagugcuccgaga

SEQ ID NO: 845063 - RNA, 19 nt, Artificial Sequence
  Description of Artificial Sequence: Synthetic oligonucleotide
  Antisense strand to SEQ ID NO: 845062
ucucggagcacucauggug

SEQ ID NO: 845064 - RNA, 19 nt, Artificial Sequence
  Description of Artificial Sequence: Synthetic oligonucleotide
  Sense strand starting at position 46 of SEQ ID NO: 588148
ccaugagugcuccgagaac

SEQ ID NO: 845065 - RNA, 19 nt, Artificial Sequence
  Description of Artificial Sequence: Synthetic oligonucleotide
  Antisense strand to SEQ ID NO: 845064
guucucggagcacucaugg

SEQ ID NO: 845066 - RNA, 19 nt, Artificial Sequence
  Description of Artificial Sequence: Synthetic oligonucleotide
  Sense strand starting at position 186 of SEQ ID NO: 588148
cgcgucagcccuuuagaca

SEQ ID NO: 845067 - RNA, 19 nt, Artificial Sequence
  Description of Artificial Sequence: Synthetic oligonucleotide
  Antisense strand to SEQ ID NO: 845066
ugucuaaagggcugacgcg

SEQ ID NO: 845068 - RNA, 19 nt, Artificial Sequence
  Description of Artificial Sequence: Synthetic oligonucleotide
  Sense strand starting at position 230 of SEQ ID NO: 588148
gacugucaccgacacucau

SEQ ID NO: 845069 - RNA, 19 nt, Artificial Sequence
  Description of Artificial Sequence: Synthetic oligonucleotide
  Antisense strand to SEQ ID NO: 845068
augagugucggugacaguc

SEQ ID NO: 845070 - RNA, 19 nt, Artificial Sequence
  Description of Artificial Sequence: Synthetic oligonucleotide
  Sense strand starting at position 240 of SEQ ID NO: 588148
gacacucaucggcagagua

SEQ ID NO: 845071 - RNA, 19 nt, Artificial Sequence
  Description of Artificial Sequence: Synthetic oligonucleotide
  Antisense strand to SEQ ID NO: 845070
uacucugccgaugaguguc

SEQ ID NO: 845072 - RNA, 19 nt, Artificial Sequence
  Description of Artificial Sequence: Synthetic oligonucleotide
  Sense strand starting at position 338 of SEQ ID NO: 588148
ugacaagcauccucugaau

SEQ ID NO: 845073 - RNA, 19 nt, Artificial Sequence
  Description of Artificial Sequence: Synthetic oligonucleotide
  Antisense strand to SEQ ID NO: 845072
auucagaggaugcuuguca

SEQ ID NO: 845074 - RNA, 19 nt, Artificial Sequence
  Description of Artificial Sequence: Synthetic oligonucleotide
  Sense strand starting at position 340 of SEQ ID NO: 588148
acaagcauccucugaauga

SEQ ID NO: 845075 - RNA, 19 nt, Artificial Sequence
  Description of Artificial Sequence: Synthetic oligonucleotide
  Antisense strand to SEQ ID NO: 845074
ucauucagaggaugcuugu

SEQ ID NO: 845076 - RNA, 19 nt, Artificial Sequence
  Description of Artificial Sequence: Synthetic oligonucleotide
  Sense strand starting at position 344 of SEQ ID NO: 588148
gcauccucugaaugaggaa

SEQ ID NO: 845077 - RNA, 19 nt, Artificial Sequence
  Description of Artificial Sequence: Synthetic oligonucleotide
  Antisense strand to SEQ ID NO: 845076
uuccucauucagaggaugc

SEQ ID NO: 845078 - RNA, 19 nt, Artificial Sequence
  Description of Artificial Sequence: Synthetic oligonucleotide
  Sense strand starting at position 810 of SEQ ID NO: 588148
accuguacccaagagaugu

SEQ ID NO: 845079 - RNA, 19 nt, Artificial Sequence
  Description of Artificial Sequence: Synthetic oligonucleotide
  Antisense strand to SEQ ID NO: 845078
acaucucuuggguacaggu

SEQ ID NO: 845080 - RNA, 19 nt, Artificial Sequence
  Description of Artificial Sequence: Synthetic oligonucleotide
  Sense strand starting at position 3045 of SEQ ID NO: 588148
uuuaaagggucccuuugua

SEQ ID NO: 845081 - RNA, 19 nt, Artificial Sequence
  Description of Artificial Sequence: Synthetic oligonucleotide
  Antisense strand to SEQ ID NO: 845080
uacaaagggacccuuuaaa

SEQ ID NO: 845082 - RNA, 19 nt, Artificial Sequence
  Description of Artificial Sequence: Synthetic oligonucleotide
  Sense strand starting at position 3049 of SEQ ID NO: 588148
aagggucccuuuguagaga

SEQ ID NO: 845083 - RNA, 19 nt, Artificial Sequence
  Description of Artificial Sequence: Synthetic oligonucleotide
  Antisense strand to SEQ ID NO: 845082
ucucuacaaagggacccuu

SEQ ID NO: 845084 - RNA, 19 nt, Artificial Sequence
  Description of Artificial Sequence: Synthetic oligonucleotide
  Sense strand starting at position 3335 of SEQ ID NO: 588148
caaguacuuccgugcauga

SEQ ID NO: 845085 - RNA, 19 nt, Artificial Sequence
  Description of Artificial Sequence: Synthetic oligonucleotide
  Antisense strand to SEQ ID NO: 845084
ucaugcacggaaguacuug

SEQ ID NO: 845086 - RNA, 19 nt, Artificial Sequence
  Description of Artificial Sequence: Synthetic oligonucleotide
  Sense strand starting at position 3508 of SEQ ID NO: 588148
agcucacucccuuaggauu

SEQ ID NO: 845087 - RNA, 19 nt, Artificial Sequence
  Description of Artificial Sequence: Synthetic oligonucleotide
  Antisense strand to SEQ ID NO: 845086
aauccuaagggagugagcu

SEQ ID NO: 845088 - RNA, 19 nt, Artificial Sequence
  Description of Artificial Sequence: Synthetic oligonucleotide
  Sense strand starting at position 3516 of SEQ ID NO: 588148
cccuuaggauuccgauguu

SEQ ID NO: 845089 - RNA, 19 nt, Artificial Sequence
  Description of Artificial Sequence: Synthetic oligonucleotide
  Antisense strand to SEQ ID NO: 845088
aacaucggaauccuaaggg

SEQ ID NO: 845090 - RNA, 19 nt, Artificial Sequence
  Description of Artificial Sequence: Synthetic oligonucleotide
  Sense strand starting at position 3554 of SEQ ID NO: 588148
ggccaugcuccagacacuu

SEQ ID NO: 845091 - RNA, 19 nt, Artificial Sequence
  Description of Artificial Sequence: Synthetic oligonucleotide
  Antisense strand to SEQ ID NO: 845090
aagugucuggagcauggcc

SEQ ID NO: 845092 - RNA, 19 nt, Artificial Sequence
  Description of Artificial Sequence: Synthetic oligonucleotide
  Sense strand starting at position 8 of SEQ ID NO: 588149
caaauuggcucagaguaag

SEQ ID NO: 845093 - RNA, 19 nt, Artificial Sequence
  Description of Artificial Sequence: Synthetic oligonucleotide
  Antisense strand to SEQ ID NO: 845092
cuuacucugagccaauuug

SEQ ID NO: 845094 - RNA, 19 nt, Artificial Sequence
  Description of Artificial Sequence: Synthetic oligonucleotide
  Sense strand starting at position 97 of SEQ ID NO: 588149
gggauuaaucugggagcug

SEQ ID NO: 845095 - RNA, 19 nt, Artificial Sequence
  Description of Artificial Sequence: Synthetic oligonucleotide
  Antisense strand to SEQ ID NO: 845094
cagcucccagauuaauccc

SEQ ID NO: 845096 - RNA, 19 nt, Artificial Sequence
  Description of Artificial Sequence: Synthetic oligonucleotide
  Sense strand starting at position 116 of SEQ ID NO: 588149
gggaaaguuugcuaaucaa

SEQ ID NO: 845097 - RNA, 19 nt, Artificial Sequence
  Description of Artificial Sequence: Synthetic oligonucleotide
  Antisense strand to SEQ ID NO: 845096
uugauuagcaaacuuuccc

SEQ ID NO: 845098 - RNA, 19 nt, Artificial Sequence
  Description of Artificial Sequence: Synthetic oligonucleotide
  Sense strand starting at position 126 of SEQ ID NO: 588149
gcuaaucaaucacauggua

SEQ ID NO: 845099 - RNA, 19 nt, Artificial Sequence
  Description of Artificial Sequence: Synthetic oligonucleotide
  Antisense strand to SEQ ID NO: 845098
uaccaugugauugauuagc

SEQ ID NO: 845100 - RNA, 19 nt, Artificial Sequence
  Description of Artificial Sequence: Synthetic oligonucleotide
  Sense strand starting at position 176 of SEQ ID NO: 588149
ugggaagagccaugugaaa

SEQ ID NO: 845101 - RNA, 19 nt, Artificial Sequence
  Description of Artificial Sequence: Synthetic oligonucleotide
  Antisense strand to SEQ ID NO: 845100
uuucacauggcucuuccca

SEQ ID NO: 845102 - RNA, 19 nt, Artificial Sequence
  Description of Artificial Sequence: Synthetic oligonucleotide
  Sense strand starting at position 221 of SEQ ID NO: 588149
augggaguuuccuuaguug

SEQ ID NO: 845103 - RNA, 19 nt, Artificial Sequence
  Description of Artificial Sequence: Synthetic oligonucleotide
  Antisense strand to SEQ ID NO: 845102
caacuaaggaaacucccau

SEQ ID NO: 845104 - RNA, 19 nt, Artificial Sequence
  Description of Artificial Sequence: Synthetic oligonucleotide
  Sense strand starting at position 725 of SEQ ID NO: 588149
cucuuaauacgggagcaga

SEQ ID NO: 845105 - RNA, 19 nt, Artificial Sequence
  Description of Artificial Sequence: Synthetic oligonucleotide
  Antisense strand to SEQ ID NO: 845104
ucugcucccguauuaagag

SEQ ID NO: 845106 - RNA, 19 nt, Artificial Sequence
  Description of Artificial Sequence: Synthetic oligonucleotide
  Sense strand starting at position 897 of SEQ ID NO: 588149
ugaugcuucuuccucagaa

SEQ ID NO: 845107 - RNA, 19 nt, Artificial Sequence
  Description of Artificial Sequence: Synthetic oligonucleotide
  Antisense strand to SEQ ID NO: 845106
uucugaggaagaagcauca

SEQ ID NO: 845108 - RNA, 19 nt, Artificial Sequence
  Description of Artificial Sequence: Synthetic oligonucleotide
  Sense strand starting at position 1055 of SEQ ID NO: 588149
ccuggauggcgagacucau

SEQ ID NO: 845109 - RNA, 19 nt, Artificial Sequence
  Description of Artificial Sequence: Synthetic oligonucleotide
  Antisense strand to SEQ ID NO: 845108
augagucucgccauccagg

SEQ ID NO: 845110 - RNA, 19 nt, Artificial Sequence
  Description of Artificial Sequence: Synthetic oligonucleotide
  Sense strand starting at position 1061 of SEQ ID NO: 588149
uggcgagacucaucauuac

SEQ ID NO: 845111 - RNA, 19 nt, Artificial Sequence
  Description of Artificial Sequence: Synthetic oligonucleotide
  Antisense strand to SEQ ID NO: 845110
guaaugaugagucucgcca

SEQ ID NO: 845112 - RNA, 19 nt, Artificial Sequence
  Description of Artificial Sequence: Synthetic oligonucleotide
  Sense strand starting at position 1072 of SEQ ID NO: 588149
aucauuaccacguguugga

SEQ ID NO: 845113 - RNA, 19 nt, Artificial Sequence
  Description of Artificial Sequence: Synthetic oligonucleotide
  Antisense strand to SEQ ID NO: 845112
uccaacacgugguaaugau

SEQ ID NO: 845114 - RNA, 19 nt, Artificial Sequence
  Description of Artificial Sequence: Synthetic oligonucleotide
  Sense strand starting at position 1075 of SEQ ID NO: 588149
auuaccacguguuggaaau

SEQ ID NO: 845115 - RNA, 19 nt, Artificial Sequence
  Description of Artificial Sequence: Synthetic oligonucleotide
  Antisense strand to SEQ ID NO: 845114
auuuccaacacgugguaau

SEQ ID NO: 845116 - RNA, 19 nt, Artificial Sequence
  Description of Artificial Sequence: Synthetic oligonucleotide
  Sense strand starting at position 1076 of SEQ ID NO: 588149
uuaccacguguuggaaaua

SEQ ID NO: 845117 - RNA, 19 nt, Artificial Sequence
  Description of Artificial Sequence: Synthetic oligonucleotide
  Antisense strand to SEQ ID NO: 845116
uauuuccaacacgugguaa

SEQ ID NO: 845118 - RNA, 19 nt, Artificial Sequence
  Description of Artificial Sequence: Synthetic oligonucleotide
  Sense strand starting at position 1171 of SEQ ID NO: 588149
cguacaauuacuugucagu

SEQ ID NO: 845119 - RNA, 19 nt, Artificial Sequence
  Description of Artificial Sequence: Synthetic oligonucleotide
  Antisense strand to SEQ ID NO: 845118
acugacaaguaauuguacg

SEQ ID NO: 845120 - RNA, 19 nt, Artificial Sequence
  Description of Artificial Sequence: Synthetic oligonucleotide
  Sense strand starting at position 1642 of SEQ ID NO: 588149
cccggcuuguggugauaaa

SEQ ID NO: 845121 - RNA, 19 nt, Artificial Sequence
  Description of Artificial Sequence: Synthetic oligonucleotide
  Antisense strand to SEQ ID NO: 845120
uuuaucaccacaagccggg

SEQ ID NO: 845122 - RNA, 19 nt, Artificial Sequence
  Description of Artificial Sequence: Synthetic oligonucleotide
  Sense strand starting at position 1643 of SEQ ID NO: 588149
ccggcuuguggugauaaag

SEQ ID NO: 845123 - RNA, 19 nt, Artificial Sequence
  Description of Artificial Sequence: Synthetic oligonucleotide
  Antisense strand to SEQ ID NO: 845122
cuuuaucaccacaagccgg

SEQ ID NO: 845124 - RNA, 19 nt, Artificial Sequence
  Description of Artificial Sequence: Synthetic oligonucleotide
  Sense strand starting at position 1782 of SEQ ID NO: 588149
gcggcugguacucgaagau

SEQ ID NO: 845125 - RNA, 19 nt, Artificial Sequence
  Description of Artificial Sequence: Synthetic oligonucleotide
  Antisense strand to SEQ ID NO: 845124
aucuucgaguaccagccgc

SEQ ID NO: 845126 - RNA, 19 nt, Artificial Sequence
  Description of Artificial Sequence: Synthetic oligonucleotide
  Sense strand starting at position 1786 of SEQ ID NO: 588149
cugguacucgaagaugauc

SEQ ID NO: 845127 - RNA, 19 nt, Artificial Sequence
  Description of Artificial Sequence: Synthetic oligonucleotide
  Antisense strand to SEQ ID NO: 845126
gaucaucuucgaguaccag

SEQ ID NO: 845128 - RNA, 19 nt, Artificial Sequence
  Description of Artificial Sequence: Synthetic oligonucleotide
  Sense strand starting at position 1794 of SEQ ID NO: 588149
cgaagaugauccuccggaa

SEQ ID NO: 845129 - RNA, 19 nt, Artificial Sequence
  Description of Artificial Sequence: Synthetic oligonucleotide
  Antisense strand to SEQ ID NO: 845128
uuccggaggaucaucuucg

SEQ ID NO: 845130 - RNA, 19 nt, Artificial Sequence
  Description of Artificial Sequence: Synthetic oligonucleotide
  Sense strand starting at position 1992 of SEQ ID NO: 588149
ggaagugacccucguacuu

SEQ ID NO: 845131 - RNA, 19 nt, Artificial Sequence
  Description of Artificial Sequence: Synthetic oligonucleotide
  Antisense strand to SEQ ID NO: 845130
aaguacgagggucacuucc

SEQ ID NO: 845132 - RNA, 19 nt, Artificial Sequence
  Description of Artificial Sequence: Synthetic oligonucleotide
  Sense strand starting at position 2318 of SEQ ID NO: 588149
cccugagagcuguggucau

SEQ ID NO: 845133 - RNA, 19 nt, Artificial Sequence
  Description of Artificial Sequence: Synthetic oligonucleotide
  Antisense strand to SEQ ID NO: 845132
augaccacagcucucaggg

SEQ ID NO: 845134 - RNA, 19 nt, Artificial Sequence
  Description of Artificial Sequence: Synthetic oligonucleotide
  Sense strand starting at position 2322 of SEQ ID NO: 588149
gagagcuguggucaucaga

SEQ ID NO: 845135 - RNA, 19 nt, Artificial Sequence
  Description of Artificial Sequence: Synthetic oligonucleotide
  Antisense strand to SEQ ID NO: 845134
ucugaugaccacagcucuc

SEQ ID NO: 845136 - RNA, 19 nt, Artificial Sequence
  Description of Artificial Sequence: Synthetic oligonucleotide
  Sense strand starting at position 2518 of SEQ ID NO: 588149
ccaccucugccuugaugga

SEQ ID NO: 845137 - RNA, 19 nt, Artificial Sequence
  Description of Artificial Sequence: Synthetic oligonucleotide
  Antisense strand to SEQ ID NO: 845136
uccaucaaggcagaggugg

SEQ ID NO: 845138 - RNA, 19 nt, Artificial Sequence
  Description of Artificial Sequence: Synthetic oligonucleotide
  Sense strand starting at position 2859 of SEQ ID NO: 588149
gcccgaaucuuguguauuu

SEQ ID NO: 845139 - RNA, 19 nt, Artificial Sequence
  Description of Artificial Sequence: Synthetic oligonucleotide
  Antisense strand to SEQ ID NO: 845138
aaauacacaagauucgggc

SEQ ID NO: 845140 - RNA, 19 nt, Artificial Sequence
  Description of Artificial Sequence: Synthetic oligonucleotide
  Sense strand starting at position 2918 of SEQ ID NO: 588149
uaguguagugaucaugacu

SEQ ID NO: 845141 - RNA, 19 nt, Artificial Sequence
  Description of Artificial Sequence: Synthetic oligonucleotide
  Antisense strand to SEQ ID NO: 845140
agucaugaucacuacacua

SEQ ID NO: 845142 - RNA, 19 nt, Artificial Sequence
  Description of Artificial Sequence: Synthetic oligonucleotide
  Sense strand starting at position 3273 of SEQ ID NO: 588149
uggagaucgcaccaucaca

SEQ ID NO: 845143 - RNA, 19 nt, Artificial Sequence
  Description of Artificial Sequence: Synthetic oligonucleotide
  Antisense strand to SEQ ID NO: 845142
ugugauggugcgaucucca

SEQ ID NO: 845144 - RNA, 19 nt, Artificial Sequence
  Description of Artificial Sequence: Synthetic oligonucleotide
  Sense strand starting at position 3371 of SEQ ID NO: 588149
gagccagcgcacuguaauu

SEQ ID NO: 845145 - RNA, 19 nt, Artificial Sequence
  Description of Artificial Sequence: Synthetic oligonucleotide
  Antisense strand to SEQ ID NO: 845144
aauuacagugcgcuggcuc

SEQ ID NO: 845146 - RNA, 19 nt, Artificial Sequence
  Description of Artificial Sequence: Synthetic oligonucleotide
  Sense strand starting at position 3380 of SEQ ID NO: 588149
cacuguaauuguuggugga

SEQ ID NO: 845147 - RNA, 19 nt, Artificial Sequence
  Description of Artificial Sequence: Synthetic oligonucleotide
  Antisense strand to SEQ ID NO: 845146
uccaccaacaauuacagug

SEQ ID NO: 845148 - RNA, 19 nt, Artificial Sequence
  Description of Artificial Sequence: Synthetic oligonucleotide
  Sense strand starting at position 3381 of SEQ ID NO: 588149
acuguaauuguugguggaa

SEQ ID NO: 845149 - RNA, 19 nt, Artificial Sequence
  Description of Artificial Sequence: Synthetic oligonucleotide
  Antisense strand to SEQ ID NO: 845148
uuccaccaacaauuacagu

SEQ ID NO: 845150 - RNA, 19 nt, Artificial Sequence
  Description of Artificial Sequence: Synthetic oligonucleotide
  Sense strand starting at position 3382 of SEQ ID NO: 588149
cuguaauuguugguggaag

SEQ ID NO: 845151 - RNA, 19 nt, Artificial Sequence
  Description of Artificial Sequence: Synthetic oligonucleotide
  Antisense strand to SEQ ID NO: 845150
cuuccaccaacaauuacag

SEQ ID NO: 845152 - RNA, 19 nt, Artificial Sequence
  Description of Artificial Sequence: Synthetic oligonucleotide
  Sense strand starting at position 3383 of SEQ ID NO: 588149
uguaauuguugguggaagu

SEQ ID NO: 845153 - RNA, 19 nt, Artificial Sequence
  Description of Artificial Sequence: Synthetic oligonucleotide
  Antisense strand to SEQ ID NO: 845152
acuuccaccaacaauuaca

SEQ ID NO: 845154 - RNA, 19 nt, Artificial Sequence
  Description of Artificial Sequence: Synthetic oligonucleotide
  Sense strand starting at position 3399 of SEQ ID NO: 588149
aguggaauucagugggaag

SEQ ID NO: 845155 - RNA, 19 nt, Artificial Sequence
  Description of Artificial Sequence: Synthetic oligonucleotide
  Antisense strand to SEQ ID NO: 845154
cuucccacugaauuccacu

SEQ ID NO: 845156 - RNA, 19 nt, Artificial Sequence
  Description of Artificial Sequence: Synthetic oligonucleotide
  Sense strand starting at position 3553 of SEQ ID NO: 588149
cuugguucucgcuguagga

SEQ ID NO: 845157 - RNA, 19 nt, Artificial Sequence
  Description of Artificial Sequence: Synthetic oligonucleotide
  Antisense strand to SEQ ID NO: 845156
uccuacagcgagaaccaag

SEQ ID NO: 845158 - RNA, 19 nt, Artificial Sequence
  Description of Artificial Sequence: Synthetic oligonucleotide
  Sense strand starting at position 3555 of SEQ ID NO: 588149
ugguucucgcuguaggaaa

SEQ ID NO: 845159 - RNA, 19 nt, Artificial Sequence
  Description of Artificial Sequence: Synthetic oligonucleotide
  Antisense strand to SEQ ID NO: 845158
uuuccuacagcgagaacca

SEQ ID NO: 845160 - RNA, 19 nt, Artificial Sequence
  Description of Artificial Sequence: Synthetic oligonucleotide
  Sense strand starting at position 3585 of SEQ ID NO: 588149
cugggugaaaucgggaaau

SEQ ID NO: 845161 - RNA, 19 nt, Artificial Sequence
  Description of Artificial Sequence: Synthetic oligonucleotide
  Antisense strand to SEQ ID NO: 845160
auuucccgauuucacccag

SEQ ID NO: 845162 - RNA, 19 nt, Artificial Sequence
  Description of Artificial Sequence: Synthetic oligonucleotide
  Sense strand starting at position 3595 of SEQ ID NO: 588149
ucgggaaauucugcucaca

SEQ ID NO: 845163 - RNA, 19 nt, Artificial Sequence
  Description of Artificial Sequence: Synthetic oligonucleotide
  Antisense strand to SEQ ID NO: 845162
ugugagcagaauuucccga

SEQ ID NO: 845164 - RNA, 19 nt, Artificial Sequence
  Description of Artificial Sequence: Synthetic oligonucleotide
  Sense strand starting at position 3747 of SEQ ID NO: 588149
cugggaagcugaugaugaa

SEQ ID NO: 845165 - RNA, 19 nt, Artificial Sequence
  Description of Artificial Sequence: Synthetic oligonucleotide
  Antisense strand to SEQ ID NO: 845164
uucaucaucagcuucccag

SEQ ID NO: 845166 - RNA, 19 nt, Artificial Sequence
  Description of Artificial Sequence: Synthetic oligonucleotide
  Sense strand starting at position 3813 of SEQ ID NO: 588149
ggccuugcucugccaaguu

SEQ ID NO: 845167 - RNA, 19 nt, Artificial Sequence
  Description of Artificial Sequence: Synthetic oligonucleotide
  Antisense strand to SEQ ID NO: 845166
aacuuggcagagcaaggcc

SEQ ID NO: 845168 - RNA, 19 nt, Artificial Sequence
  Description of Artificial Sequence: Synthetic oligonucleotide
  Sense strand starting at position 3908 of SEQ ID NO: 588149
agacaauccgaugggucuu

SEQ ID NO: 845169 - RNA, 19 nt, Artificial Sequence
  Description of Artificial Sequence: Synthetic oligonucleotide
  Antisense strand to SEQ ID NO: 845168
aagacccaucggauugucu

SEQ ID NO: 845170 - RNA, 19 nt, Artificial Sequence
  Description of Artificial Sequence: Synthetic oligonucleotide
  Sense strand starting at position 3914 of SEQ ID NO: 588149
uccgaugggucuuagagua

SEQ ID NO: 845171 - RNA, 19 nt, Artificial Sequence
  Description of Artificial Sequence: Synthetic oligonucleotide
  Antisense strand to SEQ ID NO: 845170
uacucuaagacccaucgga

SEQ ID NO: 845172 - RNA, 19 nt, Artificial Sequence
  Description of Artificial Sequence: Synthetic oligonucleotide
  Sense strand starting at position 25 of SEQ ID NO: 588150
gcuuucuuguuuccauuua

SEQ ID NO: 845173 - RNA, 19 nt, Artificial Sequence
  Description of Artificial Sequence: Synthetic oligonucleotide
  Antisense strand to SEQ ID NO: 845172
uaaauggaaacaagaaagc

SEQ ID NO: 845174 - RNA, 19 nt, Artificial Sequence
  Description of Artificial Sequence: Synthetic oligonucleotide
  Sense strand starting at position 59 of SEQ ID NO: 588150
uagaaaguuuaucuaagug

SEQ ID NO: 845175 - RNA, 19 nt, Artificial Sequence
  Description of Artificial Sequence: Synthetic oligonucleotide
  Antisense strand to SEQ ID NO: 845174
cacuuagauaaacuuucua

SEQ ID NO: 845176 - RNA, 19 nt, Artificial Sequence
  Description of Artificial Sequence: Synthetic oligonucleotide
  Sense strand starting at position 279 of SEQ ID NO: 588150
agauguaaucaaggcauag

SEQ ID NO: 845177 - RNA, 19 nt, Artificial Sequence
  Description of Artificial Sequence: Synthetic oligonucleotide
  Antisense strand to SEQ ID NO: 845176
cuaugccuugauuacaucu

SEQ ID NO: 845178 - RNA, 19 nt, Artificial Sequence
  Description of Artificial Sequence: Synthetic oligonucleotide
  Sense strand starting at position 418 of SEQ ID NO: 588150
uuagaaguauaacuagcau

SEQ ID NO: 845179 - RNA, 19 nt, Artificial Sequence
  Description of Artificial Sequence: Synthetic oligonucleotide
  Antisense strand to SEQ ID NO: 845178
augcuaguuauacuucuaa

SEQ ID NO: 845180 - RNA, 19 nt, Artificial Sequence
  Description of Artificial Sequence: Synthetic oligonucleotide
  Sense strand starting at position 621 of SEQ ID NO: 588150
ucagaucaguuaucagaau

SEQ ID NO: 845181 - RNA, 19 nt, Artificial Sequence
  Description of Artificial Sequence: Synthetic oligonucleotide
  Antisense strand to SEQ ID NO: 845180
auucugauaacugaucuga

SEQ ID NO: 845182 - RNA, 19 nt, Artificial Sequence
  Description of Artificial Sequence: Synthetic oligonucleotide
  Sense strand starting at position 810 of SEQ ID NO: 588150
acagcuugauucuuggauu

SEQ ID NO: 845183 - RNA, 19 nt, Artificial Sequence
  Description of Artificial Sequence: Synthetic oligonucleotide
  Antisense strand to SEQ ID NO: 845182
aauccaagaaucaagcugu

SEQ ID NO: 845184 - RNA, 19 nt, Artificial Sequence
  Description of Artificial Sequence: Synthetic oligonucleotide
  Sense strand starting at position 870 of SEQ ID NO: 588150
cuuuaugacucagucccua

SEQ ID NO: 845185 - RNA, 19 nt, Artificial Sequence
  Description of Artificial Sequence: Synthetic oligonucleotide
  Antisense strand to SEQ ID NO: 845184
uagggacugagucauaaag

SEQ ID NO: 845186 - RNA, 19 nt, Artificial Sequence
  Description of Artificial Sequence: Synthetic oligonucleotide
  Sense strand starting at position 949 of SEQ ID NO: 588150
cugugcgcuauuuagauua

SEQ ID NO: 845187 - RNA, 19 nt, Artificial Sequence
  Description of Artificial Sequence: Synthetic oligonucleotide
  Antisense strand to SEQ ID NO: 845186
uaaucuaaauagcgcacag

SEQ ID NO: 845188 - RNA, 19 nt, Artificial Sequence
  Description of Artificial Sequence: Synthetic oligonucleotide
  Sense strand starting at position 959 of SEQ ID NO: 588150
uuuagauuacuagggagua

SEQ ID NO: 845189 - RNA, 19 nt, Artificial Sequence
  Description of Artificial Sequence: Synthetic oligonucleotide
  Antisense strand to SEQ ID NO: 845188
uacucccuaguaaucuaaa

SEQ ID NO: 845190 - RNA, 19 nt, Artificial Sequence
  Description of Artificial Sequence: Synthetic oligonucleotide
  Sense strand starting at position 1026 of SEQ ID NO: 588150
aauuuacuuugggaguaga

SEQ ID NO: 845191 - RNA, 19 nt, Artificial Sequence
  Description of Artificial Sequence: Synthetic oligonucleotide
  Antisense strand to SEQ ID NO: 845190
ucuacucccaaaguaaauu

SEQ ID NO: 845192 - RNA, 19 nt, Artificial Sequence
  Description of Artificial Sequence: Synthetic oligonucleotide
  Sense strand starting at position 1065 of SEQ ID NO: 588150
guuaaauucugacuguaua

SEQ ID NO: 845193 - RNA, 19 nt, Artificial Sequence
  Description of Artificial Sequence: Synthetic oligonucleotide
  Antisense strand to SEQ ID NO: 845192
uauacagucagaauuuaac

SEQ ID NO: 845194 - RNA, 19 nt, Artificial Sequence
  Description of Artificial Sequence: Synthetic oligonucleotide
  Sense strand starting at position 1129 of SEQ ID NO: 588150
gcuaaacuauugcugauaa

SEQ ID NO: 845195 - RNA, 19 nt, Artificial Sequence
  Description of Artificial Sequence: Synthetic oligonucleotide
  Antisense strand to SEQ ID NO: 845194
uuaucagcaauaguuuagc

SEQ ID NO: 845196 - RNA, 19 nt, Artificial Sequence
  Description of Artificial Sequence: Synthetic oligonucleotide
  Sense strand starting at position 1142 of SEQ ID NO: 588150
ugauaaguauucuuucuug

SEQ ID NO: 845197 - RNA, 19 nt, Artificial Sequence
  Description of Artificial Sequence: Synthetic oligonucleotide
  Antisense strand to SEQ ID NO: 845196
caagaaagaauacuuauca

SEQ ID NO: 845198 - RNA, 19 nt, Artificial Sequence
  Description of Artificial Sequence: Synthetic oligonucleotide
  Sense strand starting at position 1148 of SEQ ID NO: 588150
guauucuuucuuggaauug

SEQ ID NO: 845199 - RNA, 19 nt, Artificial Sequence
  Description of Artificial Sequence: Synthetic oligonucleotide
  Antisense strand to SEQ ID NO: 845198
caauuccaagaaagaauac

SEQ ID NO: 845200 - RNA, 19 nt, Artificial Sequence
  Description of Artificial Sequence: Synthetic oligonucleotide
  Sense strand starting at position 1416 of SEQ ID NO: 588150
gauguuuauuuagaugacu

SEQ ID NO: 845201 - RNA, 19 nt, Artificial Sequence
  Description of Artificial Sequence: Synthetic oligonucleotide
  Antisense strand to SEQ ID NO: 845200
agucaucuaaauaaacauc

SEQ ID NO: 845202 - RNA, 19 nt, Artificial Sequence
  Description of Artificial Sequence: Synthetic oligonucleotide
  Sense strand starting at position 1675 of SEQ ID NO: 588150
cuuaguauugacuguaaag

SEQ ID NO: 845203 - RNA, 19 nt, Artificial Sequence
  Description of Artificial Sequence: Synthetic oligonucleotide
  Antisense strand to SEQ ID NO: 845202
cuuuacagucaauacuaag

SEQ ID NO: 845204 - RNA, 19 nt, Artificial Sequence
  Description of Artificial Sequence: Synthetic oligonucleotide
  Sense strand starting at position 1677 of SEQ ID NO: 588150
uaguauugacuguaaagua

SEQ ID NO: 845205 - RNA, 19 nt, Artificial Sequence
  Description of Artificial Sequence: Synthetic oligonucleotide
  Antisense strand to SEQ ID NO: 845204
uacuuuacagucaauacua

SEQ ID NO: 845206 - RNA, 19 nt, Artificial Sequence
  Description of Artificial Sequence: Synthetic oligonucleotide
  Sense strand starting at position 1692 of SEQ ID NO: 588150
aguauacaucgauacuugu

SEQ ID NO: 845207 - RNA, 19 nt, Artificial Sequence
  Description of Artificial Sequence: Synthetic oligonucleotide
  Antisense strand to SEQ ID NO: 845206
acaaguaucgauguauacu

SEQ ID NO: 845208 - RNA, 19 nt, Artificial Sequence
  Description of Artificial Sequence: Synthetic oligonucleotide
  Sense strand starting at position 1758 of SEQ ID NO: 588150
aguagaaguuauccaccau

SEQ ID NO: 845209 - RNA, 19 nt, Artificial Sequence
  Description of Artificial Sequence: Synthetic oligonucleotide
  Antisense strand to SEQ ID NO: 845208
augguggauaacuucuacu

SEQ ID NO: 845210 - RNA, 19 nt, Artificial Sequence
  Description of Artificial Sequence: Synthetic oligonucleotide
  Sense strand starting at position 1793 of SEQ ID NO: 588150
auguaaauguucucagaca

SEQ ID NO: 845211 - RNA, 19 nt, Artificial Sequence
  Description of Artificial Sequence: Synthetic oligonucleotide
  Antisense strand to SEQ ID NO: 845210
ugucugagaacauuuacau

SEQ ID NO: 845212 - RNA, 19 nt, Artificial Sequence
  Description of Artificial Sequence: Synthetic oligonucleotide
  Sense strand starting at position 1906 of SEQ ID NO: 588150
ggaauaaacugcucccaca

SEQ ID NO: 845213 - RNA, 19 nt, Artificial Sequence
  Description of Artificial Sequence: Synthetic oligonucleotide
  Antisense strand to SEQ ID NO: 845212
ugugggagcaguuuauucc

SEQ ID NO: 845214 - RNA, 19 nt, Artificial Sequence
  Description of Artificial Sequence: Synthetic oligonucleotide
  Sense strand starting at position 2070 of SEQ ID NO: 588150
uuaauaaugcauggcaacu

SEQ ID NO: 845215 - RNA, 19 nt, Artificial Sequence
  Description of Artificial Sequence: Synthetic oligonucleotide
  Antisense strand to SEQ ID NO: 845214
aguugccaugcauuauuaa

SEQ ID NO: 845216 - RNA, 19 nt, Artificial Sequence
  Description of Artificial Sequence: Synthetic oligonucleotide
  Sense strand starting at position 2142 of SEQ ID NO: 588150
uuagauucuuaagugaaug

SEQ ID NO: 845217 - RNA, 19 nt, Artificial Sequence
  Description of Artificial Sequence: Synthetic oligonucleotide
  Antisense strand to SEQ ID NO: 845216
cauucacuuaagaaucuaa

SEQ ID NO: 845218 - RNA, 19 nt, Artificial Sequence
  Description of Artificial Sequence: Synthetic oligonucleotide
  Sense strand starting at position 2306 of SEQ ID NO: 588150
uucuaaugacuguagcuau

SEQ ID NO: 845219 - RNA, 19 nt, Artificial Sequence
  Description of Artificial Sequence: Synthetic oligonucleotide
  Antisense strand to SEQ ID NO: 845218
auagcuacagucauuagaa

SEQ ID NO: 845220 - RNA, 19 nt, Artificial Sequence
  Description of Artificial Sequence: Synthetic oligonucleotide
  Sense strand starting at position 2380 of SEQ ID NO: 588150
auagcaugucagggaaacu

SEQ ID NO: 845221 - RNA, 19 nt, Artificial Sequence
  Description of Artificial Sequence: Synthetic oligonucleotide
  Antisense strand to SEQ ID NO: 845220
aguuucccugacaugcuau

SEQ ID NO: 845222 - RNA, 19 nt, Artificial Sequence
  Description of Artificial Sequence: Synthetic oligonucleotide
  Sense strand starting at position 3093 of SEQ ID NO: 588150
ucucuacugucaucaagag

SEQ ID NO: 845223 - RNA, 19 nt, Artificial Sequence
  Description of Artificial Sequence: Synthetic oligonucleotide
  Antisense strand to SEQ ID NO: 845222
cucuugaugacaguagaga

SEQ ID NO: 845224 - RNA, 19 nt, Artificial Sequence
  Description of Artificial Sequence: Synthetic oligonucleotide
  Sense strand starting at position 3094 of SEQ ID NO: 588150
cucuacugucaucaagagu

SEQ ID NO: 845225 - RNA, 19 nt, Artificial Sequence
  Description of Artificial Sequence: Synthetic oligonucleotide
  Antisense strand to SEQ ID NO: 845224
acucuugaugacaguagag

SEQ ID NO: 845226 - RNA, 19 nt, Artificial Sequence
  Description of Artificial Sequence: Synthetic oligonucleotide
  Sense strand starting at position 3102 of SEQ ID NO: 588150
ucaucaagagucugaccau

SEQ ID NO: 845227 - RNA, 19 nt, Artificial Sequence
  Description of Artificial Sequence: Synthetic oligonucleotide
  Antisense strand to SEQ ID NO: 845226
auggucagacucuugauga

SEQ ID NO: 845228 - RNA, 19 nt, Artificial Sequence
  Description of Artificial Sequence: Synthetic oligonucleotide
  Sense strand starting at position 3126 of SEQ ID NO: 588150
guucccucucuccagagaa

SEQ ID NO: 845229 - RNA, 19 nt, Artificial Sequence
  Description of Artificial Sequence: Synthetic oligonucleotide
  Antisense strand to SEQ ID NO: 845228
uucucuggagagagggaac

SEQ ID NO: 845230 - RNA, 19 nt, Artificial Sequence
  Description of Artificial Sequence: Synthetic oligonucleotide
  Sense strand starting at position 3186 of SEQ ID NO: 588150
gaauacaugugccucagau

SEQ ID NO: 845231 - RNA, 19 nt, Artificial Sequence
  Description of Artificial Sequence: Synthetic oligonucleotide
  Antisense strand to SEQ ID NO: 845230
aucugaggcacauguauuc

SEQ ID NO: 845232 - RNA, 19 nt, Artificial Sequence
  Description of Artificial Sequence: Synthetic oligonucleotide
  Sense strand starting at position 3188 of SEQ ID NO: 588150
auacaugugccucagaugu

SEQ ID NO: 845233 - RNA, 19 nt, Artificial Sequence
  Description of Artificial Sequence: Synthetic oligonucleotide
  Antisense strand to SEQ ID NO: 845232
acaucugaggcacauguau

SEQ ID NO: 845234 - RNA, 19 nt, Artificial Sequence
  Description of Artificial Sequence: Synthetic oligonucleotide
  Sense strand starting at position 3368 of SEQ ID NO: 588150
uccuguuugguuuagaaug

SEQ ID NO: 845235 - RNA, 19 nt, Artificial Sequence
  Description of Artificial Sequence: Synthetic oligonucleotide
  Antisense strand to SEQ ID NO: 845234
cauucuaaaccaaacagga

SEQ ID NO: 845236 - RNA, 19 nt, Artificial Sequence
  Description of Artificial Sequence: Synthetic oligonucleotide
  Sense strand starting at position 3427 of SEQ ID NO: 588150
guaucuguuaacuggauga

SEQ ID NO: 845237 - RNA, 19 nt, Artificial Sequence
  Description of Artificial Sequence: Synthetic oligonucleotide
  Antisense strand to SEQ ID NO: 845236
ucauccaguuaacagauac

SEQ ID NO: 845238 - RNA, 19 nt, Artificial Sequence
  Description of Artificial Sequence: Synthetic oligonucleotide
  Sense strand starting at position 3431 of SEQ ID NO: 588150
cuguuaacuggaugaauug

SEQ ID NO: 845239 - RNA, 19 nt, Artificial Sequence
  Description of Artificial Sequence: Synthetic oligonucleotide
  Antisense strand to SEQ ID NO: 845238
caauucauccaguuaacag

SEQ ID NO: 845240 - RNA, 19 nt, Artificial Sequence
  Description of Artificial Sequence: Synthetic oligonucleotide
  Sense strand starting at position 3589 of SEQ ID NO: 588150
uucugaacuguuuauugaa

SEQ ID NO: 845241 - RNA, 19 nt, Artificial Sequence
  Description of Artificial Sequence: Synthetic oligonucleotide
  Antisense strand to SEQ ID NO: 845240
uucaauaaacaguucagaa

SEQ ID NO: 845242 - RNA, 19 nt, Artificial Sequence
  Description of Artificial Sequence: Synthetic oligonucleotide
  Sense strand starting at position 3591 of SEQ ID NO: 588150
cugaacuguuuauugaagu

SEQ ID NO: 845243 - RNA, 19 nt, Artificial Sequence
  Description of Artificial Sequence: Synthetic oligonucleotide
  Antisense strand to SEQ ID NO: 845242
acuucaauaaacaguucag

SEQ ID NO: 845244 - RNA, 19 nt, Artificial Sequence
  Description of Artificial Sequence: Synthetic oligonucleotide
  Sense strand starting at position 3862 of SEQ ID NO: 588150
gucauugugauacacagua

SEQ ID NO: 845245 - RNA, 19 nt, Artificial Sequence
  Description of Artificial Sequence: Synthetic oligonucleotide
  Antisense strand to SEQ ID NO: 845244
uacuguguaucacaaugac

SEQ ID NO: 845246 - RNA, 19 nt, Artificial Sequence
  Description of Artificial Sequence: Synthetic oligonucleotide
  Sense strand starting at position 3894 of SEQ ID NO: 588150
acuguauaguauucucaua

SEQ ID NO: 845247 - RNA, 19 nt, Artificial Sequence
  Description of Artificial Sequence: Synthetic oligonucleotide
  Antisense strand to SEQ ID NO: 845246
uaugagaauacuauacagu

SEQ ID NO: 845248 - RNA, 19 nt, Artificial Sequence
  Description of Artificial Sequence: Synthetic oligonucleotide
  Sense strand starting at position 3896 of SEQ ID NO: 588150
uguauaguauucucauaca

SEQ ID NO: 845249 - RNA, 19 nt, Artificial Sequence
  Description of Artificial Sequence: Synthetic oligonucleotide
  Antisense strand to SEQ ID NO: 845248
uguaugagaauacuauaca

SEQ ID NO: 845250 - RNA, 19 nt, Artificial Sequence
  Description of Artificial Sequence: Synthetic oligonucleotide
  Sense strand starting at position 3981 of SEQ ID NO: 588150
guuccucagucugucauuu

SEQ ID NO: 845251 - RNA, 19 nt, Artificial Sequence
  Description of Artificial Sequence: Synthetic oligonucleotide
  Antisense strand to SEQ ID NO: 845250
aaaugacagacugaggaac

SEQ ID NO: 845252 - RNA, 19 nt, Artificial Sequence
  Description of Artificial Sequence: Synthetic oligonucleotide
  Sense strand starting at position 213 of SEQ ID NO: 588151
agaauuacuucucagcaug

SEQ ID NO: 845253 - RNA, 19 nt, Artificial Sequence
  Description of Artificial Sequence: Synthetic oligonucleotide
  Antisense strand to SEQ ID NO: 845252
caugcugagaaguaauucu

SEQ ID NO: 845254 - RNA, 19 nt, Artificial Sequence
  Description of Artificial Sequence: Synthetic oligonucleotide
  Sense strand starting at position 333 of SEQ ID NO: 588151
aauggagacuccuccaguu

SEQ ID NO: 845255 - RNA, 19 nt, Artificial Sequence
  Description of Artificial Sequence: Synthetic oligonucleotide
  Antisense strand to SEQ ID NO: 845254
aacuggaggagucuccauu

SEQ ID NO: 845256 - RNA, 19 nt, Artificial Sequence
  Description of Artificial Sequence: Synthetic oligonucleotide
  Sense strand starting at position 423 of SEQ ID NO: 588151
cacaguuauugugcaauug

SEQ ID NO: 845257 - RNA, 19 nt, Artificial Sequence
  Description of Artificial Sequence: Synthetic oligonucleotide
  Antisense strand to SEQ ID NO: 845256
caauugcacaauaacugug

SEQ ID NO: 845258 - RNA, 19 nt, Artificial Sequence
  Description of Artificial Sequence: Synthetic oligonucleotide
  Sense strand starting at position 838 of SEQ ID NO: 588151
gucuguuccugcccugaga

SEQ ID NO: 845259 - RNA, 19 nt, Artificial Sequence
  Description of Artificial Sequence: Synthetic oligonucleotide
  Antisense strand to SEQ ID NO: 845258
ucucagggcaggaacagac

SEQ ID NO: 845260 - RNA, 19 nt, Artificial Sequence
  Description of Artificial Sequence: Synthetic oligonucleotide
  Sense strand starting at position 959 of SEQ ID NO: 588151
agaggaguuuccucucuuu

SEQ ID NO: 845261 - RNA, 19 nt, Artificial Sequence
  Description of Artificial Sequence: Synthetic oligonucleotide
  Antisense strand to SEQ ID NO: 845260
aaagagaggaaacuccucu

SEQ ID NO: 845262 - RNA, 19 nt, Artificial Sequence
  Description of Artificial Sequence: Synthetic oligonucleotide
  Sense strand starting at position 1181 of SEQ ID NO: 588151
cccaucuguccaggguaaa

SEQ ID NO: 845263 - RNA, 19 nt, Artificial Sequence
  Description of Artificial Sequence: Synthetic oligonucleotide
  Antisense strand to SEQ ID NO: 845262
uuuacccuggacagauggg

SEQ ID NO: 845264 - RNA, 19 nt, Artificial Sequence
  Description of Artificial Sequence: Synthetic oligonucleotide
  Sense strand starting at position 1182 of SEQ ID NO: 588151
ccaucuguccaggguaaac

SEQ ID NO: 845265 - RNA, 19 nt, Artificial Sequence
  Description of Artificial Sequence: Synthetic oligonucleotide
  Antisense strand to SEQ ID NO: 845264
guuuacccuggacagaugg

SEQ ID NO: 845266 - RNA, 19 nt, Artificial Sequence
  Description of Artificial Sequence: Synthetic oligonucleotide
  Sense strand starting at position 1520 of SEQ ID NO: 588151
gugccaggcguuugagcau

SEQ ID NO: 845267 - RNA, 19 nt, Artificial Sequence
  Description of Artificial Sequence: Synthetic oligonucleotide
  Antisense strand to SEQ ID NO: 845266
augcucaaacgccuggcac

SEQ ID NO: 845268 - RNA, 19 nt, Artificial Sequence
  Description of Artificial Sequence: Synthetic oligonucleotide
  Sense strand starting at position 2107 of SEQ ID NO: 588151
gcagccguccuucgagaga

SEQ ID NO: 845269 - RNA, 19 nt, Artificial Sequence
  Description of Artificial Sequence: Synthetic oligonucleotide
  Antisense strand to SEQ ID NO: 845268
ucucucgaaggacggcugc

SEQ ID NO: 845270 - RNA, 19 nt, Artificial Sequence
  Description of Artificial Sequence: Synthetic oligonucleotide
  Sense strand starting at position 2110 of SEQ ID NO: 588151
gccguccuucgagagacuu

SEQ ID NO: 845271 - RNA, 19 nt, Artificial Sequence
  Description of Artificial Sequence: Synthetic oligonucleotide
  Antisense strand to SEQ ID NO: 845270
aagucucucgaaggacggc

SEQ ID NO: 845272 - RNA, 19 nt, Artificial Sequence
  Description of Artificial Sequence: Synthetic oligonucleotide
  Sense strand starting at position 2281 of SEQ ID NO: 588151
gccucugguagccgaguaa

SEQ ID NO: 845273 - RNA, 19 nt, Artificial Sequence
  Description of Artificial Sequence: Synthetic oligonucleotide
  Antisense strand to SEQ ID NO: 845272
uuacucggcuaccagaggc

SEQ ID NO: 845274 - RNA, 19 nt, Artificial Sequence
  Description of Artificial Sequence: Synthetic oligonucleotide
  Sense strand starting at position 2285 of SEQ ID NO: 588151
cugguagccgaguaaggau

SEQ ID NO: 845275 - RNA, 19 nt, Artificial Sequence
  Description of Artificial Sequence: Synthetic oligonucleotide
  Antisense strand to SEQ ID NO: 845274
auccuuacucggcuaccag

SEQ ID NO: 845276 - RNA, 19 nt, Artificial Sequence
  Description of Artificial Sequence: Synthetic oligonucleotide
  Sense strand starting at position 2416 of SEQ ID NO: 588151
cccaguaagcagugaguaa

SEQ ID NO: 845277 - RNA, 19 nt, Artificial Sequence
  Description of Artificial Sequence: Synthetic oligonucleotide
  Antisense strand to SEQ ID NO: 845276
uuacucacugcuuacuggg

SEQ ID NO: 845278 - RNA, 19 nt, Artificial Sequence
  Description of Artificial Sequence: Synthetic oligonucleotide
  Sense strand starting at position 2417 of SEQ ID NO: 588151
ccaguaagcagugaguaaa

SEQ ID NO: 845279 - RNA, 19 nt, Artificial Sequence
  Description of Artificial Sequence: Synthetic oligonucleotide
  Antisense strand to SEQ ID NO: 845278
uuuacucacugcuuacugg

SEQ ID NO: 845280 - RNA, 19 nt, Artificial Sequence
  Description of Artificial Sequence: Synthetic oligonucleotide
  Sense strand starting at position 2473 of SEQ ID NO: 588151
gguugagguucagagagaa

SEQ ID NO: 845281 - RNA, 19 nt, Artificial Sequence
  Description of Artificial Sequence: Synthetic oligonucleotide
  Antisense strand to SEQ ID NO: 845280
uucucucugaaccucaacc

SEQ ID NO: 845282 - RNA, 19 nt, Artificial Sequence
  Description of Artificial Sequence: Synthetic oligonucleotide
  Sense strand starting at position 2488 of SEQ ID NO: 588151
agaagucucuugcuuguaa

SEQ ID NO: 845283 - RNA, 19 nt, Artificial Sequence
  Description of Artificial Sequence: Synthetic oligonucleotide
  Antisense strand to SEQ ID NO: 845282
uuacaagcaagagacuucu

SEQ ID NO: 845284 - RNA, 19 nt, Artificial Sequence
  Description of Artificial Sequence: Synthetic oligonucleotide
  Sense strand starting at position 2489 of SEQ ID NO: 588151
gaagucucuugcuuguaaa

SEQ ID NO: 845285 - RNA, 19 nt, Artificial Sequence
  Description of Artificial Sequence: Synthetic oligonucleotide
  Antisense strand to SEQ ID NO: 845284
uuuacaagcaagagacuuc

SEQ ID NO: 845286 - RNA, 19 nt, Artificial Sequence
  Description of Artificial Sequence: Synthetic oligonucleotide
  Sense strand starting at position 2549 of SEQ ID NO: 588151
uucucuaccucaggaguuu

SEQ ID NO: 845287 - RNA, 19 nt, Artificial Sequence
  Description of Artificial Sequence: Synthetic oligonucleotide
  Antisense strand to SEQ ID NO: 845286
aaacuccugagguagagaa

SEQ ID NO: 845288 - RNA, 19 nt, Artificial Sequence
  Description of Artificial Sequence: Synthetic oligonucleotide
  Sense strand starting at position 2652 of SEQ ID NO: 588151
gcaguugcuccauagugag

SEQ ID NO: 845289 - RNA, 19 nt, Artificial Sequence
  Description of Artificial Sequence: Synthetic oligonucleotide
  Antisense strand to SEQ ID NO: 845288
cucacuauggagcaacugc

SEQ ID NO: 845290 - RNA, 19 nt, Artificial Sequence
  Description of Artificial Sequence: Synthetic oligonucleotide
  Sense strand starting at position 2851 of SEQ ID NO: 588151
agcugugaguccuucuaga

SEQ ID NO: 845291 - RNA, 19 nt, Artificial Sequence
  Description of Artificial Sequence: Synthetic oligonucleotide
  Antisense strand to SEQ ID NO: 845290
ucuagaaggacucacagcu

SEQ ID NO: 845292 - RNA, 19 nt, Artificial Sequence
  Description of Artificial Sequence: Synthetic oligonucleotide
  Sense strand starting at position 2928 of SEQ ID NO: 588151
cccuuaguucucugacacu

SEQ ID NO: 845293 - RNA, 19 nt, Artificial Sequence
  Description of Artificial Sequence: Synthetic oligonucleotide
  Antisense strand to SEQ ID NO: 845292
agugucagagaacuaaggg

SEQ ID NO: 845294 - RNA, 19 nt, Artificial Sequence
  Description of Artificial Sequence: Synthetic oligonucleotide
  Sense strand starting at position 2942 of SEQ ID NO: 588151
acacuuaaaccugggaugu

SEQ ID NO: 845295 - RNA, 19 nt, Artificial Sequence
  Description of Artificial Sequence: Synthetic oligonucleotide
  Antisense strand to SEQ ID NO: 845294
acaucccagguuuaagugu

SEQ ID NO: 845296 - RNA, 19 nt, Artificial Sequence
  Description of Artificial Sequence: Synthetic oligonucleotide
  Sense strand starting at position 3164 of SEQ ID NO: 588151
gcagcaguuguguguccuu

SEQ ID NO: 845297 - RNA, 19 nt, Artificial Sequence
  Description of Artificial Sequence: Synthetic oligonucleotide
  Antisense strand to SEQ ID NO: 845296
aaggacacacaacugcugc

SEQ ID NO: 845298 - RNA, 19 nt, Artificial Sequence
  Description of Artificial Sequence: Synthetic oligonucleotide
  Sense strand starting at position 3262 of SEQ ID NO: 588151
ucacgacuacccuguauga

SEQ ID NO: 845299 - RNA, 19 nt, Artificial Sequence
  Description of Artificial Sequence: Synthetic oligonucleotide
  Antisense strand to SEQ ID NO: 845298
ucauacaggguagucguga

SEQ ID NO: 845300 - RNA, 19 nt, Artificial Sequence
  Description of Artificial Sequence: Synthetic oligonucleotide
  Sense strand starting at position 3266 of SEQ ID NO: 588151
gacuacccuguaugaagua

SEQ ID NO: 845301 - RNA, 19 nt, Artificial Sequence
  Description of Artificial Sequence: Synthetic oligonucleotide
  Antisense strand to SEQ ID NO: 845300
uacuucauacaggguaguc

SEQ ID NO: 845302 - RNA, 19 nt, Artificial Sequence
  Description of Artificial Sequence: Synthetic oligonucleotide
  Sense strand starting at position 3275 of SEQ ID NO: 588151
guaugaaguaccugugauu

SEQ ID NO: 845303 - RNA, 19 nt, Artificial Sequence
  Description of Artificial Sequence: Synthetic oligonucleotide
  Antisense strand to SEQ ID NO: 845302
aaucacagguacuucauac

SEQ ID NO: 845304 - RNA, 19 nt, Artificial Sequence
  Description of Artificial Sequence: Synthetic oligonucleotide
  Sense strand starting at position 3278 of SEQ ID NO: 588151
ugaaguaccugugauuguu

SEQ ID NO: 845305 - RNA, 19 nt, Artificial Sequence
  Description of Artificial Sequence: Synthetic oligonucleotide
  Antisense strand to SEQ ID NO: 845304
aacaaucacagguacuuca

SEQ ID NO: 845306 - RNA, 19 nt, Artificial Sequence
  Description of Artificial Sequence: Synthetic oligonucleotide
  Sense strand starting at position 3280 of SEQ ID NO: 588151
aaguaccugugauuguuau

SEQ ID NO: 845307 - RNA, 19 nt, Artificial Sequence
  Description of Artificial Sequence: Synthetic oligonucleotide
  Antisense strand to SEQ ID NO: 845306
auaacaaucacagguacuu

SEQ ID NO: 845308 - RNA, 19 nt, Artificial Sequence
  Description of Artificial Sequence: Synthetic oligonucleotide
  Sense strand starting at position 3284 of SEQ ID NO: 588151
accugugauuguuaucuca

SEQ ID NO: 845309 - RNA, 19 nt, Artificial Sequence
  Description of Artificial Sequence: Synthetic oligonucleotide
  Antisense strand to SEQ ID NO: 845308
ugagauaacaaucacaggu

SEQ ID NO: 845310 - RNA, 19 nt, Artificial Sequence
  Description of Artificial Sequence: Synthetic oligonucleotide
  Sense strand starting at position 3286 of SEQ ID NO: 588151
cugugauuguuaucucaau

SEQ ID NO: 845311 - RNA, 19 nt, Artificial Sequence
  Description of Artificial Sequence: Synthetic oligonucleotide
  Antisense strand to SEQ ID NO: 845310
auugagauaacaaucacag

SEQ ID NO: 845312 - RNA, 19 nt, Artificial Sequence
  Description of Artificial Sequence: Synthetic oligonucleotide
  Sense strand starting at position 3287 of SEQ ID NO: 588151
ugugauuguuaucucaaug

SEQ ID NO: 845313 - RNA, 19 nt, Artificial Sequence
  Description of Artificial Sequence: Synthetic oligonucleotide
  Antisense strand to SEQ ID NO: 845312
cauugagauaacaaucaca

SEQ ID NO: 845314 - RNA, 19 nt, Artificial Sequence
  Description of Artificial Sequence: Synthetic oligonucleotide
  Sense strand starting at position 3292 of SEQ ID NO: 588151
uuguuaucucaaugguaug

SEQ ID NO: 845315 - RNA, 19 nt, Artificial Sequence
  Description of Artificial Sequence: Synthetic oligonucleotide
  Antisense strand to SEQ ID NO: 845314
cauaccauugagauaacaa

SEQ ID NO: 845316 - RNA, 19 nt, Artificial Sequence
  Description of Artificial Sequence: Synthetic oligonucleotide
  Sense strand starting at position 3327 of SEQ ID NO: 588151
acagaaugacgguguaucu

SEQ ID NO: 845317 - RNA, 19 nt, Artificial Sequence
  Description of Artificial Sequence: Synthetic oligonucleotide
  Antisense strand to SEQ ID NO: 845316
agauacaccgucauucugu

SEQ ID NO: 845318 - RNA, 19 nt, Artificial Sequence
  Description of Artificial Sequence: Synthetic oligonucleotide
  Sense strand starting at position 3334 of SEQ ID NO: 588151
gacgguguaucuuucccaa

SEQ ID NO: 845319 - RNA, 19 nt, Artificial Sequence
  Description of Artificial Sequence: Synthetic oligonucleotide
  Antisense strand to SEQ ID NO: 845318
uugggaaagauacaccguc

SEQ ID NO: 845320 - RNA, 19 nt, Artificial Sequence
  Description of Artificial Sequence: Synthetic oligonucleotide
  Sense strand starting at position 3383 of SEQ ID NO: 588151
gcuagaauccagugucuga

SEQ ID NO: 845321 - RNA, 19 nt, Artificial Sequence
  Description of Artificial Sequence: Synthetic oligonucleotide
  Antisense strand to SEQ ID NO: 845320
ucagacacuggauucuagc

SEQ ID NO: 845322 - RNA, 19 nt, Artificial Sequence
  Description of Artificial Sequence: Synthetic oligonucleotide
  Sense strand starting at position 3571 of SEQ ID NO: 588151
cacagcgcuccugagaaga

SEQ ID NO: 845323 - RNA, 19 nt, Artificial Sequence
  Description of Artificial Sequence: Synthetic oligonucleotide
  Antisense strand to SEQ ID NO: 845322
ucuucucaggagcgcugug

SEQ ID NO: 845324 - RNA, 19 nt, Artificial Sequence
  Description of Artificial Sequence: Synthetic oligonucleotide
  Sense strand starting at position 3573 of SEQ ID NO: 588151
cagcgcuccugagaagaaa

SEQ ID NO: 845325 - RNA, 19 nt, Artificial Sequence
  Description of Artificial Sequence: Synthetic oligonucleotide
  Antisense strand to SEQ ID NO: 845324
uuucuucucaggagcgcug

SEQ ID NO: 845326 - RNA, 19 nt, Artificial Sequence
  Description of Artificial Sequence: Synthetic oligonucleotide
  Sense strand starting at position 3916 of SEQ ID NO: 588151
gcaccuucuagguaaguga

SEQ ID NO: 845327 - RNA, 19 nt, Artificial Sequence
  Description of Artificial Sequence: Synthetic oligonucleotide
  Antisense strand to SEQ ID NO: 845326
ucacuuaccuagaaggugc

SEQ ID NO: 845328 - RNA, 19 nt, Artificial Sequence
  Description of Artificial Sequence: Synthetic oligonucleotide
  Sense strand starting at position 3923 of SEQ ID NO: 588151
cuagguaagugaucuuggu

SEQ ID NO: 845329 - RNA, 19 nt, Artificial Sequence
  Description of Artificial Sequence: Synthetic oligonucleotide
  Antisense strand to SEQ ID NO: 845328
accaagaucacuuaccuag

SEQ ID NO: 845330 - RNA, 19 nt, Artificial Sequence
  Description of Artificial Sequence: Synthetic oligonucleotide
  Sense strand starting at position 3927 of SEQ ID NO: 588151
guaagugaucuugguggca

SEQ ID NO: 845331 - RNA, 19 nt, Artificial Sequence
  Description of Artificial Sequence: Synthetic oligonucleotide
  Antisense strand to SEQ ID NO: 845330
ugccaccaagaucacuuac

SEQ ID NO: 845332 - RNA, 19 nt, Artificial Sequence
  Description of Artificial Sequence: Synthetic oligonucleotide
  Sense strand starting at position 226 of SEQ ID NO: 588152
ggugguuccacugauauag

SEQ ID NO: 845333 - RNA, 19 nt, Artificial Sequence
  Description of Artificial Sequence: Synthetic oligonucleotide
  Antisense strand to SEQ ID NO: 845332
cuauaucaguggaaccacc

SEQ ID NO: 845334 - RNA, 19 nt, Artificial Sequence
  Description of Artificial Sequence: Synthetic oligonucleotide
  Sense strand starting at position 230 of SEQ ID NO: 588152
guuccacugauauagguga

SEQ ID NO: 845335 - RNA, 19 nt, Artificial Sequence
  Description of Artificial Sequence: Synthetic oligonucleotide
  Antisense strand to SEQ ID NO: 845334
ucaccuauaucaguggaac

SEQ ID NO: 845336 - RNA, 19 nt, Artificial Sequence
  Description of Artificial Sequence: Synthetic oligonucleotide
  Sense strand starting at position 285 of SEQ ID NO: 588152
cugaauaaagaguguuuaa

SEQ ID NO: 845337 - RNA, 19 nt, Artificial Sequence
  Description of Artificial Sequence: Synthetic oligonucleotide
  Antisense strand to SEQ ID NO: 845336
uuaaacacucuuuauucag

SEQ ID NO: 845338 - RNA, 19 nt, Artificial Sequence
  Description of Artificial Sequence: Synthetic oligonucleotide
  Sense strand starting at position 595 of SEQ ID NO: 588152
ucaguaugucuguauugau

SEQ ID NO: 845339 - RNA, 19 nt, Artificial Sequence
  Description of Artificial Sequence: Synthetic oligonucleotide
  Antisense strand to SEQ ID NO: 845338
aucaauacagacauacuga

SEQ ID NO: 845340 - RNA, 19 nt, Artificial Sequence
  Description of Artificial Sequence: Synthetic oligonucleotide
  Sense strand starting at position 668 of SEQ ID NO: 588152
uuuauacuuugggcugaua

SEQ ID NO: 845341 - RNA, 19 nt, Artificial Sequence
  Description of Artificial Sequence: Synthetic oligonucleotide
  Antisense strand to SEQ ID NO: 845340
uaucagcccaaaguauaaa

SEQ ID NO: 845342 - RNA, 19 nt, Artificial Sequence
  Description of Artificial Sequence: Synthetic oligonucleotide
  Sense strand starting at position 671 of SEQ ID NO: 588152
auacuuugggcugauaacu

SEQ ID NO: 845343 - RNA, 19 nt, Artificial Sequence
  Description of Artificial Sequence: Synthetic oligonucleotide
  Antisense strand to SEQ ID NO: 845342
aguuaucagcccaaaguau

SEQ ID NO: 845344 - RNA, 19 nt, Artificial Sequence
  Description of Artificial Sequence: Synthetic oligonucleotide
  Sense strand starting at position 814 of SEQ ID NO: 588152
aguuaucauuaagugcaaa

SEQ ID NO: 845345 - RNA, 19 nt, Artificial Sequence
  Description of Artificial Sequence: Synthetic oligonucleotide
  Antisense strand to SEQ ID NO: 845344
uuugcacuuaaugauaacu

SEQ ID NO: 845346 - RNA, 19 nt, Artificial Sequence
  Description of Artificial Sequence: Synthetic oligonucleotide
  Sense strand starting at position 964 of SEQ ID NO: 588152
gguauauguggccuugugu

SEQ ID NO: 845347 - RNA, 19 nt, Artificial Sequence
  Description of Artificial Sequence: Synthetic oligonucleotide
  Antisense strand to SEQ ID NO: 845346
acacaaggccacauauacc

SEQ ID NO: 845348 - RNA, 19 nt, Artificial Sequence
  Description of Artificial Sequence: Synthetic oligonucleotide
  Sense strand starting at position 978 of SEQ ID NO: 588152
uguguaaccaccuagguua

SEQ ID NO: 845349 - RNA, 19 nt, Artificial Sequence
  Description of Artificial Sequence: Synthetic oligonucleotide
  Antisense strand to SEQ ID NO: 845348
uaaccuaggugguuacaca

SEQ ID NO: 845350 - RNA, 19 nt, Artificial Sequence
  Description of Artificial Sequence: Synthetic oligonucleotide
  Sense strand starting at position 1212 of SEQ ID NO: 588152
uccuaagcuguacaguaua

SEQ ID NO: 845351 - RNA, 19 nt, Artificial Sequence
  Description of Artificial Sequence: Synthetic oligonucleotide
  Antisense strand to SEQ ID NO: 845350
uauacuguacagcuuagga

SEQ ID NO: 845352 - RNA, 19 nt, Artificial Sequence
  Description of Artificial Sequence: Synthetic oligonucleotide
  Sense strand starting at position 1223 of SEQ ID NO: 588152
acaguauagucaccuugga

SEQ ID NO: 845353 - RNA, 19 nt, Artificial Sequence
  Description of Artificial Sequence: Synthetic oligonucleotide
  Antisense strand to SEQ ID NO: 845352
uccaaggugacuauacugu

SEQ ID NO: 845354 - RNA, 19 nt, Artificial Sequence
  Description of Artificial Sequence: Synthetic oligonucleotide
  Sense strand starting at position 1227 of SEQ ID NO: 588152
uauagucaccuuggagagu

SEQ ID NO: 845355 - RNA, 19 nt, Artificial Sequence
  Description of Artificial Sequence: Synthetic oligonucleotide
  Antisense strand to SEQ ID NO: 845354
acucuccaaggugacuaua

SEQ ID NO: 845356 - RNA, 19 nt, Artificial Sequence
  Description of Artificial Sequence: Synthetic oligonucleotide
  Sense strand starting at position 1289 of SEQ ID NO: 588152
cagccaguccuguaucaga

SEQ ID NO: 845357 - RNA, 19 nt, Artificial Sequence
  Description of Artificial Sequence: Synthetic oligonucleotide
  Antisense strand to SEQ ID NO: 845356
ucugauacaggacuggcug

SEQ ID NO: 845358 - RNA, 19 nt, Artificial Sequence
  Description of Artificial Sequence: Synthetic oligonucleotide
  Sense strand starting at position 1374 of SEQ ID NO: 588152
ugguaagauuccuccaccu

SEQ ID NO: 845359 - RNA, 19 nt, Artificial Sequence
  Description of Artificial Sequence: Synthetic oligonucleotide
  Antisense strand to SEQ ID NO: 845358
agguggaggaaucuuacca

SEQ ID NO: 845360 - RNA, 19 nt, Artificial Sequence
  Description of Artificial Sequence: Synthetic oligonucleotide
  Sense strand starting at position 1527 of SEQ ID NO: 588152
agagcaauguguucaugga

SEQ ID NO: 845361 - RNA, 19 nt, Artificial Sequence
  Description of Artificial Sequence: Synthetic oligonucleotide
  Antisense strand to SEQ ID NO: 845360
uccaugaacacauugcucu

SEQ ID NO: 845362 - RNA, 19 nt, Artificial Sequence
  Description of Artificial Sequence: Synthetic oligonucleotide
  Sense strand starting at position 1542 of SEQ ID NO: 588152
uggauaaacuugucucuag

SEQ ID NO: 845363 - RNA, 19 nt, Artificial Sequence
  Description of Artificial Sequence: Synthetic oligonucleotide
  Antisense strand to SEQ ID NO: 845362
cuagagacaaguuuaucca

SEQ ID NO: 845364 - RNA, 19 nt, Artificial Sequence
  Description of Artificial Sequence: Synthetic oligonucleotide
  Sense strand starting at position 1543 of SEQ ID NO: 588152
ggauaaacuugucucuagu

SEQ ID NO: 845365 - RNA, 19 nt, Artificial Sequence
  Description of Artificial Sequence: Synthetic oligonucleotide
  Antisense strand to SEQ ID NO: 845364
acuagagacaaguuuaucc

SEQ ID NO: 845366 - RNA, 19 nt, Artificial Sequence
  Description of Artificial Sequence: Synthetic oligonucleotide
  Sense strand starting at position 1762 of SEQ ID NO: 588152
acuggagucagauacgcau

SEQ ID NO: 845367 - RNA, 19 nt, Artificial Sequence
  Description of Artificial Sequence: Synthetic oligonucleotide
  Antisense strand to SEQ ID NO: 845366
augcguaucugacuccagu

SEQ ID NO: 845368 - RNA, 19 nt, Artificial Sequence
  Description of Artificial Sequence: Synthetic oligonucleotide
  Sense strand starting at position 1784 of SEQ ID NO: 588152
ggcuuaucuccugacuuac

SEQ ID NO: 845369 - RNA, 19 nt, Artificial Sequence
  Description of Artificial Sequence: Synthetic oligonucleotide
  Antisense strand to SEQ ID NO: 845368
guaagucaggagauaagcc

SEQ ID NO: 845370 - RNA, 19 nt, Artificial Sequence
  Description of Artificial Sequence: Synthetic oligonucleotide
  Sense strand starting at position 1794 of SEQ ID NO: 588152
cugacuuacugagugaacu

SEQ ID NO: 845371 - RNA, 19 nt, Artificial Sequence
  Description of Artificial Sequence: Synthetic oligonucleotide
  Antisense strand to SEQ ID NO: 845370
aguucacucaguaagucag

SEQ ID NO: 845372 - RNA, 19 nt, Artificial Sequence
  Description of Artificial Sequence: Synthetic oligonucleotide
  Sense strand starting at position 1795 of SEQ ID NO: 588152
ugacuuacugagugaacuu

SEQ ID NO: 845373 - RNA, 19 nt, Artificial Sequence
  Description of Artificial Sequence: Synthetic oligonucleotide
  Antisense strand to SEQ ID NO: 845372
aaguucacucaguaaguca

SEQ ID NO: 845374 - RNA, 19 nt, Artificial Sequence
  Description of Artificial Sequence: Synthetic oligonucleotide
  Sense strand starting at position 1899 of SEQ ID NO: 588152
ggguucucagaggaaagcu

SEQ ID NO: 845375 - RNA, 19 nt, Artificial Sequence
  Description of Artificial Sequence: Synthetic oligonucleotide
  Antisense strand to SEQ ID NO: 845374
agcuuuccucugagaaccc

SEQ ID NO: 845376 - RNA, 19 nt, Artificial Sequence
  Description of Artificial Sequence: Synthetic oligonucleotide
  Sense strand starting at position 2362 of SEQ ID NO: 588152
ucugaagagauuugcgguu

SEQ ID NO: 845377 - RNA, 19 nt, Artificial Sequence
  Description of Artificial Sequence: Synthetic oligonucleotide
  Antisense strand to SEQ ID NO: 845376
aaccgcaaaucucuucaga

SEQ ID NO: 845378 - RNA, 19 nt, Artificial Sequence
  Description of Artificial Sequence: Synthetic oligonucleotide
  Sense strand starting at position 2392 of SEQ ID NO: 588152
ggagguaugagguaauguc

SEQ ID NO: 845379 - RNA, 19 nt, Artificial Sequence
  Description of Artificial Sequence: Synthetic oligonucleotide
  Antisense strand to SEQ ID NO: 845378
gacauuaccucauaccucc

SEQ ID NO: 845380 - RNA, 19 nt, Artificial Sequence
  Description of Artificial Sequence: Synthetic oligonucleotide
  Sense strand starting at position 2660 of SEQ ID NO: 588152
gggugaguucuugagggac

SEQ ID NO: 845381 - RNA, 19 nt, Artificial Sequence
  Description of Artificial Sequence: Synthetic oligonucleotide
  Antisense strand to SEQ ID NO: 845380
gucccucaagaacucaccc

SEQ ID NO: 845382 - RNA, 19 nt, Artificial Sequence
  Description of Artificial Sequence: Synthetic oligonucleotide
  Sense strand starting at position 2663 of SEQ ID NO: 588152
ugaguucuugagggacucu

SEQ ID NO: 845383 - RNA, 19 nt, Artificial Sequence
  Description of Artificial Sequence: Synthetic oligonucleotide
  Antisense strand to SEQ ID NO: 845382
agagucccucaagaacuca

SEQ ID NO: 845384 - RNA, 19 nt, Artificial Sequence
  Description of Artificial Sequence: Synthetic oligonucleotide
  Sense strand starting at position 2672 of SEQ ID NO: 588152
gagggacucuaucuuguua

SEQ ID NO: 845385 - RNA, 19 nt, Artificial Sequence
  Description of Artificial Sequence: Synthetic oligonucleotide
  Antisense strand to SEQ ID NO: 845384
uaacaagauagagucccuc

SEQ ID NO: 845386 - RNA, 19 nt, Artificial Sequence
  Description of Artificial Sequence: Synthetic oligonucleotide
  Sense strand starting at position 2679 of SEQ ID NO: 588152
ucuaucuuguuagcagaaa

SEQ ID NO: 845387 - RNA, 19 nt, Artificial Sequence
  Description of Artificial Sequence: Synthetic oligonucleotide
  Antisense strand to SEQ ID NO: 845386
uuucugcuaacaagauaga

SEQ ID NO: 845388 - RNA, 19 nt, Artificial Sequence
  Description of Artificial Sequence: Synthetic oligonucleotide
  Sense strand starting at position 2877 of SEQ ID NO: 588152
ggcagagauuuggaaauag

SEQ ID NO: 845389 - RNA, 19 nt, Artificial Sequence
  Description of Artificial Sequence: Synthetic oligonucleotide
  Antisense strand to SEQ ID NO: 845388
cuauuuccaaaucucugcc

SEQ ID NO: 845390 - RNA, 19 nt, Artificial Sequence
  Description of Artificial Sequence: Synthetic oligonucleotide
  Sense strand starting at position 2943 of SEQ ID NO: 588152
auugacgaggguugcaaua

SEQ ID NO: 845391 - RNA, 19 nt, Artificial Sequence
  Description of Artificial Sequence: Synthetic oligonucleotide
  Antisense strand to SEQ ID NO: 845390
uauugcaacccucgucaau

SEQ ID NO: 845392 - RNA, 19 nt, Artificial Sequence
  Description of Artificial Sequence: Synthetic oligonucleotide
  Sense strand starting at position 3120 of SEQ ID NO: 588152
cuuaaaucgcugcauggga

SEQ ID NO: 845393 - RNA, 19 nt, Artificial Sequence
  Description of Artificial Sequence: Synthetic oligonucleotide
  Antisense strand to SEQ ID NO: 845392
ucccaugcagcgauuuaag

SEQ ID NO: 845394 - RNA, 19 nt, Artificial Sequence
  Description of Artificial Sequence: Synthetic oligonucleotide
  Sense strand starting at position 3260 of SEQ ID NO: 588152
ccugaaggagugugguaau

SEQ ID NO: 845395 - RNA, 19 nt, Artificial Sequence
  Description of Artificial Sequence: Synthetic oligonucleotide
  Antisense strand to SEQ ID NO: 845394
auuaccacacuccuucagg

SEQ ID NO: 845396 - RNA, 19 nt, Artificial Sequence
  Description of Artificial Sequence: Synthetic oligonucleotide
  Sense strand starting at position 3281 of SEQ ID NO: 588152
cugugaagggcagaaucuu

SEQ ID NO: 845397 - RNA, 19 nt, Artificial Sequence
  Description of Artificial Sequence: Synthetic oligonucleotide
  Antisense strand to SEQ ID NO: 845396
aagauucugcccuucacag

SEQ ID NO: 845398 - RNA, 19 nt, Artificial Sequence
  Description of Artificial Sequence: Synthetic oligonucleotide
  Sense strand starting at position 3323 of SEQ ID NO: 588152
guuaucaugaggcagguau

SEQ ID NO: 845399 - RNA, 19 nt, Artificial Sequence
  Description of Artificial Sequence: Synthetic oligonucleotide
  Antisense strand to SEQ ID NO: 845398
auaccugccucaugauaac

SEQ ID NO: 845400 - RNA, 19 nt, Artificial Sequence
  Description of Artificial Sequence: Synthetic oligonucleotide
  Sense strand starting at position 3327 of SEQ ID NO: 588152
ucaugaggcagguauggua

SEQ ID NO: 845401 - RNA, 19 nt, Artificial Sequence
  Description of Artificial Sequence: Synthetic oligonucleotide
  Antisense strand to SEQ ID NO: 845400
uaccauaccugccucauga

SEQ ID NO: 845402 - RNA, 19 nt, Artificial Sequence
  Description of Artificial Sequence: Synthetic oligonucleotide
  Sense strand starting at position 3647 of SEQ ID NO: 588152
cauuuaguccugugcuaga

SEQ ID NO: 845403 - RNA, 19 nt, Artificial Sequence
  Description of Artificial Sequence: Synthetic oligonucleotide
  Antisense strand to SEQ ID NO: 845402
ucuagcacaggacuaaaug

SEQ ID NO: 845404 - RNA, 19 nt, Artificial Sequence
  Description of Artificial Sequence: Synthetic oligonucleotide
  Sense strand starting at position 3697 of SEQ ID NO: 588152
cuuugucuccuaggagaca

SEQ ID NO: 845405 - RNA, 19 nt, Artificial Sequence
  Description of Artificial Sequence: Synthetic oligonucleotide
  Antisense strand to SEQ ID NO: 845404
ugucuccuaggagacaaag

SEQ ID NO: 845406 - RNA, 19 nt, Artificial Sequence
  Description of Artificial Sequence: Synthetic oligonucleotide
  Sense strand starting at position 3718 of SEQ ID NO: 588152
aggcaaugucuggagaugu

SEQ ID NO: 845407 - RNA, 19 nt, Artificial Sequence
  Description of Artificial Sequence: Synthetic oligonucleotide
  Antisense strand to SEQ ID NO: 845406
acaucuccagacauugccu

SEQ ID NO: 845408 - RNA, 19 nt, Artificial Sequence
  Description of Artificial Sequence: Synthetic oligonucleotide
  Sense strand starting at position 3770 of SEQ ID NO: 588152
gccucaaguggguagauua

SEQ ID NO: 845409 - RNA, 19 nt, Artificial Sequence
  Description of Artificial Sequence: Synthetic oligonucleotide
  Antisense strand to SEQ ID NO: 845408
uaaucuacccacuugaggc

SEQ ID NO: 845410 - RNA, 19 nt, Artificial Sequence
  Description of Artificial Sequence: Synthetic oligonucleotide
  Sense strand starting at position 3819 of SEQ ID NO: 588152
uuugacaaugugugggaua

SEQ ID NO: 845411 - RNA, 19 nt, Artificial Sequence
  Description of Artificial Sequence: Synthetic oligonucleotide
  Antisense strand to SEQ ID NO: 845410
uaucccacacauugucaaa

SEQ ID NO: 845412 - RNA, 19 nt, Artificial Sequence
  Description of Artificial Sequence: Synthetic oligonucleotide
  Sense strand starting at position 192 of SEQ ID NO: 588153
gagcguaguccgcugauua

SEQ ID NO: 845413 - RNA, 19 nt, Artificial Sequence
  Description of Artificial Sequence: Synthetic oligonucleotide
  Antisense strand to SEQ ID NO: 845412
uaaucagcggacuacgcuc

SEQ ID NO: 845414 - RNA, 19 nt, Artificial Sequence
  Description of Artificial Sequence: Synthetic oligonucleotide
  Sense strand starting at position 204 of SEQ ID NO: 588153
cugauuauucugugggucu

SEQ ID NO: 845415 - RNA, 19 nt, Artificial Sequence
  Description of Artificial Sequence: Synthetic oligonucleotide
  Antisense strand to SEQ ID NO: 845414
agacccacagaauaaucag

SEQ ID NO: 845416 - RNA, 19 nt, Artificial Sequence
  Description of Artificial Sequence: Synthetic oligonucleotide
  Sense strand starting at position 206 of SEQ ID NO: 588153
gauuauucugugggucuuu

SEQ ID NO: 845417 - RNA, 19 nt, Artificial Sequence
  Description of Artificial Sequence: Synthetic oligonucleotide
  Antisense strand to SEQ ID NO: 845416
aaagacccacagaauaauc

SEQ ID NO: 845418 - RNA, 19 nt, Artificial Sequence
  Description of Artificial Sequence: Synthetic oligonucleotide
  Sense strand starting at position 236 of SEQ ID NO: 588153
aggaguuaaccucggaagu

SEQ ID NO: 845419 - RNA, 19 nt, Artificial Sequence
  Description of Artificial Sequence: Synthetic oligonucleotide
  Antisense strand to SEQ ID NO: 845418
acuuccgagguuaacuccu

SEQ ID NO: 845420 - RNA, 19 nt, Artificial Sequence
  Description of Artificial Sequence: Synthetic oligonucleotide
  Sense strand starting at position 488 of SEQ ID NO: 588153
uguaaacgcucuccgagau

SEQ ID NO: 845421 - RNA, 19 nt, Artificial Sequence
  Description of Artificial Sequence: Synthetic oligonucleotide
  Antisense strand to SEQ ID NO: 845420
aucucggagagcguuuaca

SEQ ID NO: 845422 - RNA, 19 nt, Artificial Sequence
  Description of Artificial Sequence: Synthetic oligonucleotide
  Sense strand starting at position 489 of SEQ ID NO: 588153
guaaacgcucuccgagaua

SEQ ID NO: 845423 - RNA, 19 nt, Artificial Sequence
  Description of Artificial Sequence: Synthetic oligonucleotide
  Antisense strand to SEQ ID NO: 845422
uaucucggagagcguuuac

SEQ ID NO: 845424 - RNA, 19 nt, Artificial Sequence
  Description of Artificial Sequence: Synthetic oligonucleotide
  Sense strand starting at position 492 of SEQ ID NO: 588153
aacgcucuccgagauaauu

SEQ ID NO: 845425 - RNA, 19 nt, Artificial Sequence
  Description of Artificial Sequence: Synthetic oligonucleotide
  Antisense strand to SEQ ID NO: 845424
aauuaucucggagagcguu

SEQ ID NO: 845426 - RNA, 19 nt, Artificial Sequence
  Description of Artificial Sequence: Synthetic oligonucleotide
  Sense strand starting at position 501 of SEQ ID NO: 588153
cgagauaauuaagcuauca

SEQ ID NO: 845427 - RNA, 19 nt, Artificial Sequence
  Description of Artificial Sequence: Synthetic oligonucleotide
  Antisense strand to SEQ ID NO: 845426
ugauagcuuaauuaucucg

SEQ ID NO: 845428 - RNA, 19 nt, Artificial Sequence
  Description of Artificial Sequence: Synthetic oligonucleotide
  Sense strand starting at position 516 of SEQ ID NO: 588153
aucaauuacccggguggga

SEQ ID NO: 845429 - RNA, 19 nt, Artificial Sequence
  Description of Artificial Sequence: Synthetic oligonucleotide
  Antisense strand to SEQ ID NO: 845428
ucccacccggguaauugau

SEQ ID NO: 845430 - RNA, 19 nt, Artificial Sequence
  Description of Artificial Sequence: Synthetic oligonucleotide
  Sense strand starting at position 518 of SEQ ID NO: 588153
caauuacccgggugggaaa

SEQ ID NO: 845431 - RNA, 19 nt, Artificial Sequence
  Description of Artificial Sequence: Synthetic oligonucleotide
  Antisense strand to SEQ ID NO: 845430
uuucccacccggguaauug

SEQ ID NO: 845432 - RNA, 19 nt, Artificial Sequence
  Description of Artificial Sequence: Synthetic oligonucleotide
  Sense strand starting at position 567 of SEQ ID NO: 588153
ggccgacuccuccgggauu

SEQ ID NO: 845433 - RNA, 19 nt, Artificial Sequence
  Description of Artificial Sequence: Synthetic oligonucleotide
  Antisense strand to SEQ ID NO: 845432
aaucccggaggagucggcc

SEQ ID NO: 845434 - RNA, 19 nt, Artificial Sequence
  Description of Artificial Sequence: Synthetic oligonucleotide
  Sense strand starting at position 578 of SEQ ID NO: 588153
ccgggauucgcgcagggaa

SEQ ID NO: 845435 - RNA, 19 nt, Artificial Sequence
  Description of Artificial Sequence: Synthetic oligonucleotide
  Antisense strand to SEQ ID NO: 845434
uucccugcgcgaaucccgg

SEQ ID NO: 845436 - RNA, 19 nt, Artificial Sequence
  Description of Artificial Sequence: Synthetic oligonucleotide
  Sense strand starting at position 955 of SEQ ID NO: 588153
agcgauuccacacggaacu

SEQ ID NO: 845437 - RNA, 19 nt, Artificial Sequence
  Description of Artificial Sequence: Synthetic oligonucleotide
  Antisense strand to SEQ ID NO: 845436
aguuccguguggaaucgcu

SEQ ID NO: 845438 - RNA, 19 nt, Artificial Sequence
  Description of Artificial Sequence: Synthetic oligonucleotide
  Sense strand starting at position 956 of SEQ ID NO: 588153
gcgauuccacacggaacua

SEQ ID NO: 845439 - RNA, 19 nt, Artificial Sequence
  Description of Artificial Sequence: Synthetic oligonucleotide
  Antisense strand to SEQ ID NO: 845438
uaguuccguguggaaucgc

SEQ ID NO: 845440 - RNA, 19 nt, Artificial Sequence
  Description of Artificial Sequence: Synthetic oligonucleotide
  Sense strand starting at position 1066 of SEQ ID NO: 588153
ugacgguacccggagaagu

SEQ ID NO: 845441 - RNA, 19 nt, Artificial Sequence
  Description of Artificial Sequence: Synthetic oligonucleotide
  Antisense strand to SEQ ID NO: 845440
acuucuccggguaccguca

SEQ ID NO: 845442 - RNA, 19 nt, Artificial Sequence
  Description of Artificial Sequence: Synthetic oligonucleotide
  Sense strand starting at position 1086 of SEQ ID NO: 588153
ggaggcucgaccugaaacu

SEQ ID NO: 845443 - RNA, 19 nt, Artificial Sequence
  Description of Artificial Sequence: Synthetic oligonucleotide
  Antisense strand to SEQ ID NO: 845442
aguuucaggucgagccucc

SEQ ID NO: 845444 - RNA, 19 nt, Artificial Sequence
  Description of Artificial Sequence: Synthetic oligonucleotide
  Sense strand starting at position 1162 of SEQ ID NO: 588153
uccggcuuccgggauggau

SEQ ID NO: 845445 - RNA, 19 nt, Artificial Sequence
  Description of Artificial Sequence: Synthetic oligonucleotide
  Antisense strand to SEQ ID NO: 845444
auccaucccggaagccgga

SEQ ID NO: 845446 - RNA, 19 nt, Artificial Sequence
  Description of Artificial Sequence: Synthetic oligonucleotide
  Sense strand starting at position 1449 of SEQ ID NO: 588153
cagccuuacccagggugaa

SEQ ID NO: 845447 - RNA, 19 nt, Artificial Sequence
  Description of Artificial Sequence: Synthetic oligonucleotide
  Antisense strand to SEQ ID NO: 845446
uucacccuggguaaggcug

SEQ ID NO: 845448 - RNA, 19 nt, Artificial Sequence
  Description of Artificial Sequence: Synthetic oligonucleotide
  Sense strand starting at position 2810 of SEQ ID NO: 588153
ucugcucucugugugaaau

SEQ ID NO: 845449 - RNA, 19 nt, Artificial Sequence
  Description of Artificial Sequence: Synthetic oligonucleotide
  Antisense strand to SEQ ID NO: 845448
auuucacacagagagcaga

SEQ ID NO: 845450 - RNA, 19 nt, Artificial Sequence
  Description of Artificial Sequence: Synthetic oligonucleotide
  Sense strand starting at position 2918 of SEQ ID NO: 588153
gggagugcucaccaauucu

SEQ ID NO: 845451 - RNA, 19 nt, Artificial Sequence
  Description of Artificial Sequence: Synthetic oligonucleotide
  Antisense strand to SEQ ID NO: 845450
agaauuggugagcacuccc

SEQ ID NO: 845452 - RNA, 19 nt, Artificial Sequence
  Description of Artificial Sequence: Synthetic oligonucleotide
  Sense strand starting at position 2940 of SEQ ID NO: 588153
ccugcagucuuucuagacu

SEQ ID NO: 845453 - RNA, 19 nt, Artificial Sequence
  Description of Artificial Sequence: Synthetic oligonucleotide
  Antisense strand to SEQ ID NO: 845452
agucuagaaagacugcagg

SEQ ID NO: 845454 - RNA, 19 nt, Artificial Sequence
  Description of Artificial Sequence: Synthetic oligonucleotide
  Sense strand starting at position 2943 of SEQ ID NO: 588153
gcagucuuucuagacucaa

SEQ ID NO: 845455 - RNA, 19 nt, Artificial Sequence
  Description of Artificial Sequence: Synthetic oligonucleotide
  Antisense strand to SEQ ID NO: 845454
uugagucuagaaagacugc

SEQ ID NO: 845456 - RNA, 19 nt, Artificial Sequence
  Description of Artificial Sequence: Synthetic oligonucleotide
  Sense strand starting at position 2964 of SEQ ID NO: 588153
ugagcuagguccucagauu

SEQ ID NO: 845457 - RNA, 19 nt, Artificial Sequence
  Description of Artificial Sequence: Synthetic oligonucleotide
  Antisense strand to SEQ ID NO: 845456
aaucugaggaccuagcuca

SEQ ID NO: 845458 - RNA, 19 nt, Artificial Sequence
  Description of Artificial Sequence: Synthetic oligonucleotide
  Sense strand starting at position 2965 of SEQ ID NO: 588153
gagcuagguccucagauuc

SEQ ID NO: 845459 - RNA, 19 nt, Artificial Sequence
  Description of Artificial Sequence: Synthetic oligonucleotide
  Antisense strand to SEQ ID NO: 845458
gaaucugaggaccuagcuc

SEQ ID NO: 845460 - RNA, 19 nt, Artificial Sequence
  Description of Artificial Sequence: Synthetic oligonucleotide
  Sense strand starting at position 3192 of SEQ ID NO: 588153
ccuauaauuugugagcaac

SEQ ID NO: 845461 - RNA, 19 nt, Artificial Sequence
  Description of Artificial Sequence: Synthetic oligonucleotide
  Antisense strand to SEQ ID NO: 845460
guugcucacaaauuauagg

SEQ ID NO: 845462 - RNA, 19 nt, Artificial Sequence
  Description of Artificial Sequence: Synthetic oligonucleotide
  Sense strand starting at position 3213 of SEQ ID NO: 588153
cucaucucugucuagcuua

SEQ ID NO: 845463 - RNA, 19 nt, Artificial Sequence
  Description of Artificial Sequence: Synthetic oligonucleotide
  Antisense strand to SEQ ID NO: 845462
uaagcuagacagagaugag

SEQ ID NO: 845464 - RNA, 19 nt, Artificial Sequence
  Description of Artificial Sequence: Synthetic oligonucleotide
  Sense strand starting at position 3429 of SEQ ID NO: 588153
uggacuuaauguguuuaaa

SEQ ID NO: 845465 - RNA, 19 nt, Artificial Sequence
  Description of Artificial Sequence: Synthetic oligonucleotide
  Antisense strand to SEQ ID NO: 845464
uuuaaacacauuaagucca

SEQ ID NO: 845466 - RNA, 19 nt, Artificial Sequence
  Description of Artificial Sequence: Synthetic oligonucleotide
  Sense strand starting at position 3431 of SEQ ID NO: 588153
gacuuaauguguuuaaagc

SEQ ID NO: 845467 - RNA, 19 nt, Artificial Sequence
  Description of Artificial Sequence: Synthetic oligonucleotide
  Antisense strand to SEQ ID NO: 845466
gcuuuaaacacauuaaguc

SEQ ID NO: 845468 - RNA, 19 nt, Artificial Sequence
  Description of Artificial Sequence: Synthetic oligonucleotide
  Sense strand starting at position 3453 of SEQ ID NO: 588153
cuccaaaugcuagacaugu

SEQ ID NO: 845469 - RNA, 19 nt, Artificial Sequence
  Description of Artificial Sequence: Synthetic oligonucleotide
  Antisense strand to SEQ ID NO: 845468
acaugucuagcauuuggag

SEQ ID NO: 845470 - RNA, 19 nt, Artificial Sequence
  Description of Artificial Sequence: Synthetic oligonucleotide
  Sense strand starting at position 3459 of SEQ ID NO: 588153
augcuagacauguacguau

SEQ ID NO: 845471 - RNA, 19 nt, Artificial Sequence
  Description of Artificial Sequence: Synthetic oligonucleotide
  Antisense strand to SEQ ID NO: 845470
auacguacaugucuagcau

SEQ ID NO: 845472 - RNA, 19 nt, Artificial Sequence
  Description of Artificial Sequence: Synthetic oligonucleotide
  Sense strand starting at position 3462 of SEQ ID NO: 588153
cuagacauguacguauguu

SEQ ID NO: 845473 - RNA, 19 nt, Artificial Sequence
  Description of Artificial Sequence: Synthetic oligonucleotide
  Antisense strand to SEQ ID NO: 845472
aacauacguacaugucuag

SEQ ID NO: 845474 - RNA, 19 nt, Artificial Sequence
  Description of Artificial Sequence: Synthetic oligonucleotide
  Sense strand starting at position 3657 of SEQ ID NO: 588153
auuacacuguccucaguga

SEQ ID NO: 845475 - RNA, 19 nt, Artificial Sequence
  Description of Artificial Sequence: Synthetic oligonucleotide
  Antisense strand to SEQ ID NO: 845474
ucacugaggacaguguaau

SEQ ID NO: 845476 - RNA, 19 nt, Artificial Sequence
  Description of Artificial Sequence: Synthetic oligonucleotide
  Sense strand starting at position 3712 of SEQ ID NO: 588153
gguaaaucugcauaagcac

SEQ ID NO: 845477 - RNA, 19 nt, Artificial Sequence
  Description of Artificial Sequence: Synthetic oligonucleotide
  Antisense strand to SEQ ID NO: 845476
gugcuuaugcagauuuacc

SEQ ID NO: 845478 - RNA, 19 nt, Artificial Sequence
  Description of Artificial Sequence: Synthetic oligonucleotide
  Sense strand starting at position 3738 of SEQ ID NO: 588153
ucuacuucccugugagguu

SEQ ID NO: 845479 - RNA, 19 nt, Artificial Sequence
  Description of Artificial Sequence: Synthetic oligonucleotide
  Antisense strand to SEQ ID NO: 845478
aaccucacagggaaguaga

SEQ ID NO: 845480 - RNA, 19 nt, Artificial Sequence
  Description of Artificial Sequence: Synthetic oligonucleotide
  Sense strand starting at position 3752 of SEQ ID NO: 588153
agguuuguaagguauacuu

SEQ ID NO: 845481 - RNA, 19 nt, Artificial Sequence
  Description of Artificial Sequence: Synthetic oligonucleotide
  Antisense strand to SEQ ID NO: 845480
aaguauaccuuacaaaccu

SEQ ID NO: 845482 - RNA, 19 nt, Artificial Sequence
  Description of Artificial Sequence: Synthetic oligonucleotide
  Sense strand starting at position 3754 of SEQ ID NO: 588153
guuuguaagguauacuucu

SEQ ID NO: 845483 - RNA, 19 nt, Artificial Sequence
  Description of Artificial Sequence: Synthetic oligonucleotide
  Antisense strand to SEQ ID NO: 845482
agaaguauaccuuacaaac

SEQ ID NO: 845484 - RNA, 19 nt, Artificial Sequence
  Description of Artificial Sequence: Synthetic oligonucleotide
  Sense strand starting at position 3773 of SEQ ID NO: 588153
ccugucucaguuuacuaau

SEQ ID NO: 845485 - RNA, 19 nt, Artificial Sequence
  Description of Artificial Sequence: Synthetic oligonucleotide
  Antisense strand to SEQ ID NO: 845484
auuaguaaacugagacagg

SEQ ID NO: 845486 - RNA, 19 nt, Artificial Sequence
  Description of Artificial Sequence: Synthetic oligonucleotide
  Sense strand starting at position 3822 of SEQ ID NO: 588153
gguggaaucuggccuuuca

SEQ ID NO: 845487 - RNA, 19 nt, Artificial Sequence
  Description of Artificial Sequence: Synthetic oligonucleotide
  Antisense strand to SEQ ID NO: 845486
ugaaaggccagauuccacc

SEQ ID NO: 845488 - RNA, 19 nt, Artificial Sequence
  Description of Artificial Sequence: Synthetic oligonucleotide
  Sense strand starting at position 3932 of SEQ ID NO: 588153
ucuccuuuguguccuuaca

SEQ ID NO: 845489 - RNA, 19 nt, Artificial Sequence
  Description of Artificial Sequence: Synthetic oligonucleotide
  Antisense strand to SEQ ID NO: 845488
uguaaggacacaaaggaga

SEQ ID NO: 845490 - RNA, 19 nt, Artificial Sequence
  Description of Artificial Sequence: Synthetic oligonucleotide
  Sense strand starting at position 3934 of SEQ ID NO: 588153
uccuuuguguccuuacaau

SEQ ID NO: 845491 - RNA, 19 nt, Artificial Sequence
  Description of Artificial Sequence: Synthetic oligonucleotide
  Antisense strand to SEQ ID NO: 845490
auuguaaggacacaaagga

SEQ ID NO: 845492 - RNA, 19 nt, Artificial Sequence
  Description of Artificial Sequence: Synthetic oligonucleotide
  Sense strand starting at position 274 of SEQ ID NO: 588154
ggugguuccacugauauag

SEQ ID NO: 845493 - RNA, 19 nt, Artificial Sequence
  Description of Artificial Sequence: Synthetic oligonucleotide
  Antisense strand to SEQ ID NO: 845492
cuauaucaguggaaccacc

SEQ ID NO: 845494 - RNA, 19 nt, Artificial Sequence
  Description of Artificial Sequence: Synthetic oligonucleotide
  Sense strand starting at position 278 of SEQ ID NO: 588154
guuccacugauauagguga

SEQ ID NO: 845495 - RNA, 19 nt, Artificial Sequence
  Description of Artificial Sequence: Synthetic oligonucleotide
  Antisense strand to SEQ ID NO: 845494
ucaccuauaucaguggaac

SEQ ID NO: 845496 - RNA, 19 nt, Artificial Sequence
  Description of Artificial Sequence: Synthetic oligonucleotide
  Sense strand starting at position 333 of SEQ ID NO: 588154
cugaauaaagaguguuuaa

SEQ ID NO: 845497 - RNA, 19 nt, Artificial Sequence
  Description of Artificial Sequence: Synthetic oligonucleotide
  Antisense strand to SEQ ID NO: 845496
uuaaacacucuuuauucag

SEQ ID NO: 845498 - RNA, 19 nt, Artificial Sequence
  Description of Artificial Sequence: Synthetic oligonucleotide
  Sense strand starting at position 643 of SEQ ID NO: 588154
ucaguaugucuguauugau

SEQ ID NO: 845499 - RNA, 19 nt, Artificial Sequence
  Description of Artificial Sequence: Synthetic oligonucleotide
  Antisense strand to SEQ ID NO: 845498
aucaauacagacauacuga

SEQ ID NO: 845500 - RNA, 19 nt, Artificial Sequence
  Description of Artificial Sequence: Synthetic oligonucleotide
  Sense strand starting at position 716 of SEQ ID NO: 588154
uuuauacuuugggcugaua

SEQ ID NO: 845501 - RNA, 19 nt, Artificial Sequence
  Description of Artificial Sequence: Synthetic oligonucleotide
  Antisense strand to SEQ ID NO: 845500
uaucagcccaaaguauaaa

SEQ ID NO: 845502 - RNA, 19 nt, Artificial Sequence
  Description of Artificial Sequence: Synthetic oligonucleotide
  Sense strand starting at position 719 of SEQ ID NO: 588154
auacuuugggcugauaacu

SEQ ID NO: 845503 - RNA, 19 nt, Artificial Sequence
  Description of Artificial Sequence: Synthetic oligonucleotide
  Antisense strand to SEQ ID NO: 845502
aguuaucagcccaaaguau

SEQ ID NO: 845504 - RNA, 19 nt, Artificial Sequence
  Description of Artificial Sequence: Synthetic oligonucleotide
  Sense strand starting at position 862 of SEQ ID NO: 588154
aguuaucauuaagugcaaa

SEQ ID NO: 845505 - RNA, 19 nt, Artificial Sequence
  Description of Artificial Sequence: Synthetic oligonucleotide
  Antisense strand to SEQ ID NO: 845504
uuugcacuuaaugauaacu

SEQ ID NO: 845506 - RNA, 19 nt, Artificial Sequence
  Description of Artificial Sequence: Synthetic oligonucleotide
  Sense strand starting at position 1012 of SEQ ID NO: 588154
gguauauguggccuugugu

SEQ ID NO: 845507 - RNA, 19 nt, Artificial Sequence
  Description of Artificial Sequence: Synthetic oligonucleotide
  Antisense strand to SEQ ID NO: 845506
acacaaggccacauauacc

SEQ ID NO: 845508 - RNA, 19 nt, Artificial Sequence
  Description of Artificial Sequence: Synthetic oligonucleotide
  Sense strand starting at position 1026 of SEQ ID NO: 588154
uguguaaccaccuagguua

SEQ ID NO: 845509 - RNA, 19 nt, Artificial Sequence
  Description of Artificial Sequence: Synthetic oligonucleotide
  Antisense strand to SEQ ID NO: 845508
uaaccuaggugguuacaca

SEQ ID NO: 845510 - RNA, 19 nt, Artificial Sequence
  Description of Artificial Sequence: Synthetic oligonucleotide
  Sense strand starting at position 1260 of SEQ ID NO: 588154
uccuaagcuguacaguaua

SEQ ID NO: 845511 - RNA, 19 nt, Artificial Sequence
  Description of Artificial Sequence: Synthetic oligonucleotide
  Antisense strand to SEQ ID NO: 845510
uauacuguacagcuuagga

SEQ ID NO: 845512 - RNA, 19 nt, Artificial Sequence
  Description of Artificial Sequence: Synthetic oligonucleotide
  Sense strand starting at position 1271 of SEQ ID NO: 588154
acaguauagucaccuugga

SEQ ID NO: 845513 - RNA, 19 nt, Artificial Sequence
  Description of Artificial Sequence: Synthetic oligonucleotide
  Antisense strand to SEQ ID NO: 845512
uccaaggugacuauacugu

SEQ ID NO: 845514 - RNA, 19 nt, Artificial Sequence
  Description of Artificial Sequence: Synthetic oligonucleotide
  Sense strand starting at position 1275 of SEQ ID NO: 588154
uauagucaccuuggagagu

SEQ ID NO: 845515 - RNA, 19 nt, Artificial Sequence
  Description of Artificial Sequence: Synthetic oligonucleotide
  Antisense strand to SEQ ID NO: 845514
acucuccaaggugacuaua

SEQ ID NO: 845516 - RNA, 19 nt, Artificial Sequence
  Description of Artificial Sequence: Synthetic oligonucleotide
  Sense strand starting at position 1337 of SEQ ID NO: 588154
cagccaguccuguaucaga

SEQ ID NO: 845517 - RNA, 19 nt, Artificial Sequence
  Description of Artificial Sequence: Synthetic oligonucleotide
  Antisense strand to SEQ ID NO: 845516
ucugauacaggacuggcug

SEQ ID NO: 845518 - RNA, 19 nt, Artificial Sequence
  Description of Artificial Sequence: Synthetic oligonucleotide
  Sense strand starting at position 1422 of SEQ ID NO: 588154
ugguaagauuccuccaccu

SEQ ID NO: 845519 - RNA, 19 nt, Artificial Sequence
  Description of Artificial Sequence: Synthetic oligonucleotide
  Antisense strand to SEQ ID NO: 845518
agguggaggaaucuuacca

SEQ ID NO: 845520 - RNA, 19 nt, Artificial Sequence
  Description of Artificial Sequence: Synthetic oligonucleotide
  Sense strand starting at position 1575 of SEQ ID NO: 588154
agagcaauguguucaugga

SEQ ID NO: 845521 - RNA, 19 nt, Artificial Sequence
  Description of Artificial Sequence: Synthetic oligonucleotide
  Antisense strand to SEQ ID NO: 845520
uccaugaacacauugcucu

SEQ ID NO: 845522 - RNA, 19 nt, Artificial Sequence
  Description of Artificial Sequence: Synthetic oligonucleotide
  Sense strand starting at position 1590 of SEQ ID NO: 588154
uggauaaacuugucucuag

SEQ ID NO: 845523 - RNA, 19 nt, Artificial Sequence
  Description of Artificial Sequence: Synthetic oligonucleotide
  Antisense strand to SEQ ID NO: 845522
cuagagacaaguuuaucca

SEQ ID NO: 845524 - RNA, 19 nt, Artificial Sequence
  Description of Artificial Sequence: Synthetic oligonucleotide
  Sense strand starting at position 1591 of SEQ ID NO: 588154
ggauaaacuugucucuagu

SEQ ID NO: 845525 - RNA, 19 nt, Artificial Sequence
  Description of Artificial Sequence: Synthetic oligonucleotide
  Antisense strand to SEQ ID NO: 845524
acuagagacaaguuuaucc

SEQ ID NO: 845526 - RNA, 19 nt, Artificial Sequence
  Description of Artificial Sequence: Synthetic oligonucleotide
  Sense strand starting at position 1810 of SEQ ID NO: 588154
acuggagucagauacgcau

SEQ ID NO: 845527 - RNA, 19 nt, Artificial Sequence
  Description of Artificial Sequence: Synthetic oligonucleotide
  Antisense strand to SEQ ID NO: 845526
augcguaucugacuccagu

SEQ ID NO: 845528 - RNA, 19 nt, Artificial Sequence
  Description of Artificial Sequence: Synthetic oligonucleotide
  Sense strand starting at position 1832 of SEQ ID NO: 588154
ggcuuaucuccugacuuac

SEQ ID NO: 845529 - RNA, 19 nt, Artificial Sequence
  Description of Artificial Sequence: Synthetic oligonucleotide
  Antisense strand to SEQ ID NO: 845528
guaagucaggagauaagcc

SEQ ID NO: 845530 - RNA, 19 nt, Artificial Sequence
  Description of Artificial Sequence: Synthetic oligonucleotide
  Sense strand starting at position 1842 of SEQ ID NO: 588154
cugacuuacugagugaacu

SEQ ID NO: 845531 - RNA, 19 nt, Artificial Sequence
  Description of Artificial Sequence: Synthetic oligonucleotide
  Antisense strand to SEQ ID NO: 845530
aguucacucaguaagucag

SEQ ID NO: 845532 - RNA, 19 nt, Artificial Sequence
  Description of Artificial Sequence: Synthetic oligonucleotide
  Sense strand starting at position 1843 of SEQ ID NO: 588154
ugacuuacugagugaacuu

SEQ ID NO: 845533 - RNA, 19 nt, Artificial Sequence
  Description of Artificial Sequence: Synthetic oligonucleotide
  Antisense strand to SEQ ID NO: 845532
aaguucacucaguaaguca

SEQ ID NO: 845534 - RNA, 19 nt, Artificial Sequence
  Description of Artificial Sequence: Synthetic oligonucleotide
  Sense strand starting at position 1947 of SEQ ID NO: 588154
ggguucucagaggaaagcu

SEQ ID NO: 845535 - RNA, 19 nt, Artificial Sequence
  Description of Artificial Sequence: Synthetic oligonucleotide
  Antisense strand to SEQ ID NO: 845534
agcuuuccucugagaaccc

SEQ ID NO: 845536 - RNA, 19 nt, Artificial Sequence
  Description of Artificial Sequence: Synthetic oligonucleotide
  Sense strand starting at position 2410 of SEQ ID NO: 588154
ucugaagagauuugcgguu

SEQ ID NO: 845537 - RNA, 19 nt, Artificial Sequence
  Description of Artificial Sequence: Synthetic oligonucleotide
  Antisense strand to SEQ ID NO: 845536
aaccgcaaaucucuucaga

SEQ ID NO: 845538 - RNA, 19 nt, Artificial Sequence
  Description of Artificial Sequence: Synthetic oligonucleotide
  Sense strand starting at position 2440 of SEQ ID NO: 588154
ggagguaugagguaauguc

SEQ ID NO: 845539 - RNA, 19 nt, Artificial Sequence
  Description of Artificial Sequence: Synthetic oligonucleotide
  Antisense strand to SEQ ID NO: 845538
gacauuaccucauaccucc

SEQ ID NO: 845540 - RNA, 19 nt, Artificial Sequence
  Description of Artificial Sequence: Synthetic oligonucleotide
  Sense strand starting at position 2708 of SEQ ID NO: 588154
gggugaguucuugagggac

SEQ ID NO: 845541 - RNA, 19 nt, Artificial Sequence
  Description of Artificial Sequence: Synthetic oligonucleotide
  Antisense strand to SEQ ID NO: 845540
gucccucaagaacucaccc

SEQ ID NO: 845542 - RNA, 19 nt, Artificial Sequence
  Description of Artificial Sequence: Synthetic oligonucleotide
  Sense strand starting at position 2711 of SEQ ID NO: 588154
ugaguucuugagggacucu

SEQ ID NO: 845543 - RNA, 19 nt, Artificial Sequence
  Description of Artificial Sequence: Synthetic oligonucleotide
  Antisense strand to SEQ ID NO: 845542
agagucccucaagaacuca

SEQ ID NO: 845544 - RNA, 19 nt, Artificial Sequence
  Description of Artificial Sequence: Synthetic oligonucleotide
  Sense strand starting at position 2720 of SEQ ID NO: 588154
gagggacucuaucuuguua

SEQ ID NO: 845545 - RNA, 19 nt, Artificial Sequence
  Description of Artificial Sequence: Synthetic oligonucleotide
  Antisense strand to SEQ ID NO: 845544
uaacaagauagagucccuc

SEQ ID NO: 845546 - RNA, 19 nt, Artificial Sequence
  Description of Artificial Sequence: Synthetic oligonucleotide
  Sense strand starting at position 2727 of SEQ ID NO: 588154
ucuaucuuguuagcagaaa

SEQ ID NO: 845547 - RNA, 19 nt, Artificial Sequence
  Description of Artificial Sequence: Synthetic oligonucleotide
  Antisense strand to SEQ ID NO: 845546
uuucugcuaacaagauaga

SEQ ID NO: 845548 - RNA, 19 nt, Artificial Sequence
  Description of Artificial Sequence: Synthetic oligonucleotide
  Sense strand starting at position 2925 of SEQ ID NO: 588154
ggcagagauuuggaaauag

SEQ ID NO: 845549 - RNA, 19 nt, Artificial Sequence
  Description of Artificial Sequence: Synthetic oligonucleotide
  Antisense strand to SEQ ID NO: 845548
cuauuuccaaaucucugcc

SEQ ID NO: 845550 - RNA, 19 nt, Artificial Sequence
  Description of Artificial Sequence: Synthetic oligonucleotide
  Sense strand starting at position 2991 of SEQ ID NO: 588154
auugacgaggguugcaaua

SEQ ID NO: 845551 - RNA, 19 nt, Artificial Sequence
  Description of Artificial Sequence: Synthetic oligonucleotide
  Antisense strand to SEQ ID NO: 845550
uauugcaacccucgucaau

SEQ ID NO: 845552 - RNA, 19 nt, Artificial Sequence
  Description of Artificial Sequence: Synthetic oligonucleotide
  Sense strand starting at position 3168 of SEQ ID NO: 588154
cuuaaaucgcugcauggga

SEQ ID NO: 845553 - RNA, 19 nt, Artificial Sequence
  Description of Artificial Sequence: Synthetic oligonucleotide
  Antisense strand to SEQ ID NO: 845552
ucccaugcagcgauuuaag

SEQ ID NO: 845554 - RNA, 19 nt, Artificial Sequence
  Description of Artificial Sequence: Synthetic oligonucleotide
  Sense strand starting at position 3308 of SEQ ID NO: 588154
ccugaaggagugugguaau

SEQ ID NO: 845555 - RNA, 19 nt, Artificial Sequence
  Description of Artificial Sequence: Synthetic oligonucleotide
  Antisense strand to SEQ ID NO: 845554
auuaccacacuccuucagg

SEQ ID NO: 845556 - RNA, 19 nt, Artificial Sequence
  Description of Artificial Sequence: Synthetic oligonucleotide
  Sense strand starting at position 3329 of SEQ ID NO: 588154
cugugaagggcagaaucuu

SEQ ID NO: 845557 - RNA, 19 nt, Artificial Sequence
  Description of Artificial Sequence: Synthetic oligonucleotide
  Antisense strand to SEQ ID NO: 845556
aagauucugcccuucacag

SEQ ID NO: 845558 - RNA, 19 nt, Artificial Sequence
  Description of Artificial Sequence: Synthetic oligonucleotide
  Sense strand starting at position 3371 of SEQ ID NO: 588154
guuaucaugaggcagguau

SEQ ID NO: 845559 - RNA, 19 nt, Artificial Sequence
  Description of Artificial Sequence: Synthetic oligonucleotide
  Antisense strand to SEQ ID NO: 845558
auaccugccucaugauaac

SEQ ID NO: 845560 - RNA, 19 nt, Artificial Sequence
  Description of Artificial Sequence: Synthetic oligonucleotide
  Sense strand starting at position 3375 of SEQ ID NO: 588154
ucaugaggcagguauggua

SEQ ID NO: 845561 - RNA, 19 nt, Artificial Sequence
  Description of Artificial Sequence: Synthetic oligonucleotide
  Antisense strand to SEQ ID NO: 845560
uaccauaccugccucauga

SEQ ID NO: 845562 - RNA, 19 nt, Artificial Sequence
  Description of Artificial Sequence: Synthetic oligonucleotide
  Sense strand starting at position 3695 of SEQ ID NO: 588154
cauuuaguccugugcuaga

SEQ ID NO: 845563 - RNA, 19 nt, Artificial Sequence
  Description of Artificial Sequence: Synthetic oligonucleotide
  Antisense strand to SEQ ID NO: 845562
ucuagcacaggacuaaaug

SEQ ID NO: 845564 - RNA, 19 nt, Artificial Sequence
  Description of Artificial Sequence: Synthetic oligonucleotide
  Sense strand starting at position 3745 of SEQ ID NO: 588154
cuuugucuccuaggagaca

SEQ ID NO: 845565 - RNA, 19 nt, Artificial Sequence
  Description of Artificial Sequence: Synthetic oligonucleotide
  Antisense strand to SEQ ID NO: 845564
ugucuccuaggagacaaag

SEQ ID NO: 845566 - RNA, 19 nt, Artificial Sequence
  Description of Artificial Sequence: Synthetic oligonucleotide
  Sense strand starting at position 3766 of SEQ ID NO: 588154
aggcaaugucuggagaugu

SEQ ID NO: 845567 - RNA, 19 nt, Artificial Sequence
  Description of Artificial Sequence: Synthetic oligonucleotide
  Antisense strand to SEQ ID NO: 845566
acaucuccagacauugccu

SEQ ID NO: 845568 - RNA, 19 nt, Artificial Sequence
  Description of Artificial Sequence: Synthetic oligonucleotide
  Sense strand starting at position 3818 of SEQ ID NO: 588154
gccucaaguggguagauua

SEQ ID NO: 845569 - RNA, 19 nt, Artificial Sequence
  Description of Artificial Sequence: Synthetic oligonucleotide
  Antisense strand to SEQ ID NO: 845568
uaaucuacccacuugaggc

SEQ ID NO: 845570 - RNA, 19 nt, Artificial Sequence
  Description of Artificial Sequence: Synthetic oligonucleotide
  Sense strand starting at position 3867 of SEQ ID NO: 588154
uuugacaaugugugggaua

SEQ ID NO: 845571 - RNA, 19 nt, Artificial Sequence
  Description of Artificial Sequence: Synthetic oligonucleotide
  Antisense strand to SEQ ID NO: 845570
uaucccacacauugucaaa

SEQ ID NO: 845572 - RNA, 19 nt, Artificial Sequence
  Description of Artificial Sequence: Synthetic oligonucleotide
  Sense strand starting at position 190 of SEQ ID NO: 588155
aggagacaugcuugaaauc

SEQ ID NO: 845573 - RNA, 19 nt, Artificial Sequence
  Description of Artificial Sequence: Synthetic oligonucleotide
  Antisense strand to SEQ ID NO: 845572
gauuucaagcaugucuccu

SEQ ID NO: 845574 - RNA, 19 nt, Artificial Sequence
  Description of Artificial Sequence: Synthetic oligonucleotide
  Sense strand starting at position 200 of SEQ ID NO: 588155
cuugaaaucuaguuggaug

SEQ ID NO: 845575 - RNA, 19 nt, Artificial Sequence
  Description of Artificial Sequence: Synthetic oligonucleotide
  Antisense strand to SEQ ID NO: 845574
cauccaacuagauuucaag

SEQ ID NO: 845576 - RNA, 19 nt, Artificial Sequence
  Description of Artificial Sequence: Synthetic oligonucleotide
  Sense strand starting at position 201 of SEQ ID NO: 588155
uugaaaucuaguuggaugu

SEQ ID NO: 845577 - RNA, 19 nt, Artificial Sequence
  Description of Artificial Sequence: Synthetic oligonucleotide
  Antisense strand to SEQ ID NO: 845576
acauccaacuagauuucaa

SEQ ID NO: 845578 - RNA, 19 nt, Artificial Sequence
  Description of Artificial Sequence: Synthetic oligonucleotide
  Sense strand starting at position 205 of SEQ ID NO: 588155
aaucuaguuggaugucaga

SEQ ID NO: 845579 - RNA, 19 nt, Artificial Sequence
  Description of Artificial Sequence: Synthetic oligonucleotide
  Antisense strand to SEQ ID NO: 845578
ucugacauccaacuagauu

SEQ ID NO: 845580 - RNA, 19 nt, Artificial Sequence
  Description of Artificial Sequence: Synthetic oligonucleotide
  Sense strand starting at position 270 of SEQ ID NO: 588155
caguaucuucgccuugcau

SEQ ID NO: 845581 - RNA, 19 nt, Artificial Sequence
  Description of Artificial Sequence: Synthetic oligonucleotide
  Antisense strand to SEQ ID NO: 845580
augcaaggcgaagauacug

SEQ ID NO: 845582 - RNA, 19 nt, Artificial Sequence
  Description of Artificial Sequence: Synthetic oligonucleotide
  Sense strand starting at position 295 of SEQ ID NO: 588155
agaggcuucugagucccaa

SEQ ID NO: 845583 - RNA, 19 nt, Artificial Sequence
  Description of Artificial Sequence: Synthetic oligonucleotide
  Antisense strand to SEQ ID NO: 845582
uugggacucagaagccucu

SEQ ID NO: 845584 - RNA, 19 nt, Artificial Sequence
  Description of Artificial Sequence: Synthetic oligonucleotide
  Sense strand starting at position 435 of SEQ ID NO: 588155
gagacauaguuucuguucu

SEQ ID NO: 845585 - RNA, 19 nt, Artificial Sequence
  Description of Artificial Sequence: Synthetic oligonucleotide
  Antisense strand to SEQ ID NO: 845584
agaacagaaacuaugucuc

SEQ ID NO: 845586 - RNA, 19 nt, Artificial Sequence
  Description of Artificial Sequence: Synthetic oligonucleotide
  Sense strand starting at position 442 of SEQ ID NO: 588155
aguuucuguucuccagaag

SEQ ID NO: 845587 - RNA, 19 nt, Artificial Sequence
  Description of Artificial Sequence: Synthetic oligonucleotide
  Antisense strand to SEQ ID NO: 845586
cuucuggagaacagaaacu

SEQ ID NO: 845588 - RNA, 19 nt, Artificial Sequence
  Description of Artificial Sequence: Synthetic oligonucleotide
  Sense strand starting at position 445 of SEQ ID NO: 588155
uucuguucuccagaagcuu

SEQ ID NO: 845589 - RNA, 19 nt, Artificial Sequence
  Description of Artificial Sequence: Synthetic oligonucleotide
  Antisense strand to SEQ ID NO: 845588
aagcuucuggagaacagaa

SEQ ID NO: 845590 - RNA, 19 nt, Artificial Sequence
  Description of Artificial Sequence: Synthetic oligonucleotide
  Sense strand starting at position 451 of SEQ ID NO: 588155
ucuccagaagcuuagucua

SEQ ID NO: 845591 - RNA, 19 nt, Artificial Sequence
  Description of Artificial Sequence: Synthetic oligonucleotide
  Antisense strand to SEQ ID NO: 845590
uagacuaagcuucuggaga

SEQ ID NO: 845592 - RNA, 19 nt, Artificial Sequence
  Description of Artificial Sequence: Synthetic oligonucleotide
  Sense strand starting at position 464 of SEQ ID NO: 588155
agucuagugacugagccau

SEQ ID NO: 845593 - RNA, 19 nt, Artificial Sequence
  Description of Artificial Sequence: Synthetic oligonucleotide
  Antisense strand to SEQ ID NO: 845592
auggcucagucacuagacu

SEQ ID NO: 845594 - RNA, 19 nt, Artificial Sequence
  Description of Artificial Sequence: Synthetic oligonucleotide
  Sense strand starting at position 466 of SEQ ID NO: 588155
ucuagugacugagccauau

SEQ ID NO: 845595 - RNA, 19 nt, Artificial Sequence
  Description of Artificial Sequence: Synthetic oligonucleotide
  Antisense strand to SEQ ID NO: 845594
auauggcucagucacuaga

SEQ ID NO: 845596 - RNA, 19 nt, Artificial Sequence
  Description of Artificial Sequence: Synthetic oligonucleotide
  Sense strand starting at position 470 of SEQ ID NO: 588155
gugacugagccauauaaac

SEQ ID NO: 845597 - RNA, 19 nt, Artificial Sequence
  Description of Artificial Sequence: Synthetic oligonucleotide
  Antisense strand to SEQ ID NO: 845596
guuuauauggcucagucac

SEQ ID NO: 845598 - RNA, 19 nt, Artificial Sequence
  Description of Artificial Sequence: Synthetic oligonucleotide
  Sense strand starting at position 572 of SEQ ID NO: 588155
aaaggcuucccgggaagaa

SEQ ID NO: 845599 - RNA, 19 nt, Artificial Sequence
  Description of Artificial Sequence: Synthetic oligonucleotide
  Antisense strand to SEQ ID NO: 845598
uucuucccgggaagccuuu

SEQ ID NO: 845600 - RNA, 19 nt, Artificial Sequence
  Description of Artificial Sequence: Synthetic oligonucleotide
  Sense strand starting at position 585 of SEQ ID NO: 588155
gaagaaguguuuccuaaau

SEQ ID NO: 845601 - RNA, 19 nt, Artificial Sequence
  Description of Artificial Sequence: Synthetic oligonucleotide
  Antisense strand to SEQ ID NO: 845600
auuuaggaaacacuucuuc

SEQ ID NO: 845602 - RNA, 19 nt, Artificial Sequence
  Description of Artificial Sequence: Synthetic oligonucleotide
  Sense strand starting at position 659 of SEQ ID NO: 588155
ggcuucucacgucagaaga

SEQ ID NO: 845603 - RNA, 19 nt, Artificial Sequence
  Description of Artificial Sequence: Synthetic oligonucleotide
  Antisense strand to SEQ ID NO: 845602
ucuucugacgugagaagcc

SEQ ID NO: 845604 - RNA, 19 nt, Artificial Sequence
  Description of Artificial Sequence: Synthetic oligonucleotide
  Sense strand starting at position 740 of SEQ ID NO: 588155
uucaguauagcuggaggaa

SEQ ID NO: 845605 - RNA, 19 nt, Artificial Sequence
  Description of Artificial Sequence: Synthetic oligonucleotide
  Antisense strand to SEQ ID NO: 845604
uuccuccagcuauacugaa

SEQ ID NO: 845606 - RNA, 19 nt, Artificial Sequence
  Description of Artificial Sequence: Synthetic oligonucleotide
  Sense strand starting at position 811 of SEQ ID NO: 588155
cuuucuucugcaggaacua

SEQ ID NO: 845607 - RNA, 19 nt, Artificial Sequence
  Description of Artificial Sequence: Synthetic oligonucleotide
  Antisense strand to SEQ ID NO: 845606
uaguuccugcagaagaaag

SEQ ID NO: 845608 - RNA, 19 nt, Artificial Sequence
  Description of Artificial Sequence: Synthetic oligonucleotide
  Sense strand starting at position 812 of SEQ ID NO: 588155
uuucuucugcaggaacuaa

SEQ ID NO: 845609 - RNA, 19 nt, Artificial Sequence
  Description of Artificial Sequence: Synthetic oligonucleotide
  Antisense strand to SEQ ID NO: 845608
uuaguuccugcagaagaaa

SEQ ID NO: 845610 - RNA, 19 nt, Artificial Sequence
  Description of Artificial Sequence: Synthetic oligonucleotide
  Sense strand starting at position 824 of SEQ ID NO: 588155
gaacuaaacgucugacuac

SEQ ID NO: 845611 - RNA, 19 nt, Artificial Sequence
  Description of Artificial Sequence: Synthetic oligonucleotide
  Antisense strand to SEQ ID NO: 845610
guagucagacguuuaguuc

SEQ ID NO: 845612 - RNA, 19 nt, Artificial Sequence
  Description of Artificial Sequence: Synthetic oligonucleotide
  Sense strand starting at position 827 of SEQ ID NO: 588155
cuaaacgucugacuacaaa

SEQ ID NO: 845613 - RNA, 19 nt, Artificial Sequence
  Description of Artificial Sequence: Synthetic oligonucleotide
  Antisense strand to SEQ ID NO: 845612
uuuguagucagacguuuag

SEQ ID NO: 845614 - RNA, 19 nt, Artificial Sequence
  Description of Artificial Sequence: Synthetic oligonucleotide
  Sense strand starting at position 853 of SEQ ID NO: 588155
gggaaaucauaucugcacu

SEQ ID NO: 845615 - RNA, 19 nt, Artificial Sequence
  Description of Artificial Sequence: Synthetic oligonucleotide
  Antisense strand to SEQ ID NO: 845614
agugcagauaugauuuccc

SEQ ID NO: 845616 - RNA, 19 nt, Artificial Sequence
  Description of Artificial Sequence: Synthetic oligonucleotide
  Sense strand starting at position 1424 of SEQ ID NO: 588155
agguuucuagaccaagcaa

SEQ ID NO: 845617 - RNA, 19 nt, Artificial Sequence
  Description of Artificial Sequence: Synthetic oligonucleotide
  Antisense strand to SEQ ID NO: 845616
uugcuuggucuagaaaccu

SEQ ID NO: 845618 - RNA, 19 nt, Artificial Sequence
  Description of Artificial Sequence: Synthetic oligonucleotide
  Sense strand starting at position 1486 of SEQ ID NO: 588155
agcgguuaagugggagaga

SEQ ID NO: 845619 - RNA, 19 nt, Artificial Sequence
  Description of Artificial Sequence: Synthetic oligonucleotide
  Antisense strand to SEQ ID NO: 845618
ucucucccacuuaaccgcu

SEQ ID NO: 845620 - RNA, 19 nt, Artificial Sequence
  Description of Artificial Sequence: Synthetic oligonucleotide
  Sense strand starting at position 1562 of SEQ ID NO: 588155
acgguaacccauuauuguu

SEQ ID NO: 845621 - RNA, 19 nt, Artificial Sequence
  Description of Artificial Sequence: Synthetic oligonucleotide
  Antisense strand to SEQ ID NO: 845620
aacaauaauggguuaccgu

SEQ ID NO: 845622 - RNA, 19 nt, Artificial Sequence
  Description of Artificial Sequence: Synthetic oligonucleotide
  Sense strand starting at position 1648 of SEQ ID NO: 588155
uccucaaagcuucgaaaca

SEQ ID NO: 845623 - RNA, 19 nt, Artificial Sequence
  Description of Artificial Sequence: Synthetic oligonucleotide
  Antisense strand to SEQ ID NO: 845622
uguuucgaagcuuugagga

SEQ ID NO: 845624 - RNA, 19 nt, Artificial Sequence
  Description of Artificial Sequence: Synthetic oligonucleotide
  Sense strand starting at position 1668 of SEQ ID NO: 588155
acaaccuuccgcgacuaua

SEQ ID NO: 845625 - RNA, 19 nt, Artificial Sequence
  Description of Artificial Sequence: Synthetic oligonucleotide
  Antisense strand to SEQ ID NO: 845624
uauagucgcggaagguugu

SEQ ID NO: 845626 - RNA, 19 nt, Artificial Sequence
  Description of Artificial Sequence: Synthetic oligonucleotide
  Sense strand starting at position 2033 of SEQ ID NO: 588155
ucuugaacuucugugauuc

SEQ ID NO: 845627 - RNA, 19 nt, Artificial Sequence
  Description of Artificial Sequence: Synthetic oligonucleotide
  Antisense strand to SEQ ID NO: 845626
gaaucacagaaguucaaga

SEQ ID NO: 845628 - RNA, 19 nt, Artificial Sequence
  Description of Artificial Sequence: Synthetic oligonucleotide
  Sense strand starting at position 2209 of SEQ ID NO: 588155
ccacguauagugucuguuu

SEQ ID NO: 845629 - RNA, 19 nt, Artificial Sequence
  Description of Artificial Sequence: Synthetic oligonucleotide
  Antisense strand to SEQ ID NO: 845628
aaacagacacuauacgugg

SEQ ID NO: 845630 - RNA, 19 nt, Artificial Sequence
  Description of Artificial Sequence: Synthetic oligonucleotide
  Sense strand starting at position 2314 of SEQ ID NO: 588155
ggacuuucuuuggcacuca

SEQ ID NO: 845631 - RNA, 19 nt, Artificial Sequence
  Description of Artificial Sequence: Synthetic oligonucleotide
  Antisense strand to SEQ ID NO: 845630
ugagugccaaagaaagucc

SEQ ID NO: 845632 - RNA, 19 nt, Artificial Sequence
  Description of Artificial Sequence: Synthetic oligonucleotide
  Sense strand starting at position 2387 of SEQ ID NO: 588155
uggguugccaguuaggaga

SEQ ID NO: 845633 - RNA, 19 nt, Artificial Sequence
  Description of Artificial Sequence: Synthetic oligonucleotide
  Antisense strand to SEQ ID NO: 845632
ucuccuaacuggcaaccca

SEQ ID NO: 845634 - RNA, 19 nt, Artificial Sequence
  Description of Artificial Sequence: Synthetic oligonucleotide
  Sense strand starting at position 2422 of SEQ ID NO: 588155
ccgcuaaccugugugauuu

SEQ ID NO: 845635 - RNA, 19 nt, Artificial Sequence
  Description of Artificial Sequence: Synthetic oligonucleotide
  Antisense strand to SEQ ID NO: 845634
aaaucacacagguuagcgg

SEQ ID NO: 845636 - RNA, 19 nt, Artificial Sequence
  Description of Artificial Sequence: Synthetic oligonucleotide
  Sense strand starting at position 2484 of SEQ ID NO: 588155
acuggacuguuucccauaa

SEQ ID NO: 845637 - RNA, 19 nt, Artificial Sequence
  Description of Artificial Sequence: Synthetic oligonucleotide
  Antisense strand to SEQ ID NO: 845636
uuaugggaaacaguccagu

SEQ ID NO: 845638 - RNA, 19 nt, Artificial Sequence
  Description of Artificial Sequence: Synthetic oligonucleotide
  Sense strand starting at position 2485 of SEQ ID NO: 588155
cuggacuguuucccauaaa

SEQ ID NO: 845639 - RNA, 19 nt, Artificial Sequence
  Description of Artificial Sequence: Synthetic oligonucleotide
  Antisense strand to SEQ ID NO: 845638
uuuaugggaaacaguccag

SEQ ID NO: 845640 - RNA, 19 nt, Artificial Sequence
  Description of Artificial Sequence: Synthetic oligonucleotide
  Sense strand starting at position 2705 of SEQ ID NO: 588155
gaggaauauggaggugucu

SEQ ID NO: 845641 - RNA, 19 nt, Artificial Sequence
  Description of Artificial Sequence: Synthetic oligonucleotide
  Antisense strand to SEQ ID NO: 845640
agacaccuccauauuccuc

SEQ ID NO: 845642 - RNA, 19 nt, Artificial Sequence
  Description of Artificial Sequence: Synthetic oligonucleotide
  Sense strand starting at position 2707 of SEQ ID NO: 588155
ggaauauggaggugucucu

SEQ ID NO: 845643 - RNA, 19 nt, Artificial Sequence
  Description of Artificial Sequence: Synthetic oligonucleotide
  Antisense strand to SEQ ID NO: 845642
agagacaccuccauauucc

SEQ ID NO: 845644 - RNA, 19 nt, Artificial Sequence
  Description of Artificial Sequence: Synthetic oligonucleotide
  Sense strand starting at position 2722 of SEQ ID NO: 588155
cucugaaugcuguaccaag

SEQ ID NO: 845645 - RNA, 19 nt, Artificial Sequence
  Description of Artificial Sequence: Synthetic oligonucleotide
  Antisense strand to SEQ ID NO: 845644
cuugguacagcauucagag

SEQ ID NO: 845646 - RNA, 19 nt, Artificial Sequence
  Description of Artificial Sequence: Synthetic oligonucleotide
  Sense strand starting at position 2740 of SEQ ID NO: 588155
ggaagugguguuuaagauc

SEQ ID NO: 845647 - RNA, 19 nt, Artificial Sequence
  Description of Artificial Sequence: Synthetic oligonucleotide
  Antisense strand to SEQ ID NO: 845646
gaucuuaaacaccacuucc

SEQ ID NO: 845648 - RNA, 19 nt, Artificial Sequence
  Description of Artificial Sequence: Synthetic oligonucleotide
  Sense strand starting at position 3546 of SEQ ID NO: 588155
auaggaagccaugguuuga

SEQ ID NO: 845649 - RNA, 19 nt, Artificial Sequence
  Description of Artificial Sequence: Synthetic oligonucleotide
  Antisense strand to SEQ ID NO: 845648
ucaaaccauggcuuccuau

SEQ ID NO: 845650 - RNA, 19 nt, Artificial Sequence
  Description of Artificial Sequence: Synthetic oligonucleotide
  Sense strand starting at position 3556 of SEQ ID NO: 588155
augguuugaguuuacagua

SEQ ID NO: 845651 - RNA, 19 nt, Artificial Sequence
  Description of Artificial Sequence: Synthetic oligonucleotide
  Antisense strand to SEQ ID NO: 845650
uacuguaaacucaaaccau

SEQ ID NO: 845652 - RNA, 19 nt, Artificial Sequence
  Description of Artificial Sequence: Synthetic oligonucleotide
  Sense strand starting at position 74 of SEQ ID NO: 588157
ggacuagucugcuucccag

SEQ ID NO: 845653 - RNA, 19 nt, Artificial Sequence
  Description of Artificial Sequence: Synthetic oligonucleotide
  Antisense strand to SEQ ID NO: 845652
cugggaagcagacuagucc

SEQ ID NO: 845654 - RNA, 19 nt, Artificial Sequence
  Description of Artificial Sequence: Synthetic oligonucleotide
  Sense strand starting at position 77 of SEQ ID NO: 588157
cuagucugcuucccagaau

SEQ ID NO: 845655 - RNA, 19 nt, Artificial Sequence
  Description of Artificial Sequence: Synthetic oligonucleotide
  Antisense strand to SEQ ID NO: 845654
auucugggaagcagacuag

SEQ ID NO: 845656 - RNA, 19 nt, Artificial Sequence
  Description of Artificial Sequence: Synthetic oligonucleotide
  Sense strand starting at position 80 of SEQ ID NO: 588157
gucugcuucccagaauaau

SEQ ID NO: 845657 - RNA, 19 nt, Artificial Sequence
  Description of Artificial Sequence: Synthetic oligonucleotide
  Antisense strand to SEQ ID NO: 845656
auuauucugggaagcagac

SEQ ID NO: 845658 - RNA, 19 nt, Artificial Sequence
  Description of Artificial Sequence: Synthetic oligonucleotide
  Sense strand starting at position 213 of SEQ ID NO: 588157
gacgcaauuacuggcgaaa

SEQ ID NO: 845659 - RNA, 19 nt, Artificial Sequence
  Description of Artificial Sequence: Synthetic oligonucleotide
  Antisense strand to SEQ ID NO: 845658
uuucgccaguaauugcguc

SEQ ID NO: 845660 - RNA, 19 nt, Artificial Sequence
  Description of Artificial Sequence: Synthetic oligonucleotide
  Sense strand starting at position 216 of SEQ ID NO: 588157
gcaauuacuggcgaaauug

SEQ ID NO: 845661 - RNA, 19 nt, Artificial Sequence
  Description of Artificial Sequence: Synthetic oligonucleotide
  Antisense strand to SEQ ID NO: 845660
caauuucgccaguaauugc

SEQ ID NO: 845662 - RNA, 19 nt, Artificial Sequence
  Description of Artificial Sequence: Synthetic oligonucleotide
  Sense strand starting at position 225 of SEQ ID NO: 588157
ggcgaaauugagcaagagu

SEQ ID NO: 845663 - RNA, 19 nt, Artificial Sequence
  Description of Artificial Sequence: Synthetic oligonucleotide
  Antisense strand to SEQ ID NO: 845662
acucuugcucaauuucgcc

SEQ ID NO: 845664 - RNA, 19 nt, Artificial Sequence
  Description of Artificial Sequence: Synthetic oligonucleotide
  Sense strand starting at position 233 of SEQ ID NO: 588157
ugagcaagaguauguagua

SEQ ID NO: 845665 - RNA, 19 nt, Artificial Sequence
  Description of Artificial Sequence: Synthetic oligonucleotide
  Antisense strand to SEQ ID NO: 845664
uacuacauacucuugcuca

SEQ ID NO: 845666 - RNA, 19 nt, Artificial Sequence
  Description of Artificial Sequence: Synthetic oligonucleotide
  Sense strand starting at position 372 of SEQ ID NO: 588157
ugugguaacccuggaagca

SEQ ID NO: 845667 - RNA, 19 nt, Artificial Sequence
  Description of Artificial Sequence: Synthetic oligonucleotide
  Antisense strand to SEQ ID NO: 845666
ugcuuccaggguuaccaca

SEQ ID NO: 845668 - RNA, 19 nt, Artificial Sequence
  Description of Artificial Sequence: Synthetic oligonucleotide
  Sense strand starting at position 373 of SEQ ID NO: 588157
gugguaacccuggaagcaa

SEQ ID NO: 845669 - RNA, 19 nt, Artificial Sequence
  Description of Artificial Sequence: Synthetic oligonucleotide
  Antisense strand to SEQ ID NO: 845668
uugcuuccaggguuaccac

SEQ ID NO: 845670 - RNA, 19 nt, Artificial Sequence
  Description of Artificial Sequence: Synthetic oligonucleotide
  Sense strand starting at position 533 of SEQ ID NO: 588157
ucagaucaucugggcaaga

SEQ ID NO: 845671 - RNA, 19 nt, Artificial Sequence
  Description of Artificial Sequence: Synthetic oligonucleotide
  Antisense strand to SEQ ID NO: 845670
ucuugcccagaugaucuga

SEQ ID NO: 845672 - RNA, 19 nt, Artificial Sequence
  Description of Artificial Sequence: Synthetic oligonucleotide
  Sense strand starting at position 534 of SEQ ID NO: 588157
cagaucaucugggcaagau

SEQ ID NO: 845673 - RNA, 19 nt, Artificial Sequence
  Description of Artificial Sequence: Synthetic oligonucleotide
  Antisense strand to SEQ ID NO: 845672
aucuugcccagaugaucug

SEQ ID NO: 845674 - RNA, 19 nt, Artificial Sequence
  Description of Artificial Sequence: Synthetic oligonucleotide
  Sense strand starting at position 599 of SEQ ID NO: 588157
gguguugacugguuauauu

SEQ ID NO: 845675 - RNA, 19 nt, Artificial Sequence
  Description of Artificial Sequence: Synthetic oligonucleotide
  Antisense strand to SEQ ID NO: 845674
aauauaaccagucaacacc

SEQ ID NO: 845676 - RNA, 19 nt, Artificial Sequence
  Description of Artificial Sequence: Synthetic oligonucleotide
  Sense strand starting at position 659 of SEQ ID NO: 588157
gggagagaucccugcucac

SEQ ID NO: 845677 - RNA, 19 nt, Artificial Sequence
  Description of Artificial Sequence: Synthetic oligonucleotide
  Antisense strand to SEQ ID NO: 845676
gugagcagggaucucuccc

SEQ ID NO: 845678 - RNA, 19 nt, Artificial Sequence
  Description of Artificial Sequence: Synthetic oligonucleotide
  Sense strand starting at position 662 of SEQ ID NO: 588157
agagaucccugcucaccua

SEQ ID NO: 845679 - RNA, 19 nt, Artificial Sequence
  Description of Artificial Sequence: Synthetic oligonucleotide
  Antisense strand to SEQ ID NO: 845678
uaggugagcagggaucucu

SEQ ID NO: 845680 - RNA, 19 nt, Artificial Sequence
  Description of Artificial Sequence: Synthetic oligonucleotide
  Sense strand starting at position 766 of SEQ ID NO: 588157
acaauuuacugagggcuua

SEQ ID NO: 845681 - RNA, 19 nt, Artificial Sequence
  Description of Artificial Sequence: Synthetic oligonucleotide
  Antisense strand to SEQ ID NO: 845680
uaagcccucaguaaauugu

SEQ ID NO: 845682 - RNA, 19 nt, Artificial Sequence
  Description of Artificial Sequence: Synthetic oligonucleotide
  Sense strand starting at position 777 of SEQ ID NO: 588157
agggcuuacccucauuaau

SEQ ID NO: 845683 - RNA, 19 nt, Artificial Sequence
  Description of Artificial Sequence: Synthetic oligonucleotide
  Antisense strand to SEQ ID NO: 845682
auuaaugaggguaagcccu

SEQ ID NO: 845684 - RNA, 19 nt, Artificial Sequence
  Description of Artificial Sequence: Synthetic oligonucleotide
  Sense strand starting at position 877 of SEQ ID NO: 588157
auaugagguucagagagaa

SEQ ID NO: 845685 - RNA, 19 nt, Artificial Sequence
  Description of Artificial Sequence: Synthetic oligonucleotide
  Antisense strand to SEQ ID NO: 845684
uucucucugaaccucauau

SEQ ID NO: 845686 - RNA, 19 nt, Artificial Sequence
  Description of Artificial Sequence: Synthetic oligonucleotide
  Sense strand starting at position 892 of SEQ ID NO: 588157
agaagucacuuggcccaaa

SEQ ID NO: 845687 - RNA, 19 nt, Artificial Sequence
  Description of Artificial Sequence: Synthetic oligonucleotide
  Antisense strand to SEQ ID NO: 845686
uuugggccaagugacuucu

SEQ ID NO: 845688 - RNA, 19 nt, Artificial Sequence
  Description of Artificial Sequence: Synthetic oligonucleotide
  Sense strand starting at position 1041 of SEQ ID NO: 588157
cagaguucucagugcaagg

SEQ ID NO: 845689 - RNA, 19 nt, Artificial Sequence
  Description of Artificial Sequence: Synthetic oligonucleotide
  Antisense strand to SEQ ID NO: 845688
ccuugcacugagaacucug

SEQ ID NO: 845690 - RNA, 19 nt, Artificial Sequence
  Description of Artificial Sequence: Synthetic oligonucleotide
  Sense strand starting at position 1251 of SEQ ID NO: 588157
caagccucugucugggauu

SEQ ID NO: 845691 - RNA, 19 nt, Artificial Sequence
  Description of Artificial Sequence: Synthetic oligonucleotide
  Antisense strand to SEQ ID NO: 845690
aaucccagacagaggcuug

SEQ ID NO: 845692 - RNA, 19 nt, Artificial Sequence
  Description of Artificial Sequence: Synthetic oligonucleotide
  Sense strand starting at position 2376 of SEQ ID NO: 588157
ggugguuaucuggaguggu

SEQ ID NO: 845693 - RNA, 19 nt, Artificial Sequence
  Description of Artificial Sequence: Synthetic oligonucleotide
  Antisense strand to SEQ ID NO: 845692
accacuccagauaaccacc

SEQ ID NO: 845694 - RNA, 19 nt, Artificial Sequence
  Description of Artificial Sequence: Synthetic oligonucleotide
  Sense strand starting at position 2899 of SEQ ID NO: 588157
cuuuguugauuugcaagua

SEQ ID NO: 845695 - RNA, 19 nt, Artificial Sequence
  Description of Artificial Sequence: Synthetic oligonucleotide
  Antisense strand to SEQ ID NO: 845694
uacuugcaaaucaacaaag

SEQ ID NO: 845696 - RNA, 19 nt, Artificial Sequence
  Description of Artificial Sequence: Synthetic oligonucleotide
  Sense strand starting at position 3081 of SEQ ID NO: 588157
gccaaccaucagggaauaa

SEQ ID NO: 845697 - RNA, 19 nt, Artificial Sequence
  Description of Artificial Sequence: Synthetic oligonucleotide
  Antisense strand to SEQ ID NO: 845696
uuauucccugaugguuggc

SEQ ID NO: 845698 - RNA, 19 nt, Artificial Sequence
  Description of Artificial Sequence: Synthetic oligonucleotide
  Sense strand starting at position 3159 of SEQ ID NO: 588157
ugguguuacgguguccauu

SEQ ID NO: 845699 - RNA, 19 nt, Artificial Sequence
  Description of Artificial Sequence: Synthetic oligonucleotide
  Antisense strand to SEQ ID NO: 845698
aauggacaccguaacacca

SEQ ID NO: 845700 - RNA, 19 nt, Artificial Sequence
  Description of Artificial Sequence: Synthetic oligonucleotide
  Sense strand starting at position 3193 of SEQ ID NO: 588157
uaaggcuuaugaguugaca

SEQ ID NO: 845701 - RNA, 19 nt, Artificial Sequence
  Description of Artificial Sequence: Synthetic oligonucleotide
  Antisense strand to SEQ ID NO: 845700
ugucaacucauaagccuua

SEQ ID NO: 845702 - RNA, 19 nt, Artificial Sequence
  Description of Artificial Sequence: Synthetic oligonucleotide
  Sense strand starting at position 3195 of SEQ ID NO: 588157
aggcuuaugaguugacacu

SEQ ID NO: 845703 - RNA, 19 nt, Artificial Sequence
  Description of Artificial Sequence: Synthetic oligonucleotide
  Antisense strand to SEQ ID NO: 845702
agugucaacucauaagccu

SEQ ID NO: 845704 - RNA, 19 nt, Artificial Sequence
  Description of Artificial Sequence: Synthetic oligonucleotide
  Sense strand starting at position 3196 of SEQ ID NO: 588157
ggcuuaugaguugacacuu

SEQ ID NO: 845705 - RNA, 19 nt, Artificial Sequence
  Description of Artificial Sequence: Synthetic oligonucleotide
  Antisense strand to SEQ ID NO: 845704
aagugucaacucauaagcc

SEQ ID NO: 845706 - RNA, 19 nt, Artificial Sequence
  Description of Artificial Sequence: Synthetic oligonucleotide
  Sense strand starting at position 3206 of SEQ ID NO: 588157
uugacacuuugguugugau

SEQ ID NO: 845707 - RNA, 19 nt, Artificial Sequence
  Description of Artificial Sequence: Synthetic oligonucleotide
  Antisense strand to SEQ ID NO: 845706
aucacaaccaaagugucaa

SEQ ID NO: 845708 - RNA, 19 nt, Artificial Sequence
  Description of Artificial Sequence: Synthetic oligonucleotide
  Sense strand starting at position 3244 of SEQ ID NO: 588157
ucacuugacuuccuggaca

SEQ ID NO: 845709 - RNA, 19 nt, Artificial Sequence
  Description of Artificial Sequence: Synthetic oligonucleotide
  Antisense strand to SEQ ID NO: 845708
uguccaggaagucaaguga

SEQ ID NO: 845710 - RNA, 19 nt, Artificial Sequence
  Description of Artificial Sequence: Synthetic oligonucleotide
  Sense strand starting at position 3343 of SEQ ID NO: 588157
agccauaguccaugauguu

SEQ ID NO: 845711 - RNA, 19 nt, Artificial Sequence
  Description of Artificial Sequence: Synthetic oligonucleotide
  Antisense strand to SEQ ID NO: 845710
aacaucauggacuauggcu

SEQ ID NO: 845712 - RNA, 19 nt, Artificial Sequence
  Description of Artificial Sequence: Synthetic oligonucleotide
  Sense strand starting at position 3375 of SEQ ID NO: 588157
acuuacugccucggaauga

SEQ ID NO: 845713 - RNA, 19 nt, Artificial Sequence
  Description of Artificial Sequence: Synthetic oligonucleotide
  Antisense strand to SEQ ID NO: 845712
ucauuccgaggcaguaagu

SEQ ID NO: 845714 - RNA, 19 nt, Artificial Sequence
  Description of Artificial Sequence: Synthetic oligonucleotide
  Sense strand starting at position 3386 of SEQ ID NO: 588157
cggaaugauuuauaauauc

SEQ ID NO: 845715 - RNA, 19 nt, Artificial Sequence
  Description of Artificial Sequence: Synthetic oligonucleotide
  Antisense strand to SEQ ID NO: 845714
gauauuauaaaucauuccg

SEQ ID NO: 845716 - RNA, 19 nt, Artificial Sequence
  Description of Artificial Sequence: Synthetic oligonucleotide
  Sense strand starting at position 3403 of SEQ ID NO: 588157
uccaaaugcugaucacuga

SEQ ID NO: 845717 - RNA, 19 nt, Artificial Sequence
  Description of Artificial Sequence: Synthetic oligonucleotide
  Antisense strand to SEQ ID NO: 845716
ucagugaucagcauuugga

SEQ ID NO: 845718 - RNA, 19 nt, Artificial Sequence
  Description of Artificial Sequence: Synthetic oligonucleotide
  Sense strand starting at position 3545 of SEQ ID NO: 588157
ucccucagagagugauacu

SEQ ID NO: 845719 - RNA, 19 nt, Artificial Sequence
  Description of Artificial Sequence: Synthetic oligonucleotide
  Antisense strand to SEQ ID NO: 845718
aguaucacucucugaggga

SEQ ID NO: 845720 - RNA, 19 nt, Artificial Sequence
  Description of Artificial Sequence: Synthetic oligonucleotide
  Sense strand starting at position 3556 of SEQ ID NO: 588157
gugauacuauuguuuauuc

SEQ ID NO: 845721 - RNA, 19 nt, Artificial Sequence
  Description of Artificial Sequence: Synthetic oligonucleotide
  Antisense strand to SEQ ID NO: 845720
gaauaaacaauaguaucac

SEQ ID NO: 845722 - RNA, 19 nt, Artificial Sequence
  Description of Artificial Sequence: Synthetic oligonucleotide
  Sense strand starting at position 3701 of SEQ ID NO: 588157
uguaaccauccucgaucaa

SEQ ID NO: 845723 - RNA, 19 nt, Artificial Sequence
  Description of Artificial Sequence: Synthetic oligonucleotide
  Antisense strand to SEQ ID NO: 845722
uugaucgaggaugguuaca

SEQ ID NO: 845724 - RNA, 19 nt, Artificial Sequence
  Description of Artificial Sequence: Synthetic oligonucleotide
  Sense strand starting at position 3728 of SEQ ID NO: 588157
caucuugcccuggguuaua

SEQ ID NO: 845725 - RNA, 19 nt, Artificial Sequence
  Description of Artificial Sequence: Synthetic oligonucleotide
  Antisense strand to SEQ ID NO: 845724
uauaacccagggcaagaug

SEQ ID NO: 845726 - RNA, 19 nt, Artificial Sequence
  Description of Artificial Sequence: Synthetic oligonucleotide
  Sense strand starting at position 3820 of SEQ ID NO: 588157
ccaggaaaucuuuguaagc

SEQ ID NO: 845727 - RNA, 19 nt, Artificial Sequence
  Description of Artificial Sequence: Synthetic oligonucleotide
  Antisense strand to SEQ ID NO: 845726
gcuuacaaagauuuccugg

SEQ ID NO: 845728 - RNA, 19 nt, Artificial Sequence
  Description of Artificial Sequence: Synthetic oligonucleotide
  Sense strand starting at position 3821 of SEQ ID NO: 588157
caggaaaucuuuguaagca

SEQ ID NO: 845729 - RNA, 19 nt, Artificial Sequence
  Description of Artificial Sequence: Synthetic oligonucleotide
  Antisense strand to SEQ ID NO: 845728
ugcuuacaaagauuuccug

SEQ ID NO: 845730 - RNA, 19 nt, Artificial Sequence
  Description of Artificial Sequence: Synthetic oligonucleotide
  Sense strand starting at position 3964 of SEQ ID NO: 588157
ccugauagcuauuccuuga

SEQ ID NO: 845731 - RNA, 19 nt, Artificial Sequence
  Description of Artificial Sequence: Synthetic oligonucleotide
  Antisense strand to SEQ ID NO: 845730
ucaaggaauagcuaucagg

SEQ ID NO: 845732 - RNA, 19 nt, Artificial Sequence
  Description of Artificial Sequence: Synthetic oligonucleotide
  Sense strand starting at position 172 of SEQ ID NO: 588158
auauauagaugagagauga

SEQ ID NO: 845733 - RNA, 19 nt, Artificial Sequence
  Description of Artificial Sequence: Synthetic oligonucleotide
  Antisense strand to SEQ ID NO: 845732
ucaucucucaucuauauau

SEQ ID NO: 845734 - RNA, 19 nt, Artificial Sequence
  Description of Artificial Sequence: Synthetic oligonucleotide
  Sense strand starting at position 267 of SEQ ID NO: 588158
gugaguaaacauugaauau

SEQ ID NO: 845735 - RNA, 19 nt, Artificial Sequence
  Description of Artificial Sequence: Synthetic oligonucleotide
  Antisense strand to SEQ ID NO: 845734
auauucaauguuuacucac

SEQ ID NO: 845736 - RNA, 19 nt, Artificial Sequence
  Description of Artificial Sequence: Synthetic oligonucleotide
  Sense strand starting at position 278 of SEQ ID NO: 588158
uugaauauguuuccugaga

SEQ ID NO: 845737 - RNA, 19 nt, Artificial Sequence
  Description of Artificial Sequence: Synthetic oligonucleotide
  Antisense strand to SEQ ID NO: 845736
ucucaggaaacauauucaa

SEQ ID NO: 845738 - RNA, 19 nt, Artificial Sequence
  Description of Artificial Sequence: Synthetic oligonucleotide
  Sense strand starting at position 279 of SEQ ID NO: 588158
ugaauauguuuccugagaa

SEQ ID NO: 845739 - RNA, 19 nt, Artificial Sequence
  Description of Artificial Sequence: Synthetic oligonucleotide
  Antisense strand to SEQ ID NO: 845738
uucucaggaaacauauuca

SEQ ID NO: 845740 - RNA, 19 nt, Artificial Sequence
  Description of Artificial Sequence: Synthetic oligonucleotide
  Sense strand starting at position 310 of SEQ ID NO: 588158
gugauacuauagcuuccaa

SEQ ID NO: 845741 - RNA, 19 nt, Artificial Sequence
  Description of Artificial Sequence: Synthetic oligonucleotide
  Antisense strand to SEQ ID NO: 845740
uuggaagcuauaguaucac

SEQ ID NO: 845742 - RNA, 19 nt, Artificial Sequence
  Description of Artificial Sequence: Synthetic oligonucleotide
  Sense strand starting at position 430 of SEQ ID NO: 588158
agucaaauugauuaguacu

SEQ ID NO: 845743 - RNA, 19 nt, Artificial Sequence
  Description of Artificial Sequence: Synthetic oligonucleotide
  Antisense strand to SEQ ID NO: 845742
aguacuaaucaauuugacu

SEQ ID NO: 845744 - RNA, 19 nt, Artificial Sequence
  Description of Artificial Sequence: Synthetic oligonucleotide
  Sense strand starting at position 460 of SEQ ID NO: 588158
uuaucaagagucuacaugu

SEQ ID NO: 845745 - RNA, 19 nt, Artificial Sequence
  Description of Artificial Sequence: Synthetic oligonucleotide
  Antisense strand to SEQ ID NO: 845744
acauguagacucuugauaa

SEQ ID NO: 845746 - RNA, 19 nt, Artificial Sequence
  Description of Artificial Sequence: Synthetic oligonucleotide
  Sense strand starting at position 476 of SEQ ID NO: 588158
ugucauagucacugacaga

SEQ ID NO: 845747 - RNA, 19 nt, Artificial Sequence
  Description of Artificial Sequence: Synthetic oligonucleotide
  Antisense strand to SEQ ID NO: 845746
ucugucagugacuaugaca

SEQ ID NO: 845748 - RNA, 19 nt, Artificial Sequence
  Description of Artificial Sequence: Synthetic oligonucleotide
  Sense strand starting at position 512 of SEQ ID NO: 588158
ucuaaauaagcuuaaggua

SEQ ID NO: 845749 - RNA, 19 nt, Artificial Sequence
  Description of Artificial Sequence: Synthetic oligonucleotide
  Antisense strand to SEQ ID NO: 845748
uaccuuaagcuuauuuaga

SEQ ID NO: 845750 - RNA, 19 nt, Artificial Sequence
  Description of Artificial Sequence: Synthetic oligonucleotide
  Sense strand starting at position 519 of SEQ ID NO: 588158
aagcuuaagguauaguauu

SEQ ID NO: 845751 - RNA, 19 nt, Artificial Sequence
  Description of Artificial Sequence: Synthetic oligonucleotide
  Antisense strand to SEQ ID NO: 845750
aauacuauaccuuaagcuu

SEQ ID NO: 845752 - RNA, 19 nt, Artificial Sequence
  Description of Artificial Sequence: Synthetic oligonucleotide
  Sense strand starting at position 747 of SEQ ID NO: 588158
ggcgaaugagcucaaacau

SEQ ID NO: 845753 - RNA, 19 nt, Artificial Sequence
  Description of Artificial Sequence: Synthetic oligonucleotide
  Antisense strand to SEQ ID NO: 845752
auguuugagcucauucgcc

SEQ ID NO: 845754 - RNA, 19 nt, Artificial Sequence
  Description of Artificial Sequence: Synthetic oligonucleotide
  Sense strand starting at position 834 of SEQ ID NO: 588158
cucagauaagcaugcauaa

SEQ ID NO: 845755 - RNA, 19 nt, Artificial Sequence
  Description of Artificial Sequence: Synthetic oligonucleotide
  Antisense strand to SEQ ID NO: 845754
uuaugcaugcuuaucugag

SEQ ID NO: 845756 - RNA, 19 nt, Artificial Sequence
  Description of Artificial Sequence: Synthetic oligonucleotide
  Sense strand starting at position 1160 of SEQ ID NO: 588158
cuuucuuucgaggaggcaa

SEQ ID NO: 845757 - RNA, 19 nt, Artificial Sequence
  Description of Artificial Sequence: Synthetic oligonucleotide
  Antisense strand to SEQ ID NO: 845756
uugccuccucgaaagaaag

SEQ ID NO: 845758 - RNA, 19 nt, Artificial Sequence
  Description of Artificial Sequence: Synthetic oligonucleotide
  Sense strand starting at position 1534 of SEQ ID NO: 588158
acaguacaguuucccagaa

SEQ ID NO: 845759 - RNA, 19 nt, Artificial Sequence
  Description of Artificial Sequence: Synthetic oligonucleotide
  Antisense strand to SEQ ID NO: 845758
uucugggaaacuguacugu

SEQ ID NO: 845760 - RNA, 19 nt, Artificial Sequence
  Description of Artificial Sequence: Synthetic oligonucleotide
  Sense strand starting at position 1547 of SEQ ID NO: 588158
ccagaauaggagggcuuau

SEQ ID NO: 845761 - RNA, 19 nt, Artificial Sequence
  Description of Artificial Sequence: Synthetic oligonucleotide
  Antisense strand to SEQ ID NO: 845760
auaagcccuccuauucugg

SEQ ID NO: 845762 - RNA, 19 nt, Artificial Sequence
  Description of Artificial Sequence: Synthetic oligonucleotide
  Sense strand starting at position 1906 of SEQ ID NO: 588158
uuccaaucggcccaaauaa

SEQ ID NO: 845763 - RNA, 19 nt, Artificial Sequence
  Description of Artificial Sequence: Synthetic oligonucleotide
  Antisense strand to SEQ ID NO: 845762
uuauuugggccgauuggaa

SEQ ID NO: 845764 - RNA, 19 nt, Artificial Sequence
  Description of Artificial Sequence: Synthetic oligonucleotide
  Sense strand starting at position 1950 of SEQ ID NO: 588158
ccuggauucuuccucuuga

SEQ ID NO: 845765 - RNA, 19 nt, Artificial Sequence
  Description of Artificial Sequence: Synthetic oligonucleotide
  Antisense strand to SEQ ID NO: 845764
ucaagaggaagaauccagg

SEQ ID NO: 845766 - RNA, 19 nt, Artificial Sequence
  Description of Artificial Sequence: Synthetic oligonucleotide
  Sense strand starting at position 1951 of SEQ ID NO: 588158
cuggauucuuccucuugag

SEQ ID NO: 845767 - RNA, 19 nt, Artificial Sequence
  Description of Artificial Sequence: Synthetic oligonucleotide
  Antisense strand to SEQ ID NO: 845766
cucaagaggaagaauccag

SEQ ID NO: 845768 - RNA, 19 nt, Artificial Sequence
  Description of Artificial Sequence: Synthetic oligonucleotide
  Sense strand starting at position 2036 of SEQ ID NO: 588158
ccucaaauaugccuuugga

SEQ ID NO: 845769 - RNA, 19 nt, Artificial Sequence
  Description of Artificial Sequence: Synthetic oligonucleotide
  Antisense strand to SEQ ID NO: 845768
uccaaaggcauauuugagg

SEQ ID NO: 845770 - RNA, 19 nt, Artificial Sequence
  Description of Artificial Sequence: Synthetic oligonucleotide
  Sense strand starting at position 2039 of SEQ ID NO: 588158
caaauaugccuuuggaagu

SEQ ID NO: 845771 - RNA, 19 nt, Artificial Sequence
  Description of Artificial Sequence: Synthetic oligonucleotide
  Antisense strand to SEQ ID NO: 845770
acuuccaaaggcauauuug

SEQ ID NO: 845772 - RNA, 19 nt, Artificial Sequence
  Description of Artificial Sequence: Synthetic oligonucleotide
  Sense strand starting at position 2318 of SEQ ID NO: 588158
ucuggagggcucugcauuu

SEQ ID NO: 845773 - RNA, 19 nt, Artificial Sequence
  Description of Artificial Sequence: Synthetic oligonucleotide
  Antisense strand to SEQ ID NO: 845772
aaaugcagagcccuccaga

SEQ ID NO: 845774 - RNA, 19 nt, Artificial Sequence
  Description of Artificial Sequence: Synthetic oligonucleotide
  Sense strand starting at position 2324 of SEQ ID NO: 588158
gggcucugcauuugcaaau

SEQ ID NO: 845775 - RNA, 19 nt, Artificial Sequence
  Description of Artificial Sequence: Synthetic oligonucleotide
  Antisense strand to SEQ ID NO: 845774
auuugcaaaugcagagccc

SEQ ID NO: 845776 - RNA, 19 nt, Artificial Sequence
  Description of Artificial Sequence: Synthetic oligonucleotide
  Sense strand starting at position 2340 of SEQ ID NO: 588158
aaugguuucuuuccugaga

SEQ ID NO: 845777 - RNA, 19 nt, Artificial Sequence
  Description of Artificial Sequence: Synthetic oligonucleotide
  Antisense strand to SEQ ID NO: 845776
ucucaggaaagaaaccauu

SEQ ID NO: 845778 - RNA, 19 nt, Artificial Sequence
  Description of Artificial Sequence: Synthetic oligonucleotide
  Sense strand starting at position 2341 of SEQ ID NO: 588158
augguuucuuuccugagac

SEQ ID NO: 845779 - RNA, 19 nt, Artificial Sequence
  Description of Artificial Sequence: Synthetic oligonucleotide
  Antisense strand to SEQ ID NO: 845778
gucucaggaaagaaaccau

SEQ ID NO: 845780 - RNA, 19 nt, Artificial Sequence
  Description of Artificial Sequence: Synthetic oligonucleotide
  Sense strand starting at position 2343 of SEQ ID NO: 588158
gguuucuuuccugagacaa

SEQ ID NO: 845781 - RNA, 19 nt, Artificial Sequence
  Description of Artificial Sequence: Synthetic oligonucleotide
  Antisense strand to SEQ ID NO: 845780
uugucucaggaaagaaacc

SEQ ID NO: 845782 - RNA, 19 nt, Artificial Sequence
  Description of Artificial Sequence: Synthetic oligonucleotide
  Sense strand starting at position 2375 of SEQ ID NO: 588158
cuacaaaugugaucacagu

SEQ ID NO: 845783 - RNA, 19 nt, Artificial Sequence
  Description of Artificial Sequence: Synthetic oligonucleotide
  Antisense strand to SEQ ID NO: 845782
acugugaucacauuuguag

SEQ ID NO: 845784 - RNA, 19 nt, Artificial Sequence
  Description of Artificial Sequence: Synthetic oligonucleotide
  Sense strand starting at position 2494 of SEQ ID NO: 588158
uacagaacggaguguuagu

SEQ ID NO: 845785 - RNA, 19 nt, Artificial Sequence
  Description of Artificial Sequence: Synthetic oligonucleotide
  Antisense strand to SEQ ID NO: 845784
acuaacacuccguucugua

SEQ ID NO: 845786 - RNA, 19 nt, Artificial Sequence
  Description of Artificial Sequence: Synthetic oligonucleotide
  Sense strand starting at position 2499 of SEQ ID NO: 588158
aacggaguguuaguaggau

SEQ ID NO: 845787 - RNA, 19 nt, Artificial Sequence
  Description of Artificial Sequence: Synthetic oligonucleotide
  Antisense strand to SEQ ID NO: 845786
auccuacuaacacuccguu

SEQ ID NO: 845788 - RNA, 19 nt, Artificial Sequence
  Description of Artificial Sequence: Synthetic oligonucleotide
  Sense strand starting at position 2631 of SEQ ID NO: 588158
gaagucugaucagccaaau

SEQ ID NO: 845789 - RNA, 19 nt, Artificial Sequence
  Description of Artificial Sequence: Synthetic oligonucleotide
  Antisense strand to SEQ ID NO: 845788
auuuggcugaucagacuuc

SEQ ID NO: 845790 - RNA, 19 nt, Artificial Sequence
  Description of Artificial Sequence: Synthetic oligonucleotide
  Sense strand starting at position 2946 of SEQ ID NO: 588158
uugguuaggaagugaauca

SEQ ID NO: 845791 - RNA, 19 nt, Artificial Sequence
  Description of Artificial Sequence: Synthetic oligonucleotide
  Antisense strand to SEQ ID NO: 845790
ugauucacuuccuaaccaa

SEQ ID NO: 845792 - RNA, 19 nt, Artificial Sequence
  Description of Artificial Sequence: Synthetic oligonucleotide
  Sense strand starting at position 3018 of SEQ ID NO: 588158
gcaauuggacauugucuaa

SEQ ID NO: 845793 - RNA, 19 nt, Artificial Sequence
  Description of Artificial Sequence: Synthetic oligonucleotide
  Antisense strand to SEQ ID NO: 845792
uuagacaauguccaauugc

SEQ ID NO: 845794 - RNA, 19 nt, Artificial Sequence
  Description of Artificial Sequence: Synthetic oligonucleotide
  Sense strand starting at position 3021 of SEQ ID NO: 588158
auuggacauugucuaauaa

SEQ ID NO: 845795 - RNA, 19 nt, Artificial Sequence
  Description of Artificial Sequence: Synthetic oligonucleotide
  Antisense strand to SEQ ID NO: 845794
uuauuagacaauguccaau

SEQ ID NO: 845796 - RNA, 19 nt, Artificial Sequence
  Description of Artificial Sequence: Synthetic oligonucleotide
  Sense strand starting at position 3068 of SEQ ID NO: 588158
agcaauucuucuucuagag

SEQ ID NO: 845797 - RNA, 19 nt, Artificial Sequence
  Description of Artificial Sequence: Synthetic oligonucleotide
  Antisense strand to SEQ ID NO: 845796
cucuagaagaagaauugcu

SEQ ID NO: 845798 - RNA, 19 nt, Artificial Sequence
  Description of Artificial Sequence: Synthetic oligonucleotide
  Sense strand starting at position 3113 of SEQ ID NO: 588158
augcaauaaccuggaugaa

SEQ ID NO: 845799 - RNA, 19 nt, Artificial Sequence
  Description of Artificial Sequence: Synthetic oligonucleotide
  Antisense strand to SEQ ID NO: 845798
uucauccagguuauugcau

SEQ ID NO: 845800 - RNA, 19 nt, Artificial Sequence
  Description of Artificial Sequence: Synthetic oligonucleotide
  Sense strand starting at position 3139 of SEQ ID NO: 588158
aacauaaugucguuagaaa

SEQ ID NO: 845801 - RNA, 19 nt, Artificial Sequence
  Description of Artificial Sequence: Synthetic oligonucleotide
  Antisense strand to SEQ ID NO: 845800
uuucuaacgacauuauguu

SEQ ID NO: 845802 - RNA, 19 nt, Artificial Sequence
  Description of Artificial Sequence: Synthetic oligonucleotide
  Sense strand starting at position 3140 of SEQ ID NO: 588158
acauaaugucguuagaaac

SEQ ID NO: 845803 - RNA, 19 nt, Artificial Sequence
  Description of Artificial Sequence: Synthetic oligonucleotide
  Antisense strand to SEQ ID NO: 845802
guuucuaacgacauuaugu

SEQ ID NO: 845804 - RNA, 19 nt, Artificial Sequence
  Description of Artificial Sequence: Synthetic oligonucleotide
  Sense strand starting at position 3147 of SEQ ID NO: 588158
gucguuagaaacuagucau

SEQ ID NO: 845805 - RNA, 19 nt, Artificial Sequence
  Description of Artificial Sequence: Synthetic oligonucleotide
  Antisense strand to SEQ ID NO: 845804
augacuaguuucuaacgac

SEQ ID NO: 845806 - RNA, 19 nt, Artificial Sequence
  Description of Artificial Sequence: Synthetic oligonucleotide
  Sense strand starting at position 3150 of SEQ ID NO: 588158
guuagaaacuagucauaaa

SEQ ID NO: 845807 - RNA, 19 nt, Artificial Sequence
  Description of Artificial Sequence: Synthetic oligonucleotide
  Antisense strand to SEQ ID NO: 845806
uuuaugacuaguuucuaac

SEQ ID NO: 845808 - RNA, 19 nt, Artificial Sequence
  Description of Artificial Sequence: Synthetic oligonucleotide
  Sense strand starting at position 3191 of SEQ ID NO: 588158
auuuguauuugcugaacua

SEQ ID NO: 845809 - RNA, 19 nt, Artificial Sequence
  Description of Artificial Sequence: Synthetic oligonucleotide
  Antisense strand to SEQ ID NO: 845808
uaguucagcaaauacaaau

SEQ ID NO: 845810 - RNA, 19 nt, Artificial Sequence
  Description of Artificial Sequence: Synthetic oligonucleotide
  Sense strand starting at position 3455 of SEQ ID NO: 588158
ggugaugucacauaucagc

SEQ ID NO: 845811 - RNA, 19 nt, Artificial Sequence
  Description of Artificial Sequence: Synthetic oligonucleotide
  Antisense strand to SEQ ID NO: 845810
gcugauaugugacaucacc

SEQ ID NO: 845812 - RNA, 19 nt, Artificial Sequence
  Description of Artificial Sequence: Synthetic oligonucleotide
  Sense strand starting at position 48 of SEQ ID NO: 588159
acaguacaguuucccagaa

SEQ ID NO: 845813 - RNA, 19 nt, Artificial Sequence
  Description of Artificial Sequence: Synthetic oligonucleotide
  Antisense strand to SEQ ID NO: 845812
uucugggaaacuguacugu

SEQ ID NO: 845814 - RNA, 19 nt, Artificial Sequence
  Description of Artificial Sequence: Synthetic oligonucleotide
  Sense strand starting at position 61 of SEQ ID NO: 588159
ccagaauaggagggcuuau

SEQ ID NO: 845815 - RNA, 19 nt, Artificial Sequence
  Description of Artificial Sequence: Synthetic oligonucleotide
  Antisense strand to SEQ ID NO: 845814
auaagcccuccuauucugg

SEQ ID NO: 845816 - RNA, 19 nt, Artificial Sequence
  Description of Artificial Sequence: Synthetic oligonucleotide
  Sense strand starting at position 420 of SEQ ID NO: 588159
uuccaaucggcccaaauaa

SEQ ID NO: 845817 - RNA, 19 nt, Artificial Sequence
  Description of Artificial Sequence: Synthetic oligonucleotide
  Antisense strand to SEQ ID NO: 845816
uuauuugggccgauuggaa

SEQ ID NO: 845818 - RNA, 19 nt, Artificial Sequence
  Description of Artificial Sequence: Synthetic oligonucleotide
  Sense strand starting at position 464 of SEQ ID NO: 588159
ccuggauucuuccucuuga

SEQ ID NO: 845819 - RNA, 19 nt, Artificial Sequence
  Description of Artificial Sequence: Synthetic oligonucleotide
  Antisense strand to SEQ ID NO: 845818
ucaagaggaagaauccagg

SEQ ID NO: 845820 - RNA, 19 nt, Artificial Sequence
  Description of Artificial Sequence: Synthetic oligonucleotide
  Sense strand starting at position 465 of SEQ ID NO: 588159
cuggauucuuccucuugag

SEQ ID NO: 845821 - RNA, 19 nt, Artificial Sequence
  Description of Artificial Sequence: Synthetic oligonucleotide
  Antisense strand to SEQ ID NO: 845820
cucaagaggaagaauccag

SEQ ID NO: 845822 - RNA, 19 nt, Artificial Sequence
  Description of Artificial Sequence: Synthetic oligonucleotide
  Sense strand starting at position 550 of SEQ ID NO: 588159
ccucaaauaugccuuugga

SEQ ID NO: 845823 - RNA, 19 nt, Artificial Sequence
  Description of Artificial Sequence: Synthetic oligonucleotide
  Antisense strand to SEQ ID NO: 845822
uccaaaggcauauuugagg

SEQ ID NO: 845824 - RNA, 19 nt, Artificial Sequence
  Description of Artificial Sequence: Synthetic oligonucleotide
  Sense strand starting at position 553 of SEQ ID NO: 588159
caaauaugccuuuggaagu

SEQ ID NO: 845825 - RNA, 19 nt, Artificial Sequence
  Description of Artificial Sequence: Synthetic oligonucleotide
  Antisense strand to SEQ ID NO: 845824
acuuccaaaggcauauuug

SEQ ID NO: 845826 - RNA, 19 nt, Artificial Sequence
  Description of Artificial Sequence: Synthetic oligonucleotide
  Sense strand starting at position 832 of SEQ ID NO: 588159
ucuggagggcucugcauuu

SEQ ID NO: 845827 - RNA, 19 nt, Artificial Sequence
  Description of Artificial Sequence: Synthetic oligonucleotide
  Antisense strand to SEQ ID NO: 845826
aaaugcagagcccuccaga

SEQ ID NO: 845828 - RNA, 19 nt, Artificial Sequence
  Description of Artificial Sequence: Synthetic oligonucleotide
  Sense strand starting at position 838 of SEQ ID NO: 588159
gggcucugcauuugcaaau

SEQ ID NO: 845829 - RNA, 19 nt, Artificial Sequence
  Description of Artificial Sequence: Synthetic oligonucleotide
  Antisense strand to SEQ ID NO: 845828
auuugcaaaugcagagccc

SEQ ID NO: 845830 - RNA, 19 nt, Artificial Sequence
  Description of Artificial Sequence: Synthetic oligonucleotide
  Sense strand starting at position 854 of SEQ ID NO: 588159
aaugguuucuuuccugaga

SEQ ID NO: 845831 - RNA, 19 nt, Artificial Sequence
  Description of Artificial Sequence: Synthetic oligonucleotide
  Antisense strand to SEQ ID NO: 845830
ucucaggaaagaaaccauu

SEQ ID NO: 845832 - RNA, 19 nt, Artificial Sequence
  Description of Artificial Sequence: Synthetic oligonucleotide
  Sense strand starting at position 855 of SEQ ID NO: 588159
augguuucuuuccugagac

SEQ ID NO: 845833 - RNA, 19 nt, Artificial Sequence
  Description of Artificial Sequence: Synthetic oligonucleotide
  Antisense strand to SEQ ID NO: 845832
gucucaggaaagaaaccau

SEQ ID NO: 845834 - RNA, 19 nt, Artificial Sequence
  Description of Artificial Sequence: Synthetic oligonucleotide
  Sense strand starting at position 857 of SEQ ID NO: 588159
gguuucuuuccugagacaa

SEQ ID NO: 845835 - RNA, 19 nt, Artificial Sequence
  Description of Artificial Sequence: Synthetic oligonucleotide
  Antisense strand to SEQ ID NO: 845834
uugucucaggaaagaaacc

SEQ ID NO: 845836 - RNA, 19 nt, Artificial Sequence
  Description of Artificial Sequence: Synthetic oligonucleotide
  Sense strand starting at position 889 of SEQ ID NO: 588159
cuacaaaugugaucacagu

SEQ ID NO: 845837 - RNA, 19 nt, Artificial Sequence
  Description of Artificial Sequence: Synthetic oligonucleotide
  Antisense strand to SEQ ID NO: 845836
acugugaucacauuuguag

SEQ ID NO: 845838 - RNA, 19 nt, Artificial Sequence
  Description of Artificial Sequence: Synthetic oligonucleotide
  Sense strand starting at position 1013 of SEQ ID NO: 588159
aacggaguguuaguaggau

SEQ ID NO: 845839 - RNA, 19 nt, Artificial Sequence
  Description of Artificial Sequence: Synthetic oligonucleotide
  Antisense strand to SEQ ID NO: 845838
auccuacuaacacuccguu

SEQ ID NO: 845840 - RNA, 19 nt, Artificial Sequence
  Description of Artificial Sequence: Synthetic oligonucleotide
  Sense strand starting at position 1145 of SEQ ID NO: 588159
gaagucugaucagccaaau

SEQ ID NO: 845841 - RNA, 19 nt, Artificial Sequence
  Description of Artificial Sequence: Synthetic oligonucleotide
  Antisense strand to SEQ ID NO: 845840
auuuggcugaucagacuuc

SEQ ID NO: 845842 - RNA, 19 nt, Artificial Sequence
  Description of Artificial Sequence: Synthetic oligonucleotide
  Sense strand starting at position 1460 of SEQ ID NO: 588159
uugguuaggaagugaauca

SEQ ID NO: 845843 - RNA, 19 nt, Artificial Sequence
  Description of Artificial Sequence: Synthetic oligonucleotide
  Antisense strand to SEQ ID NO: 845842
ugauucacuuccuaaccaa

SEQ ID NO: 845844 - RNA, 19 nt, Artificial Sequence
  Description of Artificial Sequence: Synthetic oligonucleotide
  Sense strand starting at position 1532 of SEQ ID NO: 588159
gcaauuggacauugucuaa

SEQ ID NO: 845845 - RNA, 19 nt, Artificial Sequence
  Description of Artificial Sequence: Synthetic oligonucleotide
  Antisense strand to SEQ ID NO: 845844
uuagacaauguccaauugc

SEQ ID NO: 845846 - RNA, 19 nt, Artificial Sequence
  Description of Artificial Sequence: Synthetic oligonucleotide
  Sense strand starting at position 1535 of SEQ ID NO: 588159
auuggacauugucuaauaa

SEQ ID NO: 845847 - RNA, 19 nt, Artificial Sequence
  Description of Artificial Sequence: Synthetic oligonucleotide
  Antisense strand to SEQ ID NO: 845846
uuauuagacaauguccaau

SEQ ID NO: 845848 - RNA, 19 nt, Artificial Sequence
  Description of Artificial Sequence: Synthetic oligonucleotide
  Sense strand starting at position 1582 of SEQ ID NO: 588159
agcaauucuucuucuagag

SEQ ID NO: 845849 - RNA, 19 nt, Artificial Sequence
  Description of Artificial Sequence: Synthetic oligonucleotide
  Antisense strand to SEQ ID NO: 845848
cucuagaagaagaauugcu

SEQ ID NO: 845850 - RNA, 19 nt, Artificial Sequence
  Description of Artificial Sequence: Synthetic oligonucleotide
  Sense strand starting at position 1627 of SEQ ID NO: 588159
augcaauaaccuggaugaa

SEQ ID NO: 845851 - RNA, 19 nt, Artificial Sequence
  Description of Artificial Sequence: Synthetic oligonucleotide
  Antisense strand to SEQ ID NO: 845850
uucauccagguuauugcau

SEQ ID NO: 845852 - RNA, 19 nt, Artificial Sequence
  Description of Artificial Sequence: Synthetic oligonucleotide
  Sense strand starting at position 1653 of SEQ ID NO: 588159
aacauaaugucguuagaaa

SEQ ID NO: 845853 - RNA, 19 nt, Artificial Sequence
  Description of Artificial Sequence: Synthetic oligonucleotide
  Antisense strand to SEQ ID NO: 845852
uuucuaacgacauuauguu

SEQ ID NO: 845854 - RNA, 19 nt, Artificial Sequence
  Description of Artificial Sequence: Synthetic oligonucleotide
  Sense strand starting at position 1654 of SEQ ID NO: 588159
acauaaugucguuagaaac

SEQ ID NO: 845855 - RNA, 19 nt, Artificial Sequence
  Description of Artificial Sequence: Synthetic oligonucleotide
  Antisense strand to SEQ ID NO: 845854
guuucuaacgacauuaugu

SEQ ID NO: 845856 - RNA, 19 nt, Artificial Sequence
  Description of Artificial Sequence: Synthetic oligonucleotide
  Sense strand starting at position 1661 of SEQ ID NO: 588159
gucguuagaaacuagucau

SEQ ID NO: 845857 - RNA, 19 nt, Artificial Sequence
  Description of Artificial Sequence: Synthetic oligonucleotide
  Antisense strand to SEQ ID NO: 845856
augacuaguuucuaacgac

SEQ ID NO: 845858 - RNA, 19 nt, Artificial Sequence
  Description of Artificial Sequence: Synthetic oligonucleotide
  Sense strand starting at position 1664 of SEQ ID NO: 588159
guuagaaacuagucauaaa

SEQ ID NO: 845859 - RNA, 19 nt, Artificial Sequence
  Description of Artificial Sequence: Synthetic oligonucleotide
  Antisense strand to SEQ ID NO: 845858
uuuaugacuaguuucuaac

SEQ ID NO: 845860 - RNA, 19 nt, Artificial Sequence
  Description of Artificial Sequence: Synthetic oligonucleotide
  Sense strand starting at position 1705 of SEQ ID NO: 588159
auuuguauuugcugaacua

SEQ ID NO: 845861 - RNA, 19 nt, Artificial Sequence
  Description of Artificial Sequence: Synthetic oligonucleotide
  Antisense strand to SEQ ID NO: 845860
uaguucagcaaauacaaau

SEQ ID NO: 845862 - RNA, 19 nt, Artificial Sequence
  Description of Artificial Sequence: Synthetic oligonucleotide
  Sense strand starting at position 1969 of SEQ ID NO: 588159
ggugaugucacauaucagc

SEQ ID NO: 845863 - RNA, 19 nt, Artificial Sequence
  Description of Artificial Sequence: Synthetic oligonucleotide
  Antisense strand to SEQ ID NO: 845862
gcugauaugugacaucacc

SEQ ID NO: 845864 - RNA, 19 nt, Artificial Sequence
  Description of Artificial Sequence: Synthetic oligonucleotide
  Sense strand starting at position 3173 of SEQ ID NO: 588159
auuccauaaccaugaguga

SEQ ID NO: 845865 - RNA, 19 nt, Artificial Sequence
  Description of Artificial Sequence: Synthetic oligonucleotide
  Antisense strand to SEQ ID NO: 845864
ucacucaugguuauggaau

SEQ ID NO: 845866 - RNA, 19 nt, Artificial Sequence
  Description of Artificial Sequence: Synthetic oligonucleotide
  Sense strand starting at position 3186 of SEQ ID NO: 588159
gagugaagguguuuaaauc

SEQ ID NO: 845867 - RNA, 19 nt, Artificial Sequence
  Description of Artificial Sequence: Synthetic oligonucleotide
  Antisense strand to SEQ ID NO: 845866
gauuuaaacaccuucacuc

SEQ ID NO: 845868 - RNA, 19 nt, Artificial Sequence
  Description of Artificial Sequence: Synthetic oligonucleotide
  Sense strand starting at position 3245 of SEQ ID NO: 588159
aggcauagauuugaacacu

SEQ ID NO: 845869 - RNA, 19 nt, Artificial Sequence
  Description of Artificial Sequence: Synthetic oligonucleotide
  Antisense strand to SEQ ID NO: 845868
aguguucaaaucuaugccu

SEQ ID NO: 845870 - RNA, 19 nt, Artificial Sequence
  Description of Artificial Sequence: Synthetic oligonucleotide
  Sense strand starting at position 3633 of SEQ ID NO: 588159
aaaugaaagugggccuauu

SEQ ID NO: 845871 - RNA, 19 nt, Artificial Sequence
  Description of Artificial Sequence: Synthetic oligonucleotide
  Antisense strand to SEQ ID NO: 845870
aauaggcccacuuucauuu

SEQ ID NO: 845872 - RNA, 19 nt, Artificial Sequence
  Description of Artificial Sequence: Synthetic oligonucleotide
  Sense strand starting at position 3641 of SEQ ID NO: 588159
gugggccuauuauuauaga

SEQ ID NO: 845873 - RNA, 19 nt, Artificial Sequence
  Description of Artificial Sequence: Synthetic oligonucleotide
  Antisense strand to SEQ ID NO: 845872
ucuauaauaauaggcccac

SEQ ID NO: 845874 - RNA, 19 nt, Artificial Sequence
  Description of Artificial Sequence: Synthetic oligonucleotide
  Sense strand starting at position 3825 of SEQ ID NO: 588159
gugaaauugcuauaaaggu

SEQ ID NO: 845875 - RNA, 19 nt, Artificial Sequence
  Description of Artificial Sequence: Synthetic oligonucleotide
  Antisense strand to SEQ ID NO: 845874
accuuuauagcaauuucac

SEQ ID NO: 845876 - RNA, 19 nt, Artificial Sequence
  Description of Artificial Sequence: Synthetic oligonucleotide
  Sense strand starting at position 3832 of SEQ ID NO: 588159
ugcuauaaaggucauuacu

SEQ ID NO: 845877 - RNA, 19 nt, Artificial Sequence
  Description of Artificial Sequence: Synthetic oligonucleotide
  Antisense strand to SEQ ID NO: 845876
aguaaugaccuuuauagca

SEQ ID NO: 845878 - RNA, 19 nt, Artificial Sequence
  Description of Artificial Sequence: Synthetic oligonucleotide
  Sense strand starting at position 3834 of SEQ ID NO: 588159
cuauaaaggucauuacuag

SEQ ID NO: 845879 - RNA, 19 nt, Artificial Sequence
  Description of Artificial Sequence: Synthetic oligonucleotide
  Antisense strand to SEQ ID NO: 845878
cuaguaaugaccuuuauag

SEQ ID NO: 845880 - RNA, 19 nt, Artificial Sequence
  Description of Artificial Sequence: Synthetic oligonucleotide
  Sense strand starting at position 3840 of SEQ ID NO: 588159
aggucauuacuaggacauu

SEQ ID NO: 845881 - RNA, 19 nt, Artificial Sequence
  Description of Artificial Sequence: Synthetic oligonucleotide
  Antisense strand to SEQ ID NO: 845880
aauguccuaguaaugaccu

SEQ ID NO: 845882 - RNA, 19 nt, Artificial Sequence
  Description of Artificial Sequence: Synthetic oligonucleotide
  Sense strand starting at position 3846 of SEQ ID NO: 588159
uuacuaggacauuggugaa

SEQ ID NO: 845883 - RNA, 19 nt, Artificial Sequence
  Description of Artificial Sequence: Synthetic oligonucleotide
  Antisense strand to SEQ ID NO: 845882
uucaccaauguccuaguaa

SEQ ID NO: 845884 - RNA, 19 nt, Artificial Sequence
  Description of Artificial Sequence: Synthetic oligonucleotide
  Sense strand starting at position 3876 of SEQ ID NO: 588159
gacaguauaugauuauugu

SEQ ID NO: 845885 - RNA, 19 nt, Artificial Sequence
  Description of Artificial Sequence: Synthetic oligonucleotide
  Antisense strand to SEQ ID NO: 845884
acaauaaucauauacuguc

SEQ ID NO: 845886 - RNA, 19 nt, Artificial Sequence
  Description of Artificial Sequence: Synthetic oligonucleotide
  Sense strand starting at position 3949 of SEQ ID NO: 588159
ugaugauugcuccagucug

SEQ ID NO: 845887 - RNA, 19 nt, Artificial Sequence
  Description of Artificial Sequence: Synthetic oligonucleotide
  Antisense strand to SEQ ID NO: 845886
cagacuggagcaaucauca

SEQ ID NO: 845888 - RNA, 19 nt, Artificial Sequence
  Description of Artificial Sequence: Synthetic oligonucleotide
  Sense strand starting at position 3969 of SEQ ID NO: 588159
uacuguacagcugagauua

SEQ ID NO: 845889 - RNA, 19 nt, Artificial Sequence
  Description of Artificial Sequence: Synthetic oligonucleotide
  Antisense strand to SEQ ID NO: 845888
uaaucucagcuguacagua

SEQ ID NO: 845890 - RNA, 19 nt, Artificial Sequence
  Description of Artificial Sequence: Synthetic oligonucleotide
  Sense strand starting at position 3977 of SEQ ID NO: 588159
agcugagauuaacuuugga

SEQ ID NO: 845891 - RNA, 19 nt, Artificial Sequence
  Description of Artificial Sequence: Synthetic oligonucleotide
  Antisense strand to SEQ ID NO: 845890
uccaaaguuaaucucagcu

SEQ ID NO: 845892 - RNA, 19 nt, Artificial Sequence
  Description of Artificial Sequence: Synthetic oligonucleotide
  Sense strand starting at position 223 of SEQ ID NO: 588160
uggugaccuccucaaguau

SEQ ID NO: 845893 - RNA, 19 nt, Artificial Sequence
  Description of Artificial Sequence: Synthetic oligonucleotide
  Antisense strand to SEQ ID NO: 845892
auacuugaggaggucacca

SEQ ID NO: 845894 - RNA, 19 nt, Artificial Sequence
  Description of Artificial Sequence: Synthetic oligonucleotide
  Sense strand starting at position 234 of SEQ ID NO: 588160
ucaaguaucucuguuuccu

SEQ ID NO: 845895 - RNA, 19 nt, Artificial Sequence
  Description of Artificial Sequence: Synthetic oligonucleotide
  Antisense strand to SEQ ID NO: 845894
aggaaacagagauacuuga

SEQ ID NO: 845896 - RNA, 19 nt, Artificial Sequence
  Description of Artificial Sequence: Synthetic oligonucleotide
  Sense strand starting at position 416 of SEQ ID NO: 588160
uggagacucaacuguugga

SEQ ID NO: 845897 - RNA, 19 nt, Artificial Sequence
  Description of Artificial Sequence: Synthetic oligonucleotide
  Antisense strand to SEQ ID NO: 845896
uccaacaguugagucucca

SEQ ID NO: 845898 - RNA, 19 nt, Artificial Sequence
  Description of Artificial Sequence: Synthetic oligonucleotide
  Sense strand starting at position 420 of SEQ ID NO: 588160
gacucaacuguuggaauca

SEQ ID NO: 845899 - RNA, 19 nt, Artificial Sequence
  Description of Artificial Sequence: Synthetic oligonucleotide
  Antisense strand to SEQ ID NO: 845898
ugauuccaacaguugaguc

SEQ ID NO: 845900 - RNA, 19 nt, Artificial Sequence
  Description of Artificial Sequence: Synthetic oligonucleotide
  Sense strand starting at position 435 of SEQ ID NO: 588160
aucagaaguugauaucaga

SEQ ID NO: 845901 - RNA, 19 nt, Artificial Sequence
  Description of Artificial Sequence: Synthetic oligonucleotide
  Antisense strand to SEQ ID NO: 845900
ucugauaucaacuucugau

SEQ ID NO: 845902 - RNA, 19 nt, Artificial Sequence
  Description of Artificial Sequence: Synthetic oligonucleotide
  Sense strand starting at position 438 of SEQ ID NO: 588160
agaaguugauaucagaucu

SEQ ID NO: 845903 - RNA, 19 nt, Artificial Sequence
  Description of Artificial Sequence: Synthetic oligonucleotide
  Antisense strand to SEQ ID NO: 845902
agaucugauaucaacuucu

SEQ ID NO: 845904 - RNA, 19 nt, Artificial Sequence
  Description of Artificial Sequence: Synthetic oligonucleotide
  Sense strand starting at position 451 of SEQ ID NO: 588160
agaucuagcugauucccaa

SEQ ID NO: 845905 - RNA, 19 nt, Artificial Sequence
  Description of Artificial Sequence: Synthetic oligonucleotide
  Antisense strand to SEQ ID NO: 845904
uugggaaucagcuagaucu

SEQ ID NO: 845906 - RNA, 19 nt, Artificial Sequence
  Description of Artificial Sequence: Synthetic oligonucleotide
  Sense strand starting at position 516 of SEQ ID NO: 588160
cccuguacccuguauugua

SEQ ID NO: 845907 - RNA, 19 nt, Artificial Sequence
  Description of Artificial Sequence: Synthetic oligonucleotide
  Antisense strand to SEQ ID NO: 845906
uacaauacaggguacaggg

SEQ ID NO: 845908 - RNA, 19 nt, Artificial Sequence
  Description of Artificial Sequence: Synthetic oligonucleotide
  Sense strand starting at position 551 of SEQ ID NO: 588160
ugcuguaaugggcaaguga

SEQ ID NO: 845909 - RNA, 19 nt, Artificial Sequence
  Description of Artificial Sequence: Synthetic oligonucleotide
  Antisense strand to SEQ ID NO: 845908
ucacuugcccauuacagca

SEQ ID NO: 845910 - RNA, 19 nt, Artificial Sequence
  Description of Artificial Sequence: Synthetic oligonucleotide
  Sense strand starting at position 615 of SEQ ID NO: 588160
caugauuugugcuaaguaa

SEQ ID NO: 845911 - RNA, 19 nt, Artificial Sequence
  Description of Artificial Sequence: Synthetic oligonucleotide
  Antisense strand to SEQ ID NO: 845910
uuacuuagcacaaaucaug

SEQ ID NO: 845912 - RNA, 19 nt, Artificial Sequence
  Description of Artificial Sequence: Synthetic oligonucleotide
  Sense strand starting at position 721 of SEQ ID NO: 588160
gccuguguacaguacauua

SEQ ID NO: 845913 - RNA, 19 nt, Artificial Sequence
  Description of Artificial Sequence: Synthetic oligonucleotide
  Antisense strand to SEQ ID NO: 845912
uaauguacuguacacaggc

SEQ ID NO: 845914 - RNA, 19 nt, Artificial Sequence
  Description of Artificial Sequence: Synthetic oligonucleotide
  Sense strand starting at position 818 of SEQ ID NO: 588160
accggauucuuagaagaag

SEQ ID NO: 845915 - RNA, 19 nt, Artificial Sequence
  Description of Artificial Sequence: Synthetic oligonucleotide
  Antisense strand to SEQ ID NO: 845914
cuucuucuaagaauccggu

SEQ ID NO: 845916 - RNA, 19 nt, Artificial Sequence
  Description of Artificial Sequence: Synthetic oligonucleotide
  Sense strand starting at position 874 of SEQ ID NO: 588160
gaauccaggucuccagauu

SEQ ID NO: 845917 - RNA, 19 nt, Artificial Sequence
  Description of Artificial Sequence: Synthetic oligonucleotide
  Antisense strand to SEQ ID NO: 845916
aaucuggagaccuggauuc

SEQ ID NO: 845918 - RNA, 19 nt, Artificial Sequence
  Description of Artificial Sequence: Synthetic oligonucleotide
  Sense strand starting at position 916 of SEQ ID NO: 588160
gcugguucuagagaaaccu

SEQ ID NO: 845919 - RNA, 19 nt, Artificial Sequence
  Description of Artificial Sequence: Synthetic oligonucleotide
  Antisense strand to SEQ ID NO: 845918
agguuucucuagaaccagc

SEQ ID NO: 845920 - RNA, 19 nt, Artificial Sequence
  Description of Artificial Sequence: Synthetic oligonucleotide
  Sense strand starting at position 974 of SEQ ID NO: 588160
gugugucaacuccaacagu

SEQ ID NO: 845921 - RNA, 19 nt, Artificial Sequence
  Description of Artificial Sequence: Synthetic oligonucleotide
  Antisense strand to SEQ ID NO: 845920
acuguuggaguugacacac

SEQ ID NO: 845922 - RNA, 19 nt, Artificial Sequence
  Description of Artificial Sequence: Synthetic oligonucleotide
  Sense strand starting at position 1101 of SEQ ID NO: 588160
aguucugacuuaucacaca

SEQ ID NO: 845923 - RNA, 19 nt, Artificial Sequence
  Description of Artificial Sequence: Synthetic oligonucleotide
  Antisense strand to SEQ ID NO: 845922
ugugugauaagucagaacu

SEQ ID NO: 845924 - RNA, 19 nt, Artificial Sequence
  Description of Artificial Sequence: Synthetic oligonucleotide
  Sense strand starting at position 1495 of SEQ ID NO: 588160
gccauuuccucccugguca

SEQ ID NO: 845925 - RNA, 19 nt, Artificial Sequence
  Description of Artificial Sequence: Synthetic oligonucleotide
  Antisense strand to SEQ ID NO: 845924
ugaccagggaggaaauggc

SEQ ID NO: 845926 - RNA, 19 nt, Artificial Sequence
  Description of Artificial Sequence: Synthetic oligonucleotide
  Sense strand starting at position 2016 of SEQ ID NO: 588160
gcccuaugccgcguuaguu

SEQ ID NO: 845927 - RNA, 19 nt, Artificial Sequence
  Description of Artificial Sequence: Synthetic oligonucleotide
  Antisense strand to SEQ ID NO: 845926
aacuaacgcggcauagggc

SEQ ID NO: 845928 - RNA, 19 nt, Artificial Sequence
  Description of Artificial Sequence: Synthetic oligonucleotide
  Sense strand starting at position 2387 of SEQ ID NO: 588160
gugggcauuugaucaugca

SEQ ID NO: 845929 - RNA, 19 nt, Artificial Sequence
  Description of Artificial Sequence: Synthetic oligonucleotide
  Antisense strand to SEQ ID NO: 845928
ugcaugaucaaaugcccac

SEQ ID NO: 845930 - RNA, 19 nt, Artificial Sequence
  Description of Artificial Sequence: Synthetic oligonucleotide
  Sense strand starting at position 2756 of SEQ ID NO: 588160
caggacucagcuugauauc

SEQ ID NO: 845931 - RNA, 19 nt, Artificial Sequence
  Description of Artificial Sequence: Synthetic oligonucleotide
  Antisense strand to SEQ ID NO: 845930
gauaucaagcugaguccug

SEQ ID NO: 845932 - RNA, 19 nt, Artificial Sequence
  Description of Artificial Sequence: Synthetic oligonucleotide
  Sense strand starting at position 2766 of SEQ ID NO: 588160
cuugauauccuaggucaac

SEQ ID NO: 845933 - RNA, 19 nt, Artificial Sequence
  Description of Artificial Sequence: Synthetic oligonucleotide
  Antisense strand to SEQ ID NO: 845932
guugaccuaggauaucaag

SEQ ID NO: 845934 - RNA, 19 nt, Artificial Sequence
  Description of Artificial Sequence: Synthetic oligonucleotide
  Sense strand starting at position 2767 of SEQ ID NO: 588160
uugauauccuaggucaaca

SEQ ID NO: 845935 - RNA, 19 nt, Artificial Sequence
  Description of Artificial Sequence: Synthetic oligonucleotide
  Antisense strand to SEQ ID NO: 845934
uguugaccuaggauaucaa

SEQ ID NO: 845936 - RNA, 19 nt, Artificial Sequence
  Description of Artificial Sequence: Synthetic oligonucleotide
  Sense strand starting at position 3026 of SEQ ID NO: 588160
ggcuaccugguauaucaga

SEQ ID NO: 845937 - RNA, 19 nt, Artificial Sequence
  Description of Artificial Sequence: Synthetic oligonucleotide
  Antisense strand to SEQ ID NO: 845936
ucugauauaccagguagcc

SEQ ID NO: 845938 - RNA, 19 nt, Artificial Sequence
  Description of Artificial Sequence: Synthetic oligonucleotide
  Sense strand starting at position 3089 of SEQ ID NO: 588160
caggguuucugguugggaa

SEQ ID NO: 845939 - RNA, 19 nt, Artificial Sequence
  Description of Artificial Sequence: Synthetic oligonucleotide
  Antisense strand to SEQ ID NO: 845938
uucccaaccagaaacccug

SEQ ID NO: 845940 - RNA, 19 nt, Artificial Sequence
  Description of Artificial Sequence: Synthetic oligonucleotide
  Sense strand starting at position 3090 of SEQ ID NO: 588160
aggguuucugguugggaau

SEQ ID NO: 845941 - RNA, 19 nt, Artificial Sequence
  Description of Artificial Sequence: Synthetic oligonucleotide
  Antisense strand to SEQ ID NO: 845940
auucccaaccagaaacccu

SEQ ID NO: 845942 - RNA, 19 nt, Artificial Sequence
  Description of Artificial Sequence: Synthetic oligonucleotide
  Sense strand starting at position 3091 of SEQ ID NO: 588160
ggguuucugguugggaaua

SEQ ID NO: 845943 - RNA, 19 nt, Artificial Sequence
  Description of Artificial Sequence: Synthetic oligonucleotide
  Antisense strand to SEQ ID NO: 845942
uauucccaaccagaaaccc

SEQ ID NO: 845944 - RNA, 19 nt, Artificial Sequence
  Description of Artificial Sequence: Synthetic oligonucleotide
  Sense strand starting at position 3104 of SEQ ID NO: 588160
ggaauacccuucuuuguga

SEQ ID NO: 845945 - RNA, 19 nt, Artificial Sequence
  Description of Artificial Sequence: Synthetic oligonucleotide
  Antisense strand to SEQ ID NO: 845944
ucacaaagaaggguauucc

SEQ ID NO: 845946 - RNA, 19 nt, Artificial Sequence
  Description of Artificial Sequence: Synthetic oligonucleotide
  Sense strand starting at position 3196 of SEQ ID NO: 588160
cuggaauaaguguauugca

SEQ ID NO: 845947 - RNA, 19 nt, Artificial Sequence
  Description of Artificial Sequence: Synthetic oligonucleotide
  Antisense strand to SEQ ID NO: 845946
ugcaauacacuuauuccag

SEQ ID NO: 845948 - RNA, 19 nt, Artificial Sequence
  Description of Artificial Sequence: Synthetic oligonucleotide
  Sense strand starting at position 3204 of SEQ ID NO: 588160
aguguauugcaguaacuac

SEQ ID NO: 845949 - RNA, 19 nt, Artificial Sequence
  Description of Artificial Sequence: Synthetic oligonucleotide
  Antisense strand to SEQ ID NO: 845948
guaguuacugcaauacacu

SEQ ID NO: 845950 - RNA, 19 nt, Artificial Sequence
  Description of Artificial Sequence: Synthetic oligonucleotide
  Sense strand starting at position 3214 of SEQ ID NO: 588160
aguaacuaccagugcauuu

SEQ ID NO: 845951 - RNA, 19 nt, Artificial Sequence
  Description of Artificial Sequence: Synthetic oligonucleotide
  Antisense strand to SEQ ID NO: 845950
aaaugcacugguaguuacu

SEQ ID NO: 845952 - RNA, 19 nt, Artificial Sequence
  Description of Artificial Sequence: Synthetic oligonucleotide
  Sense strand starting at position 3221 of SEQ ID NO: 588160
accagugcauuugauauuu

SEQ ID NO: 845953 - RNA, 19 nt, Artificial Sequence
  Description of Artificial Sequence: Synthetic oligonucleotide
  Antisense strand to SEQ ID NO: 845952
aaauaucaaaugcacuggu

SEQ ID NO: 845954 - RNA, 19 nt, Artificial Sequence
  Description of Artificial Sequence: Synthetic oligonucleotide
  Sense strand starting at position 3744 of SEQ ID NO: 588160
cugugagcaucccuacaga

SEQ ID NO: 845955 - RNA, 19 nt, Artificial Sequence
  Description of Artificial Sequence: Synthetic oligonucleotide
  Antisense strand to SEQ ID NO: 845954
ucuguagggaugcucacag

SEQ ID NO: 845956 - RNA, 19 nt, Artificial Sequence
  Description of Artificial Sequence: Synthetic oligonucleotide
  Sense strand starting at position 3800 of SEQ ID NO: 588160
ggguguauccuuuagggag

SEQ ID NO: 845957 - RNA, 19 nt, Artificial Sequence
  Description of Artificial Sequence: Synthetic oligonucleotide
  Antisense strand to SEQ ID NO: 845956
cucccuaaaggauacaccc

SEQ ID NO: 845958 - RNA, 19 nt, Artificial Sequence
  Description of Artificial Sequence: Synthetic oligonucleotide
  Sense strand starting at position 3815 of SEQ ID NO: 588160
ggaggagaguuugcaauca

SEQ ID NO: 845959 - RNA, 19 nt, Artificial Sequence
  Description of Artificial Sequence: Synthetic oligonucleotide
  Antisense strand to SEQ ID NO: 845958
ugauugcaaacucuccucc

SEQ ID NO: 845960 - RNA, 19 nt, Artificial Sequence
  Description of Artificial Sequence: Synthetic oligonucleotide
  Sense strand starting at position 3867 of SEQ ID NO: 588160
gaaagagaugcuggucaca

SEQ ID NO: 845961 - RNA, 19 nt, Artificial Sequence
  Description of Artificial Sequence: Synthetic oligonucleotide
  Antisense strand to SEQ ID NO: 845960
ugugaccagcaucucuuuc

SEQ ID NO: 845962 - RNA, 19 nt, Artificial Sequence
  Description of Artificial Sequence: Synthetic oligonucleotide
  Sense strand starting at position 3901 of SEQ ID NO: 588160
acaugagaauuagcauauu

SEQ ID NO: 845963 - RNA, 19 nt, Artificial Sequence
  Description of Artificial Sequence: Synthetic oligonucleotide
  Antisense strand to SEQ ID NO: 845962
aauaugcuaauucucaugu

SEQ ID NO: 845964 - RNA, 19 nt, Artificial Sequence
  Description of Artificial Sequence: Synthetic oligonucleotide
  Sense strand starting at position 3915 of SEQ ID NO: 588160
auauuauacugagaaggug

SEQ ID NO: 845965 - RNA, 19 nt, Artificial Sequence
  Description of Artificial Sequence: Synthetic oligonucleotide
  Antisense strand to SEQ ID NO: 845964
caccuucucaguauaauau

SEQ ID NO: 845966 - RNA, 19 nt, Artificial Sequence
  Description of Artificial Sequence: Synthetic oligonucleotide
  Sense strand starting at position 3931 of SEQ ID NO: 588160
gugguaaucuggagaggaa

SEQ ID NO: 845967 - RNA, 19 nt, Artificial Sequence
  Description of Artificial Sequence: Synthetic oligonucleotide
  Antisense strand to SEQ ID NO: 845966
uuccucuccagauuaccac

SEQ ID NO: 845968 - RNA, 19 nt, Artificial Sequence
  Description of Artificial Sequence: Synthetic oligonucleotide
  Sense strand starting at position 3955 of SEQ ID NO: 588160
ggcugugcucaagaucaau

SEQ ID NO: 845969 - RNA, 19 nt, Artificial Sequence
  Description of Artificial Sequence: Synthetic oligonucleotide
  Antisense strand to SEQ ID NO: 845968
auugaucuugagcacagcc

SEQ ID NO: 845970 - RNA, 19 nt, Artificial Sequence
  Description of Artificial Sequence: Synthetic oligonucleotide
  Sense strand starting at position 3961 of SEQ ID NO: 588160
gcucaagaucaaugacuug

SEQ ID NO: 845971 - RNA, 19 nt, Artificial Sequence
  Description of Artificial Sequence: Synthetic oligonucleotide
  Antisense strand to SEQ ID NO: 845970
caagucauugaucuugagc

SEQ ID NO: 845972 - RNA, 19 nt, Artificial Sequence
  Description of Artificial Sequence: Synthetic oligonucleotide
  Sense strand starting at position 17 of SEQ ID NO: 588161
aacgaauucuugguuggga

SEQ ID NO: 845973 - RNA, 19 nt, Artificial Sequence
  Description of Artificial Sequence: Synthetic oligonucleotide
  Antisense strand to SEQ ID NO: 845972
ucccaaccaagaauucguu

SEQ ID NO: 845974 - RNA, 19 nt, Artificial Sequence
  Description of Artificial Sequence: Synthetic oligonucleotide
  Sense strand starting at position 20 of SEQ ID NO: 588161
gaauucuugguugggagga

SEQ ID NO: 845975 - RNA, 19 nt, Artificial Sequence
  Description of Artificial Sequence: Synthetic oligonucleotide
  Antisense strand to SEQ ID NO: 845974
uccucccaaccaagaauuc

SEQ ID NO: 845976 - RNA, 19 nt, Artificial Sequence
  Description of Artificial Sequence: Synthetic oligonucleotide
  Sense strand starting at position 30 of SEQ ID NO: 588161
uugggaggagaguguuaaa

SEQ ID NO: 845977 - RNA, 19 nt, Artificial Sequence
  Description of Artificial Sequence: Synthetic oligonucleotide
  Antisense strand to SEQ ID NO: 845976
uuuaacacucuccucccaa

SEQ ID NO: 845978 - RNA, 19 nt, Artificial Sequence
  Description of Artificial Sequence: Synthetic oligonucleotide
  Sense strand starting at position 37 of SEQ ID NO: 588161
gagaguguuaaaugagccu

SEQ ID NO: 845979 - RNA, 19 nt, Artificial Sequence
  Description of Artificial Sequence: Synthetic oligonucleotide
  Antisense strand to SEQ ID NO: 845978
aggcucauuuaacacucuc

SEQ ID NO: 845980 - RNA, 19 nt, Artificial Sequence
  Description of Artificial Sequence: Synthetic oligonucleotide
  Sense strand starting at position 66 of SEQ ID NO: 588161
uugggaagacuugguccaa

SEQ ID NO: 845981 - RNA, 19 nt, Artificial Sequence
  Description of Artificial Sequence: Synthetic oligonucleotide
  Antisense strand to SEQ ID NO: 845980
uuggaccaagucuucccaa

SEQ ID NO: 845982 - RNA, 19 nt, Artificial Sequence
  Description of Artificial Sequence: Synthetic oligonucleotide
  Sense strand starting at position 156 of SEQ ID NO: 588161
uugcccuuacagggaaauu

SEQ ID NO: 845983 - RNA, 19 nt, Artificial Sequence
  Description of Artificial Sequence: Synthetic oligonucleotide
  Antisense strand to SEQ ID NO: 845982
aauuucccuguaagggcaa

SEQ ID NO: 845984 - RNA, 19 nt, Artificial Sequence
  Description of Artificial Sequence: Synthetic oligonucleotide
  Sense strand starting at position 201 of SEQ ID NO: 588161
ucaauuaugugcuugaaag

SEQ ID NO: 845985 - RNA, 19 nt, Artificial Sequence
  Description of Artificial Sequence: Synthetic oligonucleotide
  Antisense strand to SEQ ID NO: 845984
cuuucaagcacauaauuga

SEQ ID NO: 845986 - RNA, 19 nt, Artificial Sequence
  Description of Artificial Sequence: Synthetic oligonucleotide
  Sense strand starting at position 202 of SEQ ID NO: 588161
caauuaugugcuugaaaga

SEQ ID NO: 845987 - RNA, 19 nt, Artificial Sequence
  Description of Artificial Sequence: Synthetic oligonucleotide
  Antisense strand to SEQ ID NO: 845986
ucuuucaagcacauaauug

SEQ ID NO: 845988 - RNA, 19 nt, Artificial Sequence
  Description of Artificial Sequence: Synthetic oligonucleotide
  Sense strand starting at position 213 of SEQ ID NO: 588161
uugaaagagcucugaacag

SEQ ID NO: 845989 - RNA, 19 nt, Artificial Sequence
  Description of Artificial Sequence: Synthetic oligonucleotide
  Antisense strand to SEQ ID NO: 845988
cuguucagagcucuuucaa

SEQ ID NO: 845990 - RNA, 19 nt, Artificial Sequence
  Description of Artificial Sequence: Synthetic oligonucleotide
  Sense strand starting at position 516 of SEQ ID NO: 588161
cuugguuacgaugggauga

SEQ ID NO: 845991 - RNA, 19 nt, Artificial Sequence
  Description of Artificial Sequence: Synthetic oligonucleotide
  Antisense strand to SEQ ID NO: 845990
ucaucccaucguaaccaag

SEQ ID NO: 845992 - RNA, 19 nt, Artificial Sequence
  Description of Artificial Sequence: Synthetic oligonucleotide
  Sense strand starting at position 517 of SEQ ID NO: 588161
uugguuacgaugggaugaa

SEQ ID NO: 845993 - RNA, 19 nt, Artificial Sequence
  Description of Artificial Sequence: Synthetic oligonucleotide
  Antisense strand to SEQ ID NO: 845992
uucaucccaucguaaccaa

SEQ ID NO: 845994 - RNA, 19 nt, Artificial Sequence
  Description of Artificial Sequence: Synthetic oligonucleotide
  Sense strand starting at position 518 of SEQ ID NO: 588161
ugguuacgaugggaugaaa

SEQ ID NO: 845995 - RNA, 19 nt, Artificial Sequence
  Description of Artificial Sequence: Synthetic oligonucleotide
  Antisense strand to SEQ ID NO: 845994
uuucaucccaucguaacca

SEQ ID NO: 845996 - RNA, 19 nt, Artificial Sequence
  Description of Artificial Sequence: Synthetic oligonucleotide
  Sense strand starting at position 596 of SEQ ID NO: 588161
cccaguguagcgggagaaa

SEQ ID NO: 845997 - RNA, 19 nt, Artificial Sequence
  Description of Artificial Sequence: Synthetic oligonucleotide
  Antisense strand to SEQ ID NO: 845996
uuucucccgcuacacuggg

SEQ ID NO: 845998 - RNA, 19 nt, Artificial Sequence
  Description of Artificial Sequence: Synthetic oligonucleotide
  Sense strand starting at position 653 of SEQ ID NO: 588161
cccggaguugguugcucaa

SEQ ID NO: 845999 - RNA, 19 nt, Artificial Sequence
  Description of Artificial Sequence: Synthetic oligonucleotide
  Antisense strand to SEQ ID NO: 845998
uugagcaaccaacuccggg

SEQ ID NO: 846000 - RNA, 19 nt, Artificial Sequence
  Description of Artificial Sequence: Synthetic oligonucleotide
  Sense strand starting at position 771 of SEQ ID NO: 588161
ugagguuucugcuuugaag

SEQ ID NO: 846001 - RNA, 19 nt, Artificial Sequence
  Description of Artificial Sequence: Synthetic oligonucleotide
  Antisense strand to SEQ ID NO: 846000
cuucaaagcagaaaccuca

SEQ ID NO: 846002 - RNA, 19 nt, Artificial Sequence
  Description of Artificial Sequence: Synthetic oligonucleotide
  Sense strand starting at position 773 of SEQ ID NO: 588161
agguuucugcuuugaagug

SEQ ID NO: 846003 - RNA, 19 nt, Artificial Sequence
  Description of Artificial Sequence: Synthetic oligonucleotide
  Antisense strand to SEQ ID NO: 846002
cacuucaaagcagaaaccu

SEQ ID NO: 846004 - RNA, 19 nt, Artificial Sequence
  Description of Artificial Sequence: Synthetic oligonucleotide
  Sense strand starting at position 858 of SEQ ID NO: 588161
uuucuuccugucuggaaau

SEQ ID NO: 846005 - RNA, 19 nt, Artificial Sequence
  Description of Artificial Sequence: Synthetic oligonucleotide
  Antisense strand to SEQ ID NO: 846004
auuuccagacaggaagaaa

SEQ ID NO: 846006 - RNA, 19 nt, Artificial Sequence
  Description of Artificial Sequence: Synthetic oligonucleotide
  Sense strand starting at position 860 of SEQ ID NO: 588161
ucuuccugucuggaaaugu

SEQ ID NO: 846007 - RNA, 19 nt, Artificial Sequence
  Description of Artificial Sequence: Synthetic oligonucleotide
  Antisense strand to SEQ ID NO: 846006
acauuuccagacaggaaga

SEQ ID NO: 846008 - RNA, 19 nt, Artificial Sequence
  Description of Artificial Sequence: Synthetic oligonucleotide
  Sense strand starting at position 864 of SEQ ID NO: 588161
ccugucuggaaauguagau

SEQ ID NO: 846009 - RNA, 19 nt, Artificial Sequence
  Description of Artificial Sequence: Synthetic oligonucleotide
  Antisense strand to SEQ ID NO: 846008
aucuacauuuccagacagg

SEQ ID NO: 846010 - RNA, 19 nt, Artificial Sequence
  Description of Artificial Sequence: Synthetic oligonucleotide
  Sense strand starting at position 1066 of SEQ ID NO: 588161
agucgaaguuuagaaaguu

SEQ ID NO: 846011 - RNA, 19 nt, Artificial Sequence
  Description of Artificial Sequence: Synthetic oligonucleotide
  Antisense strand to SEQ ID NO: 846010
aacuuucuaaacuucgacu

SEQ ID NO: 846012 - RNA, 19 nt, Artificial Sequence
  Description of Artificial Sequence: Synthetic oligonucleotide
  Sense strand starting at position 1074 of SEQ ID NO: 588161
uuuagaaaguuugcuuugu

SEQ ID NO: 846013 - RNA, 19 nt, Artificial Sequence
  Description of Artificial Sequence: Synthetic oligonucleotide
  Antisense strand to SEQ ID NO: 846012
acaaagcaaacuuucuaaa

SEQ ID NO: 846014 - RNA, 19 nt, Artificial Sequence
  Description of Artificial Sequence: Synthetic oligonucleotide
  Sense strand starting at position 1078 of SEQ ID NO: 588161
gaaaguuugcuuugugcau

SEQ ID NO: 846015 - RNA, 19 nt, Artificial Sequence
  Description of Artificial Sequence: Synthetic oligonucleotide
  Antisense strand to SEQ ID NO: 846014
augcacaaagcaaacuuuc

SEQ ID NO: 846016 - RNA, 19 nt, Artificial Sequence
  Description of Artificial Sequence: Synthetic oligonucleotide
  Sense strand starting at position 1079 of SEQ ID NO: 588161
aaaguuugcuuugugcauu

SEQ ID NO: 846017 - RNA, 19 nt, Artificial Sequence
  Description of Artificial Sequence: Synthetic oligonucleotide
  Antisense strand to SEQ ID NO: 846016
aaugcacaaagcaaacuuu

SEQ ID NO: 846018 - RNA, 19 nt, Artificial Sequence
  Description of Artificial Sequence: Synthetic oligonucleotide
  Sense strand starting at position 1157 of SEQ ID NO: 588161
gacucuuuguugcucaaag

SEQ ID NO: 846019 - RNA, 19 nt, Artificial Sequence
  Description of Artificial Sequence: Synthetic oligonucleotide
  Antisense strand to SEQ ID NO: 846018
cuuugagcaacaaagaguc

SEQ ID NO: 846020 - RNA, 19 nt, Artificial Sequence
  Description of Artificial Sequence: Synthetic oligonucleotide
  Sense strand starting at position 1193 of SEQ ID NO: 588161
gcugaaauguucugaggag

SEQ ID NO: 846021 - RNA, 19 nt, Artificial Sequence
  Description of Artificial Sequence: Synthetic oligonucleotide
  Antisense strand to SEQ ID NO: 846020
cuccucagaacauuucagc

SEQ ID NO: 846022 - RNA, 19 nt, Artificial Sequence
  Description of Artificial Sequence: Synthetic oligonucleotide
  Sense strand starting at position 1194 of SEQ ID NO: 588161
cugaaauguucugaggaga

SEQ ID NO: 846023 - RNA, 19 nt, Artificial Sequence
  Description of Artificial Sequence: Synthetic oligonucleotide
  Antisense strand to SEQ ID NO: 846022
ucuccucagaacauuucag

SEQ ID NO: 846024 - RNA, 19 nt, Artificial Sequence
  Description of Artificial Sequence: Synthetic oligonucleotide
  Sense strand starting at position 1340 of SEQ ID NO: 588161
uuaccuuuauacucagagu

SEQ ID NO: 846025 - RNA, 19 nt, Artificial Sequence
  Description of Artificial Sequence: Synthetic oligonucleotide
  Antisense strand to SEQ ID NO: 846024
acucugaguauaaagguaa

SEQ ID NO: 846026 - RNA, 19 nt, Artificial Sequence
  Description of Artificial Sequence: Synthetic oligonucleotide
  Sense strand starting at position 2207 of SEQ ID NO: 588161
acgcuucuuccaggcaagu

SEQ ID NO: 846027 - RNA, 19 nt, Artificial Sequence
  Description of Artificial Sequence: Synthetic oligonucleotide
  Antisense strand to SEQ ID NO: 846026
acuugccuggaagaagcgu

SEQ ID NO: 846028 - RNA, 19 nt, Artificial Sequence
  Description of Artificial Sequence: Synthetic oligonucleotide
  Sense strand starting at position 2739 of SEQ ID NO: 588161
cggcgauuuccacacgguu

SEQ ID NO: 846029 - RNA, 19 nt, Artificial Sequence
  Description of Artificial Sequence: Synthetic oligonucleotide
  Antisense strand to SEQ ID NO: 846028
aaccguguggaaaucgccg

SEQ ID NO: 846030 - RNA, 19 nt, Artificial Sequence
  Description of Artificial Sequence: Synthetic oligonucleotide
  Sense strand starting at position 2763 of SEQ ID NO: 588161
ucauuaggccggugacgaa

SEQ ID NO: 846031 - RNA, 19 nt, Artificial Sequence
  Description of Artificial Sequence: Synthetic oligonucleotide
  Antisense strand to SEQ ID NO: 846030
uucgucaccggccuaauga

SEQ ID NO: 846032 - RNA, 19 nt, Artificial Sequence
  Description of Artificial Sequence: Synthetic oligonucleotide
  Sense strand starting at position 2782 of SEQ ID NO: 588161
gcuccuaaugagggugauu

SEQ ID NO: 846033 - RNA, 19 nt, Artificial Sequence
  Description of Artificial Sequence: Synthetic oligonucleotide
  Antisense strand to SEQ ID NO: 846032
aaucacccucauuaggagc

SEQ ID NO: 846034 - RNA, 19 nt, Artificial Sequence
  Description of Artificial Sequence: Synthetic oligonucleotide
  Sense strand starting at position 2923 of SEQ ID NO: 588161
aaauuauucgucggcaggu

SEQ ID NO: 846035 - RNA, 19 nt, Artificial Sequence
  Description of Artificial Sequence: Synthetic oligonucleotide
  Antisense strand to SEQ ID NO: 846034
accugccgacgaauaauuu

SEQ ID NO: 846036 - RNA, 19 nt, Artificial Sequence
  Description of Artificial Sequence: Synthetic oligonucleotide
  Sense strand starting at position 3150 of SEQ ID NO: 588161
cgguguuucccauguagga

SEQ ID NO: 846037 - RNA, 19 nt, Artificial Sequence
  Description of Artificial Sequence: Synthetic oligonucleotide
  Antisense strand to SEQ ID NO: 846036
uccuacaugggaaacaccg

SEQ ID NO: 846038 - RNA, 19 nt, Artificial Sequence
  Description of Artificial Sequence: Synthetic oligonucleotide
  Sense strand starting at position 3152 of SEQ ID NO: 588161
guguuucccauguaggaca

SEQ ID NO: 846039 - RNA, 19 nt, Artificial Sequence
  Description of Artificial Sequence: Synthetic oligonucleotide
  Antisense strand to SEQ ID NO: 846038
uguccuacaugggaaacac

SEQ ID NO: 846040 - RNA, 19 nt, Artificial Sequence
  Description of Artificial Sequence: Synthetic oligonucleotide
  Sense strand starting at position 3232 of SEQ ID NO: 588161
ccaggugucuuccugggaa

SEQ ID NO: 846041 - RNA, 19 nt, Artificial Sequence
  Description of Artificial Sequence: Synthetic oligonucleotide
  Antisense strand to SEQ ID NO: 846040
uucccaggaagacaccugg

SEQ ID NO: 846042 - RNA, 19 nt, Artificial Sequence
  Description of Artificial Sequence: Synthetic oligonucleotide
  Sense strand starting at position 3234 of SEQ ID NO: 588161
aggugucuuccugggaagu

SEQ ID NO: 846043 - RNA, 19 nt, Artificial Sequence
  Description of Artificial Sequence: Synthetic oligonucleotide
  Antisense strand to SEQ ID NO: 846042
acuucccaggaagacaccu

SEQ ID NO: 846044 - RNA, 19 nt, Artificial Sequence
  Description of Artificial Sequence: Synthetic oligonucleotide
  Sense strand starting at position 3235 of SEQ ID NO: 588161
ggugucuuccugggaagug

SEQ ID NO: 846045 - RNA, 19 nt, Artificial Sequence
  Description of Artificial Sequence: Synthetic oligonucleotide
  Antisense strand to SEQ ID NO: 846044
cacuucccaggaagacacc

SEQ ID NO: 846046 - RNA, 19 nt, Artificial Sequence
  Description of Artificial Sequence: Synthetic oligonucleotide
  Sense strand starting at position 3328 of SEQ ID NO: 588161
ucgagaaauccguguggcu

SEQ ID NO: 846047 - RNA, 19 nt, Artificial Sequence
  Description of Artificial Sequence: Synthetic oligonucleotide
  Antisense strand to SEQ ID NO: 846046
agccacacggauuucucga

SEQ ID NO: 846048 - RNA, 19 nt, Artificial Sequence
  Description of Artificial Sequence: Synthetic oligonucleotide
  Sense strand starting at position 3330 of SEQ ID NO: 588161
gagaaauccguguggcuca

SEQ ID NO: 846049 - RNA, 19 nt, Artificial Sequence
  Description of Artificial Sequence: Synthetic oligonucleotide
  Antisense strand to SEQ ID NO: 846048
ugagccacacggauuucuc

SEQ ID NO: 846050 - RNA, 19 nt, Artificial Sequence
  Description of Artificial Sequence: Synthetic oligonucleotide
  Sense strand starting at position 3960 of SEQ ID NO: 588161
ccucuaaacgcagaauucu

SEQ ID NO: 846051 - RNA, 19 nt, Artificial Sequence
  Description of Artificial Sequence: Synthetic oligonucleotide
  Antisense strand to SEQ ID NO: 846050
agaauucugcguuuagagg

SEQ ID NO: 846052 - RNA, 19 nt, Artificial Sequence
  Description of Artificial Sequence: Synthetic oligonucleotide
  Sense strand starting at position 57 of SEQ ID NO: 588162
ggaguaucuccucgacccu

SEQ ID NO: 846053 - RNA, 19 nt, Artificial Sequence
  Description of Artificial Sequence: Synthetic oligonucleotide
  Antisense strand to SEQ ID NO: 846052
agggucgaggagauacucc

SEQ ID NO: 846054 - RNA, 19 nt, Artificial Sequence
  Description of Artificial Sequence: Synthetic oligonucleotide
  Sense strand starting at position 76 of SEQ ID NO: 588162
guccguguucuguccugga

SEQ ID NO: 846055 - RNA, 19 nt, Artificial Sequence
  Description of Artificial Sequence: Synthetic oligonucleotide
  Antisense strand to SEQ ID NO: 846054
uccaggacagaacacggac

SEQ ID NO: 846056 - RNA, 19 nt, Artificial Sequence
  Description of Artificial Sequence: Synthetic oligonucleotide
  Sense strand starting at position 78 of SEQ ID NO: 588162
ccguguucuguccuggagu

SEQ ID NO: 846057 - RNA, 19 nt, Artificial Sequence
  Description of Artificial Sequence: Synthetic oligonucleotide
  Antisense strand to SEQ ID NO: 846056
acuccaggacagaacacgg

SEQ ID NO: 846058 - RNA, 19 nt, Artificial Sequence
  Description of Artificial Sequence: Synthetic oligonucleotide
  Sense strand starting at position 80 of SEQ ID NO: 588162
guguucuguccuggaguuc

SEQ ID NO: 846059 - RNA, 19 nt, Artificial Sequence
  Description of Artificial Sequence: Synthetic oligonucleotide
  Antisense strand to SEQ ID NO: 846058
gaacuccaggacagaacac

SEQ ID NO: 846060 - RNA, 19 nt, Artificial Sequence
  Description of Artificial Sequence: Synthetic oligonucleotide
  Sense strand starting at position 142 of SEQ ID NO: 588162
cauguuugcagcugcgaga

SEQ ID NO: 846061 - RNA, 19 nt, Artificial Sequence
  Description of Artificial Sequence: Synthetic oligonucleotide
  Antisense strand to SEQ ID NO: 846060
ucucgcagcugcaaacaug

SEQ ID NO: 846062 - RNA, 19 nt, Artificial Sequence
  Description of Artificial Sequence: Synthetic oligonucleotide
  Sense strand starting at position 156 of SEQ ID NO: 588162
cgagaaacucggagugugu

SEQ ID NO: 846063 - RNA, 19 nt, Artificial Sequence
  Description of Artificial Sequence: Synthetic oligonucleotide
  Antisense strand to SEQ ID NO: 846062
acacacuccgaguuucucg

SEQ ID NO: 846064 - RNA, 19 nt, Artificial Sequence
  Description of Artificial Sequence: Synthetic oligonucleotide
  Sense strand starting at position 232 of SEQ ID NO: 588162
uggcguuugcuccaaccaa

SEQ ID NO: 846065 - RNA, 19 nt, Artificial Sequence
  Description of Artificial Sequence: Synthetic oligonucleotide
  Antisense strand to SEQ ID NO: 846064
uugguuggagcaaacgcca

SEQ ID NO: 846066 - RNA, 19 nt, Artificial Sequence
  Description of Artificial Sequence: Synthetic oligonucleotide
  Sense strand starting at position 252 of SEQ ID NO: 588162
ucagccuugcugcguuaga

SEQ ID NO: 846067 - RNA, 19 nt, Artificial Sequence
  Description of Artificial Sequence: Synthetic oligonucleotide
  Antisense strand to SEQ ID NO: 846066
ucuaacgcagcaaggcuga

SEQ ID NO: 846068 - RNA, 19 nt, Artificial Sequence
  Description of Artificial Sequence: Synthetic oligonucleotide
  Sense strand starting at position 253 of SEQ ID NO: 588162
cagccuugcugcguuagaa

SEQ ID NO: 846069 - RNA, 19 nt, Artificial Sequence
  Description of Artificial Sequence: Synthetic oligonucleotide
  Antisense strand to SEQ ID NO: 846068
uucuaacgcagcaaggcug

SEQ ID NO: 846070 - RNA, 19 nt, Artificial Sequence
  Description of Artificial Sequence: Synthetic oligonucleotide
  Sense strand starting at position 254 of SEQ ID NO: 588162
agccuugcugcguuagaaa

SEQ ID NO: 846071 - RNA, 19 nt, Artificial Sequence
  Description of Artificial Sequence: Synthetic oligonucleotide
  Antisense strand to SEQ ID NO: 846070
uuucuaacgcagcaaggcu

SEQ ID NO: 846072 - RNA, 19 nt, Artificial Sequence
  Description of Artificial Sequence: Synthetic oligonucleotide
  Sense strand starting at position 359 of SEQ ID NO: 588162
gggugcuucccggaaauuc

SEQ ID NO: 846073 - RNA, 19 nt, Artificial Sequence
  Description of Artificial Sequence: Synthetic oligonucleotide
  Antisense strand to SEQ ID NO: 846072
gaauuuccgggaagcaccc

SEQ ID NO: 846074 - RNA, 19 nt, Artificial Sequence
  Description of Artificial Sequence: Synthetic oligonucleotide
  Sense strand starting at position 491 of SEQ ID NO: 588162
acgaauuaguagcaacaga

SEQ ID NO: 846075 - RNA, 19 nt, Artificial Sequence
  Description of Artificial Sequence: Synthetic oligonucleotide
  Antisense strand to SEQ ID NO: 846074
ucuguugcuacuaauucgu

SEQ ID NO: 846076 - RNA, 19 nt, Artificial Sequence
  Description of Artificial Sequence: Synthetic oligonucleotide
  Sense strand starting at position 1703 of SEQ ID NO: 588162
cggguggcuccgugaggau

SEQ ID NO: 846077 - RNA, 19 nt, Artificial Sequence
  Description of Artificial Sequence: Synthetic oligonucleotide
  Antisense strand to SEQ ID NO: 846076
auccucacggagccacccg

SEQ ID NO: 846078 - RNA, 19 nt, Artificial Sequence
  Description of Artificial Sequence: Synthetic oligonucleotide
  Sense strand starting at position 1712 of SEQ ID NO: 588162
ccgugaggaucuccucaau

SEQ ID NO: 846079 - RNA, 19 nt, Artificial Sequence
  Description of Artificial Sequence: Synthetic oligonucleotide
  Antisense strand to SEQ ID NO: 846078
auugaggagauccucacgg

SEQ ID NO: 846080 - RNA, 19 nt, Artificial Sequence
  Description of Artificial Sequence: Synthetic oligonucleotide
  Sense strand starting at position 2256 of SEQ ID NO: 588162
cggagaguucgggaggcaa

SEQ ID NO: 846081 - RNA, 19 nt, Artificial Sequence
  Description of Artificial Sequence: Synthetic oligonucleotide
  Antisense strand to SEQ ID NO: 846080
uugccucccgaacucuccg

SEQ ID NO: 846082 - RNA, 19 nt, Artificial Sequence
  Description of Artificial Sequence: Synthetic oligonucleotide
  Sense strand starting at position 2258 of SEQ ID NO: 588162
gagaguucgggaggcaaga

SEQ ID NO: 846083 - RNA, 19 nt, Artificial Sequence
  Description of Artificial Sequence: Synthetic oligonucleotide
  Antisense strand to SEQ ID NO: 846082
ucuugccucccgaacucuc

SEQ ID NO: 846084 - RNA, 19 nt, Artificial Sequence
  Description of Artificial Sequence: Synthetic oligonucleotide
  Sense strand starting at position 2770 of SEQ ID NO: 588162
auguucuccagccgagauu

SEQ ID NO: 846085 - RNA, 19 nt, Artificial Sequence
  Description of Artificial Sequence: Synthetic oligonucleotide
  Antisense strand to SEQ ID NO: 846084
aaucucggcuggagaacau

SEQ ID NO: 846086 - RNA, 19 nt, Artificial Sequence
  Description of Artificial Sequence: Synthetic oligonucleotide
  Sense strand starting at position 2779 of SEQ ID NO: 588162
agccgagauuugcuugaau

SEQ ID NO: 846087 - RNA, 19 nt, Artificial Sequence
  Description of Artificial Sequence: Synthetic oligonucleotide
  Antisense strand to SEQ ID NO: 846086
auucaagcaaaucucggcu

SEQ ID NO: 846088 - RNA, 19 nt, Artificial Sequence
  Description of Artificial Sequence: Synthetic oligonucleotide
  Sense strand starting at position 2805 of SEQ ID NO: 588162
ucaagugauccauggacac

SEQ ID NO: 846089 - RNA, 19 nt, Artificial Sequence
  Description of Artificial Sequence: Synthetic oligonucleotide
  Antisense strand to SEQ ID NO: 846088
guguccauggaucacuuga

SEQ ID NO: 846090 - RNA, 19 nt, Artificial Sequence
  Description of Artificial Sequence: Synthetic oligonucleotide
  Sense strand starting at position 2978 of SEQ ID NO: 588162
gccagugggugcucugaga

SEQ ID NO: 846091 - RNA, 19 nt, Artificial Sequence
  Description of Artificial Sequence: Synthetic oligonucleotide
  Antisense strand to SEQ ID NO: 846090
ucucagagcacccacuggc

SEQ ID NO: 846092 - RNA, 19 nt, Artificial Sequence
  Description of Artificial Sequence: Synthetic oligonucleotide
  Sense strand starting at position 2982 of SEQ ID NO: 588162
gugggugcucugagagugu

SEQ ID NO: 846093 - RNA, 19 nt, Artificial Sequence
  Description of Artificial Sequence: Synthetic oligonucleotide
  Antisense strand to SEQ ID NO: 846092
acacucucagagcacccac

SEQ ID NO: 846094 - RNA, 19 nt, Artificial Sequence
  Description of Artificial Sequence: Synthetic oligonucleotide
  Sense strand starting at position 2986 of SEQ ID NO: 588162
gugcucugagaguguaaag

SEQ ID NO: 846095 - RNA, 19 nt, Artificial Sequence
  Description of Artificial Sequence: Synthetic oligonucleotide
  Antisense strand to SEQ ID NO: 846094
cuuuacacucucagagcac

SEQ ID NO: 846096 - RNA, 19 nt, Artificial Sequence
  Description of Artificial Sequence: Synthetic oligonucleotide
  Sense strand starting at position 3071 of SEQ ID NO: 588162
ggcaguaccuucucuagau

SEQ ID NO: 846097 - RNA, 19 nt, Artificial Sequence
  Description of Artificial Sequence: Synthetic oligonucleotide
  Antisense strand to SEQ ID NO: 846096
aucuagagaagguacugcc

SEQ ID NO: 846098 - RNA, 19 nt, Artificial Sequence
  Description of Artificial Sequence: Synthetic oligonucleotide
  Sense strand starting at position 3072 of SEQ ID NO: 588162
gcaguaccuucucuagauc

SEQ ID NO: 846099 - RNA, 19 nt, Artificial Sequence
  Description of Artificial Sequence: Synthetic oligonucleotide
  Antisense strand to SEQ ID NO: 846098
gaucuagagaagguacugc

SEQ ID NO: 846100 - RNA, 19 nt, Artificial Sequence
  Description of Artificial Sequence: Synthetic oligonucleotide
  Sense strand starting at position 3095 of SEQ ID NO: 588162
uuuccauccuuagaagagu

SEQ ID NO: 846101 - RNA, 19 nt, Artificial Sequence
  Description of Artificial Sequence: Synthetic oligonucleotide
  Antisense strand to SEQ ID NO: 846100
acucuucuaaggauggaaa

SEQ ID NO: 846102 - RNA, 19 nt, Artificial Sequence
  Description of Artificial Sequence: Synthetic oligonucleotide
  Sense strand starting at position 3318 of SEQ ID NO: 588162
gcccuuaggucuguuugga

SEQ ID NO: 846103 - RNA, 19 nt, Artificial Sequence
  Description of Artificial Sequence: Synthetic oligonucleotide
  Antisense strand to SEQ ID NO: 846102
uccaaacagaccuaagggc

SEQ ID NO: 846104 - RNA, 19 nt, Artificial Sequence
  Description of Artificial Sequence: Synthetic oligonucleotide
  Sense strand starting at position 3322 of SEQ ID NO: 588162
uuaggucuguuuggagaga

SEQ ID NO: 846105 - RNA, 19 nt, Artificial Sequence
  Description of Artificial Sequence: Synthetic oligonucleotide
  Antisense strand to SEQ ID NO: 846104
ucucuccaaacagaccuaa

SEQ ID NO: 846106 - RNA, 19 nt, Artificial Sequence
  Description of Artificial Sequence: Synthetic oligonucleotide
  Sense strand starting at position 3323 of SEQ ID NO: 588162
uaggucuguuuggagagaa

SEQ ID NO: 846107 - RNA, 19 nt, Artificial Sequence
  Description of Artificial Sequence: Synthetic oligonucleotide
  Antisense strand to SEQ ID NO: 846106
uucucuccaaacagaccua

SEQ ID NO: 846108 - RNA, 19 nt, Artificial Sequence
  Description of Artificial Sequence: Synthetic oligonucleotide
  Sense strand starting at position 3343 of SEQ ID NO: 588162
acaguuccuccaggcaaga

SEQ ID NO: 846109 - RNA, 19 nt, Artificial Sequence
  Description of Artificial Sequence: Synthetic oligonucleotide
  Antisense strand to SEQ ID NO: 846108
ucuugccuggaggaacugu

SEQ ID NO: 846110 - RNA, 19 nt, Artificial Sequence
  Description of Artificial Sequence: Synthetic oligonucleotide
  Sense strand starting at position 3530 of SEQ ID NO: 588162
gucuuuaccucagguaacu

SEQ ID NO: 846111 - RNA, 19 nt, Artificial Sequence
  Description of Artificial Sequence: Synthetic oligonucleotide
  Antisense strand to SEQ ID NO: 846110
aguuaccugagguaaagac

SEQ ID NO: 846112 - RNA, 19 nt, Artificial Sequence
  Description of Artificial Sequence: Synthetic oligonucleotide
  Sense strand starting at position 3707 of SEQ ID NO: 588162
cccagauccuuugucugua

SEQ ID NO: 846113 - RNA, 19 nt, Artificial Sequence
  Description of Artificial Sequence: Synthetic oligonucleotide
  Antisense strand to SEQ ID NO: 846112
uacagacaaaggaucuggg

SEQ ID NO: 846114 - RNA, 19 nt, Artificial Sequence
  Description of Artificial Sequence: Synthetic oligonucleotide
  Sense strand starting at position 3748 of SEQ ID NO: 588162
cuaccuuacucugguaaga

SEQ ID NO: 846115 - RNA, 19 nt, Artificial Sequence
  Description of Artificial Sequence: Synthetic oligonucleotide
  Antisense strand to SEQ ID NO: 846114
ucuuaccagaguaagguag

SEQ ID NO: 846116 - RNA, 19 nt, Artificial Sequence
  Description of Artificial Sequence: Synthetic oligonucleotide
  Sense strand starting at position 3750 of SEQ ID NO: 588162
accuuacucugguaagauc

SEQ ID NO: 846117 - RNA, 19 nt, Artificial Sequence
  Description of Artificial Sequence: Synthetic oligonucleotide
  Antisense strand to SEQ ID NO: 846116
gaucuuaccagaguaaggu

SEQ ID NO: 846118 - RNA, 19 nt, Artificial Sequence
  Description of Artificial Sequence: Synthetic oligonucleotide
  Sense strand starting at position 3799 of SEQ ID NO: 588162
ccaguuguugcaugacuuu

SEQ ID NO: 846119 - RNA, 19 nt, Artificial Sequence
  Description of Artificial Sequence: Synthetic oligonucleotide
  Antisense strand to SEQ ID NO: 846118
aaagucaugcaacaacugg

SEQ ID NO: 846120 - RNA, 19 nt, Artificial Sequence
  Description of Artificial Sequence: Synthetic oligonucleotide
  Sense strand starting at position 3806 of SEQ ID NO: 588162
uugcaugacuuucugaacu

SEQ ID NO: 846121 - RNA, 19 nt, Artificial Sequence
  Description of Artificial Sequence: Synthetic oligonucleotide
  Antisense strand to SEQ ID NO: 846120
aguucagaaagucaugcaa

SEQ ID NO: 846122 - RNA, 19 nt, Artificial Sequence
  Description of Artificial Sequence: Synthetic oligonucleotide
  Sense strand starting at position 3825 of SEQ ID NO: 588162
cagaguuaccauugggacu

SEQ ID NO: 846123 - RNA, 19 nt, Artificial Sequence
  Description of Artificial Sequence: Synthetic oligonucleotide
  Antisense strand to SEQ ID NO: 846122
agucccaaugguaacucug

SEQ ID NO: 846124 - RNA, 19 nt, Artificial Sequence
  Description of Artificial Sequence: Synthetic oligonucleotide
  Sense strand starting at position 3844 of SEQ ID NO: 588162
gaaagaagguggccucaau

SEQ ID NO: 846125 - RNA, 19 nt, Artificial Sequence
  Description of Artificial Sequence: Synthetic oligonucleotide
  Antisense strand to SEQ ID NO: 846124
auugaggccaccuucuuuc

SEQ ID NO: 846126 - RNA, 19 nt, Artificial Sequence
  Description of Artificial Sequence: Synthetic oligonucleotide
  Sense strand starting at position 3907 of SEQ ID NO: 588162
ccuacaugguucuuuggaa

SEQ ID NO: 846127 - RNA, 19 nt, Artificial Sequence
  Description of Artificial Sequence: Synthetic oligonucleotide
  Antisense strand to SEQ ID NO: 846126
uuccaaagaaccauguagg

SEQ ID NO: 846128 - RNA, 19 nt, Artificial Sequence
  Description of Artificial Sequence: Synthetic oligonucleotide
  Sense strand starting at position 3908 of SEQ ID NO: 588162
cuacaugguucuuuggaaa

SEQ ID NO: 846129 - RNA, 19 nt, Artificial Sequence
  Description of Artificial Sequence: Synthetic oligonucleotide
  Antisense strand to SEQ ID NO: 846128
uuuccaaagaaccauguag

SEQ ID NO: 846130 - RNA, 19 nt, Artificial Sequence
  Description of Artificial Sequence: Synthetic oligonucleotide
  Sense strand starting at position 3971 of SEQ ID NO: 588162
caggccuccuccugagaga

SEQ ID NO: 846131 - RNA, 19 nt, Artificial Sequence
  Description of Artificial Sequence: Synthetic oligonucleotide
  Antisense strand to SEQ ID NO: 846130
ucucucaggaggaggccug

SEQ ID NO: 846132 - RNA, 19 nt, Artificial Sequence
  Description of Artificial Sequence: Synthetic oligonucleotide
  Sense strand starting at position 248 of SEQ ID NO: 588163
uggagcaugcauugcagaa

SEQ ID NO: 846133 - RNA, 19 nt, Artificial Sequence
  Description of Artificial Sequence: Synthetic oligonucleotide
  Antisense strand to SEQ ID NO: 846132
uucugcaaugcaugcucca

SEQ ID NO: 846134 - RNA, 19 nt, Artificial Sequence
  Description of Artificial Sequence: Synthetic oligonucleotide
  Sense strand starting at position 392 of SEQ ID NO: 588163
ccaagcaucugcuuggauu

SEQ ID NO: 846135 - RNA, 19 nt, Artificial Sequence
  Description of Artificial Sequence: Synthetic oligonucleotide
  Antisense strand to SEQ ID NO: 846134
aauccaagcagaugcuugg

SEQ ID NO: 846136 - RNA, 19 nt, Artificial Sequence
  Description of Artificial Sequence: Synthetic oligonucleotide
  Sense strand starting at position 505 of SEQ ID NO: 588163
agaggugccaggugauaag

SEQ ID NO: 846137 - RNA, 19 nt, Artificial Sequence
  Description of Artificial Sequence: Synthetic oligonucleotide
  Antisense strand to SEQ ID NO: 846136
cuuaucaccuggcaccucu

SEQ ID NO: 846138 - RNA, 19 nt, Artificial Sequence
  Description of Artificial Sequence: Synthetic oligonucleotide
  Sense strand starting at position 514 of SEQ ID NO: 588163
aggugauaagccuggaaac

SEQ ID NO: 846139 - RNA, 19 nt, Artificial Sequence
  Description of Artificial Sequence: Synthetic oligonucleotide
  Antisense strand to SEQ ID NO: 846138
guuuccaggcuuaucaccu

SEQ ID NO: 846140 - RNA, 19 nt, Artificial Sequence
  Description of Artificial Sequence: Synthetic oligonucleotide
  Sense strand starting at position 750 of SEQ ID NO: 588163
gauccaaacccugguguau

SEQ ID NO: 846141 - RNA, 19 nt, Artificial Sequence
  Description of Artificial Sequence: Synthetic oligonucleotide
  Antisense strand to SEQ ID NO: 846140
auacaccaggguuuggauc

SEQ ID NO: 846142 - RNA, 19 nt, Artificial Sequence
  Description of Artificial Sequence: Synthetic oligonucleotide
  Sense strand starting at position 759 of SEQ ID NO: 588163
ccugguguauccucccaga

SEQ ID NO: 846143 - RNA, 19 nt, Artificial Sequence
  Description of Artificial Sequence: Synthetic oligonucleotide
  Antisense strand to SEQ ID NO: 846142
ucugggaggauacaccagg

SEQ ID NO: 846144 - RNA, 19 nt, Artificial Sequence
  Description of Artificial Sequence: Synthetic oligonucleotide
  Sense strand starting at position 796 of SEQ ID NO: 588163
acgcuauggagucagggaa

SEQ ID NO: 846145 - RNA, 19 nt, Artificial Sequence
  Description of Artificial Sequence: Synthetic oligonucleotide
  Antisense strand to SEQ ID NO: 846144
uucccugacuccauagcgu

SEQ ID NO: 846146 - RNA, 19 nt, Artificial Sequence
  Description of Artificial Sequence: Synthetic oligonucleotide
  Sense strand starting at position 931 of SEQ ID NO: 588163
cacugaggucuccguccaa

SEQ ID NO: 846147 - RNA, 19 nt, Artificial Sequence
  Description of Artificial Sequence: Synthetic oligonucleotide
  Antisense strand to SEQ ID NO: 846146
uuggacggagaccucagug

SEQ ID NO: 846148 - RNA, 19 nt, Artificial Sequence
  Description of Artificial Sequence: Synthetic oligonucleotide
  Sense strand starting at position 1172 of SEQ ID NO: 588163
cucggaggcacucaugaaa

SEQ ID NO: 846149 - RNA, 19 nt, Artificial Sequence
  Description of Artificial Sequence: Synthetic oligonucleotide
  Antisense strand to SEQ ID NO: 846148
uuucaugagugccuccgag

SEQ ID NO: 846150 - RNA, 19 nt, Artificial Sequence
  Description of Artificial Sequence: Synthetic oligonucleotide
  Sense strand starting at position 1194 of SEQ ID NO: 588163
gcagaaacgcuccgaaagu

SEQ ID NO: 846151 - RNA, 19 nt, Artificial Sequence
  Description of Artificial Sequence: Synthetic oligonucleotide
  Antisense strand to SEQ ID NO: 846150
acuuucggagcguuucugc

SEQ ID NO: 846152 - RNA, 19 nt, Artificial Sequence
  Description of Artificial Sequence: Synthetic oligonucleotide
  Sense strand starting at position 1236 of SEQ ID NO: 588163
gcuuucucugaaggugaca

SEQ ID NO: 846153 - RNA, 19 nt, Artificial Sequence
  Description of Artificial Sequence: Synthetic oligonucleotide
  Antisense strand to SEQ ID NO: 846152
ugucaccuucagagaaagc

SEQ ID NO: 846154 - RNA, 19 nt, Artificial Sequence
  Description of Artificial Sequence: Synthetic oligonucleotide
  Sense strand starting at position 1495 of SEQ ID NO: 588163
gcauuagcggcgucugcaa

SEQ ID NO: 846155 - RNA, 19 nt, Artificial Sequence
  Description of Artificial Sequence: Synthetic oligonucleotide
  Antisense strand to SEQ ID NO: 846154
uugcagacgccgcuaaugc

SEQ ID NO: 846156 - RNA, 19 nt, Artificial Sequence
  Description of Artificial Sequence: Synthetic oligonucleotide
  Sense strand starting at position 2758 of SEQ ID NO: 588163
aggucuauuucuugggaau

SEQ ID NO: 846157 - RNA, 19 nt, Artificial Sequence
  Description of Artificial Sequence: Synthetic oligonucleotide
  Antisense strand to SEQ ID NO: 846156
auucccaagaaauagaccu

SEQ ID NO: 846158 - RNA, 19 nt, Artificial Sequence
  Description of Artificial Sequence: Synthetic oligonucleotide
  Sense strand starting at position 2760 of SEQ ID NO: 588163
gucuauuucuugggaauaa

SEQ ID NO: 846159 - RNA, 19 nt, Artificial Sequence
  Description of Artificial Sequence: Synthetic oligonucleotide
  Antisense strand to SEQ ID NO: 846158
uuauucccaagaaauagac

SEQ ID NO: 846160 - RNA, 19 nt, Artificial Sequence
  Description of Artificial Sequence: Synthetic oligonucleotide
  Sense strand starting at position 2761 of SEQ ID NO: 588163
ucuauuucuugggaauaaa

SEQ ID NO: 846161 - RNA, 19 nt, Artificial Sequence
  Description of Artificial Sequence: Synthetic oligonucleotide
  Antisense strand to SEQ ID NO: 846160
uuuauucccaagaaauaga

SEQ ID NO: 846162 - RNA, 19 nt, Artificial Sequence
  Description of Artificial Sequence: Synthetic oligonucleotide
  Sense strand starting at position 2787 of SEQ ID NO: 588163
ccauuaauacagggucaua

SEQ ID NO: 846163 - RNA, 19 nt, Artificial Sequence
  Description of Artificial Sequence: Synthetic oligonucleotide
  Antisense strand to SEQ ID NO: 846162
uaugacccuguauuaaugg

SEQ ID NO: 846164 - RNA, 19 nt, Artificial Sequence
  Description of Artificial Sequence: Synthetic oligonucleotide
  Sense strand starting at position 2798 of SEQ ID NO: 588163
gggucauaaacgugguaaa

SEQ ID NO: 846165 - RNA, 19 nt, Artificial Sequence
  Description of Artificial Sequence: Synthetic oligonucleotide
  Antisense strand to SEQ ID NO: 846164
uuuaccacguuuaugaccc

SEQ ID NO: 846166 - RNA, 19 nt, Artificial Sequence
  Description of Artificial Sequence: Synthetic oligonucleotide
  Sense strand starting at position 2799 of SEQ ID NO: 588163
ggucauaaacgugguaaau

SEQ ID NO: 846167 - RNA, 19 nt, Artificial Sequence
  Description of Artificial Sequence: Synthetic oligonucleotide
  Antisense strand to SEQ ID NO: 846166
auuuaccacguuuaugacc

SEQ ID NO: 846168 - RNA, 19 nt, Artificial Sequence
  Description of Artificial Sequence: Synthetic oligonucleotide
  Sense strand starting at position 2821 of SEQ ID NO: 588163
auuguugucuccgcaucua

SEQ ID NO: 846169 - RNA, 19 nt, Artificial Sequence
  Description of Artificial Sequence: Synthetic oligonucleotide
  Antisense strand to SEQ ID NO: 846168
uagaugcggagacaacaau

SEQ ID NO: 846170 - RNA, 19 nt, Artificial Sequence
  Description of Artificial Sequence: Synthetic oligonucleotide
  Sense strand starting at position 2851 of SEQ ID NO: 588163
gacuuaaguuguuugaaag

SEQ ID NO: 846171 - RNA, 19 nt, Artificial Sequence
  Description of Artificial Sequence: Synthetic oligonucleotide
  Antisense strand to SEQ ID NO: 846170
cuuucaaacaacuuaaguc

SEQ ID NO: 846172 - RNA, 19 nt, Artificial Sequence
  Description of Artificial Sequence: Synthetic oligonucleotide
  Sense strand starting at position 2895 of SEQ ID NO: 588163
agguaacacuucuccguau

SEQ ID NO: 846173 - RNA, 19 nt, Artificial Sequence
  Description of Artificial Sequence: Synthetic oligonucleotide
  Antisense strand to SEQ ID NO: 846172
auacggagaaguguuaccu

SEQ ID NO: 846174 - RNA, 19 nt, Artificial Sequence
  Description of Artificial Sequence: Synthetic oligonucleotide
  Sense strand starting at position 2896 of SEQ ID NO: 588163
gguaacacuucuccguaua

SEQ ID NO: 846175 - RNA, 19 nt, Artificial Sequence
  Description of Artificial Sequence: Synthetic oligonucleotide
  Antisense strand to SEQ ID NO: 846174
uauacggagaaguguuacc

SEQ ID NO: 846176 - RNA, 19 nt, Artificial Sequence
  Description of Artificial Sequence: Synthetic oligonucleotide
  Sense strand starting at position 2897 of SEQ ID NO: 588163
guaacacuucuccguauau

SEQ ID NO: 846177 - RNA, 19 nt, Artificial Sequence
  Description of Artificial Sequence: Synthetic oligonucleotide
  Antisense strand to SEQ ID NO: 846176
auauacggagaaguguuac

SEQ ID NO: 846178 - RNA, 19 nt, Artificial Sequence
  Description of Artificial Sequence: Synthetic oligonucleotide
  Sense strand starting at position 2913 of SEQ ID NO: 588163
uaugguggugugugagaua

SEQ ID NO: 846179 - RNA, 19 nt, Artificial Sequence
  Description of Artificial Sequence: Synthetic oligonucleotide
  Antisense strand to SEQ ID NO: 846178
uaucucacacaccaccaua

SEQ ID NO: 846180 - RNA, 19 nt, Artificial Sequence
  Description of Artificial Sequence: Synthetic oligonucleotide
  Sense strand starting at position 2925 of SEQ ID NO: 588163
ugagauaacucguuuauuc

SEQ ID NO: 846181 - RNA, 19 nt, Artificial Sequence
  Description of Artificial Sequence: Synthetic oligonucleotide
  Antisense strand to SEQ ID NO: 846180
gaauaaacgaguuaucuca

SEQ ID NO: 846182 - RNA, 19 nt, Artificial Sequence
  Description of Artificial Sequence: Synthetic oligonucleotide
  Sense strand starting at position 2927 of SEQ ID NO: 588163
agauaacucguuuauucuu

SEQ ID NO: 846183 - RNA, 19 nt, Artificial Sequence
  Description of Artificial Sequence: Synthetic oligonucleotide
  Antisense strand to SEQ ID NO: 846182
aagaauaaacgaguuaucu

SEQ ID NO: 846184 - RNA, 19 nt, Artificial Sequence
  Description of Artificial Sequence: Synthetic oligonucleotide
  Sense strand starting at position 2934 of SEQ ID NO: 588163
ucguuuauucuuuaucuca

SEQ ID NO: 846185 - RNA, 19 nt, Artificial Sequence
  Description of Artificial Sequence: Synthetic oligonucleotide
  Antisense strand to SEQ ID NO: 846184
ugagauaaagaauaaacga

SEQ ID NO: 846186 - RNA, 19 nt, Artificial Sequence
  Description of Artificial Sequence: Synthetic oligonucleotide
  Sense strand starting at position 2999 of SEQ ID NO: 588163
ccuaauggccaguaucagu

SEQ ID NO: 846187 - RNA, 19 nt, Artificial Sequence
  Description of Artificial Sequence: Synthetic oligonucleotide
  Antisense strand to SEQ ID NO: 846186
acugauacuggccauuagg

SEQ ID NO: 846188 - RNA, 19 nt, Artificial Sequence
  Description of Artificial Sequence: Synthetic oligonucleotide
  Sense strand starting at position 3007 of SEQ ID NO: 588163
ccaguaucagugcagauga

SEQ ID NO: 846189 - RNA, 19 nt, Artificial Sequence
  Description of Artificial Sequence: Synthetic oligonucleotide
  Antisense strand to SEQ ID NO: 846188
ucaucugcacugauacugg

SEQ ID NO: 846190 - RNA, 19 nt, Artificial Sequence
  Description of Artificial Sequence: Synthetic oligonucleotide
  Sense strand starting at position 3009 of SEQ ID NO: 588163
aguaucagugcagaugagu

SEQ ID NO: 846191 - RNA, 19 nt, Artificial Sequence
  Description of Artificial Sequence: Synthetic oligonucleotide
  Antisense strand to SEQ ID NO: 846190
acucaucugcacugauacu

SEQ ID NO: 846192 - RNA, 19 nt, Artificial Sequence
  Description of Artificial Sequence: Synthetic oligonucleotide
  Sense strand starting at position 3191 of SEQ ID NO: 588163
uccggaaccuaagaauaau

SEQ ID NO: 846193 - RNA, 19 nt, Artificial Sequence
  Description of Artificial Sequence: Synthetic oligonucleotide
  Antisense strand to SEQ ID NO: 846192
auuauucuuagguuccgga

SEQ ID NO: 846194 - RNA, 19 nt, Artificial Sequence
  Description of Artificial Sequence: Synthetic oligonucleotide
  Sense strand starting at position 3311 of SEQ ID NO: 588163
uggucacucucccucaaga

SEQ ID NO: 846195 - RNA, 19 nt, Artificial Sequence
  Description of Artificial Sequence: Synthetic oligonucleotide
  Antisense strand to SEQ ID NO: 846194
ucuugagggagagugacca

SEQ ID NO: 846196 - RNA, 19 nt, Artificial Sequence
  Description of Artificial Sequence: Synthetic oligonucleotide
  Sense strand starting at position 3476 of SEQ ID NO: 588163
gcauucagucgucagguuu

SEQ ID NO: 846197 - RNA, 19 nt, Artificial Sequence
  Description of Artificial Sequence: Synthetic oligonucleotide
  Antisense strand to SEQ ID NO: 846196
aaaccugacgacugaaugc

SEQ ID NO: 846198 - RNA, 19 nt, Artificial Sequence
  Description of Artificial Sequence: Synthetic oligonucleotide
  Sense strand starting at position 3496 of SEQ ID NO: 588163
cugagucuccuuugauuga

SEQ ID NO: 846199 - RNA, 19 nt, Artificial Sequence
  Description of Artificial Sequence: Synthetic oligonucleotide
  Antisense strand to SEQ ID NO: 846198
ucaaucaaaggagacucag

SEQ ID NO: 846200 - RNA, 19 nt, Artificial Sequence
  Description of Artificial Sequence: Synthetic oligonucleotide
  Sense strand starting at position 3509 of SEQ ID NO: 588163
gauugaccuuucugaggag

SEQ ID NO: 846201 - RNA, 19 nt, Artificial Sequence
  Description of Artificial Sequence: Synthetic oligonucleotide
  Antisense strand to SEQ ID NO: 846200
cuccucagaaaggucaauc

SEQ ID NO: 846202 - RNA, 19 nt, Artificial Sequence
  Description of Artificial Sequence: Synthetic oligonucleotide
  Sense strand starting at position 3513 of SEQ ID NO: 588163
gaccuuucugaggagugca

SEQ ID NO: 846203 - RNA, 19 nt, Artificial Sequence
  Description of Artificial Sequence: Synthetic oligonucleotide
  Antisense strand to SEQ ID NO: 846202
ugcacuccucagaaagguc

SEQ ID NO: 846204 - RNA, 19 nt, Artificial Sequence
  Description of Artificial Sequence: Synthetic oligonucleotide
  Sense strand starting at position 3528 of SEQ ID NO: 588163
ugcagugcacacugguaua

SEQ ID NO: 846205 - RNA, 19 nt, Artificial Sequence
  Description of Artificial Sequence: Synthetic oligonucleotide
  Antisense strand to SEQ ID NO: 846204
uauaccagugugcacugca

SEQ ID NO: 846206 - RNA, 19 nt, Artificial Sequence
  Description of Artificial Sequence: Synthetic oligonucleotide
  Sense strand starting at position 3644 of SEQ ID NO: 588163
uugcauuucucugauugau

SEQ ID NO: 846207 - RNA, 19 nt, Artificial Sequence
  Description of Artificial Sequence: Synthetic oligonucleotide
  Antisense strand to SEQ ID NO: 846206
aucaaucagagaaaugcaa

SEQ ID NO: 846208 - RNA, 19 nt, Artificial Sequence
  Description of Artificial Sequence: Synthetic oligonucleotide
  Sense strand starting at position 3684 of SEQ ID NO: 588163
uagugucaugagugaagac

SEQ ID NO: 846209 - RNA, 19 nt, Artificial Sequence
  Description of Artificial Sequence: Synthetic oligonucleotide
  Antisense strand to SEQ ID NO: 846208
gucuucacucaugacacua

SEQ ID NO: 846210 - RNA, 19 nt, Artificial Sequence
  Description of Artificial Sequence: Synthetic oligonucleotide
  Sense strand starting at position 3685 of SEQ ID NO: 588163
agugucaugagugaagacu

SEQ ID NO: 846211 - RNA, 19 nt, Artificial Sequence
  Description of Artificial Sequence: Synthetic oligonucleotide
  Antisense strand to SEQ ID NO: 846210
agucuucacucaugacacu

SEQ ID NO: 846212 - RNA, 19 nt, Artificial Sequence
  Description of Artificial Sequence: Synthetic oligonucleotide
  Sense strand starting at position 2 of SEQ ID NO: 588165
ggcgcgagcuguugucaaa

SEQ ID NO: 846213 - RNA, 19 nt, Artificial Sequence
  Description of Artificial Sequence: Synthetic oligonucleotide
  Antisense strand to SEQ ID NO: 846212
uuugacaacagcucgcgcc

SEQ ID NO: 846214 - RNA, 19 nt, Artificial Sequence
  Description of Artificial Sequence: Synthetic oligonucleotide
  Sense strand starting at position 3 of SEQ ID NO: 588165
gcgcgagcuguugucaaag

SEQ ID NO: 846215 - RNA, 19 nt, Artificial Sequence
  Description of Artificial Sequence: Synthetic oligonucleotide
  Antisense strand to SEQ ID NO: 846214
cuuugacaacagcucgcgc

SEQ ID NO: 846216 - RNA, 19 nt, Artificial Sequence
  Description of Artificial Sequence: Synthetic oligonucleotide
  Sense strand starting at position 5 of SEQ ID NO: 588165
gcgagcuguugucaaagga

SEQ ID NO: 846217 - RNA, 19 nt, Artificial Sequence
  Description of Artificial Sequence: Synthetic oligonucleotide
  Antisense strand to SEQ ID NO: 846216
uccuuugacaacagcucgc

SEQ ID NO: 846218 - RNA, 19 nt, Artificial Sequence
  Description of Artificial Sequence: Synthetic oligonucleotide
  Sense strand starting at position 9 of SEQ ID NO: 588165
gcuguugucaaaggaaagu

SEQ ID NO: 846219 - RNA, 19 nt, Artificial Sequence
  Description of Artificial Sequence: Synthetic oligonucleotide
  Antisense strand to SEQ ID NO: 846218
acuuuccuuugacaacagc

SEQ ID NO: 846220 - RNA, 19 nt, Artificial Sequence
  Description of Artificial Sequence: Synthetic oligonucleotide
  Sense strand starting at position 205 of SEQ ID NO: 588165
cccggaaggucagaaagaa

SEQ ID NO: 846221 - RNA, 19 nt, Artificial Sequence
  Description of Artificial Sequence: Synthetic oligonucleotide
  Antisense strand to SEQ ID NO: 846220
uucuuucugaccuuccggg

SEQ ID NO: 846222 - RNA, 19 nt, Artificial Sequence
  Description of Artificial Sequence: Synthetic oligonucleotide
  Sense strand starting at position 257 of SEQ ID NO: 588165
cagcgugugccuuaucuuu

SEQ ID NO: 846223 - RNA, 19 nt, Artificial Sequence
  Description of Artificial Sequence: Synthetic oligonucleotide
  Antisense strand to SEQ ID NO: 846222
aaagauaaggcacacgcug

SEQ ID NO: 846224 - RNA, 19 nt, Artificial Sequence
  Description of Artificial Sequence: Synthetic oligonucleotide
  Sense strand starting at position 449 of SEQ ID NO: 588165
guuggaagccaguaacaaa

SEQ ID NO: 846225 - RNA, 19 nt, Artificial Sequence
  Description of Artificial Sequence: Synthetic oligonucleotide
  Antisense strand to SEQ ID NO: 846224
uuuguuacuggcuuccaac

SEQ ID NO: 846226 - RNA, 19 nt, Artificial Sequence
  Description of Artificial Sequence: Synthetic oligonucleotide
  Sense strand starting at position 791 of SEQ ID NO: 588165
guaucuauuucugagcaga

SEQ ID NO: 846227 - RNA, 19 nt, Artificial Sequence
  Description of Artificial Sequence: Synthetic oligonucleotide
  Antisense strand to SEQ ID NO: 846226
ucugcucagaaauagauac

SEQ ID NO: 846228 - RNA, 19 nt, Artificial Sequence
  Description of Artificial Sequence: Synthetic oligonucleotide
  Sense strand starting at position 978 of SEQ ID NO: 588165
acgagcaaccgguggaaua

SEQ ID NO: 846229 - RNA, 19 nt, Artificial Sequence
  Description of Artificial Sequence: Synthetic oligonucleotide
  Antisense strand to SEQ ID NO: 846228
uauuccaccgguugcucgu

SEQ ID NO: 846230 - RNA, 19 nt, Artificial Sequence
  Description of Artificial Sequence: Synthetic oligonucleotide
  Sense strand starting at position 1080 of SEQ ID NO: 588165
cccggaugggcuuguauca

SEQ ID NO: 846231 - RNA, 19 nt, Artificial Sequence
  Description of Artificial Sequence: Synthetic oligonucleotide
  Antisense strand to SEQ ID NO: 846230
ugauacaagcccauccggg

SEQ ID NO: 846232 - RNA, 19 nt, Artificial Sequence
  Description of Artificial Sequence: Synthetic oligonucleotide
  Sense strand starting at position 1089 of SEQ ID NO: 588165
gcuuguaucacguugucac

SEQ ID NO: 846233 - RNA, 19 nt, Artificial Sequence
  Description of Artificial Sequence: Synthetic oligonucleotide
  Antisense strand to SEQ ID NO: 846232
gugacaacgugauacaagc

SEQ ID NO: 846234 - RNA, 19 nt, Artificial Sequence
  Description of Artificial Sequence: Synthetic oligonucleotide
  Sense strand starting at position 1090 of SEQ ID NO: 588165
cuuguaucacguugucacu

SEQ ID NO: 846235 - RNA, 19 nt, Artificial Sequence
  Description of Artificial Sequence: Synthetic oligonucleotide
  Antisense strand to SEQ ID NO: 846234
agugacaacgugauacaag

SEQ ID NO: 846236 - RNA, 19 nt, Artificial Sequence
  Description of Artificial Sequence: Synthetic oligonucleotide
  Sense strand starting at position 1227 of SEQ ID NO: 588165
cugguuugggugcaauaau

SEQ ID NO: 846237 - RNA, 19 nt, Artificial Sequence
  Description of Artificial Sequence: Synthetic oligonucleotide
  Antisense strand to SEQ ID NO: 846236
auuauugcacccaaaccag

SEQ ID NO: 846238 - RNA, 19 nt, Artificial Sequence
  Description of Artificial Sequence: Synthetic oligonucleotide
  Sense strand starting at position 1236 of SEQ ID NO: 588165
gugcaauaauccggcaacu

SEQ ID NO: 846239 - RNA, 19 nt, Artificial Sequence
  Description of Artificial Sequence: Synthetic oligonucleotide
  Antisense strand to SEQ ID NO: 846238
aguugccggauuauugcac

SEQ ID NO: 846240 - RNA, 19 nt, Artificial Sequence
  Description of Artificial Sequence: Synthetic oligonucleotide
  Sense strand starting at position 1238 of SEQ ID NO: 588165
gcaauaauccggcaacuca

SEQ ID NO: 846241 - RNA, 19 nt, Artificial Sequence
  Description of Artificial Sequence: Synthetic oligonucleotide
  Antisense strand to SEQ ID NO: 846240
ugaguugccggauuauugc

SEQ ID NO: 846242 - RNA, 19 nt, Artificial Sequence
  Description of Artificial Sequence: Synthetic oligonucleotide
  Sense strand starting at position 1280 of SEQ ID NO: 588165
gcccguaacucugggagga

SEQ ID NO: 846243 - RNA, 19 nt, Artificial Sequence
  Description of Artificial Sequence: Synthetic oligonucleotide
  Antisense strand to SEQ ID NO: 846242
uccucccagaguuacgggc

SEQ ID NO: 846244 - RNA, 19 nt, Artificial Sequence
  Description of Artificial Sequence: Synthetic oligonucleotide
  Sense strand starting at position 2471 of SEQ ID NO: 588165
ccgggagcccguguuugua

SEQ ID NO: 846245 - RNA, 19 nt, Artificial Sequence
  Description of Artificial Sequence: Synthetic oligonucleotide
  Antisense strand to SEQ ID NO: 846244
uacaaacacgggcucccgg

SEQ ID NO: 846246 - RNA, 19 nt, Artificial Sequence
  Description of Artificial Sequence: Synthetic oligonucleotide
  Sense strand starting at position 2472 of SEQ ID NO: 588165
cgggagcccguguuuguaa

SEQ ID NO: 846247 - RNA, 19 nt, Artificial Sequence
  Description of Artificial Sequence: Synthetic oligonucleotide
  Antisense strand to SEQ ID NO: 846246
uuacaaacacgggcucccg

SEQ ID NO: 846248 - RNA, 19 nt, Artificial Sequence
  Description of Artificial Sequence: Synthetic oligonucleotide
  Sense strand starting at position 2473 of SEQ ID NO: 588165
gggagcccguguuuguaaa

SEQ ID NO: 846249 - RNA, 19 nt, Artificial Sequence
  Description of Artificial Sequence: Synthetic oligonucleotide
  Antisense strand to SEQ ID NO: 846248
uuuacaaacacgggcuccc

SEQ ID NO: 846250 - RNA, 19 nt, Artificial Sequence
  Description of Artificial Sequence: Synthetic oligonucleotide
  Sense strand starting at position 2793 of SEQ ID NO: 588165
agguucccagccugagauu

SEQ ID NO: 846251 - RNA, 19 nt, Artificial Sequence
  Description of Artificial Sequence: Synthetic oligonucleotide
  Antisense strand to SEQ ID NO: 846250
aaucucaggcugggaaccu

SEQ ID NO: 846252 - RNA, 19 nt, Artificial Sequence
  Description of Artificial Sequence: Synthetic oligonucleotide
  Sense strand starting at position 2892 of SEQ ID NO: 588165
ugaugacgacucggguuua

SEQ ID NO: 846253 - RNA, 19 nt, Artificial Sequence
  Description of Artificial Sequence: Synthetic oligonucleotide
  Antisense strand to SEQ ID NO: 846252
uaaacccgagucgucauca

SEQ ID NO: 846254 - RNA, 19 nt, Artificial Sequence
  Description of Artificial Sequence: Synthetic oligonucleotide
  Sense strand starting at position 2985 of SEQ ID NO: 588165
guuaguuucgcucuuguca

SEQ ID NO: 846255 - RNA, 19 nt, Artificial Sequence
  Description of Artificial Sequence: Synthetic oligonucleotide
  Antisense strand to SEQ ID NO: 846254
ugacaagagcgaaacuaac

SEQ ID NO: 846256 - RNA, 19 nt, Artificial Sequence
  Description of Artificial Sequence: Synthetic oligonucleotide
  Sense strand starting at position 3009 of SEQ ID NO: 588165
gcuggagugcuguagugua

SEQ ID NO: 846257 - RNA, 19 nt, Artificial Sequence
  Description of Artificial Sequence: Synthetic oligonucleotide
  Antisense strand to SEQ ID NO: 846256
uacacuacagcacuccagc

SEQ ID NO: 846258 - RNA, 19 nt, Artificial Sequence
  Description of Artificial Sequence: Synthetic oligonucleotide
  Sense strand starting at position 3195 of SEQ ID NO: 588165
ucaaacuccugacgugaga

SEQ ID NO: 846259 - RNA, 19 nt, Artificial Sequence
  Description of Artificial Sequence: Synthetic oligonucleotide
  Antisense strand to SEQ ID NO: 846258
ucucacgucaggaguuuga

SEQ ID NO: 846260 - RNA, 19 nt, Artificial Sequence
  Description of Artificial Sequence: Synthetic oligonucleotide
  Sense strand starting at position 3301 of SEQ ID NO: 588165
guaacuuaaggugguuaca

SEQ ID NO: 846261 - RNA, 19 nt, Artificial Sequence
  Description of Artificial Sequence: Synthetic oligonucleotide
  Antisense strand to SEQ ID NO: 846260
uguaaccaccuuaaguuac

SEQ ID NO: 846262 - RNA, 19 nt, Artificial Sequence
  Description of Artificial Sequence: Synthetic oligonucleotide
  Sense strand starting at position 3310 of SEQ ID NO: 588165
ggugguuacacguugugua

SEQ ID NO: 846263 - RNA, 19 nt, Artificial Sequence
  Description of Artificial Sequence: Synthetic oligonucleotide
  Antisense strand to SEQ ID NO: 846262
uacacaacguguaaccacc

SEQ ID NO: 846264 - RNA, 19 nt, Artificial Sequence
  Description of Artificial Sequence: Synthetic oligonucleotide
  Sense strand starting at position 3313 of SEQ ID NO: 588165
gguuacacguuguguacau

SEQ ID NO: 846265 - RNA, 19 nt, Artificial Sequence
  Description of Artificial Sequence: Synthetic oligonucleotide
  Antisense strand to SEQ ID NO: 846264
auguacacaacguguaacc

SEQ ID NO: 846266 - RNA, 19 nt, Artificial Sequence
  Description of Artificial Sequence: Synthetic oligonucleotide
  Sense strand starting at position 3314 of SEQ ID NO: 588165
guuacacguuguguacauu

SEQ ID NO: 846267 - RNA, 19 nt, Artificial Sequence
  Description of Artificial Sequence: Synthetic oligonucleotide
  Antisense strand to SEQ ID NO: 846266
aauguacacaacguguaac

SEQ ID NO: 846268 - RNA, 19 nt, Artificial Sequence
  Description of Artificial Sequence: Synthetic oligonucleotide
  Sense strand starting at position 3315 of SEQ ID NO: 588165
uuacacguuguguacauua

SEQ ID NO: 846269 - RNA, 19 nt, Artificial Sequence
  Description of Artificial Sequence: Synthetic oligonucleotide
  Antisense strand to SEQ ID NO: 846268
uaauguacacaacguguaa

SEQ ID NO: 846270 - RNA, 19 nt, Artificial Sequence
  Description of Artificial Sequence: Synthetic oligonucleotide
  Sense strand starting at position 3317 of SEQ ID NO: 588165
acacguuguguacauuaga

SEQ ID NO: 846271 - RNA, 19 nt, Artificial Sequence
  Description of Artificial Sequence: Synthetic oligonucleotide
  Antisense strand to SEQ ID NO: 846270
ucuaauguacacaacgugu

SEQ ID NO: 846272 - RNA, 19 nt, Artificial Sequence
  Description of Artificial Sequence: Synthetic oligonucleotide
  Sense strand starting at position 3400 of SEQ ID NO: 588165
ggucgaguuuccuugugug

SEQ ID NO: 846273 - RNA, 19 nt, Artificial Sequence
  Description of Artificial Sequence: Synthetic oligonucleotide
  Antisense strand to SEQ ID NO: 846272
cacacaaggaaacucgacc

SEQ ID NO: 846274 - RNA, 19 nt, Artificial Sequence
  Description of Artificial Sequence: Synthetic oligonucleotide
  Sense strand starting at position 3483 of SEQ ID NO: 588165
gccugaaaugcacacaucu

SEQ ID NO: 846275 - RNA, 19 nt, Artificial Sequence
  Description of Artificial Sequence: Synthetic oligonucleotide
  Antisense strand to SEQ ID NO: 846274
agaugugugcauuucaggc

SEQ ID NO: 846276 - RNA, 19 nt, Artificial Sequence
  Description of Artificial Sequence: Synthetic oligonucleotide
  Sense strand starting at position 3795 of SEQ ID NO: 588165
uugccuuucuaguuggcaa

SEQ ID NO: 846277 - RNA, 19 nt, Artificial Sequence
  Description of Artificial Sequence: Synthetic oligonucleotide
  Antisense strand to SEQ ID NO: 846276
uugccaacuagaaaggcaa

SEQ ID NO: 846278 - RNA, 19 nt, Artificial Sequence
  Description of Artificial Sequence: Synthetic oligonucleotide
  Sense strand starting at position 3929 of SEQ ID NO: 588165
ggugcaguuccucaaccua

SEQ ID NO: 846279 - RNA, 19 nt, Artificial Sequence
  Description of Artificial Sequence: Synthetic oligonucleotide
  Antisense strand to SEQ ID NO: 846278
uagguugaggaacugcacc

SEQ ID NO: 846280 - RNA, 19 nt, Artificial Sequence
  Description of Artificial Sequence: Synthetic oligonucleotide
  Sense strand starting at position 3944 of SEQ ID NO: 588165
ccuacaggcuucuguguua

SEQ ID NO: 846281 - RNA, 19 nt, Artificial Sequence
  Description of Artificial Sequence: Synthetic oligonucleotide
  Antisense strand to SEQ ID NO: 846280
uaacacagaagccuguagg

SEQ ID NO: 846282 - RNA, 19 nt, Artificial Sequence
  Description of Artificial Sequence: Synthetic oligonucleotide
  Sense strand starting at position 177 of SEQ ID NO: 588166
cuaccuuccuggcugagau

SEQ ID NO: 846283 - RNA, 19 nt, Artificial Sequence
  Description of Artificial Sequence: Synthetic oligonucleotide
  Antisense strand to SEQ ID NO: 846282
aucucagccaggaagguag

SEQ ID NO: 846284 - RNA, 19 nt, Artificial Sequence
  Description of Artificial Sequence: Synthetic oligonucleotide
  Sense strand starting at position 178 of SEQ ID NO: 588166
uaccuuccuggcugagauu

SEQ ID NO: 846285 - RNA, 19 nt, Artificial Sequence
  Description of Artificial Sequence: Synthetic oligonucleotide
  Antisense strand to SEQ ID NO: 846284
aaucucagccaggaaggua

SEQ ID NO: 846286 - RNA, 19 nt, Artificial Sequence
  Description of Artificial Sequence: Synthetic oligonucleotide
  Sense strand starting at position 262 of SEQ ID NO: 588166
acagcaguuuaagucaauu

SEQ ID NO: 846287 - RNA, 19 nt, Artificial Sequence
  Description of Artificial Sequence: Synthetic oligonucleotide
  Antisense strand to SEQ ID NO: 846286
aauugacuuaaacugcugu

SEQ ID NO: 846288 - RNA, 19 nt, Artificial Sequence
  Description of Artificial Sequence: Synthetic oligonucleotide
  Sense strand starting at position 330 of SEQ ID NO: 588166
guagaucucccucaguacu

SEQ ID NO: 846289 - RNA, 19 nt, Artificial Sequence
  Description of Artificial Sequence: Synthetic oligonucleotide
  Antisense strand to SEQ ID NO: 846288
aguacugagggagaucuac

SEQ ID NO: 846290 - RNA, 19 nt, Artificial Sequence
  Description of Artificial Sequence: Synthetic oligonucleotide
  Sense strand starting at position 332 of SEQ ID NO: 588166
agaucucccucaguacuga

SEQ ID NO: 846291 - RNA, 19 nt, Artificial Sequence
  Description of Artificial Sequence: Synthetic oligonucleotide
  Antisense strand to SEQ ID NO: 846290
ucaguacugagggagaucu

SEQ ID NO: 846292 - RNA, 19 nt, Artificial Sequence
  Description of Artificial Sequence: Synthetic oligonucleotide
  Sense strand starting at position 459 of SEQ ID NO: 588166
aggcauauuuagggagaga

SEQ ID NO: 846293 - RNA, 19 nt, Artificial Sequence
  Description of Artificial Sequence: Synthetic oligonucleotide
  Antisense strand to SEQ ID NO: 846292
ucucucccuaaauaugccu

SEQ ID NO: 846294 - RNA, 19 nt, Artificial Sequence
  Description of Artificial Sequence: Synthetic oligonucleotide
  Sense strand starting at position 515 of SEQ ID NO: 588166
agacgaaucugucuuagga

SEQ ID NO: 846295 - RNA, 19 nt, Artificial Sequence
  Description of Artificial Sequence: Synthetic oligonucleotide
  Antisense strand to SEQ ID NO: 846294
uccuaagacagauucgucu

SEQ ID NO: 846296 - RNA, 19 nt, Artificial Sequence
  Description of Artificial Sequence: Synthetic oligonucleotide
  Sense strand starting at position 708 of SEQ ID NO: 588166
gggcucuguugauugcaaa

SEQ ID NO: 846297 - RNA, 19 nt, Artificial Sequence
  Description of Artificial Sequence: Synthetic oligonucleotide
  Antisense strand to SEQ ID NO: 846296
uuugcaaucaacagagccc

SEQ ID NO: 846298 - RNA, 19 nt, Artificial Sequence
  Description of Artificial Sequence: Synthetic oligonucleotide
  Sense strand starting at position 849 of SEQ ID NO: 588166
gagucugcccaguguagaa

SEQ ID NO: 846299 - RNA, 19 nt, Artificial Sequence
  Description of Artificial Sequence: Synthetic oligonucleotide
  Antisense strand to SEQ ID NO: 846298
uucuacacugggcagacuc

SEQ ID NO: 846300 - RNA, 19 nt, Artificial Sequence
  Description of Artificial Sequence: Synthetic oligonucleotide
  Sense strand starting at position 851 of SEQ ID NO: 588166
gucugcccaguguagaauu

SEQ ID NO: 846301 - RNA, 19 nt, Artificial Sequence
  Description of Artificial Sequence: Synthetic oligonucleotide
  Antisense strand to SEQ ID NO: 846300
aauucuacacugggcagac

SEQ ID NO: 846302 - RNA, 19 nt, Artificial Sequence
  Description of Artificial Sequence: Synthetic oligonucleotide
  Sense strand starting at position 1068 of SEQ ID NO: 588166
gcggguuucccggugacua

SEQ ID NO: 846303 - RNA, 19 nt, Artificial Sequence
  Description of Artificial Sequence: Synthetic oligonucleotide
  Antisense strand to SEQ ID NO: 846302
uagucaccgggaaacccgc

SEQ ID NO: 846304 - RNA, 19 nt, Artificial Sequence
  Description of Artificial Sequence: Synthetic oligonucleotide
  Sense strand starting at position 1078 of SEQ ID NO: 588166
cggugacuacgugauccua

SEQ ID NO: 846305 - RNA, 19 nt, Artificial Sequence
  Description of Artificial Sequence: Synthetic oligonucleotide
  Antisense strand to SEQ ID NO: 846304
uaggaucacguagucaccg

SEQ ID NO: 846306 - RNA, 19 nt, Artificial Sequence
  Description of Artificial Sequence: Synthetic oligonucleotide
  Sense strand starting at position 1080 of SEQ ID NO: 588166
gugacuacgugauccuaua

SEQ ID NO: 846307 - RNA, 19 nt, Artificial Sequence
  Description of Artificial Sequence: Synthetic oligonucleotide
  Antisense strand to SEQ ID NO: 846306
uauaggaucacguagucac

SEQ ID NO: 846308 - RNA, 19 nt, Artificial Sequence
  Description of Artificial Sequence: Synthetic oligonucleotide
  Sense strand starting at position 1105 of SEQ ID NO: 588166
gucccauuccguguaagcu

SEQ ID NO: 846309 - RNA, 19 nt, Artificial Sequence
  Description of Artificial Sequence: Synthetic oligonucleotide
  Antisense strand to SEQ ID NO: 846308
agcuuacacggaaugggac

SEQ ID NO: 846310 - RNA, 19 nt, Artificial Sequence
  Description of Artificial Sequence: Synthetic oligonucleotide
  Sense strand starting at position 1190 of SEQ ID NO: 588166
acacaucgcgccguaagua

SEQ ID NO: 846311 - RNA, 19 nt, Artificial Sequence
  Description of Artificial Sequence: Synthetic oligonucleotide
  Antisense strand to SEQ ID NO: 846310
uacuuacggcgcgaugugu

SEQ ID NO: 846312 - RNA, 19 nt, Artificial Sequence
  Description of Artificial Sequence: Synthetic oligonucleotide
  Sense strand starting at position 1200 of SEQ ID NO: 588166
ccguaaguagguuauagga

SEQ ID NO: 846313 - RNA, 19 nt, Artificial Sequence
  Description of Artificial Sequence: Synthetic oligonucleotide
  Antisense strand to SEQ ID NO: 846312
uccuauaaccuacuuacgg

SEQ ID NO: 846314 - RNA, 19 nt, Artificial Sequence
  Description of Artificial Sequence: Synthetic oligonucleotide
  Sense strand starting at position 1586 of SEQ ID NO: 588166
ccgccuuaccuggagucaa

SEQ ID NO: 846315 - RNA, 19 nt, Artificial Sequence
  Description of Artificial Sequence: Synthetic oligonucleotide
  Antisense strand to SEQ ID NO: 846314
uugacuccagguaaggcgg

SEQ ID NO: 846316 - RNA, 19 nt, Artificial Sequence
  Description of Artificial Sequence: Synthetic oligonucleotide
  Sense strand starting at position 2532 of SEQ ID NO: 588166
cguaaccucccagaaugaa

SEQ ID NO: 846317 - RNA, 19 nt, Artificial Sequence
  Description of Artificial Sequence: Synthetic oligonucleotide
  Antisense strand to SEQ ID NO: 846316
uucauucugggagguuacg

SEQ ID NO: 846318 - RNA, 19 nt, Artificial Sequence
  Description of Artificial Sequence: Synthetic oligonucleotide
  Sense strand starting at position 2600 of SEQ ID NO: 588166
acacgaaguucucuggaga

SEQ ID NO: 846319 - RNA, 19 nt, Artificial Sequence
  Description of Artificial Sequence: Synthetic oligonucleotide
  Antisense strand to SEQ ID NO: 846318
ucuccagagaacuucgugu

SEQ ID NO: 846320 - RNA, 19 nt, Artificial Sequence
  Description of Artificial Sequence: Synthetic oligonucleotide
  Sense strand starting at position 2601 of SEQ ID NO: 588166
cacgaaguucucuggagac

SEQ ID NO: 846321 - RNA, 19 nt, Artificial Sequence
  Description of Artificial Sequence: Synthetic oligonucleotide
  Antisense strand to SEQ ID NO: 846320
gucuccagagaacuucgug

SEQ ID NO: 846322 - RNA, 19 nt, Artificial Sequence
  Description of Artificial Sequence: Synthetic oligonucleotide
  Sense strand starting at position 2603 of SEQ ID NO: 588166
cgaaguucucuggagacca

SEQ ID NO: 846323 - RNA, 19 nt, Artificial Sequence
  Description of Artificial Sequence: Synthetic oligonucleotide
  Antisense strand to SEQ ID NO: 846322
uggucuccagagaacuucg

SEQ ID NO: 846324 - RNA, 19 nt, Artificial Sequence
  Description of Artificial Sequence: Synthetic oligonucleotide
  Sense strand starting at position 2743 of SEQ ID NO: 588166
aaauaaagcccucguauga

SEQ ID NO: 846325 - RNA, 19 nt, Artificial Sequence
  Description of Artificial Sequence: Synthetic oligonucleotide
  Antisense strand to SEQ ID NO: 846324
ucauacgagggcuuuauuu

SEQ ID NO: 846326 - RNA, 19 nt, Artificial Sequence
  Description of Artificial Sequence: Synthetic oligonucleotide
  Sense strand starting at position 2747 of SEQ ID NO: 588166
aaagcccucguaugauaau

SEQ ID NO: 846327 - RNA, 19 nt, Artificial Sequence
  Description of Artificial Sequence: Synthetic oligonucleotide
  Antisense strand to SEQ ID NO: 846326
auuaucauacgagggcuuu

SEQ ID NO: 846328 - RNA, 19 nt, Artificial Sequence
  Description of Artificial Sequence: Synthetic oligonucleotide
  Sense strand starting at position 2777 of SEQ ID NO: 588166
gcacauuugguauguuugu

SEQ ID NO: 846329 - RNA, 19 nt, Artificial Sequence
  Description of Artificial Sequence: Synthetic oligonucleotide
  Antisense strand to SEQ ID NO: 846328
acaaacauaccaaaugugc

SEQ ID NO: 846330 - RNA, 19 nt, Artificial Sequence
  Description of Artificial Sequence: Synthetic oligonucleotide
  Sense strand starting at position 2822 of SEQ ID NO: 588166
ccaaaucagcaaugcagau

SEQ ID NO: 846331 - RNA, 19 nt, Artificial Sequence
  Description of Artificial Sequence: Synthetic oligonucleotide
  Antisense strand to SEQ ID NO: 846330
aucugcauugcugauuugg

SEQ ID NO: 846332 - RNA, 19 nt, Artificial Sequence
  Description of Artificial Sequence: Synthetic oligonucleotide
  Sense strand starting at position 2987 of SEQ ID NO: 588166
cugucuggucuuggugaaa

SEQ ID NO: 846333 - RNA, 19 nt, Artificial Sequence
  Description of Artificial Sequence: Synthetic oligonucleotide
  Antisense strand to SEQ ID NO: 846332
uuucaccaagaccagacag

SEQ ID NO: 846334 - RNA, 19 nt, Artificial Sequence
  Description of Artificial Sequence: Synthetic oligonucleotide
  Sense strand starting at position 2990 of SEQ ID NO: 588166
ucuggucuuggugaaauca

SEQ ID NO: 846335 - RNA, 19 nt, Artificial Sequence
  Description of Artificial Sequence: Synthetic oligonucleotide
  Antisense strand to SEQ ID NO: 846334
ugauuucaccaagaccaga

SEQ ID NO: 846336 - RNA, 19 nt, Artificial Sequence
  Description of Artificial Sequence: Synthetic oligonucleotide
  Sense strand starting at position 3024 of SEQ ID NO: 588166
ucaauuccuugucuguuua

SEQ ID NO: 846337 - RNA, 19 nt, Artificial Sequence
  Description of Artificial Sequence: Synthetic oligonucleotide
  Antisense strand to SEQ ID NO: 846336
uaaacagacaaggaauuga

SEQ ID NO: 846338 - RNA, 19 nt, Artificial Sequence
  Description of Artificial Sequence: Synthetic oligonucleotide
  Sense strand starting at position 3028 of SEQ ID NO: 588166
uuccuugucuguuuaauag

SEQ ID NO: 846339 - RNA, 19 nt, Artificial Sequence
  Description of Artificial Sequence: Synthetic oligonucleotide
  Antisense strand to SEQ ID NO: 846338
cuauuaaacagacaaggaa

SEQ ID NO: 846340 - RNA, 19 nt, Artificial Sequence
  Description of Artificial Sequence: Synthetic oligonucleotide
  Sense strand starting at position 3114 of SEQ ID NO: 588166
cacuuagacugcucaugag

SEQ ID NO: 846341 - RNA, 19 nt, Artificial Sequence
  Description of Artificial Sequence: Synthetic oligonucleotide
  Antisense strand to SEQ ID NO: 846340
cucaugagcagucuaagug

SEQ ID NO: 846342 - RNA, 19 nt, Artificial Sequence
  Description of Artificial Sequence: Synthetic oligonucleotide
  Sense strand starting at position 3118 of SEQ ID NO: 588166
uagacugcucaugaguuaa

SEQ ID NO: 846343 - RNA, 19 nt, Artificial Sequence
  Description of Artificial Sequence: Synthetic oligonucleotide
  Antisense strand to SEQ ID NO: 846342
uuaacucaugagcagucua

SEQ ID NO: 846344 - RNA, 19 nt, Artificial Sequence
  Description of Artificial Sequence: Synthetic oligonucleotide
  Sense strand starting at position 3120 of SEQ ID NO: 588166
gacugcucaugaguuaaug

SEQ ID NO: 846345 - RNA, 19 nt, Artificial Sequence
  Description of Artificial Sequence: Synthetic oligonucleotide
  Antisense strand to SEQ ID NO: 846344
cauuaacucaugagcaguc

SEQ ID NO: 846346 - RNA, 19 nt, Artificial Sequence
  Description of Artificial Sequence: Synthetic oligonucleotide
  Sense strand starting at position 3344 of SEQ ID NO: 588166
agaaauguuugagugauga

SEQ ID NO: 846347 - RNA, 19 nt, Artificial Sequence
  Description of Artificial Sequence: Synthetic oligonucleotide
  Antisense strand to SEQ ID NO: 846346
ucaucacucaaacauuucu

SEQ ID NO: 846348 - RNA, 19 nt, Artificial Sequence
  Description of Artificial Sequence: Synthetic oligonucleotide
  Sense strand starting at position 3415 of SEQ ID NO: 588166
aggagaagacaucgagcua

SEQ ID NO: 846349 - RNA, 19 nt, Artificial Sequence
  Description of Artificial Sequence: Synthetic oligonucleotide
  Antisense strand to SEQ ID NO: 846348
uagcucgaugucuucuccu

SEQ ID NO: 846350 - RNA, 19 nt, Artificial Sequence
  Description of Artificial Sequence: Synthetic oligonucleotide
  Sense strand starting at position 3426 of SEQ ID NO: 588166
ucgagcuagccagaaugau

SEQ ID NO: 846351 - RNA, 19 nt, Artificial Sequence
  Description of Artificial Sequence: Synthetic oligonucleotide
  Antisense strand to SEQ ID NO: 846350
aucauucuggcuagcucga

SEQ ID NO: 846352 - RNA, 19 nt, Artificial Sequence
  Description of Artificial Sequence: Synthetic oligonucleotide
  Sense strand starting at position 3438 of SEQ ID NO: 588166
gaaugauccugggucucag

SEQ ID NO: 846353 - RNA, 19 nt, Artificial Sequence
  Description of Artificial Sequence: Synthetic oligonucleotide
  Antisense strand to SEQ ID NO: 846352
cugagacccaggaucauuc

SEQ ID NO: 846354 - RNA, 19 nt, Artificial Sequence
  Description of Artificial Sequence: Synthetic oligonucleotide
  Sense strand starting at position 3703 of SEQ ID NO: 588166
cuuugauucugaccacgaa

SEQ ID NO: 846355 - RNA, 19 nt, Artificial Sequence
  Description of Artificial Sequence: Synthetic oligonucleotide
  Antisense strand to SEQ ID NO: 846354
uucguggucagaaucaaag

SEQ ID NO: 846356 - RNA, 19 nt, Artificial Sequence
  Description of Artificial Sequence: Synthetic oligonucleotide
  Sense strand starting at position 3706 of SEQ ID NO: 588166
ugauucugaccacgaagaa

SEQ ID NO: 846357 - RNA, 19 nt, Artificial Sequence
  Description of Artificial Sequence: Synthetic oligonucleotide
  Antisense strand to SEQ ID NO: 846356
uucuucguggucagaauca

SEQ ID NO: 846358 - RNA, 19 nt, Artificial Sequence
  Description of Artificial Sequence: Synthetic oligonucleotide
  Sense strand starting at position 3850 of SEQ ID NO: 588166
uuuauucgucccuaucuuu

SEQ ID NO: 846359 - RNA, 19 nt, Artificial Sequence
  Description of Artificial Sequence: Synthetic oligonucleotide
  Antisense strand to SEQ ID NO: 846358
aaagauagggacgaauaaa

SEQ ID NO: 846360 - RNA, 19 nt, Artificial Sequence
  Description of Artificial Sequence: Synthetic oligonucleotide
  Sense strand starting at position 3954 of SEQ ID NO: 588166
ugaaaucaaucugagacaa

SEQ ID NO: 846361 - RNA, 19 nt, Artificial Sequence
  Description of Artificial Sequence: Synthetic oligonucleotide
  Antisense strand to SEQ ID NO: 846360
uugucucagauugauuuca

SEQ ID NO: 846362 - RNA, 19 nt, Artificial Sequence
  Description of Artificial Sequence: Synthetic oligonucleotide
  Sense strand starting at position 324 of SEQ ID NO: 588167
uaggguaguaccgaaacua

SEQ ID NO: 846363 - RNA, 19 nt, Artificial Sequence
  Description of Artificial Sequence: Synthetic oligonucleotide
  Antisense strand to SEQ ID NO: 846362
uaguuucgguacuacccua

SEQ ID NO: 846364 - RNA, 19 nt, Artificial Sequence
  Description of Artificial Sequence: Synthetic oligonucleotide
  Sense strand starting at position 609 of SEQ ID NO: 588167
aggcguggucaagacagaa

SEQ ID NO: 846365 - RNA, 19 nt, Artificial Sequence
  Description of Artificial Sequence: Synthetic oligonucleotide
  Antisense strand to SEQ ID NO: 846364
uucugucuugaccacgccu

SEQ ID NO: 846366 - RNA, 19 nt, Artificial Sequence
  Description of Artificial Sequence: Synthetic oligonucleotide
  Sense strand starting at position 686 of SEQ ID NO: 588167
guugauuacaccgcguuau

SEQ ID NO: 846367 - RNA, 19 nt, Artificial Sequence
  Description of Artificial Sequence: Synthetic oligonucleotide
  Antisense strand to SEQ ID NO: 846366
auaacgcgguguaaucaac

SEQ ID NO: 846368 - RNA, 19 nt, Artificial Sequence
  Description of Artificial Sequence: Synthetic oligonucleotide
  Sense strand starting at position 697 of SEQ ID NO: 588167
cgcguuauccagguuuauu

SEQ ID NO: 846369 - RNA, 19 nt, Artificial Sequence
  Description of Artificial Sequence: Synthetic oligonucleotide
  Antisense strand to SEQ ID NO: 846368
aauaaaccuggauaacgcg

SEQ ID NO: 846370 - RNA, 19 nt, Artificial Sequence
  Description of Artificial Sequence: Synthetic oligonucleotide
  Sense strand starting at position 720 of SEQ ID NO: 588167
ucaucauuauuguugauag

SEQ ID NO: 846371 - RNA, 19 nt, Artificial Sequence
  Description of Artificial Sequence: Synthetic oligonucleotide
  Antisense strand to SEQ ID NO: 846370
cuaucaacaauaaugauga

SEQ ID NO: 846372 - RNA, 19 nt, Artificial Sequence
  Description of Artificial Sequence: Synthetic oligonucleotide
  Sense strand starting at position 728 of SEQ ID NO: 588167
auuguugauagagguaaca

SEQ ID NO: 846373 - RNA, 19 nt, Artificial Sequence
  Description of Artificial Sequence: Synthetic oligonucleotide
  Antisense strand to SEQ ID NO: 846372
uguuaccucuaucaacaau

SEQ ID NO: 846374 - RNA, 19 nt, Artificial Sequence
  Description of Artificial Sequence: Synthetic oligonucleotide
  Sense strand starting at position 910 of SEQ ID NO: 588167
ggagaaacaagcuguuuaa

SEQ ID NO: 846375 - RNA, 19 nt, Artificial Sequence
  Description of Artificial Sequence: Synthetic oligonucleotide
  Antisense strand to SEQ ID NO: 846374
uuaaacagcuuguuucucc

SEQ ID NO: 846376 - RNA, 19 nt, Artificial Sequence
  Description of Artificial Sequence: Synthetic oligonucleotide
  Sense strand starting at position 1535 of SEQ ID NO: 588167
acgugacucacagggagua

SEQ ID NO: 846377 - RNA, 19 nt, Artificial Sequence
  Description of Artificial Sequence: Synthetic oligonucleotide
  Antisense strand to SEQ ID NO: 846376
uacucccugugagucacgu

SEQ ID NO: 846378 - RNA, 19 nt, Artificial Sequence
  Description of Artificial Sequence: Synthetic oligonucleotide
  Sense strand starting at position 2113 of SEQ ID NO: 588167
uuaaauuccuuguugaaug

SEQ ID NO: 846379 - RNA, 19 nt, Artificial Sequence
  Description of Artificial Sequence: Synthetic oligonucleotide
  Antisense strand to SEQ ID NO: 846378
cauucaacaaggaauuuaa

SEQ ID NO: 846380 - RNA, 19 nt, Artificial Sequence
  Description of Artificial Sequence: Synthetic oligonucleotide
  Sense strand starting at position 2118 of SEQ ID NO: 588167
uuccuuguugaaugaaauc

SEQ ID NO: 846381 - RNA, 19 nt, Artificial Sequence
  Description of Artificial Sequence: Synthetic oligonucleotide
  Antisense strand to SEQ ID NO: 846380
gauuucauucaacaaggaa

SEQ ID NO: 846382 - RNA, 19 nt, Artificial Sequence
  Description of Artificial Sequence: Synthetic oligonucleotide
  Sense strand starting at position 2127 of SEQ ID NO: 588167
gaaugaaaucgcgauugua

SEQ ID NO: 846383 - RNA, 19 nt, Artificial Sequence
  Description of Artificial Sequence: Synthetic oligonucleotide
  Antisense strand to SEQ ID NO: 846382
uacaaucgcgauuucauuc

SEQ ID NO: 846384 - RNA, 19 nt, Artificial Sequence
  Description of Artificial Sequence: Synthetic oligonucleotide
  Sense strand starting at position 2145 of SEQ ID NO: 588167
augcguauuuguucuacaa

SEQ ID NO: 846385 - RNA, 19 nt, Artificial Sequence
  Description of Artificial Sequence: Synthetic oligonucleotide
  Antisense strand to SEQ ID NO: 846384
uuguagaacaaauacgcau

SEQ ID NO: 846386 - RNA, 19 nt, Artificial Sequence
  Description of Artificial Sequence: Synthetic oligonucleotide
  Sense strand starting at position 2244 of SEQ ID NO: 588167
cuuugcaagcguucuguua

SEQ ID NO: 846387 - RNA, 19 nt, Artificial Sequence
  Description of Artificial Sequence: Synthetic oligonucleotide
  Antisense strand to SEQ ID NO: 846386
uaacagaacgcuugcaaag

SEQ ID NO: 846388 - RNA, 19 nt, Artificial Sequence
  Description of Artificial Sequence: Synthetic oligonucleotide
  Sense strand starting at position 2245 of SEQ ID NO: 588167
uuugcaagcguucuguuau

SEQ ID NO: 846389 - RNA, 19 nt, Artificial Sequence
  Description of Artificial Sequence: Synthetic oligonucleotide
  Antisense strand to SEQ ID NO: 846388
auaacagaacgcuugcaaa

SEQ ID NO: 846390 - RNA, 19 nt, Artificial Sequence
  Description of Artificial Sequence: Synthetic oligonucleotide
  Sense strand starting at position 2248 of SEQ ID NO: 588167
gcaagcguucuguuaugua

SEQ ID NO: 846391 - RNA, 19 nt, Artificial Sequence
  Description of Artificial Sequence: Synthetic oligonucleotide
  Antisense strand to SEQ ID NO: 846390
uacauaacagaacgcuugc

SEQ ID NO: 846392 - RNA, 19 nt, Artificial Sequence
  Description of Artificial Sequence: Synthetic oligonucleotide
  Sense strand starting at position 2260 of SEQ ID NO: 588167
uuauguaaucccgaccacu

SEQ ID NO: 846393 - RNA, 19 nt, Artificial Sequence
  Description of Artificial Sequence: Synthetic oligonucleotide
  Antisense strand to SEQ ID NO: 846392
aguggucgggauuacauaa

SEQ ID NO: 846394 - RNA, 19 nt, Artificial Sequence
  Description of Artificial Sequence: Synthetic oligonucleotide
  Sense strand starting at position 2424 of SEQ ID NO: 588167
aggaguaaauacgcuaaau

SEQ ID NO: 846395 - RNA, 19 nt, Artificial Sequence
  Description of Artificial Sequence: Synthetic oligonucleotide
  Antisense strand to SEQ ID NO: 846394
auuuagcguauuuacuccu

SEQ ID NO: 846396 - RNA, 19 nt, Artificial Sequence
  Description of Artificial Sequence: Synthetic oligonucleotide
  Sense strand starting at position 2426 of SEQ ID NO: 588167
gaguaaauacgcuaaauac

SEQ ID NO: 846397 - RNA, 19 nt, Artificial Sequence
  Description of Artificial Sequence: Synthetic oligonucleotide
  Antisense strand to SEQ ID NO: 846396
guauuuagcguauuuacuc

SEQ ID NO: 846398 - RNA, 19 nt, Artificial Sequence
  Description of Artificial Sequence: Synthetic oligonucleotide
  Sense strand starting at position 2497 of SEQ ID NO: 588167
gugcgaggaaaguacuauu

SEQ ID NO: 846399 - RNA, 19 nt, Artificial Sequence
  Description of Artificial Sequence: Synthetic oligonucleotide
  Antisense strand to SEQ ID NO: 846398
aauaguacuuuccucgcac

SEQ ID NO: 846400 - RNA, 19 nt, Artificial Sequence
  Description of Artificial Sequence: Synthetic oligonucleotide
  Sense strand starting at position 2565 of SEQ ID NO: 588167
cuaauugguagcuaugaga

SEQ ID NO: 846401 - RNA, 19 nt, Artificial Sequence
  Description of Artificial Sequence: Synthetic oligonucleotide
  Antisense strand to SEQ ID NO: 846400
ucucauagcuaccaauuag

SEQ ID NO: 846402 - RNA, 19 nt, Artificial Sequence
  Description of Artificial Sequence: Synthetic oligonucleotide
  Sense strand starting at position 2600 of SEQ ID NO: 588167
gugacuuaagguuacuaua

SEQ ID NO: 846403 - RNA, 19 nt, Artificial Sequence
  Description of Artificial Sequence: Synthetic oligonucleotide
  Antisense strand to SEQ ID NO: 846402
uauaguaaccuuaagucac

SEQ ID NO: 846404 - RNA, 19 nt, Artificial Sequence
  Description of Artificial Sequence: Synthetic oligonucleotide
  Sense strand starting at position 2654 of SEQ ID NO: 588167
ugagaaauaucuguauuag

SEQ ID NO: 846405 - RNA, 19 nt, Artificial Sequence
  Description of Artificial Sequence: Synthetic oligonucleotide
  Antisense strand to SEQ ID NO: 846404
cuaauacagauauuucuca

SEQ ID NO: 846406 - RNA, 19 nt, Artificial Sequence
  Description of Artificial Sequence: Synthetic oligonucleotide
  Sense strand starting at position 2788 of SEQ ID NO: 588167
ugcaaauaagcauguggaa

SEQ ID NO: 846407 - RNA, 19 nt, Artificial Sequence
  Description of Artificial Sequence: Synthetic oligonucleotide
  Antisense strand to SEQ ID NO: 846406
uuccacaugcuuauuugca

SEQ ID NO: 846408 - RNA, 19 nt, Artificial Sequence
  Description of Artificial Sequence: Synthetic oligonucleotide
  Sense strand starting at position 2895 of SEQ ID NO: 588167
auauuagucugagcccaga

SEQ ID NO: 846409 - RNA, 19 nt, Artificial Sequence
  Description of Artificial Sequence: Synthetic oligonucleotide
  Antisense strand to SEQ ID NO: 846408
ucugggcucagacuaauau

SEQ ID NO: 846410 - RNA, 19 nt, Artificial Sequence
  Description of Artificial Sequence: Synthetic oligonucleotide
  Sense strand starting at position 3329 of SEQ ID NO: 588167
uuaggagucuuggcagaaa

SEQ ID NO: 846411 - RNA, 19 nt, Artificial Sequence
  Description of Artificial Sequence: Synthetic oligonucleotide
  Antisense strand to SEQ ID NO: 846410
uuucugccaagacuccuaa

SEQ ID NO: 846412 - RNA, 19 nt, Artificial Sequence
  Description of Artificial Sequence: Synthetic oligonucleotide
  Sense strand starting at position 3332 of SEQ ID NO: 588167
ggagucuuggcagaaagcu

SEQ ID NO: 846413 - RNA, 19 nt, Artificial Sequence
  Description of Artificial Sequence: Synthetic oligonucleotide
  Antisense strand to SEQ ID NO: 846412
agcuuucugccaagacucc

SEQ ID NO: 846414 - RNA, 19 nt, Artificial Sequence
  Description of Artificial Sequence: Synthetic oligonucleotide
  Sense strand starting at position 3385 of SEQ ID NO: 588167
ucaggugucagagaguacu

SEQ ID NO: 846415 - RNA, 19 nt, Artificial Sequence
  Description of Artificial Sequence: Synthetic oligonucleotide
  Antisense strand to SEQ ID NO: 846414
aguacucucugacaccuga

SEQ ID NO: 846416 - RNA, 19 nt, Artificial Sequence
  Description of Artificial Sequence: Synthetic oligonucleotide
  Sense strand starting at position 3391 of SEQ ID NO: 588167
gucagagaguacucugagu

SEQ ID NO: 846417 - RNA, 19 nt, Artificial Sequence
  Description of Artificial Sequence: Synthetic oligonucleotide
  Antisense strand to SEQ ID NO: 846416
acucagaguacucucugac

SEQ ID NO: 846418 - RNA, 19 nt, Artificial Sequence
  Description of Artificial Sequence: Synthetic oligonucleotide
  Sense strand starting at position 3399 of SEQ ID NO: 588167
guacucugagugcaucaga

SEQ ID NO: 846419 - RNA, 19 nt, Artificial Sequence
  Description of Artificial Sequence: Synthetic oligonucleotide
  Antisense strand to SEQ ID NO: 846418
ucugaugcacucagaguac

SEQ ID NO: 846420 - RNA, 19 nt, Artificial Sequence
  Description of Artificial Sequence: Synthetic oligonucleotide
  Sense strand starting at position 3402 of SEQ ID NO: 588167
cucugagugcaucagaacu

SEQ ID NO: 846421 - RNA, 19 nt, Artificial Sequence
  Description of Artificial Sequence: Synthetic oligonucleotide
  Antisense strand to SEQ ID NO: 846420
aguucugaugcacucagag

SEQ ID NO: 846422 - RNA, 19 nt, Artificial Sequence
  Description of Artificial Sequence: Synthetic oligonucleotide
  Sense strand starting at position 3697 of SEQ ID NO: 588167
gugaaauauagucauuggu

SEQ ID NO: 846423 - RNA, 19 nt, Artificial Sequence
  Description of Artificial Sequence: Synthetic oligonucleotide
  Antisense strand to SEQ ID NO: 846422
accaaugacuauauuucac

SEQ ID NO: 846424 - RNA, 19 nt, Artificial Sequence
  Description of Artificial Sequence: Synthetic oligonucleotide
  Sense strand starting at position 3699 of SEQ ID NO: 588167
gaaauauagucauugguuu

SEQ ID NO: 846425 - RNA, 19 nt, Artificial Sequence
  Description of Artificial Sequence: Synthetic oligonucleotide
  Antisense strand to SEQ ID NO: 846424
aaaccaaugacuauauuuc

SEQ ID NO: 846426 - RNA, 19 nt, Artificial Sequence
  Description of Artificial Sequence: Synthetic oligonucleotide
  Sense strand starting at position 3730 of SEQ ID NO: 588167
gcagcuuacagcuauggga

SEQ ID NO: 846427 - RNA, 19 nt, Artificial Sequence
  Description of Artificial Sequence: Synthetic oligonucleotide
  Antisense strand to SEQ ID NO: 846426
ucccauagcuguaagcugc

SEQ ID NO: 846428 - RNA, 19 nt, Artificial Sequence
  Description of Artificial Sequence: Synthetic oligonucleotide
  Sense strand starting at position 3744 of SEQ ID NO: 588167
ugggaucuuggucagguua

SEQ ID NO: 846429 - RNA, 19 nt, Artificial Sequence
  Description of Artificial Sequence: Synthetic oligonucleotide
  Antisense strand to SEQ ID NO: 846428
uaaccugaccaagauccca

SEQ ID NO: 846430 - RNA, 19 nt, Artificial Sequence
  Description of Artificial Sequence: Synthetic oligonucleotide
  Sense strand starting at position 3852 of SEQ ID NO: 588167
augagaucuugucuacaaa

SEQ ID NO: 846431 - RNA, 19 nt, Artificial Sequence
  Description of Artificial Sequence: Synthetic oligonucleotide
  Antisense strand to SEQ ID NO: 846430
uuuguagacaagaucucau

SEQ ID NO: 846432 - RNA, 19 nt, Artificial Sequence
  Description of Artificial Sequence: Synthetic oligonucleotide
  Sense strand starting at position 3855 of SEQ ID NO: 588167
agaucuugucuacaaagua

SEQ ID NO: 846433 - RNA, 19 nt, Artificial Sequence
  Description of Artificial Sequence: Synthetic oligonucleotide
  Antisense strand to SEQ ID NO: 846432
uacuuuguagacaagaucu

SEQ ID NO: 846434 - RNA, 19 nt, Artificial Sequence
  Description of Artificial Sequence: Synthetic oligonucleotide
  Sense strand starting at position 3882 of SEQ ID NO: 588167
gggugucugauauacagua

SEQ ID NO: 846435 - RNA, 19 nt, Artificial Sequence
  Description of Artificial Sequence: Synthetic oligonucleotide
  Antisense strand to SEQ ID NO: 846434
uacuguauaucagacaccc

SEQ ID NO: 846436 - RNA, 19 nt, Artificial Sequence
  Description of Artificial Sequence: Synthetic oligonucleotide
  Sense strand starting at position 3917 of SEQ ID NO: 588167
uuuauuauaugugugagga

SEQ ID NO: 846437 - RNA, 19 nt, Artificial Sequence
  Description of Artificial Sequence: Synthetic oligonucleotide
  Antisense strand to SEQ ID NO: 846436
uccucacacauauaauaaa

SEQ ID NO: 846438 - RNA, 19 nt, Artificial Sequence
  Description of Artificial Sequence: Synthetic oligonucleotide
  Sense strand starting at position 3918 of SEQ ID NO: 588167
uuauuauaugugugaggau

SEQ ID NO: 846439 - RNA, 19 nt, Artificial Sequence
  Description of Artificial Sequence: Synthetic oligonucleotide
  Antisense strand to SEQ ID NO: 846438
auccucacacauauaauaa

SEQ ID NO: 846440 - RNA, 19 nt, Artificial Sequence
  Description of Artificial Sequence: Synthetic oligonucleotide
  Sense strand starting at position 3927 of SEQ ID NO: 588167
gugugaggaucuguaaaua

SEQ ID NO: 846441 - RNA, 19 nt, Artificial Sequence
  Description of Artificial Sequence: Synthetic oligonucleotide
  Antisense strand to SEQ ID NO: 846440
uauuuacagauccucacac

SEQ ID NO: 846442 - RNA, 19 nt, Artificial Sequence
  Description of Artificial Sequence: Synthetic oligonucleotide
  Sense strand starting at position 340 of SEQ ID NO: 588168
aauacauaguguuuagaag

SEQ ID NO: 846443 - RNA, 19 nt, Artificial Sequence
  Description of Artificial Sequence: Synthetic oligonucleotide
  Antisense strand to SEQ ID NO: 846442
cuucuaaacacuauguauu

SEQ ID NO: 846444 - RNA, 19 nt, Artificial Sequence
  Description of Artificial Sequence: Synthetic oligonucleotide
  Sense strand starting at position 401 of SEQ ID NO: 588168
gguucuuauugacuuauca

SEQ ID NO: 846445 - RNA, 19 nt, Artificial Sequence
  Description of Artificial Sequence: Synthetic oligonucleotide
  Antisense strand to SEQ ID NO: 846444
ugauaagucaauaagaacc

SEQ ID NO: 846446 - RNA, 19 nt, Artificial Sequence
  Description of Artificial Sequence: Synthetic oligonucleotide
  Sense strand starting at position 405 of SEQ ID NO: 588168
cuuauugacuuaucaguag

SEQ ID NO: 846447 - RNA, 19 nt, Artificial Sequence
  Description of Artificial Sequence: Synthetic oligonucleotide
  Antisense strand to SEQ ID NO: 846446
cuacugauaagucaauaag

SEQ ID NO: 846448 - RNA, 19 nt, Artificial Sequence
  Description of Artificial Sequence: Synthetic oligonucleotide
  Sense strand starting at position 408 of SEQ ID NO: 588168
auugacuuaucaguagcau

SEQ ID NO: 846449 - RNA, 19 nt, Artificial Sequence
  Description of Artificial Sequence: Synthetic oligonucleotide
  Antisense strand to SEQ ID NO: 846448
augcuacugauaagucaau

SEQ ID NO: 846450 - RNA, 19 nt, Artificial Sequence
  Description of Artificial Sequence: Synthetic oligonucleotide
  Sense strand starting at position 409 of SEQ ID NO: 588168
uugacuuaucaguagcaua

SEQ ID NO: 846451 - RNA, 19 nt, Artificial Sequence
  Description of Artificial Sequence: Synthetic oligonucleotide
  Antisense strand to SEQ ID NO: 846450
uaugcuacugauaagucaa

SEQ ID NO: 846452 - RNA, 19 nt, Artificial Sequence
  Description of Artificial Sequence: Synthetic oligonucleotide
  Sense strand starting at position 758 of SEQ ID NO: 588168
gaaugcaagcucuaggaau

SEQ ID NO: 846453 - RNA, 19 nt, Artificial Sequence
  Description of Artificial Sequence: Synthetic oligonucleotide
  Antisense strand to SEQ ID NO: 846452
auuccuagagcuugcauuc

SEQ ID NO: 846454 - RNA, 19 nt, Artificial Sequence
  Description of Artificial Sequence: Synthetic oligonucleotide
  Sense strand starting at position 776 of SEQ ID NO: 588168
uugucuuaccguuugcuau

SEQ ID NO: 846455 - RNA, 19 nt, Artificial Sequence
  Description of Artificial Sequence: Synthetic oligonucleotide
  Antisense strand to SEQ ID NO: 846454
auagcaaacgguaagacaa

SEQ ID NO: 846456 - RNA, 19 nt, Artificial Sequence
  Description of Artificial Sequence: Synthetic oligonucleotide
  Sense strand starting at position 803 of SEQ ID NO: 588168
ugccuaucauauguuuaga

SEQ ID NO: 846457 - RNA, 19 nt, Artificial Sequence
  Description of Artificial Sequence: Synthetic oligonucleotide
  Antisense strand to SEQ ID NO: 846456
ucuaaacauaugauaggca

SEQ ID NO: 846458 - RNA, 19 nt, Artificial Sequence
  Description of Artificial Sequence: Synthetic oligonucleotide
  Sense strand starting at position 813 of SEQ ID NO: 588168
auguuuagaugcucaauaa

SEQ ID NO: 846459 - RNA, 19 nt, Artificial Sequence
  Description of Artificial Sequence: Synthetic oligonucleotide
  Antisense strand to SEQ ID NO: 846458
uuauugagcaucuaaacau

SEQ ID NO: 846460 - RNA, 19 nt, Artificial Sequence
  Description of Artificial Sequence: Synthetic oligonucleotide
  Sense strand starting at position 814 of SEQ ID NO: 588168
uguuuagaugcucaauaaa

SEQ ID NO: 846461 - RNA, 19 nt, Artificial Sequence
  Description of Artificial Sequence: Synthetic oligonucleotide
  Antisense strand to SEQ ID NO: 846460
uuuauugagcaucuaaaca

SEQ ID NO: 846462 - RNA, 19 nt, Artificial Sequence
  Description of Artificial Sequence: Synthetic oligonucleotide
  Sense strand starting at position 865 of SEQ ID NO: 588168
uaaagugauugauugccau

SEQ ID NO: 846463 - RNA, 19 nt, Artificial Sequence
  Description of Artificial Sequence: Synthetic oligonucleotide
  Antisense strand to SEQ ID NO: 846462
auggcaaucaaucacuuua

SEQ ID NO: 846464 - RNA, 19 nt, Artificial Sequence
  Description of Artificial Sequence: Synthetic oligonucleotide
  Sense strand starting at position 880 of SEQ ID NO: 588168
ccauguuguaaaugguaca

SEQ ID NO: 846465 - RNA, 19 nt, Artificial Sequence
  Description of Artificial Sequence: Synthetic oligonucleotide
  Antisense strand to SEQ ID NO: 846464
uguaccauuuacaacaugg

SEQ ID NO: 846466 - RNA, 19 nt, Artificial Sequence
  Description of Artificial Sequence: Synthetic oligonucleotide
  Sense strand starting at position 933 of SEQ ID NO: 588168
uuuauuaagggcuaguaga

SEQ ID NO: 846467 - RNA, 19 nt, Artificial Sequence
  Description of Artificial Sequence: Synthetic oligonucleotide
  Antisense strand to SEQ ID NO: 846466
ucuacuagcccuuaauaaa

SEQ ID NO: 846468 - RNA, 19 nt, Artificial Sequence
  Description of Artificial Sequence: Synthetic oligonucleotide
  Sense strand starting at position 1133 of SEQ ID NO: 588168
cagaaauacgagggugcua

SEQ ID NO: 846469 - RNA, 19 nt, Artificial Sequence
  Description of Artificial Sequence: Synthetic oligonucleotide
  Antisense strand to SEQ ID NO: 846468
uagcacccucguauuucug

SEQ ID NO: 846470 - RNA, 19 nt, Artificial Sequence
  Description of Artificial Sequence: Synthetic oligonucleotide
  Sense strand starting at position 1135 of SEQ ID NO: 588168
gaaauacgagggugcuaaa

SEQ ID NO: 846471 - RNA, 19 nt, Artificial Sequence
  Description of Artificial Sequence: Synthetic oligonucleotide
  Antisense strand to SEQ ID NO: 846470
uuuagcacccucguauuuc

SEQ ID NO: 846472 - RNA, 19 nt, Artificial Sequence
  Description of Artificial Sequence: Synthetic oligonucleotide
  Sense strand starting at position 1273 of SEQ ID NO: 588168
ucucuagaacugugaccuu

SEQ ID NO: 846473 - RNA, 19 nt, Artificial Sequence
  Description of Artificial Sequence: Synthetic oligonucleotide
  Antisense strand to SEQ ID NO: 846472
aaggucacaguucuagaga

SEQ ID NO: 846474 - RNA, 19 nt, Artificial Sequence
  Description of Artificial Sequence: Synthetic oligonucleotide
  Sense strand starting at position 1348 of SEQ ID NO: 588168
auuagaugaucugcaguua

SEQ ID NO: 846475 - RNA, 19 nt, Artificial Sequence
  Description of Artificial Sequence: Synthetic oligonucleotide
  Antisense strand to SEQ ID NO: 846474
uaacugcagaucaucuaau

SEQ ID NO: 846476 - RNA, 19 nt, Artificial Sequence
  Description of Artificial Sequence: Synthetic oligonucleotide
  Sense strand starting at position 1471 of SEQ ID NO: 588168
cucauaaauguaugguaga

SEQ ID NO: 846477 - RNA, 19 nt, Artificial Sequence
  Description of Artificial Sequence: Synthetic oligonucleotide
  Antisense strand to SEQ ID NO: 846476
ucuaccauacauuuaugag

SEQ ID NO: 846478 - RNA, 19 nt, Artificial Sequence
  Description of Artificial Sequence: Synthetic oligonucleotide
  Sense strand starting at position 1521 of SEQ ID NO: 588168
guauuagauugacuccuaa

SEQ ID NO: 846479 - RNA, 19 nt, Artificial Sequence
  Description of Artificial Sequence: Synthetic oligonucleotide
  Antisense strand to SEQ ID NO: 846478
uuaggagucaaucuaauac

SEQ ID NO: 846480 - RNA, 19 nt, Artificial Sequence
  Description of Artificial Sequence: Synthetic oligonucleotide
  Sense strand starting at position 1553 of SEQ ID NO: 588168
aacuguguauagucuauga

SEQ ID NO: 846481 - RNA, 19 nt, Artificial Sequence
  Description of Artificial Sequence: Synthetic oligonucleotide
  Antisense strand to SEQ ID NO: 846480
ucauagacuauacacaguu

SEQ ID NO: 846482 - RNA, 19 nt, Artificial Sequence
  Description of Artificial Sequence: Synthetic oligonucleotide
  Sense strand starting at position 1555 of SEQ ID NO: 588168
cuguguauagucuaugaaa

SEQ ID NO: 846483 - RNA, 19 nt, Artificial Sequence
  Description of Artificial Sequence: Synthetic oligonucleotide
  Antisense strand to SEQ ID NO: 846482
uuucauagacuauacacag

SEQ ID NO: 846484 - RNA, 19 nt, Artificial Sequence
  Description of Artificial Sequence: Synthetic oligonucleotide
  Sense strand starting at position 1622 of SEQ ID NO: 588168
gaaaguuuauuaucuggag

SEQ ID NO: 846485 - RNA, 19 nt, Artificial Sequence
  Description of Artificial Sequence: Synthetic oligonucleotide
  Antisense strand to SEQ ID NO: 846484
cuccagauaauaaacuuuc

SEQ ID NO: 846486 - RNA, 19 nt, Artificial Sequence
  Description of Artificial Sequence: Synthetic oligonucleotide
  Sense strand starting at position 1623 of SEQ ID NO: 588168
aaaguuuauuaucuggagu

SEQ ID NO: 846487 - RNA, 19 nt, Artificial Sequence
  Description of Artificial Sequence: Synthetic oligonucleotide
  Antisense strand to SEQ ID NO: 846486
acuccagauaauaaacuuu

SEQ ID NO: 846488 - RNA, 19 nt, Artificial Sequence
  Description of Artificial Sequence: Synthetic oligonucleotide
  Sense strand starting at position 1626 of SEQ ID NO: 588168
guuuauuaucuggaguuuc

SEQ ID NO: 846489 - RNA, 19 nt, Artificial Sequence
  Description of Artificial Sequence: Synthetic oligonucleotide
  Antisense strand to SEQ ID NO: 846488
gaaacuccagauaauaaac

SEQ ID NO: 846490 - RNA, 19 nt, Artificial Sequence
  Description of Artificial Sequence: Synthetic oligonucleotide
  Sense strand starting at position 1982 of SEQ ID NO: 588168
gcaggaaaccacggauaua

SEQ ID NO: 846491 - RNA, 19 nt, Artificial Sequence
  Description of Artificial Sequence: Synthetic oligonucleotide
  Antisense strand to SEQ ID NO: 846490
uauauccgugguuuccugc

SEQ ID NO: 846492 - RNA, 19 nt, Artificial Sequence
  Description of Artificial Sequence: Synthetic oligonucleotide
  Sense strand starting at position 2234 of SEQ ID NO: 588168
ugaagaguggcucaaagcu

SEQ ID NO: 846493 - RNA, 19 nt, Artificial Sequence
  Description of Artificial Sequence: Synthetic oligonucleotide
  Antisense strand to SEQ ID NO: 846492
agcuuugagccacucuuca

SEQ ID NO: 846494 - RNA, 19 nt, Artificial Sequence
  Description of Artificial Sequence: Synthetic oligonucleotide
  Sense strand starting at position 2297 of SEQ ID NO: 588168
gggcauuugcuuugauguu

SEQ ID NO: 846495 - RNA, 19 nt, Artificial Sequence
  Description of Artificial Sequence: Synthetic oligonucleotide
  Antisense strand to SEQ ID NO: 846494
aacaucaaagcaaaugccc

SEQ ID NO: 846496 - RNA, 19 nt, Artificial Sequence
  Description of Artificial Sequence: Synthetic oligonucleotide
  Sense strand starting at position 2340 of SEQ ID NO: 588168
gcagguccacucuaauacu

SEQ ID NO: 846497 - RNA, 19 nt, Artificial Sequence
  Description of Artificial Sequence: Synthetic oligonucleotide
  Antisense strand to SEQ ID NO: 846496
aguauuagaguggaccugc

SEQ ID NO: 846498 - RNA, 19 nt, Artificial Sequence
  Description of Artificial Sequence: Synthetic oligonucleotide
  Sense strand starting at position 2518 of SEQ ID NO: 588168
agggaauuguuccuugguc

SEQ ID NO: 846499 - RNA, 19 nt, Artificial Sequence
  Description of Artificial Sequence: Synthetic oligonucleotide
  Antisense strand to SEQ ID NO: 846498
gaccaaggaacaauucccu

SEQ ID NO: 846500 - RNA, 19 nt, Artificial Sequence
  Description of Artificial Sequence: Synthetic oligonucleotide
  Sense strand starting at position 2535 of SEQ ID NO: 588168
ucugucucagucuagagaa

SEQ ID NO: 846501 - RNA, 19 nt, Artificial Sequence
  Description of Artificial Sequence: Synthetic oligonucleotide
  Antisense strand to SEQ ID NO: 846500
uucucuagacugagacaga

SEQ ID NO: 846502 - RNA, 19 nt, Artificial Sequence
  Description of Artificial Sequence: Synthetic oligonucleotide
  Sense strand starting at position 2537 of SEQ ID NO: 588168
ugucucagucuagagaaca

SEQ ID NO: 846503 - RNA, 19 nt, Artificial Sequence
  Description of Artificial Sequence: Synthetic oligonucleotide
  Antisense strand to SEQ ID NO: 846502
uguucucuagacugagaca

SEQ ID NO: 846504 - RNA, 19 nt, Artificial Sequence
  Description of Artificial Sequence: Synthetic oligonucleotide
  Sense strand starting at position 3473 of SEQ ID NO: 588168
uugcauaugucauugaaau

SEQ ID NO: 846505 - RNA, 19 nt, Artificial Sequence
  Description of Artificial Sequence: Synthetic oligonucleotide
  Antisense strand to SEQ ID NO: 846504
auuucaaugacauaugcaa

SEQ ID NO: 846506 - RNA, 19 nt, Artificial Sequence
  Description of Artificial Sequence: Synthetic oligonucleotide
  Sense strand starting at position 3474 of SEQ ID NO: 588168
ugcauaugucauugaaaug

SEQ ID NO: 846507 - RNA, 19 nt, Artificial Sequence
  Description of Artificial Sequence: Synthetic oligonucleotide
  Antisense strand to SEQ ID NO: 846506
cauuucaaugacauaugca

SEQ ID NO: 846508 - RNA, 19 nt, Artificial Sequence
  Description of Artificial Sequence: Synthetic oligonucleotide
  Sense strand starting at position 3506 of SEQ ID NO: 588168
acuauugucugaucaucua

SEQ ID NO: 846509 - RNA, 19 nt, Artificial Sequence
  Description of Artificial Sequence: Synthetic oligonucleotide
  Antisense strand to SEQ ID NO: 846508
uagaugaucagacaauagu

SEQ ID NO: 846510 - RNA, 19 nt, Artificial Sequence
  Description of Artificial Sequence: Synthetic oligonucleotide
  Sense strand starting at position 3653 of SEQ ID NO: 588168
caaaucaagguagguaaua

SEQ ID NO: 846511 - RNA, 19 nt, Artificial Sequence
  Description of Artificial Sequence: Synthetic oligonucleotide
  Antisense strand to SEQ ID NO: 846510
uauuaccuaccuugauuug

SEQ ID NO: 846512 - RNA, 19 nt, Artificial Sequence
  Description of Artificial Sequence: Synthetic oligonucleotide
  Sense strand starting at position 3698 of SEQ ID NO: 588168
guuugcuugagcuauagag

SEQ ID NO: 846513 - RNA, 19 nt, Artificial Sequence
  Description of Artificial Sequence: Synthetic oligonucleotide
  Antisense strand to SEQ ID NO: 846512
cucuauagcucaagcaaac

SEQ ID NO: 846514 - RNA, 19 nt, Artificial Sequence
  Description of Artificial Sequence: Synthetic oligonucleotide
  Sense strand starting at position 3700 of SEQ ID NO: 588168
uugcuugagcuauagagua

SEQ ID NO: 846515 - RNA, 19 nt, Artificial Sequence
  Description of Artificial Sequence: Synthetic oligonucleotide
  Antisense strand to SEQ ID NO: 846514
uacucuauagcucaagcaa

SEQ ID NO: 846516 - RNA, 19 nt, Artificial Sequence
  Description of Artificial Sequence: Synthetic oligonucleotide
  Sense strand starting at position 3702 of SEQ ID NO: 588168
gcuugagcuauagaguaaa

SEQ ID NO: 846517 - RNA, 19 nt, Artificial Sequence
  Description of Artificial Sequence: Synthetic oligonucleotide
  Antisense strand to SEQ ID NO: 846516
uuuacucuauagcucaagc

SEQ ID NO: 846518 - RNA, 19 nt, Artificial Sequence
  Description of Artificial Sequence: Synthetic oligonucleotide
  Sense strand starting at position 3870 of SEQ ID NO: 588168
cuaaauguggcucacagau

SEQ ID NO: 846519 - RNA, 19 nt, Artificial Sequence
  Description of Artificial Sequence: Synthetic oligonucleotide
  Antisense strand to SEQ ID NO: 846518
aucugugagccacauuuag

SEQ ID NO: 846520 - RNA, 19 nt, Artificial Sequence
  Description of Artificial Sequence: Synthetic oligonucleotide
  Sense strand starting at position 3876 of SEQ ID NO: 588168
guggcucacagaugaacuu

SEQ ID NO: 846521 - RNA, 19 nt, Artificial Sequence
  Description of Artificial Sequence: Synthetic oligonucleotide
  Antisense strand to SEQ ID NO: 846520
aaguucaucugugagccac

SEQ ID NO: 846522 - RNA, 19 nt, Artificial Sequence
  Description of Artificial Sequence: Synthetic oligonucleotide
  Sense strand starting at position 1629 of SEQ ID NO: 588169
gggagaacucgagggcacu

SEQ ID NO: 846523 - RNA, 19 nt, Artificial Sequence
  Description of Artificial Sequence: Synthetic oligonucleotide
  Antisense strand to SEQ ID NO: 846522
agugcccucgaguucuccc

SEQ ID NO: 846524 - RNA, 19 nt, Artificial Sequence
  Description of Artificial Sequence: Synthetic oligonucleotide
  Sense strand starting at position 1992 of SEQ ID NO: 588169
agucuacucugcugucaca

SEQ ID NO: 846525 - RNA, 19 nt, Artificial Sequence
  Description of Artificial Sequence: Synthetic oligonucleotide
  Antisense strand to SEQ ID NO: 846524
ugugacagcagaguagacu

SEQ ID NO: 846526 - RNA, 19 nt, Artificial Sequence
  Description of Artificial Sequence: Synthetic oligonucleotide
  Sense strand starting at position 2020 of SEQ ID NO: 588169
ccaggaaguccauguccau

SEQ ID NO: 846527 - RNA, 19 nt, Artificial Sequence
  Description of Artificial Sequence: Synthetic oligonucleotide
  Antisense strand to SEQ ID NO: 846526
auggacauggacuuccugg

SEQ ID NO: 846528 - RNA, 19 nt, Artificial Sequence
  Description of Artificial Sequence: Synthetic oligonucleotide
  Sense strand starting at position 2127 of SEQ ID NO: 588169
uguacaaaguccgaguuga

SEQ ID NO: 846529 - RNA, 19 nt, Artificial Sequence
  Description of Artificial Sequence: Synthetic oligonucleotide
  Antisense strand to SEQ ID NO: 846528
ucaacucggacuuuguaca

SEQ ID NO: 846530 - RNA, 19 nt, Artificial Sequence
  Description of Artificial Sequence: Synthetic oligonucleotide
  Sense strand starting at position 3207 of SEQ ID NO: 588169
accagaucuuccugagccu

SEQ ID NO: 846531 - RNA, 19 nt, Artificial Sequence
  Description of Artificial Sequence: Synthetic oligonucleotide
  Antisense strand to SEQ ID NO: 846530
aggcucaggaagaucuggu

SEQ ID NO: 846532 - RNA, 19 nt, Artificial Sequence
  Description of Artificial Sequence: Synthetic oligonucleotide
  Sense strand starting at position 3288 of SEQ ID NO: 588169
acgaguuccuguggaggga

SEQ ID NO: 846533 - RNA, 19 nt, Artificial Sequence
  Description of Artificial Sequence: Synthetic oligonucleotide
  Antisense strand to SEQ ID NO: 846532
ucccuccacaggaacucgu

SEQ ID NO: 846534 - RNA, 19 nt, Artificial Sequence
  Description of Artificial Sequence: Synthetic oligonucleotide
  Sense strand starting at position 3612 of SEQ ID NO: 588169
ggccuaugccaugacuagu

SEQ ID NO: 846535 - RNA, 19 nt, Artificial Sequence
  Description of Artificial Sequence: Synthetic oligonucleotide
  Antisense strand to SEQ ID NO: 846534
acuagucauggcauaggcc

SEQ ID NO: 846536 - RNA, 19 nt, Artificial Sequence
  Description of Artificial Sequence: Synthetic oligonucleotide
  Sense strand starting at position 3741 of SEQ ID NO: 588169
cggccauguccugguacga

SEQ ID NO: 846537 - RNA, 19 nt, Artificial Sequence
  Description of Artificial Sequence: Synthetic oligonucleotide
  Antisense strand to SEQ ID NO: 846536
ucguaccaggacauggccg

SEQ ID NO: 846538 - RNA, 19 nt, Artificial Sequence
  Description of Artificial Sequence: Synthetic oligonucleotide
  Sense strand starting at position 91 of SEQ ID NO: 588170
gguaguugccucuggaaua

SEQ ID NO: 846539 - RNA, 19 nt, Artificial Sequence
  Description of Artificial Sequence: Synthetic oligonucleotide
  Antisense strand to SEQ ID NO: 846538
uauuccagaggcaacuacc

SEQ ID NO: 846540 - RNA, 19 nt, Artificial Sequence
  Description of Artificial Sequence: Synthetic oligonucleotide
  Sense strand starting at position 133 of SEQ ID NO: 588170
uuauccuuaucagagaggu

SEQ ID NO: 846541 - RNA, 19 nt, Artificial Sequence
  Description of Artificial Sequence: Synthetic oligonucleotide
  Antisense strand to SEQ ID NO: 846540
accucucugauaaggauaa

SEQ ID NO: 846542 - RNA, 19 nt, Artificial Sequence
  Description of Artificial Sequence: Synthetic oligonucleotide
  Sense strand starting at position 305 of SEQ ID NO: 588170
gggcucuugugggaauucu

SEQ ID NO: 846543 - RNA, 19 nt, Artificial Sequence
  Description of Artificial Sequence: Synthetic oligonucleotide
  Antisense strand to SEQ ID NO: 846542
agaauucccacaagagccc

SEQ ID NO: 846544 - RNA, 19 nt, Artificial Sequence
  Description of Artificial Sequence: Synthetic oligonucleotide
  Sense strand starting at position 314 of SEQ ID NO: 588170
ugggaauucuaggaaauaa

SEQ ID NO: 846545 - RNA, 19 nt, Artificial Sequence
  Description of Artificial Sequence: Synthetic oligonucleotide
  Antisense strand to SEQ ID NO: 846544
uuauuuccuagaauuccca

SEQ ID NO: 846546 - RNA, 19 nt, Artificial Sequence
  Description of Artificial Sequence: Synthetic oligonucleotide
  Sense strand starting at position 336 of SEQ ID NO: 588170
ccaugaagugcaugagaga

SEQ ID NO: 846547 - RNA, 19 nt, Artificial Sequence
  Description of Artificial Sequence: Synthetic oligonucleotide
  Antisense strand to SEQ ID NO: 846546
ucucucaugcacuucaugg

SEQ ID NO: 846548 - RNA, 19 nt, Artificial Sequence
  Description of Artificial Sequence: Synthetic oligonucleotide
  Sense strand starting at position 372 of SEQ ID NO: 588170
acuguugacgugugagcua

SEQ ID NO: 846549 - RNA, 19 nt, Artificial Sequence
  Description of Artificial Sequence: Synthetic oligonucleotide
  Antisense strand to SEQ ID NO: 846548
uagcucacacgucaacagu

SEQ ID NO: 846550 - RNA, 19 nt, Artificial Sequence
  Description of Artificial Sequence: Synthetic oligonucleotide
  Sense strand starting at position 377 of SEQ ID NO: 588170
ugacgugugagcuacuaau

SEQ ID NO: 846551 - RNA, 19 nt, Artificial Sequence
  Description of Artificial Sequence: Synthetic oligonucleotide
  Antisense strand to SEQ ID NO: 846550
auuaguagcucacacguca

SEQ ID NO: 846552 - RNA, 19 nt, Artificial Sequence
  Description of Artificial Sequence: Synthetic oligonucleotide
  Sense strand starting at position 383 of SEQ ID NO: 588170
gugagcuacuaauaugauu

SEQ ID NO: 846553 - RNA, 19 nt, Artificial Sequence
  Description of Artificial Sequence: Synthetic oligonucleotide
  Antisense strand to SEQ ID NO: 846552
aaucauauuaguagcucac

SEQ ID NO: 846554 - RNA, 19 nt, Artificial Sequence
  Description of Artificial Sequence: Synthetic oligonucleotide
  Sense strand starting at position 1934 of SEQ ID NO: 588170
uuccgauggcuccagaauu

SEQ ID NO: 846555 - RNA, 19 nt, Artificial Sequence
  Description of Artificial Sequence: Synthetic oligonucleotide
  Antisense strand to SEQ ID NO: 846554
aauucuggagccaucggaa

SEQ ID NO: 846556 - RNA, 19 nt, Artificial Sequence
  Description of Artificial Sequence: Synthetic oligonucleotide
  Sense strand starting at position 2007 of SEQ ID NO: 588170
gcgccaguugcugguaauu

SEQ ID NO: 846557 - RNA, 19 nt, Artificial Sequence
  Description of Artificial Sequence: Synthetic oligonucleotide
  Antisense strand to SEQ ID NO: 846556
aauuaccagcaacuggcgc

SEQ ID NO: 846558 - RNA, 19 nt, Artificial Sequence
  Description of Artificial Sequence: Synthetic oligonucleotide
  Sense strand starting at position 2712 of SEQ ID NO: 588170
gggcgagugaagugcucuu

SEQ ID NO: 846559 - RNA, 19 nt, Artificial Sequence
  Description of Artificial Sequence: Synthetic oligonucleotide
  Antisense strand to SEQ ID NO: 846558
aagagcacuucacucgccc

SEQ ID NO: 846560 - RNA, 19 nt, Artificial Sequence
  Description of Artificial Sequence: Synthetic oligonucleotide
  Sense strand starting at position 2734 of SEQ ID NO: 588170
ggucauuugugaguuguuc

SEQ ID NO: 846561 - RNA, 19 nt, Artificial Sequence
  Description of Artificial Sequence: Synthetic oligonucleotide
  Antisense strand to SEQ ID NO: 846560
gaacaacucacaaaugacc

SEQ ID NO: 846562 - RNA, 19 nt, Artificial Sequence
  Description of Artificial Sequence: Synthetic oligonucleotide
  Sense strand starting at position 2736 of SEQ ID NO: 588170
ucauuugugaguuguucug

SEQ ID NO: 846563 - RNA, 19 nt, Artificial Sequence
  Description of Artificial Sequence: Synthetic oligonucleotide
  Antisense strand to SEQ ID NO: 846562
cagaacaacucacaaauga

SEQ ID NO: 846564 - RNA, 19 nt, Artificial Sequence
  Description of Artificial Sequence: Synthetic oligonucleotide
  Sense strand starting at position 2738 of SEQ ID NO: 588170
auuugugaguuguucugca

SEQ ID NO: 846565 - RNA, 19 nt, Artificial Sequence
  Description of Artificial Sequence: Synthetic oligonucleotide
  Antisense strand to SEQ ID NO: 846564
ugcagaacaacucacaaau

SEQ ID NO: 846566 - RNA, 19 nt, Artificial Sequence
  Description of Artificial Sequence: Synthetic oligonucleotide
  Sense strand starting at position 2742 of SEQ ID NO: 588170
gugaguuguucugcaaggu

SEQ ID NO: 846567 - RNA, 19 nt, Artificial Sequence
  Description of Artificial Sequence: Synthetic oligonucleotide
  Antisense strand to SEQ ID NO: 846566
accuugcagaacaacucac

SEQ ID NO: 846568 - RNA, 19 nt, Artificial Sequence
  Description of Artificial Sequence: Synthetic oligonucleotide
  Sense strand starting at position 2743 of SEQ ID NO: 588170
ugaguuguucugcaagguu

SEQ ID NO: 846569 - RNA, 19 nt, Artificial Sequence
  Description of Artificial Sequence: Synthetic oligonucleotide
  Antisense strand to SEQ ID NO: 846568
aaccuugcagaacaacuca

SEQ ID NO: 846570 - RNA, 19 nt, Artificial Sequence
  Description of Artificial Sequence: Synthetic oligonucleotide
  Sense strand starting at position 2805 of SEQ ID NO: 588170
gagggaggccgcuauucau

SEQ ID NO: 846571 - RNA, 19 nt, Artificial Sequence
  Description of Artificial Sequence: Synthetic oligonucleotide
  Antisense strand to SEQ ID NO: 846570
augaauagcggccucccuc

SEQ ID NO: 846572 - RNA, 19 nt, Artificial Sequence
  Description of Artificial Sequence: Synthetic oligonucleotide
  Sense strand starting at position 2926 of SEQ ID NO: 588170
ccugaagagugaugggaau

SEQ ID NO: 846573 - RNA, 19 nt, Artificial Sequence
  Description of Artificial Sequence: Synthetic oligonucleotide
  Antisense strand to SEQ ID NO: 846572
auucccaucacucuucagg

SEQ ID NO: 846574 - RNA, 19 nt, Artificial Sequence
  Description of Artificial Sequence: Synthetic oligonucleotide
  Sense strand starting at position 2932 of SEQ ID NO: 588170
gagugaugggaaugauugu

SEQ ID NO: 846575 - RNA, 19 nt, Artificial Sequence
  Description of Artificial Sequence: Synthetic oligonucleotide
  Antisense strand to SEQ ID NO: 846574
acaaucauucccaucacuc

SEQ ID NO: 846576 - RNA, 19 nt, Artificial Sequence
  Description of Artificial Sequence: Synthetic oligonucleotide
  Sense strand starting at position 2947 of SEQ ID NO: 588170
uugugaaguuuccuuccau

SEQ ID NO: 846577 - RNA, 19 nt, Artificial Sequence
  Description of Artificial Sequence: Synthetic oligonucleotide
  Antisense strand to SEQ ID NO: 846576
auggaaggaaacuucacaa

SEQ ID NO: 846578 - RNA, 19 nt, Artificial Sequence
  Description of Artificial Sequence: Synthetic oligonucleotide
  Sense strand starting at position 2948 of SEQ ID NO: 588170
ugugaaguuuccuuccauc

SEQ ID NO: 846579 - RNA, 19 nt, Artificial Sequence
  Description of Artificial Sequence: Synthetic oligonucleotide
  Antisense strand to SEQ ID NO: 846578
gauggaaggaaacuucaca

SEQ ID NO: 846580 - RNA, 19 nt, Artificial Sequence
  Description of Artificial Sequence: Synthetic oligonucleotide
  Sense strand starting at position 3028 of SEQ ID NO: 588170
cacaguuagcuccagaaug

SEQ ID NO: 846581 - RNA, 19 nt, Artificial Sequence
  Description of Artificial Sequence: Synthetic oligonucleotide
  Antisense strand to SEQ ID NO: 846580
cauucuggagcuaacugug

SEQ ID NO: 846582 - RNA, 19 nt, Artificial Sequence
  Description of Artificial Sequence: Synthetic oligonucleotide
  Sense strand starting at position 3030 of SEQ ID NO: 588170
caguuagcuccagaaugga

SEQ ID NO: 846583 - RNA, 19 nt, Artificial Sequence
  Description of Artificial Sequence: Synthetic oligonucleotide
  Antisense strand to SEQ ID NO: 846582
uccauucuggagcuaacug

SEQ ID NO: 846584 - RNA, 19 nt, Artificial Sequence
  Description of Artificial Sequence: Synthetic oligonucleotide
  Sense strand starting at position 3118 of SEQ ID NO: 588170
gggaguguggccuaauggu

SEQ ID NO: 846585 - RNA, 19 nt, Artificial Sequence
  Description of Artificial Sequence: Synthetic oligonucleotide
  Antisense strand to SEQ ID NO: 846584
accauuaggccacacuccc

SEQ ID NO: 846586 - RNA, 19 nt, Artificial Sequence
  Description of Artificial Sequence: Synthetic oligonucleotide
  Sense strand starting at position 3133 of SEQ ID NO: 588170
ugguuccgucuuugaggua

SEQ ID NO: 846587 - RNA, 19 nt, Artificial Sequence
  Description of Artificial Sequence: Synthetic oligonucleotide
  Antisense strand to SEQ ID NO: 846586
uaccucaaagacggaacca

SEQ ID NO: 846588 - RNA, 19 nt, Artificial Sequence
  Description of Artificial Sequence: Synthetic oligonucleotide
  Sense strand starting at position 3138 of SEQ ID NO: 588170
ccgucuuugagguacaacu

SEQ ID NO: 846589 - RNA, 19 nt, Artificial Sequence
  Description of Artificial Sequence: Synthetic oligonucleotide
  Antisense strand to SEQ ID NO: 846588
aguuguaccucaaagacgg

SEQ ID NO: 846590 - RNA, 19 nt, Artificial Sequence
  Description of Artificial Sequence: Synthetic oligonucleotide
  Sense strand starting at position 3181 of SEQ ID NO: 588170
cuguuuaccagcucugcga

SEQ ID NO: 846591 - RNA, 19 nt, Artificial Sequence
  Description of Artificial Sequence: Synthetic oligonucleotide
  Antisense strand to SEQ ID NO: 846590
ucgcagagcugguaaacag

SEQ ID NO: 846592 - RNA, 19 nt, Artificial Sequence
  Description of Artificial Sequence: Synthetic oligonucleotide
  Sense strand starting at position 3204 of SEQ ID NO: 588170
gagugaauggcucgagcuc

SEQ ID NO: 846593 - RNA, 19 nt, Artificial Sequence
  Description of Artificial Sequence: Synthetic oligonucleotide
  Antisense strand to SEQ ID NO: 846592
gagcucgagccauucacuc

SEQ ID NO: 846594 - RNA, 19 nt, Artificial Sequence
  Description of Artificial Sequence: Synthetic oligonucleotide
  Sense strand starting at position 3348 of SEQ ID NO: 588170
gcacacuugugagcaggua

SEQ ID NO: 846595 - RNA, 19 nt, Artificial Sequence
  Description of Artificial Sequence: Synthetic oligonucleotide
  Antisense strand to SEQ ID NO: 846594
uaccugcucacaagugugc

SEQ ID NO: 846596 - RNA, 19 nt, Artificial Sequence
  Description of Artificial Sequence: Synthetic oligonucleotide
  Sense strand starting at position 3349 of SEQ ID NO: 588170
cacacuugugagcagguau

SEQ ID NO: 846597 - RNA, 19 nt, Artificial Sequence
  Description of Artificial Sequence: Synthetic oligonucleotide
  Antisense strand to SEQ ID NO: 846596
auaccugcucacaagugug

SEQ ID NO: 846598 - RNA, 19 nt, Artificial Sequence
  Description of Artificial Sequence: Synthetic oligonucleotide
  Sense strand starting at position 3402 of SEQ ID NO: 588170
agguucaugugacucguaa

SEQ ID NO: 846599 - RNA, 19 nt, Artificial Sequence
  Description of Artificial Sequence: Synthetic oligonucleotide
  Antisense strand to SEQ ID NO: 846598
uuacgagucacaugaaccu

SEQ ID NO: 846600 - RNA, 19 nt, Artificial Sequence
  Description of Artificial Sequence: Synthetic oligonucleotide
  Sense strand starting at position 3410 of SEQ ID NO: 588170
gugacucguaauuggcaga

SEQ ID NO: 846601 - RNA, 19 nt, Artificial Sequence
  Description of Artificial Sequence: Synthetic oligonucleotide
  Antisense strand to SEQ ID NO: 846600
ucugccaauuacgagucac

SEQ ID NO: 846602 - RNA, 19 nt, Artificial Sequence
  Description of Artificial Sequence: Synthetic oligonucleotide
  Sense strand starting at position 3411 of SEQ ID NO: 588170
ugacucguaauuggcagaa

SEQ ID NO: 846603 - RNA, 19 nt, Artificial Sequence
  Description of Artificial Sequence: Synthetic oligonucleotide
  Antisense strand to SEQ ID NO: 846602
uucugccaauuacgaguca

SEQ ID NO: 846604 - RNA, 19 nt, Artificial Sequence
  Description of Artificial Sequence: Synthetic oligonucleotide
  Sense strand starting at position 3413 of SEQ ID NO: 588170
acucguaauuggcagaacu

SEQ ID NO: 846605 - RNA, 19 nt, Artificial Sequence
  Description of Artificial Sequence: Synthetic oligonucleotide
  Antisense strand to SEQ ID NO: 846604
aguucugccaauuacgagu

SEQ ID NO: 846606 - RNA, 19 nt, Artificial Sequence
  Description of Artificial Sequence: Synthetic oligonucleotide
  Sense strand starting at position 3520 of SEQ ID NO: 588170
gaauuaggagcccgagaga

SEQ ID NO: 846607 - RNA, 19 nt, Artificial Sequence
  Description of Artificial Sequence: Synthetic oligonucleotide
  Antisense strand to SEQ ID NO: 846606
ucucucgggcuccuaauuc

SEQ ID NO: 846608 - RNA, 19 nt, Artificial Sequence
  Description of Artificial Sequence: Synthetic oligonucleotide
  Sense strand starting at position 3549 of SEQ ID NO: 588170
ggcagaagcgccgugauca

SEQ ID NO: 846609 - RNA, 19 nt, Artificial Sequence
  Description of Artificial Sequence: Synthetic oligonucleotide
  Antisense strand to SEQ ID NO: 846608
ugaucacggcgcuucugcc

SEQ ID NO: 846610 - RNA, 19 nt, Artificial Sequence
  Description of Artificial Sequence: Synthetic oligonucleotide
  Sense strand starting at position 3550 of SEQ ID NO: 588170
gcagaagcgccgugaucaa

SEQ ID NO: 846611 - RNA, 19 nt, Artificial Sequence
  Description of Artificial Sequence: Synthetic oligonucleotide
  Antisense strand to SEQ ID NO: 846610
uugaucacggcgcuucugc

SEQ ID NO: 846612 - RNA, 19 nt, Artificial Sequence
  Description of Artificial Sequence: Synthetic oligonucleotide
  Sense strand starting at position 3564 of SEQ ID NO: 588170
aucaauuacuugggcuaua

SEQ ID NO: 846613 - RNA, 19 nt, Artificial Sequence
  Description of Artificial Sequence: Synthetic oligonucleotide
  Antisense strand to SEQ ID NO: 846612
uauagcccaaguaauugau

SEQ ID NO: 846614 - RNA, 19 nt, Artificial Sequence
  Description of Artificial Sequence: Synthetic oligonucleotide
  Sense strand starting at position 3565 of SEQ ID NO: 588170
ucaauuacuugggcuauaa

SEQ ID NO: 846615 - RNA, 19 nt, Artificial Sequence
  Description of Artificial Sequence: Synthetic oligonucleotide
  Antisense strand to SEQ ID NO: 846614
uuauagcccaaguaauuga

SEQ ID NO: 846616 - RNA, 19 nt, Artificial Sequence
  Description of Artificial Sequence: Synthetic oligonucleotide
  Sense strand starting at position 3577 of SEQ ID NO: 588170
gcuauaaauuucugcuguu

SEQ ID NO: 846617 - RNA, 19 nt, Artificial Sequence
  Description of Artificial Sequence: Synthetic oligonucleotide
  Antisense strand to SEQ ID NO: 846616
aacagcagaaauuuauagc

SEQ ID NO: 846618 - RNA, 19 nt, Artificial Sequence
  Description of Artificial Sequence: Synthetic oligonucleotide
  Sense strand starting at position 13 of SEQ ID NO: 588171
aucgauugaacugggaagu

SEQ ID NO: 846619 - RNA, 19 nt, Artificial Sequence
  Description of Artificial Sequence: Synthetic oligonucleotide
  Antisense strand to SEQ ID NO: 846618
acuucccaguucaaucgau

SEQ ID NO: 846620 - RNA, 19 nt, Artificial Sequence
  Description of Artificial Sequence: Synthetic oligonucleotide
  Sense strand starting at position 152 of SEQ ID NO: 588171
guaacauuguaucuguacu

SEQ ID NO: 846621 - RNA, 19 nt, Artificial Sequence
  Description of Artificial Sequence: Synthetic oligonucleotide
  Antisense strand to SEQ ID NO: 846620
aguacagauacaauguuac

SEQ ID NO: 846622 - RNA, 19 nt, Artificial Sequence
  Description of Artificial Sequence: Synthetic oligonucleotide
  Sense strand starting at position 160 of SEQ ID NO: 588171
guaucuguacuuugcuaca

SEQ ID NO: 846623 - RNA, 19 nt, Artificial Sequence
  Description of Artificial Sequence: Synthetic oligonucleotide
  Antisense strand to SEQ ID NO: 846622
uguagcaaaguacagauac

SEQ ID NO: 846624 - RNA, 19 nt, Artificial Sequence
  Description of Artificial Sequence: Synthetic oligonucleotide
  Sense strand starting at position 180 of SEQ ID NO: 588171
auggauaaguagcuauaau

SEQ ID NO: 846625 - RNA, 19 nt, Artificial Sequence
  Description of Artificial Sequence: Synthetic oligonucleotide
  Antisense strand to SEQ ID NO: 846624
auuauagcuacuuauccau

SEQ ID NO: 846626 - RNA, 19 nt, Artificial Sequence
  Description of Artificial Sequence: Synthetic oligonucleotide
  Sense strand starting at position 190 of SEQ ID NO: 588171
agcuauaauuguuuggaca

SEQ ID NO: 846627 - RNA, 19 nt, Artificial Sequence
  Description of Artificial Sequence: Synthetic oligonucleotide
  Antisense strand to SEQ ID NO: 846626
uguccaaacaauuauagcu

SEQ ID NO: 846628 - RNA, 19 nt, Artificial Sequence
  Description of Artificial Sequence: Synthetic oligonucleotide
  Sense strand starting at position 191 of SEQ ID NO: 588171
gcuauaauuguuuggacaa

SEQ ID NO: 846629 - RNA, 19 nt, Artificial Sequence
  Description of Artificial Sequence: Synthetic oligonucleotide
  Antisense strand to SEQ ID NO: 846628
uuguccaaacaauuauagc

SEQ ID NO: 846630 - RNA, 19 nt, Artificial Sequence
  Description of Artificial Sequence: Synthetic oligonucleotide
  Sense strand starting at position 220 of SEQ ID NO: 588171
caauguuugcugggauugu

SEQ ID NO: 846631 - RNA, 19 nt, Artificial Sequence
  Description of Artificial Sequence: Synthetic oligonucleotide
  Antisense strand to SEQ ID NO: 846630
acaaucccagcaaacauug

SEQ ID NO: 846632 - RNA, 19 nt, Artificial Sequence
  Description of Artificial Sequence: Synthetic oligonucleotide
  Sense strand starting at position 229 of SEQ ID NO: 588171
cugggauuguuccugucuu

SEQ ID NO: 846633 - RNA, 19 nt, Artificial Sequence
  Description of Artificial Sequence: Synthetic oligonucleotide
  Antisense strand to SEQ ID NO: 846632
aagacaggaacaaucccag

SEQ ID NO: 846634 - RNA, 19 nt, Artificial Sequence
  Description of Artificial Sequence: Synthetic oligonucleotide
  Sense strand starting at position 239 of SEQ ID NO: 588171
uccugucuucuuuguaguu

SEQ ID NO: 846635 - RNA, 19 nt, Artificial Sequence
  Description of Artificial Sequence: Synthetic oligonucleotide
  Antisense strand to SEQ ID NO: 846634
aacuacaaagaagacagga

SEQ ID NO: 846636 - RNA, 19 nt, Artificial Sequence
  Description of Artificial Sequence: Synthetic oligonucleotide
  Sense strand starting at position 352 of SEQ ID NO: 588171
caugaaguucuagaggucu

SEQ ID NO: 846637 - RNA, 19 nt, Artificial Sequence
  Description of Artificial Sequence: Synthetic oligonucleotide
  Antisense strand to SEQ ID NO: 846636
agaccucuagaacuucaug

SEQ ID NO: 846638 - RNA, 19 nt, Artificial Sequence
  Description of Artificial Sequence: Synthetic oligonucleotide
  Sense strand starting at position 354 of SEQ ID NO: 588171
ugaaguucuagaggucuaa

SEQ ID NO: 846639 - RNA, 19 nt, Artificial Sequence
  Description of Artificial Sequence: Synthetic oligonucleotide
  Antisense strand to SEQ ID NO: 846638
uuagaccucuagaacuuca

SEQ ID NO: 846640 - RNA, 19 nt, Artificial Sequence
  Description of Artificial Sequence: Synthetic oligonucleotide
  Sense strand starting at position 358 of SEQ ID NO: 588171
guucuagaggucuaaguua

SEQ ID NO: 846641 - RNA, 19 nt, Artificial Sequence
  Description of Artificial Sequence: Synthetic oligonucleotide
  Antisense strand to SEQ ID NO: 846640
uaacuuagaccucuagaac

SEQ ID NO: 846642 - RNA, 19 nt, Artificial Sequence
  Description of Artificial Sequence: Synthetic oligonucleotide
  Sense strand starting at position 366 of SEQ ID NO: 588171
ggucuaaguuaagagauau

SEQ ID NO: 846643 - RNA, 19 nt, Artificial Sequence
  Description of Artificial Sequence: Synthetic oligonucleotide
  Antisense strand to SEQ ID NO: 846642
auaucucuuaacuuagacc

SEQ ID NO: 846644 - RNA, 19 nt, Artificial Sequence
  Description of Artificial Sequence: Synthetic oligonucleotide
  Sense strand starting at position 706 of SEQ ID NO: 588171
cuuccauaggcuugaaauu

SEQ ID NO: 846645 - RNA, 19 nt, Artificial Sequence
  Description of Artificial Sequence: Synthetic oligonucleotide
  Antisense strand to SEQ ID NO: 846644
aauuucaagccuauggaag

SEQ ID NO: 846646 - RNA, 19 nt, Artificial Sequence
  Description of Artificial Sequence: Synthetic oligonucleotide
  Sense strand starting at position 806 of SEQ ID NO: 588171
uggaccuacuggucuguaa

SEQ ID NO: 846647 - RNA, 19 nt, Artificial Sequence
  Description of Artificial Sequence: Synthetic oligonucleotide
  Antisense strand to SEQ ID NO: 846646
uuacagaccaguaggucca

SEQ ID NO: 846648 - RNA, 19 nt, Artificial Sequence
  Description of Artificial Sequence: Synthetic oligonucleotide
  Sense strand starting at position 808 of SEQ ID NO: 588171
gaccuacuggucuguaaag

SEQ ID NO: 846649 - RNA, 19 nt, Artificial Sequence
  Description of Artificial Sequence: Synthetic oligonucleotide
  Antisense strand to SEQ ID NO: 846648
cuuuacagaccaguagguc

SEQ ID NO: 846650 - RNA, 19 nt, Artificial Sequence
  Description of Artificial Sequence: Synthetic oligonucleotide
  Sense strand starting at position 1202 of SEQ ID NO: 588171
ggaacaaaguuggugucuu

SEQ ID NO: 846651 - RNA, 19 nt, Artificial Sequence
  Description of Artificial Sequence: Synthetic oligonucleotide
  Antisense strand to SEQ ID NO: 846650
aagacaccaacuuuguucc

SEQ ID NO: 846652 - RNA, 19 nt, Artificial Sequence
  Description of Artificial Sequence: Synthetic oligonucleotide
  Sense strand starting at position 1213 of SEQ ID NO: 588171
ggugucuuucuccaggguu

SEQ ID NO: 846653 - RNA, 19 nt, Artificial Sequence
  Description of Artificial Sequence: Synthetic oligonucleotide
  Antisense strand to SEQ ID NO: 846652
aacccuggagaaagacacc

SEQ ID NO: 846654 - RNA, 19 nt, Artificial Sequence
  Description of Artificial Sequence: Synthetic oligonucleotide
  Sense strand starting at position 1216 of SEQ ID NO: 588171
gucuuucuccaggguuuga

SEQ ID NO: 846655 - RNA, 19 nt, Artificial Sequence
  Description of Artificial Sequence: Synthetic oligonucleotide
  Antisense strand to SEQ ID NO: 846654
ucaaacccuggagaaagac

SEQ ID NO: 846656 - RNA, 19 nt, Artificial Sequence
  Description of Artificial Sequence: Synthetic oligonucleotide
  Sense strand starting at position 1260 of SEQ ID NO: 588171
ggaagauacucuuacccac

SEQ ID NO: 846657 - RNA, 19 nt, Artificial Sequence
  Description of Artificial Sequence: Synthetic oligonucleotide
  Antisense strand to SEQ ID NO: 846656
guggguaagaguaucuucc

SEQ ID NO: 846658 - RNA, 19 nt, Artificial Sequence
  Description of Artificial Sequence: Synthetic oligonucleotide
  Sense strand starting at position 1324 of SEQ ID NO: 588171
ccguguucacccuggagaa

SEQ ID NO: 846659 - RNA, 19 nt, Artificial Sequence
  Description of Artificial Sequence: Synthetic oligonucleotide
  Antisense strand to SEQ ID NO: 846658
uucuccagggugaacacgg

SEQ ID NO: 846660 - RNA, 19 nt, Artificial Sequence
  Description of Artificial Sequence: Synthetic oligonucleotide
  Sense strand starting at position 1325 of SEQ ID NO: 588171
cguguucacccuggagaag

SEQ ID NO: 846661 - RNA, 19 nt, Artificial Sequence
  Description of Artificial Sequence: Synthetic oligonucleotide
  Antisense strand to SEQ ID NO: 846660
cuucuccagggugaacacg

SEQ ID NO: 846662 - RNA, 19 nt, Artificial Sequence
  Description of Artificial Sequence: Synthetic oligonucleotide
  Sense strand starting at position 1343 of SEQ ID NO: 588171
ggagugguaggaggauuau

SEQ ID NO: 846663 - RNA, 19 nt, Artificial Sequence
  Description of Artificial Sequence: Synthetic oligonucleotide
  Antisense strand to SEQ ID NO: 846662
auaauccuccuaccacucc

SEQ ID NO: 846664 - RNA, 19 nt, Artificial Sequence
  Description of Artificial Sequence: Synthetic oligonucleotide
  Sense strand starting at position 1352 of SEQ ID NO: 588171
ggaggauuaugagugugag

SEQ ID NO: 846665 - RNA, 19 nt, Artificial Sequence
  Description of Artificial Sequence: Synthetic oligonucleotide
  Antisense strand to SEQ ID NO: 846664
cucacacucauaauccucc

SEQ ID NO: 846666 - RNA, 19 nt, Artificial Sequence
  Description of Artificial Sequence: Synthetic oligonucleotide
  Sense strand starting at position 1355 of SEQ ID NO: 588171
ggauuaugagugugaggcu

SEQ ID NO: 846667 - RNA, 19 nt, Artificial Sequence
  Description of Artificial Sequence: Synthetic oligonucleotide
  Antisense strand to SEQ ID NO: 846666
agccucacacucauaaucc

SEQ ID NO: 846668 - RNA, 19 nt, Artificial Sequence
  Description of Artificial Sequence: Synthetic oligonucleotide
  Sense strand starting at position 1548 of SEQ ID NO: 588171
gaaacugucgaaugaguuc

SEQ ID NO: 846669 - RNA, 19 nt, Artificial Sequence
  Description of Artificial Sequence: Synthetic oligonucleotide
  Antisense strand to SEQ ID NO: 846668
gaacucauucgacaguuuc

SEQ ID NO: 846670 - RNA, 19 nt, Artificial Sequence
  Description of Artificial Sequence: Synthetic oligonucleotide
  Sense strand starting at position 1555 of SEQ ID NO: 588171
ucgaaugaguucccacaaa

SEQ ID NO: 846671 - RNA, 19 nt, Artificial Sequence
  Description of Artificial Sequence: Synthetic oligonucleotide
  Antisense strand to SEQ ID NO: 846670
uuugugggaacucauucga

SEQ ID NO: 846672 - RNA, 19 nt, Artificial Sequence
  Description of Artificial Sequence: Synthetic oligonucleotide
  Sense strand starting at position 1982 of SEQ ID NO: 588171
cgccucugccaaugagacu

SEQ ID NO: 846673 - RNA, 19 nt, Artificial Sequence
  Description of Artificial Sequence: Synthetic oligonucleotide
  Antisense strand to SEQ ID NO: 846672
agucucauuggcagaggcg

SEQ ID NO: 846674 - RNA, 19 nt, Artificial Sequence
  Description of Artificial Sequence: Synthetic oligonucleotide
  Sense strand starting at position 2116 of SEQ ID NO: 588171
cagaguagguguccaaaua

SEQ ID NO: 846675 - RNA, 19 nt, Artificial Sequence
  Description of Artificial Sequence: Synthetic oligonucleotide
  Antisense strand to SEQ ID NO: 846674
uauuuggacaccuacucug

SEQ ID NO: 846676 - RNA, 19 nt, Artificial Sequence
  Description of Artificial Sequence: Synthetic oligonucleotide
  Sense strand starting at position 2117 of SEQ ID NO: 588171
agaguagguguccaaauag

SEQ ID NO: 846677 - RNA, 19 nt, Artificial Sequence
  Description of Artificial Sequence: Synthetic oligonucleotide
  Antisense strand to SEQ ID NO: 846676
cuauuuggacaccuacucu

SEQ ID NO: 846678 - RNA, 19 nt, Artificial Sequence
  Description of Artificial Sequence: Synthetic oligonucleotide
  Sense strand starting at position 2205 of SEQ ID NO: 588171
cacucagaccucugaguag

SEQ ID NO: 846679 - RNA, 19 nt, Artificial Sequence
  Description of Artificial Sequence: Synthetic oligonucleotide
  Antisense strand to SEQ ID NO: 846678
cuacucagaggucugagug

SEQ ID NO: 846680 - RNA, 19 nt, Artificial Sequence
  Description of Artificial Sequence: Synthetic oligonucleotide
  Sense strand starting at position 2398 of SEQ ID NO: 588171
ccuggaaggcuuuauacau

SEQ ID NO: 846681 - RNA, 19 nt, Artificial Sequence
  Description of Artificial Sequence: Synthetic oligonucleotide
  Antisense strand to SEQ ID NO: 846680
auguauaaagccuuccagg

SEQ ID NO: 846682 - RNA, 19 nt, Artificial Sequence
  Description of Artificial Sequence: Synthetic oligonucleotide
  Sense strand starting at position 2433 of SEQ ID NO: 588171
ugagcuguagugugauuca

SEQ ID NO: 846683 - RNA, 19 nt, Artificial Sequence
  Description of Artificial Sequence: Synthetic oligonucleotide
  Antisense strand to SEQ ID NO: 846682
ugaaucacacuacagcuca

SEQ ID NO: 846684 - RNA, 19 nt, Artificial Sequence
  Description of Artificial Sequence: Synthetic oligonucleotide
  Sense strand starting at position 2436 of SEQ ID NO: 588171
gcuguagugugauucagag

SEQ ID NO: 846685 - RNA, 19 nt, Artificial Sequence
  Description of Artificial Sequence: Synthetic oligonucleotide
  Antisense strand to SEQ ID NO: 846684
cucugaaucacacuacagc

SEQ ID NO: 846686 - RNA, 19 nt, Artificial Sequence
  Description of Artificial Sequence: Synthetic oligonucleotide
  Sense strand starting at position 2473 of SEQ ID NO: 588171
acuccagguuucuuauaga

SEQ ID NO: 846687 - RNA, 19 nt, Artificial Sequence
  Description of Artificial Sequence: Synthetic oligonucleotide
  Antisense strand to SEQ ID NO: 846686
ucuauaagaaaccuggagu

SEQ ID NO: 846688 - RNA, 19 nt, Artificial Sequence
  Description of Artificial Sequence: Synthetic oligonucleotide
  Sense strand starting at position 2478 of SEQ ID NO: 588171
agguuucuuauagauucgu

SEQ ID NO: 846689 - RNA, 19 nt, Artificial Sequence
  Description of Artificial Sequence: Synthetic oligonucleotide
  Antisense strand to SEQ ID NO: 846688
acgaaucuauaagaaaccu

SEQ ID NO: 846690 - RNA, 19 nt, Artificial Sequence
  Description of Artificial Sequence: Synthetic oligonucleotide
  Sense strand starting at position 3152 of SEQ ID NO: 588171
acuauauuaguugggacua

SEQ ID NO: 846691 - RNA, 19 nt, Artificial Sequence
  Description of Artificial Sequence: Synthetic oligonucleotide
  Antisense strand to SEQ ID NO: 846690
uagucccaacuaauauagu

SEQ ID NO: 846692 - RNA, 19 nt, Artificial Sequence
  Description of Artificial Sequence: Synthetic oligonucleotide
  Sense strand starting at position 3154 of SEQ ID NO: 588171
uauauuaguugggacuaca

SEQ ID NO: 846693 - RNA, 19 nt, Artificial Sequence
  Description of Artificial Sequence: Synthetic oligonucleotide
  Antisense strand to SEQ ID NO: 846692
uguagucccaacuaauaua

SEQ ID NO: 846694 - RNA, 19 nt, Artificial Sequence
  Description of Artificial Sequence: Synthetic oligonucleotide
  Sense strand starting at position 3511 of SEQ ID NO: 588171
cgggauucuccauguuggu

SEQ ID NO: 846695 - RNA, 19 nt, Artificial Sequence
  Description of Artificial Sequence: Synthetic oligonucleotide
  Antisense strand to SEQ ID NO: 846694
accaacauggagaaucccg

SEQ ID NO: 846696 - RNA, 19 nt, Artificial Sequence
  Description of Artificial Sequence: Synthetic oligonucleotide
  Sense strand starting at position 3920 of SEQ ID NO: 588171
gugccuggucucgaacuua

SEQ ID NO: 846697 - RNA, 19 nt, Artificial Sequence
  Description of Artificial Sequence: Synthetic oligonucleotide
  Antisense strand to SEQ ID NO: 846696
uaaguucgagaccaggcac

SEQ ID NO: 846698 - RNA, 19 nt, Artificial Sequence
  Description of Artificial Sequence: Synthetic oligonucleotide
  Sense strand starting at position 264 of SEQ ID NO: 588172
acguuaacaucucauaaag

SEQ ID NO: 846699 - RNA, 19 nt, Artificial Sequence
  Description of Artificial Sequence: Synthetic oligonucleotide
  Antisense strand to SEQ ID NO: 846698
cuuuaugagauguuaacgu

SEQ ID NO: 846700 - RNA, 19 nt, Artificial Sequence
  Description of Artificial Sequence: Synthetic oligonucleotide
  Sense strand starting at position 266 of SEQ ID NO: 588172
guuaacaucucauaaagua

SEQ ID NO: 846701 - RNA, 19 nt, Artificial Sequence
  Description of Artificial Sequence: Synthetic oligonucleotide
  Antisense strand to SEQ ID NO: 846700
uacuuuaugagauguuaac

SEQ ID NO: 846702 - RNA, 19 nt, Artificial Sequence
  Description of Artificial Sequence: Synthetic oligonucleotide
  Sense strand starting at position 313 of SEQ ID NO: 588172
uuauuugccucagaacuga

SEQ ID NO: 846703 - RNA, 19 nt, Artificial Sequence
  Description of Artificial Sequence: Synthetic oligonucleotide
  Antisense strand to SEQ ID NO: 846702
ucaguucugaggcaaauaa

SEQ ID NO: 846704 - RNA, 19 nt, Artificial Sequence
  Description of Artificial Sequence: Synthetic oligonucleotide
  Sense strand starting at position 407 of SEQ ID NO: 588172
gggugaugucagcaagucu

SEQ ID NO: 846705 - RNA, 19 nt, Artificial Sequence
  Description of Artificial Sequence: Synthetic oligonucleotide
  Antisense strand to SEQ ID NO: 846704
agacuugcugacaucaccc

SEQ ID NO: 846706 - RNA, 19 nt, Artificial Sequence
  Description of Artificial Sequence: Synthetic oligonucleotide
  Sense strand starting at position 699 of SEQ ID NO: 588172
ucccguaagccugguuacu

SEQ ID NO: 846707 - RNA, 19 nt, Artificial Sequence
  Description of Artificial Sequence: Synthetic oligonucleotide
  Antisense strand to SEQ ID NO: 846706
aguaaccaggcuuacggga

SEQ ID NO: 846708 - RNA, 19 nt, Artificial Sequence
  Description of Artificial Sequence: Synthetic oligonucleotide
  Sense strand starting at position 708 of SEQ ID NO: 588172
ccugguuacugguccugua

SEQ ID NO: 846709 - RNA, 19 nt, Artificial Sequence
  Description of Artificial Sequence: Synthetic oligonucleotide
  Antisense strand to SEQ ID NO: 846708
uacaggaccaguaaccagg

SEQ ID NO: 846710 - RNA, 19 nt, Artificial Sequence
  Description of Artificial Sequence: Synthetic oligonucleotide
  Sense strand starting at position 738 of SEQ ID NO: 588172
ccuucuggguccugguaga

SEQ ID NO: 846711 - RNA, 19 nt, Artificial Sequence
  Description of Artificial Sequence: Synthetic oligonucleotide
  Antisense strand to SEQ ID NO: 846710
ucuaccaggacccagaagg

SEQ ID NO: 846712 - RNA, 19 nt, Artificial Sequence
  Description of Artificial Sequence: Synthetic oligonucleotide
  Sense strand starting at position 745 of SEQ ID NO: 588172
gguccugguagaugagaaa

SEQ ID NO: 846713 - RNA, 19 nt, Artificial Sequence
  Description of Artificial Sequence: Synthetic oligonucleotide
  Antisense strand to SEQ ID NO: 846712
uuucucaucuaccaggacc

SEQ ID NO: 846714 - RNA, 19 nt, Artificial Sequence
  Description of Artificial Sequence: Synthetic oligonucleotide
  Sense strand starting at position 898 of SEQ ID NO: 588172
cugggaguaccuggcugau

SEQ ID NO: 846715 - RNA, 19 nt, Artificial Sequence
  Description of Artificial Sequence: Synthetic oligonucleotide
  Antisense strand to SEQ ID NO: 846714
aucagccagguacucccag

SEQ ID NO: 846716 - RNA, 19 nt, Artificial Sequence
  Description of Artificial Sequence: Synthetic oligonucleotide
  Sense strand starting at position 900 of SEQ ID NO: 588172
gggaguaccuggcugauga

SEQ ID NO: 846717 - RNA, 19 nt, Artificial Sequence
  Description of Artificial Sequence: Synthetic oligonucleotide
  Antisense strand to SEQ ID NO: 846716
ucaucagccagguacuccc

SEQ ID NO: 846718 - RNA, 19 nt, Artificial Sequence
  Description of Artificial Sequence: Synthetic oligonucleotide
  Sense strand starting at position 1051 of SEQ ID NO: 588172
ugcugcaauuucuggguaa

SEQ ID NO: 846719 - RNA, 19 nt, Artificial Sequence
  Description of Artificial Sequence: Synthetic oligonucleotide
  Antisense strand to SEQ ID NO: 846718
uuacccagaaauugcagca

SEQ ID NO: 846720 - RNA, 19 nt, Artificial Sequence
  Description of Artificial Sequence: Synthetic oligonucleotide
  Sense strand starting at position 1052 of SEQ ID NO: 588172
gcugcaauuucuggguaac

SEQ ID NO: 846721 - RNA, 19 nt, Artificial Sequence
  Description of Artificial Sequence: Synthetic oligonucleotide
  Antisense strand to SEQ ID NO: 846720
guuacccagaaauugcagc

SEQ ID NO: 846722 - RNA, 19 nt, Artificial Sequence
  Description of Artificial Sequence: Synthetic oligonucleotide
  Sense strand starting at position 1063 of SEQ ID NO: 588172
uggguaaccuagcuuguca

SEQ ID NO: 846723 - RNA, 19 nt, Artificial Sequence
  Description of Artificial Sequence: Synthetic oligonucleotide
  Antisense strand to SEQ ID NO: 846722
ugacaagcuagguuaccca

SEQ ID NO: 846724 - RNA, 19 nt, Artificial Sequence
  Description of Artificial Sequence: Synthetic oligonucleotide
  Sense strand starting at position 1223 of SEQ ID NO: 588172
acgacauagcuuuacuuua

SEQ ID NO: 846725 - RNA, 19 nt, Artificial Sequence
  Description of Artificial Sequence: Synthetic oligonucleotide
  Antisense strand to SEQ ID NO: 846724
uaaaguaaagcuaugucgu

SEQ ID NO: 846726 - RNA, 19 nt, Artificial Sequence
  Description of Artificial Sequence: Synthetic oligonucleotide
  Sense strand starting at position 1243 of SEQ ID NO: 588172
acuccuagaucuuggccaa

SEQ ID NO: 846727 - RNA, 19 nt, Artificial Sequence
  Description of Artificial Sequence: Synthetic oligonucleotide
  Antisense strand to SEQ ID NO: 846726
uuggccaagaucuaggagu

SEQ ID NO: 846728 - RNA, 19 nt, Artificial Sequence
  Description of Artificial Sequence: Synthetic oligonucleotide
  Sense strand starting at position 1246 of SEQ ID NO: 588172
ccuagaucuuggccaaguu

SEQ ID NO: 846729 - RNA, 19 nt, Artificial Sequence
  Description of Artificial Sequence: Synthetic oligonucleotide
  Antisense strand to SEQ ID NO: 846728
aacuuggccaagaucuagg

SEQ ID NO: 846730 - RNA, 19 nt, Artificial Sequence
  Description of Artificial Sequence: Synthetic oligonucleotide
  Sense strand starting at position 1258 of SEQ ID NO: 588172
ccaaguuguuccuucuaca

SEQ ID NO: 846731 - RNA, 19 nt, Artificial Sequence
  Description of Artificial Sequence: Synthetic oligonucleotide
  Antisense strand to SEQ ID NO: 846730
uguagaaggaacaacuugg

SEQ ID NO: 846732 - RNA, 19 nt, Artificial Sequence
  Description of Artificial Sequence: Synthetic oligonucleotide
  Sense strand starting at position 1280 of SEQ ID NO: 588172
cagucaucucaaugcgaga

SEQ ID NO: 846733 - RNA, 19 nt, Artificial Sequence
  Description of Artificial Sequence: Synthetic oligonucleotide
  Antisense strand to SEQ ID NO: 846732
ucucgcauugagaugacug

SEQ ID NO: 846734 - RNA, 19 nt, Artificial Sequence
  Description of Artificial Sequence: Synthetic oligonucleotide
  Sense strand starting at position 1282 of SEQ ID NO: 588172
gucaucucaaugcgagaau

SEQ ID NO: 846735 - RNA, 19 nt, Artificial Sequence
  Description of Artificial Sequence: Synthetic oligonucleotide
  Antisense strand to SEQ ID NO: 846734
auucucgcauugagaugac

SEQ ID NO: 846736 - RNA, 19 nt, Artificial Sequence
  Description of Artificial Sequence: Synthetic oligonucleotide
  Sense strand starting at position 1297 of SEQ ID NO: 588172
gaaugaggauacuaacaga

SEQ ID NO: 846737 - RNA, 19 nt, Artificial Sequence
  Description of Artificial Sequence: Synthetic oligonucleotide
  Antisense strand to SEQ ID NO: 846736
ucuguuaguauccucauuc

SEQ ID NO: 846738 - RNA, 19 nt, Artificial Sequence
  Description of Artificial Sequence: Synthetic oligonucleotide
  Sense strand starting at position 1339 of SEQ ID NO: 588172
ggaccaaaugugugaugag

SEQ ID NO: 846739 - RNA, 19 nt, Artificial Sequence
  Description of Artificial Sequence: Synthetic oligonucleotide
  Antisense strand to SEQ ID NO: 846738
cucaucacacauuuggucc

SEQ ID NO: 846740 - RNA, 19 nt, Artificial Sequence
  Description of Artificial Sequence: Synthetic oligonucleotide
  Sense strand starting at position 1379 of SEQ ID NO: 588172
gccuacaggaauugaguuu

SEQ ID NO: 846741 - RNA, 19 nt, Artificial Sequence
  Description of Artificial Sequence: Synthetic oligonucleotide
  Antisense strand to SEQ ID NO: 846740
aaacucaauuccuguaggc

SEQ ID NO: 846742 - RNA, 19 nt, Artificial Sequence
  Description of Artificial Sequence: Synthetic oligonucleotide
  Sense strand starting at position 1386 of SEQ ID NO: 588172
ggaauugaguuucuuacua

SEQ ID NO: 846743 - RNA, 19 nt, Artificial Sequence
  Description of Artificial Sequence: Synthetic oligonucleotide
  Antisense strand to SEQ ID NO: 846742
uaguaagaaacucaauucc

SEQ ID NO: 846744 - RNA, 19 nt, Artificial Sequence
  Description of Artificial Sequence: Synthetic oligonucleotide
  Sense strand starting at position 1390 of SEQ ID NO: 588172
uugaguuucuuacuacuuc

SEQ ID NO: 846745 - RNA, 19 nt, Artificial Sequence
  Description of Artificial Sequence: Synthetic oligonucleotide
  Antisense strand to SEQ ID NO: 846744
gaaguaguaagaaacucaa

SEQ ID NO: 846746 - RNA, 19 nt, Artificial Sequence
  Description of Artificial Sequence: Synthetic oligonucleotide
  Sense strand starting at position 1492 of SEQ ID NO: 588172
agcggaguuucaggguaga

SEQ ID NO: 846747 - RNA, 19 nt, Artificial Sequence
  Description of Artificial Sequence: Synthetic oligonucleotide
  Antisense strand to SEQ ID NO: 846746
ucuacccugaaacuccgcu

SEQ ID NO: 846748 - RNA, 19 nt, Artificial Sequence
  Description of Artificial Sequence: Synthetic oligonucleotide
  Sense strand starting at position 1682 of SEQ ID NO: 588172
acucgaucuucuugauuuc

SEQ ID NO: 846749 - RNA, 19 nt, Artificial Sequence
  Description of Artificial Sequence: Synthetic oligonucleotide
  Antisense strand to SEQ ID NO: 846748
gaaaucaagaagaucgagu

SEQ ID NO: 846750 - RNA, 19 nt, Artificial Sequence
  Description of Artificial Sequence: Synthetic oligonucleotide
  Sense strand starting at position 1685 of SEQ ID NO: 588172
cgaucuucuugauuucugu

SEQ ID NO: 846751 - RNA, 19 nt, Artificial Sequence
  Description of Artificial Sequence: Synthetic oligonucleotide
  Antisense strand to SEQ ID NO: 846750
acagaaaucaagaagaucg

SEQ ID NO: 846752 - RNA, 19 nt, Artificial Sequence
  Description of Artificial Sequence: Synthetic oligonucleotide
  Sense strand starting at position 1931 of SEQ ID NO: 588172
agccauugugccuggagga

SEQ ID NO: 846753 - RNA, 19 nt, Artificial Sequence
  Description of Artificial Sequence: Synthetic oligonucleotide
  Antisense strand to SEQ ID NO: 846752
uccuccaggcacaauggcu

SEQ ID NO: 846754 - RNA, 19 nt, Artificial Sequence
  Description of Artificial Sequence: Synthetic oligonucleotide
  Sense strand starting at position 2362 of SEQ ID NO: 588172
ccgagaucuggcuaacuuu

SEQ ID NO: 846755 - RNA, 19 nt, Artificial Sequence
  Description of Artificial Sequence: Synthetic oligonucleotide
  Antisense strand to SEQ ID NO: 846754
aaaguuagccagaucucgg

SEQ ID NO: 846756 - RNA, 19 nt, Artificial Sequence
  Description of Artificial Sequence: Synthetic oligonucleotide
  Sense strand starting at position 2368 of SEQ ID NO: 588172
ucuggcuaacuuuaugaaa

SEQ ID NO: 846757 - RNA, 19 nt, Artificial Sequence
  Description of Artificial Sequence: Synthetic oligonucleotide
  Antisense strand to SEQ ID NO: 846756
uuucauaaaguuagccaga

SEQ ID NO: 846758 - RNA, 19 nt, Artificial Sequence
  Description of Artificial Sequence: Synthetic oligonucleotide
  Sense strand starting at position 2370 of SEQ ID NO: 588172
uggcuaacuuuaugaaauu

SEQ ID NO: 846759 - RNA, 19 nt, Artificial Sequence
  Description of Artificial Sequence: Synthetic oligonucleotide
  Antisense strand to SEQ ID NO: 846758
aauuucauaaaguuagcca

SEQ ID NO: 846760 - RNA, 19 nt, Artificial Sequence
  Description of Artificial Sequence: Synthetic oligonucleotide
  Sense strand starting at position 2371 of SEQ ID NO: 588172
ggcuaacuuuaugaaauuc

SEQ ID NO: 846761 - RNA, 19 nt, Artificial Sequence
  Description of Artificial Sequence: Synthetic oligonucleotide
  Antisense strand to SEQ ID NO: 846760
gaauuucauaaaguuagcc

SEQ ID NO: 846762 - RNA, 19 nt, Artificial Sequence
  Description of Artificial Sequence: Synthetic oligonucleotide
  Sense strand starting at position 2395 of SEQ ID NO: 588172
agccaaauaucguuuaaau

SEQ ID NO: 846763 - RNA, 19 nt, Artificial Sequence
  Description of Artificial Sequence: Synthetic oligonucleotide
  Antisense strand to SEQ ID NO: 846762
auuuaaacgauauuuggcu

SEQ ID NO: 846764 - RNA, 19 nt, Artificial Sequence
  Description of Artificial Sequence: Synthetic oligonucleotide
  Sense strand starting at position 3656 of SEQ ID NO: 588172
uccucugucuuccaaguaa

SEQ ID NO: 846765 - RNA, 19 nt, Artificial Sequence
  Description of Artificial Sequence: Synthetic oligonucleotide
  Antisense strand to SEQ ID NO: 846764
uuacuuggaagacagagga

SEQ ID NO: 846766 - RNA, 19 nt, Artificial Sequence
  Description of Artificial Sequence: Synthetic oligonucleotide
  Sense strand starting at position 3705 of SEQ ID NO: 588172
caggcuuacccaggagcaa

SEQ ID NO: 846767 - RNA, 19 nt, Artificial Sequence
  Description of Artificial Sequence: Synthetic oligonucleotide
  Antisense strand to SEQ ID NO: 846766
uugcuccuggguaagccug

SEQ ID NO: 846768 - RNA, 19 nt, Artificial Sequence
  Description of Artificial Sequence: Synthetic oligonucleotide
  Sense strand starting at position 3718 of SEQ ID NO: 588172
gagcaaggucgggaucaga

SEQ ID NO: 846769 - RNA, 19 nt, Artificial Sequence
  Description of Artificial Sequence: Synthetic oligonucleotide
  Antisense strand to SEQ ID NO: 846768
ucugaucccgaccuugcuc

SEQ ID NO: 846770 - RNA, 19 nt, Artificial Sequence
  Description of Artificial Sequence: Synthetic oligonucleotide
  Sense strand starting at position 3747 of SEQ ID NO: 588172
agcccucuguuuccugaaa

SEQ ID NO: 846771 - RNA, 19 nt, Artificial Sequence
  Description of Artificial Sequence: Synthetic oligonucleotide
  Antisense strand to SEQ ID NO: 846770
uuucaggaaacagagggcu

SEQ ID NO: 846772 - RNA, 19 nt, Artificial Sequence
  Description of Artificial Sequence: Synthetic oligonucleotide
  Sense strand starting at position 10 of SEQ ID NO: 588173
gaaccugaaucagucugau

SEQ ID NO: 846773 - RNA, 19 nt, Artificial Sequence
  Description of Artificial Sequence: Synthetic oligonucleotide
  Antisense strand to SEQ ID NO: 846772
aucagacugauucagguuc

SEQ ID NO: 846774 - RNA, 19 nt, Artificial Sequence
  Description of Artificial Sequence: Synthetic oligonucleotide
  Sense strand starting at position 153 of SEQ ID NO: 588173
uccaguaaccuugguguuu

SEQ ID NO: 846775 - RNA, 19 nt, Artificial Sequence
  Description of Artificial Sequence: Synthetic oligonucleotide
  Antisense strand to SEQ ID NO: 846774
aaacaccaagguuacugga

SEQ ID NO: 846776 - RNA, 19 nt, Artificial Sequence
  Description of Artificial Sequence: Synthetic oligonucleotide
  Sense strand starting at position 247 of SEQ ID NO: 588173
gucccacugaguggucaaa

SEQ ID NO: 846777 - RNA, 19 nt, Artificial Sequence
  Description of Artificial Sequence: Synthetic oligonucleotide
  Antisense strand to SEQ ID NO: 846776
uuugaccacucagugggac

SEQ ID NO: 846778 - RNA, 19 nt, Artificial Sequence
  Description of Artificial Sequence: Synthetic oligonucleotide
  Sense strand starting at position 369 of SEQ ID NO: 588173
ccugauaucucagcucaag

SEQ ID NO: 846779 - RNA, 19 nt, Artificial Sequence
  Description of Artificial Sequence: Synthetic oligonucleotide
  Antisense strand to SEQ ID NO: 846778
cuugagcugagauaucagg

SEQ ID NO: 846780 - RNA, 19 nt, Artificial Sequence
  Description of Artificial Sequence: Synthetic oligonucleotide
  Sense strand starting at position 385 of SEQ ID NO: 588173
aagggaaguuugugaauuu

SEQ ID NO: 846781 - RNA, 19 nt, Artificial Sequence
  Description of Artificial Sequence: Synthetic oligonucleotide
  Antisense strand to SEQ ID NO: 846780
aaauucacaaacuucccuu

SEQ ID NO: 846782 - RNA, 19 nt, Artificial Sequence
  Description of Artificial Sequence: Synthetic oligonucleotide
  Sense strand starting at position 386 of SEQ ID NO: 588173
agggaaguuugugaauuuc

SEQ ID NO: 846783 - RNA, 19 nt, Artificial Sequence
  Description of Artificial Sequence: Synthetic oligonucleotide
  Antisense strand to SEQ ID NO: 846782
gaaauucacaaacuucccu

SEQ ID NO: 846784 - RNA, 19 nt, Artificial Sequence
  Description of Artificial Sequence: Synthetic oligonucleotide
  Sense strand starting at position 392 of SEQ ID NO: 588173
guuugugaauuucaaggga

SEQ ID NO: 846785 - RNA, 19 nt, Artificial Sequence
  Description of Artificial Sequence: Synthetic oligonucleotide
  Antisense strand to SEQ ID NO: 846784
ucccuugaaauucacaaac

SEQ ID NO: 846786 - RNA, 19 nt, Artificial Sequence
  Description of Artificial Sequence: Synthetic oligonucleotide
  Sense strand starting at position 412 of SEQ ID NO: 588173
guguguuaaucaguaucac

SEQ ID NO: 846787 - RNA, 19 nt, Artificial Sequence
  Description of Artificial Sequence: Synthetic oligonucleotide
  Antisense strand to SEQ ID NO: 846786
gugauacugauuaacacac

SEQ ID NO: 846788 - RNA, 19 nt, Artificial Sequence
  Description of Artificial Sequence: Synthetic oligonucleotide
  Sense strand starting at position 413 of SEQ ID NO: 588173
uguguuaaucaguaucaca

SEQ ID NO: 846789 - RNA, 19 nt, Artificial Sequence
  Description of Artificial Sequence: Synthetic oligonucleotide
  Antisense strand to SEQ ID NO: 846788
ugugauacugauuaacaca

SEQ ID NO: 846790 - RNA, 19 nt, Artificial Sequence
  Description of Artificial Sequence: Synthetic oligonucleotide
  Sense strand starting at position 1069 of SEQ ID NO: 588173
ccacgagggacucagcauu

SEQ ID NO: 846791 - RNA, 19 nt, Artificial Sequence
  Description of Artificial Sequence: Synthetic oligonucleotide
  Antisense strand to SEQ ID NO: 846790
aaugcugagucccucgugg

SEQ ID NO: 846792 - RNA, 19 nt, Artificial Sequence
  Description of Artificial Sequence: Synthetic oligonucleotide
  Sense strand starting at position 1188 of SEQ ID NO: 588173
ggaggaaacugguuguaac

SEQ ID NO: 846793 - RNA, 19 nt, Artificial Sequence
  Description of Artificial Sequence: Synthetic oligonucleotide
  Antisense strand to SEQ ID NO: 846792
guuacaaccaguuuccucc

SEQ ID NO: 846794 - RNA, 19 nt, Artificial Sequence
  Description of Artificial Sequence: Synthetic oligonucleotide
  Sense strand starting at position 1189 of SEQ ID NO: 588173
gaggaaacugguuguaaca

SEQ ID NO: 846795 - RNA, 19 nt, Artificial Sequence
  Description of Artificial Sequence: Synthetic oligonucleotide
  Antisense strand to SEQ ID NO: 846794
uguuacaaccaguuuccuc

SEQ ID NO: 846796 - RNA, 19 nt, Artificial Sequence
  Description of Artificial Sequence: Synthetic oligonucleotide
  Sense strand starting at position 1191 of SEQ ID NO: 588173
ggaaacugguuguaacaua

SEQ ID NO: 846797 - RNA, 19 nt, Artificial Sequence
  Description of Artificial Sequence: Synthetic oligonucleotide
  Antisense strand to SEQ ID NO: 846796
uauguuacaaccaguuucc

SEQ ID NO: 846798 - RNA, 19 nt, Artificial Sequence
  Description of Artificial Sequence: Synthetic oligonucleotide
  Sense strand starting at position 1224 of SEQ ID NO: 588173
aggugaacauggcucugaa

SEQ ID NO: 846799 - RNA, 19 nt, Artificial Sequence
  Description of Artificial Sequence: Synthetic oligonucleotide
  Antisense strand to SEQ ID NO: 846798
uucagagccauguucaccu

SEQ ID NO: 846800 - RNA, 19 nt, Artificial Sequence
  Description of Artificial Sequence: Synthetic oligonucleotide
  Sense strand starting at position 1227 of SEQ ID NO: 588173
ugaacauggcucugaauga

SEQ ID NO: 846801 - RNA, 19 nt, Artificial Sequence
  Description of Artificial Sequence: Synthetic oligonucleotide
  Antisense strand to SEQ ID NO: 846800
ucauucagagccauguuca

SEQ ID NO: 846802 - RNA, 19 nt, Artificial Sequence
  Description of Artificial Sequence: Synthetic oligonucleotide
  Sense strand starting at position 1228 of SEQ ID NO: 588173
gaacauggcucugaaugaa

SEQ ID NO: 846803 - RNA, 19 nt, Artificial Sequence
  Description of Artificial Sequence: Synthetic oligonucleotide
  Antisense strand to SEQ ID NO: 846802
uucauucagagccauguuc

SEQ ID NO: 846804 - RNA, 19 nt, Artificial Sequence
  Description of Artificial Sequence: Synthetic oligonucleotide
  Sense strand starting at position 1637 of SEQ ID NO: 588173
aaagguacguaugaggaaa

SEQ ID NO: 846805 - RNA, 19 nt, Artificial Sequence
  Description of Artificial Sequence: Synthetic oligonucleotide
  Antisense strand to SEQ ID NO: 846804
uuuccucauacguaccuuu

SEQ ID NO: 846806 - RNA, 19 nt, Artificial Sequence
  Description of Artificial Sequence: Synthetic oligonucleotide
  Sense strand starting at position 2049 of SEQ ID NO: 588173
gagugaggcugggcuuaaa

SEQ ID NO: 846807 - RNA, 19 nt, Artificial Sequence
  Description of Artificial Sequence: Synthetic oligonucleotide
  Antisense strand to SEQ ID NO: 846806
uuuaagcccagccucacuc

SEQ ID NO: 846808 - RNA, 19 nt, Artificial Sequence
  Description of Artificial Sequence: Synthetic oligonucleotide
  Sense strand starting at position 2217 of SEQ ID NO: 588173
cucuuucucccacguggaa

SEQ ID NO: 846809 - RNA, 19 nt, Artificial Sequence
  Description of Artificial Sequence: Synthetic oligonucleotide
  Antisense strand to SEQ ID NO: 846808
uuccacgugggagaaagag

SEQ ID NO: 846810 - RNA, 19 nt, Artificial Sequence
  Description of Artificial Sequence: Synthetic oligonucleotide
  Sense strand starting at position 2262 of SEQ ID NO: 588173
gggucagggcccuggaaau

SEQ ID NO: 846811 - RNA, 19 nt, Artificial Sequence
  Description of Artificial Sequence: Synthetic oligonucleotide
  Antisense strand to SEQ ID NO: 846810
auuuccagggcccugaccc

SEQ ID NO: 846812 - RNA, 19 nt, Artificial Sequence
  Description of Artificial Sequence: Synthetic oligonucleotide
  Sense strand starting at position 2272 of SEQ ID NO: 588173
ccuggaaaucgccauccuu

SEQ ID NO: 846813 - RNA, 19 nt, Artificial Sequence
  Description of Artificial Sequence: Synthetic oligonucleotide
  Antisense strand to SEQ ID NO: 846812
aaggauggcgauuuccagg

SEQ ID NO: 846814 - RNA, 19 nt, Artificial Sequence
  Description of Artificial Sequence: Synthetic oligonucleotide
  Sense strand starting at position 2290 of SEQ ID NO: 588173
uuccuuugugcugaucaga

SEQ ID NO: 846815 - RNA, 19 nt, Artificial Sequence
  Description of Artificial Sequence: Synthetic oligonucleotide
  Antisense strand to SEQ ID NO: 846814
ucugaucagcacaaaggaa

SEQ ID NO: 846816 - RNA, 19 nt, Artificial Sequence
  Description of Artificial Sequence: Synthetic oligonucleotide
  Sense strand starting at position 2293 of SEQ ID NO: 588173
cuuugugcugaucagaaga

SEQ ID NO: 846817 - RNA, 19 nt, Artificial Sequence
  Description of Artificial Sequence: Synthetic oligonucleotide
  Antisense strand to SEQ ID NO: 846816
ucuucugaucagcacaaag

SEQ ID NO: 846818 - RNA, 19 nt, Artificial Sequence
  Description of Artificial Sequence: Synthetic oligonucleotide
  Sense strand starting at position 2560 of SEQ ID NO: 588173
gggcuugucacuuagcaag

SEQ ID NO: 846819 - RNA, 19 nt, Artificial Sequence
  Description of Artificial Sequence: Synthetic oligonucleotide
  Antisense strand to SEQ ID NO: 846818
cuugcuaagugacaagccc

SEQ ID NO: 846820 - RNA, 19 nt, Artificial Sequence
  Description of Artificial Sequence: Synthetic oligonucleotide
  Sense strand starting at position 2571 of SEQ ID NO: 588173
uuagcaagagauggcuaua

SEQ ID NO: 846821 - RNA, 19 nt, Artificial Sequence
  Description of Artificial Sequence: Synthetic oligonucleotide
  Antisense strand to SEQ ID NO: 846820
uauagccaucucuugcuaa

SEQ ID NO: 846822 - RNA, 19 nt, Artificial Sequence
  Description of Artificial Sequence: Synthetic oligonucleotide
  Sense strand starting at position 2574 of SEQ ID NO: 588173
gcaagagauggcuauagca

SEQ ID NO: 846823 - RNA, 19 nt, Artificial Sequence
  Description of Artificial Sequence: Synthetic oligonucleotide
  Antisense strand to SEQ ID NO: 846822
ugcuauagccaucucuugc

SEQ ID NO: 846824 - RNA, 19 nt, Artificial Sequence
  Description of Artificial Sequence: Synthetic oligonucleotide
  Sense strand starting at position 2623 of SEQ ID NO: 588173
gggaauggcagugguacuu

SEQ ID NO: 846825 - RNA, 19 nt, Artificial Sequence
  Description of Artificial Sequence: Synthetic oligonucleotide
  Antisense strand to SEQ ID NO: 846824
aaguaccacugccauuccc

SEQ ID NO: 846826 - RNA, 19 nt, Artificial Sequence
  Description of Artificial Sequence: Synthetic oligonucleotide
  Sense strand starting at position 2670 of SEQ ID NO: 588173
gauguugugaguuguagga

SEQ ID NO: 846827 - RNA, 19 nt, Artificial Sequence
  Description of Artificial Sequence: Synthetic oligonucleotide
  Antisense strand to SEQ ID NO: 846826
uccuacaacucacaacauc

SEQ ID NO: 846828 - RNA, 19 nt, Artificial Sequence
  Description of Artificial Sequence: Synthetic oligonucleotide
  Sense strand starting at position 2768 of SEQ ID NO: 588173
uuuacuguuggugaugaga

SEQ ID NO: 846829 - RNA, 19 nt, Artificial Sequence
  Description of Artificial Sequence: Synthetic oligonucleotide
  Antisense strand to SEQ ID NO: 846828
ucucaucaccaacaguaaa

SEQ ID NO: 846830 - RNA, 19 nt, Artificial Sequence
  Description of Artificial Sequence: Synthetic oligonucleotide
  Sense strand starting at position 2782 of SEQ ID NO: 588173
ugagaaaggucagagaagu

SEQ ID NO: 846831 - RNA, 19 nt, Artificial Sequence
  Description of Artificial Sequence: Synthetic oligonucleotide
  Antisense strand to SEQ ID NO: 846830
acuucucugaccuuucuca

SEQ ID NO: 846832 - RNA, 19 nt, Artificial Sequence
  Description of Artificial Sequence: Synthetic oligonucleotide
  Sense strand starting at position 2795 of SEQ ID NO: 588173
agaagugauugguugguca

SEQ ID NO: 846833 - RNA, 19 nt, Artificial Sequence
  Description of Artificial Sequence: Synthetic oligonucleotide
  Antisense strand to SEQ ID NO: 846832
ugaccaaccaaucacuucu

SEQ ID NO: 846834 - RNA, 19 nt, Artificial Sequence
  Description of Artificial Sequence: Synthetic oligonucleotide
  Sense strand starting at position 2797 of SEQ ID NO: 588173
aagugauugguuggucaaa

SEQ ID NO: 846835 - RNA, 19 nt, Artificial Sequence
  Description of Artificial Sequence: Synthetic oligonucleotide
  Antisense strand to SEQ ID NO: 846834
uuugaccaaccaaucacuu

SEQ ID NO: 846836 - RNA, 19 nt, Artificial Sequence
  Description of Artificial Sequence: Synthetic oligonucleotide
  Sense strand starting at position 2872 of SEQ ID NO: 588173
ugaacccugcucugugaaa

SEQ ID NO: 846837 - RNA, 19 nt, Artificial Sequence
  Description of Artificial Sequence: Synthetic oligonucleotide
  Antisense strand to SEQ ID NO: 846836
uuucacagagcaggguuca

SEQ ID NO: 846838 - RNA, 19 nt, Artificial Sequence
  Description of Artificial Sequence: Synthetic oligonucleotide
  Sense strand starting at position 2874 of SEQ ID NO: 588173
aacccugcucugugaaaga

SEQ ID NO: 846839 - RNA, 19 nt, Artificial Sequence
  Description of Artificial Sequence: Synthetic oligonucleotide
  Antisense strand to SEQ ID NO: 846838
ucuuucacagagcaggguu

SEQ ID NO: 846840 - RNA, 19 nt, Artificial Sequence
  Description of Artificial Sequence: Synthetic oligonucleotide
  Sense strand starting at position 2909 of SEQ ID NO: 588173
cuguaaaguucccugugca

SEQ ID NO: 846841 - RNA, 19 nt, Artificial Sequence
  Description of Artificial Sequence: Synthetic oligonucleotide
  Antisense strand to SEQ ID NO: 846840
ugcacagggaacuuuacag

SEQ ID NO: 846842 - RNA, 19 nt, Artificial Sequence
  Description of Artificial Sequence: Synthetic oligonucleotide
  Sense strand starting at position 2910 of SEQ ID NO: 588173
uguaaaguucccugugcag

SEQ ID NO: 846843 - RNA, 19 nt, Artificial Sequence
  Description of Artificial Sequence: Synthetic oligonucleotide
  Antisense strand to SEQ ID NO: 846842
cugcacagggaacuuuaca

SEQ ID NO: 846844 - RNA, 19 nt, Artificial Sequence
  Description of Artificial Sequence: Synthetic oligonucleotide
  Sense strand starting at position 3103 of SEQ ID NO: 588173
cacaaaugugacuggcaga

SEQ ID NO: 846845 - RNA, 19 nt, Artificial Sequence
  Description of Artificial Sequence: Synthetic oligonucleotide
  Antisense strand to SEQ ID NO: 846844
ucugccagucacauuugug

SEQ ID NO: 846846 - RNA, 19 nt, Artificial Sequence
  Description of Artificial Sequence: Synthetic oligonucleotide
  Sense strand starting at position 3706 of SEQ ID NO: 588173
uuccguagucuuggagacu

SEQ ID NO: 846847 - RNA, 19 nt, Artificial Sequence
  Description of Artificial Sequence: Synthetic oligonucleotide
  Antisense strand to SEQ ID NO: 846846
agucuccaagacuacggaa

SEQ ID NO: 846848 - RNA, 19 nt, Artificial Sequence
  Description of Artificial Sequence: Synthetic oligonucleotide
  Sense strand starting at position 3862 of SEQ ID NO: 588173
cacugucaccucugggaga

SEQ ID NO: 846849 - RNA, 19 nt, Artificial Sequence
  Description of Artificial Sequence: Synthetic oligonucleotide
  Antisense strand to SEQ ID NO: 846848
ucucccagaggugacagug

SEQ ID NO: 846850 - RNA, 19 nt, Artificial Sequence
  Description of Artificial Sequence: Synthetic oligonucleotide
  Sense strand starting at position 3918 of SEQ ID NO: 588173
gaggccaggcaucauuaaa

SEQ ID NO: 846851 - RNA, 19 nt, Artificial Sequence
  Description of Artificial Sequence: Synthetic oligonucleotide
  Antisense strand to SEQ ID NO: 846850
uuuaaugaugccuggccuc

SEQ ID NO: 846852 - RNA, 19 nt, Artificial Sequence
  Description of Artificial Sequence: Synthetic oligonucleotide
  Sense strand starting at position 1339 of SEQ ID NO: 588175
gugguaguuccugggaagu

SEQ ID NO: 846853 - RNA, 19 nt, Artificial Sequence
  Description of Artificial Sequence: Synthetic oligonucleotide
  Antisense strand to SEQ ID NO: 846852
acuucccaggaacuaccac

SEQ ID NO: 846854 - RNA, 19 nt, Artificial Sequence
  Description of Artificial Sequence: Synthetic oligonucleotide
  Sense strand starting at position 1398 of SEQ ID NO: 588175
caagguuugcuaugaggca

SEQ ID NO: 846855 - RNA, 19 nt, Artificial Sequence
  Description of Artificial Sequence: Synthetic oligonucleotide
  Antisense strand to SEQ ID NO: 846854
ugccucauagcaaaccuug

SEQ ID NO: 846856 - RNA, 19 nt, Artificial Sequence
  Description of Artificial Sequence: Synthetic oligonucleotide
  Sense strand starting at position 1425 of SEQ ID NO: 588175
gcuccauauccagagugga

SEQ ID NO: 846857 - RNA, 19 nt, Artificial Sequence
  Description of Artificial Sequence: Synthetic oligonucleotide
  Antisense strand to SEQ ID NO: 846856
uccacucuggauauggagc

SEQ ID NO: 846858 - RNA, 19 nt, Artificial Sequence
  Description of Artificial Sequence: Synthetic oligonucleotide
  Sense strand starting at position 1439 of SEQ ID NO: 588175
guggacaguuacucaccua

SEQ ID NO: 846859 - RNA, 19 nt, Artificial Sequence
  Description of Artificial Sequence: Synthetic oligonucleotide
  Antisense strand to SEQ ID NO: 846858
uaggugaguaacuguccac

SEQ ID NO: 846860 - RNA, 19 nt, Artificial Sequence
  Description of Artificial Sequence: Synthetic oligonucleotide
  Sense strand starting at position 1496 of SEQ ID NO: 588175
ucuaguguuaauggucauu

SEQ ID NO: 846861 - RNA, 19 nt, Artificial Sequence
  Description of Artificial Sequence: Synthetic oligonucleotide
  Antisense strand to SEQ ID NO: 846860
aaugaccauuaacacuaga

SEQ ID NO: 846862 - RNA, 19 nt, Artificial Sequence
  Description of Artificial Sequence: Synthetic oligonucleotide
  Sense strand starting at position 1498 of SEQ ID NO: 588175
uaguguuaauggucauuac

SEQ ID NO: 846863 - RNA, 19 nt, Artificial Sequence
  Description of Artificial Sequence: Synthetic oligonucleotide
  Antisense strand to SEQ ID NO: 846862
guaaugaccauuaacacua

SEQ ID NO: 846864 - RNA, 19 nt, Artificial Sequence
  Description of Artificial Sequence: Synthetic oligonucleotide
  Sense strand starting at position 1501 of SEQ ID NO: 588175
uguuaauggucauuaccca

SEQ ID NO: 846865 - RNA, 19 nt, Artificial Sequence
  Description of Artificial Sequence: Synthetic oligonucleotide
  Antisense strand to SEQ ID NO: 846864
uggguaaugaccauuaaca

SEQ ID NO: 846866 - RNA, 19 nt, Artificial Sequence
  Description of Artificial Sequence: Synthetic oligonucleotide
  Sense strand starting at position 1530 of SEQ ID NO: 588175
ggagaucaguauucccuca

SEQ ID NO: 846867 - RNA, 19 nt, Artificial Sequence
  Description of Artificial Sequence: Synthetic oligonucleotide
  Antisense strand to SEQ ID NO: 846866
ugagggaauacugaucucc

SEQ ID NO: 846868 - RNA, 19 nt, Artificial Sequence
  Description of Artificial Sequence: Synthetic oligonucleotide
  Sense strand starting at position 1532 of SEQ ID NO: 588175
agaucaguauucccucauu

SEQ ID NO: 846869 - RNA, 19 nt, Artificial Sequence
  Description of Artificial Sequence: Synthetic oligonucleotide
  Antisense strand to SEQ ID NO: 846868
aaugagggaauacugaucu

SEQ ID NO: 846870 - RNA, 19 nt, Artificial Sequence
  Description of Artificial Sequence: Synthetic oligonucleotide
  Sense strand starting at position 1556 of SEQ ID NO: 588175
ucuagaauccauggucacu

SEQ ID NO: 846871 - RNA, 19 nt, Artificial Sequence
  Description of Artificial Sequence: Synthetic oligonucleotide
  Antisense strand to SEQ ID NO: 846870
agugaccauggauucuaga

SEQ ID NO: 846872 - RNA, 19 nt, Artificial Sequence
  Description of Artificial Sequence: Synthetic oligonucleotide
  Sense strand starting at position 1587 of SEQ ID NO: 588175
aaucuagugucagugguua

SEQ ID NO: 846873 - RNA, 19 nt, Artificial Sequence
  Description of Artificial Sequence: Synthetic oligonucleotide
  Antisense strand to SEQ ID NO: 846872
uaaccacugacacuagauu

SEQ ID NO: 846874 - RNA, 19 nt, Artificial Sequence
  Description of Artificial Sequence: Synthetic oligonucleotide
  Sense strand starting at position 1591 of SEQ ID NO: 588175
uagugucagugguuacuca

SEQ ID NO: 846875 - RNA, 19 nt, Artificial Sequence
  Description of Artificial Sequence: Synthetic oligonucleotide
  Antisense strand to SEQ ID NO: 846874
ugaguaaccacugacacua

SEQ ID NO: 846876 - RNA, 19 nt, Artificial Sequence
  Description of Artificial Sequence: Synthetic oligonucleotide
  Sense strand starting at position 1627 of SEQ ID NO: 588175
ggcuuauagucacucaccu

SEQ ID NO: 846877 - RNA, 19 nt, Artificial Sequence
  Description of Artificial Sequence: Synthetic oligonucleotide
  Antisense strand to SEQ ID NO: 846876
aggugagugacuauaagcc

SEQ ID NO: 846878 - RNA, 19 nt, Artificial Sequence
  Description of Artificial Sequence: Synthetic oligonucleotide
  Sense strand starting at position 2106 of SEQ ID NO: 588175
cagugaaaugugggugauc

SEQ ID NO: 846879 - RNA, 19 nt, Artificial Sequence
  Description of Artificial Sequence: Synthetic oligonucleotide
  Antisense strand to SEQ ID NO: 846878
gaucacccacauuucacug

SEQ ID NO: 846880 - RNA, 19 nt, Artificial Sequence
  Description of Artificial Sequence: Synthetic oligonucleotide
  Sense strand starting at position 2157 of SEQ ID NO: 588175
caggcauugugguuaagua

SEQ ID NO: 846881 - RNA, 19 nt, Artificial Sequence
  Description of Artificial Sequence: Synthetic oligonucleotide
  Antisense strand to SEQ ID NO: 846880
uacuuaaccacaaugccug

SEQ ID NO: 846882 - RNA, 19 nt, Artificial Sequence
  Description of Artificial Sequence: Synthetic oligonucleotide
  Sense strand starting at position 2158 of SEQ ID NO: 588175
aggcauugugguuaaguac

SEQ ID NO: 846883 - RNA, 19 nt, Artificial Sequence
  Description of Artificial Sequence: Synthetic oligonucleotide
  Antisense strand to SEQ ID NO: 846882
guacuuaaccacaaugccu

SEQ ID NO: 846884 - RNA, 19 nt, Artificial Sequence
  Description of Artificial Sequence: Synthetic oligonucleotide
  Sense strand starting at position 2608 of SEQ ID NO: 588175
accaucuugccuggcauau

SEQ ID NO: 846885 - RNA, 19 nt, Artificial Sequence
  Description of Artificial Sequence: Synthetic oligonucleotide
  Antisense strand to SEQ ID NO: 846884
auaugccaggcaagauggu

SEQ ID NO: 846886 - RNA, 19 nt, Artificial Sequence
  Description of Artificial Sequence: Synthetic oligonucleotide
  Sense strand starting at position 2612 of SEQ ID NO: 588175
ucuugccuggcauauuauu

SEQ ID NO: 846887 - RNA, 19 nt, Artificial Sequence
  Description of Artificial Sequence: Synthetic oligonucleotide
  Antisense strand to SEQ ID NO: 846886
aauaauaugccaggcaaga

SEQ ID NO: 846888 - RNA, 19 nt, Artificial Sequence
  Description of Artificial Sequence: Synthetic oligonucleotide
  Sense strand starting at position 2618 of SEQ ID NO: 588175
cuggcauauuauucuuaga

SEQ ID NO: 846889 - RNA, 19 nt, Artificial Sequence
  Description of Artificial Sequence: Synthetic oligonucleotide
  Antisense strand to SEQ ID NO: 846888
ucuaagaauaauaugccag

SEQ ID NO: 846890 - RNA, 19 nt, Artificial Sequence
  Description of Artificial Sequence: Synthetic oligonucleotide
  Sense strand starting at position 2620 of SEQ ID NO: 588175
ggcauauuauucuuagagg

SEQ ID NO: 846891 - RNA, 19 nt, Artificial Sequence
  Description of Artificial Sequence: Synthetic oligonucleotide
  Antisense strand to SEQ ID NO: 846890
ccucuaagaauaauaugcc

SEQ ID NO: 846892 - RNA, 19 nt, Artificial Sequence
  Description of Artificial Sequence: Synthetic oligonucleotide
  Sense strand starting at position 3200 of SEQ ID NO: 588175
gguggaugcgucaggcuau

SEQ ID NO: 846893 - RNA, 19 nt, Artificial Sequence
  Description of Artificial Sequence: Synthetic oligonucleotide
  Antisense strand to SEQ ID NO: 846892
auagccugacgcauccacc

SEQ ID NO: 846894 - RNA, 19 nt, Artificial Sequence
  Description of Artificial Sequence: Synthetic oligonucleotide
  Sense strand starting at position 3206 of SEQ ID NO: 588175
ugcgucaggcuauaaauga

SEQ ID NO: 846895 - RNA, 19 nt, Artificial Sequence
  Description of Artificial Sequence: Synthetic oligonucleotide
  Antisense strand to SEQ ID NO: 846894
ucauuuauagccugacgca

SEQ ID NO: 846896 - RNA, 19 nt, Artificial Sequence
  Description of Artificial Sequence: Synthetic oligonucleotide
  Sense strand starting at position 3241 of SEQ ID NO: 588175
cgguguacucuucauggca

SEQ ID NO: 846897 - RNA, 19 nt, Artificial Sequence
  Description of Artificial Sequence: Synthetic oligonucleotide
  Antisense strand to SEQ ID NO: 846896
ugccaugaagaguacaccg

SEQ ID NO: 846898 - RNA, 19 nt, Artificial Sequence
  Description of Artificial Sequence: Synthetic oligonucleotide
  Sense strand starting at position 3298 of SEQ ID NO: 588175
aauagccuugcugaggaaa

SEQ ID NO: 846899 - RNA, 19 nt, Artificial Sequence
  Description of Artificial Sequence: Synthetic oligonucleotide
  Antisense strand to SEQ ID NO: 846898
uuuccucagcaaggcuauu

SEQ ID NO: 846900 - RNA, 19 nt, Artificial Sequence
  Description of Artificial Sequence: Synthetic oligonucleotide
  Sense strand starting at position 3301 of SEQ ID NO: 588175
agccuugcugaggaaauua

SEQ ID NO: 846901 - RNA, 19 nt, Artificial Sequence
  Description of Artificial Sequence: Synthetic oligonucleotide
  Antisense strand to SEQ ID NO: 846900
uaauuuccucagcaaggcu

SEQ ID NO: 846902 - RNA, 19 nt, Artificial Sequence
  Description of Artificial Sequence: Synthetic oligonucleotide
  Sense strand starting at position 3460 of SEQ ID NO: 588175
ucauucugucuuuaauggu

SEQ ID NO: 846903 - RNA, 19 nt, Artificial Sequence
  Description of Artificial Sequence: Synthetic oligonucleotide
  Antisense strand to SEQ ID NO: 846902
accauuaaagacagaauga

SEQ ID NO: 846904 - RNA, 19 nt, Artificial Sequence
  Description of Artificial Sequence: Synthetic oligonucleotide
  Sense strand starting at position 3512 of SEQ ID NO: 588175
agcugugaacugugaagca

SEQ ID NO: 846905 - RNA, 19 nt, Artificial Sequence
  Description of Artificial Sequence: Synthetic oligonucleotide
  Antisense strand to SEQ ID NO: 846904
ugcuucacaguucacagcu

SEQ ID NO: 846906 - RNA, 19 nt, Artificial Sequence
  Description of Artificial Sequence: Synthetic oligonucleotide
  Sense strand starting at position 3535 of SEQ ID NO: 588175
uguuaaggaugacaaauaa

SEQ ID NO: 846907 - RNA, 19 nt, Artificial Sequence
  Description of Artificial Sequence: Synthetic oligonucleotide
  Antisense strand to SEQ ID NO: 846906
uuauuugucauccuuaaca

SEQ ID NO: 846908 - RNA, 19 nt, Artificial Sequence
  Description of Artificial Sequence: Synthetic oligonucleotide
  Sense strand starting at position 3739 of SEQ ID NO: 588175
acaugaucuugagaaacca

SEQ ID NO: 846909 - RNA, 19 nt, Artificial Sequence
  Description of Artificial Sequence: Synthetic oligonucleotide
  Antisense strand to SEQ ID NO: 846908
ugguuucucaagaucaugu

SEQ ID NO: 846910 - RNA, 19 nt, Artificial Sequence
  Description of Artificial Sequence: Synthetic oligonucleotide
  Sense strand starting at position 3758 of SEQ ID NO: 588175
aagagagguuucuccauug

SEQ ID NO: 846911 - RNA, 19 nt, Artificial Sequence
  Description of Artificial Sequence: Synthetic oligonucleotide
  Antisense strand to SEQ ID NO: 846910
caauggagaaaccucucuu

SEQ ID NO: 846912 - RNA, 19 nt, Artificial Sequence
  Description of Artificial Sequence: Synthetic oligonucleotide
  Sense strand starting at position 3776 of SEQ ID NO: 588175
gguaccaugaguuggacua

SEQ ID NO: 846913 - RNA, 19 nt, Artificial Sequence
  Description of Artificial Sequence: Synthetic oligonucleotide
  Antisense strand to SEQ ID NO: 846912
uaguccaacucaugguacc

SEQ ID NO: 846914 - RNA, 19 nt, Artificial Sequence
  Description of Artificial Sequence: Synthetic oligonucleotide
  Sense strand starting at position 3786 of SEQ ID NO: 588175
guuggacuagauugauuga

SEQ ID NO: 846915 - RNA, 19 nt, Artificial Sequence
  Description of Artificial Sequence: Synthetic oligonucleotide
  Antisense strand to SEQ ID NO: 846914
ucaaucaaucuaguccaac

SEQ ID NO: 846916 - RNA, 19 nt, Artificial Sequence
  Description of Artificial Sequence: Synthetic oligonucleotide
  Sense strand starting at position 3831 of SEQ ID NO: 588175
ccuguuauggaccagguau

SEQ ID NO: 846917 - RNA, 19 nt, Artificial Sequence
  Description of Artificial Sequence: Synthetic oligonucleotide
  Antisense strand to SEQ ID NO: 846916
auaccugguccauaacagg

SEQ ID NO: 846918 - RNA, 19 nt, Artificial Sequence
  Description of Artificial Sequence: Synthetic oligonucleotide
  Sense strand starting at position 3844 of SEQ ID NO: 588175
agguauugugcucagucuu

SEQ ID NO: 846919 - RNA, 19 nt, Artificial Sequence
  Description of Artificial Sequence: Synthetic oligonucleotide
  Antisense strand to SEQ ID NO: 846918
aagacugagcacaauaccu

SEQ ID NO: 846920 - RNA, 19 nt, Artificial Sequence
  Description of Artificial Sequence: Synthetic oligonucleotide
  Sense strand starting at position 3850 of SEQ ID NO: 588175
ugugcucagucuuuaaacu

SEQ ID NO: 846921 - RNA, 19 nt, Artificial Sequence
  Description of Artificial Sequence: Synthetic oligonucleotide
  Antisense strand to SEQ ID NO: 846920
aguuuaaagacugagcaca

SEQ ID NO: 846922 - RNA, 19 nt, Artificial Sequence
  Description of Artificial Sequence: Synthetic oligonucleotide
  Sense strand starting at position 3858 of SEQ ID NO: 588175
gucuuuaaacugcagaagu

SEQ ID NO: 846923 - RNA, 19 nt, Artificial Sequence
  Description of Artificial Sequence: Synthetic oligonucleotide
  Antisense strand to SEQ ID NO: 846922
acuucugcaguuuaaagac

SEQ ID NO: 846924 - RNA, 19 nt, Artificial Sequence
  Description of Artificial Sequence: Synthetic oligonucleotide
  Sense strand starting at position 3860 of SEQ ID NO: 588175
cuuuaaacugcagaaguaa

SEQ ID NO: 846925 - RNA, 19 nt, Artificial Sequence
  Description of Artificial Sequence: Synthetic oligonucleotide
  Antisense strand to SEQ ID NO: 846924
uuacuucugcaguuuaaag

SEQ ID NO: 846926 - RNA, 19 nt, Artificial Sequence
  Description of Artificial Sequence: Synthetic oligonucleotide
  Sense strand starting at position 3877 of SEQ ID NO: 588175
aagauagagucuuugcacu

SEQ ID NO: 846927 - RNA, 19 nt, Artificial Sequence
  Description of Artificial Sequence: Synthetic oligonucleotide
  Antisense strand to SEQ ID NO: 846926
agugcaaagacucuaucuu

SEQ ID NO: 846928 - RNA, 19 nt, Artificial Sequence
  Description of Artificial Sequence: Synthetic oligonucleotide
  Sense strand starting at position 3879 of SEQ ID NO: 588175
gauagagucuuugcacuaa

SEQ ID NO: 846929 - RNA, 19 nt, Artificial Sequence
  Description of Artificial Sequence: Synthetic oligonucleotide
  Antisense strand to SEQ ID NO: 846928
uuagugcaaagacucuauc

SEQ ID NO: 846930 - RNA, 19 nt, Artificial Sequence
  Description of Artificial Sequence: Synthetic oligonucleotide
  Sense strand starting at position 3947 of SEQ ID NO: 588175
uagagaugcgcacagaguu

SEQ ID NO: 846931 - RNA, 19 nt, Artificial Sequence
  Description of Artificial Sequence: Synthetic oligonucleotide
  Antisense strand to SEQ ID NO: 846930
aacucugugcgcaucucua

SEQ ID NO: 846932 - RNA, 19 nt, Artificial Sequence
  Description of Artificial Sequence: Synthetic oligonucleotide
  Sense strand starting at position 285 of SEQ ID NO: 588176
caagguuugcuaugaggca

SEQ ID NO: 846933 - RNA, 19 nt, Artificial Sequence
  Description of Artificial Sequence: Synthetic oligonucleotide
  Antisense strand to SEQ ID NO: 846932
ugccucauagcaaaccuug

SEQ ID NO: 846934 - RNA, 19 nt, Artificial Sequence
  Description of Artificial Sequence: Synthetic oligonucleotide
  Sense strand starting at position 312 of SEQ ID NO: 588176
gcuccauauccagagugga

SEQ ID NO: 846935 - RNA, 19 nt, Artificial Sequence
  Description of Artificial Sequence: Synthetic oligonucleotide
  Antisense strand to SEQ ID NO: 846934
uccacucuggauauggagc

SEQ ID NO: 846936 - RNA, 19 nt, Artificial Sequence
  Description of Artificial Sequence: Synthetic oligonucleotide
  Sense strand starting at position 326 of SEQ ID NO: 588176
guggacaguuacucaccua

SEQ ID NO: 846937 - RNA, 19 nt, Artificial Sequence
  Description of Artificial Sequence: Synthetic oligonucleotide
  Antisense strand to SEQ ID NO: 846936
uaggugaguaacuguccac

SEQ ID NO: 846938 - RNA, 19 nt, Artificial Sequence
  Description of Artificial Sequence: Synthetic oligonucleotide
  Sense strand starting at position 385 of SEQ ID NO: 588176
uaguguuaauggucauuac

SEQ ID NO: 846939 - RNA, 19 nt, Artificial Sequence
  Description of Artificial Sequence: Synthetic oligonucleotide
  Antisense strand to SEQ ID NO: 846938
guaaugaccauuaacacua

SEQ ID NO: 846940 - RNA, 19 nt, Artificial Sequence
  Description of Artificial Sequence: Synthetic oligonucleotide
  Sense strand starting at position 388 of SEQ ID NO: 588176
uguuaauggucauuaccca

SEQ ID NO: 846941 - RNA, 19 nt, Artificial Sequence
  Description of Artificial Sequence: Synthetic oligonucleotide
  Antisense strand to SEQ ID NO: 846940
uggguaaugaccauuaaca

SEQ ID NO: 846942 - RNA, 19 nt, Artificial Sequence
  Description of Artificial Sequence: Synthetic oligonucleotide
  Sense strand starting at position 417 of SEQ ID NO: 588176
ggagaucaguauucccuca

SEQ ID NO: 846943 - RNA, 19 nt, Artificial Sequence
  Description of Artificial Sequence: Synthetic oligonucleotide
  Antisense strand to SEQ ID NO: 846942
ugagggaauacugaucucc

SEQ ID NO: 846944 - RNA, 19 nt, Artificial Sequence
  Description of Artificial Sequence: Synthetic oligonucleotide
  Sense strand starting at position 419 of SEQ ID NO: 588176
agaucaguauucccucauu

SEQ ID NO: 846945 - RNA, 19 nt, Artificial Sequence
  Description of Artificial Sequence: Synthetic oligonucleotide
  Antisense strand to SEQ ID NO: 846944
aaugagggaauacugaucu

SEQ ID NO: 846946 - RNA, 19 nt, Artificial Sequence
  Description of Artificial Sequence: Synthetic oligonucleotide
  Sense strand starting at position 443 of SEQ ID NO: 588176
ucuagaauccauggucacu

SEQ ID NO: 846947 - RNA, 19 nt, Artificial Sequence
  Description of Artificial Sequence: Synthetic oligonucleotide
  Antisense strand to SEQ ID NO: 846946
agugaccauggauucuaga

SEQ ID NO: 846948 - RNA, 19 nt, Artificial Sequence
  Description of Artificial Sequence: Synthetic oligonucleotide
  Sense strand starting at position 993 of SEQ ID NO: 588176
cagugaaaugugggugauc

SEQ ID NO: 846949 - RNA, 19 nt, Artificial Sequence
  Description of Artificial Sequence: Synthetic oligonucleotide
  Antisense strand to SEQ ID NO: 846948
gaucacccacauuucacug

SEQ ID NO: 846950 - RNA, 19 nt, Artificial Sequence
  Description of Artificial Sequence: Synthetic oligonucleotide
  Sense strand starting at position 1045 of SEQ ID NO: 588176
aggcauugugguuaaguac

SEQ ID NO: 846951 - RNA, 19 nt, Artificial Sequence
  Description of Artificial Sequence: Synthetic oligonucleotide
  Antisense strand to SEQ ID NO: 846950
guacuuaaccacaaugccu

SEQ ID NO: 846952 - RNA, 19 nt, Artificial Sequence
  Description of Artificial Sequence: Synthetic oligonucleotide
  Sense strand starting at position 1499 of SEQ ID NO: 588176
ucuugccuggcauauuauu

SEQ ID NO: 846953 - RNA, 19 nt, Artificial Sequence
  Description of Artificial Sequence: Synthetic oligonucleotide
  Antisense strand to SEQ ID NO: 846952
aauaauaugccaggcaaga

SEQ ID NO: 846954 - RNA, 19 nt, Artificial Sequence
  Description of Artificial Sequence: Synthetic oligonucleotide
  Sense strand starting at position 1505 of SEQ ID NO: 588176
cuggcauauuauucuuaga

SEQ ID NO: 846955 - RNA, 19 nt, Artificial Sequence
  Description of Artificial Sequence: Synthetic oligonucleotide
  Antisense strand to SEQ ID NO: 846954
ucuaagaauaauaugccag

SEQ ID NO: 846956 - RNA, 19 nt, Artificial Sequence
  Description of Artificial Sequence: Synthetic oligonucleotide
  Sense strand starting at position 1507 of SEQ ID NO: 588176
ggcauauuauucuuagagg

SEQ ID NO: 846957 - RNA, 19 nt, Artificial Sequence
  Description of Artificial Sequence: Synthetic oligonucleotide
  Antisense strand to SEQ ID NO: 846956
ccucuaagaauaauaugcc

SEQ ID NO: 846958 - RNA, 19 nt, Artificial Sequence
  Description of Artificial Sequence: Synthetic oligonucleotide
  Sense strand starting at position 2087 of SEQ ID NO: 588176
gguggaugcgucaggcuau

SEQ ID NO: 846959 - RNA, 19 nt, Artificial Sequence
  Description of Artificial Sequence: Synthetic oligonucleotide
  Antisense strand to SEQ ID NO: 846958
auagccugacgcauccacc

SEQ ID NO: 846960 - RNA, 19 nt, Artificial Sequence
  Description of Artificial Sequence: Synthetic oligonucleotide
  Sense strand starting at position 2093 of SEQ ID NO: 588176
ugcgucaggcuauaaauga

SEQ ID NO: 846961 - RNA, 19 nt, Artificial Sequence
  Description of Artificial Sequence: Synthetic oligonucleotide
  Antisense strand to SEQ ID NO: 846960
ucauuuauagccugacgca

SEQ ID NO: 846962 - RNA, 19 nt, Artificial Sequence
  Description of Artificial Sequence: Synthetic oligonucleotide
  Sense strand starting at position 2185 of SEQ ID NO: 588176
aauagccuugcugaggaaa

SEQ ID NO: 846963 - RNA, 19 nt, Artificial Sequence
  Description of Artificial Sequence: Synthetic oligonucleotide
  Antisense strand to SEQ ID NO: 846962
uuuccucagcaaggcuauu

SEQ ID NO: 846964 - RNA, 19 nt, Artificial Sequence
  Description of Artificial Sequence: Synthetic oligonucleotide
  Sense strand starting at position 2188 of SEQ ID NO: 588176
agccuugcugaggaaauua

SEQ ID NO: 846965 - RNA, 19 nt, Artificial Sequence
  Description of Artificial Sequence: Synthetic oligonucleotide
  Antisense strand to SEQ ID NO: 846964
uaauuuccucagcaaggcu

SEQ ID NO: 846966 - RNA, 19 nt, Artificial Sequence
  Description of Artificial Sequence: Synthetic oligonucleotide
  Sense strand starting at position 2347 of SEQ ID NO: 588176
ucauucugucuuuaauggu

SEQ ID NO: 846967 - RNA, 19 nt, Artificial Sequence
  Description of Artificial Sequence: Synthetic oligonucleotide
  Antisense strand to SEQ ID NO: 846966
accauuaaagacagaauga

SEQ ID NO: 846968 - RNA, 19 nt, Artificial Sequence
  Description of Artificial Sequence: Synthetic oligonucleotide
  Sense strand starting at position 2645 of SEQ ID NO: 588176
aagagagguuucuccauug

SEQ ID NO: 846969 - RNA, 19 nt, Artificial Sequence
  Description of Artificial Sequence: Synthetic oligonucleotide
  Antisense strand to SEQ ID NO: 846968
caauggagaaaccucucuu

SEQ ID NO: 846970 - RNA, 19 nt, Artificial Sequence
  Description of Artificial Sequence: Synthetic oligonucleotide
  Sense strand starting at position 2663 of SEQ ID NO: 588176
gguaccaugaguuggacua

SEQ ID NO: 846971 - RNA, 19 nt, Artificial Sequence
  Description of Artificial Sequence: Synthetic oligonucleotide
  Antisense strand to SEQ ID NO: 846970
uaguccaacucaugguacc

SEQ ID NO: 846972 - RNA, 19 nt, Artificial Sequence
  Description of Artificial Sequence: Synthetic oligonucleotide
  Sense strand starting at position 2673 of SEQ ID NO: 588176
guuggacuagauugauuga

SEQ ID NO: 846973 - RNA, 19 nt, Artificial Sequence
  Description of Artificial Sequence: Synthetic oligonucleotide
  Antisense strand to SEQ ID NO: 846972
ucaaucaaucuaguccaac

SEQ ID NO: 846974 - RNA, 19 nt, Artificial Sequence
  Description of Artificial Sequence: Synthetic oligonucleotide
  Sense strand starting at position 2718 of SEQ ID NO: 588176
ccuguuauggaccagguau

SEQ ID NO: 846975 - RNA, 19 nt, Artificial Sequence
  Description of Artificial Sequence: Synthetic oligonucleotide
  Antisense strand to SEQ ID NO: 846974
auaccugguccauaacagg

SEQ ID NO: 846976 - RNA, 19 nt, Artificial Sequence
  Description of Artificial Sequence: Synthetic oligonucleotide
  Sense strand starting at position 2745 of SEQ ID NO: 588176
gucuuuaaacugcagaagu

SEQ ID NO: 846977 - RNA, 19 nt, Artificial Sequence
  Description of Artificial Sequence: Synthetic oligonucleotide
  Antisense strand to SEQ ID NO: 846976
acuucugcaguuuaaagac

SEQ ID NO: 846978 - RNA, 19 nt, Artificial Sequence
  Description of Artificial Sequence: Synthetic oligonucleotide
  Sense strand starting at position 2747 of SEQ ID NO: 588176
cuuuaaacugcagaaguaa

SEQ ID NO: 846979 - RNA, 19 nt, Artificial Sequence
  Description of Artificial Sequence: Synthetic oligonucleotide
  Antisense strand to SEQ ID NO: 846978
uuacuucugcaguuuaaag

SEQ ID NO: 846980 - RNA, 19 nt, Artificial Sequence
  Description of Artificial Sequence: Synthetic oligonucleotide
  Sense strand starting at position 2764 of SEQ ID NO: 588176
aagauagagucuuugcacu

SEQ ID NO: 846981 - RNA, 19 nt, Artificial Sequence
  Description of Artificial Sequence: Synthetic oligonucleotide
  Antisense strand to SEQ ID NO: 846980
agugcaaagacucuaucuu

SEQ ID NO: 846982 - RNA, 19 nt, Artificial Sequence
  Description of Artificial Sequence: Synthetic oligonucleotide
  Sense strand starting at position 2766 of SEQ ID NO: 588176
gauagagucuuugcacuaa

SEQ ID NO: 846983 - RNA, 19 nt, Artificial Sequence
  Description of Artificial Sequence: Synthetic oligonucleotide
  Antisense strand to SEQ ID NO: 846982
uuagugcaaagacucuauc

SEQ ID NO: 846984 - RNA, 19 nt, Artificial Sequence
  Description of Artificial Sequence: Synthetic oligonucleotide
  Sense strand starting at position 2834 of SEQ ID NO: 588176
uagagaugcgcacagaguu

SEQ ID NO: 846985 - RNA, 19 nt, Artificial Sequence
  Description of Artificial Sequence: Synthetic oligonucleotide
  Antisense strand to SEQ ID NO: 846984
aacucugugcgcaucucua

SEQ ID NO: 846986 - RNA, 19 nt, Artificial Sequence
  Description of Artificial Sequence: Synthetic oligonucleotide
  Sense strand starting at position 2908 of SEQ ID NO: 588176
gggugcuucccagaggaga

SEQ ID NO: 846987 - RNA, 19 nt, Artificial Sequence
  Description of Artificial Sequence: Synthetic oligonucleotide
  Antisense strand to SEQ ID NO: 846986
ucuccucugggaagcaccc

SEQ ID NO: 846988 - RNA, 19 nt, Artificial Sequence
  Description of Artificial Sequence: Synthetic oligonucleotide
  Sense strand starting at position 3003 of SEQ ID NO: 588176
aggaacagccuguguaaau

SEQ ID NO: 846989 - RNA, 19 nt, Artificial Sequence
  Description of Artificial Sequence: Synthetic oligonucleotide
  Antisense strand to SEQ ID NO: 846988
auuuacacaggcuguuccu

SEQ ID NO: 846990 - RNA, 19 nt, Artificial Sequence
  Description of Artificial Sequence: Synthetic oligonucleotide
  Sense strand starting at position 3004 of SEQ ID NO: 588176
ggaacagccuguguaaaug

SEQ ID NO: 846991 - RNA, 19 nt, Artificial Sequence
  Description of Artificial Sequence: Synthetic oligonucleotide
  Antisense strand to SEQ ID NO: 846990
cauuuacacaggcuguucc

SEQ ID NO: 846992 - RNA, 19 nt, Artificial Sequence
  Description of Artificial Sequence: Synthetic oligonucleotide
  Sense strand starting at position 3237 of SEQ ID NO: 588176
gugucucggaaauaacauu

SEQ ID NO: 846993 - RNA, 19 nt, Artificial Sequence
  Description of Artificial Sequence: Synthetic oligonucleotide
  Antisense strand to SEQ ID NO: 846992
aauguuauuuccgagacac

SEQ ID NO: 846994 - RNA, 19 nt, Artificial Sequence
  Description of Artificial Sequence: Synthetic oligonucleotide
  Sense strand starting at position 3293 of SEQ ID NO: 588176
ugagucuugcuuuaguuaa

SEQ ID NO: 846995 - RNA, 19 nt, Artificial Sequence
  Description of Artificial Sequence: Synthetic oligonucleotide
  Antisense strand to SEQ ID NO: 846994
uuaacuaaagcaagacuca

SEQ ID NO: 846996 - RNA, 19 nt, Artificial Sequence
  Description of Artificial Sequence: Synthetic oligonucleotide
  Sense strand starting at position 3320 of SEQ ID NO: 588176
uaaagugaggccugaacca

SEQ ID NO: 846997 - RNA, 19 nt, Artificial Sequence
  Description of Artificial Sequence: Synthetic oligonucleotide
  Antisense strand to SEQ ID NO: 846996
ugguucaggccucacuuua

SEQ ID NO: 846998 - RNA, 19 nt, Artificial Sequence
  Description of Artificial Sequence: Synthetic oligonucleotide
  Sense strand starting at position 3333 of SEQ ID NO: 588176
gaaccaugucagugauggu

SEQ ID NO: 846999 - RNA, 19 nt, Artificial Sequence
  Description of Artificial Sequence: Synthetic oligonucleotide
  Antisense strand to SEQ ID NO: 846998
accaucacugacaugguuc

SEQ ID NO: 847000 - RNA, 19 nt, Artificial Sequence
  Description of Artificial Sequence: Synthetic oligonucleotide
  Sense strand starting at position 3346 of SEQ ID NO: 588176
gauggugggcaugggaaau

SEQ ID NO: 847001 - RNA, 19 nt, Artificial Sequence
  Description of Artificial Sequence: Synthetic oligonucleotide
  Antisense strand to SEQ ID NO: 847000
auuucccaugcccaccauc

SEQ ID NO: 847002 - RNA, 19 nt, Artificial Sequence
  Description of Artificial Sequence: Synthetic oligonucleotide
  Sense strand starting at position 3396 of SEQ ID NO: 588176
ugauuagacuuguuuacca

SEQ ID NO: 847003 - RNA, 19 nt, Artificial Sequence
  Description of Artificial Sequence: Synthetic oligonucleotide
  Antisense strand to SEQ ID NO: 847002
ugguaaacaagucuaauca

SEQ ID NO: 847004 - RNA, 19 nt, Artificial Sequence
  Description of Artificial Sequence: Synthetic oligonucleotide
  Sense strand starting at position 3469 of SEQ ID NO: 588176
ugggaaacuggauguuugu

SEQ ID NO: 847005 - RNA, 19 nt, Artificial Sequence
  Description of Artificial Sequence: Synthetic oligonucleotide
  Antisense strand to SEQ ID NO: 847004
acaaacauccaguuuccca

SEQ ID NO: 847006 - RNA, 19 nt, Artificial Sequence
  Description of Artificial Sequence: Synthetic oligonucleotide
  Sense strand starting at position 3719 of SEQ ID NO: 588176
gcauaaagaugaccuacuu

SEQ ID NO: 847007 - RNA, 19 nt, Artificial Sequence
  Description of Artificial Sequence: Synthetic oligonucleotide
  Antisense strand to SEQ ID NO: 847006
aaguaggucaucuuuaugc

SEQ ID NO: 847008 - RNA, 19 nt, Artificial Sequence
  Description of Artificial Sequence: Synthetic oligonucleotide
  Sense strand starting at position 3730 of SEQ ID NO: 588176
accuacuuauguguaacau

SEQ ID NO: 847009 - RNA, 19 nt, Artificial Sequence
  Description of Artificial Sequence: Synthetic oligonucleotide
  Antisense strand to SEQ ID NO: 847008
auguuacacauaaguaggu

SEQ ID NO: 847010 - RNA, 19 nt, Artificial Sequence
  Description of Artificial Sequence: Synthetic oligonucleotide
  Sense strand starting at position 3731 of SEQ ID NO: 588176
ccuacuuauguguaacauu

SEQ ID NO: 847011 - RNA, 19 nt, Artificial Sequence
  Description of Artificial Sequence: Synthetic oligonucleotide
  Antisense strand to SEQ ID NO: 847010
aauguuacacauaaguagg

SEQ ID NO: 847012 - RNA, 19 nt, Artificial Sequence
  Description of Artificial Sequence: Synthetic oligonucleotide
  Sense strand starting at position 1602 of SEQ ID NO: 588177
agugguaguuccugggaag

SEQ ID NO: 847013 - RNA, 19 nt, Artificial Sequence
  Description of Artificial Sequence: Synthetic oligonucleotide
  Antisense strand to SEQ ID NO: 847012
cuucccaggaacuaccacu

SEQ ID NO: 847014 - RNA, 19 nt, Artificial Sequence
  Description of Artificial Sequence: Synthetic oligonucleotide
  Sense strand starting at position 1603 of SEQ ID NO: 588177
gugguaguuccugggaagu

SEQ ID NO: 847015 - RNA, 19 nt, Artificial Sequence
  Description of Artificial Sequence: Synthetic oligonucleotide
  Antisense strand to SEQ ID NO: 847014
acuucccaggaacuaccac

SEQ ID NO: 847016 - RNA, 19 nt, Artificial Sequence
  Description of Artificial Sequence: Synthetic oligonucleotide
  Sense strand starting at position 1605 of SEQ ID NO: 588177
gguaguuccugggaaguag

SEQ ID NO: 847017 - RNA, 19 nt, Artificial Sequence
  Description of Artificial Sequence: Synthetic oligonucleotide
  Antisense strand to SEQ ID NO: 847016
cuacuucccaggaacuacc

SEQ ID NO: 847018 - RNA, 19 nt, Artificial Sequence
  Description of Artificial Sequence: Synthetic oligonucleotide
  Sense strand starting at position 1662 of SEQ ID NO: 588177
caagguuugcuaugaggca

SEQ ID NO: 847019 - RNA, 19 nt, Artificial Sequence
  Description of Artificial Sequence: Synthetic oligonucleotide
  Antisense strand to SEQ ID NO: 847018
ugccucauagcaaaccuug

SEQ ID NO: 847020 - RNA, 19 nt, Artificial Sequence
  Description of Artificial Sequence: Synthetic oligonucleotide
  Sense strand starting at position 1689 of SEQ ID NO: 588177
gcuccauauccagagugga

SEQ ID NO: 847021 - RNA, 19 nt, Artificial Sequence
  Description of Artificial Sequence: Synthetic oligonucleotide
  Antisense strand to SEQ ID NO: 847020
uccacucuggauauggagc

SEQ ID NO: 847022 - RNA, 19 nt, Artificial Sequence
  Description of Artificial Sequence: Synthetic oligonucleotide
  Sense strand starting at position 1703 of SEQ ID NO: 588177
guggacaguuacucaccua

SEQ ID NO: 847023 - RNA, 19 nt, Artificial Sequence
  Description of Artificial Sequence: Synthetic oligonucleotide
  Antisense strand to SEQ ID NO: 847022
uaggugaguaacuguccac

SEQ ID NO: 847024 - RNA, 19 nt, Artificial Sequence
  Description of Artificial Sequence: Synthetic oligonucleotide
  Sense strand starting at position 1760 of SEQ ID NO: 588177
ucuaguguuaauggucauu

SEQ ID NO: 847025 - RNA, 19 nt, Artificial Sequence
  Description of Artificial Sequence: Synthetic oligonucleotide
  Antisense strand to SEQ ID NO: 847024
aaugaccauuaacacuaga

SEQ ID NO: 847026 - RNA, 19 nt, Artificial Sequence
  Description of Artificial Sequence: Synthetic oligonucleotide
  Sense strand starting at position 1762 of SEQ ID NO: 588177
uaguguuaauggucauuac

SEQ ID NO: 847027 - RNA, 19 nt, Artificial Sequence
  Description of Artificial Sequence: Synthetic oligonucleotide
  Antisense strand to SEQ ID NO: 847026
guaaugaccauuaacacua

SEQ ID NO: 847028 - RNA, 19 nt, Artificial Sequence
  Description of Artificial Sequence: Synthetic oligonucleotide
  Sense strand starting at position 1765 of SEQ ID NO: 588177
uguuaauggucauuaccca

SEQ ID NO: 847029 - RNA, 19 nt, Artificial Sequence
  Description of Artificial Sequence: Synthetic oligonucleotide
  Antisense strand to SEQ ID NO: 847028
uggguaaugaccauuaaca

SEQ ID NO: 847030 - RNA, 19 nt, Artificial Sequence
  Description of Artificial Sequence: Synthetic oligonucleotide
  Sense strand starting at position 1794 of SEQ ID NO: 588177
ggagaucaguauucccuca

SEQ ID NO: 847031 - RNA, 19 nt, Artificial Sequence
  Description of Artificial Sequence: Synthetic oligonucleotide
  Antisense strand to SEQ ID NO: 847030
ugagggaauacugaucucc

SEQ ID NO: 847032 - RNA, 19 nt, Artificial Sequence
  Description of Artificial Sequence: Synthetic oligonucleotide
  Sense strand starting at position 1796 of SEQ ID NO: 588177
agaucaguauucccucauu

SEQ ID NO: 847033 - RNA, 19 nt, Artificial Sequence
  Description of Artificial Sequence: Synthetic oligonucleotide
  Antisense strand to SEQ ID NO: 847032
aaugagggaauacugaucu

SEQ ID NO: 847034 - RNA, 19 nt, Artificial Sequence
  Description of Artificial Sequence: Synthetic oligonucleotide
  Sense strand starting at position 1820 of SEQ ID NO: 588177
ucuagaauccauggucacu

SEQ ID NO: 847035 - RNA, 19 nt, Artificial Sequence
  Description of Artificial Sequence: Synthetic oligonucleotide
  Antisense strand to SEQ ID NO: 847034
agugaccauggauucuaga

SEQ ID NO: 847036 - RNA, 19 nt, Artificial Sequence
  Description of Artificial Sequence: Synthetic oligonucleotide
  Sense strand starting at position 1851 of SEQ ID NO: 588177
aaucuagugucagugguua

SEQ ID NO: 847037 - RNA, 19 nt, Artificial Sequence
  Description of Artificial Sequence: Synthetic oligonucleotide
  Antisense strand to SEQ ID NO: 847036
uaaccacugacacuagauu

SEQ ID NO: 847038 - RNA, 19 nt, Artificial Sequence
  Description of Artificial Sequence: Synthetic oligonucleotide
  Sense strand starting at position 1853 of SEQ ID NO: 588177
ucuagugucagugguuacu

SEQ ID NO: 847039 - RNA, 19 nt, Artificial Sequence
  Description of Artificial Sequence: Synthetic oligonucleotide
  Antisense strand to SEQ ID NO: 847038
aguaaccacugacacuaga

SEQ ID NO: 847040 - RNA, 19 nt, Artificial Sequence
  Description of Artificial Sequence: Synthetic oligonucleotide
  Sense strand starting at position 1855 of SEQ ID NO: 588177
uagugucagugguuacuca

SEQ ID NO: 847041 - RNA, 19 nt, Artificial Sequence
  Description of Artificial Sequence: Synthetic oligonucleotide
  Antisense strand to SEQ ID NO: 847040
ugaguaaccacugacacua

SEQ ID NO: 847042 - RNA, 19 nt, Artificial Sequence
  Description of Artificial Sequence: Synthetic oligonucleotide
  Sense strand starting at position 1891 of SEQ ID NO: 588177
ggcuuauagucacucaccu

SEQ ID NO: 847043 - RNA, 19 nt, Artificial Sequence
  Description of Artificial Sequence: Synthetic oligonucleotide
  Antisense strand to SEQ ID NO: 847042
aggugagugacuauaagcc

SEQ ID NO: 847044 - RNA, 19 nt, Artificial Sequence
  Description of Artificial Sequence: Synthetic oligonucleotide
  Sense strand starting at position 2248 of SEQ ID NO: 588177
aggucaucauugcaucaca

SEQ ID NO: 847045 - RNA, 19 nt, Artificial Sequence
  Description of Artificial Sequence: Synthetic oligonucleotide
  Antisense strand to SEQ ID NO: 847044
ugugaugcaaugaugaccu

SEQ ID NO: 847046 - RNA, 19 nt, Artificial Sequence
  Description of Artificial Sequence: Synthetic oligonucleotide
  Sense strand starting at position 2370 of SEQ ID NO: 588177
cagugaaaugugggugauc

SEQ ID NO: 847047 - RNA, 19 nt, Artificial Sequence
  Description of Artificial Sequence: Synthetic oligonucleotide
  Antisense strand to SEQ ID NO: 847046
gaucacccacauuucacug

SEQ ID NO: 847048 - RNA, 19 nt, Artificial Sequence
  Description of Artificial Sequence: Synthetic oligonucleotide
  Sense strand starting at position 2421 of SEQ ID NO: 588177
caggcauugugguuaagua

SEQ ID NO: 847049 - RNA, 19 nt, Artificial Sequence
  Description of Artificial Sequence: Synthetic oligonucleotide
  Antisense strand to SEQ ID NO: 847048
uacuuaaccacaaugccug

SEQ ID NO: 847050 - RNA, 19 nt, Artificial Sequence
  Description of Artificial Sequence: Synthetic oligonucleotide
  Sense strand starting at position 2422 of SEQ ID NO: 588177
aggcauugugguuaaguac

SEQ ID NO: 847051 - RNA, 19 nt, Artificial Sequence
  Description of Artificial Sequence: Synthetic oligonucleotide
  Antisense strand to SEQ ID NO: 847050
guacuuaaccacaaugccu

SEQ ID NO: 847052 - RNA, 19 nt, Artificial Sequence
  Description of Artificial Sequence: Synthetic oligonucleotide
  Sense strand starting at position 2440 of SEQ ID NO: 588177
cauggauucuagcaccgaa

SEQ ID NO: 847053 - RNA, 19 nt, Artificial Sequence
  Description of Artificial Sequence: Synthetic oligonucleotide
  Antisense strand to SEQ ID NO: 847052
uucggugcuagaauccaug

SEQ ID NO: 847054 - RNA, 19 nt, Artificial Sequence
  Description of Artificial Sequence: Synthetic oligonucleotide
  Sense strand starting at position 2872 of SEQ ID NO: 588177
accaucuugccuggcauau

SEQ ID NO: 847055 - RNA, 19 nt, Artificial Sequence
  Description of Artificial Sequence: Synthetic oligonucleotide
  Antisense strand to SEQ ID NO: 847054
auaugccaggcaagauggu

SEQ ID NO: 847056 - RNA, 19 nt, Artificial Sequence
  Description of Artificial Sequence: Synthetic oligonucleotide
  Sense strand starting at position 2876 of SEQ ID NO: 588177
ucuugccuggcauauuauu

SEQ ID NO: 847057 - RNA, 19 nt, Artificial Sequence
  Description of Artificial Sequence: Synthetic oligonucleotide
  Antisense strand to SEQ ID NO: 847056
aauaauaugccaggcaaga

SEQ ID NO: 847058 - RNA, 19 nt, Artificial Sequence
  Description of Artificial Sequence: Synthetic oligonucleotide
  Sense strand starting at position 2882 of SEQ ID NO: 588177
cuggcauauuauucuuaga

SEQ ID NO: 847059 - RNA, 19 nt, Artificial Sequence
  Description of Artificial Sequence: Synthetic oligonucleotide
  Antisense strand to SEQ ID NO: 847058
ucuaagaauaauaugccag

SEQ ID NO: 847060 - RNA, 19 nt, Artificial Sequence
  Description of Artificial Sequence: Synthetic oligonucleotide
  Sense strand starting at position 2884 of SEQ ID NO: 588177
ggcauauuauucuuagagg

SEQ ID NO: 847061 - RNA, 19 nt, Artificial Sequence
  Description of Artificial Sequence: Synthetic oligonucleotide
  Antisense strand to SEQ ID NO: 847060
ccucuaagaauaauaugcc

SEQ ID NO: 847062 - RNA, 19 nt, Artificial Sequence
  Description of Artificial Sequence: Synthetic oligonucleotide
  Sense strand starting at position 2887 of SEQ ID NO: 588177
auauuauucuuagaggcaa

SEQ ID NO: 847063 - RNA, 19 nt, Artificial Sequence
  Description of Artificial Sequence: Synthetic oligonucleotide
  Antisense strand to SEQ ID NO: 847062
uugccucuaagaauaauau

SEQ ID NO: 847064 - RNA, 19 nt, Artificial Sequence
  Description of Artificial Sequence: Synthetic oligonucleotide
  Sense strand starting at position 2899 of SEQ ID NO: 588177
gaggcaaggucucauugua

SEQ ID NO: 847065 - RNA, 19 nt, Artificial Sequence
  Description of Artificial Sequence: Synthetic oligonucleotide
  Antisense strand to SEQ ID NO: 847064
uacaaugagaccuugccuc

SEQ ID NO: 847066 - RNA, 19 nt, Artificial Sequence
  Description of Artificial Sequence: Synthetic oligonucleotide
  Sense strand starting at position 3464 of SEQ ID NO: 588177
gguggaugcgucaggcuau

SEQ ID NO: 847067 - RNA, 19 nt, Artificial Sequence
  Description of Artificial Sequence: Synthetic oligonucleotide
  Antisense strand to SEQ ID NO: 847066
auagccugacgcauccacc

SEQ ID NO: 847068 - RNA, 19 nt, Artificial Sequence
  Description of Artificial Sequence: Synthetic oligonucleotide
  Sense strand starting at position 3470 of SEQ ID NO: 588177
ugcgucaggcuauaaauga

SEQ ID NO: 847069 - RNA, 19 nt, Artificial Sequence
  Description of Artificial Sequence: Synthetic oligonucleotide
  Antisense strand to SEQ ID NO: 847068
ucauuuauagccugacgca

SEQ ID NO: 847070 - RNA, 19 nt, Artificial Sequence
  Description of Artificial Sequence: Synthetic oligonucleotide
  Sense strand starting at position 3505 of SEQ ID NO: 588177
cgguguacucuucauggca

SEQ ID NO: 847071 - RNA, 19 nt, Artificial Sequence
  Description of Artificial Sequence: Synthetic oligonucleotide
  Antisense strand to SEQ ID NO: 847070
ugccaugaagaguacaccg

SEQ ID NO: 847072 - RNA, 19 nt, Artificial Sequence
  Description of Artificial Sequence: Synthetic oligonucleotide
  Sense strand starting at position 3562 of SEQ ID NO: 588177
aauagccuugcugaggaaa

SEQ ID NO: 847073 - RNA, 19 nt, Artificial Sequence
  Description of Artificial Sequence: Synthetic oligonucleotide
  Antisense strand to SEQ ID NO: 847072
uuuccucagcaaggcuauu

SEQ ID NO: 847074 - RNA, 19 nt, Artificial Sequence
  Description of Artificial Sequence: Synthetic oligonucleotide
  Sense strand starting at position 3565 of SEQ ID NO: 588177
agccuugcugaggaaauua

SEQ ID NO: 847075 - RNA, 19 nt, Artificial Sequence
  Description of Artificial Sequence: Synthetic oligonucleotide
  Antisense strand to SEQ ID NO: 847074
uaauuuccucagcaaggcu

SEQ ID NO: 847076 - RNA, 19 nt, Artificial Sequence
  Description of Artificial Sequence: Synthetic oligonucleotide
  Sense strand starting at position 3706 of SEQ ID NO: 588177
gguuucuaauuauaagcuu

SEQ ID NO: 847077 - RNA, 19 nt, Artificial Sequence
  Description of Artificial Sequence: Synthetic oligonucleotide
  Antisense strand to SEQ ID NO: 847076
aagcuuauaauuagaaacc

SEQ ID NO: 847078 - RNA, 19 nt, Artificial Sequence
  Description of Artificial Sequence: Synthetic oligonucleotide
  Sense strand starting at position 3724 of SEQ ID NO: 588177
ucauucugucuuuaauggu

SEQ ID NO: 847079 - RNA, 19 nt, Artificial Sequence
  Description of Artificial Sequence: Synthetic oligonucleotide
  Antisense strand to SEQ ID NO: 847078
accauuaaagacagaauga

SEQ ID NO: 847080 - RNA, 19 nt, Artificial Sequence
  Description of Artificial Sequence: Synthetic oligonucleotide
  Sense strand starting at position 3767 of SEQ ID NO: 588177
gcucgugucagcugugaac

SEQ ID NO: 847081 - RNA, 19 nt, Artificial Sequence
  Description of Artificial Sequence: Synthetic oligonucleotide
  Antisense strand to SEQ ID NO: 847080
guucacagcugacacgagc

SEQ ID NO: 847082 - RNA, 19 nt, Artificial Sequence
  Description of Artificial Sequence: Synthetic oligonucleotide
  Sense strand starting at position 3776 of SEQ ID NO: 588177
agcugugaacugugaagca

SEQ ID NO: 847083 - RNA, 19 nt, Artificial Sequence
  Description of Artificial Sequence: Synthetic oligonucleotide
  Antisense strand to SEQ ID NO: 847082
ugcuucacaguucacagcu

SEQ ID NO: 847084 - RNA, 19 nt, Artificial Sequence
  Description of Artificial Sequence: Synthetic oligonucleotide
  Sense strand starting at position 3799 of SEQ ID NO: 588177
uguuaaggaugacaaauaa

SEQ ID NO: 847085 - RNA, 19 nt, Artificial Sequence
  Description of Artificial Sequence: Synthetic oligonucleotide
  Antisense strand to SEQ ID NO: 847084
uuauuugucauccuuaaca

SEQ ID NO: 847086 - RNA, 19 nt, Artificial Sequence
  Description of Artificial Sequence: Synthetic oligonucleotide
  Sense strand starting at position 3814 of SEQ ID NO: 588177
auaaaugugcuuugccauu

SEQ ID NO: 847087 - RNA, 19 nt, Artificial Sequence
  Description of Artificial Sequence: Synthetic oligonucleotide
  Antisense strand to SEQ ID NO: 847086
aauggcaaagcacauuuau

SEQ ID NO: 847088 - RNA, 19 nt, Artificial Sequence
  Description of Artificial Sequence: Synthetic oligonucleotide
  Sense strand starting at position 3925 of SEQ ID NO: 588177
gcugauuuguucuggugga

SEQ ID NO: 847089 - RNA, 19 nt, Artificial Sequence
  Description of Artificial Sequence: Synthetic oligonucleotide
  Antisense strand to SEQ ID NO: 847088
uccaccagaacaaaucagc

SEQ ID NO: 847090 - RNA, 19 nt, Artificial Sequence
  Description of Artificial Sequence: Synthetic oligonucleotide
  Sense strand starting at position 3926 of SEQ ID NO: 588177
cugauuuguucugguggaa

SEQ ID NO: 847091 - RNA, 19 nt, Artificial Sequence
  Description of Artificial Sequence: Synthetic oligonucleotide
  Antisense strand to SEQ ID NO: 847090
uuccaccagaacaaaucag

SEQ ID NO: 847092 - RNA, 19 nt, Artificial Sequence
  Description of Artificial Sequence: Synthetic oligonucleotide
  Sense strand starting at position 221 of SEQ ID NO: 588178
ggugauuuaugguaugacu

SEQ ID NO: 847093 - RNA, 19 nt, Artificial Sequence
  Description of Artificial Sequence: Synthetic oligonucleotide
  Antisense strand to SEQ ID NO: 847092
agucauaccauaaaucacc

SEQ ID NO: 847094 - RNA, 19 nt, Artificial Sequence
  Description of Artificial Sequence: Synthetic oligonucleotide
  Sense strand starting at position 224 of SEQ ID NO: 588178
gauuuaugguaugacucaa

SEQ ID NO: 847095 - RNA, 19 nt, Artificial Sequence
  Description of Artificial Sequence: Synthetic oligonucleotide
  Antisense strand to SEQ ID NO: 847094
uugagucauaccauaaauc

SEQ ID NO: 847096 - RNA, 19 nt, Artificial Sequence
  Description of Artificial Sequence: Synthetic oligonucleotide
  Sense strand starting at position 297 of SEQ ID NO: 588178
ugagguaagcccuauauga

SEQ ID NO: 847097 - RNA, 19 nt, Artificial Sequence
  Description of Artificial Sequence: Synthetic oligonucleotide
  Antisense strand to SEQ ID NO: 847096
ucauauagggcuuaccuca

SEQ ID NO: 847098 - RNA, 19 nt, Artificial Sequence
  Description of Artificial Sequence: Synthetic oligonucleotide
  Sense strand starting at position 434 of SEQ ID NO: 588178
aagguaaacuuguuggaaa

SEQ ID NO: 847099 - RNA, 19 nt, Artificial Sequence
  Description of Artificial Sequence: Synthetic oligonucleotide
  Antisense strand to SEQ ID NO: 847098
uuuccaacaaguuuaccuu

SEQ ID NO: 847100 - RNA, 19 nt, Artificial Sequence
  Description of Artificial Sequence: Synthetic oligonucleotide
  Sense strand starting at position 540 of SEQ ID NO: 588178
gccuuagggcuagagucaa

SEQ ID NO: 847101 - RNA, 19 nt, Artificial Sequence
  Description of Artificial Sequence: Synthetic oligonucleotide
  Antisense strand to SEQ ID NO: 847100
uugacucuagcccuaaggc

SEQ ID NO: 847102 - RNA, 19 nt, Artificial Sequence
  Description of Artificial Sequence: Synthetic oligonucleotide
  Sense strand starting at position 595 of SEQ ID NO: 588178
agacaagauuugugacuuc

SEQ ID NO: 847103 - RNA, 19 nt, Artificial Sequence
  Description of Artificial Sequence: Synthetic oligonucleotide
  Antisense strand to SEQ ID NO: 847102
gaagucacaaaucuugucu

SEQ ID NO: 847104 - RNA, 19 nt, Artificial Sequence
  Description of Artificial Sequence: Synthetic oligonucleotide
  Sense strand starting at position 776 of SEQ ID NO: 588178
uggucacugugauauuuaa

SEQ ID NO: 847105 - RNA, 19 nt, Artificial Sequence
  Description of Artificial Sequence: Synthetic oligonucleotide
  Antisense strand to SEQ ID NO: 847104
uuaaauaucacagugacca

SEQ ID NO: 847106 - RNA, 19 nt, Artificial Sequence
  Description of Artificial Sequence: Synthetic oligonucleotide
  Sense strand starting at position 868 of SEQ ID NO: 588178
gaacuuacacgagggaagu

SEQ ID NO: 847107 - RNA, 19 nt, Artificial Sequence
  Description of Artificial Sequence: Synthetic oligonucleotide
  Antisense strand to SEQ ID NO: 847106
acuucccucguguaaguuc

SEQ ID NO: 847108 - RNA, 19 nt, Artificial Sequence
  Description of Artificial Sequence: Synthetic oligonucleotide
  Sense strand starting at position 1035 of SEQ ID NO: 588178
uuuaaauguggccaacuaa

SEQ ID NO: 847109 - RNA, 19 nt, Artificial Sequence
  Description of Artificial Sequence: Synthetic oligonucleotide
  Antisense strand to SEQ ID NO: 847108
uuaguuggccacauuuaaa

SEQ ID NO: 847110 - RNA, 19 nt, Artificial Sequence
  Description of Artificial Sequence: Synthetic oligonucleotide
  Sense strand starting at position 1107 of SEQ ID NO: 588178
ggccuuaaccagugggaga

SEQ ID NO: 847111 - RNA, 19 nt, Artificial Sequence
  Description of Artificial Sequence: Synthetic oligonucleotide
  Antisense strand to SEQ ID NO: 847110
ucucccacugguuaaggcc

SEQ ID NO: 847112 - RNA, 19 nt, Artificial Sequence
  Description of Artificial Sequence: Synthetic oligonucleotide
  Sense strand starting at position 1108 of SEQ ID NO: 588178
gccuuaaccagugggagau

SEQ ID NO: 847113 - RNA, 19 nt, Artificial Sequence
  Description of Artificial Sequence: Synthetic oligonucleotide
  Antisense strand to SEQ ID NO: 847112
aucucccacugguuaaggc

SEQ ID NO: 847114 - RNA, 19 nt, Artificial Sequence
  Description of Artificial Sequence: Synthetic oligonucleotide
  Sense strand starting at position 1156 of SEQ ID NO: 588178
ucuuguauguagccuagaa

SEQ ID NO: 847115 - RNA, 19 nt, Artificial Sequence
  Description of Artificial Sequence: Synthetic oligonucleotide
  Antisense strand to SEQ ID NO: 847114
uucuaggcuacauacaaga

SEQ ID NO: 847116 - RNA, 19 nt, Artificial Sequence
  Description of Artificial Sequence: Synthetic oligonucleotide
  Sense strand starting at position 1237 of SEQ ID NO: 588178
ggaggcugguccucuaaau

SEQ ID NO: 847117 - RNA, 19 nt, Artificial Sequence
  Description of Artificial Sequence: Synthetic oligonucleotide
  Antisense strand to SEQ ID NO: 847116
auuuagaggaccagccucc

SEQ ID NO: 847118 - RNA, 19 nt, Artificial Sequence
  Description of Artificial Sequence: Synthetic oligonucleotide
  Sense strand starting at position 1322 of SEQ ID NO: 588178
augugauuuccaggccucu

SEQ ID NO: 847119 - RNA, 19 nt, Artificial Sequence
  Description of Artificial Sequence: Synthetic oligonucleotide
  Antisense strand to SEQ ID NO: 847118
agaggccuggaaaucacau

SEQ ID NO: 847120 - RNA, 19 nt, Artificial Sequence
  Description of Artificial Sequence: Synthetic oligonucleotide
  Sense strand starting at position 1380 of SEQ ID NO: 588178
cucugugugaaugagcuaa

SEQ ID NO: 847121 - RNA, 19 nt, Artificial Sequence
  Description of Artificial Sequence: Synthetic oligonucleotide
  Antisense strand to SEQ ID NO: 847120
uuagcucauucacacagag

SEQ ID NO: 847122 - RNA, 19 nt, Artificial Sequence
  Description of Artificial Sequence: Synthetic oligonucleotide
  Sense strand starting at position 1772 of SEQ ID NO: 588178
ggacuucgcucaccaggaa

SEQ ID NO: 847123 - RNA, 19 nt, Artificial Sequence
  Description of Artificial Sequence: Synthetic oligonucleotide
  Antisense strand to SEQ ID NO: 847122
uuccuggugagcgaagucc

SEQ ID NO: 847124 - RNA, 19 nt, Artificial Sequence
  Description of Artificial Sequence: Synthetic oligonucleotide
  Sense strand starting at position 1773 of SEQ ID NO: 588178
gacuucgcucaccaggaau

SEQ ID NO: 847125 - RNA, 19 nt, Artificial Sequence
  Description of Artificial Sequence: Synthetic oligonucleotide
  Antisense strand to SEQ ID NO: 847124
auuccuggugagcgaaguc

SEQ ID NO: 847126 - RNA, 19 nt, Artificial Sequence
  Description of Artificial Sequence: Synthetic oligonucleotide
  Sense strand starting at position 2092 of SEQ ID NO: 588178
uuccuagacguugucguua

SEQ ID NO: 847127 - RNA, 19 nt, Artificial Sequence
  Description of Artificial Sequence: Synthetic oligonucleotide
  Antisense strand to SEQ ID NO: 847126
uaacgacaacgucuaggaa

SEQ ID NO: 847128 - RNA, 19 nt, Artificial Sequence
  Description of Artificial Sequence: Synthetic oligonucleotide
  Sense strand starting at position 2101 of SEQ ID NO: 588178
guugucguuacugauaaga

SEQ ID NO: 847129 - RNA, 19 nt, Artificial Sequence
  Description of Artificial Sequence: Synthetic oligonucleotide
  Antisense strand to SEQ ID NO: 847128
ucuuaucaguaacgacaac

SEQ ID NO: 847130 - RNA, 19 nt, Artificial Sequence
  Description of Artificial Sequence: Synthetic oligonucleotide
  Sense strand starting at position 2156 of SEQ ID NO: 588178
gggcuacacaggugaugaa

SEQ ID NO: 847131 - RNA, 19 nt, Artificial Sequence
  Description of Artificial Sequence: Synthetic oligonucleotide
  Antisense strand to SEQ ID NO: 847130
uucaucaccuguguagccc

SEQ ID NO: 847132 - RNA, 19 nt, Artificial Sequence
  Description of Artificial Sequence: Synthetic oligonucleotide
  Sense strand starting at position 2233 of SEQ ID NO: 588178
guggcugagcgcaguuauu

SEQ ID NO: 847133 - RNA, 19 nt, Artificial Sequence
  Description of Artificial Sequence: Synthetic oligonucleotide
  Antisense strand to SEQ ID NO: 847132
aauaacugcgcucagccac

SEQ ID NO: 847134 - RNA, 19 nt, Artificial Sequence
  Description of Artificial Sequence: Synthetic oligonucleotide
  Sense strand starting at position 2317 of SEQ ID NO: 588178
ucgggcugucuuuagagaa

SEQ ID NO: 847135 - RNA, 19 nt, Artificial Sequence
  Description of Artificial Sequence: Synthetic oligonucleotide
  Antisense strand to SEQ ID NO: 847134
uucucuaaagacagcccga

SEQ ID NO: 847136 - RNA, 19 nt, Artificial Sequence
  Description of Artificial Sequence: Synthetic oligonucleotide
  Sense strand starting at position 2321 of SEQ ID NO: 588178
gcugucuuuagagaaguuc

SEQ ID NO: 847137 - RNA, 19 nt, Artificial Sequence
  Description of Artificial Sequence: Synthetic oligonucleotide
  Antisense strand to SEQ ID NO: 847136
gaacuucucuaaagacagc

SEQ ID NO: 847138 - RNA, 19 nt, Artificial Sequence
  Description of Artificial Sequence: Synthetic oligonucleotide
  Sense strand starting at position 2708 of SEQ ID NO: 588178
acaccuucugcuuacgagu

SEQ ID NO: 847139 - RNA, 19 nt, Artificial Sequence
  Description of Artificial Sequence: Synthetic oligonucleotide
  Antisense strand to SEQ ID NO: 847138
acucguaagcagaaggugu

SEQ ID NO: 847140 - RNA, 19 nt, Artificial Sequence
  Description of Artificial Sequence: Synthetic oligonucleotide
  Sense strand starting at position 2775 of SEQ ID NO: 588178
acccaaaguuugucauucu

SEQ ID NO: 847141 - RNA, 19 nt, Artificial Sequence
  Description of Artificial Sequence: Synthetic oligonucleotide
  Antisense strand to SEQ ID NO: 847140
agaaugacaaacuuugggu

SEQ ID NO: 847142 - RNA, 19 nt, Artificial Sequence
  Description of Artificial Sequence: Synthetic oligonucleotide
  Sense strand starting at position 3002 of SEQ ID NO: 588178
gcaagacucuagguacagu

SEQ ID NO: 847143 - RNA, 19 nt, Artificial Sequence
  Description of Artificial Sequence: Synthetic oligonucleotide
  Antisense strand to SEQ ID NO: 847142
acuguaccuagagucuugc

SEQ ID NO: 847144 - RNA, 19 nt, Artificial Sequence
  Description of Artificial Sequence: Synthetic oligonucleotide
  Sense strand starting at position 3080 of SEQ ID NO: 588178
gauauuucgugacaacaca

SEQ ID NO: 847145 - RNA, 19 nt, Artificial Sequence
  Description of Artificial Sequence: Synthetic oligonucleotide
  Antisense strand to SEQ ID NO: 847144
uguguugucacgaaauauc

SEQ ID NO: 847146 - RNA, 19 nt, Artificial Sequence
  Description of Artificial Sequence: Synthetic oligonucleotide
  Sense strand starting at position 3120 of SEQ ID NO: 588178
guguguuauaugugggaag

SEQ ID NO: 847147 - RNA, 19 nt, Artificial Sequence
  Description of Artificial Sequence: Synthetic oligonucleotide
  Antisense strand to SEQ ID NO: 847146
cuucccacauauaacacac

SEQ ID NO: 847148 - RNA, 19 nt, Artificial Sequence
  Description of Artificial Sequence: Synthetic oligonucleotide
  Sense strand starting at position 3122 of SEQ ID NO: 588178
guguuauaugugggaagga

SEQ ID NO: 847149 - RNA, 19 nt, Artificial Sequence
  Description of Artificial Sequence: Synthetic oligonucleotide
  Antisense strand to SEQ ID NO: 847148
uccuucccacauauaacac

SEQ ID NO: 847150 - RNA, 19 nt, Artificial Sequence
  Description of Artificial Sequence: Synthetic oligonucleotide
  Sense strand starting at position 3163 of SEQ ID NO: 588178
gaaguuauuggauagcugu

SEQ ID NO: 847151 - RNA, 19 nt, Artificial Sequence
  Description of Artificial Sequence: Synthetic oligonucleotide
  Antisense strand to SEQ ID NO: 847150
acagcuauccaauaacuuc

SEQ ID NO: 847152 - RNA, 19 nt, Artificial Sequence
  Description of Artificial Sequence: Synthetic oligonucleotide
  Sense strand starting at position 3169 of SEQ ID NO: 588178
auuggauagcuguguuaca

SEQ ID NO: 847153 - RNA, 19 nt, Artificial Sequence
  Description of Artificial Sequence: Synthetic oligonucleotide
  Antisense strand to SEQ ID NO: 847152
uguaacacagcuauccaau

SEQ ID NO: 847154 - RNA, 19 nt, Artificial Sequence
  Description of Artificial Sequence: Synthetic oligonucleotide
  Sense strand starting at position 3176 of SEQ ID NO: 588178
agcuguguuacagaagaaa

SEQ ID NO: 847155 - RNA, 19 nt, Artificial Sequence
  Description of Artificial Sequence: Synthetic oligonucleotide
  Antisense strand to SEQ ID NO: 847154
uuucuucuguaacacagcu

SEQ ID NO: 847156 - RNA, 19 nt, Artificial Sequence
  Description of Artificial Sequence: Synthetic oligonucleotide
  Sense strand starting at position 3311 of SEQ ID NO: 588178
gccuuagucgaguaccuga

SEQ ID NO: 847157 - RNA, 19 nt, Artificial Sequence
  Description of Artificial Sequence: Synthetic oligonucleotide
  Antisense strand to SEQ ID NO: 847156
ucagguacucgacuaaggc

SEQ ID NO: 847158 - RNA, 19 nt, Artificial Sequence
  Description of Artificial Sequence: Synthetic oligonucleotide
  Sense strand starting at position 3426 of SEQ ID NO: 588178
guuugauuaccuuagguuu

SEQ ID NO: 847159 - RNA, 19 nt, Artificial Sequence
  Description of Artificial Sequence: Synthetic oligonucleotide
  Antisense strand to SEQ ID NO: 847158
aaaccuaagguaaucaaac

SEQ ID NO: 847160 - RNA, 19 nt, Artificial Sequence
  Description of Artificial Sequence: Synthetic oligonucleotide
  Sense strand starting at position 3455 of SEQ ID NO: 588178
agugucuuacuugaggaag

SEQ ID NO: 847161 - RNA, 19 nt, Artificial Sequence
  Description of Artificial Sequence: Synthetic oligonucleotide
  Antisense strand to SEQ ID NO: 847160
cuuccucaaguaagacacu

SEQ ID NO: 847162 - RNA, 19 nt, Artificial Sequence
  Description of Artificial Sequence: Synthetic oligonucleotide
  Sense strand starting at position 3530 of SEQ ID NO: 588178
acaaauagauucucgguuu

SEQ ID NO: 847163 - RNA, 19 nt, Artificial Sequence
  Description of Artificial Sequence: Synthetic oligonucleotide
  Antisense strand to SEQ ID NO: 847162
aaaccgagaaucuauuugu

SEQ ID NO: 847164 - RNA, 19 nt, Artificial Sequence
  Description of Artificial Sequence: Synthetic oligonucleotide
  Sense strand starting at position 3533 of SEQ ID NO: 588178
aauagauucucgguuuaua

SEQ ID NO: 847165 - RNA, 19 nt, Artificial Sequence
  Description of Artificial Sequence: Synthetic oligonucleotide
  Antisense strand to SEQ ID NO: 847164
uauaaaccgagaaucuauu

SEQ ID NO: 847166 - RNA, 19 nt, Artificial Sequence
  Description of Artificial Sequence: Synthetic oligonucleotide
  Sense strand starting at position 3585 of SEQ ID NO: 588178
ggcacucuucuguaucaga

SEQ ID NO: 847167 - RNA, 19 nt, Artificial Sequence
  Description of Artificial Sequence: Synthetic oligonucleotide
  Antisense strand to SEQ ID NO: 847166
ucugauacagaagagugcc

SEQ ID NO: 847168 - RNA, 19 nt, Artificial Sequence
  Description of Artificial Sequence: Synthetic oligonucleotide
  Sense strand starting at position 3756 of SEQ ID NO: 588178
agccaaaugcuaggagagu

SEQ ID NO: 847169 - RNA, 19 nt, Artificial Sequence
  Description of Artificial Sequence: Synthetic oligonucleotide
  Antisense strand to SEQ ID NO: 847168
acucuccuagcauuuggcu

SEQ ID NO: 847170 - RNA, 19 nt, Artificial Sequence
  Description of Artificial Sequence: Synthetic oligonucleotide
  Sense strand starting at position 3794 of SEQ ID NO: 588178
gcuuucuucuaggcagaau

SEQ ID NO: 847171 - RNA, 19 nt, Artificial Sequence
  Description of Artificial Sequence: Synthetic oligonucleotide
  Antisense strand to SEQ ID NO: 847170
auucugccuagaagaaagc

SEQ ID NO: 847172 - RNA, 19 nt, Artificial Sequence
  Description of Artificial Sequence: Synthetic oligonucleotide
  Sense strand starting at position 141 of SEQ ID NO: 588179
ggcuguggcuugugggaaa

SEQ ID NO: 847173 - RNA, 19 nt, Artificial Sequence
  Description of Artificial Sequence: Synthetic oligonucleotide
  Antisense strand to SEQ ID NO: 847172
uuucccacaagccacagcc

SEQ ID NO: 847174 - RNA, 19 nt, Artificial Sequence
  Description of Artificial Sequence: Synthetic oligonucleotide
  Sense strand starting at position 576 of SEQ ID NO: 588179
accagacucgcccgaauau

SEQ ID NO: 847175 - RNA, 19 nt, Artificial Sequence
  Description of Artificial Sequence: Synthetic oligonucleotide
  Antisense strand to SEQ ID NO: 847174
auauucgggcgagucuggu

SEQ ID NO: 847176 - RNA, 19 nt, Artificial Sequence
  Description of Artificial Sequence: Synthetic oligonucleotide
  Sense strand starting at position 763 of SEQ ID NO: 588179
gacuccaagugcugguuua

SEQ ID NO: 847177 - RNA, 19 nt, Artificial Sequence
  Description of Artificial Sequence: Synthetic oligonucleotide
  Antisense strand to SEQ ID NO: 847176
uaaaccagcacuuggaguc

SEQ ID NO: 847178 - RNA, 19 nt, Artificial Sequence
  Description of Artificial Sequence: Synthetic oligonucleotide
  Sense strand starting at position 902 of SEQ ID NO: 588179
gccggaugccucugggaga

SEQ ID NO: 847179 - RNA, 19 nt, Artificial Sequence
  Description of Artificial Sequence: Synthetic oligonucleotide
  Antisense strand to SEQ ID NO: 847178
ucucccagaggcauccggc

SEQ ID NO: 847180 - RNA, 19 nt, Artificial Sequence
  Description of Artificial Sequence: Synthetic oligonucleotide
  Sense strand starting at position 903 of SEQ ID NO: 588179
ccggaugccucugggagaa

SEQ ID NO: 847181 - RNA, 19 nt, Artificial Sequence
  Description of Artificial Sequence: Synthetic oligonucleotide
  Antisense strand to SEQ ID NO: 847180
uucucccagaggcauccgg

SEQ ID NO: 847182 - RNA, 19 nt, Artificial Sequence
  Description of Artificial Sequence: Synthetic oligonucleotide
  Sense strand starting at position 905 of SEQ ID NO: 588179
ggaugccucugggagaaga

SEQ ID NO: 847183 - RNA, 19 nt, Artificial Sequence
  Description of Artificial Sequence: Synthetic oligonucleotide
  Antisense strand to SEQ ID NO: 847182
ucuucucccagaggcaucc

SEQ ID NO: 847184 - RNA, 19 nt, Artificial Sequence
  Description of Artificial Sequence: Synthetic oligonucleotide
  Sense strand starting at position 1347 of SEQ ID NO: 588179
agcugcugcucuggaagaa

SEQ ID NO: 847185 - RNA, 19 nt, Artificial Sequence
  Description of Artificial Sequence: Synthetic oligonucleotide
  Antisense strand to SEQ ID NO: 847184
uucuuccagagcagcagcu

SEQ ID NO: 847186 - RNA, 19 nt, Artificial Sequence
  Description of Artificial Sequence: Synthetic oligonucleotide
  Sense strand starting at position 2082 of SEQ ID NO: 588179
acuguuuggagcugugaac

SEQ ID NO: 847187 - RNA, 19 nt, Artificial Sequence
  Description of Artificial Sequence: Synthetic oligonucleotide
  Antisense strand to SEQ ID NO: 847186
guucacagcuccaaacagu

SEQ ID NO: 847188 - RNA, 19 nt, Artificial Sequence
  Description of Artificial Sequence: Synthetic oligonucleotide
  Sense strand starting at position 2299 of SEQ ID NO: 588179
ucugaaggcccuugggauu

SEQ ID NO: 847189 - RNA, 19 nt, Artificial Sequence
  Description of Artificial Sequence: Synthetic oligonucleotide
  Antisense strand to SEQ ID NO: 847188
aaucccaagggccuucaga

SEQ ID NO: 847190 - RNA, 19 nt, Artificial Sequence
  Description of Artificial Sequence: Synthetic oligonucleotide
  Sense strand starting at position 2479 of SEQ ID NO: 588179
caccauggcuggcagaauu

SEQ ID NO: 847191 - RNA, 19 nt, Artificial Sequence
  Description of Artificial Sequence: Synthetic oligonucleotide
  Antisense strand to SEQ ID NO: 847190
aauucugccagccauggug

SEQ ID NO: 847192 - RNA, 19 nt, Artificial Sequence
  Description of Artificial Sequence: Synthetic oligonucleotide
  Sense strand starting at position 2652 of SEQ ID NO: 588179
uggcauguggcaugcauua

SEQ ID NO: 847193 - RNA, 19 nt, Artificial Sequence
  Description of Artificial Sequence: Synthetic oligonucleotide
  Antisense strand to SEQ ID NO: 847192
uaaugcaugccacaugcca

SEQ ID NO: 847194 - RNA, 19 nt, Artificial Sequence
  Description of Artificial Sequence: Synthetic oligonucleotide
  Sense strand starting at position 2654 of SEQ ID NO: 588179
gcauguggcaugcauuagu

SEQ ID NO: 847195 - RNA, 19 nt, Artificial Sequence
  Description of Artificial Sequence: Synthetic oligonucleotide
  Antisense strand to SEQ ID NO: 847194
acuaaugcaugccacaugc

SEQ ID NO: 847196 - RNA, 19 nt, Artificial Sequence
  Description of Artificial Sequence: Synthetic oligonucleotide
  Sense strand starting at position 2657 of SEQ ID NO: 588179
uguggcaugcauuaguauu

SEQ ID NO: 847197 - RNA, 19 nt, Artificial Sequence
  Description of Artificial Sequence: Synthetic oligonucleotide
  Antisense strand to SEQ ID NO: 847196
aauacuaaugcaugccaca

SEQ ID NO: 847198 - RNA, 19 nt, Artificial Sequence
  Description of Artificial Sequence: Synthetic oligonucleotide
  Sense strand starting at position 2685 of SEQ ID NO: 588179
gggugguugucaggaaggu

SEQ ID NO: 847199 - RNA, 19 nt, Artificial Sequence
  Description of Artificial Sequence: Synthetic oligonucleotide
  Antisense strand to SEQ ID NO: 847198
accuuccugacaaccaccc

SEQ ID NO: 847200 - RNA, 19 nt, Artificial Sequence
  Description of Artificial Sequence: Synthetic oligonucleotide
  Sense strand starting at position 3049 of SEQ ID NO: 588179
cccacuuuccugggaagga

SEQ ID NO: 847201 - RNA, 19 nt, Artificial Sequence
  Description of Artificial Sequence: Synthetic oligonucleotide
  Antisense strand to SEQ ID NO: 847200
uccuucccaggaaaguggg

SEQ ID NO: 847202 - RNA, 19 nt, Artificial Sequence
  Description of Artificial Sequence: Synthetic oligonucleotide
  Sense strand starting at position 3050 of SEQ ID NO: 588179
ccacuuuccugggaaggau

SEQ ID NO: 847203 - RNA, 19 nt, Artificial Sequence
  Description of Artificial Sequence: Synthetic oligonucleotide
  Antisense strand to SEQ ID NO: 847202
auccuucccaggaaagugg

SEQ ID NO: 847204 - RNA, 19 nt, Artificial Sequence
  Description of Artificial Sequence: Synthetic oligonucleotide
  Sense strand starting at position 3059 of SEQ ID NO: 588179
ugggaaggaucuuggacau

SEQ ID NO: 847205 - RNA, 19 nt, Artificial Sequence
  Description of Artificial Sequence: Synthetic oligonucleotide
  Antisense strand to SEQ ID NO: 847204
auguccaagauccuuccca

SEQ ID NO: 847206 - RNA, 19 nt, Artificial Sequence
  Description of Artificial Sequence: Synthetic oligonucleotide
  Sense strand starting at position 3276 of SEQ ID NO: 588179
uggccuaucuccucuuagu

SEQ ID NO: 847207 - RNA, 19 nt, Artificial Sequence
  Description of Artificial Sequence: Synthetic oligonucleotide
  Antisense strand to SEQ ID NO: 847206
acuaagaggagauaggcca

SEQ ID NO: 847208 - RNA, 19 nt, Artificial Sequence
  Description of Artificial Sequence: Synthetic oligonucleotide
  Sense strand starting at position 3348 of SEQ ID NO: 588179
gggucacugucaugaaguc

SEQ ID NO: 847209 - RNA, 19 nt, Artificial Sequence
  Description of Artificial Sequence: Synthetic oligonucleotide
  Antisense strand to SEQ ID NO: 847208
gacuucaugacagugaccc

SEQ ID NO: 847210 - RNA, 19 nt, Artificial Sequence
  Description of Artificial Sequence: Synthetic oligonucleotide
  Sense strand starting at position 3349 of SEQ ID NO: 588179
ggucacugucaugaaguca

SEQ ID NO: 847211 - RNA, 19 nt, Artificial Sequence
  Description of Artificial Sequence: Synthetic oligonucleotide
  Antisense strand to SEQ ID NO: 847210
ugacuucaugacagugacc

SEQ ID NO: 847212 - RNA, 19 nt, Artificial Sequence
  Description of Artificial Sequence: Synthetic oligonucleotide
  Sense strand starting at position 3357 of SEQ ID NO: 588179
ucaugaagucacugggaug

SEQ ID NO: 847213 - RNA, 19 nt, Artificial Sequence
  Description of Artificial Sequence: Synthetic oligonucleotide
  Antisense strand to SEQ ID NO: 847212
caucccagugacuucauga

SEQ ID NO: 847214 - RNA, 19 nt, Artificial Sequence
  Description of Artificial Sequence: Synthetic oligonucleotide
  Sense strand starting at position 3648 of SEQ ID NO: 588179
gugcgaggccguugcuaua

SEQ ID NO: 847215 - RNA, 19 nt, Artificial Sequence
  Description of Artificial Sequence: Synthetic oligonucleotide
  Antisense strand to SEQ ID NO: 847214
uauagcaacggccucgcac

SEQ ID NO: 847216 - RNA, 19 nt, Artificial Sequence
  Description of Artificial Sequence: Synthetic oligonucleotide
  Sense strand starting at position 3685 of SEQ ID NO: 588179
gggccuguugcugcaguua

SEQ ID NO: 847217 - RNA, 19 nt, Artificial Sequence
  Description of Artificial Sequence: Synthetic oligonucleotide
  Antisense strand to SEQ ID NO: 847216
uaacugcagcaacaggccc

SEQ ID NO: 847218 - RNA, 19 nt, Artificial Sequence
  Description of Artificial Sequence: Synthetic oligonucleotide
  Sense strand starting at position 3905 of SEQ ID NO: 588179
gcaugauguuccuggccac

SEQ ID NO: 847219 - RNA, 19 nt, Artificial Sequence
  Description of Artificial Sequence: Synthetic oligonucleotide
  Antisense strand to SEQ ID NO: 847218
guggccaggaacaucaugc

SEQ ID NO: 847220 - RNA, 19 nt, Artificial Sequence
  Description of Artificial Sequence: Synthetic oligonucleotide
  Sense strand starting at position 3906 of SEQ ID NO: 588179
caugauguuccuggccaca

SEQ ID NO: 847221 - RNA, 19 nt, Artificial Sequence
  Description of Artificial Sequence: Synthetic oligonucleotide
  Antisense strand to SEQ ID NO: 847220
uguggccaggaacaucaug

SEQ ID NO: 847222 - RNA, 19 nt, Artificial Sequence
  Description of Artificial Sequence: Synthetic oligonucleotide
  Sense strand starting at position 3908 of SEQ ID NO: 588179
ugauguuccuggccacaaa

SEQ ID NO: 847223 - RNA, 19 nt, Artificial Sequence
  Description of Artificial Sequence: Synthetic oligonucleotide
  Antisense strand to SEQ ID NO: 847222
uuuguggccaggaacauca

SEQ ID NO: 847224 - RNA, 19 nt, Artificial Sequence
  Description of Artificial Sequence: Synthetic oligonucleotide
  Sense strand starting at position 94 of SEQ ID NO: 588180
gggcacuuccagugucuca

SEQ ID NO: 847225 - RNA, 19 nt, Artificial Sequence
  Description of Artificial Sequence: Synthetic oligonucleotide
  Antisense strand to SEQ ID NO: 847224
ugagacacuggaagugccc

SEQ ID NO: 847226 - RNA, 19 nt, Artificial Sequence
  Description of Artificial Sequence: Synthetic oligonucleotide
  Sense strand starting at position 187 of SEQ ID NO: 588180
ggaacaaaguucuaagccu

SEQ ID NO: 847227 - RNA, 19 nt, Artificial Sequence
  Description of Artificial Sequence: Synthetic oligonucleotide
  Antisense strand to SEQ ID NO: 847226
aggcuuagaacuuuguucc

SEQ ID NO: 847228 - RNA, 19 nt, Artificial Sequence
  Description of Artificial Sequence: Synthetic oligonucleotide
  Sense strand starting at position 645 of SEQ ID NO: 588180
gguuucuuacugggaggga

SEQ ID NO: 847229 - RNA, 19 nt, Artificial Sequence
  Description of Artificial Sequence: Synthetic oligonucleotide
  Antisense strand to SEQ ID NO: 847228
ucccucccaguaagaaacc

SEQ ID NO: 847230 - RNA, 19 nt, Artificial Sequence
  Description of Artificial Sequence: Synthetic oligonucleotide
  Sense strand starting at position 646 of SEQ ID NO: 588180
guuucuuacugggagggaa

SEQ ID NO: 847231 - RNA, 19 nt, Artificial Sequence
  Description of Artificial Sequence: Synthetic oligonucleotide
  Antisense strand to SEQ ID NO: 847230
uucccucccaguaagaaac

SEQ ID NO: 847232 - RNA, 19 nt, Artificial Sequence
  Description of Artificial Sequence: Synthetic oligonucleotide
  Sense strand starting at position 668 of SEQ ID NO: 588180
gggugucacuauggcacua

SEQ ID NO: 847233 - RNA, 19 nt, Artificial Sequence
  Description of Artificial Sequence: Synthetic oligonucleotide
  Antisense strand to SEQ ID NO: 847232
uagugccauagugacaccc

SEQ ID NO: 847234 - RNA, 19 nt, Artificial Sequence
  Description of Artificial Sequence: Synthetic oligonucleotide
  Sense strand starting at position 680 of SEQ ID NO: 588180
ggcacuaugguguggagaa

SEQ ID NO: 847235 - RNA, 19 nt, Artificial Sequence
  Description of Artificial Sequence: Synthetic oligonucleotide
  Antisense strand to SEQ ID NO: 847234
uucuccacaccauagugcc

SEQ ID NO: 847236 - RNA, 19 nt, Artificial Sequence
  Description of Artificial Sequence: Synthetic oligonucleotide
  Sense strand starting at position 681 of SEQ ID NO: 588180
gcacuaugguguggagaaa

SEQ ID NO: 847237 - RNA, 19 nt, Artificial Sequence
  Description of Artificial Sequence: Synthetic oligonucleotide
  Antisense strand to SEQ ID NO: 847236
uuucuccacaccauagugc

SEQ ID NO: 847238 - RNA, 19 nt, Artificial Sequence
  Description of Artificial Sequence: Synthetic oligonucleotide
  Sense strand starting at position 891 of SEQ ID NO: 588180
acaaccuucuccgaauaga

SEQ ID NO: 847239 - RNA, 19 nt, Artificial Sequence
  Description of Artificial Sequence: Synthetic oligonucleotide
  Antisense strand to SEQ ID NO: 847238
ucuauucggagaagguugu

SEQ ID NO: 847240 - RNA, 19 nt, Artificial Sequence
  Description of Artificial Sequence: Synthetic oligonucleotide
  Sense strand starting at position 947 of SEQ ID NO: 588180
gaaacugaguuccagguua

SEQ ID NO: 847241 - RNA, 19 nt, Artificial Sequence
  Description of Artificial Sequence: Synthetic oligonucleotide
  Antisense strand to SEQ ID NO: 847240
uaaccuggaacucaguuuc

SEQ ID NO: 847242 - RNA, 19 nt, Artificial Sequence
  Description of Artificial Sequence: Synthetic oligonucleotide
  Sense strand starting at position 949 of SEQ ID NO: 588180
aacugaguuccagguuaaa

SEQ ID NO: 847243 - RNA, 19 nt, Artificial Sequence
  Description of Artificial Sequence: Synthetic oligonucleotide
  Antisense strand to SEQ ID NO: 847242
uuuaaccuggaacucaguu

SEQ ID NO: 847244 - RNA, 19 nt, Artificial Sequence
  Description of Artificial Sequence: Synthetic oligonucleotide
  Sense strand starting at position 998 of SEQ ID NO: 588180
caugccuuaccugguaaga

SEQ ID NO: 847245 - RNA, 19 nt, Artificial Sequence
  Description of Artificial Sequence: Synthetic oligonucleotide
  Antisense strand to SEQ ID NO: 847244
ucuuaccagguaaggcaug

SEQ ID NO: 847246 - RNA, 19 nt, Artificial Sequence
  Description of Artificial Sequence: Synthetic oligonucleotide
  Sense strand starting at position 1000 of SEQ ID NO: 588180
ugccuuaccugguaagaag

SEQ ID NO: 847247 - RNA, 19 nt, Artificial Sequence
  Description of Artificial Sequence: Synthetic oligonucleotide
  Antisense strand to SEQ ID NO: 847246
cuucuuaccagguaaggca

SEQ ID NO: 847248 - RNA, 19 nt, Artificial Sequence
  Description of Artificial Sequence: Synthetic oligonucleotide
  Sense strand starting at position 1488 of SEQ ID NO: 588180
gggcuuucuagagagcaca

SEQ ID NO: 847249 - RNA, 19 nt, Artificial Sequence
  Description of Artificial Sequence: Synthetic oligonucleotide
  Antisense strand to SEQ ID NO: 847248
ugugcucucuagaaagccc

SEQ ID NO: 847250 - RNA, 19 nt, Artificial Sequence
  Description of Artificial Sequence: Synthetic oligonucleotide
  Sense strand starting at position 1634 of SEQ ID NO: 588180
gggaaucccagaugucugu

SEQ ID NO: 847251 - RNA, 19 nt, Artificial Sequence
  Description of Artificial Sequence: Synthetic oligonucleotide
  Antisense strand to SEQ ID NO: 847250
acagacaucugggauuccc

SEQ ID NO: 847252 - RNA, 19 nt, Artificial Sequence
  Description of Artificial Sequence: Synthetic oligonucleotide
  Sense strand starting at position 2252 of SEQ ID NO: 588180
cgacuagaggccgaguuua

SEQ ID NO: 847253 - RNA, 19 nt, Artificial Sequence
  Description of Artificial Sequence: Synthetic oligonucleotide
  Antisense strand to SEQ ID NO: 847252
uaaacucggccucuagucg

SEQ ID NO: 847254 - RNA, 19 nt, Artificial Sequence
  Description of Artificial Sequence: Synthetic oligonucleotide
  Sense strand starting at position 2467 of SEQ ID NO: 588180
cguggcucugcggauacau

SEQ ID NO: 847255 - RNA, 19 nt, Artificial Sequence
  Description of Artificial Sequence: Synthetic oligonucleotide
  Antisense strand to SEQ ID NO: 847254
auguauccgcagagccacg

SEQ ID NO: 847256 - RNA, 19 nt, Artificial Sequence
  Description of Artificial Sequence: Synthetic oligonucleotide
  Sense strand starting at position 2523 of SEQ ID NO: 588180
ccggaagcuuccuaacucu

SEQ ID NO: 847257 - RNA, 19 nt, Artificial Sequence
  Description of Artificial Sequence: Synthetic oligonucleotide
  Antisense strand to SEQ ID NO: 847256
agaguuaggaagcuuccgg

SEQ ID NO: 847258 - RNA, 19 nt, Artificial Sequence
  Description of Artificial Sequence: Synthetic oligonucleotide
  Sense strand starting at position 2538 of SEQ ID NO: 588180
cucuaaucguaagaaguua

SEQ ID NO: 847259 - RNA, 19 nt, Artificial Sequence
  Description of Artificial Sequence: Synthetic oligonucleotide
  Antisense strand to SEQ ID NO: 847258
uaacuucuuacgauuagag

SEQ ID NO: 847260 - RNA, 19 nt, Artificial Sequence
  Description of Artificial Sequence: Synthetic oligonucleotide
  Sense strand starting at position 2853 of SEQ ID NO: 588180
gagcgaucuccagggaaga

SEQ ID NO: 847261 - RNA, 19 nt, Artificial Sequence
  Description of Artificial Sequence: Synthetic oligonucleotide
  Antisense strand to SEQ ID NO: 847260
ucuucccuggagaucgcuc

SEQ ID NO: 847262 - RNA, 19 nt, Artificial Sequence
  Description of Artificial Sequence: Synthetic oligonucleotide
  Sense strand starting at position 2854 of SEQ ID NO: 588180
agcgaucuccagggaagaa

SEQ ID NO: 847263 - RNA, 19 nt, Artificial Sequence
  Description of Artificial Sequence: Synthetic oligonucleotide
  Antisense strand to SEQ ID NO: 847262
uucuucccuggagaucgcu

SEQ ID NO: 847264 - RNA, 19 nt, Artificial Sequence
  Description of Artificial Sequence: Synthetic oligonucleotide
  Sense strand starting at position 2930 of SEQ ID NO: 588180
uuguccuaggccuggauau

SEQ ID NO: 847265 - RNA, 19 nt, Artificial Sequence
  Description of Artificial Sequence: Synthetic oligonucleotide
  Antisense strand to SEQ ID NO: 847264
auauccaggccuaggacaa

SEQ ID NO: 847266 - RNA, 19 nt, Artificial Sequence
  Description of Artificial Sequence: Synthetic oligonucleotide
  Sense strand starting at position 2977 of SEQ ID NO: 588180
uggagcuucuaggauccaa

SEQ ID NO: 847267 - RNA, 19 nt, Artificial Sequence
  Description of Artificial Sequence: Synthetic oligonucleotide
  Antisense strand to SEQ ID NO: 847266
uuggauccuagaagcucca

SEQ ID NO: 847268 - RNA, 19 nt, Artificial Sequence
  Description of Artificial Sequence: Synthetic oligonucleotide
  Sense strand starting at position 3110 of SEQ ID NO: 588180
gaggccuggccacauaaau

SEQ ID NO: 847269 - RNA, 19 nt, Artificial Sequence
  Description of Artificial Sequence: Synthetic oligonucleotide
  Antisense strand to SEQ ID NO: 847268
auuuauguggccaggccuc

SEQ ID NO: 847270 - RNA, 19 nt, Artificial Sequence
  Description of Artificial Sequence: Synthetic oligonucleotide
  Sense strand starting at position 3138 of SEQ ID NO: 588180
guucaaggcucggcaagaa

SEQ ID NO: 847271 - RNA, 19 nt, Artificial Sequence
  Description of Artificial Sequence: Synthetic oligonucleotide
  Antisense strand to SEQ ID NO: 847270
uucuugccgagccuugaac

SEQ ID NO: 847272 - RNA, 19 nt, Artificial Sequence
  Description of Artificial Sequence: Synthetic oligonucleotide
  Sense strand starting at position 3313 of SEQ ID NO: 588180
gcuguuucugccuggcaca

SEQ ID NO: 847273 - RNA, 19 nt, Artificial Sequence
  Description of Artificial Sequence: Synthetic oligonucleotide
  Antisense strand to SEQ ID NO: 847272
ugugccaggcagaaacagc

SEQ ID NO: 847274 - RNA, 19 nt, Artificial Sequence
  Description of Artificial Sequence: Synthetic oligonucleotide
  Sense strand starting at position 3399 of SEQ ID NO: 588180
ugguguuguucugacauug

SEQ ID NO: 847275 - RNA, 19 nt, Artificial Sequence
  Description of Artificial Sequence: Synthetic oligonucleotide
  Antisense strand to SEQ ID NO: 847274
caaugucagaacaacacca

SEQ ID NO: 847276 - RNA, 19 nt, Artificial Sequence
  Description of Artificial Sequence: Synthetic oligonucleotide
  Sense strand starting at position 3469 of SEQ ID NO: 588180
ucacacuucucacuguaga

SEQ ID NO: 847277 - RNA, 19 nt, Artificial Sequence
  Description of Artificial Sequence: Synthetic oligonucleotide
  Antisense strand to SEQ ID NO: 847276
ucuacagugagaaguguga

SEQ ID NO: 847278 - RNA, 19 nt, Artificial Sequence
  Description of Artificial Sequence: Synthetic oligonucleotide
  Sense strand starting at position 3474 of SEQ ID NO: 588180
cuucucacuguagaaagua

SEQ ID NO: 847279 - RNA, 19 nt, Artificial Sequence
  Description of Artificial Sequence: Synthetic oligonucleotide
  Antisense strand to SEQ ID NO: 847278
uacuuucuacagugagaag

SEQ ID NO: 847280 - RNA, 19 nt, Artificial Sequence
  Description of Artificial Sequence: Synthetic oligonucleotide
  Sense strand starting at position 3504 of SEQ ID NO: 588180
gcuuuauucuggcagcuag

SEQ ID NO: 847281 - RNA, 19 nt, Artificial Sequence
  Description of Artificial Sequence: Synthetic oligonucleotide
  Antisense strand to SEQ ID NO: 847280
cuagcugccagaauaaagc

SEQ ID NO: 847282 - RNA, 19 nt, Artificial Sequence
  Description of Artificial Sequence: Synthetic oligonucleotide
  Sense strand starting at position 3515 of SEQ ID NO: 588180
gcagcuagcucccuguuau

SEQ ID NO: 847283 - RNA, 19 nt, Artificial Sequence
  Description of Artificial Sequence: Synthetic oligonucleotide
  Antisense strand to SEQ ID NO: 847282
auaacagggagcuagcugc

SEQ ID NO: 847284 - RNA, 19 nt, Artificial Sequence
  Description of Artificial Sequence: Synthetic oligonucleotide
  Sense strand starting at position 3573 of SEQ ID NO: 588180
ugggcuggacuuuauuaau

SEQ ID NO: 847285 - RNA, 19 nt, Artificial Sequence
  Description of Artificial Sequence: Synthetic oligonucleotide
  Antisense strand to SEQ ID NO: 847284
auuaauaaaguccagccca

SEQ ID NO: 847286 - RNA, 19 nt, Artificial Sequence
  Description of Artificial Sequence: Synthetic oligonucleotide
  Sense strand starting at position 3579 of SEQ ID NO: 588180
ggacuuuauuaaugacuug

SEQ ID NO: 847287 - RNA, 19 nt, Artificial Sequence
  Description of Artificial Sequence: Synthetic oligonucleotide
  Antisense strand to SEQ ID NO: 847286
caagucauuaauaaagucc

SEQ ID NO: 847288 - RNA, 19 nt, Artificial Sequence
  Description of Artificial Sequence: Synthetic oligonucleotide
  Sense strand starting at position 3629 of SEQ ID NO: 588180
cuugaauugcuggguguga

SEQ ID NO: 847289 - RNA, 19 nt, Artificial Sequence
  Description of Artificial Sequence: Synthetic oligonucleotide
  Antisense strand to SEQ ID NO: 847288
ucacacccagcaauucaag

SEQ ID NO: 847290 - RNA, 19 nt, Artificial Sequence
  Description of Artificial Sequence: Synthetic oligonucleotide
  Sense strand starting at position 3631 of SEQ ID NO: 588180
ugaauugcugggugugaca

SEQ ID NO: 847291 - RNA, 19 nt, Artificial Sequence
  Description of Artificial Sequence: Synthetic oligonucleotide
  Antisense strand to SEQ ID NO: 847290
ugucacacccagcaauuca

SEQ ID NO: 847292 - RNA, 19 nt, Artificial Sequence
  Description of Artificial Sequence: Synthetic oligonucleotide
  Sense strand starting at position 3712 of SEQ ID NO: 588180
gagccuucccaugagacca

SEQ ID NO: 847293 - RNA, 19 nt, Artificial Sequence
  Description of Artificial Sequence: Synthetic oligonucleotide
  Antisense strand to SEQ ID NO: 847292
uggucucaugggaaggcuc

SEQ ID NO: 847294 - RNA, 19 nt, Artificial Sequence
  Description of Artificial Sequence: Synthetic oligonucleotide
  Sense strand starting at position 3762 of SEQ ID NO: 588180
cugaaacuuugugucaaag

SEQ ID NO: 847295 - RNA, 19 nt, Artificial Sequence
  Description of Artificial Sequence: Synthetic oligonucleotide
  Antisense strand to SEQ ID NO: 847294
cuuugacacaaaguuucag

SEQ ID NO: 847296 - RNA, 19 nt, Artificial Sequence
  Description of Artificial Sequence: Synthetic oligonucleotide
  Sense strand starting at position 3815 of SEQ ID NO: 588180
augcaugccugcugguuaa

SEQ ID NO: 847297 - RNA, 19 nt, Artificial Sequence
  Description of Artificial Sequence: Synthetic oligonucleotide
  Antisense strand to SEQ ID NO: 847296
uuaaccagcaggcaugcau

SEQ ID NO: 847298 - RNA, 19 nt, Artificial Sequence
  Description of Artificial Sequence: Synthetic oligonucleotide
  Sense strand starting at position 3852 of SEQ ID NO: 588180
accugucacucugcaguaa

SEQ ID NO: 847299 - RNA, 19 nt, Artificial Sequence
  Description of Artificial Sequence: Synthetic oligonucleotide
  Antisense strand to SEQ ID NO: 847298
uuacugcagagugacaggu

SEQ ID NO: 847300 - RNA, 19 nt, Artificial Sequence
  Description of Artificial Sequence: Synthetic oligonucleotide
  Sense strand starting at position 148 of SEQ ID NO: 588181
uugagaugucuuuggauca

SEQ ID NO: 847301 - RNA, 19 nt, Artificial Sequence
  Description of Artificial Sequence: Synthetic oligonucleotide
  Antisense strand to SEQ ID NO: 847300
ugauccaaagacaucucaa

SEQ ID NO: 847302 - RNA, 19 nt, Artificial Sequence
  Description of Artificial Sequence: Synthetic oligonucleotide
  Sense strand starting at position 195 of SEQ ID NO: 588181
cugaauugcagguguauua

SEQ ID NO: 847303 - RNA, 19 nt, Artificial Sequence
  Description of Artificial Sequence: Synthetic oligonucleotide
  Antisense strand to SEQ ID NO: 847302
uaauacaccugcaauucag

SEQ ID NO: 847304 - RNA, 19 nt, Artificial Sequence
  Description of Artificial Sequence: Synthetic oligonucleotide
  Sense strand starting at position 222 of SEQ ID NO: 588181
guuuccauuugauagggau

SEQ ID NO: 847305 - RNA, 19 nt, Artificial Sequence
  Description of Artificial Sequence: Synthetic oligonucleotide
  Antisense strand to SEQ ID NO: 847304
aucccuaucaaauggaaac

SEQ ID NO: 847306 - RNA, 19 nt, Artificial Sequence
  Description of Artificial Sequence: Synthetic oligonucleotide
  Sense strand starting at position 319 of SEQ ID NO: 588181
guuuaugcccugcagagau

SEQ ID NO: 847307 - RNA, 19 nt, Artificial Sequence
  Description of Artificial Sequence: Synthetic oligonucleotide
  Antisense strand to SEQ ID NO: 847306
aucucugcagggcauaaac

SEQ ID NO: 847308 - RNA, 19 nt, Artificial Sequence
  Description of Artificial Sequence: Synthetic oligonucleotide
  Sense strand starting at position 380 of SEQ ID NO: 588181
ggauuccauugguuggcaa

SEQ ID NO: 847309 - RNA, 19 nt, Artificial Sequence
  Description of Artificial Sequence: Synthetic oligonucleotide
  Antisense strand to SEQ ID NO: 847308
uugccaaccaauggaaucc

SEQ ID NO: 847310 - RNA, 19 nt, Artificial Sequence
  Description of Artificial Sequence: Synthetic oligonucleotide
  Sense strand starting at position 512 of SEQ ID NO: 588181
cccagucuggccuggcaaa

SEQ ID NO: 847311 - RNA, 19 nt, Artificial Sequence
  Description of Artificial Sequence: Synthetic oligonucleotide
  Antisense strand to SEQ ID NO: 847310
uuugccaggccagacuggg

SEQ ID NO: 847312 - RNA, 19 nt, Artificial Sequence
  Description of Artificial Sequence: Synthetic oligonucleotide
  Sense strand starting at position 536 of SEQ ID NO: 588181
gcccaaagagucuacugaa

SEQ ID NO: 847313 - RNA, 19 nt, Artificial Sequence
  Description of Artificial Sequence: Synthetic oligonucleotide
  Antisense strand to SEQ ID NO: 847312
uucaguagacucuuugggc

SEQ ID NO: 847314 - RNA, 19 nt, Artificial Sequence
  Description of Artificial Sequence: Synthetic oligonucleotide
  Sense strand starting at position 622 of SEQ ID NO: 588181
ucaaccuguuccucuguua

SEQ ID NO: 847315 - RNA, 19 nt, Artificial Sequence
  Description of Artificial Sequence: Synthetic oligonucleotide
  Antisense strand to SEQ ID NO: 847314
uaacagaggaacagguuga

SEQ ID NO: 847316 - RNA, 19 nt, Artificial Sequence
  Description of Artificial Sequence: Synthetic oligonucleotide
  Sense strand starting at position 625 of SEQ ID NO: 588181
accuguuccucuguuagag

SEQ ID NO: 847317 - RNA, 19 nt, Artificial Sequence
  Description of Artificial Sequence: Synthetic oligonucleotide
  Antisense strand to SEQ ID NO: 847316
cucuaacagaggaacaggu

SEQ ID NO: 847318 - RNA, 19 nt, Artificial Sequence
  Description of Artificial Sequence: Synthetic oligonucleotide
  Sense strand starting at position 631 of SEQ ID NO: 588181
uccucuguuagaggaggaa

SEQ ID NO: 847319 - RNA, 19 nt, Artificial Sequence
  Description of Artificial Sequence: Synthetic oligonucleotide
  Antisense strand to SEQ ID NO: 847318
uuccuccucuaacagagga

SEQ ID NO: 847320 - RNA, 19 nt, Artificial Sequence
  Description of Artificial Sequence: Synthetic oligonucleotide
  Sense strand starting at position 705 of SEQ ID NO: 588181
uggaaugaaaucugaguuc

SEQ ID NO: 847321 - RNA, 19 nt, Artificial Sequence
  Description of Artificial Sequence: Synthetic oligonucleotide
  Antisense strand to SEQ ID NO: 847320
gaacucagauuucauucca

SEQ ID NO: 847322 - RNA, 19 nt, Artificial Sequence
  Description of Artificial Sequence: Synthetic oligonucleotide
  Sense strand starting at position 753 of SEQ ID NO: 588181
ggguuucuguguccaauca

SEQ ID NO: 847323 - RNA, 19 nt, Artificial Sequence
  Description of Artificial Sequence: Synthetic oligonucleotide
  Antisense strand to SEQ ID NO: 847322
ugauuggacacagaaaccc

SEQ ID NO: 847324 - RNA, 19 nt, Artificial Sequence
  Description of Artificial Sequence: Synthetic oligonucleotide
  Sense strand starting at position 785 of SEQ ID NO: 588181
gauguuugaggcuggauga

SEQ ID NO: 847325 - RNA, 19 nt, Artificial Sequence
  Description of Artificial Sequence: Synthetic oligonucleotide
  Antisense strand to SEQ ID NO: 847324
ucauccagccucaaacauc

SEQ ID NO: 847326 - RNA, 19 nt, Artificial Sequence
  Description of Artificial Sequence: Synthetic oligonucleotide
  Sense strand starting at position 883 of SEQ ID NO: 588181
cuucuaccuccagagugaa

SEQ ID NO: 847327 - RNA, 19 nt, Artificial Sequence
  Description of Artificial Sequence: Synthetic oligonucleotide
  Antisense strand to SEQ ID NO: 847326
uucacucuggagguagaag

SEQ ID NO: 847328 - RNA, 19 nt, Artificial Sequence
  Description of Artificial Sequence: Synthetic oligonucleotide
  Sense strand starting at position 1008 of SEQ ID NO: 588181
ccagucuagcaagauuaga

SEQ ID NO: 847329 - RNA, 19 nt, Artificial Sequence
  Description of Artificial Sequence: Synthetic oligonucleotide
  Antisense strand to SEQ ID NO: 847328
ucuaaucuugcuagacugg

SEQ ID NO: 847330 - RNA, 19 nt, Artificial Sequence
  Description of Artificial Sequence: Synthetic oligonucleotide
  Sense strand starting at position 1203 of SEQ ID NO: 588181
ucaggucucccaugguaag

SEQ ID NO: 847331 - RNA, 19 nt, Artificial Sequence
  Description of Artificial Sequence: Synthetic oligonucleotide
  Antisense strand to SEQ ID NO: 847330
cuuaccaugggagaccuga

SEQ ID NO: 847332 - RNA, 19 nt, Artificial Sequence
  Description of Artificial Sequence: Synthetic oligonucleotide
  Sense strand starting at position 1204 of SEQ ID NO: 588181
caggucucccaugguaagu

SEQ ID NO: 847333 - RNA, 19 nt, Artificial Sequence
  Description of Artificial Sequence: Synthetic oligonucleotide
  Antisense strand to SEQ ID NO: 847332
acuuaccaugggagaccug

SEQ ID NO: 847334 - RNA, 19 nt, Artificial Sequence
  Description of Artificial Sequence: Synthetic oligonucleotide
  Sense strand starting at position 1372 of SEQ ID NO: 588181
gcccucagccauuaaguga

SEQ ID NO: 847335 - RNA, 19 nt, Artificial Sequence
  Description of Artificial Sequence: Synthetic oligonucleotide
  Antisense strand to SEQ ID NO: 847334
ucacuuaauggcugagggc

SEQ ID NO: 847336 - RNA, 19 nt, Artificial Sequence
  Description of Artificial Sequence: Synthetic oligonucleotide
  Sense strand starting at position 1688 of SEQ ID NO: 588181
aaggaaaugucagaggaaa

SEQ ID NO: 847337 - RNA, 19 nt, Artificial Sequence
  Description of Artificial Sequence: Synthetic oligonucleotide
  Antisense strand to SEQ ID NO: 847336
uuuccucugacauuuccuu

SEQ ID NO: 847338 - RNA, 19 nt, Artificial Sequence
  Description of Artificial Sequence: Synthetic oligonucleotide
  Sense strand starting at position 1917 of SEQ ID NO: 588181
gggucaagaaggugucuua

SEQ ID NO: 847339 - RNA, 19 nt, Artificial Sequence
  Description of Artificial Sequence: Synthetic oligonucleotide
  Antisense strand to SEQ ID NO: 847338
uaagacaccuucuugaccc

SEQ ID NO: 847340 - RNA, 19 nt, Artificial Sequence
  Description of Artificial Sequence: Synthetic oligonucleotide
  Sense strand starting at position 1920 of SEQ ID NO: 588181
ucaagaaggugucuuauuc

SEQ ID NO: 847341 - RNA, 19 nt, Artificial Sequence
  Description of Artificial Sequence: Synthetic oligonucleotide
  Antisense strand to SEQ ID NO: 847340
gaauaagacaccuucuuga

SEQ ID NO: 847342 - RNA, 19 nt, Artificial Sequence
  Description of Artificial Sequence: Synthetic oligonucleotide
  Sense strand starting at position 1929 of SEQ ID NO: 588181
ugucuuauuccagguccuu

SEQ ID NO: 847343 - RNA, 19 nt, Artificial Sequence
  Description of Artificial Sequence: Synthetic oligonucleotide
  Antisense strand to SEQ ID NO: 847342
aaggaccuggaauaagaca

SEQ ID NO: 847344 - RNA, 19 nt, Artificial Sequence
  Description of Artificial Sequence: Synthetic oligonucleotide
  Sense strand starting at position 2106 of SEQ ID NO: 588181
uuggguuugcaguaguuca

SEQ ID NO: 847345 - RNA, 19 nt, Artificial Sequence
  Description of Artificial Sequence: Synthetic oligonucleotide
  Antisense strand to SEQ ID NO: 847344
ugaacuacugcaaacccaa

SEQ ID NO: 847346 - RNA, 19 nt, Artificial Sequence
  Description of Artificial Sequence: Synthetic oligonucleotide
  Sense strand starting at position 2266 of SEQ ID NO: 588181
uaaagucagccaugggaca

SEQ ID NO: 847347 - RNA, 19 nt, Artificial Sequence
  Description of Artificial Sequence: Synthetic oligonucleotide
  Antisense strand to SEQ ID NO: 847346
ugucccauggcugacuuua

SEQ ID NO: 847348 - RNA, 19 nt, Artificial Sequence
  Description of Artificial Sequence: Synthetic oligonucleotide
  Sense strand starting at position 2399 of SEQ ID NO: 588181
gcuugccagccucaacauu

SEQ ID NO: 847349 - RNA, 19 nt, Artificial Sequence
  Description of Artificial Sequence: Synthetic oligonucleotide
  Antisense strand to SEQ ID NO: 847348
aauguugaggcuggcaagc

SEQ ID NO: 847350 - RNA, 19 nt, Artificial Sequence
  Description of Artificial Sequence: Synthetic oligonucleotide
  Sense strand starting at position 2476 of SEQ ID NO: 588181
ugcugcauuuggucaacua

SEQ ID NO: 847351 - RNA, 19 nt, Artificial Sequence
  Description of Artificial Sequence: Synthetic oligonucleotide
  Antisense strand to SEQ ID NO: 847350
uaguugaccaaaugcagca

SEQ ID NO: 847352 - RNA, 19 nt, Artificial Sequence
  Description of Artificial Sequence: Synthetic oligonucleotide
  Sense strand starting at position 2521 of SEQ ID NO: 588181
ggugcuuacugauuaccca

SEQ ID NO: 847353 - RNA, 19 nt, Artificial Sequence
  Description of Artificial Sequence: Synthetic oligonucleotide
  Antisense strand to SEQ ID NO: 847352
uggguaaucaguaagcacc

SEQ ID NO: 847354 - RNA, 19 nt, Artificial Sequence
  Description of Artificial Sequence: Synthetic oligonucleotide
  Sense strand starting at position 2522 of SEQ ID NO: 588181
gugcuuacugauuacccaa

SEQ ID NO: 847355 - RNA, 19 nt, Artificial Sequence
  Description of Artificial Sequence: Synthetic oligonucleotide
  Antisense strand to SEQ ID NO: 847354
uuggguaaucaguaagcac

SEQ ID NO: 847356 - RNA, 19 nt, Artificial Sequence
  Description of Artificial Sequence: Synthetic oligonucleotide
  Sense strand starting at position 2672 of SEQ ID NO: 588181
cuggguaguauauguuagu

SEQ ID NO: 847357 - RNA, 19 nt, Artificial Sequence
  Description of Artificial Sequence: Synthetic oligonucleotide
  Antisense strand to SEQ ID NO: 847356
acuaacauauacuacccag

SEQ ID NO: 847358 - RNA, 19 nt, Artificial Sequence
  Description of Artificial Sequence: Synthetic oligonucleotide
  Sense strand starting at position 2673 of SEQ ID NO: 588181
uggguaguauauguuaguu

SEQ ID NO: 847359 - RNA, 19 nt, Artificial Sequence
  Description of Artificial Sequence: Synthetic oligonucleotide
  Antisense strand to SEQ ID NO: 847358
aacuaacauauacuaccca

SEQ ID NO: 847360 - RNA, 19 nt, Artificial Sequence
  Description of Artificial Sequence: Synthetic oligonucleotide
  Sense strand starting at position 2811 of SEQ ID NO: 588181
cuuggagcugugugagagu

SEQ ID NO: 847361 - RNA, 19 nt, Artificial Sequence
  Description of Artificial Sequence: Synthetic oligonucleotide
  Antisense strand to SEQ ID NO: 847360
acucucacacagcuccaag

SEQ ID NO: 847362 - RNA, 19 nt, Artificial Sequence
  Description of Artificial Sequence: Synthetic oligonucleotide
  Sense strand starting at position 2822 of SEQ ID NO: 588181
gugagaguaucuguuccau

SEQ ID NO: 847363 - RNA, 19 nt, Artificial Sequence
  Description of Artificial Sequence: Synthetic oligonucleotide
  Antisense strand to SEQ ID NO: 847362
auggaacagauacucucac

SEQ ID NO: 847364 - RNA, 19 nt, Artificial Sequence
  Description of Artificial Sequence: Synthetic oligonucleotide
  Sense strand starting at position 2916 of SEQ ID NO: 588181
ugccuuuaucuugacauga

SEQ ID NO: 847365 - RNA, 19 nt, Artificial Sequence
  Description of Artificial Sequence: Synthetic oligonucleotide
  Antisense strand to SEQ ID NO: 847364
ucaugucaagauaaaggca

SEQ ID NO: 847366 - RNA, 19 nt, Artificial Sequence
  Description of Artificial Sequence: Synthetic oligonucleotide
  Sense strand starting at position 3244 of SEQ ID NO: 588181
auaugauguucuuccuaug

SEQ ID NO: 847367 - RNA, 19 nt, Artificial Sequence
  Description of Artificial Sequence: Synthetic oligonucleotide
  Antisense strand to SEQ ID NO: 847366
cauaggaagaacaucauau

SEQ ID NO: 847368 - RNA, 19 nt, Artificial Sequence
  Description of Artificial Sequence: Synthetic oligonucleotide
  Sense strand starting at position 3320 of SEQ ID NO: 588181
agagcucaaucugucucaa

SEQ ID NO: 847369 - RNA, 19 nt, Artificial Sequence
  Description of Artificial Sequence: Synthetic oligonucleotide
  Antisense strand to SEQ ID NO: 847368
uugagacagauugagcucu

SEQ ID NO: 847370 - RNA, 19 nt, Artificial Sequence
  Description of Artificial Sequence: Synthetic oligonucleotide
  Sense strand starting at position 3388 of SEQ ID NO: 588181
agaucacucuaucaugaag

SEQ ID NO: 847371 - RNA, 19 nt, Artificial Sequence
  Description of Artificial Sequence: Synthetic oligonucleotide
  Antisense strand to SEQ ID NO: 847370
cuucaugauagagugaucu

SEQ ID NO: 847372 - RNA, 19 nt, Artificial Sequence
  Description of Artificial Sequence: Synthetic oligonucleotide
  Sense strand starting at position 3445 of SEQ ID NO: 588181
ccaugaaaucauggcagua

SEQ ID NO: 847373 - RNA, 19 nt, Artificial Sequence
  Description of Artificial Sequence: Synthetic oligonucleotide
  Antisense strand to SEQ ID NO: 847372
uacugccaugauuucaugg

SEQ ID NO: 847374 - RNA, 19 nt, Artificial Sequence
  Description of Artificial Sequence: Synthetic oligonucleotide
  Sense strand starting at position 3460 of SEQ ID NO: 588181
aguagacaucauggcagua

SEQ ID NO: 847375 - RNA, 19 nt, Artificial Sequence
  Description of Artificial Sequence: Synthetic oligonucleotide
  Antisense strand to SEQ ID NO: 847374
uacugccaugaugucuacu

SEQ ID NO: 847376 - RNA, 19 nt, Artificial Sequence
  Description of Artificial Sequence: Synthetic oligonucleotide
  Sense strand starting at position 3949 of SEQ ID NO: 588181
cugucuacugcugauugaa

SEQ ID NO: 847377 - RNA, 19 nt, Artificial Sequence
  Description of Artificial Sequence: Synthetic oligonucleotide
  Antisense strand to SEQ ID NO: 847376
uucaaucagcaguagacag

SEQ ID NO: 847378 - RNA, 19 nt, Artificial Sequence
  Description of Artificial Sequence: Synthetic oligonucleotide
  Sense strand starting at position 3951 of SEQ ID NO: 588181
gucuacugcugauugaaug

SEQ ID NO: 847379 - RNA, 19 nt, Artificial Sequence
  Description of Artificial Sequence: Synthetic oligonucleotide
  Antisense strand to SEQ ID NO: 847378
cauucaaucagcaguagac

SEQ ID NO: 847380 - RNA, 19 nt, Artificial Sequence
  Description of Artificial Sequence: Synthetic oligonucleotide
  Sense strand starting at position 6 of SEQ ID NO: 588182
cugcuuuaguugucagagg

SEQ ID NO: 847381 - RNA, 19 nt, Artificial Sequence
  Description of Artificial Sequence: Synthetic oligonucleotide
  Antisense strand to SEQ ID NO: 847380
ccucugacaacuaaagcag

SEQ ID NO: 847382 - RNA, 19 nt, Artificial Sequence
  Description of Artificial Sequence: Synthetic oligonucleotide
  Sense strand starting at position 11 of SEQ ID NO: 588182
uuaguugucagagggugaa

SEQ ID NO: 847383 - RNA, 19 nt, Artificial Sequence
  Description of Artificial Sequence: Synthetic oligonucleotide
  Antisense strand to SEQ ID NO: 847382
uucacccucugacaacuaa

SEQ ID NO: 847384 - RNA, 19 nt, Artificial Sequence
  Description of Artificial Sequence: Synthetic oligonucleotide
  Sense strand starting at position 31 of SEQ ID NO: 588182
ugacaacacgauugauuga

SEQ ID NO: 847385 - RNA, 19 nt, Artificial Sequence
  Description of Artificial Sequence: Synthetic oligonucleotide
  Antisense strand to SEQ ID NO: 847384
ucaaucaaucguguuguca

SEQ ID NO: 847386 - RNA, 19 nt, Artificial Sequence
  Description of Artificial Sequence: Synthetic oligonucleotide
  Sense strand starting at position 38 of SEQ ID NO: 588182
acgauugauugacagggaa

SEQ ID NO: 847387 - RNA, 19 nt, Artificial Sequence
  Description of Artificial Sequence: Synthetic oligonucleotide
  Antisense strand to SEQ ID NO: 847386
uucccugucaaucaaucgu

SEQ ID NO: 847388 - RNA, 19 nt, Artificial Sequence
  Description of Artificial Sequence: Synthetic oligonucleotide
  Sense strand starting at position 107 of SEQ ID NO: 588182
agacuuagcuccucagaga

SEQ ID NO: 847389 - RNA, 19 nt, Artificial Sequence
  Description of Artificial Sequence: Synthetic oligonucleotide
  Antisense strand to SEQ ID NO: 847388
ucucugaggagcuaagucu

SEQ ID NO: 847390 - RNA, 19 nt, Artificial Sequence
  Description of Artificial Sequence: Synthetic oligonucleotide
  Sense strand starting at position 140 of SEQ ID NO: 588182
ggucuuggccaggaacaga

SEQ ID NO: 847391 - RNA, 19 nt, Artificial Sequence
  Description of Artificial Sequence: Synthetic oligonucleotide
  Antisense strand to SEQ ID NO: 847390
ucuguuccuggccaagacc

SEQ ID NO: 847392 - RNA, 19 nt, Artificial Sequence
  Description of Artificial Sequence: Synthetic oligonucleotide
  Sense strand starting at position 155 of SEQ ID NO: 588182
cagaucaguugaguggauu

SEQ ID NO: 847393 - RNA, 19 nt, Artificial Sequence
  Description of Artificial Sequence: Synthetic oligonucleotide
  Antisense strand to SEQ ID NO: 847392
aauccacucaacugaucug

SEQ ID NO: 847394 - RNA, 19 nt, Artificial Sequence
  Description of Artificial Sequence: Synthetic oligonucleotide
  Sense strand starting at position 215 of SEQ ID NO: 588182
ucacgauggcuucagggaa

SEQ ID NO: 847395 - RNA, 19 nt, Artificial Sequence
  Description of Artificial Sequence: Synthetic oligonucleotide
  Antisense strand to SEQ ID NO: 847394
uucccugaagccaucguga

SEQ ID NO: 847396 - RNA, 19 nt, Artificial Sequence
  Description of Artificial Sequence: Synthetic oligonucleotide
  Sense strand starting at position 291 of SEQ ID NO: 588182
cucaucaaucuugagcaga

SEQ ID NO: 847397 - RNA, 19 nt, Artificial Sequence
  Description of Artificial Sequence: Synthetic oligonucleotide
  Antisense strand to SEQ ID NO: 847396
ucugcucaagauugaugag

SEQ ID NO: 847398 - RNA, 19 nt, Artificial Sequence
  Description of Artificial Sequence: Synthetic oligonucleotide
  Sense strand starting at position 1205 of SEQ ID NO: 588182
uugugugguacguuuguua

SEQ ID NO: 847399 - RNA, 19 nt, Artificial Sequence
  Description of Artificial Sequence: Synthetic oligonucleotide
  Antisense strand to SEQ ID NO: 847398
uaacaaacguaccacacaa

SEQ ID NO: 847400 - RNA, 19 nt, Artificial Sequence
  Description of Artificial Sequence: Synthetic oligonucleotide
  Sense strand starting at position 1216 of SEQ ID NO: 588182
guuuguuauacuugaugag

SEQ ID NO: 847401 - RNA, 19 nt, Artificial Sequence
  Description of Artificial Sequence: Synthetic oligonucleotide
  Antisense strand to SEQ ID NO: 847400
cucaucaaguauaacaaac

SEQ ID NO: 847402 - RNA, 19 nt, Artificial Sequence
  Description of Artificial Sequence: Synthetic oligonucleotide
  Sense strand starting at position 1225 of SEQ ID NO: 588182
acuugaugagccgguauca

SEQ ID NO: 847403 - RNA, 19 nt, Artificial Sequence
  Description of Artificial Sequence: Synthetic oligonucleotide
  Antisense strand to SEQ ID NO: 847402
ugauaccggcucaucaagu

SEQ ID NO: 847404 - RNA, 19 nt, Artificial Sequence
  Description of Artificial Sequence: Synthetic oligonucleotide
  Sense strand starting at position 1235 of SEQ ID NO: 588182
ccgguaucaaugcaugguu

SEQ ID NO: 847405 - RNA, 19 nt, Artificial Sequence
  Description of Artificial Sequence: Synthetic oligonucleotide
  Antisense strand to SEQ ID NO: 847404
aaccaugcauugauaccgg

SEQ ID NO: 847406 - RNA, 19 nt, Artificial Sequence
  Description of Artificial Sequence: Synthetic oligonucleotide
  Sense strand starting at position 1238 of SEQ ID NO: 588182
guaucaaugcaugguuacu

SEQ ID NO: 847407 - RNA, 19 nt, Artificial Sequence
  Description of Artificial Sequence: Synthetic oligonucleotide
  Antisense strand to SEQ ID NO: 847406
aguaaccaugcauugauac

SEQ ID NO: 847408 - RNA, 19 nt, Artificial Sequence
  Description of Artificial Sequence: Synthetic oligonucleotide
  Sense strand starting at position 1240 of SEQ ID NO: 588182
aucaaugcaugguuacuaa

SEQ ID NO: 847409 - RNA, 19 nt, Artificial Sequence
  Description of Artificial Sequence: Synthetic oligonucleotide
  Antisense strand to SEQ ID NO: 847408
uuaguaaccaugcauugau

SEQ ID NO: 847410 - RNA, 19 nt, Artificial Sequence
  Description of Artificial Sequence: Synthetic oligonucleotide
  Sense strand starting at position 1304 of SEQ ID NO: 588182
uugugcauucuaugagauu

SEQ ID NO: 847411 - RNA, 19 nt, Artificial Sequence
  Description of Artificial Sequence: Synthetic oligonucleotide
  Antisense strand to SEQ ID NO: 847410
aaucucauagaaugcacaa

SEQ ID NO: 847412 - RNA, 19 nt, Artificial Sequence
  Description of Artificial Sequence: Synthetic oligonucleotide
  Sense strand starting at position 1610 of SEQ ID NO: 588182
cagagcuaucaguguugaa

SEQ ID NO: 847413 - RNA, 19 nt, Artificial Sequence
  Description of Artificial Sequence: Synthetic oligonucleotide
  Antisense strand to SEQ ID NO: 847412
uucaacacugauagcucug

SEQ ID NO: 847414 - RNA, 19 nt, Artificial Sequence
  Description of Artificial Sequence: Synthetic oligonucleotide
  Sense strand starting at position 1719 of SEQ ID NO: 588182
ucauccuuauugguaaaga

SEQ ID NO: 847415 - RNA, 19 nt, Artificial Sequence
  Description of Artificial Sequence: Synthetic oligonucleotide
  Antisense strand to SEQ ID NO: 847414
ucuuuaccaauaaggauga

SEQ ID NO: 847416 - RNA, 19 nt, Artificial Sequence
  Description of Artificial Sequence: Synthetic oligonucleotide
  Sense strand starting at position 1919 of SEQ ID NO: 588182
guggucauaucugucuuga

SEQ ID NO: 847417 - RNA, 19 nt, Artificial Sequence
  Description of Artificial Sequence: Synthetic oligonucleotide
  Antisense strand to SEQ ID NO: 847416
ucaagacagauaugaccac

SEQ ID NO: 847418 - RNA, 19 nt, Artificial Sequence
  Description of Artificial Sequence: Synthetic oligonucleotide
  Sense strand starting at position 1921 of SEQ ID NO: 588182
ggucauaucugucuugagu

SEQ ID NO: 847419 - RNA, 19 nt, Artificial Sequence
  Description of Artificial Sequence: Synthetic oligonucleotide
  Antisense strand to SEQ ID NO: 847418
acucaagacagauaugacc

SEQ ID NO: 847420 - RNA, 19 nt, Artificial Sequence
  Description of Artificial Sequence: Synthetic oligonucleotide
  Sense strand starting at position 2008 of SEQ ID NO: 588182
gcaugugucauugcuuagu

SEQ ID NO: 847421 - RNA, 19 nt, Artificial Sequence
  Description of Artificial Sequence: Synthetic oligonucleotide
  Antisense strand to SEQ ID NO: 847420
acuaagcaaugacacaugc

SEQ ID NO: 847422 - RNA, 19 nt, Artificial Sequence
  Description of Artificial Sequence: Synthetic oligonucleotide
  Sense strand starting at position 2032 of SEQ ID NO: 588182
gugacuguccauugugaca

SEQ ID NO: 847423 - RNA, 19 nt, Artificial Sequence
  Description of Artificial Sequence: Synthetic oligonucleotide
  Antisense strand to SEQ ID NO: 847422
ugucacaauggacagucac

SEQ ID NO: 847424 - RNA, 19 nt, Artificial Sequence
  Description of Artificial Sequence: Synthetic oligonucleotide
  Sense strand starting at position 2054 of SEQ ID NO: 588182
ggacauucucaaggucaca

SEQ ID NO: 847425 - RNA, 19 nt, Artificial Sequence
  Description of Artificial Sequence: Synthetic oligonucleotide
  Antisense strand to SEQ ID NO: 847424
ugugaccuugagaaugucc

SEQ ID NO: 847426 - RNA, 19 nt, Artificial Sequence
  Description of Artificial Sequence: Synthetic oligonucleotide
  Sense strand starting at position 2101 of SEQ ID NO: 588182
ggaauuaucuugcugcuug

SEQ ID NO: 847427 - RNA, 19 nt, Artificial Sequence
  Description of Artificial Sequence: Synthetic oligonucleotide
  Antisense strand to SEQ ID NO: 847426
caagcagcaagauaauucc

SEQ ID NO: 847428 - RNA, 19 nt, Artificial Sequence
  Description of Artificial Sequence: Synthetic oligonucleotide
  Sense strand starting at position 2168 of SEQ ID NO: 588182
gugaacauugaguagcuga

SEQ ID NO: 847429 - RNA, 19 nt, Artificial Sequence
  Description of Artificial Sequence: Synthetic oligonucleotide
  Antisense strand to SEQ ID NO: 847428
ucagcuacucaauguucac

SEQ ID NO: 847430 - RNA, 19 nt, Artificial Sequence
  Description of Artificial Sequence: Synthetic oligonucleotide
  Sense strand starting at position 2171 of SEQ ID NO: 588182
aacauugaguagcugagua

SEQ ID NO: 847431 - RNA, 19 nt, Artificial Sequence
  Description of Artificial Sequence: Synthetic oligonucleotide
  Antisense strand to SEQ ID NO: 847430
uacucagcuacucaauguu

SEQ ID NO: 847432 - RNA, 19 nt, Artificial Sequence
  Description of Artificial Sequence: Synthetic oligonucleotide
  Sense strand starting at position 2494 of SEQ ID NO: 588182
uucuauagacaugggcaaa

SEQ ID NO: 847433 - RNA, 19 nt, Artificial Sequence
  Description of Artificial Sequence: Synthetic oligonucleotide
  Antisense strand to SEQ ID NO: 847432
uuugcccaugucuauagaa

SEQ ID NO: 847434 - RNA, 19 nt, Artificial Sequence
  Description of Artificial Sequence: Synthetic oligonucleotide
  Sense strand starting at position 2568 of SEQ ID NO: 588182
uggccagauauggguagaa

SEQ ID NO: 847435 - RNA, 19 nt, Artificial Sequence
  Description of Artificial Sequence: Synthetic oligonucleotide
  Antisense strand to SEQ ID NO: 847434
uucuacccauaucuggcca

SEQ ID NO: 847436 - RNA, 19 nt, Artificial Sequence
  Description of Artificial Sequence: Synthetic oligonucleotide
  Sense strand starting at position 2610 of SEQ ID NO: 588182
ugcaaauucucuccaugag

SEQ ID NO: 847437 - RNA, 19 nt, Artificial Sequence
  Description of Artificial Sequence: Synthetic oligonucleotide
  Antisense strand to SEQ ID NO: 847436
cucauggagagaauuugca

SEQ ID NO: 847438 - RNA, 19 nt, Artificial Sequence
  Description of Artificial Sequence: Synthetic oligonucleotide
  Sense strand starting at position 2740 of SEQ ID NO: 588182
uaaauagucugauugaguu

SEQ ID NO: 847439 - RNA, 19 nt, Artificial Sequence
  Description of Artificial Sequence: Synthetic oligonucleotide
  Antisense strand to SEQ ID NO: 847438
aacucaaucagacuauuua

SEQ ID NO: 847440 - RNA, 19 nt, Artificial Sequence
  Description of Artificial Sequence: Synthetic oligonucleotide
  Sense strand starting at position 2744 of SEQ ID NO: 588182
uagucugauugaguuaaua

SEQ ID NO: 847441 - RNA, 19 nt, Artificial Sequence
  Description of Artificial Sequence: Synthetic oligonucleotide
  Antisense strand to SEQ ID NO: 847440
uauuaacucaaucagacua

SEQ ID NO: 847442 - RNA, 19 nt, Artificial Sequence
  Description of Artificial Sequence: Synthetic oligonucleotide
  Sense strand starting at position 2752 of SEQ ID NO: 588182
uugaguuaauaacuuguga

SEQ ID NO: 847443 - RNA, 19 nt, Artificial Sequence
  Description of Artificial Sequence: Synthetic oligonucleotide
  Antisense strand to SEQ ID NO: 847442
ucacaaguuauuaacucaa

SEQ ID NO: 847444 - RNA, 19 nt, Artificial Sequence
  Description of Artificial Sequence: Synthetic oligonucleotide
  Sense strand starting at position 2911 of SEQ ID NO: 588182
cugaaucuguguccaugaa

SEQ ID NO: 847445 - RNA, 19 nt, Artificial Sequence
  Description of Artificial Sequence: Synthetic oligonucleotide
  Antisense strand to SEQ ID NO: 847444
uucauggacacagauucag

SEQ ID NO: 847446 - RNA, 19 nt, Artificial Sequence
  Description of Artificial Sequence: Synthetic oligonucleotide
  Sense strand starting at position 2912 of SEQ ID NO: 588182
ugaaucuguguccaugaaa

SEQ ID NO: 847447 - RNA, 19 nt, Artificial Sequence
  Description of Artificial Sequence: Synthetic oligonucleotide
  Antisense strand to SEQ ID NO: 847446
uuucauggacacagauuca

SEQ ID NO: 847448 - RNA, 19 nt, Artificial Sequence
  Description of Artificial Sequence: Synthetic oligonucleotide
  Sense strand starting at position 2915 of SEQ ID NO: 588182
aucuguguccaugaaauaa

SEQ ID NO: 847449 - RNA, 19 nt, Artificial Sequence
  Description of Artificial Sequence: Synthetic oligonucleotide
  Antisense strand to SEQ ID NO: 847448
uuauuucauggacacagau

SEQ ID NO: 847450 - RNA, 19 nt, Artificial Sequence
  Description of Artificial Sequence: Synthetic oligonucleotide
  Sense strand starting at position 3005 of SEQ ID NO: 588182
uguuaugaacauggauaua

SEQ ID NO: 847451 - RNA, 19 nt, Artificial Sequence
  Description of Artificial Sequence: Synthetic oligonucleotide
  Antisense strand to SEQ ID NO: 847450
uauauccauguucauaaca

SEQ ID NO: 847452 - RNA, 19 nt, Artificial Sequence
  Description of Artificial Sequence: Synthetic oligonucleotide
  Sense strand starting at position 3063 of SEQ ID NO: 588182
agaagauucuuccaaugag

SEQ ID NO: 847453 - RNA, 19 nt, Artificial Sequence
  Description of Artificial Sequence: Synthetic oligonucleotide
  Antisense strand to SEQ ID NO: 847452
cucauuggaagaaucuucu

SEQ ID NO: 847454 - RNA, 19 nt, Artificial Sequence
  Description of Artificial Sequence: Synthetic oligonucleotide
  Sense strand starting at position 3107 of SEQ ID NO: 588182
aaagguguucugcagagca

SEQ ID NO: 847455 - RNA, 19 nt, Artificial Sequence
  Description of Artificial Sequence: Synthetic oligonucleotide
  Antisense strand to SEQ ID NO: 847454
ugcucugcagaacaccuuu

SEQ ID NO: 847456 - RNA, 19 nt, Artificial Sequence
  Description of Artificial Sequence: Synthetic oligonucleotide
  Sense strand starting at position 3109 of SEQ ID NO: 588182
agguguucugcagagcaac

SEQ ID NO: 847457 - RNA, 19 nt, Artificial Sequence
  Description of Artificial Sequence: Synthetic oligonucleotide
  Antisense strand to SEQ ID NO: 847456
guugcucugcagaacaccu

SEQ ID NO: 847458 - RNA, 19 nt, Artificial Sequence
  Description of Artificial Sequence: Synthetic oligonucleotide
  Sense strand starting at position 3180 of SEQ ID NO: 588182
ccuggaccuuuguuacaga

SEQ ID NO: 847459 - RNA, 19 nt, Artificial Sequence
  Description of Artificial Sequence: Synthetic oligonucleotide
  Antisense strand to SEQ ID NO: 847458
ucuguaacaaagguccagg

SEQ ID NO: 847460 - RNA, 19 nt, Artificial Sequence
  Description of Artificial Sequence: Synthetic oligonucleotide
  Sense strand starting at position 268 of SEQ ID NO: 588183
gcaacaagucuccaaagua

SEQ ID NO: 847461 - RNA, 19 nt, Artificial Sequence
  Description of Artificial Sequence: Synthetic oligonucleotide
  Antisense strand to SEQ ID NO: 847460
uacuuuggagacuuguugc

SEQ ID NO: 847462 - RNA, 19 nt, Artificial Sequence
  Description of Artificial Sequence: Synthetic oligonucleotide
  Sense strand starting at position 437 of SEQ ID NO: 588183
augucugcugcuguguaaa

SEQ ID NO: 847463 - RNA, 19 nt, Artificial Sequence
  Description of Artificial Sequence: Synthetic oligonucleotide
  Antisense strand to SEQ ID NO: 847462
uuuacacagcagcagacau

SEQ ID NO: 847464 - RNA, 19 nt, Artificial Sequence
  Description of Artificial Sequence: Synthetic oligonucleotide
  Sense strand starting at position 448 of SEQ ID NO: 588183
uguguaaacuacucagaaa

SEQ ID NO: 847465 - RNA, 19 nt, Artificial Sequence
  Description of Artificial Sequence: Synthetic oligonucleotide
  Antisense strand to SEQ ID NO: 847464
uuucugaguaguuuacaca

SEQ ID NO: 847466 - RNA, 19 nt, Artificial Sequence
  Description of Artificial Sequence: Synthetic oligonucleotide
  Sense strand starting at position 459 of SEQ ID NO: 588183
cucagaaaguuugcuugaa

SEQ ID NO: 847467 - RNA, 19 nt, Artificial Sequence
  Description of Artificial Sequence: Synthetic oligonucleotide
  Antisense strand to SEQ ID NO: 847466
uucaagcaaacuuucugag

SEQ ID NO: 847468 - RNA, 19 nt, Artificial Sequence
  Description of Artificial Sequence: Synthetic oligonucleotide
  Sense strand starting at position 460 of SEQ ID NO: 588183
ucagaaaguuugcuugaac

SEQ ID NO: 847469 - RNA, 19 nt, Artificial Sequence
  Description of Artificial Sequence: Synthetic oligonucleotide
  Antisense strand to SEQ ID NO: 847468
guucaagcaaacuuucuga

SEQ ID NO: 847470 - RNA, 19 nt, Artificial Sequence
  Description of Artificial Sequence: Synthetic oligonucleotide
  Sense strand starting at position 461 of SEQ ID NO: 588183
cagaaaguuugcuugaaca

SEQ ID NO: 847471 - RNA, 19 nt, Artificial Sequence
  Description of Artificial Sequence: Synthetic oligonucleotide
  Antisense strand to SEQ ID NO: 847470
uguucaagcaaacuuucug

SEQ ID NO: 847472 - RNA, 19 nt, Artificial Sequence
  Description of Artificial Sequence: Synthetic oligonucleotide
  Sense strand starting at position 463 of SEQ ID NO: 588183
gaaaguuugcuugaacacc

SEQ ID NO: 847473 - RNA, 19 nt, Artificial Sequence
  Description of Artificial Sequence: Synthetic oligonucleotide
  Antisense strand to SEQ ID NO: 847472
gguguucaagcaaacuuuc

SEQ ID NO: 847474 - RNA, 19 nt, Artificial Sequence
  Description of Artificial Sequence: Synthetic oligonucleotide
  Sense strand starting at position 522 of SEQ ID NO: 588183
cugcaaucugaugauacuu

SEQ ID NO: 847475 - RNA, 19 nt, Artificial Sequence
  Description of Artificial Sequence: Synthetic oligonucleotide
  Antisense strand to SEQ ID NO: 847474
aaguaucaucagauugcag

SEQ ID NO: 847476 - RNA, 19 nt, Artificial Sequence
  Description of Artificial Sequence: Synthetic oligonucleotide
  Sense strand starting at position 1405 of SEQ ID NO: 588183
uuguuugauguaggaaaga

SEQ ID NO: 847477 - RNA, 19 nt, Artificial Sequence
  Description of Artificial Sequence: Synthetic oligonucleotide
  Antisense strand to SEQ ID NO: 847476
ucuuuccuacaucaaacaa

SEQ ID NO: 847478 - RNA, 19 nt, Artificial Sequence
  Description of Artificial Sequence: Synthetic oligonucleotide
  Sense strand starting at position 1454 of SEQ ID NO: 588183
ggaaacauuuaccauguau

SEQ ID NO: 847479 - RNA, 19 nt, Artificial Sequence
  Description of Artificial Sequence: Synthetic oligonucleotide
  Antisense strand to SEQ ID NO: 847478
auacaugguaaauguuucc

SEQ ID NO: 847480 - RNA, 19 nt, Artificial Sequence
  Description of Artificial Sequence: Synthetic oligonucleotide
  Sense strand starting at position 1466 of SEQ ID NO: 588183
cauguauucuuucugaagg

SEQ ID NO: 847481 - RNA, 19 nt, Artificial Sequence
  Description of Artificial Sequence: Synthetic oligonucleotide
  Antisense strand to SEQ ID NO: 847480
ccuucagaaagaauacaug

SEQ ID NO: 847482 - RNA, 19 nt, Artificial Sequence
  Description of Artificial Sequence: Synthetic oligonucleotide
  Sense strand starting at position 1631 of SEQ ID NO: 588183
ucguaaccucaagauggua

SEQ ID NO: 847483 - RNA, 19 nt, Artificial Sequence
  Description of Artificial Sequence: Synthetic oligonucleotide
  Antisense strand to SEQ ID NO: 847482
uaccaucuugagguuacga

SEQ ID NO: 847484 - RNA, 19 nt, Artificial Sequence
  Description of Artificial Sequence: Synthetic oligonucleotide
  Sense strand starting at position 2039 of SEQ ID NO: 588183
cuggaaucaugagcacaau

SEQ ID NO: 847485 - RNA, 19 nt, Artificial Sequence
  Description of Artificial Sequence: Synthetic oligonucleotide
  Antisense strand to SEQ ID NO: 847484
auugugcucaugauuccag

SEQ ID NO: 847486 - RNA, 19 nt, Artificial Sequence
  Description of Artificial Sequence: Synthetic oligonucleotide
  Sense strand starting at position 2154 of SEQ ID NO: 588183
ugcagauuugcuugacuca

SEQ ID NO: 847487 - RNA, 19 nt, Artificial Sequence
  Description of Artificial Sequence: Synthetic oligonucleotide
  Antisense strand to SEQ ID NO: 847486
ugagucaagcaaaucugca

SEQ ID NO: 847488 - RNA, 19 nt, Artificial Sequence
  Description of Artificial Sequence: Synthetic oligonucleotide
  Sense strand starting at position 2214 of SEQ ID NO: 588183
gcacuaugugcguucacag

SEQ ID NO: 847489 - RNA, 19 nt, Artificial Sequence
  Description of Artificial Sequence: Synthetic oligonucleotide
  Antisense strand to SEQ ID NO: 847488
cugugaacgcacauagugc

SEQ ID NO: 847490 - RNA, 19 nt, Artificial Sequence
  Description of Artificial Sequence: Synthetic oligonucleotide
  Sense strand starting at position 2233 of SEQ ID NO: 588183
augauucugauguguggaa

SEQ ID NO: 847491 - RNA, 19 nt, Artificial Sequence
  Description of Artificial Sequence: Synthetic oligonucleotide
  Antisense strand to SEQ ID NO: 847490
uuccacacaucagaaucau

SEQ ID NO: 847492 - RNA, 19 nt, Artificial Sequence
  Description of Artificial Sequence: Synthetic oligonucleotide
  Sense strand starting at position 2234 of SEQ ID NO: 588183
ugauucugauguguggaau

SEQ ID NO: 847493 - RNA, 19 nt, Artificial Sequence
  Description of Artificial Sequence: Synthetic oligonucleotide
  Antisense strand to SEQ ID NO: 847492
auuccacacaucagaauca

SEQ ID NO: 847494 - RNA, 19 nt, Artificial Sequence
  Description of Artificial Sequence: Synthetic oligonucleotide
  Sense strand starting at position 2235 of SEQ ID NO: 588183
gauucugauguguggaaua

SEQ ID NO: 847495 - RNA, 19 nt, Artificial Sequence
  Description of Artificial Sequence: Synthetic oligonucleotide
  Antisense strand to SEQ ID NO: 847494
uauuccacacaucagaauc

SEQ ID NO: 847496 - RNA, 19 nt, Artificial Sequence
  Description of Artificial Sequence: Synthetic oligonucleotide
  Sense strand starting at position 2237 of SEQ ID NO: 588183
uucugauguguggaauauc

SEQ ID NO: 847497 - RNA, 19 nt, Artificial Sequence
  Description of Artificial Sequence: Synthetic oligonucleotide
  Antisense strand to SEQ ID NO: 847496
gauauuccacacaucagaa

SEQ ID NO: 847498 - RNA, 19 nt, Artificial Sequence
  Description of Artificial Sequence: Synthetic oligonucleotide
  Sense strand starting at position 2503 of SEQ ID NO: 588183
aaaugagauuucugggaaa

SEQ ID NO: 847499 - RNA, 19 nt, Artificial Sequence
  Description of Artificial Sequence: Synthetic oligonucleotide
  Antisense strand to SEQ ID NO: 847498
uuucccagaaaucucauuu

SEQ ID NO: 847500 - RNA, 19 nt, Artificial Sequence
  Description of Artificial Sequence: Synthetic oligonucleotide
  Sense strand starting at position 2506 of SEQ ID NO: 588183
ugagauuucugggaaauca

SEQ ID NO: 847501 - RNA, 19 nt, Artificial Sequence
  Description of Artificial Sequence: Synthetic oligonucleotide
  Antisense strand to SEQ ID NO: 847500
ugauuucccagaaaucuca

SEQ ID NO: 847502 - RNA, 19 nt, Artificial Sequence
  Description of Artificial Sequence: Synthetic oligonucleotide
  Sense strand starting at position 2516 of SEQ ID NO: 588183
gggaaaucauuacuauguu

SEQ ID NO: 847503 - RNA, 19 nt, Artificial Sequence
  Description of Artificial Sequence: Synthetic oligonucleotide
  Antisense strand to SEQ ID NO: 847502
aacauaguaaugauuuccc

SEQ ID NO: 847504 - RNA, 19 nt, Artificial Sequence
  Description of Artificial Sequence: Synthetic oligonucleotide
  Sense strand starting at position 2564 of SEQ ID NO: 588183
uguuucauuugggaaagga

SEQ ID NO: 847505 - RNA, 19 nt, Artificial Sequence
  Description of Artificial Sequence: Synthetic oligonucleotide
  Antisense strand to SEQ ID NO: 847504
uccuuucccaaaugaaaca

SEQ ID NO: 847506 - RNA, 19 nt, Artificial Sequence
  Description of Artificial Sequence: Synthetic oligonucleotide
  Sense strand starting at position 2598 of SEQ ID NO: 588183
gucggaagaaucugaggaa

SEQ ID NO: 847507 - RNA, 19 nt, Artificial Sequence
  Description of Artificial Sequence: Synthetic oligonucleotide
  Antisense strand to SEQ ID NO: 847506
uuccucagauucuuccgac

SEQ ID NO: 847508 - RNA, 19 nt, Artificial Sequence
  Description of Artificial Sequence: Synthetic oligonucleotide
  Sense strand starting at position 2663 of SEQ ID NO: 588183
caggguuaauuguuuaaag

SEQ ID NO: 847509 - RNA, 19 nt, Artificial Sequence
  Description of Artificial Sequence: Synthetic oligonucleotide
  Antisense strand to SEQ ID NO: 847508
cuuuaaacaauuaacccug

SEQ ID NO: 847510 - RNA, 19 nt, Artificial Sequence
  Description of Artificial Sequence: Synthetic oligonucleotide
  Sense strand starting at position 2745 of SEQ ID NO: 588183
cuaugaguugcacaaugug

SEQ ID NO: 847511 - RNA, 19 nt, Artificial Sequence
  Description of Artificial Sequence: Synthetic oligonucleotide
  Antisense strand to SEQ ID NO: 847510
cacauugugcaacucauag

SEQ ID NO: 847512 - RNA, 19 nt, Artificial Sequence
  Description of Artificial Sequence: Synthetic oligonucleotide
  Sense strand starting at position 2947 of SEQ ID NO: 588183
gggaaaccuugucucaaca

SEQ ID NO: 847513 - RNA, 19 nt, Artificial Sequence
  Description of Artificial Sequence: Synthetic oligonucleotide
  Antisense strand to SEQ ID NO: 847512
uguugagacaagguuuccc

SEQ ID NO: 847514 - RNA, 19 nt, Artificial Sequence
  Description of Artificial Sequence: Synthetic oligonucleotide
  Sense strand starting at position 3010 of SEQ ID NO: 588183
auguaaauacuugguaaac

SEQ ID NO: 847515 - RNA, 19 nt, Artificial Sequence
  Description of Artificial Sequence: Synthetic oligonucleotide
  Antisense strand to SEQ ID NO: 847514
guuuaccaaguauuuacau

SEQ ID NO: 847516 - RNA, 19 nt, Artificial Sequence
  Description of Artificial Sequence: Synthetic oligonucleotide
  Sense strand starting at position 3070 of SEQ ID NO: 588183
cuuauaauugccgauugga

SEQ ID NO: 847517 - RNA, 19 nt, Artificial Sequence
  Description of Artificial Sequence: Synthetic oligonucleotide
  Antisense strand to SEQ ID NO: 847516
uccaaucggcaauuauaag

SEQ ID NO: 847518 - RNA, 19 nt, Artificial Sequence
  Description of Artificial Sequence: Synthetic oligonucleotide
  Sense strand starting at position 3078 of SEQ ID NO: 588183
ugccgauuggagcauauau

SEQ ID NO: 847519 - RNA, 19 nt, Artificial Sequence
  Description of Artificial Sequence: Synthetic oligonucleotide
  Antisense strand to SEQ ID NO: 847518
auauaugcuccaaucggca

SEQ ID NO: 847520 - RNA, 19 nt, Artificial Sequence
  Description of Artificial Sequence: Synthetic oligonucleotide
  Sense strand starting at position 3187 of SEQ ID NO: 588183
cuuccuuuaggccaacaga

SEQ ID NO: 847521 - RNA, 19 nt, Artificial Sequence
  Description of Artificial Sequence: Synthetic oligonucleotide
  Antisense strand to SEQ ID NO: 847520
ucuguuggccuaaaggaag

SEQ ID NO: 847522 - RNA, 19 nt, Artificial Sequence
  Description of Artificial Sequence: Synthetic oligonucleotide
  Sense strand starting at position 3277 of SEQ ID NO: 588183
augcuagucuaagugagaa

SEQ ID NO: 847523 - RNA, 19 nt, Artificial Sequence
  Description of Artificial Sequence: Synthetic oligonucleotide
  Antisense strand to SEQ ID NO: 847522
uucucacuuagacuagcau

SEQ ID NO: 847524 - RNA, 19 nt, Artificial Sequence
  Description of Artificial Sequence: Synthetic oligonucleotide
  Sense strand starting at position 3279 of SEQ ID NO: 588183
gcuagucuaagugagaaga

SEQ ID NO: 847525 - RNA, 19 nt, Artificial Sequence
  Description of Artificial Sequence: Synthetic oligonucleotide
  Antisense strand to SEQ ID NO: 847524
ucuucucacuuagacuagc

SEQ ID NO: 847526 - RNA, 19 nt, Artificial Sequence
  Description of Artificial Sequence: Synthetic oligonucleotide
  Sense strand starting at position 3635 of SEQ ID NO: 588183
uuaguugucagagggugaa

SEQ ID NO: 847527 - RNA, 19 nt, Artificial Sequence
  Description of Artificial Sequence: Synthetic oligonucleotide
  Antisense strand to SEQ ID NO: 847526
uucacccucugacaacuaa

SEQ ID NO: 847528 - RNA, 19 nt, Artificial Sequence
  Description of Artificial Sequence: Synthetic oligonucleotide
  Sense strand starting at position 3655 of SEQ ID NO: 588183
ugacaacacgauugauuga

SEQ ID NO: 847529 - RNA, 19 nt, Artificial Sequence
  Description of Artificial Sequence: Synthetic oligonucleotide
  Antisense strand to SEQ ID NO: 847528
ucaaucaaucguguuguca

SEQ ID NO: 847530 - RNA, 19 nt, Artificial Sequence
  Description of Artificial Sequence: Synthetic oligonucleotide
  Sense strand starting at position 3731 of SEQ ID NO: 588183
agacuuagcuccucagaga

SEQ ID NO: 847531 - RNA, 19 nt, Artificial Sequence
  Description of Artificial Sequence: Synthetic oligonucleotide
  Antisense strand to SEQ ID NO: 847530
ucucugaggagcuaagucu

SEQ ID NO: 847532 - RNA, 19 nt, Artificial Sequence
  Description of Artificial Sequence: Synthetic oligonucleotide
  Sense strand starting at position 3764 of SEQ ID NO: 588183
ggucuuggccaggaacaga

SEQ ID NO: 847533 - RNA, 19 nt, Artificial Sequence
  Description of Artificial Sequence: Synthetic oligonucleotide
  Antisense strand to SEQ ID NO: 847532
ucuguuccuggccaagacc

SEQ ID NO: 847534 - RNA, 19 nt, Artificial Sequence
  Description of Artificial Sequence: Synthetic oligonucleotide
  Sense strand starting at position 3779 of SEQ ID NO: 588183
cagaucaguugaguggauu

SEQ ID NO: 847535 - RNA, 19 nt, Artificial Sequence
  Description of Artificial Sequence: Synthetic oligonucleotide
  Antisense strand to SEQ ID NO: 847534
aauccacucaacugaucug

SEQ ID NO: 847536 - RNA, 19 nt, Artificial Sequence
  Description of Artificial Sequence: Synthetic oligonucleotide
  Sense strand starting at position 3839 of SEQ ID NO: 588183
ucacgauggcuucagggaa

SEQ ID NO: 847537 - RNA, 19 nt, Artificial Sequence
  Description of Artificial Sequence: Synthetic oligonucleotide
  Antisense strand to SEQ ID NO: 847536
uucccugaagccaucguga

SEQ ID NO: 847538 - RNA, 19 nt, Artificial Sequence
  Description of Artificial Sequence: Synthetic oligonucleotide
  Sense strand starting at position 3915 of SEQ ID NO: 588183
cucaucaaucuugagcaga

SEQ ID NO: 847539 - RNA, 19 nt, Artificial Sequence
  Description of Artificial Sequence: Synthetic oligonucleotide
  Antisense strand to SEQ ID NO: 847538
ucugcucaagauugaugag

SEQ ID NO: 847540 - RNA, 19 nt, Artificial Sequence
  Description of Artificial Sequence: Synthetic oligonucleotide
  Sense strand starting at position 53 of SEQ ID NO: 588184
guauuaacuguguaauaag

SEQ ID NO: 847541 - RNA, 19 nt, Artificial Sequence
  Description of Artificial Sequence: Synthetic oligonucleotide
  Antisense strand to SEQ ID NO: 847540
cuuauuacacaguuaauac

SEQ ID NO: 847542 - RNA, 19 nt, Artificial Sequence
  Description of Artificial Sequence: Synthetic oligonucleotide
  Sense strand starting at position 327 of SEQ ID NO: 588184
uguauuucuuagccuggua

SEQ ID NO: 847543 - RNA, 19 nt, Artificial Sequence
  Description of Artificial Sequence: Synthetic oligonucleotide
  Antisense strand to SEQ ID NO: 847542
uaccaggcuaagaaauaca

SEQ ID NO: 847544 - RNA, 19 nt, Artificial Sequence
  Description of Artificial Sequence: Synthetic oligonucleotide
  Sense strand starting at position 425 of SEQ ID NO: 588184
accuauacuguguagacuu

SEQ ID NO: 847545 - RNA, 19 nt, Artificial Sequence
  Description of Artificial Sequence: Synthetic oligonucleotide
  Antisense strand to SEQ ID NO: 847544
aagucuacacaguauaggu

SEQ ID NO: 847546 - RNA, 19 nt, Artificial Sequence
  Description of Artificial Sequence: Synthetic oligonucleotide
  Sense strand starting at position 628 of SEQ ID NO: 588184
gcaaacuggcaauaacuua

SEQ ID NO: 847547 - RNA, 19 nt, Artificial Sequence
  Description of Artificial Sequence: Synthetic oligonucleotide
  Antisense strand to SEQ ID NO: 847546
uaaguuauugccaguuugc

SEQ ID NO: 847548 - RNA, 19 nt, Artificial Sequence
  Description of Artificial Sequence: Synthetic oligonucleotide
  Sense strand starting at position 643 of SEQ ID NO: 588184
cuuaaaugcucaguaacag

SEQ ID NO: 847549 - RNA, 19 nt, Artificial Sequence
  Description of Artificial Sequence: Synthetic oligonucleotide
  Antisense strand to SEQ ID NO: 847548
cuguuacugagcauuuaag

SEQ ID NO: 847550 - RNA, 19 nt, Artificial Sequence
  Description of Artificial Sequence: Synthetic oligonucleotide
  Sense strand starting at position 658 of SEQ ID NO: 588184
acaggaagcugguuaaauu

SEQ ID NO: 847551 - RNA, 19 nt, Artificial Sequence
  Description of Artificial Sequence: Synthetic oligonucleotide
  Antisense strand to SEQ ID NO: 847550
aauuuaaccagcuuccugu

SEQ ID NO: 847552 - RNA, 19 nt, Artificial Sequence
  Description of Artificial Sequence: Synthetic oligonucleotide
  Sense strand starting at position 669 of SEQ ID NO: 588184
guuaaauuagagcacauau

SEQ ID NO: 847553 - RNA, 19 nt, Artificial Sequence
  Description of Artificial Sequence: Synthetic oligonucleotide
  Antisense strand to SEQ ID NO: 847552
auaugugcucuaauuuaac

SEQ ID NO: 847554 - RNA, 19 nt, Artificial Sequence
  Description of Artificial Sequence: Synthetic oligonucleotide
  Sense strand starting at position 1288 of SEQ ID NO: 588184
agauauugacaauggcuuu

SEQ ID NO: 847555 - RNA, 19 nt, Artificial Sequence
  Description of Artificial Sequence: Synthetic oligonucleotide
  Antisense strand to SEQ ID NO: 847554
aaagccauugucaauaucu

SEQ ID NO: 847556 - RNA, 19 nt, Artificial Sequence
  Description of Artificial Sequence: Synthetic oligonucleotide
  Sense strand starting at position 1803 of SEQ ID NO: 588184
gccuaaaccucuccagagu

SEQ ID NO: 847557 - RNA, 19 nt, Artificial Sequence
  Description of Artificial Sequence: Synthetic oligonucleotide
  Antisense strand to SEQ ID NO: 847556
acucuggagagguuuaggc

SEQ ID NO: 847558 - RNA, 19 nt, Artificial Sequence
  Description of Artificial Sequence: Synthetic oligonucleotide
  Sense strand starting at position 1840 of SEQ ID NO: 588184
gaaguuaccugucuccaga

SEQ ID NO: 847559 - RNA, 19 nt, Artificial Sequence
  Description of Artificial Sequence: Synthetic oligonucleotide
  Antisense strand to SEQ ID NO: 847558
ucuggagacagguaacuuc

SEQ ID NO: 847560 - RNA, 19 nt, Artificial Sequence
  Description of Artificial Sequence: Synthetic oligonucleotide
  Sense strand starting at position 2249 of SEQ ID NO: 588184
cucgaaacauuauuaagua

SEQ ID NO: 847561 - RNA, 19 nt, Artificial Sequence
  Description of Artificial Sequence: Synthetic oligonucleotide
  Antisense strand to SEQ ID NO: 847560
uacuuaauaauguuucgag

SEQ ID NO: 847562 - RNA, 19 nt, Artificial Sequence
  Description of Artificial Sequence: Synthetic oligonucleotide
  Sense strand starting at position 2298 of SEQ ID NO: 588184
aagggauguguauauguaa

SEQ ID NO: 847563 - RNA, 19 nt, Artificial Sequence
  Description of Artificial Sequence: Synthetic oligonucleotide
  Antisense strand to SEQ ID NO: 847562
uuacauauacacaucccuu

SEQ ID NO: 847564 - RNA, 19 nt, Artificial Sequence
  Description of Artificial Sequence: Synthetic oligonucleotide
  Sense strand starting at position 2301 of SEQ ID NO: 588184
ggauguguauauguaauua

SEQ ID NO: 847565 - RNA, 19 nt, Artificial Sequence
  Description of Artificial Sequence: Synthetic oligonucleotide
  Antisense strand to SEQ ID NO: 847564
uaauuacauauacacaucc

SEQ ID NO: 847566 - RNA, 19 nt, Artificial Sequence
  Description of Artificial Sequence: Synthetic oligonucleotide
  Sense strand starting at position 2305 of SEQ ID NO: 588184
guguauauguaauuaacac

SEQ ID NO: 847567 - RNA, 19 nt, Artificial Sequence
  Description of Artificial Sequence: Synthetic oligonucleotide
  Antisense strand to SEQ ID NO: 847566
guguuaauuacauauacac

SEQ ID NO: 847568 - RNA, 19 nt, Artificial Sequence
  Description of Artificial Sequence: Synthetic oligonucleotide
  Sense strand starting at position 2313 of SEQ ID NO: 588184
guaauuaacacagagcgga

SEQ ID NO: 847569 - RNA, 19 nt, Artificial Sequence
  Description of Artificial Sequence: Synthetic oligonucleotide
  Antisense strand to SEQ ID NO: 847568
uccgcucuguguuaauuac

SEQ ID NO: 847570 - RNA, 19 nt, Artificial Sequence
  Description of Artificial Sequence: Synthetic oligonucleotide
  Sense strand starting at position 2351 of SEQ ID NO: 588184
uguuaagaauucucaggca

SEQ ID NO: 847571 - RNA, 19 nt, Artificial Sequence
  Description of Artificial Sequence: Synthetic oligonucleotide
  Antisense strand to SEQ ID NO: 847570
ugccugagaauucuuaaca

SEQ ID NO: 847572 - RNA, 19 nt, Artificial Sequence
  Description of Artificial Sequence: Synthetic oligonucleotide
  Sense strand starting at position 2612 of SEQ ID NO: 588184
ucaagugugguggauguua

SEQ ID NO: 847573 - RNA, 19 nt, Artificial Sequence
  Description of Artificial Sequence: Synthetic oligonucleotide
  Antisense strand to SEQ ID NO: 847572
uaacauccaccacacuuga

SEQ ID NO: 847574 - RNA, 19 nt, Artificial Sequence
  Description of Artificial Sequence: Synthetic oligonucleotide
  Sense strand starting at position 2696 of SEQ ID NO: 588184
ccggaacugaagugagaau

SEQ ID NO: 847575 - RNA, 19 nt, Artificial Sequence
  Description of Artificial Sequence: Synthetic oligonucleotide
  Antisense strand to SEQ ID NO: 847574
auucucacuucaguuccgg

SEQ ID NO: 847576 - RNA, 19 nt, Artificial Sequence
  Description of Artificial Sequence: Synthetic oligonucleotide
  Sense strand starting at position 2765 of SEQ ID NO: 588184
ucuggacagcucugagaag

SEQ ID NO: 847577 - RNA, 19 nt, Artificial Sequence
  Description of Artificial Sequence: Synthetic oligonucleotide
  Antisense strand to SEQ ID NO: 847576
cuucucagagcuguccaga

SEQ ID NO: 847578 - RNA, 19 nt, Artificial Sequence
  Description of Artificial Sequence: Synthetic oligonucleotide
  Sense strand starting at position 2870 of SEQ ID NO: 588184
gucucucaccuuuaguaag

SEQ ID NO: 847579 - RNA, 19 nt, Artificial Sequence
  Description of Artificial Sequence: Synthetic oligonucleotide
  Antisense strand to SEQ ID NO: 847578
cuuacuaaaggugagagac

SEQ ID NO: 847580 - RNA, 19 nt, Artificial Sequence
  Description of Artificial Sequence: Synthetic oligonucleotide
  Sense strand starting at position 2903 of SEQ ID NO: 588184
auucucuuucugggagaaa

SEQ ID NO: 847581 - RNA, 19 nt, Artificial Sequence
  Description of Artificial Sequence: Synthetic oligonucleotide
  Antisense strand to SEQ ID NO: 847580
uuucucccagaaagagaau

SEQ ID NO: 847582 - RNA, 19 nt, Artificial Sequence
  Description of Artificial Sequence: Synthetic oligonucleotide
  Sense strand starting at position 2947 of SEQ ID NO: 588184
uguuaacaucugcaguaua

SEQ ID NO: 847583 - RNA, 19 nt, Artificial Sequence
  Description of Artificial Sequence: Synthetic oligonucleotide
  Antisense strand to SEQ ID NO: 847582
uauacugcagauguuaaca

SEQ ID NO: 847584 - RNA, 19 nt, Artificial Sequence
  Description of Artificial Sequence: Synthetic oligonucleotide
  Sense strand starting at position 3031 of SEQ ID NO: 588184
ucuguccauuugucauuga

SEQ ID NO: 847585 - RNA, 19 nt, Artificial Sequence
  Description of Artificial Sequence: Synthetic oligonucleotide
  Antisense strand to SEQ ID NO: 847584
ucaaugacaaauggacaga

SEQ ID NO: 847586 - RNA, 19 nt, Artificial Sequence
  Description of Artificial Sequence: Synthetic oligonucleotide
  Sense strand starting at position 3354 of SEQ ID NO: 588184
gcuuuaucuguggaaagac

SEQ ID NO: 847587 - RNA, 19 nt, Artificial Sequence
  Description of Artificial Sequence: Synthetic oligonucleotide
  Antisense strand to SEQ ID NO: 847586
gucuuuccacagauaaagc

SEQ ID NO: 847588 - RNA, 19 nt, Artificial Sequence
  Description of Artificial Sequence: Synthetic oligonucleotide
  Sense strand starting at position 3412 of SEQ ID NO: 588184
agacguuguuaaucacaca

SEQ ID NO: 847589 - RNA, 19 nt, Artificial Sequence
  Description of Artificial Sequence: Synthetic oligonucleotide
  Antisense strand to SEQ ID NO: 847588
ugugugauuaacaacgucu

SEQ ID NO: 847590 - RNA, 19 nt, Artificial Sequence
  Description of Artificial Sequence: Synthetic oligonucleotide
  Sense strand starting at position 3492 of SEQ ID NO: 588184
agggaaauagauugcuacu

SEQ ID NO: 847591 - RNA, 19 nt, Artificial Sequence
  Description of Artificial Sequence: Synthetic oligonucleotide
  Antisense strand to SEQ ID NO: 847590
aguagcaaucuauuucccu

SEQ ID NO: 847592 - RNA, 19 nt, Artificial Sequence
  Description of Artificial Sequence: Synthetic oligonucleotide
  Sense strand starting at position 3591 of SEQ ID NO: 588184
cuuauuaucuugucuggaa

SEQ ID NO: 847593 - RNA, 19 nt, Artificial Sequence
  Description of Artificial Sequence: Synthetic oligonucleotide
  Antisense strand to SEQ ID NO: 847592
uuccagacaagauaauaag

SEQ ID NO: 847594 - RNA, 19 nt, Artificial Sequence
  Description of Artificial Sequence: Synthetic oligonucleotide
  Sense strand starting at position 3592 of SEQ ID NO: 588184
uuauuaucuugucuggaau

SEQ ID NO: 847595 - RNA, 19 nt, Artificial Sequence
  Description of Artificial Sequence: Synthetic oligonucleotide
  Antisense strand to SEQ ID NO: 847594
auuccagacaagauaauaa

SEQ ID NO: 847596 - RNA, 19 nt, Artificial Sequence
  Description of Artificial Sequence: Synthetic oligonucleotide
  Sense strand starting at position 3595 of SEQ ID NO: 588184
uuaucuugucuggaauuau

SEQ ID NO: 847597 - RNA, 19 nt, Artificial Sequence
  Description of Artificial Sequence: Synthetic oligonucleotide
  Antisense strand to SEQ ID NO: 847596
auaauuccagacaagauaa

SEQ ID NO: 847598 - RNA, 19 nt, Artificial Sequence
  Description of Artificial Sequence: Synthetic oligonucleotide
  Sense strand starting at position 3604 of SEQ ID NO: 588184
cuggaauuauaugugauua

SEQ ID NO: 847599 - RNA, 19 nt, Artificial Sequence
  Description of Artificial Sequence: Synthetic oligonucleotide
  Antisense strand to SEQ ID NO: 847598
uaaucacauauaauuccag

SEQ ID NO: 847600 - RNA, 19 nt, Artificial Sequence
  Description of Artificial Sequence: Synthetic oligonucleotide
  Sense strand starting at position 3612 of SEQ ID NO: 588184
auaugugauuauuugcagu

SEQ ID NO: 847601 - RNA, 19 nt, Artificial Sequence
  Description of Artificial Sequence: Synthetic oligonucleotide
  Antisense strand to SEQ ID NO: 847600
acugcaaauaaucacauau

SEQ ID NO: 847602 - RNA, 19 nt, Artificial Sequence
  Description of Artificial Sequence: Synthetic oligonucleotide
  Sense strand starting at position 3614 of SEQ ID NO: 588184
augugauuauuugcaguuu

SEQ ID NO: 847603 - RNA, 19 nt, Artificial Sequence
  Description of Artificial Sequence: Synthetic oligonucleotide
  Antisense strand to SEQ ID NO: 847602
aaacugcaaauaaucacau

SEQ ID NO: 847604 - RNA, 19 nt, Artificial Sequence
  Description of Artificial Sequence: Synthetic oligonucleotide
  Sense strand starting at position 3665 of SEQ ID NO: 588184
cuagaaaucugccuuaaag

SEQ ID NO: 847605 - RNA, 19 nt, Artificial Sequence
  Description of Artificial Sequence: Synthetic oligonucleotide
  Antisense strand to SEQ ID NO: 847604
cuuuaaggcagauuucuag

SEQ ID NO: 847606 - RNA, 19 nt, Artificial Sequence
  Description of Artificial Sequence: Synthetic oligonucleotide
  Sense strand starting at position 3714 of SEQ ID NO: 588184
cuuguacuacuuugagaaa

SEQ ID NO: 847607 - RNA, 19 nt, Artificial Sequence
  Description of Artificial Sequence: Synthetic oligonucleotide
  Antisense strand to SEQ ID NO: 847606
uuucucaaaguaguacaag

SEQ ID NO: 847608 - RNA, 19 nt, Artificial Sequence
  Description of Artificial Sequence: Synthetic oligonucleotide
  Sense strand starting at position 3727 of SEQ ID NO: 588184
gagaaacacuucucaguag

SEQ ID NO: 847609 - RNA, 19 nt, Artificial Sequence
  Description of Artificial Sequence: Synthetic oligonucleotide
  Antisense strand to SEQ ID NO: 847608
cuacugagaaguguuucuc

SEQ ID NO: 847610 - RNA, 19 nt, Artificial Sequence
  Description of Artificial Sequence: Synthetic oligonucleotide
  Sense strand starting at position 3733 of SEQ ID NO: 588184
cacuucucaguagagugau

SEQ ID NO: 847611 - RNA, 19 nt, Artificial Sequence
  Description of Artificial Sequence: Synthetic oligonucleotide
  Antisense strand to SEQ ID NO: 847610
aucacucuacugagaagug

SEQ ID NO: 847612 - RNA, 19 nt, Artificial Sequence
  Description of Artificial Sequence: Synthetic oligonucleotide
  Sense strand starting at position 3736 of SEQ ID NO: 588184
uucucaguagagugauucu

SEQ ID NO: 847613 - RNA, 19 nt, Artificial Sequence
  Description of Artificial Sequence: Synthetic oligonucleotide
  Antisense strand to SEQ ID NO: 847612
agaaucacucuacugagaa

SEQ ID NO: 847614 - RNA, 19 nt, Artificial Sequence
  Description of Artificial Sequence: Synthetic oligonucleotide
  Sense strand starting at position 3739 of SEQ ID NO: 588184
ucaguagagugauucuuaa

SEQ ID NO: 847615 - RNA, 19 nt, Artificial Sequence
  Description of Artificial Sequence: Synthetic oligonucleotide
  Antisense strand to SEQ ID NO: 847614
uuaagaaucacucuacuga

SEQ ID NO: 847616 - RNA, 19 nt, Artificial Sequence
  Description of Artificial Sequence: Synthetic oligonucleotide
  Sense strand starting at position 3847 of SEQ ID NO: 588184
auggguuucuaaccuaaca

SEQ ID NO: 847617 - RNA, 19 nt, Artificial Sequence
  Description of Artificial Sequence: Synthetic oligonucleotide
  Antisense strand to SEQ ID NO: 847616
uguuagguuagaaacccau

SEQ ID NO: 847618 - RNA, 19 nt, Artificial Sequence
  Description of Artificial Sequence: Synthetic oligonucleotide
  Sense strand starting at position 3892 of SEQ ID NO: 588184
cuagaaggauucuugcaaa

SEQ ID NO: 847619 - RNA, 19 nt, Artificial Sequence
  Description of Artificial Sequence: Synthetic oligonucleotide
  Antisense strand to SEQ ID NO: 847618
uuugcaagaauccuucuag

SEQ ID NO: 847620 - RNA, 19 nt, Artificial Sequence
  Description of Artificial Sequence: Synthetic oligonucleotide
  Sense strand starting at position 3 of SEQ ID NO: 588185
gccuguguucuaggaaagg

SEQ ID NO: 847621 - RNA, 19 nt, Artificial Sequence
  Description of Artificial Sequence: Synthetic oligonucleotide
  Antisense strand to SEQ ID NO: 847620
ccuuuccuagaacacaggc

SEQ ID NO: 847622 - RNA, 19 nt, Artificial Sequence
  Description of Artificial Sequence: Synthetic oligonucleotide
  Sense strand starting at position 67 of SEQ ID NO: 588185
ugggaaaucggcugcaucu

SEQ ID NO: 847623 - RNA, 19 nt, Artificial Sequence
  Description of Artificial Sequence: Synthetic oligonucleotide
  Antisense strand to SEQ ID NO: 847622
agaugcagccgauuuccca

SEQ ID NO: 847624 - RNA, 19 nt, Artificial Sequence
  Description of Artificial Sequence: Synthetic oligonucleotide
  Sense strand starting at position 69 of SEQ ID NO: 588185
ggaaaucggcugcaucuua

SEQ ID NO: 847625 - RNA, 19 nt, Artificial Sequence
  Description of Artificial Sequence: Synthetic oligonucleotide
  Antisense strand to SEQ ID NO: 847624
uaagaugcagccgauuucc

SEQ ID NO: 847626 - RNA, 19 nt, Artificial Sequence
  Description of Artificial Sequence: Synthetic oligonucleotide
  Sense strand starting at position 105 of SEQ ID NO: 588185
gguauauagcuagggaaac

SEQ ID NO: 847627 - RNA, 19 nt, Artificial Sequence
  Description of Artificial Sequence: Synthetic oligonucleotide
  Antisense strand to SEQ ID NO: 847626
guuucccuagcuauauacc

SEQ ID NO: 847628 - RNA, 19 nt, Artificial Sequence
  Description of Artificial Sequence: Synthetic oligonucleotide
  Sense strand starting at position 246 of SEQ ID NO: 588185
aguuguaccuuucuggaaa

SEQ ID NO: 847629 - RNA, 19 nt, Artificial Sequence
  Description of Artificial Sequence: Synthetic oligonucleotide
  Antisense strand to SEQ ID NO: 847628
uuuccagaaagguacaacu

SEQ ID NO: 847630 - RNA, 19 nt, Artificial Sequence
  Description of Artificial Sequence: Synthetic oligonucleotide
  Sense strand starting at position 644 of SEQ ID NO: 588185
guacuuaguggauggucau

SEQ ID NO: 847631 - RNA, 19 nt, Artificial Sequence
  Description of Artificial Sequence: Synthetic oligonucleotide
  Antisense strand to SEQ ID NO: 847630
augaccauccacuaaguac

SEQ ID NO: 847632 - RNA, 19 nt, Artificial Sequence
  Description of Artificial Sequence: Synthetic oligonucleotide
  Sense strand starting at position 647 of SEQ ID NO: 588185
cuuaguggauggucauuau

SEQ ID NO: 847633 - RNA, 19 nt, Artificial Sequence
  Description of Artificial Sequence: Synthetic oligonucleotide
  Antisense strand to SEQ ID NO: 847632
auaaugaccauccacuaag

SEQ ID NO: 847634 - RNA, 19 nt, Artificial Sequence
  Description of Artificial Sequence: Synthetic oligonucleotide
  Sense strand starting at position 650 of SEQ ID NO: 588185
aguggauggucauuauuau

SEQ ID NO: 847635 - RNA, 19 nt, Artificial Sequence
  Description of Artificial Sequence: Synthetic oligonucleotide
  Antisense strand to SEQ ID NO: 847634
auaauaaugaccauccacu

SEQ ID NO: 847636 - RNA, 19 nt, Artificial Sequence
  Description of Artificial Sequence: Synthetic oligonucleotide
  Sense strand starting at position 651 of SEQ ID NO: 588185
guggauggucauuauuauc

SEQ ID NO: 847637 - RNA, 19 nt, Artificial Sequence
  Description of Artificial Sequence: Synthetic oligonucleotide
  Antisense strand to SEQ ID NO: 847636
gauaauaaugaccauccac

SEQ ID NO: 847638 - RNA, 19 nt, Artificial Sequence
  Description of Artificial Sequence: Synthetic oligonucleotide
  Sense strand starting at position 681 of SEQ ID NO: 588185
cucuguguccugggauaca

SEQ ID NO: 847639 - RNA, 19 nt, Artificial Sequence
  Description of Artificial Sequence: Synthetic oligonucleotide
  Antisense strand to SEQ ID NO: 847638
uguaucccaggacacagag

SEQ ID NO: 847640 - RNA, 19 nt, Artificial Sequence
  Description of Artificial Sequence: Synthetic oligonucleotide
  Sense strand starting at position 748 of SEQ ID NO: 588185
caggcuuuaucugugucaa

SEQ ID NO: 847641 - RNA, 19 nt, Artificial Sequence
  Description of Artificial Sequence: Synthetic oligonucleotide
  Antisense strand to SEQ ID NO: 847640
uugacacagauaaagccug

SEQ ID NO: 847642 - RNA, 19 nt, Artificial Sequence
  Description of Artificial Sequence: Synthetic oligonucleotide
  Sense strand starting at position 749 of SEQ ID NO: 588185
aggcuuuaucugugucaag

SEQ ID NO: 847643 - RNA, 19 nt, Artificial Sequence
  Description of Artificial Sequence: Synthetic oligonucleotide
  Antisense strand to SEQ ID NO: 847642
cuugacacagauaaagccu

SEQ ID NO: 847644 - RNA, 19 nt, Artificial Sequence
  Description of Artificial Sequence: Synthetic oligonucleotide
  Sense strand starting at position 750 of SEQ ID NO: 588185
ggcuuuaucugugucaagg

SEQ ID NO: 847645 - RNA, 19 nt, Artificial Sequence
  Description of Artificial Sequence: Synthetic oligonucleotide
  Antisense strand to SEQ ID NO: 847644
ccuugacacagauaaagcc

SEQ ID NO: 847646 - RNA, 19 nt, Artificial Sequence
  Description of Artificial Sequence: Synthetic oligonucleotide
  Sense strand starting at position 756 of SEQ ID NO: 588185
aucugugucaaggguacuu

SEQ ID NO: 847647 - RNA, 19 nt, Artificial Sequence
  Description of Artificial Sequence: Synthetic oligonucleotide
  Antisense strand to SEQ ID NO: 847646
aaguacccuugacacagau

SEQ ID NO: 847648 - RNA, 19 nt, Artificial Sequence
  Description of Artificial Sequence: Synthetic oligonucleotide
  Sense strand starting at position 866 of SEQ ID NO: 588185
cugggaagcucuuccugau

SEQ ID NO: 847649 - RNA, 19 nt, Artificial Sequence
  Description of Artificial Sequence: Synthetic oligonucleotide
  Antisense strand to SEQ ID NO: 847648
aucaggaagagcuucccag

SEQ ID NO: 847650 - RNA, 19 nt, Artificial Sequence
  Description of Artificial Sequence: Synthetic oligonucleotide
  Sense strand starting at position 915 of SEQ ID NO: 588185
accugaaacuauugugaug

SEQ ID NO: 847651 - RNA, 19 nt, Artificial Sequence
  Description of Artificial Sequence: Synthetic oligonucleotide
  Antisense strand to SEQ ID NO: 847650
caucacaauaguuucaggu

SEQ ID NO: 847652 - RNA, 19 nt, Artificial Sequence
  Description of Artificial Sequence: Synthetic oligonucleotide
  Sense strand starting at position 917 of SEQ ID NO: 588185
cugaaacuauugugaugga

SEQ ID NO: 847653 - RNA, 19 nt, Artificial Sequence
  Description of Artificial Sequence: Synthetic oligonucleotide
  Antisense strand to SEQ ID NO: 847652
uccaucacaauaguuucag

SEQ ID NO: 847654 - RNA, 19 nt, Artificial Sequence
  Description of Artificial Sequence: Synthetic oligonucleotide
  Sense strand starting at position 918 of SEQ ID NO: 588185
ugaaacuauugugauggau

SEQ ID NO: 847655 - RNA, 19 nt, Artificial Sequence
  Description of Artificial Sequence: Synthetic oligonucleotide
  Antisense strand to SEQ ID NO: 847654
auccaucacaauaguuuca

SEQ ID NO: 847656 - RNA, 19 nt, Artificial Sequence
  Description of Artificial Sequence: Synthetic oligonucleotide
  Sense strand starting at position 920 of SEQ ID NO: 588185
aaacuauugugauggaugu

SEQ ID NO: 847657 - RNA, 19 nt, Artificial Sequence
  Description of Artificial Sequence: Synthetic oligonucleotide
  Antisense strand to SEQ ID NO: 847656
acauccaucacaauaguuu

SEQ ID NO: 847658 - RNA, 19 nt, Artificial Sequence
  Description of Artificial Sequence: Synthetic oligonucleotide
  Sense strand starting at position 921 of SEQ ID NO: 588185
aacuauugugauggaugua

SEQ ID NO: 847659 - RNA, 19 nt, Artificial Sequence
  Description of Artificial Sequence: Synthetic oligonucleotide
  Antisense strand to SEQ ID NO: 847658
uacauccaucacaauaguu

SEQ ID NO: 847660 - RNA, 19 nt, Artificial Sequence
  Description of Artificial Sequence: Synthetic oligonucleotide
  Sense strand starting at position 924 of SEQ ID NO: 588185
uauugugauggauguacaa

SEQ ID NO: 847661 - RNA, 19 nt, Artificial Sequence
  Description of Artificial Sequence: Synthetic oligonucleotide
  Antisense strand to SEQ ID NO: 847660
uuguacauccaucacaaua

SEQ ID NO: 847662 - RNA, 19 nt, Artificial Sequence
  Description of Artificial Sequence: Synthetic oligonucleotide
  Sense strand starting at position 934 of SEQ ID NO: 588185
gauguacaacccugggaau

SEQ ID NO: 847663 - RNA, 19 nt, Artificial Sequence
  Description of Artificial Sequence: Synthetic oligonucleotide
  Antisense strand to SEQ ID NO: 847662
auucccaggguuguacauc

SEQ ID NO: 847664 - RNA, 19 nt, Artificial Sequence
  Description of Artificial Sequence: Synthetic oligonucleotide
  Sense strand starting at position 935 of SEQ ID NO: 588185
auguacaacccugggaaua

SEQ ID NO: 847665 - RNA, 19 nt, Artificial Sequence
  Description of Artificial Sequence: Synthetic oligonucleotide
  Antisense strand to SEQ ID NO: 847664
uauucccaggguuguacau

SEQ ID NO: 847666 - RNA, 19 nt, Artificial Sequence
  Description of Artificial Sequence: Synthetic oligonucleotide
  Sense strand starting at position 972 of SEQ ID NO: 588185
uguacaguauggguaaguu

SEQ ID NO: 847667 - RNA, 19 nt, Artificial Sequence
  Description of Artificial Sequence: Synthetic oligonucleotide
  Antisense strand to SEQ ID NO: 847666
aacuuacccauacuguaca

SEQ ID NO: 847668 - RNA, 19 nt, Artificial Sequence
  Description of Artificial Sequence: Synthetic oligonucleotide
  Sense strand starting at position 982 of SEQ ID NO: 588185
ggguaaguuguauagcuca

SEQ ID NO: 847669 - RNA, 19 nt, Artificial Sequence
  Description of Artificial Sequence: Synthetic oligonucleotide
  Antisense strand to SEQ ID NO: 847668
ugagcuauacaacuuaccc

SEQ ID NO: 847670 - RNA, 19 nt, Artificial Sequence
  Description of Artificial Sequence: Synthetic oligonucleotide
  Sense strand starting at position 1054 of SEQ ID NO: 588185
uuuacuaaauccucagugu

SEQ ID NO: 847671 - RNA, 19 nt, Artificial Sequence
  Description of Artificial Sequence: Synthetic oligonucleotide
  Antisense strand to SEQ ID NO: 847670
acacugaggauuuaguaaa

SEQ ID NO: 847672 - RNA, 19 nt, Artificial Sequence
  Description of Artificial Sequence: Synthetic oligonucleotide
  Sense strand starting at position 1055 of SEQ ID NO: 588185
uuacuaaauccucagugua

SEQ ID NO: 847673 - RNA, 19 nt, Artificial Sequence
  Description of Artificial Sequence: Synthetic oligonucleotide
  Antisense strand to SEQ ID NO: 847672
uacacugaggauuuaguaa

SEQ ID NO: 847674 - RNA, 19 nt, Artificial Sequence
  Description of Artificial Sequence: Synthetic oligonucleotide
  Sense strand starting at position 1057 of SEQ ID NO: 588185
acuaaauccucaguguaug

SEQ ID NO: 847675 - RNA, 19 nt, Artificial Sequence
  Description of Artificial Sequence: Synthetic oligonucleotide
  Antisense strand to SEQ ID NO: 847674
cauacacugaggauuuagu

SEQ ID NO: 847676 - RNA, 19 nt, Artificial Sequence
  Description of Artificial Sequence: Synthetic oligonucleotide
  Sense strand starting at position 1058 of SEQ ID NO: 588185
cuaaauccucaguguaugu

SEQ ID NO: 847677 - RNA, 19 nt, Artificial Sequence
  Description of Artificial Sequence: Synthetic oligonucleotide
  Antisense strand to SEQ ID NO: 847676
acauacacugaggauuuag

SEQ ID NO: 847678 - RNA, 19 nt, Artificial Sequence
  Description of Artificial Sequence: Synthetic oligonucleotide
  Sense strand starting at position 1063 of SEQ ID NO: 588185
uccucaguguauguuaaca

SEQ ID NO: 847679 - RNA, 19 nt, Artificial Sequence
  Description of Artificial Sequence: Synthetic oligonucleotide
  Antisense strand to SEQ ID NO: 847678
uguuaacauacacugagga

SEQ ID NO: 847680 - RNA, 19 nt, Artificial Sequence
  Description of Artificial Sequence: Synthetic oligonucleotide
  Sense strand starting at position 1103 of SEQ ID NO: 588185
agauaauaaugacgauaac

SEQ ID NO: 847681 - RNA, 19 nt, Artificial Sequence
  Description of Artificial Sequence: Synthetic oligonucleotide
  Antisense strand to SEQ ID NO: 847680
guuaucgucauuauuaucu

SEQ ID NO: 847682 - RNA, 19 nt, Artificial Sequence
  Description of Artificial Sequence: Synthetic oligonucleotide
  Sense strand starting at position 1127 of SEQ ID NO: 588185
acugaacucuugcaugcua

SEQ ID NO: 847683 - RNA, 19 nt, Artificial Sequence
  Description of Artificial Sequence: Synthetic oligonucleotide
  Antisense strand to SEQ ID NO: 847682
uagcaugcaagaguucagu

SEQ ID NO: 847684 - RNA, 19 nt, Artificial Sequence
  Description of Artificial Sequence: Synthetic oligonucleotide
  Sense strand starting at position 1129 of SEQ ID NO: 588185
ugaacucuugcaugcuaga

SEQ ID NO: 847685 - RNA, 19 nt, Artificial Sequence
  Description of Artificial Sequence: Synthetic oligonucleotide
  Antisense strand to SEQ ID NO: 847684
ucuagcaugcaagaguuca

SEQ ID NO: 847686 - RNA, 19 nt, Artificial Sequence
  Description of Artificial Sequence: Synthetic oligonucleotide
  Sense strand starting at position 1142 of SEQ ID NO: 588185
gcuagaaccugcuaaggau

SEQ ID NO: 847687 - RNA, 19 nt, Artificial Sequence
  Description of Artificial Sequence: Synthetic oligonucleotide
  Antisense strand to SEQ ID NO: 847686
auccuuagcagguucuagc

SEQ ID NO: 847688 - RNA, 19 nt, Artificial Sequence
  Description of Artificial Sequence: Synthetic oligonucleotide
  Sense strand starting at position 1201 of SEQ ID NO: 588185
agcagacacuaaucguuau

SEQ ID NO: 847689 - RNA, 19 nt, Artificial Sequence
  Description of Artificial Sequence: Synthetic oligonucleotide
  Antisense strand to SEQ ID NO: 847688
auaacgauuagugucugcu

SEQ ID NO: 847690 - RNA, 19 nt, Artificial Sequence
  Description of Artificial Sequence: Synthetic oligonucleotide
  Sense strand starting at position 1680 of SEQ ID NO: 588185
gcucuuuguucccuuccga

SEQ ID NO: 847691 - RNA, 19 nt, Artificial Sequence
  Description of Artificial Sequence: Synthetic oligonucleotide
  Antisense strand to SEQ ID NO: 847690
ucggaagggaacaaagagc

SEQ ID NO: 847692 - RNA, 19 nt, Artificial Sequence
  Description of Artificial Sequence: Synthetic oligonucleotide
  Sense strand starting at position 2300 of SEQ ID NO: 588185
ccgcguuggcgaaaucgaa

SEQ ID NO: 847693 - RNA, 19 nt, Artificial Sequence
  Description of Artificial Sequence: Synthetic oligonucleotide
  Antisense strand to SEQ ID NO: 847692
uucgauuucgccaacgcgg

SEQ ID NO: 847694 - RNA, 19 nt, Artificial Sequence
  Description of Artificial Sequence: Synthetic oligonucleotide
  Sense strand starting at position 2667 of SEQ ID NO: 588185
guggcuuccggauauucuu

SEQ ID NO: 847695 - RNA, 19 nt, Artificial Sequence
  Description of Artificial Sequence: Synthetic oligonucleotide
  Antisense strand to SEQ ID NO: 847694
aagaauauccggaagccac

SEQ ID NO: 847696 - RNA, 19 nt, Artificial Sequence
  Description of Artificial Sequence: Synthetic oligonucleotide
  Sense strand starting at position 2812 of SEQ ID NO: 588185
uagggcucauugguuacaa

SEQ ID NO: 847697 - RNA, 19 nt, Artificial Sequence
  Description of Artificial Sequence: Synthetic oligonucleotide
  Antisense strand to SEQ ID NO: 847696
uuguaaccaaugagcccua

SEQ ID NO: 847698 - RNA, 19 nt, Artificial Sequence
  Description of Artificial Sequence: Synthetic oligonucleotide
  Sense strand starting at position 3718 of SEQ ID NO: 588185
aaguuuggccuggagcaga

SEQ ID NO: 847699 - RNA, 19 nt, Artificial Sequence
  Description of Artificial Sequence: Synthetic oligonucleotide
  Antisense strand to SEQ ID NO: 847698
ucugcuccaggccaaacuu

SEQ ID NO: 847700 - RNA, 19 nt, Artificial Sequence
  Description of Artificial Sequence: Synthetic oligonucleotide
  Sense strand starting at position 2181 of SEQ ID NO: 588186
caggauaaggcguggaaga

SEQ ID NO: 847701 - RNA, 19 nt, Artificial Sequence
  Description of Artificial Sequence: Synthetic oligonucleotide
  Antisense strand to SEQ ID NO: 847700
ucuuccacgccuuauccug

SEQ ID NO: 847702 - RNA, 19 nt, Artificial Sequence
  Description of Artificial Sequence: Synthetic oligonucleotide
  Sense strand starting at position 2963 of SEQ ID NO: 588186
agagcagaguuguuuguuu

SEQ ID NO: 847703 - RNA, 19 nt, Artificial Sequence
  Description of Artificial Sequence: Synthetic oligonucleotide
  Antisense strand to SEQ ID NO: 847702
aaacaaacaacucugcucu

SEQ ID NO: 847704 - RNA, 19 nt, Artificial Sequence
  Description of Artificial Sequence: Synthetic oligonucleotide
  Sense strand starting at position 2965 of SEQ ID NO: 588186
agcagaguuguuuguuugu

SEQ ID NO: 847705 - RNA, 19 nt, Artificial Sequence
  Description of Artificial Sequence: Synthetic oligonucleotide
  Antisense strand to SEQ ID NO: 847704
acaaacaaacaacucugcu

SEQ ID NO: 847706 - RNA, 19 nt, Artificial Sequence
  Description of Artificial Sequence: Synthetic oligonucleotide
  Sense strand starting at position 2967 of SEQ ID NO: 588186
cagaguuguuuguuuguaa

SEQ ID NO: 847707 - RNA, 19 nt, Artificial Sequence
  Description of Artificial Sequence: Synthetic oligonucleotide
  Antisense strand to SEQ ID NO: 847706
uuacaaacaaacaacucug

SEQ ID NO: 847708 - RNA, 19 nt, Artificial Sequence
  Description of Artificial Sequence: Synthetic oligonucleotide
  Sense strand starting at position 2968 of SEQ ID NO: 588186
agaguuguuuguuuguaau

SEQ ID NO: 847709 - RNA, 19 nt, Artificial Sequence
  Description of Artificial Sequence: Synthetic oligonucleotide
  Antisense strand to SEQ ID NO: 847708
auuacaaacaaacaacucu

SEQ ID NO: 847710 - RNA, 19 nt, Artificial Sequence
  Description of Artificial Sequence: Synthetic oligonucleotide
  Sense strand starting at position 2971 of SEQ ID NO: 588186
guuguuuguuuguaauuuc

SEQ ID NO: 847711 - RNA, 19 nt, Artificial Sequence
  Description of Artificial Sequence: Synthetic oligonucleotide
  Antisense strand to SEQ ID NO: 847710
gaaauuacaaacaaacaac

SEQ ID NO: 847712 - RNA, 19 nt, Artificial Sequence
  Description of Artificial Sequence: Synthetic oligonucleotide
  Sense strand starting at position 2986 of SEQ ID NO: 588186
uuucuugauugggcgauca

SEQ ID NO: 847713 - RNA, 19 nt, Artificial Sequence
  Description of Artificial Sequence: Synthetic oligonucleotide
  Antisense strand to SEQ ID NO: 847712
ugaucgcccaaucaagaaa

SEQ ID NO: 847714 - RNA, 19 nt, Artificial Sequence
  Description of Artificial Sequence: Synthetic oligonucleotide
  Sense strand starting at position 3057 of SEQ ID NO: 588186
cccuuugugauggaagugu

SEQ ID NO: 847715 - RNA, 19 nt, Artificial Sequence
  Description of Artificial Sequence: Synthetic oligonucleotide
  Antisense strand to SEQ ID NO: 847714
acacuuccaucacaaaggg

SEQ ID NO: 847716 - RNA, 19 nt, Artificial Sequence
  Description of Artificial Sequence: Synthetic oligonucleotide
  Sense strand starting at position 3061 of SEQ ID NO: 588186
uugugauggaaguguuaca

SEQ ID NO: 847717 - RNA, 19 nt, Artificial Sequence
  Description of Artificial Sequence: Synthetic oligonucleotide
  Antisense strand to SEQ ID NO: 847716
uguaacacuuccaucacaa

SEQ ID NO: 847718 - RNA, 19 nt, Artificial Sequence
  Description of Artificial Sequence: Synthetic oligonucleotide
  Sense strand starting at position 3066 of SEQ ID NO: 588186
auggaaguguuacaguaga

SEQ ID NO: 847719 - RNA, 19 nt, Artificial Sequence
  Description of Artificial Sequence: Synthetic oligonucleotide
  Antisense strand to SEQ ID NO: 847718
ucuacuguaacacuuccau

SEQ ID NO: 847720 - RNA, 19 nt, Artificial Sequence
  Description of Artificial Sequence: Synthetic oligonucleotide
  Sense strand starting at position 3089 of SEQ ID NO: 588186
ucagaaacaucagagccau

SEQ ID NO: 847721 - RNA, 19 nt, Artificial Sequence
  Description of Artificial Sequence: Synthetic oligonucleotide
  Antisense strand to SEQ ID NO: 847720
auggcucugauguuucuga

SEQ ID NO: 847722 - RNA, 19 nt, Artificial Sequence
  Description of Artificial Sequence: Synthetic oligonucleotide
  Sense strand starting at position 3149 of SEQ ID NO: 588186
uuguaaguuggguguggau

SEQ ID NO: 847723 - RNA, 19 nt, Artificial Sequence
  Description of Artificial Sequence: Synthetic oligonucleotide
  Antisense strand to SEQ ID NO: 847722
auccacacccaacuuacaa

SEQ ID NO: 847724 - RNA, 19 nt, Artificial Sequence
  Description of Artificial Sequence: Synthetic oligonucleotide
  Sense strand starting at position 3156 of SEQ ID NO: 588186
uuggguguggauuguauau

SEQ ID NO: 847725 - RNA, 19 nt, Artificial Sequence
  Description of Artificial Sequence: Synthetic oligonucleotide
  Antisense strand to SEQ ID NO: 847724
auauacaauccacacccaa

SEQ ID NO: 847726 - RNA, 19 nt, Artificial Sequence
  Description of Artificial Sequence: Synthetic oligonucleotide
  Sense strand starting at position 3191 of SEQ ID NO: 588186
augugugaugccgauguua

SEQ ID NO: 847727 - RNA, 19 nt, Artificial Sequence
  Description of Artificial Sequence: Synthetic oligonucleotide
  Antisense strand to SEQ ID NO: 847726
uaacaucggcaucacacau

SEQ ID NO: 847728 - RNA, 19 nt, Artificial Sequence
  Description of Artificial Sequence: Synthetic oligonucleotide
  Sense strand starting at position 3193 of SEQ ID NO: 588186
gugugaugccgauguuaac

SEQ ID NO: 847729 - RNA, 19 nt, Artificial Sequence
  Description of Artificial Sequence: Synthetic oligonucleotide
  Antisense strand to SEQ ID NO: 847728
guuaacaucggcaucacac

SEQ ID NO: 847730 - RNA, 19 nt, Artificial Sequence
  Description of Artificial Sequence: Synthetic oligonucleotide
  Sense strand starting at position 3199 of SEQ ID NO: 588186
ugccgauguuaaccaaaga

SEQ ID NO: 847731 - RNA, 19 nt, Artificial Sequence
  Description of Artificial Sequence: Synthetic oligonucleotide
  Antisense strand to SEQ ID NO: 847730
ucuuugguuaacaucggca

SEQ ID NO: 847732 - RNA, 19 nt, Artificial Sequence
  Description of Artificial Sequence: Synthetic oligonucleotide
  Sense strand starting at position 3262 of SEQ ID NO: 588186
gcagacgguucuuccuaga

SEQ ID NO: 847733 - RNA, 19 nt, Artificial Sequence
  Description of Artificial Sequence: Synthetic oligonucleotide
  Antisense strand to SEQ ID NO: 847732
ucuaggaagaaccgucugc

SEQ ID NO: 847734 - RNA, 19 nt, Artificial Sequence
  Description of Artificial Sequence: Synthetic oligonucleotide
  Sense strand starting at position 3267 of SEQ ID NO: 588186
cgguucuuccuagaaguga

SEQ ID NO: 847735 - RNA, 19 nt, Artificial Sequence
  Description of Artificial Sequence: Synthetic oligonucleotide
  Antisense strand to SEQ ID NO: 847734
ucacuucuaggaagaaccg

SEQ ID NO: 847736 - RNA, 19 nt, Artificial Sequence
  Description of Artificial Sequence: Synthetic oligonucleotide
  Sense strand starting at position 3400 of SEQ ID NO: 588186
guuccuuguuccucguuua

SEQ ID NO: 847737 - RNA, 19 nt, Artificial Sequence
  Description of Artificial Sequence: Synthetic oligonucleotide
  Antisense strand to SEQ ID NO: 847736
uaaacgaggaacaaggaac

SEQ ID NO: 847738 - RNA, 19 nt, Artificial Sequence
  Description of Artificial Sequence: Synthetic oligonucleotide
  Sense strand starting at position 3407 of SEQ ID NO: 588186
guuccucguuuacuguuaa

SEQ ID NO: 847739 - RNA, 19 nt, Artificial Sequence
  Description of Artificial Sequence: Synthetic oligonucleotide
  Antisense strand to SEQ ID NO: 847738
uuaacaguaaacgaggaac

SEQ ID NO: 847740 - RNA, 19 nt, Artificial Sequence
  Description of Artificial Sequence: Synthetic oligonucleotide
  Sense strand starting at position 3420 of SEQ ID NO: 588186
uguuaauagugguuacuac

SEQ ID NO: 847741 - RNA, 19 nt, Artificial Sequence
  Description of Artificial Sequence: Synthetic oligonucleotide
  Antisense strand to SEQ ID NO: 847740
guaguaaccacuauuaaca

SEQ ID NO: 847742 - RNA, 19 nt, Artificial Sequence
  Description of Artificial Sequence: Synthetic oligonucleotide
  Sense strand starting at position 3421 of SEQ ID NO: 588186
guuaauagugguuacuaca

SEQ ID NO: 847743 - RNA, 19 nt, Artificial Sequence
  Description of Artificial Sequence: Synthetic oligonucleotide
  Antisense strand to SEQ ID NO: 847742
uguaguaaccacuauuaac

SEQ ID NO: 847744 - RNA, 19 nt, Artificial Sequence
  Description of Artificial Sequence: Synthetic oligonucleotide
  Sense strand starting at position 3523 of SEQ ID NO: 588186
ccagcaagaggucauggua

SEQ ID NO: 847745 - RNA, 19 nt, Artificial Sequence
  Description of Artificial Sequence: Synthetic oligonucleotide
  Antisense strand to SEQ ID NO: 847744
uaccaugaccucuugcugg

SEQ ID NO: 847746 - RNA, 19 nt, Artificial Sequence
  Description of Artificial Sequence: Synthetic oligonucleotide
  Sense strand starting at position 3526 of SEQ ID NO: 588186
gcaagaggucaugguagug

SEQ ID NO: 847747 - RNA, 19 nt, Artificial Sequence
  Description of Artificial Sequence: Synthetic oligonucleotide
  Antisense strand to SEQ ID NO: 847746
cacuaccaugaccucuugc

SEQ ID NO: 847748 - RNA, 19 nt, Artificial Sequence
  Description of Artificial Sequence: Synthetic oligonucleotide
  Sense strand starting at position 3532 of SEQ ID NO: 588186
ggucaugguaguggguaaa

SEQ ID NO: 847749 - RNA, 19 nt, Artificial Sequence
  Description of Artificial Sequence: Synthetic oligonucleotide
  Antisense strand to SEQ ID NO: 847748
uuuacccacuaccaugacc

SEQ ID NO: 847750 - RNA, 19 nt, Artificial Sequence
  Description of Artificial Sequence: Synthetic oligonucleotide
  Sense strand starting at position 3535 of SEQ ID NO: 588186
caugguaguggguaaaugu

SEQ ID NO: 847751 - RNA, 19 nt, Artificial Sequence
  Description of Artificial Sequence: Synthetic oligonucleotide
  Antisense strand to SEQ ID NO: 847750
acauuuacccacuaccaug

SEQ ID NO: 847752 - RNA, 19 nt, Artificial Sequence
  Description of Artificial Sequence: Synthetic oligonucleotide
  Sense strand starting at position 3557 of SEQ ID NO: 588186
ugugauuucuucuucugua

SEQ ID NO: 847753 - RNA, 19 nt, Artificial Sequence
  Description of Artificial Sequence: Synthetic oligonucleotide
  Antisense strand to SEQ ID NO: 847752
uacagaagaagaaaucaca

SEQ ID NO: 847754 - RNA, 19 nt, Artificial Sequence
  Description of Artificial Sequence: Synthetic oligonucleotide
  Sense strand starting at position 3558 of SEQ ID NO: 588186
gugauuucuucuucuguaa

SEQ ID NO: 847755 - RNA, 19 nt, Artificial Sequence
  Description of Artificial Sequence: Synthetic oligonucleotide
  Antisense strand to SEQ ID NO: 847754
uuacagaagaagaaaucac

SEQ ID NO: 847756 - RNA, 19 nt, Artificial Sequence
  Description of Artificial Sequence: Synthetic oligonucleotide
  Sense strand starting at position 3584 of SEQ ID NO: 588186
ucaugaauaccagggucuu

SEQ ID NO: 847757 - RNA, 19 nt, Artificial Sequence
  Description of Artificial Sequence: Synthetic oligonucleotide
  Antisense strand to SEQ ID NO: 847756
aagacccugguauucauga

SEQ ID NO: 847758 - RNA, 19 nt, Artificial Sequence
  Description of Artificial Sequence: Synthetic oligonucleotide
  Sense strand starting at position 3665 of SEQ ID NO: 588186
aacuguaugugguugcgau

SEQ ID NO: 847759 - RNA, 19 nt, Artificial Sequence
  Description of Artificial Sequence: Synthetic oligonucleotide
  Antisense strand to SEQ ID NO: 847758
aucgcaaccacauacaguu

SEQ ID NO: 847760 - RNA, 19 nt, Artificial Sequence
  Description of Artificial Sequence: Synthetic oligonucleotide
  Sense strand starting at position 3666 of SEQ ID NO: 588186
acuguaugugguugcgauu

SEQ ID NO: 847761 - RNA, 19 nt, Artificial Sequence
  Description of Artificial Sequence: Synthetic oligonucleotide
  Antisense strand to SEQ ID NO: 847760
aaucgcaaccacauacagu

SEQ ID NO: 847762 - RNA, 19 nt, Artificial Sequence
  Description of Artificial Sequence: Synthetic oligonucleotide
  Sense strand starting at position 3677 of SEQ ID NO: 588186
uugcgauucuaacuuagaa

SEQ ID NO: 847763 - RNA, 19 nt, Artificial Sequence
  Description of Artificial Sequence: Synthetic oligonucleotide
  Antisense strand to SEQ ID NO: 847762
uucuaaguuagaaucgcaa

SEQ ID NO: 847764 - RNA, 19 nt, Artificial Sequence
  Description of Artificial Sequence: Synthetic oligonucleotide
  Sense strand starting at position 3681 of SEQ ID NO: 588186
gauucuaacuuagaagagu

SEQ ID NO: 847765 - RNA, 19 nt, Artificial Sequence
  Description of Artificial Sequence: Synthetic oligonucleotide
  Antisense strand to SEQ ID NO: 847764
acucuucuaaguuagaauc

SEQ ID NO: 847766 - RNA, 19 nt, Artificial Sequence
  Description of Artificial Sequence: Synthetic oligonucleotide
  Sense strand starting at position 3694 of SEQ ID NO: 588186
aagaguuggaguugaucau

SEQ ID NO: 847767 - RNA, 19 nt, Artificial Sequence
  Description of Artificial Sequence: Synthetic oligonucleotide
  Antisense strand to SEQ ID NO: 847766
augaucaacuccaacucuu

SEQ ID NO: 847768 - RNA, 19 nt, Artificial Sequence
  Description of Artificial Sequence: Synthetic oligonucleotide
  Sense strand starting at position 3698 of SEQ ID NO: 588186
guuggaguugaucaugucu

SEQ ID NO: 847769 - RNA, 19 nt, Artificial Sequence
  Description of Artificial Sequence: Synthetic oligonucleotide
  Antisense strand to SEQ ID NO: 847768
agacaugaucaacuccaac

SEQ ID NO: 847770 - RNA, 19 nt, Artificial Sequence
  Description of Artificial Sequence: Synthetic oligonucleotide
  Sense strand starting at position 3706 of SEQ ID NO: 588186
ugaucaugucuuuguguca

SEQ ID NO: 847771 - RNA, 19 nt, Artificial Sequence
  Description of Artificial Sequence: Synthetic oligonucleotide
  Antisense strand to SEQ ID NO: 847770
ugacacaaagacaugauca

SEQ ID NO: 847772 - RNA, 19 nt, Artificial Sequence
  Description of Artificial Sequence: Synthetic oligonucleotide
  Sense strand starting at position 3707 of SEQ ID NO: 588186
gaucaugucuuugugucaa

SEQ ID NO: 847773 - RNA, 19 nt, Artificial Sequence
  Description of Artificial Sequence: Synthetic oligonucleotide
  Antisense strand to SEQ ID NO: 847772
uugacacaaagacaugauc

SEQ ID NO: 847774 - RNA, 19 nt, Artificial Sequence
  Description of Artificial Sequence: Synthetic oligonucleotide
  Sense strand starting at position 3886 of SEQ ID NO: 588186
ucaguucuguagccagaac

SEQ ID NO: 847775 - RNA, 19 nt, Artificial Sequence
  Description of Artificial Sequence: Synthetic oligonucleotide
  Antisense strand to SEQ ID NO: 847774
guucuggcuacagaacuga

SEQ ID NO: 847776 - RNA, 19 nt, Artificial Sequence
  Description of Artificial Sequence: Synthetic oligonucleotide
  Sense strand starting at position 3927 of SEQ ID NO: 588186
agguauccacaugguuaca

SEQ ID NO: 847777 - RNA, 19 nt, Artificial Sequence
  Description of Artificial Sequence: Synthetic oligonucleotide
  Antisense strand to SEQ ID NO: 847776
uguaaccauguggauaccu

SEQ ID NO: 847778 - RNA, 19 nt, Artificial Sequence
  Description of Artificial Sequence: Synthetic oligonucleotide
  Sense strand starting at position 3960 of SEQ ID NO: 588186
acuagcuagguuuaugaau

SEQ ID NO: 847779 - RNA, 19 nt, Artificial Sequence
  Description of Artificial Sequence: Synthetic oligonucleotide
  Antisense strand to SEQ ID NO: 847778
auucauaaaccuagcuagu

SEQ ID NO: 847780 - RNA, 19 nt, Artificial Sequence
  Description of Artificial Sequence: Synthetic oligonucleotide
  Sense strand starting at position 33 of SEQ ID NO: 588187
cagaaacgcuucuuugaga

SEQ ID NO: 847781 - RNA, 19 nt, Artificial Sequence
  Description of Artificial Sequence: Synthetic oligonucleotide
  Antisense strand to SEQ ID NO: 847780
ucucaaagaagcguuucug

SEQ ID NO: 847782 - RNA, 19 nt, Artificial Sequence
  Description of Artificial Sequence: Synthetic oligonucleotide
  Sense strand starting at position 196 of SEQ ID NO: 588187
ucagccauuccucaggaau

SEQ ID NO: 847783 - RNA, 19 nt, Artificial Sequence
  Description of Artificial Sequence: Synthetic oligonucleotide
  Antisense strand to SEQ ID NO: 847782
auuccugaggaauggcuga

SEQ ID NO: 847784 - RNA, 19 nt, Artificial Sequence
  Description of Artificial Sequence: Synthetic oligonucleotide
  Sense strand starting at position 359 of SEQ ID NO: 588187
ggguuuccucagcaacauc

SEQ ID NO: 847785 - RNA, 19 nt, Artificial Sequence
  Description of Artificial Sequence: Synthetic oligonucleotide
  Antisense strand to SEQ ID NO: 847784
gauguugcugaggaaaccc

SEQ ID NO: 847786 - RNA, 19 nt, Artificial Sequence
  Description of Artificial Sequence: Synthetic oligonucleotide
  Sense strand starting at position 439 of SEQ ID NO: 588187
gcuucucugcgaucuuucu

SEQ ID NO: 847787 - RNA, 19 nt, Artificial Sequence
  Description of Artificial Sequence: Synthetic oligonucleotide
  Antisense strand to SEQ ID NO: 847786
agaaagaucgcagagaagc

SEQ ID NO: 847788 - RNA, 19 nt, Artificial Sequence
  Description of Artificial Sequence: Synthetic oligonucleotide
  Sense strand starting at position 569 of SEQ ID NO: 588187
ggcugaggccugcagacau

SEQ ID NO: 847789 - RNA, 19 nt, Artificial Sequence
  Description of Artificial Sequence: Synthetic oligonucleotide
  Antisense strand to SEQ ID NO: 847788
augucugcaggccucagcc

SEQ ID NO: 847790 - RNA, 19 nt, Artificial Sequence
  Description of Artificial Sequence: Synthetic oligonucleotide
  Sense strand starting at position 595 of SEQ ID NO: 588187
gaaaguugccgccuuaguc

SEQ ID NO: 847791 - RNA, 19 nt, Artificial Sequence
  Description of Artificial Sequence: Synthetic oligonucleotide
  Antisense strand to SEQ ID NO: 847790
gacuaaggcggcaacuuuc

SEQ ID NO: 847792 - RNA, 19 nt, Artificial Sequence
  Description of Artificial Sequence: Synthetic oligonucleotide
  Sense strand starting at position 652 of SEQ ID NO: 588187
gcuaauaagcaacagaugu

SEQ ID NO: 847793 - RNA, 19 nt, Artificial Sequence
  Description of Artificial Sequence: Synthetic oligonucleotide
  Antisense strand to SEQ ID NO: 847792
acaucuguugcuuauuagc

SEQ ID NO: 847794 - RNA, 19 nt, Artificial Sequence
  Description of Artificial Sequence: Synthetic oligonucleotide
  Sense strand starting at position 663 of SEQ ID NO: 588187
acagauguuuguucccaca

SEQ ID NO: 847795 - RNA, 19 nt, Artificial Sequence
  Description of Artificial Sequence: Synthetic oligonucleotide
  Antisense strand to SEQ ID NO: 847794
ugugggaacaaacaucugu

SEQ ID NO: 847796 - RNA, 19 nt, Artificial Sequence
  Description of Artificial Sequence: Synthetic oligonucleotide
  Sense strand starting at position 1026 of SEQ ID NO: 588187
agagguuugagaggguuga

SEQ ID NO: 847797 - RNA, 19 nt, Artificial Sequence
  Description of Artificial Sequence: Synthetic oligonucleotide
  Antisense strand to SEQ ID NO: 847796
ucaacccucucaaaccucu

SEQ ID NO: 847798 - RNA, 19 nt, Artificial Sequence
  Description of Artificial Sequence: Synthetic oligonucleotide
  Sense strand starting at position 1030 of SEQ ID NO: 588187
guuugagaggguugacaac

SEQ ID NO: 847799 - RNA, 19 nt, Artificial Sequence
  Description of Artificial Sequence: Synthetic oligonucleotide
  Antisense strand to SEQ ID NO: 847798
guugucaacccucucaaac

SEQ ID NO: 847800 - RNA, 19 nt, Artificial Sequence
  Description of Artificial Sequence: Synthetic oligonucleotide
  Sense strand starting at position 1046 of SEQ ID NO: 588187
aacagcugugguuggaaua

SEQ ID NO: 847801 - RNA, 19 nt, Artificial Sequence
  Description of Artificial Sequence: Synthetic oligonucleotide
  Antisense strand to SEQ ID NO: 847800
uauuccaaccacagcuguu

SEQ ID NO: 847802 - RNA, 19 nt, Artificial Sequence
  Description of Artificial Sequence: Synthetic oligonucleotide
  Sense strand starting at position 1047 of SEQ ID NO: 588187
acagcugugguuggaauaa

SEQ ID NO: 847803 - RNA, 19 nt, Artificial Sequence
  Description of Artificial Sequence: Synthetic oligonucleotide
  Antisense strand to SEQ ID NO: 847802
uuauuccaaccacagcugu

SEQ ID NO: 847804 - RNA, 19 nt, Artificial Sequence
  Description of Artificial Sequence: Synthetic oligonucleotide
  Sense strand starting at position 1056 of SEQ ID NO: 588187
guuggaauaagaggaguua

SEQ ID NO: 847805 - RNA, 19 nt, Artificial Sequence
  Description of Artificial Sequence: Synthetic oligonucleotide
  Antisense strand to SEQ ID NO: 847804
uaacuccucuuauuccaac

SEQ ID NO: 847806 - RNA, 19 nt, Artificial Sequence
  Description of Artificial Sequence: Synthetic oligonucleotide
  Sense strand starting at position 1065 of SEQ ID NO: 588187
agaggaguuaaugguaaug

SEQ ID NO: 847807 - RNA, 19 nt, Artificial Sequence
  Description of Artificial Sequence: Synthetic oligonucleotide
  Antisense strand to SEQ ID NO: 847806
cauuaccauuaacuccucu

SEQ ID NO: 847808 - RNA, 19 nt, Artificial Sequence
  Description of Artificial Sequence: Synthetic oligonucleotide
  Sense strand starting at position 1140 of SEQ ID NO: 588187
agguuucuaucacugggaa

SEQ ID NO: 847809 - RNA, 19 nt, Artificial Sequence
  Description of Artificial Sequence: Synthetic oligonucleotide
  Antisense strand to SEQ ID NO: 847808
uucccagugauagaaaccu

SEQ ID NO: 847810 - RNA, 19 nt, Artificial Sequence
  Description of Artificial Sequence: Synthetic oligonucleotide
  Sense strand starting at position 1141 of SEQ ID NO: 588187
gguuucuaucacugggaaa

SEQ ID NO: 847811 - RNA, 19 nt, Artificial Sequence
  Description of Artificial Sequence: Synthetic oligonucleotide
  Antisense strand to SEQ ID NO: 847810
uuucccagugauagaaacc

SEQ ID NO: 847812 - RNA, 19 nt, Artificial Sequence
  Description of Artificial Sequence: Synthetic oligonucleotide
  Sense strand starting at position 1142 of SEQ ID NO: 588187
guuucuaucacugggaaag

SEQ ID NO: 847813 - RNA, 19 nt, Artificial Sequence
  Description of Artificial Sequence: Synthetic oligonucleotide
  Antisense strand to SEQ ID NO: 847812
cuuucccagugauagaaac

SEQ ID NO: 847814 - RNA, 19 nt, Artificial Sequence
  Description of Artificial Sequence: Synthetic oligonucleotide
  Sense strand starting at position 1154 of SEQ ID NO: 588187
gggaaagcugacuggcuaa

SEQ ID NO: 847815 - RNA, 19 nt, Artificial Sequence
  Description of Artificial Sequence: Synthetic oligonucleotide
  Antisense strand to SEQ ID NO: 847814
uuagccagucagcuuuccc

SEQ ID NO: 847816 - RNA, 19 nt, Artificial Sequence
  Description of Artificial Sequence: Synthetic oligonucleotide
  Sense strand starting at position 1264 of SEQ ID NO: 588187
ccuggucuccauuaagaug

SEQ ID NO: 847817 - RNA, 19 nt, Artificial Sequence
  Description of Artificial Sequence: Synthetic oligonucleotide
  Antisense strand to SEQ ID NO: 847816
caucuuaauggagaccagg

SEQ ID NO: 847818 - RNA, 19 nt, Artificial Sequence
  Description of Artificial Sequence: Synthetic oligonucleotide
  Sense strand starting at position 1396 of SEQ ID NO: 588187
ggcagacauuacuuaugga

SEQ ID NO: 847819 - RNA, 19 nt, Artificial Sequence
  Description of Artificial Sequence: Synthetic oligonucleotide
  Antisense strand to SEQ ID NO: 847818
uccauaaguaaugucugcc

SEQ ID NO: 847820 - RNA, 19 nt, Artificial Sequence
  Description of Artificial Sequence: Synthetic oligonucleotide
  Sense strand starting at position 2212 of SEQ ID NO: 588187
auuguauuaacgggaugga

SEQ ID NO: 847821 - RNA, 19 nt, Artificial Sequence
  Description of Artificial Sequence: Synthetic oligonucleotide
  Antisense strand to SEQ ID NO: 847820
uccaucccguuaauacaau

SEQ ID NO: 847822 - RNA, 19 nt, Artificial Sequence
  Description of Artificial Sequence: Synthetic oligonucleotide
  Sense strand starting at position 2215 of SEQ ID NO: 588187
guauuaacgggauggaaag

SEQ ID NO: 847823 - RNA, 19 nt, Artificial Sequence
  Description of Artificial Sequence: Synthetic oligonucleotide
  Antisense strand to SEQ ID NO: 847822
cuuuccaucccguuaauac

SEQ ID NO: 847824 - RNA, 19 nt, Artificial Sequence
  Description of Artificial Sequence: Synthetic oligonucleotide
  Sense strand starting at position 2410 of SEQ ID NO: 588187
cuccucagccaggaucaau

SEQ ID NO: 847825 - RNA, 19 nt, Artificial Sequence
  Description of Artificial Sequence: Synthetic oligonucleotide
  Antisense strand to SEQ ID NO: 847824
auugauccuggcugaggag

SEQ ID NO: 847826 - RNA, 19 nt, Artificial Sequence
  Description of Artificial Sequence: Synthetic oligonucleotide
  Sense strand starting at position 2530 of SEQ ID NO: 588187
cugagugguugggugaaga

SEQ ID NO: 847827 - RNA, 19 nt, Artificial Sequence
  Description of Artificial Sequence: Synthetic oligonucleotide
  Antisense strand to SEQ ID NO: 847826
ucuucacccaaccacucag

SEQ ID NO: 847828 - RNA, 19 nt, Artificial Sequence
  Description of Artificial Sequence: Synthetic oligonucleotide
  Sense strand starting at position 2531 of SEQ ID NO: 588187
ugagugguugggugaagaa

SEQ ID NO: 847829 - RNA, 19 nt, Artificial Sequence
  Description of Artificial Sequence: Synthetic oligonucleotide
  Antisense strand to SEQ ID NO: 847828
uucuucacccaaccacuca

SEQ ID NO: 847830 - RNA, 19 nt, Artificial Sequence
  Description of Artificial Sequence: Synthetic oligonucleotide
  Sense strand starting at position 2702 of SEQ ID NO: 588187
cugacauuucaguguggug

SEQ ID NO: 847831 - RNA, 19 nt, Artificial Sequence
  Description of Artificial Sequence: Synthetic oligonucleotide
  Antisense strand to SEQ ID NO: 847830
caccacacugaaaugucag

SEQ ID NO: 847832 - RNA, 19 nt, Artificial Sequence
  Description of Artificial Sequence: Synthetic oligonucleotide
  Sense strand starting at position 2756 of SEQ ID NO: 588187
guggacauggauugucaga

SEQ ID NO: 847833 - RNA, 19 nt, Artificial Sequence
  Description of Artificial Sequence: Synthetic oligonucleotide
  Antisense strand to SEQ ID NO: 847832
ucugacaauccauguccac

SEQ ID NO: 847834 - RNA, 19 nt, Artificial Sequence
  Description of Artificial Sequence: Synthetic oligonucleotide
  Sense strand starting at position 2769 of SEQ ID NO: 588187
gucagauaugacuauguac

SEQ ID NO: 847835 - RNA, 19 nt, Artificial Sequence
  Description of Artificial Sequence: Synthetic oligonucleotide
  Antisense strand to SEQ ID NO: 847834
guacauagucauaucugac

SEQ ID NO: 847836 - RNA, 19 nt, Artificial Sequence
  Description of Artificial Sequence: Synthetic oligonucleotide
  Sense strand starting at position 2817 of SEQ ID NO: 588187
uuggauuguuuaucaacag

SEQ ID NO: 847837 - RNA, 19 nt, Artificial Sequence
  Description of Artificial Sequence: Synthetic oligonucleotide
  Antisense strand to SEQ ID NO: 847836
cuguugauaaacaauccaa

SEQ ID NO: 847838 - RNA, 19 nt, Artificial Sequence
  Description of Artificial Sequence: Synthetic oligonucleotide
  Sense strand starting at position 2866 of SEQ ID NO: 588187
gugugcuguauuuauauga

SEQ ID NO: 847839 - RNA, 19 nt, Artificial Sequence
  Description of Artificial Sequence: Synthetic oligonucleotide
  Antisense strand to SEQ ID NO: 847838
ucauauaaauacagcacac

SEQ ID NO: 847840 - RNA, 19 nt, Artificial Sequence
  Description of Artificial Sequence: Synthetic oligonucleotide
  Sense strand starting at position 2926 of SEQ ID NO: 588187
guugaacuagccugggaua

SEQ ID NO: 847841 - RNA, 19 nt, Artificial Sequence
  Description of Artificial Sequence: Synthetic oligonucleotide
  Antisense strand to SEQ ID NO: 847840
uaucccaggcuaguucaac

SEQ ID NO: 847842 - RNA, 19 nt, Artificial Sequence
  Description of Artificial Sequence: Synthetic oligonucleotide
  Sense strand starting at position 2927 of SEQ ID NO: 588187
uugaacuagccugggauaa

SEQ ID NO: 847843 - RNA, 19 nt, Artificial Sequence
  Description of Artificial Sequence: Synthetic oligonucleotide
  Antisense strand to SEQ ID NO: 847842
uuaucccaggcuaguucaa

SEQ ID NO: 847844 - RNA, 19 nt, Artificial Sequence
  Description of Artificial Sequence: Synthetic oligonucleotide
  Sense strand starting at position 2971 of SEQ ID NO: 588187
gcagaaugaaacugcagua

SEQ ID NO: 847845 - RNA, 19 nt, Artificial Sequence
  Description of Artificial Sequence: Synthetic oligonucleotide
  Antisense strand to SEQ ID NO: 847844
uacugcaguuucauucugc

SEQ ID NO: 847846 - RNA, 19 nt, Artificial Sequence
  Description of Artificial Sequence: Synthetic oligonucleotide
  Sense strand starting at position 3210 of SEQ ID NO: 588187
uugaguaaauguccuaaua

SEQ ID NO: 847847 - RNA, 19 nt, Artificial Sequence
  Description of Artificial Sequence: Synthetic oligonucleotide
  Antisense strand to SEQ ID NO: 847846
uauuaggacauuuacucaa

SEQ ID NO: 847848 - RNA, 19 nt, Artificial Sequence
  Description of Artificial Sequence: Synthetic oligonucleotide
  Sense strand starting at position 3299 of SEQ ID NO: 588187
guguuagugguuuacaaac

SEQ ID NO: 847849 - RNA, 19 nt, Artificial Sequence
  Description of Artificial Sequence: Synthetic oligonucleotide
  Antisense strand to SEQ ID NO: 847848
guuuguaaaccacuaacac

SEQ ID NO: 847850 - RNA, 19 nt, Artificial Sequence
  Description of Artificial Sequence: Synthetic oligonucleotide
  Sense strand starting at position 3451 of SEQ ID NO: 588187
gugagugugcguguucaua

SEQ ID NO: 847851 - RNA, 19 nt, Artificial Sequence
  Description of Artificial Sequence: Synthetic oligonucleotide
  Antisense strand to SEQ ID NO: 847850
uaugaacacgcacacucac

SEQ ID NO: 847852 - RNA, 19 nt, Artificial Sequence
  Description of Artificial Sequence: Synthetic oligonucleotide
  Sense strand starting at position 3601 of SEQ ID NO: 588187
gcucuaauugugcuguuua

SEQ ID NO: 847853 - RNA, 19 nt, Artificial Sequence
  Description of Artificial Sequence: Synthetic oligonucleotide
  Antisense strand to SEQ ID NO: 847852
uaaacagcacaauuagagc

SEQ ID NO: 847854 - RNA, 19 nt, Artificial Sequence
  Description of Artificial Sequence: Synthetic oligonucleotide
  Sense strand starting at position 3606 of SEQ ID NO: 588187
aauugugcuguuuagaaac

SEQ ID NO: 847855 - RNA, 19 nt, Artificial Sequence
  Description of Artificial Sequence: Synthetic oligonucleotide
  Antisense strand to SEQ ID NO: 847854
guuucuaaacagcacaauu

SEQ ID NO: 847856 - RNA, 19 nt, Artificial Sequence
  Description of Artificial Sequence: Synthetic oligonucleotide
  Sense strand starting at position 3781 of SEQ ID NO: 588187
guggucagguaagugaaua

SEQ ID NO: 847857 - RNA, 19 nt, Artificial Sequence
  Description of Artificial Sequence: Synthetic oligonucleotide
  Antisense strand to SEQ ID NO: 847856
uauucacuuaccugaccac

SEQ ID NO: 847858 - RNA, 19 nt, Artificial Sequence
  Description of Artificial Sequence: Synthetic oligonucleotide
  Sense strand starting at position 3782 of SEQ ID NO: 588187
uggucagguaagugaauaa

SEQ ID NO: 847859 - RNA, 19 nt, Artificial Sequence
  Description of Artificial Sequence: Synthetic oligonucleotide
  Antisense strand to SEQ ID NO: 847858
uuauucacuuaccugacca

SEQ ID NO: 847860 - RNA, 19 nt, Artificial Sequence
  Description of Artificial Sequence: Synthetic oligonucleotide
  Sense strand starting at position 65 of SEQ ID NO: 588188
agggauugaauugguccua

SEQ ID NO: 847861 - RNA, 19 nt, Artificial Sequence
  Description of Artificial Sequence: Synthetic oligonucleotide
  Antisense strand to SEQ ID NO: 847860
uaggaccaauucaaucccu

SEQ ID NO: 847862 - RNA, 19 nt, Artificial Sequence
  Description of Artificial Sequence: Synthetic oligonucleotide
  Sense strand starting at position 115 of SEQ ID NO: 588188
aaauguuguccucgauaua

SEQ ID NO: 847863 - RNA, 19 nt, Artificial Sequence
  Description of Artificial Sequence: Synthetic oligonucleotide
  Antisense strand to SEQ ID NO: 847862
uauaucgaggacaacauuu

SEQ ID NO: 847864 - RNA, 19 nt, Artificial Sequence
  Description of Artificial Sequence: Synthetic oligonucleotide
  Sense strand starting at position 116 of SEQ ID NO: 588188
aauguuguccucgauauag

SEQ ID NO: 847865 - RNA, 19 nt, Artificial Sequence
  Description of Artificial Sequence: Synthetic oligonucleotide
  Antisense strand to SEQ ID NO: 847864
cuauaucgaggacaacauu

SEQ ID NO: 847866 - RNA, 19 nt, Artificial Sequence
  Description of Artificial Sequence: Synthetic oligonucleotide
  Sense strand starting at position 235 of SEQ ID NO: 588188
ugcauacauguauauauga

SEQ ID NO: 847867 - RNA, 19 nt, Artificial Sequence
  Description of Artificial Sequence: Synthetic oligonucleotide
  Antisense strand to SEQ ID NO: 847866
ucauauauacauguaugca

SEQ ID NO: 847868 - RNA, 19 nt, Artificial Sequence
  Description of Artificial Sequence: Synthetic oligonucleotide
  Sense strand starting at position 252 of SEQ ID NO: 588188
gauagauguaaacgguaug

SEQ ID NO: 847869 - RNA, 19 nt, Artificial Sequence
  Description of Artificial Sequence: Synthetic oligonucleotide
  Antisense strand to SEQ ID NO: 847868
cauaccguuuacaucuauc

SEQ ID NO: 847870 - RNA, 19 nt, Artificial Sequence
  Description of Artificial Sequence: Synthetic oligonucleotide
  Sense strand starting at position 255 of SEQ ID NO: 588188
agauguaaacgguauguua

SEQ ID NO: 847871 - RNA, 19 nt, Artificial Sequence
  Description of Artificial Sequence: Synthetic oligonucleotide
  Antisense strand to SEQ ID NO: 847870
uaacauaccguuuacaucu

SEQ ID NO: 847872 - RNA, 19 nt, Artificial Sequence
  Description of Artificial Sequence: Synthetic oligonucleotide
  Sense strand starting at position 257 of SEQ ID NO: 588188
auguaaacgguauguuaua

SEQ ID NO: 847873 - RNA, 19 nt, Artificial Sequence
  Description of Artificial Sequence: Synthetic oligonucleotide
  Antisense strand to SEQ ID NO: 847872
uauaacauaccguuuacau

SEQ ID NO: 847874 - RNA, 19 nt, Artificial Sequence
  Description of Artificial Sequence: Synthetic oligonucleotide
  Sense strand starting at position 267 of SEQ ID NO: 588188
uauguuauaugggugcaua

SEQ ID NO: 847875 - RNA, 19 nt, Artificial Sequence
  Description of Artificial Sequence: Synthetic oligonucleotide
  Antisense strand to SEQ ID NO: 847874
uaugcacccauauaacaua

SEQ ID NO: 847876 - RNA, 19 nt, Artificial Sequence
  Description of Artificial Sequence: Synthetic oligonucleotide
  Sense strand starting at position 268 of SEQ ID NO: 588188
auguuauaugggugcauac

SEQ ID NO: 847877 - RNA, 19 nt, Artificial Sequence
  Description of Artificial Sequence: Synthetic oligonucleotide
  Antisense strand to SEQ ID NO: 847876
guaugcacccauauaacau

SEQ ID NO: 847878 - RNA, 19 nt, Artificial Sequence
  Description of Artificial Sequence: Synthetic oligonucleotide
  Sense strand starting at position 416 of SEQ ID NO: 588188
ggaagaaguuggcucacua

SEQ ID NO: 847879 - RNA, 19 nt, Artificial Sequence
  Description of Artificial Sequence: Synthetic oligonucleotide
  Antisense strand to SEQ ID NO: 847878
uagugagccaacuucuucc

SEQ ID NO: 847880 - RNA, 19 nt, Artificial Sequence
  Description of Artificial Sequence: Synthetic oligonucleotide
  Sense strand starting at position 420 of SEQ ID NO: 588188
gaaguuggcucacuacuaa

SEQ ID NO: 847881 - RNA, 19 nt, Artificial Sequence
  Description of Artificial Sequence: Synthetic oligonucleotide
  Antisense strand to SEQ ID NO: 847880
uuaguagugagccaacuuc

SEQ ID NO: 847882 - RNA, 19 nt, Artificial Sequence
  Description of Artificial Sequence: Synthetic oligonucleotide
  Sense strand starting at position 563 of SEQ ID NO: 588188
ucuucucacguagaaguaa

SEQ ID NO: 847883 - RNA, 19 nt, Artificial Sequence
  Description of Artificial Sequence: Synthetic oligonucleotide
  Antisense strand to SEQ ID NO: 847882
uuacuucuacgugagaaga

SEQ ID NO: 847884 - RNA, 19 nt, Artificial Sequence
  Description of Artificial Sequence: Synthetic oligonucleotide
  Sense strand starting at position 571 of SEQ ID NO: 588188
cguagaaguaagugaagga

SEQ ID NO: 847885 - RNA, 19 nt, Artificial Sequence
  Description of Artificial Sequence: Synthetic oligonucleotide
  Antisense strand to SEQ ID NO: 847884
uccuucacuuacuucuacg

SEQ ID NO: 847886 - RNA, 19 nt, Artificial Sequence
  Description of Artificial Sequence: Synthetic oligonucleotide
  Sense strand starting at position 620 of SEQ ID NO: 588188
gagccuauucgauggaaag

SEQ ID NO: 847887 - RNA, 19 nt, Artificial Sequence
  Description of Artificial Sequence: Synthetic oligonucleotide
  Antisense strand to SEQ ID NO: 847886
cuuuccaucgaauaggcuc

SEQ ID NO: 847888 - RNA, 19 nt, Artificial Sequence
  Description of Artificial Sequence: Synthetic oligonucleotide
  Sense strand starting at position 861 of SEQ ID NO: 588188
auaauuguuguugaaucca

SEQ ID NO: 847889 - RNA, 19 nt, Artificial Sequence
  Description of Artificial Sequence: Synthetic oligonucleotide
  Antisense strand to SEQ ID NO: 847888
uggauucaacaacaauuau

SEQ ID NO: 847890 - RNA, 19 nt, Artificial Sequence
  Description of Artificial Sequence: Synthetic oligonucleotide
  Sense strand starting at position 959 of SEQ ID NO: 588188
aagauaaauucgccucgag

SEQ ID NO: 847891 - RNA, 19 nt, Artificial Sequence
  Description of Artificial Sequence: Synthetic oligonucleotide
  Antisense strand to SEQ ID NO: 847890
cucgaggcgaauuuaucuu

SEQ ID NO: 847892 - RNA, 19 nt, Artificial Sequence
  Description of Artificial Sequence: Synthetic oligonucleotide
  Sense strand starting at position 1101 of SEQ ID NO: 588188
guguaauggaagggaaagu

SEQ ID NO: 847893 - RNA, 19 nt, Artificial Sequence
  Description of Artificial Sequence: Synthetic oligonucleotide
  Antisense strand to SEQ ID NO: 847892
acuuucccuuccauuacac

SEQ ID NO: 847894 - RNA, 19 nt, Artificial Sequence
  Description of Artificial Sequence: Synthetic oligonucleotide
  Sense strand starting at position 1190 of SEQ ID NO: 588188
uucucuuaggguuguaauu

SEQ ID NO: 847895 - RNA, 19 nt, Artificial Sequence
  Description of Artificial Sequence: Synthetic oligonucleotide
  Antisense strand to SEQ ID NO: 847894
aauuacaacccuaagagaa

SEQ ID NO: 847896 - RNA, 19 nt, Artificial Sequence
  Description of Artificial Sequence: Synthetic oligonucleotide
  Sense strand starting at position 1214 of SEQ ID NO: 588188
aagaaauuaguaugaucga

SEQ ID NO: 847897 - RNA, 19 nt, Artificial Sequence
  Description of Artificial Sequence: Synthetic oligonucleotide
  Antisense strand to SEQ ID NO: 847896
ucgaucauacuaauuucuu

SEQ ID NO: 847898 - RNA, 19 nt, Artificial Sequence
  Description of Artificial Sequence: Synthetic oligonucleotide
  Sense strand starting at position 1219 of SEQ ID NO: 588188
auuaguaugaucgaacgga

SEQ ID NO: 847899 - RNA, 19 nt, Artificial Sequence
  Description of Artificial Sequence: Synthetic oligonucleotide
  Antisense strand to SEQ ID NO: 847898
uccguucgaucauacuaau

SEQ ID NO: 847900 - RNA, 19 nt, Artificial Sequence
  Description of Artificial Sequence: Synthetic oligonucleotide
  Sense strand starting at position 1223 of SEQ ID NO: 588188
guaugaucgaacggaaaug

SEQ ID NO: 847901 - RNA, 19 nt, Artificial Sequence
  Description of Artificial Sequence: Synthetic oligonucleotide
  Antisense strand to SEQ ID NO: 847900
cauuuccguucgaucauac

SEQ ID NO: 847902 - RNA, 19 nt, Artificial Sequence
  Description of Artificial Sequence: Synthetic oligonucleotide
  Sense strand starting at position 1239 of SEQ ID NO: 588188
augaacauucgacgugaug

SEQ ID NO: 847903 - RNA, 19 nt, Artificial Sequence
  Description of Artificial Sequence: Synthetic oligonucleotide
  Antisense strand to SEQ ID NO: 847902
caucacgucgaauguucau

SEQ ID NO: 847904 - RNA, 19 nt, Artificial Sequence
  Description of Artificial Sequence: Synthetic oligonucleotide
  Sense strand starting at position 1370 of SEQ ID NO: 588188
gugugcgaccuaucuguca

SEQ ID NO: 847905 - RNA, 19 nt, Artificial Sequence
  Description of Artificial Sequence: Synthetic oligonucleotide
  Antisense strand to SEQ ID NO: 847904
ugacagauaggucgcacac

SEQ ID NO: 847906 - RNA, 19 nt, Artificial Sequence
  Description of Artificial Sequence: Synthetic oligonucleotide
  Sense strand starting at position 1394 of SEQ ID NO: 588188
uggguucacucugugggaa

SEQ ID NO: 847907 - RNA, 19 nt, Artificial Sequence
  Description of Artificial Sequence: Synthetic oligonucleotide
  Antisense strand to SEQ ID NO: 847906
uucccacagagugaaccca

SEQ ID NO: 847908 - RNA, 19 nt, Artificial Sequence
  Description of Artificial Sequence: Synthetic oligonucleotide
  Sense strand starting at position 1395 of SEQ ID NO: 588188
ggguucacucugugggaaa

SEQ ID NO: 847909 - RNA, 19 nt, Artificial Sequence
  Description of Artificial Sequence: Synthetic oligonucleotide
  Antisense strand to SEQ ID NO: 847908
uuucccacagagugaaccc

SEQ ID NO: 847910 - RNA, 19 nt, Artificial Sequence
  Description of Artificial Sequence: Synthetic oligonucleotide
  Sense strand starting at position 1460 of SEQ ID NO: 588188
cgaggucccgcagaaauua

SEQ ID NO: 847911 - RNA, 19 nt, Artificial Sequence
  Description of Artificial Sequence: Synthetic oligonucleotide
  Antisense strand to SEQ ID NO: 847910
uaauuucugcgggaccucg

SEQ ID NO: 847912 - RNA, 19 nt, Artificial Sequence
  Description of Artificial Sequence: Synthetic oligonucleotide
  Sense strand starting at position 2291 of SEQ ID NO: 588188
aagaaacucuugguggcua

SEQ ID NO: 847913 - RNA, 19 nt, Artificial Sequence
  Description of Artificial Sequence: Synthetic oligonucleotide
  Antisense strand to SEQ ID NO: 847912
uagccaccaagaguuucuu

SEQ ID NO: 847914 - RNA, 19 nt, Artificial Sequence
  Description of Artificial Sequence: Synthetic oligonucleotide
  Sense strand starting at position 2642 of SEQ ID NO: 588188
guuggauuacaucaauggu

SEQ ID NO: 847915 - RNA, 19 nt, Artificial Sequence
  Description of Artificial Sequence: Synthetic oligonucleotide
  Antisense strand to SEQ ID NO: 847914
accauugauguaauccaac

SEQ ID NO: 847916 - RNA, 19 nt, Artificial Sequence
  Description of Artificial Sequence: Synthetic oligonucleotide
  Sense strand starting at position 3093 of SEQ ID NO: 588188
ggagucuugcucugauaau

SEQ ID NO: 847917 - RNA, 19 nt, Artificial Sequence
  Description of Artificial Sequence: Synthetic oligonucleotide
  Antisense strand to SEQ ID NO: 847916
auuaucagagcaagacucc

SEQ ID NO: 847918 - RNA, 19 nt, Artificial Sequence
  Description of Artificial Sequence: Synthetic oligonucleotide
  Sense strand starting at position 3252 of SEQ ID NO: 588188
caccuagauucgguuagau

SEQ ID NO: 847919 - RNA, 19 nt, Artificial Sequence
  Description of Artificial Sequence: Synthetic oligonucleotide
  Antisense strand to SEQ ID NO: 847918
aucuaaccgaaucuaggug

SEQ ID NO: 847920 - RNA, 19 nt, Artificial Sequence
  Description of Artificial Sequence: Synthetic oligonucleotide
  Sense strand starting at position 3326 of SEQ ID NO: 588188
cuuuauguccagcaugaga

SEQ ID NO: 847921 - RNA, 19 nt, Artificial Sequence
  Description of Artificial Sequence: Synthetic oligonucleotide
  Antisense strand to SEQ ID NO: 847920
ucucaugcuggacauaaag

SEQ ID NO: 847922 - RNA, 19 nt, Artificial Sequence
  Description of Artificial Sequence: Synthetic oligonucleotide
  Sense strand starting at position 3387 of SEQ ID NO: 588188
ugcuuacaggcuggagaaa

SEQ ID NO: 847923 - RNA, 19 nt, Artificial Sequence
  Description of Artificial Sequence: Synthetic oligonucleotide
  Antisense strand to SEQ ID NO: 847922
uuucuccagccuguaagca

SEQ ID NO: 847924 - RNA, 19 nt, Artificial Sequence
  Description of Artificial Sequence: Synthetic oligonucleotide
  Sense strand starting at position 3388 of SEQ ID NO: 588188
gcuuacaggcuggagaaau

SEQ ID NO: 847925 - RNA, 19 nt, Artificial Sequence
  Description of Artificial Sequence: Synthetic oligonucleotide
  Antisense strand to SEQ ID NO: 847924
auuucuccagccuguaagc

SEQ ID NO: 847926 - RNA, 19 nt, Artificial Sequence
  Description of Artificial Sequence: Synthetic oligonucleotide
  Sense strand starting at position 3467 of SEQ ID NO: 588188
aagguauucccaugaugag

SEQ ID NO: 847927 - RNA, 19 nt, Artificial Sequence
  Description of Artificial Sequence: Synthetic oligonucleotide
  Antisense strand to SEQ ID NO: 847926
cucaucaugggaauaccuu

SEQ ID NO: 847928 - RNA, 19 nt, Artificial Sequence
  Description of Artificial Sequence: Synthetic oligonucleotide
  Sense strand starting at position 3790 of SEQ ID NO: 588188
aggacauucccauguguaa

SEQ ID NO: 847929 - RNA, 19 nt, Artificial Sequence
  Description of Artificial Sequence: Synthetic oligonucleotide
  Antisense strand to SEQ ID NO: 847928
uuacacaugggaauguccu

SEQ ID NO: 847930 - RNA, 19 nt, Artificial Sequence
  Description of Artificial Sequence: Synthetic oligonucleotide
  Sense strand starting at position 3797 of SEQ ID NO: 588188
ucccauguguaacuacaau

SEQ ID NO: 847931 - RNA, 19 nt, Artificial Sequence
  Description of Artificial Sequence: Synthetic oligonucleotide
  Antisense strand to SEQ ID NO: 847930
auuguaguuacacauggga

SEQ ID NO: 847932 - RNA, 19 nt, Artificial Sequence
  Description of Artificial Sequence: Synthetic oligonucleotide
  Sense strand starting at position 3817 of SEQ ID NO: 588188
ucauuaucauguccgaaga

SEQ ID NO: 847933 - RNA, 19 nt, Artificial Sequence
  Description of Artificial Sequence: Synthetic oligonucleotide
  Antisense strand to SEQ ID NO: 847932
ucuucggacaugauaauga

SEQ ID NO: 847934 - RNA, 19 nt, Artificial Sequence
  Description of Artificial Sequence: Synthetic oligonucleotide
  Sense strand starting at position 3818 of SEQ ID NO: 588188
cauuaucauguccgaagau

SEQ ID NO: 847935 - RNA, 19 nt, Artificial Sequence
  Description of Artificial Sequence: Synthetic oligonucleotide
  Antisense strand to SEQ ID NO: 847934
aucuucggacaugauaaug

SEQ ID NO: 847936 - RNA, 19 nt, Artificial Sequence
  Description of Artificial Sequence: Synthetic oligonucleotide
  Sense strand starting at position 3972 of SEQ ID NO: 588188
ugaaucgauacuggaugau

SEQ ID NO: 847937 - RNA, 19 nt, Artificial Sequence
  Description of Artificial Sequence: Synthetic oligonucleotide
  Antisense strand to SEQ ID NO: 847936
aucauccaguaucgauuca

SEQ ID NO: 847938 - RNA, 19 nt, Artificial Sequence
  Description of Artificial Sequence: Synthetic oligonucleotide
  Sense strand starting at position 3975 of SEQ ID NO: 588188
aucgauacuggaugauauc

SEQ ID NO: 847939 - RNA, 19 nt, Artificial Sequence
  Description of Artificial Sequence: Synthetic oligonucleotide
  Antisense strand to SEQ ID NO: 847938
gauaucauccaguaucgau

SEQ ID NO: 847940 - RNA, 19 nt, Artificial Sequence
  Description of Artificial Sequence: Synthetic oligonucleotide
  Sense strand starting at position 1987 of SEQ ID NO: 588189
guccguacgggucaucuua

SEQ ID NO: 847941 - RNA, 19 nt, Artificial Sequence
  Description of Artificial Sequence: Synthetic oligonucleotide
  Antisense strand to SEQ ID NO: 847940
uaagaugacccguacggac

SEQ ID NO: 847942 - RNA, 19 nt, Artificial Sequence
  Description of Artificial Sequence: Synthetic oligonucleotide
  Sense strand starting at position 1989 of SEQ ID NO: 588189
ccguacgggucaucuuaaa

SEQ ID NO: 847943 - RNA, 19 nt, Artificial Sequence
  Description of Artificial Sequence: Synthetic oligonucleotide
  Antisense strand to SEQ ID NO: 847942
uuuaagaugacccguacgg

SEQ ID NO: 847944 - RNA, 19 nt, Artificial Sequence
  Description of Artificial Sequence: Synthetic oligonucleotide
  Sense strand starting at position 2811 of SEQ ID NO: 588189
caaguaucuuugggugguu

SEQ ID NO: 847945 - RNA, 19 nt, Artificial Sequence
  Description of Artificial Sequence: Synthetic oligonucleotide
  Antisense strand to SEQ ID NO: 847944
aaccacccaaagauacuug

SEQ ID NO: 847946 - RNA, 19 nt, Artificial Sequence
  Description of Artificial Sequence: Synthetic oligonucleotide
  Sense strand starting at position 2813 of SEQ ID NO: 588189
aguaucuuugggugguuga

SEQ ID NO: 847947 - RNA, 19 nt, Artificial Sequence
  Description of Artificial Sequence: Synthetic oligonucleotide
  Antisense strand to SEQ ID NO: 847946
ucaaccacccaaagauacu

SEQ ID NO: 847948 - RNA, 19 nt, Artificial Sequence
  Description of Artificial Sequence: Synthetic oligonucleotide
  Sense strand starting at position 2814 of SEQ ID NO: 588189
guaucuuugggugguugaa

SEQ ID NO: 847949 - RNA, 19 nt, Artificial Sequence
  Description of Artificial Sequence: Synthetic oligonucleotide
  Antisense strand to SEQ ID NO: 847948
uucaaccacccaaagauac

SEQ ID NO: 847950 - RNA, 19 nt, Artificial Sequence
  Description of Artificial Sequence: Synthetic oligonucleotide
  Sense strand starting at position 2816 of SEQ ID NO: 588189
aucuuugggugguugaaac

SEQ ID NO: 847951 - RNA, 19 nt, Artificial Sequence
  Description of Artificial Sequence: Synthetic oligonucleotide
  Antisense strand to SEQ ID NO: 847950
guuucaaccacccaaagau

SEQ ID NO: 847952 - RNA, 19 nt, Artificial Sequence
  Description of Artificial Sequence: Synthetic oligonucleotide
  Sense strand starting at position 3023 of SEQ ID NO: 588189
ccauuucgcucagaagguu

SEQ ID NO: 847953 - RNA, 19 nt, Artificial Sequence
  Description of Artificial Sequence: Synthetic oligonucleotide
  Antisense strand to SEQ ID NO: 847952
aaccuucugagcgaaaugg

SEQ ID NO: 847954 - RNA, 19 nt, Artificial Sequence
  Description of Artificial Sequence: Synthetic oligonucleotide
  Sense strand starting at position 3031 of SEQ ID NO: 588189
cucagaagguuccauggaa

SEQ ID NO: 847955 - RNA, 19 nt, Artificial Sequence
  Description of Artificial Sequence: Synthetic oligonucleotide
  Antisense strand to SEQ ID NO: 847954
uuccauggaaccuucugag

SEQ ID NO: 847956 - RNA, 19 nt, Artificial Sequence
  Description of Artificial Sequence: Synthetic oligonucleotide
  Sense strand starting at position 3251 of SEQ ID NO: 588189
ggcagaaccucagguggau

SEQ ID NO: 847957 - RNA, 19 nt, Artificial Sequence
  Description of Artificial Sequence: Synthetic oligonucleotide
  Antisense strand to SEQ ID NO: 847956
auccaccugagguucugcc

SEQ ID NO: 847958 - RNA, 19 nt, Artificial Sequence
  Description of Artificial Sequence: Synthetic oligonucleotide
  Sense strand starting at position 2575 of SEQ ID NO: 588190
gcuagagggugucacagau

SEQ ID NO: 847959 - RNA, 19 nt, Artificial Sequence
  Description of Artificial Sequence: Synthetic oligonucleotide
  Antisense strand to SEQ ID NO: 847958
aucugugacacccucuagc

SEQ ID NO: 847960 - RNA, 19 nt, Artificial Sequence
  Description of Artificial Sequence: Synthetic oligonucleotide
  Sense strand starting at position 2823 of SEQ ID NO: 588190
uggacacgugcuugaggaa

SEQ ID NO: 847961 - RNA, 19 nt, Artificial Sequence
  Description of Artificial Sequence: Synthetic oligonucleotide
  Antisense strand to SEQ ID NO: 847960
uuccucaagcacgugucca

SEQ ID NO: 847962 - RNA, 19 nt, Artificial Sequence
  Description of Artificial Sequence: Synthetic oligonucleotide
  Sense strand starting at position 2824 of SEQ ID NO: 588190
ggacacgugcuugaggaaa

SEQ ID NO: 847963 - RNA, 19 nt, Artificial Sequence
  Description of Artificial Sequence: Synthetic oligonucleotide
  Antisense strand to SEQ ID NO: 847962
uuuccucaagcacgugucc

SEQ ID NO: 847964 - RNA, 19 nt, Artificial Sequence
  Description of Artificial Sequence: Synthetic oligonucleotide
  Sense strand starting at position 2826 of SEQ ID NO: 588190
acacgugcuugaggaaaca

SEQ ID NO: 847965 - RNA, 19 nt, Artificial Sequence
  Description of Artificial Sequence: Synthetic oligonucleotide
  Antisense strand to SEQ ID NO: 847964
uguuuccucaagcacgugu

SEQ ID NO: 847966 - RNA, 19 nt, Artificial Sequence
  Description of Artificial Sequence: Synthetic oligonucleotide
  Sense strand starting at position 2934 of SEQ ID NO: 588190
aacagaguguacuuugcua

SEQ ID NO: 847967 - RNA, 19 nt, Artificial Sequence
  Description of Artificial Sequence: Synthetic oligonucleotide
  Antisense strand to SEQ ID NO: 847966
uagcaaaguacacucuguu

SEQ ID NO: 847968 - RNA, 19 nt, Artificial Sequence
  Description of Artificial Sequence: Synthetic oligonucleotide
  Sense strand starting at position 2936 of SEQ ID NO: 588190
cagaguguacuuugcuaau

SEQ ID NO: 847969 - RNA, 19 nt, Artificial Sequence
  Description of Artificial Sequence: Synthetic oligonucleotide
  Antisense strand to SEQ ID NO: 847968
auuagcaaaguacacucug

SEQ ID NO: 847970 - RNA, 19 nt, Artificial Sequence
  Description of Artificial Sequence: Synthetic oligonucleotide
  Sense strand starting at position 2938 of SEQ ID NO: 588190
gaguguacuuugcuaauga

SEQ ID NO: 847971 - RNA, 19 nt, Artificial Sequence
  Description of Artificial Sequence: Synthetic oligonucleotide
  Antisense strand to SEQ ID NO: 847970
ucauuagcaaaguacacuc

SEQ ID NO: 847972 - RNA, 19 nt, Artificial Sequence
  Description of Artificial Sequence: Synthetic oligonucleotide
  Sense strand starting at position 2939 of SEQ ID NO: 588190
aguguacuuugcuaaugaa

SEQ ID NO: 847973 - RNA, 19 nt, Artificial Sequence
  Description of Artificial Sequence: Synthetic oligonucleotide
  Antisense strand to SEQ ID NO: 847972
uucauuagcaaaguacacu

SEQ ID NO: 847974 - RNA, 19 nt, Artificial Sequence
  Description of Artificial Sequence: Synthetic oligonucleotide
  Sense strand starting at position 2956 of SEQ ID NO: 588190
aagcccuugucauuggaca

SEQ ID NO: 847975 - RNA, 19 nt, Artificial Sequence
  Description of Artificial Sequence: Synthetic oligonucleotide
  Antisense strand to SEQ ID NO: 847974
uguccaaugacaagggcuu

SEQ ID NO: 847976 - RNA, 19 nt, Artificial Sequence
  Description of Artificial Sequence: Synthetic oligonucleotide
  Sense strand starting at position 2958 of SEQ ID NO: 588190
gcccuugucauuggacaga

SEQ ID NO: 847977 - RNA, 19 nt, Artificial Sequence
  Description of Artificial Sequence: Synthetic oligonucleotide
  Antisense strand to SEQ ID NO: 847976
ucuguccaaugacaagggc

SEQ ID NO: 847978 - RNA, 19 nt, Artificial Sequence
  Description of Artificial Sequence: Synthetic oligonucleotide
  Sense strand starting at position 3009 of SEQ ID NO: 588190
aaacguugccaccgugaau

SEQ ID NO: 847979 - RNA, 19 nt, Artificial Sequence
  Description of Artificial Sequence: Synthetic oligonucleotide
  Antisense strand to SEQ ID NO: 847978
auucacgguggcaacguuu

SEQ ID NO: 847980 - RNA, 19 nt, Artificial Sequence
  Description of Artificial Sequence: Synthetic oligonucleotide
  Sense strand starting at position 3070 of SEQ ID NO: 588190
gggaaaugcucucucagug

SEQ ID NO: 847981 - RNA, 19 nt, Artificial Sequence
  Description of Artificial Sequence: Synthetic oligonucleotide
  Antisense strand to SEQ ID NO: 847980
cacugagagagcauuuccc

SEQ ID NO: 847982 - RNA, 19 nt, Artificial Sequence
  Description of Artificial Sequence: Synthetic oligonucleotide
  Sense strand starting at position 3239 of SEQ ID NO: 588190
gggugagagcuccauccca

SEQ ID NO: 847983 - RNA, 19 nt, Artificial Sequence
  Description of Artificial Sequence: Synthetic oligonucleotide
  Antisense strand to SEQ ID NO: 847982
ugggauggagcucucaccc

SEQ ID NO: 847984 - RNA, 19 nt, Artificial Sequence
  Description of Artificial Sequence: Synthetic oligonucleotide
  Sense strand starting at position 3366 of SEQ ID NO: 588190
caccgucuuuggguuaauu

SEQ ID NO: 847985 - RNA, 19 nt, Artificial Sequence
  Description of Artificial Sequence: Synthetic oligonucleotide
  Antisense strand to SEQ ID NO: 847984
aauuaacccaaagacggug

SEQ ID NO: 847986 - RNA, 19 nt, Artificial Sequence
  Description of Artificial Sequence: Synthetic oligonucleotide
  Sense strand starting at position 3377 of SEQ ID NO: 588190
gguuaauuugcuggagcca

SEQ ID NO: 847987 - RNA, 19 nt, Artificial Sequence
  Description of Artificial Sequence: Synthetic oligonucleotide
  Antisense strand to SEQ ID NO: 847986
uggcuccagcaaauuaacc

SEQ ID NO: 847988 - RNA, 19 nt, Artificial Sequence
  Description of Artificial Sequence: Synthetic oligonucleotide
  Sense strand starting at position 3386 of SEQ ID NO: 588190
gcuggagccacucauagaa

SEQ ID NO: 847989 - RNA, 19 nt, Artificial Sequence
  Description of Artificial Sequence: Synthetic oligonucleotide
  Antisense strand to SEQ ID NO: 847988
uucuaugaguggcuccagc

SEQ ID NO: 847990 - RNA, 19 nt, Artificial Sequence
  Description of Artificial Sequence: Synthetic oligonucleotide
  Sense strand starting at position 3406 of SEQ ID NO: 588190
uagggaaguuaugacguuu

SEQ ID NO: 847991 - RNA, 19 nt, Artificial Sequence
  Description of Artificial Sequence: Synthetic oligonucleotide
  Antisense strand to SEQ ID NO: 847990
aaacgucauaacuucccua

SEQ ID NO: 847992 - RNA, 19 nt, Artificial Sequence
  Description of Artificial Sequence: Synthetic oligonucleotide
  Sense strand starting at position 3439 of SEQ ID NO: 588190
aaggguauugauugcaaag

SEQ ID NO: 847993 - RNA, 19 nt, Artificial Sequence
  Description of Artificial Sequence: Synthetic oligonucleotide
  Antisense strand to SEQ ID NO: 847992
cuuugcaaucaauacccuu

SEQ ID NO: 847994 - RNA, 19 nt, Artificial Sequence
  Description of Artificial Sequence: Synthetic oligonucleotide
  Sense strand starting at position 3441 of SEQ ID NO: 588190
ggguauugauugcaaagga

SEQ ID NO: 847995 - RNA, 19 nt, Artificial Sequence
  Description of Artificial Sequence: Synthetic oligonucleotide
  Antisense strand to SEQ ID NO: 847994
uccuuugcaaucaauaccc

SEQ ID NO: 847996 - RNA, 19 nt, Artificial Sequence
  Description of Artificial Sequence: Synthetic oligonucleotide
  Sense strand starting at position 3505 of SEQ ID NO: 588190
uuccauguccucgcuaguu

SEQ ID NO: 847997 - RNA, 19 nt, Artificial Sequence
  Description of Artificial Sequence: Synthetic oligonucleotide
  Antisense strand to SEQ ID NO: 847996
aacuagcgaggacauggaa

SEQ ID NO: 847998 - RNA, 19 nt, Artificial Sequence
  Description of Artificial Sequence: Synthetic oligonucleotide
  Sense strand starting at position 3558 of SEQ ID NO: 588190
ccagaaguucccugagccu

SEQ ID NO: 847999 - RNA, 19 nt, Artificial Sequence
  Description of Artificial Sequence: Synthetic oligonucleotide
  Antisense strand to SEQ ID NO: 847998
aggcucagggaacuucugg

SEQ ID NO: 848000 - RNA, 19 nt, Artificial Sequence
  Description of Artificial Sequence: Synthetic oligonucleotide
  Sense strand starting at position 3601 of SEQ ID NO: 588190
gcuuccugaugucagcauu

SEQ ID NO: 848001 - RNA, 19 nt, Artificial Sequence
  Description of Artificial Sequence: Synthetic oligonucleotide
  Antisense strand to SEQ ID NO: 848000
aaugcugacaucaggaagc

SEQ ID NO: 848002 - RNA, 19 nt, Artificial Sequence
  Description of Artificial Sequence: Synthetic oligonucleotide
  Sense strand starting at position 3674 of SEQ ID NO: 588190
ucagaaaggugagaauguu

SEQ ID NO: 848003 - RNA, 19 nt, Artificial Sequence
  Description of Artificial Sequence: Synthetic oligonucleotide
  Antisense strand to SEQ ID NO: 848002
aacauucucaccuuucuga

SEQ ID NO: 848004 - RNA, 19 nt, Artificial Sequence
  Description of Artificial Sequence: Synthetic oligonucleotide
  Sense strand starting at position 3682 of SEQ ID NO: 588190
gugagaauguuagcguccu

SEQ ID NO: 848005 - RNA, 19 nt, Artificial Sequence
  Description of Artificial Sequence: Synthetic oligonucleotide
  Antisense strand to SEQ ID NO: 848004
aggacgcuaacauucucac

SEQ ID NO: 848006 - RNA, 19 nt, Artificial Sequence
  Description of Artificial Sequence: Synthetic oligonucleotide
  Sense strand starting at position 3906 of SEQ ID NO: 588190
gugucuuguauggacguga

SEQ ID NO: 848007 - RNA, 19 nt, Artificial Sequence
  Description of Artificial Sequence: Synthetic oligonucleotide
  Antisense strand to SEQ ID NO: 848006
ucacguccauacaagacac

SEQ ID NO: 848008 - RNA, 19 nt, Artificial Sequence
  Description of Artificial Sequence: Synthetic oligonucleotide
  Sense strand starting at position 3910 of SEQ ID NO: 588190
cuuguauggacgugaucca

SEQ ID NO: 848009 - RNA, 19 nt, Artificial Sequence
  Description of Artificial Sequence: Synthetic oligonucleotide
  Antisense strand to SEQ ID NO: 848008
uggaucacguccauacaag

SEQ ID NO: 848010 - RNA, 19 nt, Artificial Sequence
  Description of Artificial Sequence: Synthetic oligonucleotide
  Sense strand starting at position 3911 of SEQ ID NO: 588190
uuguauggacgugauccau

SEQ ID NO: 848011 - RNA, 19 nt, Artificial Sequence
  Description of Artificial Sequence: Synthetic oligonucleotide
  Antisense strand to SEQ ID NO: 848010
auggaucacguccauacaa

SEQ ID NO: 848012 - RNA, 19 nt, Artificial Sequence
  Description of Artificial Sequence: Synthetic oligonucleotide
  Sense strand starting at position 3917 of SEQ ID NO: 588190
ggacgugauccauaccaac

SEQ ID NO: 848013 - RNA, 19 nt, Artificial Sequence
  Description of Artificial Sequence: Synthetic oligonucleotide
  Antisense strand to SEQ ID NO: 848012
guugguauggaucacgucc

SEQ ID NO: 848014 - RNA, 19 nt, Artificial Sequence
  Description of Artificial Sequence: Synthetic oligonucleotide
  Sense strand starting at position 24 of SEQ ID NO: 588191
agugugugcgcguuagacu

SEQ ID NO: 848015 - RNA, 19 nt, Artificial Sequence
  Description of Artificial Sequence: Synthetic oligonucleotide
  Antisense strand to SEQ ID NO: 848014
agucuaacgcgcacacacu

SEQ ID NO: 848016 - RNA, 19 nt, Artificial Sequence
  Description of Artificial Sequence: Synthetic oligonucleotide
  Sense strand starting at position 31 of SEQ ID NO: 588191
gcgcguuagacuuaccuaa

SEQ ID NO: 848017 - RNA, 19 nt, Artificial Sequence
  Description of Artificial Sequence: Synthetic oligonucleotide
  Antisense strand to SEQ ID NO: 848016
uuagguaagucuaacgcgc

SEQ ID NO: 848018 - RNA, 19 nt, Artificial Sequence
  Description of Artificial Sequence: Synthetic oligonucleotide
  Sense strand starting at position 42 of SEQ ID NO: 588191
uuaccuaagguucggauau

SEQ ID NO: 848019 - RNA, 19 nt, Artificial Sequence
  Description of Artificial Sequence: Synthetic oligonucleotide
  Antisense strand to SEQ ID NO: 848018
auauccgaaccuuagguaa

SEQ ID NO: 848020 - RNA, 19 nt, Artificial Sequence
  Description of Artificial Sequence: Synthetic oligonucleotide
  Sense strand starting at position 240 of SEQ ID NO: 588191
cggaaauccuccucuccuu

SEQ ID NO: 848021 - RNA, 19 nt, Artificial Sequence
  Description of Artificial Sequence: Synthetic oligonucleotide
  Antisense strand to SEQ ID NO: 848020
aaggagaggaggauuuccg

SEQ ID NO: 848022 - RNA, 19 nt, Artificial Sequence
  Description of Artificial Sequence: Synthetic oligonucleotide
  Sense strand starting at position 336 of SEQ ID NO: 588191
cauuucugccguugaggaa

SEQ ID NO: 848023 - RNA, 19 nt, Artificial Sequence
  Description of Artificial Sequence: Synthetic oligonucleotide
  Antisense strand to SEQ ID NO: 848022
uuccucaacggcagaaaug

SEQ ID NO: 848024 - RNA, 19 nt, Artificial Sequence
  Description of Artificial Sequence: Synthetic oligonucleotide
  Sense strand starting at position 503 of SEQ ID NO: 588191
augcccuugagagggauaa

SEQ ID NO: 848025 - RNA, 19 nt, Artificial Sequence
  Description of Artificial Sequence: Synthetic oligonucleotide
  Antisense strand to SEQ ID NO: 848024
uuaucccucucaagggcau

SEQ ID NO: 848026 - RNA, 19 nt, Artificial Sequence
  Description of Artificial Sequence: Synthetic oligonucleotide
  Sense strand starting at position 527 of SEQ ID NO: 588191
agucuugcacaaugaauca

SEQ ID NO: 848027 - RNA, 19 nt, Artificial Sequence
  Description of Artificial Sequence: Synthetic oligonucleotide
  Antisense strand to SEQ ID NO: 848026
ugauucauugugcaagacu

SEQ ID NO: 848028 - RNA, 19 nt, Artificial Sequence
  Description of Artificial Sequence: Synthetic oligonucleotide
  Sense strand starting at position 777 of SEQ ID NO: 588191
cugguaaaguggucaccau

SEQ ID NO: 848029 - RNA, 19 nt, Artificial Sequence
  Description of Artificial Sequence: Synthetic oligonucleotide
  Antisense strand to SEQ ID NO: 848028
auggugaccacuuuaccag

SEQ ID NO: 848030 - RNA, 19 nt, Artificial Sequence
  Description of Artificial Sequence: Synthetic oligonucleotide
  Sense strand starting at position 778 of SEQ ID NO: 588191
ugguaaaguggucaccauu

SEQ ID NO: 848031 - RNA, 19 nt, Artificial Sequence
  Description of Artificial Sequence: Synthetic oligonucleotide
  Antisense strand to SEQ ID NO: 848030
aauggugaccacuuuacca

SEQ ID NO: 848032 - RNA, 19 nt, Artificial Sequence
  Description of Artificial Sequence: Synthetic oligonucleotide
  Sense strand starting at position 1405 of SEQ ID NO: 588191
gcacuuucguaaccaugga

SEQ ID NO: 848033 - RNA, 19 nt, Artificial Sequence
  Description of Artificial Sequence: Synthetic oligonucleotide
  Antisense strand to SEQ ID NO: 848032
uccaugguuacgaaagugc

SEQ ID NO: 848034 - RNA, 19 nt, Artificial Sequence
  Description of Artificial Sequence: Synthetic oligonucleotide
  Sense strand starting at position 1759 of SEQ ID NO: 588191
cacucuuuaccguaggcau

SEQ ID NO: 848035 - RNA, 19 nt, Artificial Sequence
  Description of Artificial Sequence: Synthetic oligonucleotide
  Antisense strand to SEQ ID NO: 848034
augccuacgguaaagagug

SEQ ID NO: 848036 - RNA, 19 nt, Artificial Sequence
  Description of Artificial Sequence: Synthetic oligonucleotide
  Sense strand starting at position 2154 of SEQ ID NO: 588191
cugggugucucucuaauag

SEQ ID NO: 848037 - RNA, 19 nt, Artificial Sequence
  Description of Artificial Sequence: Synthetic oligonucleotide
  Antisense strand to SEQ ID NO: 848036
cuauuagagagacacccag

SEQ ID NO: 848038 - RNA, 19 nt, Artificial Sequence
  Description of Artificial Sequence: Synthetic oligonucleotide
  Sense strand starting at position 2184 of SEQ ID NO: 588191
uauugcuugucauuccgga

SEQ ID NO: 848039 - RNA, 19 nt, Artificial Sequence
  Description of Artificial Sequence: Synthetic oligonucleotide
  Antisense strand to SEQ ID NO: 848038
uccggaaugacaagcaaua

SEQ ID NO: 848040 - RNA, 19 nt, Artificial Sequence
  Description of Artificial Sequence: Synthetic oligonucleotide
  Sense strand starting at position 2189 of SEQ ID NO: 588191
cuugucauuccggagaacu

SEQ ID NO: 848041 - RNA, 19 nt, Artificial Sequence
  Description of Artificial Sequence: Synthetic oligonucleotide
  Antisense strand to SEQ ID NO: 848040
aguucuccggaaugacaag

SEQ ID NO: 848042 - RNA, 19 nt, Artificial Sequence
  Description of Artificial Sequence: Synthetic oligonucleotide
  Sense strand starting at position 2191 of SEQ ID NO: 588191
ugucauuccggagaacuug

SEQ ID NO: 848043 - RNA, 19 nt, Artificial Sequence
  Description of Artificial Sequence: Synthetic oligonucleotide
  Antisense strand to SEQ ID NO: 848042
caaguucuccggaaugaca

SEQ ID NO: 848044 - RNA, 19 nt, Artificial Sequence
  Description of Artificial Sequence: Synthetic oligonucleotide
  Sense strand starting at position 2207 of SEQ ID NO: 588191
uugugaaagauucgauucu

SEQ ID NO: 848045 - RNA, 19 nt, Artificial Sequence
  Description of Artificial Sequence: Synthetic oligonucleotide
  Antisense strand to SEQ ID NO: 848044
agaaucgaaucuuucacaa

SEQ ID NO: 848046 - RNA, 19 nt, Artificial Sequence
  Description of Artificial Sequence: Synthetic oligonucleotide
  Sense strand starting at position 2213 of SEQ ID NO: 588191
aagauucgauucuugagga

SEQ ID NO: 848047 - RNA, 19 nt, Artificial Sequence
  Description of Artificial Sequence: Synthetic oligonucleotide
  Antisense strand to SEQ ID NO: 848046
uccucaagaaucgaaucuu

SEQ ID NO: 848048 - RNA, 19 nt, Artificial Sequence
  Description of Artificial Sequence: Synthetic oligonucleotide
  Sense strand starting at position 2269 of SEQ ID NO: 588191
gccaucagccugcaguuaa

SEQ ID NO: 848049 - RNA, 19 nt, Artificial Sequence
  Description of Artificial Sequence: Synthetic oligonucleotide
  Antisense strand to SEQ ID NO: 848048
uuaacugcaggcugauggc

SEQ ID NO: 848050 - RNA, 19 nt, Artificial Sequence
  Description of Artificial Sequence: Synthetic oligonucleotide
  Sense strand starting at position 2352 of SEQ ID NO: 588191
cuccuauguccuuggaaga

SEQ ID NO: 848051 - RNA, 19 nt, Artificial Sequence
  Description of Artificial Sequence: Synthetic oligonucleotide
  Antisense strand to SEQ ID NO: 848050
ucuuccaaggacauaggag

SEQ ID NO: 848052 - RNA, 19 nt, Artificial Sequence
  Description of Artificial Sequence: Synthetic oligonucleotide
  Sense strand starting at position 2353 of SEQ ID NO: 588191
uccuauguccuuggaagac

SEQ ID NO: 848053 - RNA, 19 nt, Artificial Sequence
  Description of Artificial Sequence: Synthetic oligonucleotide
  Antisense strand to SEQ ID NO: 848052
gucuuccaaggacauagga

SEQ ID NO: 848054 - RNA, 19 nt, Artificial Sequence
  Description of Artificial Sequence: Synthetic oligonucleotide
  Sense strand starting at position 2363 of SEQ ID NO: 588191
uuggaagacucuccuguau

SEQ ID NO: 848055 - RNA, 19 nt, Artificial Sequence
  Description of Artificial Sequence: Synthetic oligonucleotide
  Antisense strand to SEQ ID NO: 848054
auacaggagagucuuccaa

SEQ ID NO: 848056 - RNA, 19 nt, Artificial Sequence
  Description of Artificial Sequence: Synthetic oligonucleotide
  Sense strand starting at position 2574 of SEQ ID NO: 588191
cagucaugucccuacagag

SEQ ID NO: 848057 - RNA, 19 nt, Artificial Sequence
  Description of Artificial Sequence: Synthetic oligonucleotide
  Antisense strand to SEQ ID NO: 848056
cucuguagggacaugacug

SEQ ID NO: 848058 - RNA, 19 nt, Artificial Sequence
  Description of Artificial Sequence: Synthetic oligonucleotide
  Sense strand starting at position 3036 of SEQ ID NO: 588191
ggcauuuguugggaaagca

SEQ ID NO: 848059 - RNA, 19 nt, Artificial Sequence
  Description of Artificial Sequence: Synthetic oligonucleotide
  Antisense strand to SEQ ID NO: 848058
ugcuuucccaacaaaugcc

SEQ ID NO: 848060 - RNA, 19 nt, Artificial Sequence
  Description of Artificial Sequence: Synthetic oligonucleotide
  Sense strand starting at position 3068 of SEQ ID NO: 588191
ggugaaauaucagucacug

SEQ ID NO: 848061 - RNA, 19 nt, Artificial Sequence
  Description of Artificial Sequence: Synthetic oligonucleotide
  Antisense strand to SEQ ID NO: 848060
cagugacugauauuucacc

SEQ ID NO: 848062 - RNA, 19 nt, Artificial Sequence
  Description of Artificial Sequence: Synthetic oligonucleotide
  Sense strand starting at position 3139 of SEQ ID NO: 588191
gggugcaacagauaccuua

SEQ ID NO: 848063 - RNA, 19 nt, Artificial Sequence
  Description of Artificial Sequence: Synthetic oligonucleotide
  Antisense strand to SEQ ID NO: 848062
uaagguaucuguugcaccc

SEQ ID NO: 848064 - RNA, 19 nt, Artificial Sequence
  Description of Artificial Sequence: Synthetic oligonucleotide
  Sense strand starting at position 3165 of SEQ ID NO: 588191
gaggaagguaggugguaua

SEQ ID NO: 848065 - RNA, 19 nt, Artificial Sequence
  Description of Artificial Sequence: Synthetic oligonucleotide
  Antisense strand to SEQ ID NO: 848064
uauaccaccuaccuuccuc

SEQ ID NO: 848066 - RNA, 19 nt, Artificial Sequence
  Description of Artificial Sequence: Synthetic oligonucleotide
  Sense strand starting at position 3246 of SEQ ID NO: 588191
gguaguuugggcugcauuu

SEQ ID NO: 848067 - RNA, 19 nt, Artificial Sequence
  Description of Artificial Sequence: Synthetic oligonucleotide
  Antisense strand to SEQ ID NO: 848066
aaaugcagcccaaacuacc

SEQ ID NO: 848068 - RNA, 19 nt, Artificial Sequence
  Description of Artificial Sequence: Synthetic oligonucleotide
  Sense strand starting at position 3256 of SEQ ID NO: 588191
gcugcauuugucugcugga

SEQ ID NO: 848069 - RNA, 19 nt, Artificial Sequence
  Description of Artificial Sequence: Synthetic oligonucleotide
  Antisense strand to SEQ ID NO: 848068
uccagcagacaaaugcagc

SEQ ID NO: 848070 - RNA, 19 nt, Artificial Sequence
  Description of Artificial Sequence: Synthetic oligonucleotide
  Sense strand starting at position 3285 of SEQ ID NO: 588191
ggagaugucaaauaguguu

SEQ ID NO: 848071 - RNA, 19 nt, Artificial Sequence
  Description of Artificial Sequence: Synthetic oligonucleotide
  Antisense strand to SEQ ID NO: 848070
aacacuauuugacaucucc

SEQ ID NO: 848072 - RNA, 19 nt, Artificial Sequence
  Description of Artificial Sequence: Synthetic oligonucleotide
  Sense strand starting at position 3336 of SEQ ID NO: 588191
cuacauguuucucuuccga

SEQ ID NO: 848073 - RNA, 19 nt, Artificial Sequence
  Description of Artificial Sequence: Synthetic oligonucleotide
  Antisense strand to SEQ ID NO: 848072
ucggaagagaaacauguag

SEQ ID NO: 848074 - RNA, 19 nt, Artificial Sequence
  Description of Artificial Sequence: Synthetic oligonucleotide
  Sense strand starting at position 3338 of SEQ ID NO: 588191
acauguuucucuuccgauu

SEQ ID NO: 848075 - RNA, 19 nt, Artificial Sequence
  Description of Artificial Sequence: Synthetic oligonucleotide
  Antisense strand to SEQ ID NO: 848074
aaucggaagagaaacaugu

SEQ ID NO: 848076 - RNA, 19 nt, Artificial Sequence
  Description of Artificial Sequence: Synthetic oligonucleotide
  Sense strand starting at position 3414 of SEQ ID NO: 588191
cgggccuacacuugucuua

SEQ ID NO: 848077 - RNA, 19 nt, Artificial Sequence
  Description of Artificial Sequence: Synthetic oligonucleotide
  Antisense strand to SEQ ID NO: 848076
uaagacaaguguaggcccg

SEQ ID NO: 848078 - RNA, 19 nt, Artificial Sequence
  Description of Artificial Sequence: Synthetic oligonucleotide
  Sense strand starting at position 3416 of SEQ ID NO: 588191
ggccuacacuugucuuaaa

SEQ ID NO: 848079 - RNA, 19 nt, Artificial Sequence
  Description of Artificial Sequence: Synthetic oligonucleotide
  Antisense strand to SEQ ID NO: 848078
uuuaagacaaguguaggcc

SEQ ID NO: 848080 - RNA, 19 nt, Artificial Sequence
  Description of Artificial Sequence: Synthetic oligonucleotide
  Sense strand starting at position 3426 of SEQ ID NO: 588191
ugucuuaaacacugagaug

SEQ ID NO: 848081 - RNA, 19 nt, Artificial Sequence
  Description of Artificial Sequence: Synthetic oligonucleotide
  Antisense strand to SEQ ID NO: 848080
caucucaguguuuaagaca

SEQ ID NO: 848082 - RNA, 19 nt, Artificial Sequence
  Description of Artificial Sequence: Synthetic oligonucleotide
  Sense strand starting at position 3465 of SEQ ID NO: 588191
gcaaccuucugaguuuagu

SEQ ID NO: 848083 - RNA, 19 nt, Artificial Sequence
  Description of Artificial Sequence: Synthetic oligonucleotide
  Antisense strand to SEQ ID NO: 848082
acuaaacucagaagguugc

SEQ ID NO: 848084 - RNA, 19 nt, Artificial Sequence
  Description of Artificial Sequence: Synthetic oligonucleotide
  Sense strand starting at position 3471 of SEQ ID NO: 588191
uucugaguuuagucuggau

SEQ ID NO: 848085 - RNA, 19 nt, Artificial Sequence
  Description of Artificial Sequence: Synthetic oligonucleotide
  Antisense strand to SEQ ID NO: 848084
auccagacuaaacucagaa

SEQ ID NO: 848086 - RNA, 19 nt, Artificial Sequence
  Description of Artificial Sequence: Synthetic oligonucleotide
  Sense strand starting at position 3475 of SEQ ID NO: 588191
gaguuuagucuggauccac

SEQ ID NO: 848087 - RNA, 19 nt, Artificial Sequence
  Description of Artificial Sequence: Synthetic oligonucleotide
  Antisense strand to SEQ ID NO: 848086
guggauccagacuaaacuc

SEQ ID NO: 848088 - RNA, 19 nt, Artificial Sequence
  Description of Artificial Sequence: Synthetic oligonucleotide
  Sense strand starting at position 3595 of SEQ ID NO: 588191
ggcucuaagguuugccuau

SEQ ID NO: 848089 - RNA, 19 nt, Artificial Sequence
  Description of Artificial Sequence: Synthetic oligonucleotide
  Antisense strand to SEQ ID NO: 848088
auaggcaaaccuuagagcc

SEQ ID NO: 848090 - RNA, 19 nt, Artificial Sequence
  Description of Artificial Sequence: Synthetic oligonucleotide
  Sense strand starting at position 3786 of SEQ ID NO: 588191
gguuggugugcgccuguaa

SEQ ID NO: 848091 - RNA, 19 nt, Artificial Sequence
  Description of Artificial Sequence: Synthetic oligonucleotide
  Antisense strand to SEQ ID NO: 848090
uuacaggcgcacaccaacc

SEQ ID NO: 848092 - RNA, 19 nt, Artificial Sequence
  Description of Artificial Sequence: Synthetic oligonucleotide
  Sense strand starting at position 3787 of SEQ ID NO: 588191
guuggugugcgccuguaaa

SEQ ID NO: 848093 - RNA, 19 nt, Artificial Sequence
  Description of Artificial Sequence: Synthetic oligonucleotide
  Antisense strand to SEQ ID NO: 848092
uuuacaggcgcacaccaac

SEQ ID NO: 848094 - RNA, 19 nt, Artificial Sequence
  Description of Artificial Sequence: Synthetic oligonucleotide
  Sense strand starting at position 18 of SEQ ID NO: 588192
cccuucuauugaguaugga

SEQ ID NO: 848095 - RNA, 19 nt, Artificial Sequence
  Description of Artificial Sequence: Synthetic oligonucleotide
  Antisense strand to SEQ ID NO: 848094
uccauacucaauagaaggg

SEQ ID NO: 848096 - RNA, 19 nt, Artificial Sequence
  Description of Artificial Sequence: Synthetic oligonucleotide
  Sense strand starting at position 165 of SEQ ID NO: 588192
aguaauuuauccuaaggga

SEQ ID NO: 848097 - RNA, 19 nt, Artificial Sequence
  Description of Artificial Sequence: Synthetic oligonucleotide
  Antisense strand to SEQ ID NO: 848096
ucccuuaggauaaauuacu

SEQ ID NO: 848098 - RNA, 19 nt, Artificial Sequence
  Description of Artificial Sequence: Synthetic oligonucleotide
  Sense strand starting at position 619 of SEQ ID NO: 588192
gccagaguggccuaacuca

SEQ ID NO: 848099 - RNA, 19 nt, Artificial Sequence
  Description of Artificial Sequence: Synthetic oligonucleotide
  Antisense strand to SEQ ID NO: 848098
ugaguuaggccacucuggc

SEQ ID NO: 848100 - RNA, 19 nt, Artificial Sequence
  Description of Artificial Sequence: Synthetic oligonucleotide
  Sense strand starting at position 1009 of SEQ ID NO: 588192
cuggguugccuacagauga

SEQ ID NO: 848101 - RNA, 19 nt, Artificial Sequence
  Description of Artificial Sequence: Synthetic oligonucleotide
  Antisense strand to SEQ ID NO: 848100
ucaucuguaggcaacccag

SEQ ID NO: 848102 - RNA, 19 nt, Artificial Sequence
  Description of Artificial Sequence: Synthetic oligonucleotide
  Sense strand starting at position 1013 of SEQ ID NO: 588192
guugccuacagaugaagau

SEQ ID NO: 848103 - RNA, 19 nt, Artificial Sequence
  Description of Artificial Sequence: Synthetic oligonucleotide
  Antisense strand to SEQ ID NO: 848102
aucuucaucuguaggcaac

SEQ ID NO: 848104 - RNA, 19 nt, Artificial Sequence
  Description of Artificial Sequence: Synthetic oligonucleotide
  Sense strand starting at position 1025 of SEQ ID NO: 588192
ugaagauacucagcaaagu

SEQ ID NO: 848105 - RNA, 19 nt, Artificial Sequence
  Description of Artificial Sequence: Synthetic oligonucleotide
  Antisense strand to SEQ ID NO: 848104
acuuugcugaguaucuuca

SEQ ID NO: 848106 - RNA, 19 nt, Artificial Sequence
  Description of Artificial Sequence: Synthetic oligonucleotide
  Sense strand starting at position 1062 of SEQ ID NO: 588192
aaauucucuuaggcagagu

SEQ ID NO: 848107 - RNA, 19 nt, Artificial Sequence
  Description of Artificial Sequence: Synthetic oligonucleotide
  Antisense strand to SEQ ID NO: 848106
acucugccuaagagaauuu

SEQ ID NO: 848108 - RNA, 19 nt, Artificial Sequence
  Description of Artificial Sequence: Synthetic oligonucleotide
  Sense strand starting at position 1136 of SEQ ID NO: 588192
acaaguaaacugugauaca

SEQ ID NO: 848109 - RNA, 19 nt, Artificial Sequence
  Description of Artificial Sequence: Synthetic oligonucleotide
  Antisense strand to SEQ ID NO: 848108
uguaucacaguuuacuugu

SEQ ID NO: 848110 - RNA, 19 nt, Artificial Sequence
  Description of Artificial Sequence: Synthetic oligonucleotide
  Sense strand starting at position 1219 of SEQ ID NO: 588192
gcacuuugugaucacuugu

SEQ ID NO: 848111 - RNA, 19 nt, Artificial Sequence
  Description of Artificial Sequence: Synthetic oligonucleotide
  Antisense strand to SEQ ID NO: 848110
acaagugaucacaaagugc

SEQ ID NO: 848112 - RNA, 19 nt, Artificial Sequence
  Description of Artificial Sequence: Synthetic oligonucleotide
  Sense strand starting at position 1225 of SEQ ID NO: 588192
ugugaucacuugucuggaa

SEQ ID NO: 848113 - RNA, 19 nt, Artificial Sequence
  Description of Artificial Sequence: Synthetic oligonucleotide
  Antisense strand to SEQ ID NO: 848112
uuccagacaagugaucaca

SEQ ID NO: 848114 - RNA, 19 nt, Artificial Sequence
  Description of Artificial Sequence: Synthetic oligonucleotide
  Sense strand starting at position 1227 of SEQ ID NO: 588192
ugaucacuugucuggaacu

SEQ ID NO: 848115 - RNA, 19 nt, Artificial Sequence
  Description of Artificial Sequence: Synthetic oligonucleotide
  Antisense strand to SEQ ID NO: 848114
aguuccagacaagugauca

SEQ ID NO: 848116 - RNA, 19 nt, Artificial Sequence
  Description of Artificial Sequence: Synthetic oligonucleotide
  Sense strand starting at position 1229 of SEQ ID NO: 588192
aucacuugucuggaacuuu

SEQ ID NO: 848117 - RNA, 19 nt, Artificial Sequence
  Description of Artificial Sequence: Synthetic oligonucleotide
  Antisense strand to SEQ ID NO: 848116
aaaguuccagacaagugau

SEQ ID NO: 848118 - RNA, 19 nt, Artificial Sequence
  Description of Artificial Sequence: Synthetic oligonucleotide
  Sense strand starting at position 1307 of SEQ ID NO: 588192
aguuuauugucaccuugag

SEQ ID NO: 848119 - RNA, 19 nt, Artificial Sequence
  Description of Artificial Sequence: Synthetic oligonucleotide
  Antisense strand to SEQ ID NO: 848118
cucaaggugacaauaaacu

SEQ ID NO: 848120 - RNA, 19 nt, Artificial Sequence
  Description of Artificial Sequence: Synthetic oligonucleotide
  Sense strand starting at position 1468 of SEQ ID NO: 588192
auguaauuccaugaaggca

SEQ ID NO: 848121 - RNA, 19 nt, Artificial Sequence
  Description of Artificial Sequence: Synthetic oligonucleotide
  Antisense strand to SEQ ID NO: 848120
ugccuucauggaauuacau

SEQ ID NO: 848122 - RNA, 19 nt, Artificial Sequence
  Description of Artificial Sequence: Synthetic oligonucleotide
  Sense strand starting at position 1516 of SEQ ID NO: 588192
aaauucugugccuagguaa

SEQ ID NO: 848123 - RNA, 19 nt, Artificial Sequence
  Description of Artificial Sequence: Synthetic oligonucleotide
  Antisense strand to SEQ ID NO: 848122
uuaccuaggcacagaauuu

SEQ ID NO: 848124 - RNA, 19 nt, Artificial Sequence
  Description of Artificial Sequence: Synthetic oligonucleotide
  Sense strand starting at position 1656 of SEQ ID NO: 588192
gaaacuuguuggcuuccca

SEQ ID NO: 848125 - RNA, 19 nt, Artificial Sequence
  Description of Artificial Sequence: Synthetic oligonucleotide
  Antisense strand to SEQ ID NO: 848124
ugggaagccaacaaguuuc

SEQ ID NO: 848126 - RNA, 19 nt, Artificial Sequence
  Description of Artificial Sequence: Synthetic oligonucleotide
  Sense strand starting at position 1695 of SEQ ID NO: 588192
uauagaccuccuugaugga

SEQ ID NO: 848127 - RNA, 19 nt, Artificial Sequence
  Description of Artificial Sequence: Synthetic oligonucleotide
  Antisense strand to SEQ ID NO: 848126
uccaucaaggaggucuaua

SEQ ID NO: 848128 - RNA, 19 nt, Artificial Sequence
  Description of Artificial Sequence: Synthetic oligonucleotide
  Sense strand starting at position 1722 of SEQ ID NO: 588192
cccuguaggagucacugua

SEQ ID NO: 848129 - RNA, 19 nt, Artificial Sequence
  Description of Artificial Sequence: Synthetic oligonucleotide
  Antisense strand to SEQ ID NO: 848128
uacagugacuccuacaggg

SEQ ID NO: 848130 - RNA, 19 nt, Artificial Sequence
  Description of Artificial Sequence: Synthetic oligonucleotide
  Sense strand starting at position 1757 of SEQ ID NO: 588192
cuggucuuacgggagaaca

SEQ ID NO: 848131 - RNA, 19 nt, Artificial Sequence
  Description of Artificial Sequence: Synthetic oligonucleotide
  Antisense strand to SEQ ID NO: 848130
uguucucccguaagaccag

SEQ ID NO: 848132 - RNA, 19 nt, Artificial Sequence
  Description of Artificial Sequence: Synthetic oligonucleotide
  Sense strand starting at position 1782 of SEQ ID NO: 588192
ugguguggucuuggagaug

SEQ ID NO: 848133 - RNA, 19 nt, Artificial Sequence
  Description of Artificial Sequence: Synthetic oligonucleotide
  Antisense strand to SEQ ID NO: 848132
caucuccaagaccacacca

SEQ ID NO: 848134 - RNA, 19 nt, Artificial Sequence
  Description of Artificial Sequence: Synthetic oligonucleotide
  Sense strand starting at position 2001 of SEQ ID NO: 588192
gugauaucaccuggcucag

SEQ ID NO: 848135 - RNA, 19 nt, Artificial Sequence
  Description of Artificial Sequence: Synthetic oligonucleotide
  Antisense strand to SEQ ID NO: 848134
cugagccaggugauaucac

SEQ ID NO: 848136 - RNA, 19 nt, Artificial Sequence
  Description of Artificial Sequence: Synthetic oligonucleotide
  Sense strand starting at position 2128 of SEQ ID NO: 588192
gagaucuucuaggucaggu

SEQ ID NO: 848137 - RNA, 19 nt, Artificial Sequence
  Description of Artificial Sequence: Synthetic oligonucleotide
  Antisense strand to SEQ ID NO: 848136
accugaccuagaagaucuc

SEQ ID NO: 848138 - RNA, 19 nt, Artificial Sequence
  Description of Artificial Sequence: Synthetic oligonucleotide
  Sense strand starting at position 2141 of SEQ ID NO: 588192
ucagguuucucacuguuga

SEQ ID NO: 848139 - RNA, 19 nt, Artificial Sequence
  Description of Artificial Sequence: Synthetic oligonucleotide
  Antisense strand to SEQ ID NO: 848138
ucaacagugagaaaccuga

SEQ ID NO: 848140 - RNA, 19 nt, Artificial Sequence
  Description of Artificial Sequence: Synthetic oligonucleotide
  Sense strand starting at position 2364 of SEQ ID NO: 588192
uguguuacacgauacacaa

SEQ ID NO: 848141 - RNA, 19 nt, Artificial Sequence
  Description of Artificial Sequence: Synthetic oligonucleotide
  Antisense strand to SEQ ID NO: 848140
uuguguaucguguaacaca

SEQ ID NO: 848142 - RNA, 19 nt, Artificial Sequence
  Description of Artificial Sequence: Synthetic oligonucleotide
  Sense strand starting at position 2393 of SEQ ID NO: 588192
uggucaauacugcaaugaa

SEQ ID NO: 848143 - RNA, 19 nt, Artificial Sequence
  Description of Artificial Sequence: Synthetic oligonucleotide
  Antisense strand to SEQ ID NO: 848142
uucauugcaguauugacca

SEQ ID NO: 848144 - RNA, 19 nt, Artificial Sequence
  Description of Artificial Sequence: Synthetic oligonucleotide
  Sense strand starting at position 2462 of SEQ ID NO: 588192
ggaaauaaauuagugagca

SEQ ID NO: 848145 - RNA, 19 nt, Artificial Sequence
  Description of Artificial Sequence: Synthetic oligonucleotide
  Antisense strand to SEQ ID NO: 848144
ugcucacuaauuuauuucc

SEQ ID NO: 848146 - RNA, 19 nt, Artificial Sequence
  Description of Artificial Sequence: Synthetic oligonucleotide
  Sense strand starting at position 2470 of SEQ ID NO: 588192
auuagugagcacggagaaa

SEQ ID NO: 848147 - RNA, 19 nt, Artificial Sequence
  Description of Artificial Sequence: Synthetic oligonucleotide
  Antisense strand to SEQ ID NO: 848146
uuucuccgugcucacuaau

SEQ ID NO: 848148 - RNA, 19 nt, Artificial Sequence
  Description of Artificial Sequence: Synthetic oligonucleotide
  Sense strand starting at position 2526 of SEQ ID NO: 588192
guguuaaggcaguaucuac

SEQ ID NO: 848149 - RNA, 19 nt, Artificial Sequence
  Description of Artificial Sequence: Synthetic oligonucleotide
  Antisense strand to SEQ ID NO: 848148
guagauacugccuuaacac

SEQ ID NO: 848150 - RNA, 19 nt, Artificial Sequence
  Description of Artificial Sequence: Synthetic oligonucleotide
  Sense strand starting at position 2569 of SEQ ID NO: 588192
agcuaaggccuagauucuu

SEQ ID NO: 848151 - RNA, 19 nt, Artificial Sequence
  Description of Artificial Sequence: Synthetic oligonucleotide
  Antisense strand to SEQ ID NO: 848150
aagaaucuaggccuuagcu

SEQ ID NO: 848152 - RNA, 19 nt, Artificial Sequence
  Description of Artificial Sequence: Synthetic oligonucleotide
  Sense strand starting at position 2847 of SEQ ID NO: 588192
agguacccauguucuagaa

SEQ ID NO: 848153 - RNA, 19 nt, Artificial Sequence
  Description of Artificial Sequence: Synthetic oligonucleotide
  Antisense strand to SEQ ID NO: 848152
uucuagaacauggguaccu

SEQ ID NO: 848154 - RNA, 19 nt, Artificial Sequence
  Description of Artificial Sequence: Synthetic oligonucleotide
  Sense strand starting at position 2851 of SEQ ID NO: 588192
acccauguucuagaaaggu

SEQ ID NO: 848155 - RNA, 19 nt, Artificial Sequence
  Description of Artificial Sequence: Synthetic oligonucleotide
  Antisense strand to SEQ ID NO: 848154
accuuucuagaacaugggu

SEQ ID NO: 848156 - RNA, 19 nt, Artificial Sequence
  Description of Artificial Sequence: Synthetic oligonucleotide
  Sense strand starting at position 2954 of SEQ ID NO: 588192
gauguugaucuggguggga

SEQ ID NO: 848157 - RNA, 19 nt, Artificial Sequence
  Description of Artificial Sequence: Synthetic oligonucleotide
  Antisense strand to SEQ ID NO: 848156
ucccacccagaucaacauc

SEQ ID NO: 848158 - RNA, 19 nt, Artificial Sequence
  Description of Artificial Sequence: Synthetic oligonucleotide
  Sense strand starting at position 2956 of SEQ ID NO: 588192
uguugaucugggugggaga

SEQ ID NO: 848159 - RNA, 19 nt, Artificial Sequence
  Description of Artificial Sequence: Synthetic oligonucleotide
  Antisense strand to SEQ ID NO: 848158
ucucccacccagaucaaca

SEQ ID NO: 848160 - RNA, 19 nt, Artificial Sequence
  Description of Artificial Sequence: Synthetic oligonucleotide
  Sense strand starting at position 3152 of SEQ ID NO: 588192
gcaguuccuggguaugaug

SEQ ID NO: 848161 - RNA, 19 nt, Artificial Sequence
  Description of Artificial Sequence: Synthetic oligonucleotide
  Antisense strand to SEQ ID NO: 848160
caucauacccaggaacugc

SEQ ID NO: 848162 - RNA, 19 nt, Artificial Sequence
  Description of Artificial Sequence: Synthetic oligonucleotide
  Sense strand starting at position 3160 of SEQ ID NO: 588192
uggguaugaugcagggaga

SEQ ID NO: 848163 - RNA, 19 nt, Artificial Sequence
  Description of Artificial Sequence: Synthetic oligonucleotide
  Antisense strand to SEQ ID NO: 848162
ucucccugcaucauaccca

SEQ ID NO: 848164 - RNA, 19 nt, Artificial Sequence
  Description of Artificial Sequence: Synthetic oligonucleotide
  Sense strand starting at position 3249 of SEQ ID NO: 588192
caggauugguguccagaga

SEQ ID NO: 848165 - RNA, 19 nt, Artificial Sequence
  Description of Artificial Sequence: Synthetic oligonucleotide
  Antisense strand to SEQ ID NO: 848164
ucucuggacaccaauccug

SEQ ID NO: 848166 - RNA, 19 nt, Artificial Sequence
  Description of Artificial Sequence: Synthetic oligonucleotide
  Sense strand starting at position 3344 of SEQ ID NO: 588192
ggguguuagcaugagauga

SEQ ID NO: 848167 - RNA, 19 nt, Artificial Sequence
  Description of Artificial Sequence: Synthetic oligonucleotide
  Antisense strand to SEQ ID NO: 848166
ucaucucaugcuaacaccc

SEQ ID NO: 848168 - RNA, 19 nt, Artificial Sequence
  Description of Artificial Sequence: Synthetic oligonucleotide
  Sense strand starting at position 3370 of SEQ ID NO: 588192
gggccugugcuauaaggua

SEQ ID NO: 848169 - RNA, 19 nt, Artificial Sequence
  Description of Artificial Sequence: Synthetic oligonucleotide
  Antisense strand to SEQ ID NO: 848168
uaccuuauagcacaggccc

SEQ ID NO: 848170 - RNA, 19 nt, Artificial Sequence
  Description of Artificial Sequence: Synthetic oligonucleotide
  Sense strand starting at position 3663 of SEQ ID NO: 588192
gccacaugugcucagacau

SEQ ID NO: 848171 - RNA, 19 nt, Artificial Sequence
  Description of Artificial Sequence: Synthetic oligonucleotide
  Antisense strand to SEQ ID NO: 848170
augucugagcacauguggc

SEQ ID NO: 848172 - RNA, 19 nt, Artificial Sequence
  Description of Artificial Sequence: Synthetic oligonucleotide
  Sense strand starting at position 3899 of SEQ ID NO: 588192
uggcuuguugaagaucaca

SEQ ID NO: 848173 - RNA, 19 nt, Artificial Sequence
  Description of Artificial Sequence: Synthetic oligonucleotide
  Antisense strand to SEQ ID NO: 848172
ugugaucuucaacaagcca

SEQ ID NO: 848174 - RNA, 19 nt, Artificial Sequence
  Description of Artificial Sequence: Synthetic oligonucleotide
  Sense strand starting at position 6 of SEQ ID NO: 588193
auaauuagagcucaaaguc

SEQ ID NO: 848175 - RNA, 19 nt, Artificial Sequence
  Description of Artificial Sequence: Synthetic oligonucleotide
  Antisense strand to SEQ ID NO: 848174
gacuuugagcucuaauuau

SEQ ID NO: 848176 - RNA, 19 nt, Artificial Sequence
  Description of Artificial Sequence: Synthetic oligonucleotide
  Sense strand starting at position 214 of SEQ ID NO: 588193
ugcaguacuuuagcacaaa

SEQ ID NO: 848177 - RNA, 19 nt, Artificial Sequence
  Description of Artificial Sequence: Synthetic oligonucleotide
  Antisense strand to SEQ ID NO: 848176
uuugugcuaaaguacugca

SEQ ID NO: 848178 - RNA, 19 nt, Artificial Sequence
  Description of Artificial Sequence: Synthetic oligonucleotide
  Sense strand starting at position 295 of SEQ ID NO: 588193
gaacaacuguuggaggaaa

SEQ ID NO: 848179 - RNA, 19 nt, Artificial Sequence
  Description of Artificial Sequence: Synthetic oligonucleotide
  Antisense strand to SEQ ID NO: 848178
uuuccuccaacaguuguuc

SEQ ID NO: 848180 - RNA, 19 nt, Artificial Sequence
  Description of Artificial Sequence: Synthetic oligonucleotide
  Sense strand starting at position 354 of SEQ ID NO: 588193
agagcaaggucugccuaaa

SEQ ID NO: 848181 - RNA, 19 nt, Artificial Sequence
  Description of Artificial Sequence: Synthetic oligonucleotide
  Antisense strand to SEQ ID NO: 848180
uuuaggcagaccuugcucu

SEQ ID NO: 848182 - RNA, 19 nt, Artificial Sequence
  Description of Artificial Sequence: Synthetic oligonucleotide
  Sense strand starting at position 403 of SEQ ID NO: 588193
auuccuucuccucgaacga

SEQ ID NO: 848183 - RNA, 19 nt, Artificial Sequence
  Description of Artificial Sequence: Synthetic oligonucleotide
  Antisense strand to SEQ ID NO: 848182
ucguucgaggagaaggaau

SEQ ID NO: 848184 - RNA, 19 nt, Artificial Sequence
  Description of Artificial Sequence: Synthetic oligonucleotide
  Sense strand starting at position 404 of SEQ ID NO: 588193
uuccuucuccucgaacgaa

SEQ ID NO: 848185 - RNA, 19 nt, Artificial Sequence
  Description of Artificial Sequence: Synthetic oligonucleotide
  Antisense strand to SEQ ID NO: 848184
uucguucgaggagaaggaa

SEQ ID NO: 848186 - RNA, 19 nt, Artificial Sequence
  Description of Artificial Sequence: Synthetic oligonucleotide
  Sense strand starting at position 483 of SEQ ID NO: 588193
gucucagaggacuguuaug

SEQ ID NO: 848187 - RNA, 19 nt, Artificial Sequence
  Description of Artificial Sequence: Synthetic oligonucleotide
  Antisense strand to SEQ ID NO: 848186
cauaacaguccucugagac

SEQ ID NO: 848188 - RNA, 19 nt, Artificial Sequence
  Description of Artificial Sequence: Synthetic oligonucleotide
  Sense strand starting at position 494 of SEQ ID NO: 588193
cuguuaugcugcucagaaa

SEQ ID NO: 848189 - RNA, 19 nt, Artificial Sequence
  Description of Artificial Sequence: Synthetic oligonucleotide
  Antisense strand to SEQ ID NO: 848188
uuucugagcagcauaacag

SEQ ID NO: 848190 - RNA, 19 nt, Artificial Sequence
  Description of Artificial Sequence: Synthetic oligonucleotide
  Sense strand starting at position 495 of SEQ ID NO: 588193
uguuaugcugcucagaaac

SEQ ID NO: 848191 - RNA, 19 nt, Artificial Sequence
  Description of Artificial Sequence: Synthetic oligonucleotide
  Antisense strand to SEQ ID NO: 848190
guuucugagcagcauaaca

SEQ ID NO: 848192 - RNA, 19 nt, Artificial Sequence
  Description of Artificial Sequence: Synthetic oligonucleotide
  Sense strand starting at position 678 of SEQ ID NO: 588193
cuggucucucaagggacua

SEQ ID NO: 848193 - RNA, 19 nt, Artificial Sequence
  Description of Artificial Sequence: Synthetic oligonucleotide
  Antisense strand to SEQ ID NO: 848192
uagucccuugagagaccag

SEQ ID NO: 848194 - RNA, 19 nt, Artificial Sequence
  Description of Artificial Sequence: Synthetic oligonucleotide
  Sense strand starting at position 679 of SEQ ID NO: 588193
uggucucucaagggacuau

SEQ ID NO: 848195 - RNA, 19 nt, Artificial Sequence
  Description of Artificial Sequence: Synthetic oligonucleotide
  Antisense strand to SEQ ID NO: 848194
auagucccuugagagacca

SEQ ID NO: 848196 - RNA, 19 nt, Artificial Sequence
  Description of Artificial Sequence: Synthetic oligonucleotide
  Sense strand starting at position 754 of SEQ ID NO: 588193
ccaagucaccagcagagau

SEQ ID NO: 848197 - RNA, 19 nt, Artificial Sequence
  Description of Artificial Sequence: Synthetic oligonucleotide
  Antisense strand to SEQ ID NO: 848196
aucucugcuggugacuugg

SEQ ID NO: 848198 - RNA, 19 nt, Artificial Sequence
  Description of Artificial Sequence: Synthetic oligonucleotide
  Sense strand starting at position 863 of SEQ ID NO: 588193
uccugacuuaagggagcua

SEQ ID NO: 848199 - RNA, 19 nt, Artificial Sequence
  Description of Artificial Sequence: Synthetic oligonucleotide
  Antisense strand to SEQ ID NO: 848198
uagcucccuuaagucagga

SEQ ID NO: 848200 - RNA, 19 nt, Artificial Sequence
  Description of Artificial Sequence: Synthetic oligonucleotide
  Sense strand starting at position 893 of SEQ ID NO: 588193
gguuuagcaugccugggaa

SEQ ID NO: 848201 - RNA, 19 nt, Artificial Sequence
  Description of Artificial Sequence: Synthetic oligonucleotide
  Antisense strand to SEQ ID NO: 848200
uucccaggcaugcuaaacc

SEQ ID NO: 848202 - RNA, 19 nt, Artificial Sequence
  Description of Artificial Sequence: Synthetic oligonucleotide
  Sense strand starting at position 895 of SEQ ID NO: 588193
uuuagcaugccugggaauu

SEQ ID NO: 848203 - RNA, 19 nt, Artificial Sequence
  Description of Artificial Sequence: Synthetic oligonucleotide
  Antisense strand to SEQ ID NO: 848202
aauucccaggcaugcuaaa

SEQ ID NO: 848204 - RNA, 19 nt, Artificial Sequence
  Description of Artificial Sequence: Synthetic oligonucleotide
  Sense strand starting at position 897 of SEQ ID NO: 588193
uagcaugccugggaauuua

SEQ ID NO: 848205 - RNA, 19 nt, Artificial Sequence
  Description of Artificial Sequence: Synthetic oligonucleotide
  Antisense strand to SEQ ID NO: 848204
uaaauucccaggcaugcua

SEQ ID NO: 848206 - RNA, 19 nt, Artificial Sequence
  Description of Artificial Sequence: Synthetic oligonucleotide
  Sense strand starting at position 931 of SEQ ID NO: 588193
gucuaaggauuugaggcua

SEQ ID NO: 848207 - RNA, 19 nt, Artificial Sequence
  Description of Artificial Sequence: Synthetic oligonucleotide
  Antisense strand to SEQ ID NO: 848206
uagccucaaauccuuagac

SEQ ID NO: 848208 - RNA, 19 nt, Artificial Sequence
  Description of Artificial Sequence: Synthetic oligonucleotide
  Sense strand starting at position 992 of SEQ ID NO: 588193
ccggucucauguuugaaag

SEQ ID NO: 848209 - RNA, 19 nt, Artificial Sequence
  Description of Artificial Sequence: Synthetic oligonucleotide
  Antisense strand to SEQ ID NO: 848208
cuuucaaacaugagaccgg

SEQ ID NO: 848210 - RNA, 19 nt, Artificial Sequence
  Description of Artificial Sequence: Synthetic oligonucleotide
  Sense strand starting at position 1046 of SEQ ID NO: 588193
cuuugaagugcuuggauaa

SEQ ID NO: 848211 - RNA, 19 nt, Artificial Sequence
  Description of Artificial Sequence: Synthetic oligonucleotide
  Antisense strand to SEQ ID NO: 848210
uuauccaagcacuucaaag

SEQ ID NO: 848212 - RNA, 19 nt, Artificial Sequence
  Description of Artificial Sequence: Synthetic oligonucleotide
  Sense strand starting at position 1047 of SEQ ID NO: 588193
uuugaagugcuuggauaac

SEQ ID NO: 848213 - RNA, 19 nt, Artificial Sequence
  Description of Artificial Sequence: Synthetic oligonucleotide
  Antisense strand to SEQ ID NO: 848212
guuauccaagcacuucaaa

SEQ ID NO: 848214 - RNA, 19 nt, Artificial Sequence
  Description of Artificial Sequence: Synthetic oligonucleotide
  Sense strand starting at position 2111 of SEQ ID NO: 588193
guagaugcucauggcuaga

SEQ ID NO: 848215 - RNA, 19 nt, Artificial Sequence
  Description of Artificial Sequence: Synthetic oligonucleotide
  Antisense strand to SEQ ID NO: 848214
ucuagccaugagcaucuac

SEQ ID NO: 848216 - RNA, 19 nt, Artificial Sequence
  Description of Artificial Sequence: Synthetic oligonucleotide
  Sense strand starting at position 2122 of SEQ ID NO: 588193
uggcuagaaggcugacuua

SEQ ID NO: 848217 - RNA, 19 nt, Artificial Sequence
  Description of Artificial Sequence: Synthetic oligonucleotide
  Antisense strand to SEQ ID NO: 848216
uaagucagccuucuagcca

SEQ ID NO: 848218 - RNA, 19 nt, Artificial Sequence
  Description of Artificial Sequence: Synthetic oligonucleotide
  Sense strand starting at position 2291 of SEQ ID NO: 588193
aguguaacccagcaucacu

SEQ ID NO: 848219 - RNA, 19 nt, Artificial Sequence
  Description of Artificial Sequence: Synthetic oligonucleotide
  Antisense strand to SEQ ID NO: 848218
agugaugcuggguuacacu

SEQ ID NO: 848220 - RNA, 19 nt, Artificial Sequence
  Description of Artificial Sequence: Synthetic oligonucleotide
  Sense strand starting at position 2396 of SEQ ID NO: 588193
aaguaacaagugugaauga

SEQ ID NO: 848221 - RNA, 19 nt, Artificial Sequence
  Description of Artificial Sequence: Synthetic oligonucleotide
  Antisense strand to SEQ ID NO: 848220
ucauucacacuuguuacuu

SEQ ID NO: 848222 - RNA, 19 nt, Artificial Sequence
  Description of Artificial Sequence: Synthetic oligonucleotide
  Sense strand starting at position 2442 of SEQ ID NO: 588193
ccuugagaguaauaauuua

SEQ ID NO: 848223 - RNA, 19 nt, Artificial Sequence
  Description of Artificial Sequence: Synthetic oligonucleotide
  Antisense strand to SEQ ID NO: 848222
uaaauuauuacucucaagg

SEQ ID NO: 848224 - RNA, 19 nt, Artificial Sequence
  Description of Artificial Sequence: Synthetic oligonucleotide
  Sense strand starting at position 2469 of SEQ ID NO: 588193
aauguaacuccagggauua

SEQ ID NO: 848225 - RNA, 19 nt, Artificial Sequence
  Description of Artificial Sequence: Synthetic oligonucleotide
  Antisense strand to SEQ ID NO: 848224
uaaucccuggaguuacauu

SEQ ID NO: 848226 - RNA, 19 nt, Artificial Sequence
  Description of Artificial Sequence: Synthetic oligonucleotide
  Sense strand starting at position 2470 of SEQ ID NO: 588193
auguaacuccagggauuaa

SEQ ID NO: 848227 - RNA, 19 nt, Artificial Sequence
  Description of Artificial Sequence: Synthetic oligonucleotide
  Antisense strand to SEQ ID NO: 848226
uuaaucccuggaguuacau

SEQ ID NO: 848228 - RNA, 19 nt, Artificial Sequence
  Description of Artificial Sequence: Synthetic oligonucleotide
  Sense strand starting at position 2548 of SEQ ID NO: 588193
gagccaauuuaccaggagu

SEQ ID NO: 848229 - RNA, 19 nt, Artificial Sequence
  Description of Artificial Sequence: Synthetic oligonucleotide
  Antisense strand to SEQ ID NO: 848228
acuccugguaaauuggcuc

SEQ ID NO: 848230 - RNA, 19 nt, Artificial Sequence
  Description of Artificial Sequence: Synthetic oligonucleotide
  Sense strand starting at position 2582 of SEQ ID NO: 588193
cuuugagauuguucacgga

SEQ ID NO: 848231 - RNA, 19 nt, Artificial Sequence
  Description of Artificial Sequence: Synthetic oligonucleotide
  Antisense strand to SEQ ID NO: 848230
uccgugaacaaucucaaag

SEQ ID NO: 848232 - RNA, 19 nt, Artificial Sequence
  Description of Artificial Sequence: Synthetic oligonucleotide
  Sense strand starting at position 2615 of SEQ ID NO: 588193
auaguuaaauacucaaggu

SEQ ID NO: 848233 - RNA, 19 nt, Artificial Sequence
  Description of Artificial Sequence: Synthetic oligonucleotide
  Antisense strand to SEQ ID NO: 848232
accuugaguauuuaacuau

SEQ ID NO: 848234 - RNA, 19 nt, Artificial Sequence
  Description of Artificial Sequence: Synthetic oligonucleotide
  Sense strand starting at position 2729 of SEQ ID NO: 588193
gcaggcaaauaccuauaaa

SEQ ID NO: 848235 - RNA, 19 nt, Artificial Sequence
  Description of Artificial Sequence: Synthetic oligonucleotide
  Antisense strand to SEQ ID NO: 848234
uuuauagguauuugccugc

SEQ ID NO: 848236 - RNA, 19 nt, Artificial Sequence
  Description of Artificial Sequence: Synthetic oligonucleotide
  Sense strand starting at position 2771 of SEQ ID NO: 588193
agaaacagauguuacaaua

SEQ ID NO: 848237 - RNA, 19 nt, Artificial Sequence
  Description of Artificial Sequence: Synthetic oligonucleotide
  Antisense strand to SEQ ID NO: 848236
uauuguaacaucuguuucu

SEQ ID NO: 848238 - RNA, 19 nt, Artificial Sequence
  Description of Artificial Sequence: Synthetic oligonucleotide
  Sense strand starting at position 2990 of SEQ ID NO: 588193
cagagcagauauguuuaaa

SEQ ID NO: 848239 - RNA, 19 nt, Artificial Sequence
  Description of Artificial Sequence: Synthetic oligonucleotide
  Antisense strand to SEQ ID NO: 848238
uuuaaacauaucugcucug

SEQ ID NO: 848240 - RNA, 19 nt, Artificial Sequence
  Description of Artificial Sequence: Synthetic oligonucleotide
  Sense strand starting at position 3425 of SEQ ID NO: 588193
uggacuaacccaugugcua

SEQ ID NO: 848241 - RNA, 19 nt, Artificial Sequence
  Description of Artificial Sequence: Synthetic oligonucleotide
  Antisense strand to SEQ ID NO: 848240
uagcacauggguuagucca

SEQ ID NO: 848242 - RNA, 19 nt, Artificial Sequence
  Description of Artificial Sequence: Synthetic oligonucleotide
  Sense strand starting at position 3654 of SEQ ID NO: 588193
gcugguauuucccuugguu

SEQ ID NO: 848243 - RNA, 19 nt, Artificial Sequence
  Description of Artificial Sequence: Synthetic oligonucleotide
  Antisense strand to SEQ ID NO: 848242
aaccaagggaaauaccagc

SEQ ID NO: 848244 - RNA, 19 nt, Artificial Sequence
  Description of Artificial Sequence: Synthetic oligonucleotide
  Sense strand starting at position 3656 of SEQ ID NO: 588193
ugguauuucccuugguucu

SEQ ID NO: 848245 - RNA, 19 nt, Artificial Sequence
  Description of Artificial Sequence: Synthetic oligonucleotide
  Antisense strand to SEQ ID NO: 848244
agaaccaagggaaauacca

SEQ ID NO: 848246 - RNA, 19 nt, Artificial Sequence
  Description of Artificial Sequence: Synthetic oligonucleotide
  Sense strand starting at position 3743 of SEQ ID NO: 588193
cgauaaauccauuggcuau

SEQ ID NO: 848247 - RNA, 19 nt, Artificial Sequence
  Description of Artificial Sequence: Synthetic oligonucleotide
  Antisense strand to SEQ ID NO: 848246
auagccaauggauuuaucg

SEQ ID NO: 848248 - RNA, 19 nt, Artificial Sequence
  Description of Artificial Sequence: Synthetic oligonucleotide
  Sense strand starting at position 3755 of SEQ ID NO: 588193
uggcuauuucuauguaauc

SEQ ID NO: 848249 - RNA, 19 nt, Artificial Sequence
  Description of Artificial Sequence: Synthetic oligonucleotide
  Antisense strand to SEQ ID NO: 848248
gauuacauagaaauagcca

SEQ ID NO: 848250 - RNA, 19 nt, Artificial Sequence
  Description of Artificial Sequence: Synthetic oligonucleotide
  Sense strand starting at position 3928 of SEQ ID NO: 588193
agcugagacaagggucaau

SEQ ID NO: 848251 - RNA, 19 nt, Artificial Sequence
  Description of Artificial Sequence: Synthetic oligonucleotide
  Antisense strand to SEQ ID NO: 848250
auugacccuugucucagcu

SEQ ID NO: 848252 - RNA, 19 nt, Artificial Sequence
  Description of Artificial Sequence: Synthetic oligonucleotide
  Sense strand starting at position 3943 of SEQ ID NO: 588193
caauuuaguggcuggcuaa

SEQ ID NO: 848253 - RNA, 19 nt, Artificial Sequence
  Description of Artificial Sequence: Synthetic oligonucleotide
  Antisense strand to SEQ ID NO: 848252
uuagccagccacuaaauug

SEQ ID NO: 848254 - RNA, 19 nt, Artificial Sequence
  Description of Artificial Sequence: Synthetic oligonucleotide
  Sense strand starting at position 199 of SEQ ID NO: 588194
cauccugaguguuuaagaa

SEQ ID NO: 848255 - RNA, 19 nt, Artificial Sequence
  Description of Artificial Sequence: Synthetic oligonucleotide
  Antisense strand to SEQ ID NO: 848254
uucuuaaacacucaggaug

SEQ ID NO: 848256 - RNA, 19 nt, Artificial Sequence
  Description of Artificial Sequence: Synthetic oligonucleotide
  Sense strand starting at position 206 of SEQ ID NO: 588194
aguguuuaagaaggcaaga

SEQ ID NO: 848257 - RNA, 19 nt, Artificial Sequence
  Description of Artificial Sequence: Synthetic oligonucleotide
  Antisense strand to SEQ ID NO: 848256
ucuugccuucuuaaacacu

SEQ ID NO: 848258 - RNA, 19 nt, Artificial Sequence
  Description of Artificial Sequence: Synthetic oligonucleotide
  Sense strand starting at position 219 of SEQ ID NO: 588194
gcaagaaauuguguaguac

SEQ ID NO: 848259 - RNA, 19 nt, Artificial Sequence
  Description of Artificial Sequence: Synthetic oligonucleotide
  Antisense strand to SEQ ID NO: 848258
guacuacacaauuucuugc

SEQ ID NO: 848260 - RNA, 19 nt, Artificial Sequence
  Description of Artificial Sequence: Synthetic oligonucleotide
  Sense strand starting at position 220 of SEQ ID NO: 588194
caagaaauuguguaguaca

SEQ ID NO: 848261 - RNA, 19 nt, Artificial Sequence
  Description of Artificial Sequence: Synthetic oligonucleotide
  Antisense strand to SEQ ID NO: 848260
uguacuacacaauuucuug

SEQ ID NO: 848262 - RNA, 19 nt, Artificial Sequence
  Description of Artificial Sequence: Synthetic oligonucleotide
  Sense strand starting at position 363 of SEQ ID NO: 588194
guuugccauuuaucucauu

SEQ ID NO: 848263 - RNA, 19 nt, Artificial Sequence
  Description of Artificial Sequence: Synthetic oligonucleotide
  Antisense strand to SEQ ID NO: 848262
aaugagauaaauggcaaac

SEQ ID NO: 848264 - RNA, 19 nt, Artificial Sequence
  Description of Artificial Sequence: Synthetic oligonucleotide
  Sense strand starting at position 525 of SEQ ID NO: 588194
aguguuaaaucauuugugu

SEQ ID NO: 848265 - RNA, 19 nt, Artificial Sequence
  Description of Artificial Sequence: Synthetic oligonucleotide
  Antisense strand to SEQ ID NO: 848264
acacaaaugauuuaacacu

SEQ ID NO: 848266 - RNA, 19 nt, Artificial Sequence
  Description of Artificial Sequence: Synthetic oligonucleotide
  Sense strand starting at position 602 of SEQ ID NO: 588194
uuaguagaguccuuuaaga

SEQ ID NO: 848267 - RNA, 19 nt, Artificial Sequence
  Description of Artificial Sequence: Synthetic oligonucleotide
  Antisense strand to SEQ ID NO: 848266
ucuuaaaggacucuacuaa

SEQ ID NO: 848268 - RNA, 19 nt, Artificial Sequence
  Description of Artificial Sequence: Synthetic oligonucleotide
  Sense strand starting at position 748 of SEQ ID NO: 588194
ggguaauaauuccuaacuc

SEQ ID NO: 848269 - RNA, 19 nt, Artificial Sequence
  Description of Artificial Sequence: Synthetic oligonucleotide
  Antisense strand to SEQ ID NO: 848268
gaguuaggaauuauuaccc

SEQ ID NO: 848270 - RNA, 19 nt, Artificial Sequence
  Description of Artificial Sequence: Synthetic oligonucleotide
  Sense strand starting at position 768 of SEQ ID NO: 588194
cgaggugguuguaugaagu

SEQ ID NO: 848271 - RNA, 19 nt, Artificial Sequence
  Description of Artificial Sequence: Synthetic oligonucleotide
  Antisense strand to SEQ ID NO: 848270
acuucauacaaccaccucg

SEQ ID NO: 848272 - RNA, 19 nt, Artificial Sequence
  Description of Artificial Sequence: Synthetic oligonucleotide
  Sense strand starting at position 800 of SEQ ID NO: 588194
augcaaaguguugaacaca

SEQ ID NO: 848273 - RNA, 19 nt, Artificial Sequence
  Description of Artificial Sequence: Synthetic oligonucleotide
  Antisense strand to SEQ ID NO: 848272
uguguucaacacuuugcau

SEQ ID NO: 848274 - RNA, 19 nt, Artificial Sequence
  Description of Artificial Sequence: Synthetic oligonucleotide
  Sense strand starting at position 803 of SEQ ID NO: 588194
caaaguguugaacacagua

SEQ ID NO: 848275 - RNA, 19 nt, Artificial Sequence
  Description of Artificial Sequence: Synthetic oligonucleotide
  Antisense strand to SEQ ID NO: 848274
uacuguguucaacacuuug

SEQ ID NO: 848276 - RNA, 19 nt, Artificial Sequence
  Description of Artificial Sequence: Synthetic oligonucleotide
  Sense strand starting at position 1125 of SEQ ID NO: 588194
auaugaaccuuauuguugu

SEQ ID NO: 848277 - RNA, 19 nt, Artificial Sequence
  Description of Artificial Sequence: Synthetic oligonucleotide
  Antisense strand to SEQ ID NO: 848276
acaacaauaagguucauau

SEQ ID NO: 848278 - RNA, 19 nt, Artificial Sequence
  Description of Artificial Sequence: Synthetic oligonucleotide
  Sense strand starting at position 1169 of SEQ ID NO: 588194
cggguuauguuacuuauuu

SEQ ID NO: 848279 - RNA, 19 nt, Artificial Sequence
  Description of Artificial Sequence: Synthetic oligonucleotide
  Antisense strand to SEQ ID NO: 848278
aaauaaguaacauaacccg

SEQ ID NO: 848280 - RNA, 19 nt, Artificial Sequence
  Description of Artificial Sequence: Synthetic oligonucleotide
  Sense strand starting at position 1194 of SEQ ID NO: 588194
cuaccuuugcaaggguaau

SEQ ID NO: 848281 - RNA, 19 nt, Artificial Sequence
  Description of Artificial Sequence: Synthetic oligonucleotide
  Antisense strand to SEQ ID NO: 848280
auuacccuugcaaagguag

SEQ ID NO: 848282 - RNA, 19 nt, Artificial Sequence
  Description of Artificial Sequence: Synthetic oligonucleotide
  Sense strand starting at position 1200 of SEQ ID NO: 588194
uugcaaggguaauugucau

SEQ ID NO: 848283 - RNA, 19 nt, Artificial Sequence
  Description of Artificial Sequence: Synthetic oligonucleotide
  Antisense strand to SEQ ID NO: 848282
augacaauuacccuugcaa

SEQ ID NO: 848284 - RNA, 19 nt, Artificial Sequence
  Description of Artificial Sequence: Synthetic oligonucleotide
  Sense strand starting at position 1207 of SEQ ID NO: 588194
gguaauugucaucauugca

SEQ ID NO: 848285 - RNA, 19 nt, Artificial Sequence
  Description of Artificial Sequence: Synthetic oligonucleotide
  Antisense strand to SEQ ID NO: 848284
ugcaaugaugacaauuacc

SEQ ID NO: 848286 - RNA, 19 nt, Artificial Sequence
  Description of Artificial Sequence: Synthetic oligonucleotide
  Sense strand starting at position 1302 of SEQ ID NO: 588194
auuggauccuaaguggaua

SEQ ID NO: 848287 - RNA, 19 nt, Artificial Sequence
  Description of Artificial Sequence: Synthetic oligonucleotide
  Antisense strand to SEQ ID NO: 848286
uauccacuuaggauccaau

SEQ ID NO: 848288 - RNA, 19 nt, Artificial Sequence
  Description of Artificial Sequence: Synthetic oligonucleotide
  Sense strand starting at position 1303 of SEQ ID NO: 588194
uuggauccuaaguggauau

SEQ ID NO: 848289 - RNA, 19 nt, Artificial Sequence
  Description of Artificial Sequence: Synthetic oligonucleotide
  Antisense strand to SEQ ID NO: 848288
auauccacuuaggauccaa

SEQ ID NO: 848290 - RNA, 19 nt, Artificial Sequence
  Description of Artificial Sequence: Synthetic oligonucleotide
  Sense strand starting at position 1404 of SEQ ID NO: 588194
agacuaacaguaugaaugu

SEQ ID NO: 848291 - RNA, 19 nt, Artificial Sequence
  Description of Artificial Sequence: Synthetic oligonucleotide
  Antisense strand to SEQ ID NO: 848290
acauucauacuguuagucu

SEQ ID NO: 848292 - RNA, 19 nt, Artificial Sequence
  Description of Artificial Sequence: Synthetic oligonucleotide
  Sense strand starting at position 1411 of SEQ ID NO: 588194
caguaugaauguucuauag

SEQ ID NO: 848293 - RNA, 19 nt, Artificial Sequence
  Description of Artificial Sequence: Synthetic oligonucleotide
  Antisense strand to SEQ ID NO: 848292
cuauagaacauucauacug

SEQ ID NO: 848294 - RNA, 19 nt, Artificial Sequence
  Description of Artificial Sequence: Synthetic oligonucleotide
  Sense strand starting at position 1450 of SEQ ID NO: 588194
uggugcucucaguaaagau

SEQ ID NO: 848295 - RNA, 19 nt, Artificial Sequence
  Description of Artificial Sequence: Synthetic oligonucleotide
  Antisense strand to SEQ ID NO: 848294
aucuuuacugagagcacca

SEQ ID NO: 848296 - RNA, 19 nt, Artificial Sequence
  Description of Artificial Sequence: Synthetic oligonucleotide
  Sense strand starting at position 2171 of SEQ ID NO: 588194
guacccuaguauuccuaau

SEQ ID NO: 848297 - RNA, 19 nt, Artificial Sequence
  Description of Artificial Sequence: Synthetic oligonucleotide
  Antisense strand to SEQ ID NO: 848296
auuaggaauacuaggguac

SEQ ID NO: 848298 - RNA, 19 nt, Artificial Sequence
  Description of Artificial Sequence: Synthetic oligonucleotide
  Sense strand starting at position 2624 of SEQ ID NO: 588194
auuacuuucuaguugagaa

SEQ ID NO: 848299 - RNA, 19 nt, Artificial Sequence
  Description of Artificial Sequence: Synthetic oligonucleotide
  Antisense strand to SEQ ID NO: 848298
uucucaacuagaaaguaau

SEQ ID NO: 848300 - RNA, 19 nt, Artificial Sequence
  Description of Artificial Sequence: Synthetic oligonucleotide
  Sense strand starting at position 3030 of SEQ ID NO: 588194
gaaagugcccucugaagag

SEQ ID NO: 848301 - RNA, 19 nt, Artificial Sequence
  Description of Artificial Sequence: Synthetic oligonucleotide
  Antisense strand to SEQ ID NO: 848300
cucuucagagggcacuuuc

SEQ ID NO: 848302 - RNA, 19 nt, Artificial Sequence
  Description of Artificial Sequence: Synthetic oligonucleotide
  Sense strand starting at position 3113 of SEQ ID NO: 588194
ucuacaugugagcaagcaa

SEQ ID NO: 848303 - RNA, 19 nt, Artificial Sequence
  Description of Artificial Sequence: Synthetic oligonucleotide
  Antisense strand to SEQ ID NO: 848302
uugcuugcucacauguaga

SEQ ID NO: 848304 - RNA, 19 nt, Artificial Sequence
  Description of Artificial Sequence: Synthetic oligonucleotide
  Sense strand starting at position 3250 of SEQ ID NO: 588194
cugugaggaauacgaguuu

SEQ ID NO: 848305 - RNA, 19 nt, Artificial Sequence
  Description of Artificial Sequence: Synthetic oligonucleotide
  Antisense strand to SEQ ID NO: 848304
aaacucguauuccucacag

SEQ ID NO: 848306 - RNA, 19 nt, Artificial Sequence
  Description of Artificial Sequence: Synthetic oligonucleotide
  Sense strand starting at position 3256 of SEQ ID NO: 588194
ggaauacgaguuuauucga

SEQ ID NO: 848307 - RNA, 19 nt, Artificial Sequence
  Description of Artificial Sequence: Synthetic oligonucleotide
  Antisense strand to SEQ ID NO: 848306
ucgaauaaacucguauucc

SEQ ID NO: 848308 - RNA, 19 nt, Artificial Sequence
  Description of Artificial Sequence: Synthetic oligonucleotide
  Sense strand starting at position 3291 of SEQ ID NO: 588194
agugaagaguuaucaacac

SEQ ID NO: 848309 - RNA, 19 nt, Artificial Sequence
  Description of Artificial Sequence: Synthetic oligonucleotide
  Antisense strand to SEQ ID NO: 848308
guguugauaacucuucacu

SEQ ID NO: 848310 - RNA, 19 nt, Artificial Sequence
  Description of Artificial Sequence: Synthetic oligonucleotide
  Sense strand starting at position 3295 of SEQ ID NO: 588194
aagaguuaucaacacguaa

SEQ ID NO: 848311 - RNA, 19 nt, Artificial Sequence
  Description of Artificial Sequence: Synthetic oligonucleotide
  Antisense strand to SEQ ID NO: 848310
uuacguguugauaacucuu

SEQ ID NO: 848312 - RNA, 19 nt, Artificial Sequence
  Description of Artificial Sequence: Synthetic oligonucleotide
  Sense strand starting at position 3299 of SEQ ID NO: 588194
guuaucaacacguaaguga

SEQ ID NO: 848313 - RNA, 19 nt, Artificial Sequence
  Description of Artificial Sequence: Synthetic oligonucleotide
  Antisense strand to SEQ ID NO: 848312
ucacuuacguguugauaac

SEQ ID NO: 848314 - RNA, 19 nt, Artificial Sequence
  Description of Artificial Sequence: Synthetic oligonucleotide
  Sense strand starting at position 3308 of SEQ ID NO: 588194
acguaagugacaggaucua

SEQ ID NO: 848315 - RNA, 19 nt, Artificial Sequence
  Description of Artificial Sequence: Synthetic oligonucleotide
  Antisense strand to SEQ ID NO: 848314
uagauccugucacuuacgu

SEQ ID NO: 848316 - RNA, 19 nt, Artificial Sequence
  Description of Artificial Sequence: Synthetic oligonucleotide
  Sense strand starting at position 3343 of SEQ ID NO: 588194
cugcuagcugcuguguaua

SEQ ID NO: 848317 - RNA, 19 nt, Artificial Sequence
  Description of Artificial Sequence: Synthetic oligonucleotide
  Antisense strand to SEQ ID NO: 848316
uauacacagcagcuagcag

SEQ ID NO: 848318 - RNA, 19 nt, Artificial Sequence
  Description of Artificial Sequence: Synthetic oligonucleotide
  Sense strand starting at position 3353 of SEQ ID NO: 588194
cuguguauacaugaaacuu

SEQ ID NO: 848319 - RNA, 19 nt, Artificial Sequence
  Description of Artificial Sequence: Synthetic oligonucleotide
  Antisense strand to SEQ ID NO: 848318
aaguuucauguauacacag

SEQ ID NO: 848320 - RNA, 19 nt, Artificial Sequence
  Description of Artificial Sequence: Synthetic oligonucleotide
  Sense strand starting at position 3413 of SEQ ID NO: 588194
uugcaaugagcagguaaga

SEQ ID NO: 848321 - RNA, 19 nt, Artificial Sequence
  Description of Artificial Sequence: Synthetic oligonucleotide
  Antisense strand to SEQ ID NO: 848320
ucuuaccugcucauugcaa

SEQ ID NO: 848322 - RNA, 19 nt, Artificial Sequence
  Description of Artificial Sequence: Synthetic oligonucleotide
  Sense strand starting at position 3463 of SEQ ID NO: 588194
uucugagguagaugugaca

SEQ ID NO: 848323 - RNA, 19 nt, Artificial Sequence
  Description of Artificial Sequence: Synthetic oligonucleotide
  Antisense strand to SEQ ID NO: 848322
ugucacaucuaccucagaa

SEQ ID NO: 848324 - RNA, 19 nt, Artificial Sequence
  Description of Artificial Sequence: Synthetic oligonucleotide
  Sense strand starting at position 3557 of SEQ ID NO: 588194
agcaaauagcuggaucaua

SEQ ID NO: 848325 - RNA, 19 nt, Artificial Sequence
  Description of Artificial Sequence: Synthetic oligonucleotide
  Antisense strand to SEQ ID NO: 848324
uaugauccagcuauuugcu

SEQ ID NO: 848326 - RNA, 19 nt, Artificial Sequence
  Description of Artificial Sequence: Synthetic oligonucleotide
  Sense strand starting at position 3610 of SEQ ID NO: 588194
acuugauuucuuugcuugu

SEQ ID NO: 848327 - RNA, 19 nt, Artificial Sequence
  Description of Artificial Sequence: Synthetic oligonucleotide
  Antisense strand to SEQ ID NO: 848326
acaagcaaagaaaucaagu

SEQ ID NO: 848328 - RNA, 19 nt, Artificial Sequence
  Description of Artificial Sequence: Synthetic oligonucleotide
  Sense strand starting at position 3611 of SEQ ID NO: 588194
cuugauuucuuugcuuguu

SEQ ID NO: 848329 - RNA, 19 nt, Artificial Sequence
  Description of Artificial Sequence: Synthetic oligonucleotide
  Antisense strand to SEQ ID NO: 848328
aacaagcaaagaaaucaag

SEQ ID NO: 848330 - RNA, 19 nt, Artificial Sequence
  Description of Artificial Sequence: Synthetic oligonucleotide
  Sense strand starting at position 3612 of SEQ ID NO: 588194
uugauuucuuugcuuguuu

SEQ ID NO: 848331 - RNA, 19 nt, Artificial Sequence
  Description of Artificial Sequence: Synthetic oligonucleotide
  Antisense strand to SEQ ID NO: 848330
aaacaagcaaagaaaucaa

SEQ ID NO: 848332 - RNA, 19 nt, Artificial Sequence
  Description of Artificial Sequence: Synthetic oligonucleotide
  Sense strand starting at position 3728 of SEQ ID NO: 588194
uuucuuaggcuccaucaga

SEQ ID NO: 848333 - RNA, 19 nt, Artificial Sequence
  Description of Artificial Sequence: Synthetic oligonucleotide
  Antisense strand to SEQ ID NO: 848332
ucugauggagccuaagaaa

SEQ ID NO: 848334 - RNA, 19 nt, Artificial Sequence
  Description of Artificial Sequence: Synthetic oligonucleotide
  Sense strand starting at position 66 of SEQ ID NO: 588195
agaaacuucugguauuaau

SEQ ID NO: 848335 - RNA, 19 nt, Artificial Sequence
  Description of Artificial Sequence: Synthetic oligonucleotide
  Antisense strand to SEQ ID NO: 848334
auuaauaccagaaguuucu

SEQ ID NO: 848336 - RNA, 19 nt, Artificial Sequence
  Description of Artificial Sequence: Synthetic oligonucleotide
  Sense strand starting at position 169 of SEQ ID NO: 588195
ccacgaaauuucguguaua

SEQ ID NO: 848337 - RNA, 19 nt, Artificial Sequence
  Description of Artificial Sequence: Synthetic oligonucleotide
  Antisense strand to SEQ ID NO: 848336
uauacacgaaauuucgugg

SEQ ID NO: 848338 - RNA, 19 nt, Artificial Sequence
  Description of Artificial Sequence: Synthetic oligonucleotide
  Sense strand starting at position 257 of SEQ ID NO: 588195
gcagcagagaucuaggcaa

SEQ ID NO: 848339 - RNA, 19 nt, Artificial Sequence
  Description of Artificial Sequence: Synthetic oligonucleotide
  Antisense strand to SEQ ID NO: 848338
uugccuagaucucugcugc

SEQ ID NO: 848340 - RNA, 19 nt, Artificial Sequence
  Description of Artificial Sequence: Synthetic oligonucleotide
  Sense strand starting at position 259 of SEQ ID NO: 588195
agcagagaucuaggcaaac

SEQ ID NO: 848341 - RNA, 19 nt, Artificial Sequence
  Description of Artificial Sequence: Synthetic oligonucleotide
  Antisense strand to SEQ ID NO: 848340
guuugccuagaucucugcu

SEQ ID NO: 848342 - RNA, 19 nt, Artificial Sequence
  Description of Artificial Sequence: Synthetic oligonucleotide
  Sense strand starting at position 279 of SEQ ID NO: 588195
gaggcauaccuagaucuuc

SEQ ID NO: 848343 - RNA, 19 nt, Artificial Sequence
  Description of Artificial Sequence: Synthetic oligonucleotide
  Antisense strand to SEQ ID NO: 848342
gaagaucuagguaugccuc

SEQ ID NO: 848344 - RNA, 19 nt, Artificial Sequence
  Description of Artificial Sequence: Synthetic oligonucleotide
  Sense strand starting at position 287 of SEQ ID NO: 588195
ccuagaucuucucaggauu

SEQ ID NO: 848345 - RNA, 19 nt, Artificial Sequence
  Description of Artificial Sequence: Synthetic oligonucleotide
  Antisense strand to SEQ ID NO: 848344
aauccugagaagaucuagg

SEQ ID NO: 848346 - RNA, 19 nt, Artificial Sequence
  Description of Artificial Sequence: Synthetic oligonucleotide
  Sense strand starting at position 300 of SEQ ID NO: 588195
aggauucuuacaugcagag

SEQ ID NO: 848347 - RNA, 19 nt, Artificial Sequence
  Description of Artificial Sequence: Synthetic oligonucleotide
  Antisense strand to SEQ ID NO: 848346
cucugcauguaagaauccu

SEQ ID NO: 848348 - RNA, 19 nt, Artificial Sequence
  Description of Artificial Sequence: Synthetic oligonucleotide
  Sense strand starting at position 327 of SEQ ID NO: 588195
ggcucaugucuugaauaaa

SEQ ID NO: 848349 - RNA, 19 nt, Artificial Sequence
  Description of Artificial Sequence: Synthetic oligonucleotide
  Antisense strand to SEQ ID NO: 848348
uuuauucaagacaugagcc

SEQ ID NO: 848350 - RNA, 19 nt, Artificial Sequence
  Description of Artificial Sequence: Synthetic oligonucleotide
  Sense strand starting at position 350 of SEQ ID NO: 588195
cgccaaugauucucauaua

SEQ ID NO: 848351 - RNA, 19 nt, Artificial Sequence
  Description of Artificial Sequence: Synthetic oligonucleotide
  Antisense strand to SEQ ID NO: 848350
uauaugagaaucauuggcg

SEQ ID NO: 848352 - RNA, 19 nt, Artificial Sequence
  Description of Artificial Sequence: Synthetic oligonucleotide
  Sense strand starting at position 369 of SEQ ID NO: 588195
cgccuuaaggcccaaauua

SEQ ID NO: 848353 - RNA, 19 nt, Artificial Sequence
  Description of Artificial Sequence: Synthetic oligonucleotide
  Antisense strand to SEQ ID NO: 848352
uaauuugggccuuaaggcg

SEQ ID NO: 848354 - RNA, 19 nt, Artificial Sequence
  Description of Artificial Sequence: Synthetic oligonucleotide
  Sense strand starting at position 488 of SEQ ID NO: 588195
cgccaucucccagguuaaa

SEQ ID NO: 848355 - RNA, 19 nt, Artificial Sequence
  Description of Artificial Sequence: Synthetic oligonucleotide
  Antisense strand to SEQ ID NO: 848354
uuuaaccugggagauggcg

SEQ ID NO: 848356 - RNA, 19 nt, Artificial Sequence
  Description of Artificial Sequence: Synthetic oligonucleotide
  Sense strand starting at position 731 of SEQ ID NO: 588195
ugccuaggaucagauuuaa

SEQ ID NO: 848357 - RNA, 19 nt, Artificial Sequence
  Description of Artificial Sequence: Synthetic oligonucleotide
  Antisense strand to SEQ ID NO: 848356
uuaaaucugauccuaggca

SEQ ID NO: 848358 - RNA, 19 nt, Artificial Sequence
  Description of Artificial Sequence: Synthetic oligonucleotide
  Sense strand starting at position 765 of SEQ ID NO: 588195
caaagcuuugaccaaggua

SEQ ID NO: 848359 - RNA, 19 nt, Artificial Sequence
  Description of Artificial Sequence: Synthetic oligonucleotide
  Antisense strand to SEQ ID NO: 848358
uaccuuggucaaagcuuug

SEQ ID NO: 848360 - RNA, 19 nt, Artificial Sequence
  Description of Artificial Sequence: Synthetic oligonucleotide
  Sense strand starting at position 891 of SEQ ID NO: 588195
cuagacuaaucaucguuaa

SEQ ID NO: 848361 - RNA, 19 nt, Artificial Sequence
  Description of Artificial Sequence: Synthetic oligonucleotide
  Antisense strand to SEQ ID NO: 848360
uuaacgaugauuagucuag

SEQ ID NO: 848362 - RNA, 19 nt, Artificial Sequence
  Description of Artificial Sequence: Synthetic oligonucleotide
  Sense strand starting at position 1107 of SEQ ID NO: 588195
gugcuuucugcccaucgga

SEQ ID NO: 848363 - RNA, 19 nt, Artificial Sequence
  Description of Artificial Sequence: Synthetic oligonucleotide
  Antisense strand to SEQ ID NO: 848362
uccgaugggcagaaagcac

SEQ ID NO: 848364 - RNA, 19 nt, Artificial Sequence
  Description of Artificial Sequence: Synthetic oligonucleotide
  Sense strand starting at position 1197 of SEQ ID NO: 588195
cgucuuaaccuacacaagu

SEQ ID NO: 848365 - RNA, 19 nt, Artificial Sequence
  Description of Artificial Sequence: Synthetic oligonucleotide
  Antisense strand to SEQ ID NO: 848364
acuuguguagguuaagacg

SEQ ID NO: 848366 - RNA, 19 nt, Artificial Sequence
  Description of Artificial Sequence: Synthetic oligonucleotide
  Sense strand starting at position 2238 of SEQ ID NO: 588195
ucuagacccuucuauagga

SEQ ID NO: 848367 - RNA, 19 nt, Artificial Sequence
  Description of Artificial Sequence: Synthetic oligonucleotide
  Antisense strand to SEQ ID NO: 848366
uccuauagaagggucuaga

SEQ ID NO: 848368 - RNA, 19 nt, Artificial Sequence
  Description of Artificial Sequence: Synthetic oligonucleotide
  Sense strand starting at position 2308 of SEQ ID NO: 588195
gggcgucuccaugagauua

SEQ ID NO: 848369 - RNA, 19 nt, Artificial Sequence
  Description of Artificial Sequence: Synthetic oligonucleotide
  Antisense strand to SEQ ID NO: 848368
uaaucucauggagacgccc

SEQ ID NO: 848370 - RNA, 19 nt, Artificial Sequence
  Description of Artificial Sequence: Synthetic oligonucleotide
  Sense strand starting at position 2316 of SEQ ID NO: 588195
ccaugagauuaagacaaag

SEQ ID NO: 848371 - RNA, 19 nt, Artificial Sequence
  Description of Artificial Sequence: Synthetic oligonucleotide
  Antisense strand to SEQ ID NO: 848370
cuuugucuuaaucucaugg

SEQ ID NO: 848372 - RNA, 19 nt, Artificial Sequence
  Description of Artificial Sequence: Synthetic oligonucleotide
  Sense strand starting at position 2338 of SEQ ID NO: 588195
auaauagaguuccagacua

SEQ ID NO: 848373 - RNA, 19 nt, Artificial Sequence
  Description of Artificial Sequence: Synthetic oligonucleotide
  Antisense strand to SEQ ID NO: 848372
uagucuggaacucuauuau

SEQ ID NO: 848374 - RNA, 19 nt, Artificial Sequence
  Description of Artificial Sequence: Synthetic oligonucleotide
  Sense strand starting at position 2754 of SEQ ID NO: 588195
cccuacauuccuggaagau

SEQ ID NO: 848375 - RNA, 19 nt, Artificial Sequence
  Description of Artificial Sequence: Synthetic oligonucleotide
  Antisense strand to SEQ ID NO: 848374
aucuuccaggaauguaggg

SEQ ID NO: 848376 - RNA, 19 nt, Artificial Sequence
  Description of Artificial Sequence: Synthetic oligonucleotide
  Sense strand starting at position 2763 of SEQ ID NO: 588195
ccuggaagaucucuugauu

SEQ ID NO: 848377 - RNA, 19 nt, Artificial Sequence
  Description of Artificial Sequence: Synthetic oligonucleotide
  Antisense strand to SEQ ID NO: 848376
aaucaagagaucuuccagg

SEQ ID NO: 848378 - RNA, 19 nt, Artificial Sequence
  Description of Artificial Sequence: Synthetic oligonucleotide
  Sense strand starting at position 2831 of SEQ ID NO: 588195
agcugaguaguuggcaaga

SEQ ID NO: 848379 - RNA, 19 nt, Artificial Sequence
  Description of Artificial Sequence: Synthetic oligonucleotide
  Antisense strand to SEQ ID NO: 848378
ucuugccaacuacucagcu

SEQ ID NO: 848380 - RNA, 19 nt, Artificial Sequence
  Description of Artificial Sequence: Synthetic oligonucleotide
  Sense strand starting at position 2836 of SEQ ID NO: 588195
aguaguuggcaagaaccaa

SEQ ID NO: 848381 - RNA, 19 nt, Artificial Sequence
  Description of Artificial Sequence: Synthetic oligonucleotide
  Antisense strand to SEQ ID NO: 848380
uugguucuugccaacuacu

SEQ ID NO: 848382 - RNA, 19 nt, Artificial Sequence
  Description of Artificial Sequence: Synthetic oligonucleotide
  Sense strand starting at position 2921 of SEQ ID NO: 588195
ggcugaguucccugcuuac

SEQ ID NO: 848383 - RNA, 19 nt, Artificial Sequence
  Description of Artificial Sequence: Synthetic oligonucleotide
  Antisense strand to SEQ ID NO: 848382
guaagcagggaacucagcc

SEQ ID NO: 848384 - RNA, 19 nt, Artificial Sequence
  Description of Artificial Sequence: Synthetic oligonucleotide
  Sense strand starting at position 2924 of SEQ ID NO: 588195
ugaguucccugcuuacuau

SEQ ID NO: 848385 - RNA, 19 nt, Artificial Sequence
  Description of Artificial Sequence: Synthetic oligonucleotide
  Antisense strand to SEQ ID NO: 848384
auaguaagcagggaacuca

SEQ ID NO: 848386 - RNA, 19 nt, Artificial Sequence
  Description of Artificial Sequence: Synthetic oligonucleotide
  Sense strand starting at position 2960 of SEQ ID NO: 588195
agauucuauggccauuaca

SEQ ID NO: 848387 - RNA, 19 nt, Artificial Sequence
  Description of Artificial Sequence: Synthetic oligonucleotide
  Antisense strand to SEQ ID NO: 848386
uguaauggccauagaaucu

SEQ ID NO: 848388 - RNA, 19 nt, Artificial Sequence
  Description of Artificial Sequence: Synthetic oligonucleotide
  Sense strand starting at position 2986 of SEQ ID NO: 588195
aguguugucaggugaagug

SEQ ID NO: 848389 - RNA, 19 nt, Artificial Sequence
  Description of Artificial Sequence: Synthetic oligonucleotide
  Antisense strand to SEQ ID NO: 848388
cacuucaccugacaacacu

SEQ ID NO: 848390 - RNA, 19 nt, Artificial Sequence
  Description of Artificial Sequence: Synthetic oligonucleotide
  Sense strand starting at position 2987 of SEQ ID NO: 588195
guguugucaggugaaguga

SEQ ID NO: 848391 - RNA, 19 nt, Artificial Sequence
  Description of Artificial Sequence: Synthetic oligonucleotide
  Antisense strand to SEQ ID NO: 848390
ucacuucaccugacaacac

SEQ ID NO: 848392 - RNA, 19 nt, Artificial Sequence
  Description of Artificial Sequence: Synthetic oligonucleotide
  Sense strand starting at position 3006 of SEQ ID NO: 588195
gguggagacaauugcagua

SEQ ID NO: 848393 - RNA, 19 nt, Artificial Sequence
  Description of Artificial Sequence: Synthetic oligonucleotide
  Antisense strand to SEQ ID NO: 848392
uacugcaauugucuccacc

SEQ ID NO: 848394 - RNA, 19 nt, Artificial Sequence
  Description of Artificial Sequence: Synthetic oligonucleotide
  Sense strand starting at position 3277 of SEQ ID NO: 588195
gacuauuaccagugcuuug

SEQ ID NO: 848395 - RNA, 19 nt, Artificial Sequence
  Description of Artificial Sequence: Synthetic oligonucleotide
  Antisense strand to SEQ ID NO: 848394
caaagcacugguaauaguc

SEQ ID NO: 848396 - RNA, 19 nt, Artificial Sequence
  Description of Artificial Sequence: Synthetic oligonucleotide
  Sense strand starting at position 3327 of SEQ ID NO: 588195
gugugcaagaaagauaauu

SEQ ID NO: 848397 - RNA, 19 nt, Artificial Sequence
  Description of Artificial Sequence: Synthetic oligonucleotide
  Antisense strand to SEQ ID NO: 848396
aauuaucuuucuugcacac

SEQ ID NO: 848398 - RNA, 19 nt, Artificial Sequence
  Description of Artificial Sequence: Synthetic oligonucleotide
  Sense strand starting at position 3360 of SEQ ID NO: 588195
gguacuaucucaguacuaa

SEQ ID NO: 848399 - RNA, 19 nt, Artificial Sequence
  Description of Artificial Sequence: Synthetic oligonucleotide
  Antisense strand to SEQ ID NO: 848398
uuaguacugagauaguacc

SEQ ID NO: 848400 - RNA, 19 nt, Artificial Sequence
  Description of Artificial Sequence: Synthetic oligonucleotide
  Sense strand starting at position 3361 of SEQ ID NO: 588195
guacuaucucaguacuaau

SEQ ID NO: 848401 - RNA, 19 nt, Artificial Sequence
  Description of Artificial Sequence: Synthetic oligonucleotide
  Antisense strand to SEQ ID NO: 848400
auuaguacugagauaguac

SEQ ID NO: 848402 - RNA, 19 nt, Artificial Sequence
  Description of Artificial Sequence: Synthetic oligonucleotide
  Sense strand starting at position 3447 of SEQ ID NO: 588195
acagaaauguaccaaguua

SEQ ID NO: 848403 - RNA, 19 nt, Artificial Sequence
  Description of Artificial Sequence: Synthetic oligonucleotide
  Antisense strand to SEQ ID NO: 848402
uaacuugguacauuucugu

SEQ ID NO: 848404 - RNA, 19 nt, Artificial Sequence
  Description of Artificial Sequence: Synthetic oligonucleotide
  Sense strand starting at position 3467 of SEQ ID NO: 588195
gguaguaagcaauagcuuu

SEQ ID NO: 848405 - RNA, 19 nt, Artificial Sequence
  Description of Artificial Sequence: Synthetic oligonucleotide
  Antisense strand to SEQ ID NO: 848404
aaagcuauugcuuacuacc

SEQ ID NO: 848406 - RNA, 19 nt, Artificial Sequence
  Description of Artificial Sequence: Synthetic oligonucleotide
  Sense strand starting at position 3867 of SEQ ID NO: 588195
gaaagaucuuaaucguagu

SEQ ID NO: 848407 - RNA, 19 nt, Artificial Sequence
  Description of Artificial Sequence: Synthetic oligonucleotide
  Antisense strand to SEQ ID NO: 848406
acuacgauuaagaucuuuc

SEQ ID NO: 848408 - RNA, 19 nt, Artificial Sequence
  Description of Artificial Sequence: Synthetic oligonucleotide
  Sense strand starting at position 3873 of SEQ ID NO: 588195
ucuuaaucguagucaucaa

SEQ ID NO: 848409 - RNA, 19 nt, Artificial Sequence
  Description of Artificial Sequence: Synthetic oligonucleotide
  Antisense strand to SEQ ID NO: 848408
uugaugacuacgauuaaga

SEQ ID NO: 848410 - RNA, 19 nt, Artificial Sequence
  Description of Artificial Sequence: Synthetic oligonucleotide
  Sense strand starting at position 3953 of SEQ ID NO: 588195
uuguguuccucuuuacaaa

SEQ ID NO: 848411 - RNA, 19 nt, Artificial Sequence
  Description of Artificial Sequence: Synthetic oligonucleotide
  Antisense strand to SEQ ID NO: 848410
uuuguaaagaggaacacaa

SEQ ID NO: 848412 - RNA, 19 nt, Artificial Sequence
  Description of Artificial Sequence: Synthetic oligonucleotide
  Sense strand starting at position 3954 of SEQ ID NO: 588195
uguguuccucuuuacaaac

SEQ ID NO: 848413 - RNA, 19 nt, Artificial Sequence
  Description of Artificial Sequence: Synthetic oligonucleotide
  Antisense strand to SEQ ID NO: 848412
guuuguaaagaggaacaca

SEQ ID NO: 848414 - RNA, 19 nt, Artificial Sequence
  Description of Artificial Sequence: Synthetic oligonucleotide
  Sense strand starting at position 77 of SEQ ID NO: 588196
acucuuagcuaucugaugu

SEQ ID NO: 848415 - RNA, 19 nt, Artificial Sequence
  Description of Artificial Sequence: Synthetic oligonucleotide
  Antisense strand to SEQ ID NO: 848414
acaucagauagcuaagagu

SEQ ID NO: 848416 - RNA, 19 nt, Artificial Sequence
  Description of Artificial Sequence: Synthetic oligonucleotide
  Sense strand starting at position 116 of SEQ ID NO: 588196
augguucuuuccgucacaa

SEQ ID NO: 848417 - RNA, 19 nt, Artificial Sequence
  Description of Artificial Sequence: Synthetic oligonucleotide
  Antisense strand to SEQ ID NO: 848416
uugugacggaaagaaccau

SEQ ID NO: 848418 - RNA, 19 nt, Artificial Sequence
  Description of Artificial Sequence: Synthetic oligonucleotide
  Sense strand starting at position 118 of SEQ ID NO: 588196
gguucuuuccgucacaauu

SEQ ID NO: 848419 - RNA, 19 nt, Artificial Sequence
  Description of Artificial Sequence: Synthetic oligonucleotide
  Antisense strand to SEQ ID NO: 848418
aauugugacggaaagaacc

SEQ ID NO: 848420 - RNA, 19 nt, Artificial Sequence
  Description of Artificial Sequence: Synthetic oligonucleotide
  Sense strand starting at position 169 of SEQ ID NO: 588196
cgccuugcucccucuguua

SEQ ID NO: 848421 - RNA, 19 nt, Artificial Sequence
  Description of Artificial Sequence: Synthetic oligonucleotide
  Antisense strand to SEQ ID NO: 848420
uaacagagggagcaaggcg

SEQ ID NO: 848422 - RNA, 19 nt, Artificial Sequence
  Description of Artificial Sequence: Synthetic oligonucleotide
  Sense strand starting at position 267 of SEQ ID NO: 588196
uggguuuaaucaguaaauu

SEQ ID NO: 848423 - RNA, 19 nt, Artificial Sequence
  Description of Artificial Sequence: Synthetic oligonucleotide
  Antisense strand to SEQ ID NO: 848422
aauuuacugauuaaaccca

SEQ ID NO: 848424 - RNA, 19 nt, Artificial Sequence
  Description of Artificial Sequence: Synthetic oligonucleotide
  Sense strand starting at position 289 of SEQ ID NO: 588196
ucaucaagaucuucgaagu

SEQ ID NO: 848425 - RNA, 19 nt, Artificial Sequence
  Description of Artificial Sequence: Synthetic oligonucleotide
  Antisense strand to SEQ ID NO: 848424
acuucgaagaucuugauga

SEQ ID NO: 848426 - RNA, 19 nt, Artificial Sequence
  Description of Artificial Sequence: Synthetic oligonucleotide
  Sense strand starting at position 290 of SEQ ID NO: 588196
caucaagaucuucgaaguu

SEQ ID NO: 848427 - RNA, 19 nt, Artificial Sequence
  Description of Artificial Sequence: Synthetic oligonucleotide
  Antisense strand to SEQ ID NO: 848426
aacuucgaagaucuugaug

SEQ ID NO: 848428 - RNA, 19 nt, Artificial Sequence
  Description of Artificial Sequence: Synthetic oligonucleotide
  Sense strand starting at position 418 of SEQ ID NO: 588196
gacagacuauuugggaaug

SEQ ID NO: 848429 - RNA, 19 nt, Artificial Sequence
  Description of Artificial Sequence: Synthetic oligonucleotide
  Antisense strand to SEQ ID NO: 848428
cauucccaaauagucuguc

SEQ ID NO: 848430 - RNA, 19 nt, Artificial Sequence
  Description of Artificial Sequence: Synthetic oligonucleotide
  Sense strand starting at position 419 of SEQ ID NO: 588196
acagacuauuugggaauga

SEQ ID NO: 848431 - RNA, 19 nt, Artificial Sequence
  Description of Artificial Sequence: Synthetic oligonucleotide
  Antisense strand to SEQ ID NO: 848430
ucauucccaaauagucugu

SEQ ID NO: 848432 - RNA, 19 nt, Artificial Sequence
  Description of Artificial Sequence: Synthetic oligonucleotide
  Sense strand starting at position 666 of SEQ ID NO: 588196
ggaggucaugucugucuga

SEQ ID NO: 848433 - RNA, 19 nt, Artificial Sequence
  Description of Artificial Sequence: Synthetic oligonucleotide
  Antisense strand to SEQ ID NO: 848432
ucagacagacaugaccucc

SEQ ID NO: 848434 - RNA, 19 nt, Artificial Sequence
  Description of Artificial Sequence: Synthetic oligonucleotide
  Sense strand starting at position 667 of SEQ ID NO: 588196
gaggucaugucugucugau

SEQ ID NO: 848435 - RNA, 19 nt, Artificial Sequence
  Description of Artificial Sequence: Synthetic oligonucleotide
  Antisense strand to SEQ ID NO: 848434
aucagacagacaugaccuc

SEQ ID NO: 848436 - RNA, 19 nt, Artificial Sequence
  Description of Artificial Sequence: Synthetic oligonucleotide
  Sense strand starting at position 669 of SEQ ID NO: 588196
ggucaugucugucugauuc

SEQ ID NO: 848437 - RNA, 19 nt, Artificial Sequence
  Description of Artificial Sequence: Synthetic oligonucleotide
  Antisense strand to SEQ ID NO: 848436
gaaucagacagacaugacc

SEQ ID NO: 848438 - RNA, 19 nt, Artificial Sequence
  Description of Artificial Sequence: Synthetic oligonucleotide
  Sense strand starting at position 718 of SEQ ID NO: 588196
ggacucauaucucuuacgu

SEQ ID NO: 848439 - RNA, 19 nt, Artificial Sequence
  Description of Artificial Sequence: Synthetic oligonucleotide
  Antisense strand to SEQ ID NO: 848438
acguaagagauaugagucc

SEQ ID NO: 848440 - RNA, 19 nt, Artificial Sequence
  Description of Artificial Sequence: Synthetic oligonucleotide
  Sense strand starting at position 959 of SEQ ID NO: 588196
cucuuauugugacuucucu

SEQ ID NO: 848441 - RNA, 19 nt, Artificial Sequence
  Description of Artificial Sequence: Synthetic oligonucleotide
  Antisense strand to SEQ ID NO: 848440
agagaagucacaauaagag

SEQ ID NO: 848442 - RNA, 19 nt, Artificial Sequence
  Description of Artificial Sequence: Synthetic oligonucleotide
  Sense strand starting at position 1049 of SEQ ID NO: 588196
gacacugagcagcaucauu

SEQ ID NO: 848443 - RNA, 19 nt, Artificial Sequence
  Description of Artificial Sequence: Synthetic oligonucleotide
  Antisense strand to SEQ ID NO: 848442
aaugaugcugcucaguguc

SEQ ID NO: 848444 - RNA, 19 nt, Artificial Sequence
  Description of Artificial Sequence: Synthetic oligonucleotide
  Sense strand starting at position 1148 of SEQ ID NO: 588196
cugguaacaguuugggaaa

SEQ ID NO: 848445 - RNA, 19 nt, Artificial Sequence
  Description of Artificial Sequence: Synthetic oligonucleotide
  Antisense strand to SEQ ID NO: 848444
uuucccaaacuguuaccag

SEQ ID NO: 848446 - RNA, 19 nt, Artificial Sequence
  Description of Artificial Sequence: Synthetic oligonucleotide
  Sense strand starting at position 1211 of SEQ ID NO: 588196
guguguucaguuuggagga

SEQ ID NO: 848447 - RNA, 19 nt, Artificial Sequence
  Description of Artificial Sequence: Synthetic oligonucleotide
  Antisense strand to SEQ ID NO: 848446
uccuccaaacugaacacac

SEQ ID NO: 848448 - RNA, 19 nt, Artificial Sequence
  Description of Artificial Sequence: Synthetic oligonucleotide
  Sense strand starting at position 1278 of SEQ ID NO: 588196
aucgucuucuaucugaaau

SEQ ID NO: 848449 - RNA, 19 nt, Artificial Sequence
  Description of Artificial Sequence: Synthetic oligonucleotide
  Antisense strand to SEQ ID NO: 848448
auuucagauagaagacgau

SEQ ID NO: 848450 - RNA, 19 nt, Artificial Sequence
  Description of Artificial Sequence: Synthetic oligonucleotide
  Sense strand starting at position 1365 of SEQ ID NO: 588196
gagcuaaucugauccugag

SEQ ID NO: 848451 - RNA, 19 nt, Artificial Sequence
  Description of Artificial Sequence: Synthetic oligonucleotide
  Antisense strand to SEQ ID NO: 848450
cucaggaucagauuagcuc

SEQ ID NO: 848452 - RNA, 19 nt, Artificial Sequence
  Description of Artificial Sequence: Synthetic oligonucleotide
  Sense strand starting at position 1625 of SEQ ID NO: 588196
agcggaaggcauuaaugau

SEQ ID NO: 848453 - RNA, 19 nt, Artificial Sequence
  Description of Artificial Sequence: Synthetic oligonucleotide
  Antisense strand to SEQ ID NO: 848452
aucauuaaugccuuccgcu

SEQ ID NO: 848454 - RNA, 19 nt, Artificial Sequence
  Description of Artificial Sequence: Synthetic oligonucleotide
  Sense strand starting at position 1631 of SEQ ID NO: 588196
aggcauuaaugaucuucca

SEQ ID NO: 848455 - RNA, 19 nt, Artificial Sequence
  Description of Artificial Sequence: Synthetic oligonucleotide
  Antisense strand to SEQ ID NO: 848454
uggaagaucauuaaugccu

SEQ ID NO: 848456 - RNA, 19 nt, Artificial Sequence
  Description of Artificial Sequence: Synthetic oligonucleotide
  Sense strand starting at position 2250 of SEQ ID NO: 588196
gcgagugccggauuguuga

SEQ ID NO: 848457 - RNA, 19 nt, Artificial Sequence
  Description of Artificial Sequence: Synthetic oligonucleotide
  Antisense strand to SEQ ID NO: 848456
ucaacaauccggcacucgc

SEQ ID NO: 848458 - RNA, 19 nt, Artificial Sequence
  Description of Artificial Sequence: Synthetic oligonucleotide
  Sense strand starting at position 2324 of SEQ ID NO: 588196
aaaguucggcuuugaugau

SEQ ID NO: 848459 - RNA, 19 nt, Artificial Sequence
  Description of Artificial Sequence: Synthetic oligonucleotide
  Antisense strand to SEQ ID NO: 848458
aucaucaaagccgaacuuu

SEQ ID NO: 848460 - RNA, 19 nt, Artificial Sequence
  Description of Artificial Sequence: Synthetic oligonucleotide
  Sense strand starting at position 2788 of SEQ ID NO: 588196
gcuugcggcaguccuaauu

SEQ ID NO: 848461 - RNA, 19 nt, Artificial Sequence
  Description of Artificial Sequence: Synthetic oligonucleotide
  Antisense strand to SEQ ID NO: 848460
aauuaggacugccgcaagc

SEQ ID NO: 848462 - RNA, 19 nt, Artificial Sequence
  Description of Artificial Sequence: Synthetic oligonucleotide
  Sense strand starting at position 2861 of SEQ ID NO: 588196
gcaccuggucuugggaaga

SEQ ID NO: 848463 - RNA, 19 nt, Artificial Sequence
  Description of Artificial Sequence: Synthetic oligonucleotide
  Antisense strand to SEQ ID NO: 848462
ucuucccaagaccaggugc

SEQ ID NO: 848464 - RNA, 19 nt, Artificial Sequence
  Description of Artificial Sequence: Synthetic oligonucleotide
  Sense strand starting at position 3301 of SEQ ID NO: 588196
agggaaagauugcuuuauu

SEQ ID NO: 848465 - RNA, 19 nt, Artificial Sequence
  Description of Artificial Sequence: Synthetic oligonucleotide
  Antisense strand to SEQ ID NO: 848464
aauaaagcaaucuuucccu

SEQ ID NO: 848466 - RNA, 19 nt, Artificial Sequence
  Description of Artificial Sequence: Synthetic oligonucleotide
  Sense strand starting at position 3302 of SEQ ID NO: 588196
gggaaagauugcuuuauuc

SEQ ID NO: 848467 - RNA, 19 nt, Artificial Sequence
  Description of Artificial Sequence: Synthetic oligonucleotide
  Antisense strand to SEQ ID NO: 848466
gaauaaagcaaucuuuccc

SEQ ID NO: 848468 - RNA, 19 nt, Artificial Sequence
  Description of Artificial Sequence: Synthetic oligonucleotide
  Sense strand starting at position 3304 of SEQ ID NO: 588196
gaaagauugcuuuauucga

SEQ ID NO: 848469 - RNA, 19 nt, Artificial Sequence
  Description of Artificial Sequence: Synthetic oligonucleotide
  Antisense strand to SEQ ID NO: 848468
ucgaauaaagcaaucuuuc

SEQ ID NO: 848470 - RNA, 19 nt, Artificial Sequence
  Description of Artificial Sequence: Synthetic oligonucleotide
  Sense strand starting at position 3325 of SEQ ID NO: 588196
gguuaaauaugcccaguga

SEQ ID NO: 848471 - RNA, 19 nt, Artificial Sequence
  Description of Artificial Sequence: Synthetic oligonucleotide
  Antisense strand to SEQ ID NO: 848470
ucacugggcauauuuaacc

SEQ ID NO: 848472 - RNA, 19 nt, Artificial Sequence
  Description of Artificial Sequence: Synthetic oligonucleotide
  Sense strand starting at position 3326 of SEQ ID NO: 588196
guuaaauaugcccagugac

SEQ ID NO: 848473 - RNA, 19 nt, Artificial Sequence
  Description of Artificial Sequence: Synthetic oligonucleotide
  Antisense strand to SEQ ID NO: 848472
gucacugggcauauuuaac

SEQ ID NO: 848474 - RNA, 19 nt, Artificial Sequence
  Description of Artificial Sequence: Synthetic oligonucleotide
  Sense strand starting at position 3488 of SEQ ID NO: 588196
auaguaaugcaguaauaca

SEQ ID NO: 848475 - RNA, 19 nt, Artificial Sequence
  Description of Artificial Sequence: Synthetic oligonucleotide
  Antisense strand to SEQ ID NO: 848474
uguauuacugcauuacuau

SEQ ID NO: 848476 - RNA, 19 nt, Artificial Sequence
  Description of Artificial Sequence: Synthetic oligonucleotide
  Sense strand starting at position 3530 of SEQ ID NO: 588196
ugcaaaggauuacaaauau

SEQ ID NO: 848477 - RNA, 19 nt, Artificial Sequence
  Description of Artificial Sequence: Synthetic oligonucleotide
  Antisense strand to SEQ ID NO: 848476
auauuuguaauccuuugca

SEQ ID NO: 848478 - RNA, 19 nt, Artificial Sequence
  Description of Artificial Sequence: Synthetic oligonucleotide
  Sense strand starting at position 3754 of SEQ ID NO: 588196
gcagguuagucucccugaa

SEQ ID NO: 848479 - RNA, 19 nt, Artificial Sequence
  Description of Artificial Sequence: Synthetic oligonucleotide
  Antisense strand to SEQ ID NO: 848478
uucagggagacuaaccugc

SEQ ID NO: 848480 - RNA, 19 nt, Artificial Sequence
  Description of Artificial Sequence: Synthetic oligonucleotide
  Sense strand starting at position 3756 of SEQ ID NO: 588196
agguuagucucccugaacu

SEQ ID NO: 848481 - RNA, 19 nt, Artificial Sequence
  Description of Artificial Sequence: Synthetic oligonucleotide
  Antisense strand to SEQ ID NO: 848480
aguucagggagacuaaccu

SEQ ID NO: 848482 - RNA, 19 nt, Artificial Sequence
  Description of Artificial Sequence: Synthetic oligonucleotide
  Sense strand starting at position 3758 of SEQ ID NO: 588196
guuagucucccugaacuca

SEQ ID NO: 848483 - RNA, 19 nt, Artificial Sequence
  Description of Artificial Sequence: Synthetic oligonucleotide
  Antisense strand to SEQ ID NO: 848482
ugaguucagggagacuaac

SEQ ID NO: 848484 - RNA, 19 nt, Artificial Sequence
  Description of Artificial Sequence: Synthetic oligonucleotide
  Sense strand starting at position 3877 of SEQ ID NO: 588196
cuauguuccucuccagaca

SEQ ID NO: 848485 - RNA, 19 nt, Artificial Sequence
  Description of Artificial Sequence: Synthetic oligonucleotide
  Antisense strand to SEQ ID NO: 848484
ugucuggagaggaacauag

SEQ ID NO: 848486 - RNA, 19 nt, Artificial Sequence
  Description of Artificial Sequence: Synthetic oligonucleotide
  Sense strand starting at position 3955 of SEQ ID NO: 588196
acacuaauuguucggaagu

SEQ ID NO: 848487 - RNA, 19 nt, Artificial Sequence
  Description of Artificial Sequence: Synthetic oligonucleotide
  Antisense strand to SEQ ID NO: 848486
acuuccgaacaauuagugu

SEQ ID NO: 848488 - RNA, 19 nt, Artificial Sequence
  Description of Artificial Sequence: Synthetic oligonucleotide
  Sense strand starting at position 3962 of SEQ ID NO: 588196
uuguucggaaguuauguau

SEQ ID NO: 848489 - RNA, 19 nt, Artificial Sequence
  Description of Artificial Sequence: Synthetic oligonucleotide
  Antisense strand to SEQ ID NO: 848488
auacauaacuuccgaacaa

SEQ ID NO: 848490 - RNA, 19 nt, Artificial Sequence
  Description of Artificial Sequence: Synthetic oligonucleotide
  Sense strand starting at position 3965 of SEQ ID NO: 588196
uucggaaguuauguauaaa

SEQ ID NO: 848491 - RNA, 19 nt, Artificial Sequence
  Description of Artificial Sequence: Synthetic oligonucleotide
  Antisense strand to SEQ ID NO: 848490
uuuauacauaacuuccgaa

SEQ ID NO: 848492 - RNA, 19 nt, Artificial Sequence
  Description of Artificial Sequence: Synthetic oligonucleotide
  Sense strand starting at position 3966 of SEQ ID NO: 588196
ucggaaguuauguauaaac

SEQ ID NO: 848493 - RNA, 19 nt, Artificial Sequence
  Description of Artificial Sequence: Synthetic oligonucleotide
  Antisense strand to SEQ ID NO: 848492
guuuauacauaacuuccga

SEQ ID NO: 848494 - RNA, 19 nt, Artificial Sequence
  Description of Artificial Sequence: Synthetic oligonucleotide
  Sense strand starting at position 279 of SEQ ID NO: 588197
gauugcaccuggccuauua

SEQ ID NO: 848495 - RNA, 19 nt, Artificial Sequence
  Description of Artificial Sequence: Synthetic oligonucleotide
  Antisense strand to SEQ ID NO: 848494
uaauaggccaggugcaauc

SEQ ID NO: 848496 - RNA, 19 nt, Artificial Sequence
  Description of Artificial Sequence: Synthetic oligonucleotide
  Sense strand starting at position 309 of SEQ ID NO: 588197
uggcuagcacuuugaauca

SEQ ID NO: 848497 - RNA, 19 nt, Artificial Sequence
  Description of Artificial Sequence: Synthetic oligonucleotide
  Antisense strand to SEQ ID NO: 848496
ugauucaaagugcuagcca

SEQ ID NO: 848498 - RNA, 19 nt, Artificial Sequence
  Description of Artificial Sequence: Synthetic oligonucleotide
  Sense strand starting at position 462 of SEQ ID NO: 588197
ccaggucuguucuauccaa

SEQ ID NO: 848499 - RNA, 19 nt, Artificial Sequence
  Description of Artificial Sequence: Synthetic oligonucleotide
  Antisense strand to SEQ ID NO: 848498
uuggauagaacagaccugg

SEQ ID NO: 848500 - RNA, 19 nt, Artificial Sequence
  Description of Artificial Sequence: Synthetic oligonucleotide
  Sense strand starting at position 470 of SEQ ID NO: 588197
guucuauccaagcggaguu

SEQ ID NO: 848501 - RNA, 19 nt, Artificial Sequence
  Description of Artificial Sequence: Synthetic oligonucleotide
  Antisense strand to SEQ ID NO: 848500
aacuccgcuuggauagaac

SEQ ID NO: 848502 - RNA, 19 nt, Artificial Sequence
  Description of Artificial Sequence: Synthetic oligonucleotide
  Sense strand starting at position 499 of SEQ ID NO: 588197
accuuauggucucuaauug

SEQ ID NO: 848503 - RNA, 19 nt, Artificial Sequence
  Description of Artificial Sequence: Synthetic oligonucleotide
  Antisense strand to SEQ ID NO: 848502
caauuagagaccauaaggu

SEQ ID NO: 848504 - RNA, 19 nt, Artificial Sequence
  Description of Artificial Sequence: Synthetic oligonucleotide
  Sense strand starting at position 500 of SEQ ID NO: 588197
ccuuauggucucuaauuga

SEQ ID NO: 848505 - RNA, 19 nt, Artificial Sequence
  Description of Artificial Sequence: Synthetic oligonucleotide
  Antisense strand to SEQ ID NO: 848504
ucaauuagagaccauaagg

SEQ ID NO: 848506 - RNA, 19 nt, Artificial Sequence
  Description of Artificial Sequence: Synthetic oligonucleotide
  Sense strand starting at position 529 of SEQ ID NO: 588197
guugccauuuaucauagca

SEQ ID NO: 848507 - RNA, 19 nt, Artificial Sequence
  Description of Artificial Sequence: Synthetic oligonucleotide
  Antisense strand to SEQ ID NO: 848506
ugcuaugauaaauggcaac

SEQ ID NO: 848508 - RNA, 19 nt, Artificial Sequence
  Description of Artificial Sequence: Synthetic oligonucleotide
  Sense strand starting at position 625 of SEQ ID NO: 588197
cugcaugcuugacgggaaa

SEQ ID NO: 848509 - RNA, 19 nt, Artificial Sequence
  Description of Artificial Sequence: Synthetic oligonucleotide
  Antisense strand to SEQ ID NO: 848508
uuucccgucaagcaugcag

SEQ ID NO: 848510 - RNA, 19 nt, Artificial Sequence
  Description of Artificial Sequence: Synthetic oligonucleotide
  Sense strand starting at position 653 of SEQ ID NO: 588197
cauuaauucucagugggag

SEQ ID NO: 848511 - RNA, 19 nt, Artificial Sequence
  Description of Artificial Sequence: Synthetic oligonucleotide
  Antisense strand to SEQ ID NO: 848510
cucccacugagaauuaaug

SEQ ID NO: 848512 - RNA, 19 nt, Artificial Sequence
  Description of Artificial Sequence: Synthetic oligonucleotide
  Sense strand starting at position 1447 of SEQ ID NO: 588197
agcgaaugugacguugcau

SEQ ID NO: 848513 - RNA, 19 nt, Artificial Sequence
  Description of Artificial Sequence: Synthetic oligonucleotide
  Antisense strand to SEQ ID NO: 848512
augcaacgucacauucgcu

SEQ ID NO: 848514 - RNA, 19 nt, Artificial Sequence
  Description of Artificial Sequence: Synthetic oligonucleotide
  Sense strand starting at position 1448 of SEQ ID NO: 588197
gcgaaugugacguugcauu

SEQ ID NO: 848515 - RNA, 19 nt, Artificial Sequence
  Description of Artificial Sequence: Synthetic oligonucleotide
  Antisense strand to SEQ ID NO: 848514
aaugcaacgucacauucgc

SEQ ID NO: 848516 - RNA, 19 nt, Artificial Sequence
  Description of Artificial Sequence: Synthetic oligonucleotide
  Sense strand starting at position 2016 of SEQ ID NO: 588197
gccaaauaaguuggugaga

SEQ ID NO: 848517 - RNA, 19 nt, Artificial Sequence
  Description of Artificial Sequence: Synthetic oligonucleotide
  Antisense strand to SEQ ID NO: 848516
ucucaccaacuuauuuggc

SEQ ID NO: 848518 - RNA, 19 nt, Artificial Sequence
  Description of Artificial Sequence: Synthetic oligonucleotide
  Sense strand starting at position 2017 of SEQ ID NO: 588197
ccaaauaaguuggugagaa

SEQ ID NO: 848519 - RNA, 19 nt, Artificial Sequence
  Description of Artificial Sequence: Synthetic oligonucleotide
  Antisense strand to SEQ ID NO: 848518
uucucaccaacuuauuugg

SEQ ID NO: 848520 - RNA, 19 nt, Artificial Sequence
  Description of Artificial Sequence: Synthetic oligonucleotide
  Sense strand starting at position 2018 of SEQ ID NO: 588197
caaauaaguuggugagaag

SEQ ID NO: 848521 - RNA, 19 nt, Artificial Sequence
  Description of Artificial Sequence: Synthetic oligonucleotide
  Antisense strand to SEQ ID NO: 848520
cuucucaccaacuuauuug

SEQ ID NO: 848522 - RNA, 19 nt, Artificial Sequence
  Description of Artificial Sequence: Synthetic oligonucleotide
  Sense strand starting at position 2021 of SEQ ID NO: 588197
auaaguuggugagaagguu

SEQ ID NO: 848523 - RNA, 19 nt, Artificial Sequence
  Description of Artificial Sequence: Synthetic oligonucleotide
  Antisense strand to SEQ ID NO: 848522
aaccuucucaccaacuuau

SEQ ID NO: 848524 - RNA, 19 nt, Artificial Sequence
  Description of Artificial Sequence: Synthetic oligonucleotide
  Sense strand starting at position 2053 of SEQ ID NO: 588197
uggcgagaagcagagaaau

SEQ ID NO: 848525 - RNA, 19 nt, Artificial Sequence
  Description of Artificial Sequence: Synthetic oligonucleotide
  Antisense strand to SEQ ID NO: 848524
auuucucugcuucucgcca

SEQ ID NO: 848526 - RNA, 19 nt, Artificial Sequence
  Description of Artificial Sequence: Synthetic oligonucleotide
  Sense strand starting at position 2389 of SEQ ID NO: 588197
ccgugaucaccaggaucau

SEQ ID NO: 848527 - RNA, 19 nt, Artificial Sequence
  Description of Artificial Sequence: Synthetic oligonucleotide
  Antisense strand to SEQ ID NO: 848526
augauccuggugaucacgg

SEQ ID NO: 848528 - RNA, 19 nt, Artificial Sequence
  Description of Artificial Sequence: Synthetic oligonucleotide
  Sense strand starting at position 2515 of SEQ ID NO: 588197
gugucaacaucuccaagga

SEQ ID NO: 848529 - RNA, 19 nt, Artificial Sequence
  Description of Artificial Sequence: Synthetic oligonucleotide
  Antisense strand to SEQ ID NO: 848528
uccuuggagauguugacac

SEQ ID NO: 848530 - RNA, 19 nt, Artificial Sequence
  Description of Artificial Sequence: Synthetic oligonucleotide
  Sense strand starting at position 2717 of SEQ ID NO: 588197
uuuacaaguucugaagcaa

SEQ ID NO: 848531 - RNA, 19 nt, Artificial Sequence
  Description of Artificial Sequence: Synthetic oligonucleotide
  Antisense strand to SEQ ID NO: 848530
uugcuucagaacuuguaaa

SEQ ID NO: 848532 - RNA, 19 nt, Artificial Sequence
  Description of Artificial Sequence: Synthetic oligonucleotide
  Sense strand starting at position 2786 of SEQ ID NO: 588197
aggacuuaucccugucaca

SEQ ID NO: 848533 - RNA, 19 nt, Artificial Sequence
  Description of Artificial Sequence: Synthetic oligonucleotide
  Antisense strand to SEQ ID NO: 848532
ugugacagggauaaguccu

SEQ ID NO: 848534 - RNA, 19 nt, Artificial Sequence
  Description of Artificial Sequence: Synthetic oligonucleotide
  Sense strand starting at position 2918 of SEQ ID NO: 588197
gcuaacaacuuugcaauga

SEQ ID NO: 848535 - RNA, 19 nt, Artificial Sequence
  Description of Artificial Sequence: Synthetic oligonucleotide
  Antisense strand to SEQ ID NO: 848534
ucauugcaaaguuguuagc

SEQ ID NO: 848536 - RNA, 19 nt, Artificial Sequence
  Description of Artificial Sequence: Synthetic oligonucleotide
  Sense strand starting at position 2953 of SEQ ID NO: 588197
gcugaaugccagugaugug

SEQ ID NO: 848537 - RNA, 19 nt, Artificial Sequence
  Description of Artificial Sequence: Synthetic oligonucleotide
  Antisense strand to SEQ ID NO: 848536
cacaucacuggcauucagc

SEQ ID NO: 848538 - RNA, 19 nt, Artificial Sequence
  Description of Artificial Sequence: Synthetic oligonucleotide
  Sense strand starting at position 2968 of SEQ ID NO: 588197
ugugcucucagccauggaa

SEQ ID NO: 848539 - RNA, 19 nt, Artificial Sequence
  Description of Artificial Sequence: Synthetic oligonucleotide
  Antisense strand to SEQ ID NO: 848538
uuccauggcugagagcaca

SEQ ID NO: 848540 - RNA, 19 nt, Artificial Sequence
  Description of Artificial Sequence: Synthetic oligonucleotide
  Sense strand starting at position 2970 of SEQ ID NO: 588197
ugcucucagccauggaaga

SEQ ID NO: 848541 - RNA, 19 nt, Artificial Sequence
  Description of Artificial Sequence: Synthetic oligonucleotide
  Antisense strand to SEQ ID NO: 848540
ucuuccauggcugagagca

SEQ ID NO: 848542 - RNA, 19 nt, Artificial Sequence
  Description of Artificial Sequence: Synthetic oligonucleotide
  Sense strand starting at position 2993 of SEQ ID NO: 588197
gaguuccagcgguucguua

SEQ ID NO: 848543 - RNA, 19 nt, Artificial Sequence
  Description of Artificial Sequence: Synthetic oligonucleotide
  Antisense strand to SEQ ID NO: 848542
uaacgaaccgcuggaacuc

SEQ ID NO: 848544 - RNA, 19 nt, Artificial Sequence
  Description of Artificial Sequence: Synthetic oligonucleotide
  Sense strand starting at position 3019 of SEQ ID NO: 588197
gaaagaagcucuggaaggu

SEQ ID NO: 848545 - RNA, 19 nt, Artificial Sequence
  Description of Artificial Sequence: Synthetic oligonucleotide
  Antisense strand to SEQ ID NO: 848544
accuuccagagcuucuuuc

SEQ ID NO: 848546 - RNA, 19 nt, Artificial Sequence
  Description of Artificial Sequence: Synthetic oligonucleotide
  Sense strand starting at position 3040 of SEQ ID NO: 588197
cgagccucuugucuucuaa

SEQ ID NO: 848547 - RNA, 19 nt, Artificial Sequence
  Description of Artificial Sequence: Synthetic oligonucleotide
  Antisense strand to SEQ ID NO: 848546
uuagaagacaagaggcucg

SEQ ID NO: 848548 - RNA, 19 nt, Artificial Sequence
  Description of Artificial Sequence: Synthetic oligonucleotide
  Sense strand starting at position 3126 of SEQ ID NO: 588197
cuuuaaguccaguaagcca

SEQ ID NO: 848549 - RNA, 19 nt, Artificial Sequence
  Description of Artificial Sequence: Synthetic oligonucleotide
  Antisense strand to SEQ ID NO: 848548
uggcuuacuggacuuaaag

SEQ ID NO: 848550 - RNA, 19 nt, Artificial Sequence
  Description of Artificial Sequence: Synthetic oligonucleotide
  Sense strand starting at position 3195 of SEQ ID NO: 588197
uuguaaugcugagcaaguu

SEQ ID NO: 848551 - RNA, 19 nt, Artificial Sequence
  Description of Artificial Sequence: Synthetic oligonucleotide
  Antisense strand to SEQ ID NO: 848550
aacuugcucagcauuacaa

SEQ ID NO: 848552 - RNA, 19 nt, Artificial Sequence
  Description of Artificial Sequence: Synthetic oligonucleotide
  Sense strand starting at position 3196 of SEQ ID NO: 588197
uguaaugcugagcaaguua

SEQ ID NO: 848553 - RNA, 19 nt, Artificial Sequence
  Description of Artificial Sequence: Synthetic oligonucleotide
  Antisense strand to SEQ ID NO: 848552
uaacuugcucagcauuaca

SEQ ID NO: 848554 - RNA, 19 nt, Artificial Sequence
  Description of Artificial Sequence: Synthetic oligonucleotide
  Sense strand starting at position 3575 of SEQ ID NO: 588197
uuuccaauuguacaaugua

SEQ ID NO: 848555 - RNA, 19 nt, Artificial Sequence
  Description of Artificial Sequence: Synthetic oligonucleotide
  Antisense strand to SEQ ID NO: 848554
uacauuguacaauuggaaa

SEQ ID NO: 848556 - RNA, 19 nt, Artificial Sequence
  Description of Artificial Sequence: Synthetic oligonucleotide
  Sense strand starting at position 3591 of SEQ ID NO: 588197
guaauuagcuccugcaguc

SEQ ID NO: 848557 - RNA, 19 nt, Artificial Sequence
  Description of Artificial Sequence: Synthetic oligonucleotide
  Antisense strand to SEQ ID NO: 848556
gacugcaggagcuaauuac

SEQ ID NO: 848558 - RNA, 19 nt, Artificial Sequence
  Description of Artificial Sequence: Synthetic oligonucleotide
  Sense strand starting at position 3871 of SEQ ID NO: 588197
cuugaaaugagacgugcua

SEQ ID NO: 848559 - RNA, 19 nt, Artificial Sequence
  Description of Artificial Sequence: Synthetic oligonucleotide
  Antisense strand to SEQ ID NO: 848558
uagcacgucucauuucaag

SEQ ID NO: 848560 - RNA, 19 nt, Artificial Sequence
  Description of Artificial Sequence: Synthetic oligonucleotide
  Sense strand starting at position 3884 of SEQ ID NO: 588197
gugcuacguguuucuguga

SEQ ID NO: 848561 - RNA, 19 nt, Artificial Sequence
  Description of Artificial Sequence: Synthetic oligonucleotide
  Antisense strand to SEQ ID NO: 848560
ucacagaaacacguagcac

SEQ ID NO: 848562 - RNA, 19 nt, Artificial Sequence
  Description of Artificial Sequence: Synthetic oligonucleotide
  Sense strand starting at position 3885 of SEQ ID NO: 588197
ugcuacguguuucugugaa

SEQ ID NO: 848563 - RNA, 19 nt, Artificial Sequence
  Description of Artificial Sequence: Synthetic oligonucleotide
  Antisense strand to SEQ ID NO: 848562
uucacagaaacacguagca

SEQ ID NO: 848564 - RNA, 19 nt, Artificial Sequence
  Description of Artificial Sequence: Synthetic oligonucleotide
  Sense strand starting at position 3889 of SEQ ID NO: 588197
acguguuucugugaagcuu

SEQ ID NO: 848565 - RNA, 19 nt, Artificial Sequence
  Description of Artificial Sequence: Synthetic oligonucleotide
  Antisense strand to SEQ ID NO: 848564
aagcuucacagaaacacgu

SEQ ID NO: 848566 - RNA, 19 nt, Artificial Sequence
  Description of Artificial Sequence: Synthetic oligonucleotide
  Sense strand starting at position 344 of SEQ ID NO: 588198
gauugcaccuggccuauua

SEQ ID NO: 848567 - RNA, 19 nt, Artificial Sequence
  Description of Artificial Sequence: Synthetic oligonucleotide
  Antisense strand to SEQ ID NO: 848566
uaauaggccaggugcaauc

SEQ ID NO: 848568 - RNA, 19 nt, Artificial Sequence
  Description of Artificial Sequence: Synthetic oligonucleotide
  Sense strand starting at position 374 of SEQ ID NO: 588198
uggcuagcacuuugaauca

SEQ ID NO: 848569 - RNA, 19 nt, Artificial Sequence
  Description of Artificial Sequence: Synthetic oligonucleotide
  Antisense strand to SEQ ID NO: 848568
ugauucaaagugcuagcca

SEQ ID NO: 848570 - RNA, 19 nt, Artificial Sequence
  Description of Artificial Sequence: Synthetic oligonucleotide
  Sense strand starting at position 527 of SEQ ID NO: 588198
ccaggucuguucuauccaa

SEQ ID NO: 848571 - RNA, 19 nt, Artificial Sequence
  Description of Artificial Sequence: Synthetic oligonucleotide
  Antisense strand to SEQ ID NO: 848570
uuggauagaacagaccugg

SEQ ID NO: 848572 - RNA, 19 nt, Artificial Sequence
  Description of Artificial Sequence: Synthetic oligonucleotide
  Sense strand starting at position 535 of SEQ ID NO: 588198
guucuauccaagcggaguu

SEQ ID NO: 848573 - RNA, 19 nt, Artificial Sequence
  Description of Artificial Sequence: Synthetic oligonucleotide
  Antisense strand to SEQ ID NO: 848572
aacuccgcuuggauagaac

SEQ ID NO: 848574 - RNA, 19 nt, Artificial Sequence
  Description of Artificial Sequence: Synthetic oligonucleotide
  Sense strand starting at position 564 of SEQ ID NO: 588198
accuuauggucucuaauug

SEQ ID NO: 848575 - RNA, 19 nt, Artificial Sequence
  Description of Artificial Sequence: Synthetic oligonucleotide
  Antisense strand to SEQ ID NO: 848574
caauuagagaccauaaggu

SEQ ID NO: 848576 - RNA, 19 nt, Artificial Sequence
  Description of Artificial Sequence: Synthetic oligonucleotide
  Sense strand starting at position 565 of SEQ ID NO: 588198
ccuuauggucucuaauuga

SEQ ID NO: 848577 - RNA, 19 nt, Artificial Sequence
  Description of Artificial Sequence: Synthetic oligonucleotide
  Antisense strand to SEQ ID NO: 848576
ucaauuagagaccauaagg

SEQ ID NO: 848578 - RNA, 19 nt, Artificial Sequence
  Description of Artificial Sequence: Synthetic oligonucleotide
  Sense strand starting at position 594 of SEQ ID NO: 588198
guugccauuuaucauagca

SEQ ID NO: 848579 - RNA, 19 nt, Artificial Sequence
  Description of Artificial Sequence: Synthetic oligonucleotide
  Antisense strand to SEQ ID NO: 848578
ugcuaugauaaauggcaac

SEQ ID NO: 848580 - RNA, 19 nt, Artificial Sequence
  Description of Artificial Sequence: Synthetic oligonucleotide
  Sense strand starting at position 690 of SEQ ID NO: 588198
cugcaugcuugacgggaaa

SEQ ID NO: 848581 - RNA, 19 nt, Artificial Sequence
  Description of Artificial Sequence: Synthetic oligonucleotide
  Antisense strand to SEQ ID NO: 848580
uuucccgucaagcaugcag

SEQ ID NO: 848582 - RNA, 19 nt, Artificial Sequence
  Description of Artificial Sequence: Synthetic oligonucleotide
  Sense strand starting at position 718 of SEQ ID NO: 588198
cauuaauucucagugggag

SEQ ID NO: 848583 - RNA, 19 nt, Artificial Sequence
  Description of Artificial Sequence: Synthetic oligonucleotide
  Antisense strand to SEQ ID NO: 848582
cucccacugagaauuaaug

SEQ ID NO: 848584 - RNA, 19 nt, Artificial Sequence
  Description of Artificial Sequence: Synthetic oligonucleotide
  Sense strand starting at position 1512 of SEQ ID NO: 588198
agcgaaugugacguugcau

SEQ ID NO: 848585 - RNA, 19 nt, Artificial Sequence
  Description of Artificial Sequence: Synthetic oligonucleotide
  Antisense strand to SEQ ID NO: 848584
augcaacgucacauucgcu

SEQ ID NO: 848586 - RNA, 19 nt, Artificial Sequence
  Description of Artificial Sequence: Synthetic oligonucleotide
  Sense strand starting at position 1513 of SEQ ID NO: 588198
gcgaaugugacguugcauu

SEQ ID NO: 848587 - RNA, 19 nt, Artificial Sequence
  Description of Artificial Sequence: Synthetic oligonucleotide
  Antisense strand to SEQ ID NO: 848586
aaugcaacgucacauucgc

SEQ ID NO: 848588 - RNA, 19 nt, Artificial Sequence
  Description of Artificial Sequence: Synthetic oligonucleotide
  Sense strand starting at position 2081 of SEQ ID NO: 588198
gccaaauaaguuggugaga

SEQ ID NO: 848589 - RNA, 19 nt, Artificial Sequence
  Description of Artificial Sequence: Synthetic oligonucleotide
  Antisense strand to SEQ ID NO: 848588
ucucaccaacuuauuuggc

SEQ ID NO: 848590 - RNA, 19 nt, Artificial Sequence
  Description of Artificial Sequence: Synthetic oligonucleotide
  Sense strand starting at position 2082 of SEQ ID NO: 588198
ccaaauaaguuggugagaa

SEQ ID NO: 848591 - RNA, 19 nt, Artificial Sequence
  Description of Artificial Sequence: Synthetic oligonucleotide
  Antisense strand to SEQ ID NO: 848590
uucucaccaacuuauuugg

SEQ ID NO: 848592 - RNA, 19 nt, Artificial Sequence
  Description of Artificial Sequence: Synthetic oligonucleotide
  Sense strand starting at position 2083 of SEQ ID NO: 588198
caaauaaguuggugagaag

SEQ ID NO: 848593 - RNA, 19 nt, Artificial Sequence
  Description of Artificial Sequence: Synthetic oligonucleotide
  Antisense strand to SEQ ID NO: 848592
cuucucaccaacuuauuug

SEQ ID NO: 848594 - RNA, 19 nt, Artificial Sequence
  Description of Artificial Sequence: Synthetic oligonucleotide
  Sense strand starting at position 2086 of SEQ ID NO: 588198
auaaguuggugagaagguu

SEQ ID NO: 848595 - RNA, 19 nt, Artificial Sequence
  Description of Artificial Sequence: Synthetic oligonucleotide
  Antisense strand to SEQ ID NO: 848594
aaccuucucaccaacuuau

SEQ ID NO: 848596 - RNA, 19 nt, Artificial Sequence
  Description of Artificial Sequence: Synthetic oligonucleotide
  Sense strand starting at position 2118 of SEQ ID NO: 588198
uggcgagaagcagagaaau

SEQ ID NO: 848597 - RNA, 19 nt, Artificial Sequence
  Description of Artificial Sequence: Synthetic oligonucleotide
  Antisense strand to SEQ ID NO: 848596
auuucucugcuucucgcca

SEQ ID NO: 848598 - RNA, 19 nt, Artificial Sequence
  Description of Artificial Sequence: Synthetic oligonucleotide
  Sense strand starting at position 2454 of SEQ ID NO: 588198
ccgugaucaccaggaucau

SEQ ID NO: 848599 - RNA, 19 nt, Artificial Sequence
  Description of Artificial Sequence: Synthetic oligonucleotide
  Antisense strand to SEQ ID NO: 848598
augauccuggugaucacgg

SEQ ID NO: 848600 - RNA, 19 nt, Artificial Sequence
  Description of Artificial Sequence: Synthetic oligonucleotide
  Sense strand starting at position 2580 of SEQ ID NO: 588198
gugucaacaucuccaagga

SEQ ID NO: 848601 - RNA, 19 nt, Artificial Sequence
  Description of Artificial Sequence: Synthetic oligonucleotide
  Antisense strand to SEQ ID NO: 848600
uccuuggagauguugacac

SEQ ID NO: 848602 - RNA, 19 nt, Artificial Sequence
  Description of Artificial Sequence: Synthetic oligonucleotide
  Sense strand starting at position 2782 of SEQ ID NO: 588198
uuuacaaguucugaagcaa

SEQ ID NO: 848603 - RNA, 19 nt, Artificial Sequence
  Description of Artificial Sequence: Synthetic oligonucleotide
  Antisense strand to SEQ ID NO: 848602
uugcuucagaacuuguaaa

SEQ ID NO: 848604 - RNA, 19 nt, Artificial Sequence
  Description of Artificial Sequence: Synthetic oligonucleotide
  Sense strand starting at position 2851 of SEQ ID NO: 588198
aggacuuaucccugucaca

SEQ ID NO: 848605 - RNA, 19 nt, Artificial Sequence
  Description of Artificial Sequence: Synthetic oligonucleotide
  Antisense strand to SEQ ID NO: 848604
ugugacagggauaaguccu

SEQ ID NO: 848606 - RNA, 19 nt, Artificial Sequence
  Description of Artificial Sequence: Synthetic oligonucleotide
  Sense strand starting at position 2983 of SEQ ID NO: 588198
gcuaacaacuuugcaauga

SEQ ID NO: 848607 - RNA, 19 nt, Artificial Sequence
  Description of Artificial Sequence: Synthetic oligonucleotide
  Antisense strand to SEQ ID NO: 848606
ucauugcaaaguuguuagc

SEQ ID NO: 848608 - RNA, 19 nt, Artificial Sequence
  Description of Artificial Sequence: Synthetic oligonucleotide
  Sense strand starting at position 3018 of SEQ ID NO: 588198
gcugaaugccagugaugug

SEQ ID NO: 848609 - RNA, 19 nt, Artificial Sequence
  Description of Artificial Sequence: Synthetic oligonucleotide
  Antisense strand to SEQ ID NO: 848608
cacaucacuggcauucagc

SEQ ID NO: 848610 - RNA, 19 nt, Artificial Sequence
  Description of Artificial Sequence: Synthetic oligonucleotide
  Sense strand starting at position 3033 of SEQ ID NO: 588198
ugugcucucagccauggaa

SEQ ID NO: 848611 - RNA, 19 nt, Artificial Sequence
  Description of Artificial Sequence: Synthetic oligonucleotide
  Antisense strand to SEQ ID NO: 848610
uuccauggcugagagcaca

SEQ ID NO: 848612 - RNA, 19 nt, Artificial Sequence
  Description of Artificial Sequence: Synthetic oligonucleotide
  Sense strand starting at position 3035 of SEQ ID NO: 588198
ugcucucagccauggaaga

SEQ ID NO: 848613 - RNA, 19 nt, Artificial Sequence
  Description of Artificial Sequence: Synthetic oligonucleotide
  Antisense strand to SEQ ID NO: 848612
ucuuccauggcugagagca

SEQ ID NO: 848614 - RNA, 19 nt, Artificial Sequence
  Description of Artificial Sequence: Synthetic oligonucleotide
  Sense strand starting at position 3058 of SEQ ID NO: 588198
gaguuccagcgguucguua

SEQ ID NO: 848615 - RNA, 19 nt, Artificial Sequence
  Description of Artificial Sequence: Synthetic oligonucleotide
  Antisense strand to SEQ ID NO: 848614
uaacgaaccgcuggaacuc

SEQ ID NO: 848616 - RNA, 19 nt, Artificial Sequence
  Description of Artificial Sequence: Synthetic oligonucleotide
  Sense strand starting at position 3084 of SEQ ID NO: 588198
gaaagaagcucuggaaggu

SEQ ID NO: 848617 - RNA, 19 nt, Artificial Sequence
  Description of Artificial Sequence: Synthetic oligonucleotide
  Antisense strand to SEQ ID NO: 848616
accuuccagagcuucuuuc

SEQ ID NO: 848618 - RNA, 19 nt, Artificial Sequence
  Description of Artificial Sequence: Synthetic oligonucleotide
  Sense strand starting at position 3105 of SEQ ID NO: 588198
cgagccucuugucuucuaa

SEQ ID NO: 848619 - RNA, 19 nt, Artificial Sequence
  Description of Artificial Sequence: Synthetic oligonucleotide
  Antisense strand to SEQ ID NO: 848618
uuagaagacaagaggcucg

SEQ ID NO: 848620 - RNA, 19 nt, Artificial Sequence
  Description of Artificial Sequence: Synthetic oligonucleotide
  Sense strand starting at position 3191 of SEQ ID NO: 588198
cuuuaaguccaguaagcca

SEQ ID NO: 848621 - RNA, 19 nt, Artificial Sequence
  Description of Artificial Sequence: Synthetic oligonucleotide
  Antisense strand to SEQ ID NO: 848620
uggcuuacuggacuuaaag

SEQ ID NO: 848622 - RNA, 19 nt, Artificial Sequence
  Description of Artificial Sequence: Synthetic oligonucleotide
  Sense strand starting at position 3260 of SEQ ID NO: 588198
uuguaaugcugagcaaguu

SEQ ID NO: 848623 - RNA, 19 nt, Artificial Sequence
  Description of Artificial Sequence: Synthetic oligonucleotide
  Antisense strand to SEQ ID NO: 848622
aacuugcucagcauuacaa

SEQ ID NO: 848624 - RNA, 19 nt, Artificial Sequence
  Description of Artificial Sequence: Synthetic oligonucleotide
  Sense strand starting at position 3261 of SEQ ID NO: 588198
uguaaugcugagcaaguua

SEQ ID NO: 848625 - RNA, 19 nt, Artificial Sequence
  Description of Artificial Sequence: Synthetic oligonucleotide
  Antisense strand to SEQ ID NO: 848624
uaacuugcucagcauuaca

SEQ ID NO: 848626 - RNA, 19 nt, Artificial Sequence
  Description of Artificial Sequence: Synthetic oligonucleotide
  Sense strand starting at position 3640 of SEQ ID NO: 588198
uuuccaauuguacaaugua

SEQ ID NO: 848627 - RNA, 19 nt, Artificial Sequence
  Description of Artificial Sequence: Synthetic oligonucleotide
  Antisense strand to SEQ ID NO: 848626
uacauuguacaauuggaaa

SEQ ID NO: 848628 - RNA, 19 nt, Artificial Sequence
  Description of Artificial Sequence: Synthetic oligonucleotide
  Sense strand starting at position 3656 of SEQ ID NO: 588198
guaauuagcuccugcaguc

SEQ ID NO: 848629 - RNA, 19 nt, Artificial Sequence
  Description of Artificial Sequence: Synthetic oligonucleotide
  Antisense strand to SEQ ID NO: 848628
gacugcaggagcuaauuac

SEQ ID NO: 848630 - RNA, 19 nt, Artificial Sequence
  Description of Artificial Sequence: Synthetic oligonucleotide
  Sense strand starting at position 3936 of SEQ ID NO: 588198
cuugaaaugagacgugcua

SEQ ID NO: 848631 - RNA, 19 nt, Artificial Sequence
  Description of Artificial Sequence: Synthetic oligonucleotide
  Antisense strand to SEQ ID NO: 848630
uagcacgucucauuucaag

SEQ ID NO: 848632 - RNA, 19 nt, Artificial Sequence
  Description of Artificial Sequence: Synthetic oligonucleotide
  Sense strand starting at position 3949 of SEQ ID NO: 588198
gugcuacguguuucuguga

SEQ ID NO: 848633 - RNA, 19 nt, Artificial Sequence
  Description of Artificial Sequence: Synthetic oligonucleotide
  Antisense strand to SEQ ID NO: 848632
ucacagaaacacguagcac

SEQ ID NO: 848634 - RNA, 19 nt, Artificial Sequence
  Description of Artificial Sequence: Synthetic oligonucleotide
  Sense strand starting at position 3950 of SEQ ID NO: 588198
ugcuacguguuucugugaa

SEQ ID NO: 848635 - RNA, 19 nt, Artificial Sequence
  Description of Artificial Sequence: Synthetic oligonucleotide
  Antisense strand to SEQ ID NO: 848634
uucacagaaacacguagca

SEQ ID NO: 848636 - RNA, 19 nt, Artificial Sequence
  Description of Artificial Sequence: Synthetic oligonucleotide
  Sense strand starting at position 3954 of SEQ ID NO: 588198
acguguuucugugaagcuu

SEQ ID NO: 848637 - RNA, 19 nt, Artificial Sequence
  Description of Artificial Sequence: Synthetic oligonucleotide
  Antisense strand to SEQ ID NO: 848636
aagcuucacagaaacacgu

SEQ ID NO: 848638 - RNA, 19 nt, Artificial Sequence
  Description of Artificial Sequence: Synthetic oligonucleotide
  Sense strand starting at position 343 of SEQ ID NO: 588199
gauugcaccuggccuauua

SEQ ID NO: 848639 - RNA, 19 nt, Artificial Sequence
  Description of Artificial Sequence: Synthetic oligonucleotide
  Antisense strand to SEQ ID NO: 848638
uaauaggccaggugcaauc

SEQ ID NO: 848640 - RNA, 19 nt, Artificial Sequence
  Description of Artificial Sequence: Synthetic oligonucleotide
  Sense strand starting at position 373 of SEQ ID NO: 588199
uggcuagcacuuugaauca

SEQ ID NO: 848641 - RNA, 19 nt, Artificial Sequence
  Description of Artificial Sequence: Synthetic oligonucleotide
  Antisense strand to SEQ ID NO: 848640
ugauucaaagugcuagcca

SEQ ID NO: 848642 - RNA, 19 nt, Artificial Sequence
  Description of Artificial Sequence: Synthetic oligonucleotide
  Sense strand starting at position 526 of SEQ ID NO: 588199
ccaggucuguucuauccaa

SEQ ID NO: 848643 - RNA, 19 nt, Artificial Sequence
  Description of Artificial Sequence: Synthetic oligonucleotide
  Antisense strand to SEQ ID NO: 848642
uuggauagaacagaccugg

SEQ ID NO: 848644 - RNA, 19 nt, Artificial Sequence
  Description of Artificial Sequence: Synthetic oligonucleotide
  Sense strand starting at position 534 of SEQ ID NO: 588199
guucuauccaagcggaguu

SEQ ID NO: 848645 - RNA, 19 nt, Artificial Sequence
  Description of Artificial Sequence: Synthetic oligonucleotide
  Antisense strand to SEQ ID NO: 848644
aacuccgcuuggauagaac

SEQ ID NO: 848646 - RNA, 19 nt, Artificial Sequence
  Description of Artificial Sequence: Synthetic oligonucleotide
  Sense strand starting at position 563 of SEQ ID NO: 588199
accuuauggucucuaauug

SEQ ID NO: 848647 - RNA, 19 nt, Artificial Sequence
  Description of Artificial Sequence: Synthetic oligonucleotide
  Antisense strand to SEQ ID NO: 848646
caauuagagaccauaaggu

SEQ ID NO: 848648 - RNA, 19 nt, Artificial Sequence
  Description of Artificial Sequence: Synthetic oligonucleotide
  Sense strand starting at position 564 of SEQ ID NO: 588199
ccuuauggucucuaauuga

SEQ ID NO: 848649 - RNA, 19 nt, Artificial Sequence
  Description of Artificial Sequence: Synthetic oligonucleotide
  Antisense strand to SEQ ID NO: 848648
ucaauuagagaccauaagg

SEQ ID NO: 848650 - RNA, 19 nt, Artificial Sequence
  Description of Artificial Sequence: Synthetic oligonucleotide
  Sense strand starting at position 593 of SEQ ID NO: 588199
guugccauuuaucauagca

SEQ ID NO: 848651 - RNA, 19 nt, Artificial Sequence
  Description of Artificial Sequence: Synthetic oligonucleotide
  Antisense strand to SEQ ID NO: 848650
ugcuaugauaaauggcaac

SEQ ID NO: 848652 - RNA, 19 nt, Artificial Sequence
  Description of Artificial Sequence: Synthetic oligonucleotide
  Sense strand starting at position 689 of SEQ ID NO: 588199
cugcaugcuugacgggaaa

SEQ ID NO: 848653 - RNA, 19 nt, Artificial Sequence
  Description of Artificial Sequence: Synthetic oligonucleotide
  Antisense strand to SEQ ID NO: 848652
uuucccgucaagcaugcag

SEQ ID NO: 848654 - RNA, 19 nt, Artificial Sequence
  Description of Artificial Sequence: Synthetic oligonucleotide
  Sense strand starting at position 717 of SEQ ID NO: 588199
cauuaauucucagugggag

SEQ ID NO: 848655 - RNA, 19 nt, Artificial Sequence
  Description of Artificial Sequence: Synthetic oligonucleotide
  Antisense strand to SEQ ID NO: 848654
cucccacugagaauuaaug

SEQ ID NO: 848656 - RNA, 19 nt, Artificial Sequence
  Description of Artificial Sequence: Synthetic oligonucleotide
  Sense strand starting at position 1511 of SEQ ID NO: 588199
agcgaaugugacguugcau

SEQ ID NO: 848657 - RNA, 19 nt, Artificial Sequence
  Description of Artificial Sequence: Synthetic oligonucleotide
  Antisense strand to SEQ ID NO: 848656
augcaacgucacauucgcu

SEQ ID NO: 848658 - RNA, 19 nt, Artificial Sequence
  Description of Artificial Sequence: Synthetic oligonucleotide
  Sense strand starting at position 1512 of SEQ ID NO: 588199
gcgaaugugacguugcauu

SEQ ID NO: 848659 - RNA, 19 nt, Artificial Sequence
  Description of Artificial Sequence: Synthetic oligonucleotide
  Antisense strand to SEQ ID NO: 848658
aaugcaacgucacauucgc

SEQ ID NO: 848660 - RNA, 19 nt, Artificial Sequence
  Description of Artificial Sequence: Synthetic oligonucleotide
  Sense strand starting at position 2080 of SEQ ID NO: 588199
gccaaauaaguuggugaga

SEQ ID NO: 848661 - RNA, 19 nt, Artificial Sequence
  Description of Artificial Sequence: Synthetic oligonucleotide
  Antisense strand to SEQ ID NO: 848660
ucucaccaacuuauuuggc

SEQ ID NO: 848662 - RNA, 19 nt, Artificial Sequence
  Description of Artificial Sequence: Synthetic oligonucleotide
  Sense strand starting at position 2081 of SEQ ID NO: 588199
ccaaauaaguuggugagaa

SEQ ID NO: 848663 - RNA, 19 nt, Artificial Sequence
  Description of Artificial Sequence: Synthetic oligonucleotide
  Antisense strand to SEQ ID NO: 848662
uucucaccaacuuauuugg

SEQ ID NO: 848664 - RNA, 19 nt, Artificial Sequence
  Description of Artificial Sequence: Synthetic oligonucleotide
  Sense strand starting at position 2082 of SEQ ID NO: 588199
caaauaaguuggugagaag

SEQ ID NO: 848665 - RNA, 19 nt, Artificial Sequence
  Description of Artificial Sequence: Synthetic oligonucleotide
  Antisense strand to SEQ ID NO: 848664
cuucucaccaacuuauuug

SEQ ID NO: 848666 - RNA, 19 nt, Artificial Sequence
  Description of Artificial Sequence: Synthetic oligonucleotide
  Sense strand starting at position 2085 of SEQ ID NO: 588199
auaaguuggugagaagguu

SEQ ID NO: 848667 - RNA, 19 nt, Artificial Sequence
  Description of Artificial Sequence: Synthetic oligonucleotide
  Antisense strand to SEQ ID NO: 848666
aaccuucucaccaacuuau

SEQ ID NO: 848668 - RNA, 19 nt, Artificial Sequence
  Description of Artificial Sequence: Synthetic oligonucleotide
  Sense strand starting at position 2117 of SEQ ID NO: 588199
uggcgagaagcagagaaau

SEQ ID NO: 848669 - RNA, 19 nt, Artificial Sequence
  Description of Artificial Sequence: Synthetic oligonucleotide
  Antisense strand to SEQ ID NO: 848668
auuucucugcuucucgcca

SEQ ID NO: 848670 - RNA, 19 nt, Artificial Sequence
  Description of Artificial Sequence: Synthetic oligonucleotide
  Sense strand starting at position 2453 of SEQ ID NO: 588199
ccgugaucaccaggaucau

SEQ ID NO: 848671 - RNA, 19 nt, Artificial Sequence
  Description of Artificial Sequence: Synthetic oligonucleotide
  Antisense strand to SEQ ID NO: 848670
augauccuggugaucacgg

SEQ ID NO: 848672 - RNA, 19 nt, Artificial Sequence
  Description of Artificial Sequence: Synthetic oligonucleotide
  Sense strand starting at position 2579 of SEQ ID NO: 588199
gugucaacaucuccaagga

SEQ ID NO: 848673 - RNA, 19 nt, Artificial Sequence
  Description of Artificial Sequence: Synthetic oligonucleotide
  Antisense strand to SEQ ID NO: 848672
uccuuggagauguugacac

SEQ ID NO: 848674 - RNA, 19 nt, Artificial Sequence
  Description of Artificial Sequence: Synthetic oligonucleotide
  Sense strand starting at position 2781 of SEQ ID NO: 588199
uuuacaaguucugaagcaa

SEQ ID NO: 848675 - RNA, 19 nt, Artificial Sequence
  Description of Artificial Sequence: Synthetic oligonucleotide
  Antisense strand to SEQ ID NO: 848674
uugcuucagaacuuguaaa

SEQ ID NO: 848676 - RNA, 19 nt, Artificial Sequence
  Description of Artificial Sequence: Synthetic oligonucleotide
  Sense strand starting at position 2850 of SEQ ID NO: 588199
aggacuuaucccugucaca

SEQ ID NO: 848677 - RNA, 19 nt, Artificial Sequence
  Description of Artificial Sequence: Synthetic oligonucleotide
  Antisense strand to SEQ ID NO: 848676
ugugacagggauaaguccu

SEQ ID NO: 848678 - RNA, 19 nt, Artificial Sequence
  Description of Artificial Sequence: Synthetic oligonucleotide
  Sense strand starting at position 2982 of SEQ ID NO: 588199
gcuaacaacuuugcaauga

SEQ ID NO: 848679 - RNA, 19 nt, Artificial Sequence
  Description of Artificial Sequence: Synthetic oligonucleotide
  Antisense strand to SEQ ID NO: 848678
ucauugcaaaguuguuagc

SEQ ID NO: 848680 - RNA, 19 nt, Artificial Sequence
  Description of Artificial Sequence: Synthetic oligonucleotide
  Sense strand starting at position 3017 of SEQ ID NO: 588199
gcugaaugccagugaugug

SEQ ID NO: 848681 - RNA, 19 nt, Artificial Sequence
  Description of Artificial Sequence: Synthetic oligonucleotide
  Antisense strand to SEQ ID NO: 848680
cacaucacuggcauucagc

SEQ ID NO: 848682 - RNA, 19 nt, Artificial Sequence
  Description of Artificial Sequence: Synthetic oligonucleotide
  Sense strand starting at position 3032 of SEQ ID NO: 588199
ugugcucucagccauggaa

SEQ ID NO: 848683 - RNA, 19 nt, Artificial Sequence
  Description of Artificial Sequence: Synthetic oligonucleotide
  Antisense strand to SEQ ID NO: 848682
uuccauggcugagagcaca

SEQ ID NO: 848684 - RNA, 19 nt, Artificial Sequence
  Description of Artificial Sequence: Synthetic oligonucleotide
  Sense strand starting at position 3034 of SEQ ID NO: 588199
ugcucucagccauggaaga

SEQ ID NO: 848685 - RNA, 19 nt, Artificial Sequence
  Description of Artificial Sequence: Synthetic oligonucleotide
  Antisense strand to SEQ ID NO: 848684
ucuuccauggcugagagca

SEQ ID NO: 848686 - RNA, 19 nt, Artificial Sequence
  Description of Artificial Sequence: Synthetic oligonucleotide
  Sense strand starting at position 3057 of SEQ ID NO: 588199
gaguuccagcgguucguua

SEQ ID NO: 848687 - RNA, 19 nt, Artificial Sequence
  Description of Artificial Sequence: Synthetic oligonucleotide
  Antisense strand to SEQ ID NO: 848686
uaacgaaccgcuggaacuc

SEQ ID NO: 848688 - RNA, 19 nt, Artificial Sequence
  Description of Artificial Sequence: Synthetic oligonucleotide
  Sense strand starting at position 3083 of SEQ ID NO: 588199
gaaagaagcucuggaaggu

SEQ ID NO: 848689 - RNA, 19 nt, Artificial Sequence
  Description of Artificial Sequence: Synthetic oligonucleotide
  Antisense strand to SEQ ID NO: 848688
accuuccagagcuucuuuc

SEQ ID NO: 848690 - RNA, 19 nt, Artificial Sequence
  Description of Artificial Sequence: Synthetic oligonucleotide
  Sense strand starting at position 3104 of SEQ ID NO: 588199
cgagccucuugucuucuaa

SEQ ID NO: 848691 - RNA, 19 nt, Artificial Sequence
  Description of Artificial Sequence: Synthetic oligonucleotide
  Antisense strand to SEQ ID NO: 848690
uuagaagacaagaggcucg

SEQ ID NO: 848692 - RNA, 19 nt, Artificial Sequence
  Description of Artificial Sequence: Synthetic oligonucleotide
  Sense strand starting at position 3190 of SEQ ID NO: 588199
cuuuaaguccaguaagcca

SEQ ID NO: 848693 - RNA, 19 nt, Artificial Sequence
  Description of Artificial Sequence: Synthetic oligonucleotide
  Antisense strand to SEQ ID NO: 848692
uggcuuacuggacuuaaag

SEQ ID NO: 848694 - RNA, 19 nt, Artificial Sequence
  Description of Artificial Sequence: Synthetic oligonucleotide
  Sense strand starting at position 3259 of SEQ ID NO: 588199
uuguaaugcugagcaaguu

SEQ ID NO: 848695 - RNA, 19 nt, Artificial Sequence
  Description of Artificial Sequence: Synthetic oligonucleotide
  Antisense strand to SEQ ID NO: 848694
aacuugcucagcauuacaa

SEQ ID NO: 848696 - RNA, 19 nt, Artificial Sequence
  Description of Artificial Sequence: Synthetic oligonucleotide
  Sense strand starting at position 3260 of SEQ ID NO: 588199
uguaaugcugagcaaguua

SEQ ID NO: 848697 - RNA, 19 nt, Artificial Sequence
  Description of Artificial Sequence: Synthetic oligonucleotide
  Antisense strand to SEQ ID NO: 848696
uaacuugcucagcauuaca

SEQ ID NO: 848698 - RNA, 19 nt, Artificial Sequence
  Description of Artificial Sequence: Synthetic oligonucleotide
  Sense strand starting at position 3639 of SEQ ID NO: 588199
uuuccaauuguacaaugua

SEQ ID NO: 848699 - RNA, 19 nt, Artificial Sequence
  Description of Artificial Sequence: Synthetic oligonucleotide
  Antisense strand to SEQ ID NO: 848698
uacauuguacaauuggaaa

SEQ ID NO: 848700 - RNA, 19 nt, Artificial Sequence
  Description of Artificial Sequence: Synthetic oligonucleotide
  Sense strand starting at position 3655 of SEQ ID NO: 588199
guaauuagcuccugcaguc

SEQ ID NO: 848701 - RNA, 19 nt, Artificial Sequence
  Description of Artificial Sequence: Synthetic oligonucleotide
  Antisense strand to SEQ ID NO: 848700
gacugcaggagcuaauuac

SEQ ID NO: 848702 - RNA, 19 nt, Artificial Sequence
  Description of Artificial Sequence: Synthetic oligonucleotide
  Sense strand starting at position 3935 of SEQ ID NO: 588199
cuugaaaugagacgugcua

SEQ ID NO: 848703 - RNA, 19 nt, Artificial Sequence
  Description of Artificial Sequence: Synthetic oligonucleotide
  Antisense strand to SEQ ID NO: 848702
uagcacgucucauuucaag

SEQ ID NO: 848704 - RNA, 19 nt, Artificial Sequence
  Description of Artificial Sequence: Synthetic oligonucleotide
  Sense strand starting at position 3948 of SEQ ID NO: 588199
gugcuacguguuucuguga

SEQ ID NO: 848705 - RNA, 19 nt, Artificial Sequence
  Description of Artificial Sequence: Synthetic oligonucleotide
  Antisense strand to SEQ ID NO: 848704
ucacagaaacacguagcac

SEQ ID NO: 848706 - RNA, 19 nt, Artificial Sequence
  Description of Artificial Sequence: Synthetic oligonucleotide
  Sense strand starting at position 3949 of SEQ ID NO: 588199
ugcuacguguuucugugaa

SEQ ID NO: 848707 - RNA, 19 nt, Artificial Sequence
  Description of Artificial Sequence: Synthetic oligonucleotide
  Antisense strand to SEQ ID NO: 848706
uucacagaaacacguagca

SEQ ID NO: 848708 - RNA, 19 nt, Artificial Sequence
  Description of Artificial Sequence: Synthetic oligonucleotide
  Sense strand starting at position 3953 of SEQ ID NO: 588199
acguguuucugugaagcuu

SEQ ID NO: 848709 - RNA, 19 nt, Artificial Sequence
  Description of Artificial Sequence: Synthetic oligonucleotide
  Antisense strand to SEQ ID NO: 848708
aagcuucacagaaacacgu

SEQ ID NO: 848710 - RNA, 19 nt, Artificial Sequence
  Description of Artificial Sequence: Synthetic oligonucleotide
  Sense strand starting at position 2221 of SEQ ID NO: 588200
caaacagaauuccgagaga

SEQ ID NO: 848711 - RNA, 19 nt, Artificial Sequence
  Description of Artificial Sequence: Synthetic oligonucleotide
  Antisense strand to SEQ ID NO: 848710
ucucucggaauucuguuug

SEQ ID NO: 848712 - RNA, 19 nt, Artificial Sequence
  Description of Artificial Sequence: Synthetic oligonucleotide
  Sense strand starting at position 2264 of SEQ ID NO: 588200
ugccaaaggccaugauuga

SEQ ID NO: 848713 - RNA, 19 nt, Artificial Sequence
  Description of Artificial Sequence: Synthetic oligonucleotide
  Antisense strand to SEQ ID NO: 848712
ucaaucauggccuuuggca

SEQ ID NO: 848714 - RNA, 19 nt, Artificial Sequence
  Description of Artificial Sequence: Synthetic oligonucleotide
  Sense strand starting at position 2271 of SEQ ID NO: 588200
ggccaugauugagcgaaca

SEQ ID NO: 848715 - RNA, 19 nt, Artificial Sequence
  Description of Artificial Sequence: Synthetic oligonucleotide
  Antisense strand to SEQ ID NO: 848714
uguucgcucaaucauggcc

SEQ ID NO: 848716 - RNA, 19 nt, Artificial Sequence
  Description of Artificial Sequence: Synthetic oligonucleotide
  Sense strand starting at position 2273 of SEQ ID NO: 588200
ccaugauugagcgaacaca

SEQ ID NO: 848717 - RNA, 19 nt, Artificial Sequence
  Description of Artificial Sequence: Synthetic oligonucleotide
  Antisense strand to SEQ ID NO: 848716
uguguucgcucaaucaugg

SEQ ID NO: 848718 - RNA, 19 nt, Artificial Sequence
  Description of Artificial Sequence: Synthetic oligonucleotide
  Sense strand starting at position 2392 of SEQ ID NO: 588200
caaggagaggccuguuauc

SEQ ID NO: 848719 - RNA, 19 nt, Artificial Sequence
  Description of Artificial Sequence: Synthetic oligonucleotide
  Antisense strand to SEQ ID NO: 848718
gauaacaggccucuccuug

SEQ ID NO: 848720 - RNA, 19 nt, Artificial Sequence
  Description of Artificial Sequence: Synthetic oligonucleotide
  Sense strand starting at position 2402 of SEQ ID NO: 588200
ccuguuauccgaccgugca

SEQ ID NO: 848721 - RNA, 19 nt, Artificial Sequence
  Description of Artificial Sequence: Synthetic oligonucleotide
  Antisense strand to SEQ ID NO: 848720
ugcacggucggauaacagg

SEQ ID NO: 848722 - RNA, 19 nt, Artificial Sequence
  Description of Artificial Sequence: Synthetic oligonucleotide
  Sense strand starting at position 2404 of SEQ ID NO: 588200
uguuauccgaccgugcauu

SEQ ID NO: 848723 - RNA, 19 nt, Artificial Sequence
  Description of Artificial Sequence: Synthetic oligonucleotide
  Antisense strand to SEQ ID NO: 848722
aaugcacggucggauaaca

SEQ ID NO: 848724 - RNA, 19 nt, Artificial Sequence
  Description of Artificial Sequence: Synthetic oligonucleotide
  Sense strand starting at position 2454 of SEQ ID NO: 588200
gcugcagagaguugaguuu

SEQ ID NO: 848725 - RNA, 19 nt, Artificial Sequence
  Description of Artificial Sequence: Synthetic oligonucleotide
  Antisense strand to SEQ ID NO: 848724
aaacucaacucucugcagc

SEQ ID NO: 848726 - RNA, 19 nt, Artificial Sequence
  Description of Artificial Sequence: Synthetic oligonucleotide
  Sense strand starting at position 2460 of SEQ ID NO: 588200
gagaguugaguuugugcaa

SEQ ID NO: 848727 - RNA, 19 nt, Artificial Sequence
  Description of Artificial Sequence: Synthetic oligonucleotide
  Antisense strand to SEQ ID NO: 848726
uugcacaaacucaacucuc

SEQ ID NO: 848728 - RNA, 19 nt, Artificial Sequence
  Description of Artificial Sequence: Synthetic oligonucleotide
  Sense strand starting at position 2461 of SEQ ID NO: 588200
agaguugaguuugugcaaa

SEQ ID NO: 848729 - RNA, 19 nt, Artificial Sequence
  Description of Artificial Sequence: Synthetic oligonucleotide
  Antisense strand to SEQ ID NO: 848728
uuugcacaaacucaacucu

SEQ ID NO: 848730 - RNA, 19 nt, Artificial Sequence
  Description of Artificial Sequence: Synthetic oligonucleotide
  Sense strand starting at position 2575 of SEQ ID NO: 588200
gugcaguuugagcggugaa

SEQ ID NO: 848731 - RNA, 19 nt, Artificial Sequence
  Description of Artificial Sequence: Synthetic oligonucleotide
  Antisense strand to SEQ ID NO: 848730
uucaccgcucaaacugcac

SEQ ID NO: 848732 - RNA, 19 nt, Artificial Sequence
  Description of Artificial Sequence: Synthetic oligonucleotide
  Sense strand starting at position 2622 of SEQ ID NO: 588200
uccuguucccugcagagaa

SEQ ID NO: 848733 - RNA, 19 nt, Artificial Sequence
  Description of Artificial Sequence: Synthetic oligonucleotide
  Antisense strand to SEQ ID NO: 848732
uucucugcagggaacagga

SEQ ID NO: 848734 - RNA, 19 nt, Artificial Sequence
  Description of Artificial Sequence: Synthetic oligonucleotide
  Sense strand starting at position 2778 of SEQ ID NO: 588200
ggagucuuccggcacugua

SEQ ID NO: 848735 - RNA, 19 nt, Artificial Sequence
  Description of Artificial Sequence: Synthetic oligonucleotide
  Antisense strand to SEQ ID NO: 848734
uacagugccggaagacucc

SEQ ID NO: 848736 - RNA, 19 nt, Artificial Sequence
  Description of Artificial Sequence: Synthetic oligonucleotide
  Sense strand starting at position 2867 of SEQ ID NO: 588200
gccugaaugugcuucccuu

SEQ ID NO: 848737 - RNA, 19 nt, Artificial Sequence
  Description of Artificial Sequence: Synthetic oligonucleotide
  Antisense strand to SEQ ID NO: 848736
aagggaagcacauucaggc

SEQ ID NO: 848738 - RNA, 19 nt, Artificial Sequence
  Description of Artificial Sequence: Synthetic oligonucleotide
  Sense strand starting at position 2975 of SEQ ID NO: 588200
uggccacugugucuauauu

SEQ ID NO: 848739 - RNA, 19 nt, Artificial Sequence
  Description of Artificial Sequence: Synthetic oligonucleotide
  Antisense strand to SEQ ID NO: 848738
aauauagacacaguggcca

SEQ ID NO: 848740 - RNA, 19 nt, Artificial Sequence
  Description of Artificial Sequence: Synthetic oligonucleotide
  Sense strand starting at position 2976 of SEQ ID NO: 588200
ggccacugugucuauauua

SEQ ID NO: 848741 - RNA, 19 nt, Artificial Sequence
  Description of Artificial Sequence: Synthetic oligonucleotide
  Antisense strand to SEQ ID NO: 848740
uaauauagacacaguggcc

SEQ ID NO: 848742 - RNA, 19 nt, Artificial Sequence
  Description of Artificial Sequence: Synthetic oligonucleotide
  Sense strand starting at position 2983 of SEQ ID NO: 588200
gugucuauauuaccaaagu

SEQ ID NO: 848743 - RNA, 19 nt, Artificial Sequence
  Description of Artificial Sequence: Synthetic oligonucleotide
  Antisense strand to SEQ ID NO: 848742
acuuugguaauauagacac

SEQ ID NO: 848744 - RNA, 19 nt, Artificial Sequence
  Description of Artificial Sequence: Synthetic oligonucleotide
  Sense strand starting at position 3031 of SEQ ID NO: 588200
auuaguugcuucccgugau

SEQ ID NO: 848745 - RNA, 19 nt, Artificial Sequence
  Description of Artificial Sequence: Synthetic oligonucleotide
  Antisense strand to SEQ ID NO: 848744
aucacgggaagcaacuaau

SEQ ID NO: 848746 - RNA, 19 nt, Artificial Sequence
  Description of Artificial Sequence: Synthetic oligonucleotide
  Sense strand starting at position 3034 of SEQ ID NO: 588200
aguugcuucccgugaugaa

SEQ ID NO: 848747 - RNA, 19 nt, Artificial Sequence
  Description of Artificial Sequence: Synthetic oligonucleotide
  Antisense strand to SEQ ID NO: 848746
uucaucacgggaagcaacu

SEQ ID NO: 848748 - RNA, 19 nt, Artificial Sequence
  Description of Artificial Sequence: Synthetic oligonucleotide
  Sense strand starting at position 3035 of SEQ ID NO: 588200
guugcuucccgugaugaaa

SEQ ID NO: 848749 - RNA, 19 nt, Artificial Sequence
  Description of Artificial Sequence: Synthetic oligonucleotide
  Antisense strand to SEQ ID NO: 848748
uuucaucacgggaagcaac

SEQ ID NO: 848750 - RNA, 19 nt, Artificial Sequence
  Description of Artificial Sequence: Synthetic oligonucleotide
  Sense strand starting at position 3100 of SEQ ID NO: 588200
aagucuccguuccuagaga

SEQ ID NO: 848751 - RNA, 19 nt, Artificial Sequence
  Description of Artificial Sequence: Synthetic oligonucleotide
  Antisense strand to SEQ ID NO: 848750
ucucuaggaacggagacuu

SEQ ID NO: 848752 - RNA, 19 nt, Artificial Sequence
  Description of Artificial Sequence: Synthetic oligonucleotide
  Sense strand starting at position 3117 of SEQ ID NO: 588200
gaaagucaguuacccugau

SEQ ID NO: 848753 - RNA, 19 nt, Artificial Sequence
  Description of Artificial Sequence: Synthetic oligonucleotide
  Antisense strand to SEQ ID NO: 848752
aucaggguaacugacuuuc

SEQ ID NO: 848754 - RNA, 19 nt, Artificial Sequence
  Description of Artificial Sequence: Synthetic oligonucleotide
  Sense strand starting at position 3121 of SEQ ID NO: 588200
gucaguuacccugauauaa

SEQ ID NO: 848755 - RNA, 19 nt, Artificial Sequence
  Description of Artificial Sequence: Synthetic oligonucleotide
  Antisense strand to SEQ ID NO: 848754
uuauaucaggguaacugac

SEQ ID NO: 848756 - RNA, 19 nt, Artificial Sequence
  Description of Artificial Sequence: Synthetic oligonucleotide
  Sense strand starting at position 3208 of SEQ ID NO: 588200
ggaguaauguggcucucau

SEQ ID NO: 848757 - RNA, 19 nt, Artificial Sequence
  Description of Artificial Sequence: Synthetic oligonucleotide
  Antisense strand to SEQ ID NO: 848756
augagagccacauuacucc

SEQ ID NO: 848758 - RNA, 19 nt, Artificial Sequence
  Description of Artificial Sequence: Synthetic oligonucleotide
  Sense strand starting at position 3219 of SEQ ID NO: 588200
gcucucaugcuuuauggca

SEQ ID NO: 848759 - RNA, 19 nt, Artificial Sequence
  Description of Artificial Sequence: Synthetic oligonucleotide
  Antisense strand to SEQ ID NO: 848758
ugccauaaagcaugagagc

SEQ ID NO: 848760 - RNA, 19 nt, Artificial Sequence
  Description of Artificial Sequence: Synthetic oligonucleotide
  Sense strand starting at position 3232 of SEQ ID NO: 588200
auggcagguuucccuaaga

SEQ ID NO: 848761 - RNA, 19 nt, Artificial Sequence
  Description of Artificial Sequence: Synthetic oligonucleotide
  Antisense strand to SEQ ID NO: 848760
ucuuagggaaaccugccau

SEQ ID NO: 848762 - RNA, 19 nt, Artificial Sequence
  Description of Artificial Sequence: Synthetic oligonucleotide
  Sense strand starting at position 3300 of SEQ ID NO: 588200
ggcuccguuugccuaaaga

SEQ ID NO: 848763 - RNA, 19 nt, Artificial Sequence
  Description of Artificial Sequence: Synthetic oligonucleotide
  Antisense strand to SEQ ID NO: 848762
ucuuuaggcaaacggagcc

SEQ ID NO: 848764 - RNA, 19 nt, Artificial Sequence
  Description of Artificial Sequence: Synthetic oligonucleotide
  Sense strand starting at position 3579 of SEQ ID NO: 588200
aacguagaaaugcgagaau

SEQ ID NO: 848765 - RNA, 19 nt, Artificial Sequence
  Description of Artificial Sequence: Synthetic oligonucleotide
  Antisense strand to SEQ ID NO: 848764
auucucgcauuucuacguu

SEQ ID NO: 848766 - RNA, 19 nt, Artificial Sequence
  Description of Artificial Sequence: Synthetic oligonucleotide
  Sense strand starting at position 3649 of SEQ ID NO: 588200
ugcacuagugggugucaaa

SEQ ID NO: 848767 - RNA, 19 nt, Artificial Sequence
  Description of Artificial Sequence: Synthetic oligonucleotide
  Antisense strand to SEQ ID NO: 848766
uuugacacccacuagugca

SEQ ID NO: 848768 - RNA, 19 nt, Artificial Sequence
  Description of Artificial Sequence: Synthetic oligonucleotide
  Sense strand starting at position 3660 of SEQ ID NO: 588200
gugucaaacccuuagguga

SEQ ID NO: 848769 - RNA, 19 nt, Artificial Sequence
  Description of Artificial Sequence: Synthetic oligonucleotide
  Antisense strand to SEQ ID NO: 848768
ucaccuaaggguuugacac

SEQ ID NO: 848770 - RNA, 19 nt, Artificial Sequence
  Description of Artificial Sequence: Synthetic oligonucleotide
  Sense strand starting at position 3750 of SEQ ID NO: 588200
gagacaucuggcuguaccu

SEQ ID NO: 848771 - RNA, 19 nt, Artificial Sequence
  Description of Artificial Sequence: Synthetic oligonucleotide
  Antisense strand to SEQ ID NO: 848770
agguacagccagaugucuc

SEQ ID NO: 848772 - RNA, 19 nt, Artificial Sequence
  Description of Artificial Sequence: Synthetic oligonucleotide
  Sense strand starting at position 3752 of SEQ ID NO: 588200
gacaucuggcuguaccuua

SEQ ID NO: 848773 - RNA, 19 nt, Artificial Sequence
  Description of Artificial Sequence: Synthetic oligonucleotide
  Antisense strand to SEQ ID NO: 848772
uaagguacagccagauguc

SEQ ID NO: 848774 - RNA, 19 nt, Artificial Sequence
  Description of Artificial Sequence: Synthetic oligonucleotide
  Sense strand starting at position 3809 of SEQ ID NO: 588200
ccuggcauuaugugaugca

SEQ ID NO: 848775 - RNA, 19 nt, Artificial Sequence
  Description of Artificial Sequence: Synthetic oligonucleotide
  Antisense strand to SEQ ID NO: 848774
ugcaucacauaaugccagg

SEQ ID NO: 848776 - RNA, 19 nt, Artificial Sequence
  Description of Artificial Sequence: Synthetic oligonucleotide
  Sense strand starting at position 3851 of SEQ ID NO: 588200
ugcugugugcuugccaaag

SEQ ID NO: 848777 - RNA, 19 nt, Artificial Sequence
  Description of Artificial Sequence: Synthetic oligonucleotide
  Antisense strand to SEQ ID NO: 848776
cuuuggcaagcacacagca

SEQ ID NO: 848778 - RNA, 19 nt, Artificial Sequence
  Description of Artificial Sequence: Synthetic oligonucleotide
  Sense strand starting at position 3857 of SEQ ID NO: 588200
gugcuugccaaagaugcuu

SEQ ID NO: 848779 - RNA, 19 nt, Artificial Sequence
  Description of Artificial Sequence: Synthetic oligonucleotide
  Antisense strand to SEQ ID NO: 848778
aagcaucuuuggcaagcac

SEQ ID NO: 848780 - RNA, 19 nt, Artificial Sequence
  Description of Artificial Sequence: Synthetic oligonucleotide
  Sense strand starting at position 3908 of SEQ ID NO: 588200
acugcaaguuuacaggaaa

SEQ ID NO: 848781 - RNA, 19 nt, Artificial Sequence
  Description of Artificial Sequence: Synthetic oligonucleotide
  Antisense strand to SEQ ID NO: 848780
uuuccuguaaacuugcagu

SEQ ID NO: 848782 - RNA, 19 nt, Artificial Sequence
  Description of Artificial Sequence: Synthetic oligonucleotide
  Sense strand starting at position 3926 of SEQ ID NO: 588200
auggaagaguuugagccau

SEQ ID NO: 848783 - RNA, 19 nt, Artificial Sequence
  Description of Artificial Sequence: Synthetic oligonucleotide
  Antisense strand to SEQ ID NO: 848782
auggcucaaacucuuccau

SEQ ID NO: 848784 - RNA, 19 nt, Artificial Sequence
  Description of Artificial Sequence: Synthetic oligonucleotide
  Sense strand starting at position 3928 of SEQ ID NO: 588200
ggaagaguuugagccauga

SEQ ID NO: 848785 - RNA, 19 nt, Artificial Sequence
  Description of Artificial Sequence: Synthetic oligonucleotide
  Antisense strand to SEQ ID NO: 848784
ucauggcucaaacucuucc

SEQ ID NO: 848786 - RNA, 19 nt, Artificial Sequence
  Description of Artificial Sequence: Synthetic oligonucleotide
  Sense strand starting at position 3930 of SEQ ID NO: 588200
aagaguuugagccaugagu

SEQ ID NO: 848787 - RNA, 19 nt, Artificial Sequence
  Description of Artificial Sequence: Synthetic oligonucleotide
  Antisense strand to SEQ ID NO: 848786
acucauggcucaaacucuu

SEQ ID NO: 848788 - RNA, 19 nt, Artificial Sequence
  Description of Artificial Sequence: Synthetic oligonucleotide
  Sense strand starting at position 3932 of SEQ ID NO: 588200
gaguuugagccaugaguua

SEQ ID NO: 848789 - RNA, 19 nt, Artificial Sequence
  Description of Artificial Sequence: Synthetic oligonucleotide
  Antisense strand to SEQ ID NO: 848788
uaacucauggcucaaacuc

SEQ ID NO: 848790 - RNA, 19 nt, Artificial Sequence
  Description of Artificial Sequence: Synthetic oligonucleotide
  Sense strand starting at position 347 of SEQ ID NO: 588201
gauggagucauggguccau

SEQ ID NO: 848791 - RNA, 19 nt, Artificial Sequence
  Description of Artificial Sequence: Synthetic oligonucleotide
  Antisense strand to SEQ ID NO: 848790
auggacccaugacuccauc

SEQ ID NO: 848792 - RNA, 19 nt, Artificial Sequence
  Description of Artificial Sequence: Synthetic oligonucleotide
  Sense strand starting at position 351 of SEQ ID NO: 588201
gagucauggguccaugaua

SEQ ID NO: 848793 - RNA, 19 nt, Artificial Sequence
  Description of Artificial Sequence: Synthetic oligonucleotide
  Antisense strand to SEQ ID NO: 848792
uaucauggacccaugacuc

SEQ ID NO: 848794 - RNA, 19 nt, Artificial Sequence
  Description of Artificial Sequence: Synthetic oligonucleotide
  Sense strand starting at position 413 of SEQ ID NO: 588201
ucaugaacggguuguagaa

SEQ ID NO: 848795 - RNA, 19 nt, Artificial Sequence
  Description of Artificial Sequence: Synthetic oligonucleotide
  Antisense strand to SEQ ID NO: 848794
uucuacaacccguucauga

SEQ ID NO: 848796 - RNA, 19 nt, Artificial Sequence
  Description of Artificial Sequence: Synthetic oligonucleotide
  Sense strand starting at position 426 of SEQ ID NO: 588201
guagaagacuugguucaug

SEQ ID NO: 848797 - RNA, 19 nt, Artificial Sequence
  Description of Artificial Sequence: Synthetic oligonucleotide
  Antisense strand to SEQ ID NO: 848796
caugaaccaagucuucuac

SEQ ID NO: 848798 - RNA, 19 nt, Artificial Sequence
  Description of Artificial Sequence: Synthetic oligonucleotide
  Sense strand starting at position 435 of SEQ ID NO: 588201
uugguucauggaugagaug

SEQ ID NO: 848799 - RNA, 19 nt, Artificial Sequence
  Description of Artificial Sequence: Synthetic oligonucleotide
  Antisense strand to SEQ ID NO: 848798
caucucauccaugaaccaa

SEQ ID NO: 848800 - RNA, 19 nt, Artificial Sequence
  Description of Artificial Sequence: Synthetic oligonucleotide
  Sense strand starting at position 505 of SEQ ID NO: 588201
ggaugaauuauguguuggu

SEQ ID NO: 848801 - RNA, 19 nt, Artificial Sequence
  Description of Artificial Sequence: Synthetic oligonucleotide
  Antisense strand to SEQ ID NO: 848800
accaacacauaauucaucc

SEQ ID NO: 848802 - RNA, 19 nt, Artificial Sequence
  Description of Artificial Sequence: Synthetic oligonucleotide
  Sense strand starting at position 506 of SEQ ID NO: 588201
gaugaauuauguguuggua

SEQ ID NO: 848803 - RNA, 19 nt, Artificial Sequence
  Description of Artificial Sequence: Synthetic oligonucleotide
  Antisense strand to SEQ ID NO: 848802
uaccaacacauaauucauc

SEQ ID NO: 848804 - RNA, 19 nt, Artificial Sequence
  Description of Artificial Sequence: Synthetic oligonucleotide
  Sense strand starting at position 509 of SEQ ID NO: 588201
gaauuauguguugguagaa

SEQ ID NO: 848805 - RNA, 19 nt, Artificial Sequence
  Description of Artificial Sequence: Synthetic oligonucleotide
  Antisense strand to SEQ ID NO: 848804
uucuaccaacacauaauuc

SEQ ID NO: 848806 - RNA, 19 nt, Artificial Sequence
  Description of Artificial Sequence: Synthetic oligonucleotide
  Sense strand starting at position 510 of SEQ ID NO: 588201
aauuauguguugguagaag

SEQ ID NO: 848807 - RNA, 19 nt, Artificial Sequence
  Description of Artificial Sequence: Synthetic oligonucleotide
  Antisense strand to SEQ ID NO: 848806
cuucuaccaacacauaauu

SEQ ID NO: 848808 - RNA, 19 nt, Artificial Sequence
  Description of Artificial Sequence: Synthetic oligonucleotide
  Sense strand starting at position 532 of SEQ ID NO: 588201
ucauuaauggauggguuga

SEQ ID NO: 848809 - RNA, 19 nt, Artificial Sequence
  Description of Artificial Sequence: Synthetic oligonucleotide
  Antisense strand to SEQ ID NO: 848808
ucaacccauccauuaauga

SEQ ID NO: 848810 - RNA, 19 nt, Artificial Sequence
  Description of Artificial Sequence: Synthetic oligonucleotide
  Sense strand starting at position 543 of SEQ ID NO: 588201
uggguugauucauugauga

SEQ ID NO: 848811 - RNA, 19 nt, Artificial Sequence
  Description of Artificial Sequence: Synthetic oligonucleotide
  Antisense strand to SEQ ID NO: 848810
ucaucaaugaaucaaccca

SEQ ID NO: 848812 - RNA, 19 nt, Artificial Sequence
  Description of Artificial Sequence: Synthetic oligonucleotide
  Sense strand starting at position 573 of SEQ ID NO: 588201
aaucuugaauggguuggua

SEQ ID NO: 848813 - RNA, 19 nt, Artificial Sequence
  Description of Artificial Sequence: Synthetic oligonucleotide
  Antisense strand to SEQ ID NO: 848812
uaccaacccauucaagauu

SEQ ID NO: 848814 - RNA, 19 nt, Artificial Sequence
  Description of Artificial Sequence: Synthetic oligonucleotide
  Sense strand starting at position 575 of SEQ ID NO: 588201
ucuugaauggguugguaga

SEQ ID NO: 848815 - RNA, 19 nt, Artificial Sequence
  Description of Artificial Sequence: Synthetic oligonucleotide
  Antisense strand to SEQ ID NO: 848814
ucuaccaacccauucaaga

SEQ ID NO: 848816 - RNA, 19 nt, Artificial Sequence
  Description of Artificial Sequence: Synthetic oligonucleotide
  Sense strand starting at position 604 of SEQ ID NO: 588201
cacggacagccauauguaa

SEQ ID NO: 848817 - RNA, 19 nt, Artificial Sequence
  Description of Artificial Sequence: Synthetic oligonucleotide
  Antisense strand to SEQ ID NO: 848816
uuacauauggcuguccgug

SEQ ID NO: 848818 - RNA, 19 nt, Artificial Sequence
  Description of Artificial Sequence: Synthetic oligonucleotide
  Sense strand starting at position 634 of SEQ ID NO: 588201
uggguagauagguggauaa

SEQ ID NO: 848819 - RNA, 19 nt, Artificial Sequence
  Description of Artificial Sequence: Synthetic oligonucleotide
  Antisense strand to SEQ ID NO: 848818
uuauccaccuaucuaccca

SEQ ID NO: 848820 - RNA, 19 nt, Artificial Sequence
  Description of Artificial Sequence: Synthetic oligonucleotide
  Sense strand starting at position 751 of SEQ ID NO: 588201
ccuuucugacaguggugaa

SEQ ID NO: 848821 - RNA, 19 nt, Artificial Sequence
  Description of Artificial Sequence: Synthetic oligonucleotide
  Antisense strand to SEQ ID NO: 848820
uucaccacugucagaaagg

SEQ ID NO: 848822 - RNA, 19 nt, Artificial Sequence
  Description of Artificial Sequence: Synthetic oligonucleotide
  Sense strand starting at position 752 of SEQ ID NO: 588201
cuuucugacaguggugaau

SEQ ID NO: 848823 - RNA, 19 nt, Artificial Sequence
  Description of Artificial Sequence: Synthetic oligonucleotide
  Antisense strand to SEQ ID NO: 848822
auucaccacugucagaaag

SEQ ID NO: 848824 - RNA, 19 nt, Artificial Sequence
  Description of Artificial Sequence: Synthetic oligonucleotide
  Sense strand starting at position 764 of SEQ ID NO: 588201
ggugaauugugagugauca

SEQ ID NO: 848825 - RNA, 19 nt, Artificial Sequence
  Description of Artificial Sequence: Synthetic oligonucleotide
  Antisense strand to SEQ ID NO: 848824
ugaucacucacaauucacc

SEQ ID NO: 848826 - RNA, 19 nt, Artificial Sequence
  Description of Artificial Sequence: Synthetic oligonucleotide
  Sense strand starting at position 765 of SEQ ID NO: 588201
gugaauugugagugaucac

SEQ ID NO: 848827 - RNA, 19 nt, Artificial Sequence
  Description of Artificial Sequence: Synthetic oligonucleotide
  Antisense strand to SEQ ID NO: 848826
gugaucacucacaauucac

SEQ ID NO: 848828 - RNA, 19 nt, Artificial Sequence
  Description of Artificial Sequence: Synthetic oligonucleotide
  Sense strand starting at position 798 of SEQ ID NO: 588201
agaauaggugucugcugga

SEQ ID NO: 848829 - RNA, 19 nt, Artificial Sequence
  Description of Artificial Sequence: Synthetic oligonucleotide
  Antisense strand to SEQ ID NO: 848828
uccagcagacaccuauucu

SEQ ID NO: 848830 - RNA, 19 nt, Artificial Sequence
  Description of Artificial Sequence: Synthetic oligonucleotide
  Sense strand starting at position 803 of SEQ ID NO: 588201
aggugucugcuggagcgaa

SEQ ID NO: 848831 - RNA, 19 nt, Artificial Sequence
  Description of Artificial Sequence: Synthetic oligonucleotide
  Antisense strand to SEQ ID NO: 848830
uucgcuccagcagacaccu

SEQ ID NO: 848832 - RNA, 19 nt, Artificial Sequence
  Description of Artificial Sequence: Synthetic oligonucleotide
  Sense strand starting at position 815 of SEQ ID NO: 588201
gagcgaaaucuucguaaga

SEQ ID NO: 848833 - RNA, 19 nt, Artificial Sequence
  Description of Artificial Sequence: Synthetic oligonucleotide
  Antisense strand to SEQ ID NO: 848832
ucuuacgaagauuucgcuc

SEQ ID NO: 848834 - RNA, 19 nt, Artificial Sequence
  Description of Artificial Sequence: Synthetic oligonucleotide
  Sense strand starting at position 816 of SEQ ID NO: 588201
agcgaaaucuucguaagac

SEQ ID NO: 848835 - RNA, 19 nt, Artificial Sequence
  Description of Artificial Sequence: Synthetic oligonucleotide
  Antisense strand to SEQ ID NO: 848834
gucuuacgaagauuucgcu

SEQ ID NO: 848836 - RNA, 19 nt, Artificial Sequence
  Description of Artificial Sequence: Synthetic oligonucleotide
  Sense strand starting at position 910 of SEQ ID NO: 588201
ccuggaaacaucgauggca

SEQ ID NO: 848837 - RNA, 19 nt, Artificial Sequence
  Description of Artificial Sequence: Synthetic oligonucleotide
  Antisense strand to SEQ ID NO: 848836
ugccaucgauguuuccagg

SEQ ID NO: 848838 - RNA, 19 nt, Artificial Sequence
  Description of Artificial Sequence: Synthetic oligonucleotide
  Sense strand starting at position 1008 of SEQ ID NO: 588201
ugggcagugcucuaauaca

SEQ ID NO: 848839 - RNA, 19 nt, Artificial Sequence
  Description of Artificial Sequence: Synthetic oligonucleotide
  Antisense strand to SEQ ID NO: 848838
uguauuagagcacugccca

SEQ ID NO: 848840 - RNA, 19 nt, Artificial Sequence
  Description of Artificial Sequence: Synthetic oligonucleotide
  Sense strand starting at position 1153 of SEQ ID NO: 588201
uugcgagggcucugagaua

SEQ ID NO: 848841 - RNA, 19 nt, Artificial Sequence
  Description of Artificial Sequence: Synthetic oligonucleotide
  Antisense strand to SEQ ID NO: 848840
uaucucagagcccucgcaa

SEQ ID NO: 848842 - RNA, 19 nt, Artificial Sequence
  Description of Artificial Sequence: Synthetic oligonucleotide
  Sense strand starting at position 1164 of SEQ ID NO: 588201
cugagauacucagcuaaca

SEQ ID NO: 848843 - RNA, 19 nt, Artificial Sequence
  Description of Artificial Sequence: Synthetic oligonucleotide
  Antisense strand to SEQ ID NO: 848842
uguuagcugaguaucucag

SEQ ID NO: 848844 - RNA, 19 nt, Artificial Sequence
  Description of Artificial Sequence: Synthetic oligonucleotide
  Sense strand starting at position 2032 of SEQ ID NO: 588201
ugcugugacguuuaaauga

SEQ ID NO: 848845 - RNA, 19 nt, Artificial Sequence
  Description of Artificial Sequence: Synthetic oligonucleotide
  Antisense strand to SEQ ID NO: 848844
ucauuuaaacgucacagca

SEQ ID NO: 848846 - RNA, 19 nt, Artificial Sequence
  Description of Artificial Sequence: Synthetic oligonucleotide
  Sense strand starting at position 2039 of SEQ ID NO: 588201
acguuuaaaugagcaagua

SEQ ID NO: 848847 - RNA, 19 nt, Artificial Sequence
  Description of Artificial Sequence: Synthetic oligonucleotide
  Antisense strand to SEQ ID NO: 848846
uacuugcucauuuaaacgu

SEQ ID NO: 848848 - RNA, 19 nt, Artificial Sequence
  Description of Artificial Sequence: Synthetic oligonucleotide
  Sense strand starting at position 2181 of SEQ ID NO: 588201
accacuuauuagcuuugua

SEQ ID NO: 848849 - RNA, 19 nt, Artificial Sequence
  Description of Artificial Sequence: Synthetic oligonucleotide
  Antisense strand to SEQ ID NO: 848848
uacaaagcuaauaaguggu

SEQ ID NO: 848850 - RNA, 19 nt, Artificial Sequence
  Description of Artificial Sequence: Synthetic oligonucleotide
  Sense strand starting at position 2240 of SEQ ID NO: 588201
gggcucuggucugcagaau

SEQ ID NO: 848851 - RNA, 19 nt, Artificial Sequence
  Description of Artificial Sequence: Synthetic oligonucleotide
  Antisense strand to SEQ ID NO: 848850
auucugcagaccagagccc

SEQ ID NO: 848852 - RNA, 19 nt, Artificial Sequence
  Description of Artificial Sequence: Synthetic oligonucleotide
  Sense strand starting at position 2371 of SEQ ID NO: 588201
ccgucauuagcgcucuacu

SEQ ID NO: 848853 - RNA, 19 nt, Artificial Sequence
  Description of Artificial Sequence: Synthetic oligonucleotide
  Antisense strand to SEQ ID NO: 848852
aguagagcgcuaaugacgg

SEQ ID NO: 848854 - RNA, 19 nt, Artificial Sequence
  Description of Artificial Sequence: Synthetic oligonucleotide
  Sense strand starting at position 2379 of SEQ ID NO: 588201
agcgcucuacugggaauua

SEQ ID NO: 848855 - RNA, 19 nt, Artificial Sequence
  Description of Artificial Sequence: Synthetic oligonucleotide
  Antisense strand to SEQ ID NO: 848854
uaauucccaguagagcgcu

SEQ ID NO: 848856 - RNA, 19 nt, Artificial Sequence
  Description of Artificial Sequence: Synthetic oligonucleotide
  Sense strand starting at position 2879 of SEQ ID NO: 588201
cccacuucuggccaagaca

SEQ ID NO: 848857 - RNA, 19 nt, Artificial Sequence
  Description of Artificial Sequence: Synthetic oligonucleotide
  Antisense strand to SEQ ID NO: 848856
ugucuuggccagaaguggg

SEQ ID NO: 848858 - RNA, 19 nt, Artificial Sequence
  Description of Artificial Sequence: Synthetic oligonucleotide
  Sense strand starting at position 3177 of SEQ ID NO: 588201
gcuucagggucauugugau

SEQ ID NO: 848859 - RNA, 19 nt, Artificial Sequence
  Description of Artificial Sequence: Synthetic oligonucleotide
  Antisense strand to SEQ ID NO: 848858
aucacaaugacccugaagc

SEQ ID NO: 848860 - RNA, 19 nt, Artificial Sequence
  Description of Artificial Sequence: Synthetic oligonucleotide
  Sense strand starting at position 3791 of SEQ ID NO: 588201
ggcagucucagcugacaaa

SEQ ID NO: 848861 - RNA, 19 nt, Artificial Sequence
  Description of Artificial Sequence: Synthetic oligonucleotide
  Antisense strand to SEQ ID NO: 848860
uuugucagcugagacugcc

SEQ ID NO: 848862 - RNA, 19 nt, Artificial Sequence
  Description of Artificial Sequence: Synthetic oligonucleotide
  Sense strand starting at position 3817 of SEQ ID NO: 588201
guguguauacuaugaaaca

SEQ ID NO: 848863 - RNA, 19 nt, Artificial Sequence
  Description of Artificial Sequence: Synthetic oligonucleotide
  Antisense strand to SEQ ID NO: 848862
uguuucauaguauacacac

SEQ ID NO: 848864 - RNA, 19 nt, Artificial Sequence
  Description of Artificial Sequence: Synthetic oligonucleotide
  Sense strand starting at position 3861 of SEQ ID NO: 588201
agguaaccaucuguacuua

SEQ ID NO: 848865 - RNA, 19 nt, Artificial Sequence
  Description of Artificial Sequence: Synthetic oligonucleotide
  Antisense strand to SEQ ID NO: 848864
uaaguacagaugguuaccu

SEQ ID NO: 848866 - RNA, 19 nt, Artificial Sequence
  Description of Artificial Sequence: Synthetic oligonucleotide
  Sense strand starting at position 3862 of SEQ ID NO: 588201
gguaaccaucuguacuuau

SEQ ID NO: 848867 - RNA, 19 nt, Artificial Sequence
  Description of Artificial Sequence: Synthetic oligonucleotide
  Antisense strand to SEQ ID NO: 848866
auaaguacagaugguuacc

SEQ ID NO: 848868 - RNA, 19 nt, Artificial Sequence
  Description of Artificial Sequence: Synthetic oligonucleotide
  Sense strand starting at position 3916 of SEQ ID NO: 588201
acucuaauccguuacacag

SEQ ID NO: 848869 - RNA, 19 nt, Artificial Sequence
  Description of Artificial Sequence: Synthetic oligonucleotide
  Antisense strand to SEQ ID NO: 848868
cuguguaacggauuagagu

SEQ ID NO: 848870 - RNA, 19 nt, Artificial Sequence
  Description of Artificial Sequence: Synthetic oligonucleotide
  Sense strand starting at position 49 of SEQ ID NO: 588202
aaggguuuaccagauguuu

SEQ ID NO: 848871 - RNA, 19 nt, Artificial Sequence
  Description of Artificial Sequence: Synthetic oligonucleotide
  Antisense strand to SEQ ID NO: 848870
aaacaucugguaaacccuu

SEQ ID NO: 848872 - RNA, 19 nt, Artificial Sequence
  Description of Artificial Sequence: Synthetic oligonucleotide
  Sense strand starting at position 141 of SEQ ID NO: 588202
ggcugaugaggcuaauuaa

SEQ ID NO: 848873 - RNA, 19 nt, Artificial Sequence
  Description of Artificial Sequence: Synthetic oligonucleotide
  Antisense strand to SEQ ID NO: 848872
uuaauuagccucaucagcc

SEQ ID NO: 848874 - RNA, 19 nt, Artificial Sequence
  Description of Artificial Sequence: Synthetic oligonucleotide
  Sense strand starting at position 156 of SEQ ID NO: 588202
uuaaccuuuguugaugauu

SEQ ID NO: 848875 - RNA, 19 nt, Artificial Sequence
  Description of Artificial Sequence: Synthetic oligonucleotide
  Antisense strand to SEQ ID NO: 848874
aaucaucaacaaagguuaa

SEQ ID NO: 848876 - RNA, 19 nt, Artificial Sequence
  Description of Artificial Sequence: Synthetic oligonucleotide
  Sense strand starting at position 182 of SEQ ID NO: 588202
ggcucaaccucaucuaaag

SEQ ID NO: 848877 - RNA, 19 nt, Artificial Sequence
  Description of Artificial Sequence: Synthetic oligonucleotide
  Antisense strand to SEQ ID NO: 848876
cuuuagaugagguugagcc

SEQ ID NO: 848878 - RNA, 19 nt, Artificial Sequence
  Description of Artificial Sequence: Synthetic oligonucleotide
  Sense strand starting at position 666 of SEQ ID NO: 588202
ggaauaagauaacaccuaa

SEQ ID NO: 848879 - RNA, 19 nt, Artificial Sequence
  Description of Artificial Sequence: Synthetic oligonucleotide
  Antisense strand to SEQ ID NO: 848878
uuagguguuaucuuauucc

SEQ ID NO: 848880 - RNA, 19 nt, Artificial Sequence
  Description of Artificial Sequence: Synthetic oligonucleotide
  Sense strand starting at position 902 of SEQ ID NO: 588202
agguaccugucuuuauaaa

SEQ ID NO: 848881 - RNA, 19 nt, Artificial Sequence
  Description of Artificial Sequence: Synthetic oligonucleotide
  Antisense strand to SEQ ID NO: 848880
uuuauaaagacagguaccu

SEQ ID NO: 848882 - RNA, 19 nt, Artificial Sequence
  Description of Artificial Sequence: Synthetic oligonucleotide
  Sense strand starting at position 1771 of SEQ ID NO: 588202
agaccuuauuuaugaggga

SEQ ID NO: 848883 - RNA, 19 nt, Artificial Sequence
  Description of Artificial Sequence: Synthetic oligonucleotide
  Antisense strand to SEQ ID NO: 848882
ucccucauaaauaaggucu

SEQ ID NO: 848884 - RNA, 19 nt, Artificial Sequence
  Description of Artificial Sequence: Synthetic oligonucleotide
  Sense strand starting at position 1772 of SEQ ID NO: 588202
gaccuuauuuaugagggaa

SEQ ID NO: 848885 - RNA, 19 nt, Artificial Sequence
  Description of Artificial Sequence: Synthetic oligonucleotide
  Antisense strand to SEQ ID NO: 848884
uucccucauaaauaagguc

SEQ ID NO: 848886 - RNA, 19 nt, Artificial Sequence
  Description of Artificial Sequence: Synthetic oligonucleotide
  Sense strand starting at position 1796 of SEQ ID NO: 588202
uuaugugauaguuaacgau

SEQ ID NO: 848887 - RNA, 19 nt, Artificial Sequence
  Description of Artificial Sequence: Synthetic oligonucleotide
  Antisense strand to SEQ ID NO: 848886
aucguuaacuaucacauaa

SEQ ID NO: 848888 - RNA, 19 nt, Artificial Sequence
  Description of Artificial Sequence: Synthetic oligonucleotide
  Sense strand starting at position 1800 of SEQ ID NO: 588202
gugauaguuaacgauaguu

SEQ ID NO: 848889 - RNA, 19 nt, Artificial Sequence
  Description of Artificial Sequence: Synthetic oligonucleotide
  Antisense strand to SEQ ID NO: 848888
aacuaucguuaacuaucac

SEQ ID NO: 848890 - RNA, 19 nt, Artificial Sequence
  Description of Artificial Sequence: Synthetic oligonucleotide
  Sense strand starting at position 1802 of SEQ ID NO: 588202
gauaguuaacgauaguuaa

SEQ ID NO: 848891 - RNA, 19 nt, Artificial Sequence
  Description of Artificial Sequence: Synthetic oligonucleotide
  Antisense strand to SEQ ID NO: 848890
uuaacuaucguuaacuauc

SEQ ID NO: 848892 - RNA, 19 nt, Artificial Sequence
  Description of Artificial Sequence: Synthetic oligonucleotide
  Sense strand starting at position 1846 of SEQ ID NO: 588202
uuguaagauuggguaaagu

SEQ ID NO: 848893 - RNA, 19 nt, Artificial Sequence
  Description of Artificial Sequence: Synthetic oligonucleotide
  Antisense strand to SEQ ID NO: 848892
acuuuacccaaucuuacaa

SEQ ID NO: 848894 - RNA, 19 nt, Artificial Sequence
  Description of Artificial Sequence: Synthetic oligonucleotide
  Sense strand starting at position 1957 of SEQ ID NO: 588202
cgaguacaauuugugaugu

SEQ ID NO: 848895 - RNA, 19 nt, Artificial Sequence
  Description of Artificial Sequence: Synthetic oligonucleotide
  Antisense strand to SEQ ID NO: 848894
acaucacaaauuguacucg

SEQ ID NO: 848896 - RNA, 19 nt, Artificial Sequence
  Description of Artificial Sequence: Synthetic oligonucleotide
  Sense strand starting at position 1959 of SEQ ID NO: 588202
aguacaauuugugauguga

SEQ ID NO: 848897 - RNA, 19 nt, Artificial Sequence
  Description of Artificial Sequence: Synthetic oligonucleotide
  Antisense strand to SEQ ID NO: 848896
ucacaucacaaauuguacu

SEQ ID NO: 848898 - RNA, 19 nt, Artificial Sequence
  Description of Artificial Sequence: Synthetic oligonucleotide
  Sense strand starting at position 1976 of SEQ ID NO: 588202
gaugaaguccguuacaacu

SEQ ID NO: 848899 - RNA, 19 nt, Artificial Sequence
  Description of Artificial Sequence: Synthetic oligonucleotide
  Antisense strand to SEQ ID NO: 848898
aguuguaacggacuucauc

SEQ ID NO: 848900 - RNA, 19 nt, Artificial Sequence
  Description of Artificial Sequence: Synthetic oligonucleotide
  Sense strand starting at position 1999 of SEQ ID NO: 588202
gcgacacucugauccacua

SEQ ID NO: 848901 - RNA, 19 nt, Artificial Sequence
  Description of Artificial Sequence: Synthetic oligonucleotide
  Antisense strand to SEQ ID NO: 848900
uaguggaucagagugucgc

SEQ ID NO: 848902 - RNA, 19 nt, Artificial Sequence
  Description of Artificial Sequence: Synthetic oligonucleotide
  Sense strand starting at position 2076 of SEQ ID NO: 588202
ugaacacucugaucuguuu

SEQ ID NO: 848903 - RNA, 19 nt, Artificial Sequence
  Description of Artificial Sequence: Synthetic oligonucleotide
  Antisense strand to SEQ ID NO: 848902
aaacagaucagaguguuca

SEQ ID NO: 848904 - RNA, 19 nt, Artificial Sequence
  Description of Artificial Sequence: Synthetic oligonucleotide
  Sense strand starting at position 2082 of SEQ ID NO: 588202
cucugaucuguuuggaacu

SEQ ID NO: 848905 - RNA, 19 nt, Artificial Sequence
  Description of Artificial Sequence: Synthetic oligonucleotide
  Antisense strand to SEQ ID NO: 848904
aguuccaaacagaucagag

SEQ ID NO: 848906 - RNA, 19 nt, Artificial Sequence
  Description of Artificial Sequence: Synthetic oligonucleotide
  Sense strand starting at position 2136 of SEQ ID NO: 588202
uaaguuggucaguaguuaa

SEQ ID NO: 848907 - RNA, 19 nt, Artificial Sequence
  Description of Artificial Sequence: Synthetic oligonucleotide
  Antisense strand to SEQ ID NO: 848906
uuaacuacugaccaacuua

SEQ ID NO: 848908 - RNA, 19 nt, Artificial Sequence
  Description of Artificial Sequence: Synthetic oligonucleotide
  Sense strand starting at position 2140 of SEQ ID NO: 588202
uuggucaguaguuaaacua

SEQ ID NO: 848909 - RNA, 19 nt, Artificial Sequence
  Description of Artificial Sequence: Synthetic oligonucleotide
  Antisense strand to SEQ ID NO: 848908
uaguuuaacuacugaccaa

SEQ ID NO: 848910 - RNA, 19 nt, Artificial Sequence
  Description of Artificial Sequence: Synthetic oligonucleotide
  Sense strand starting at position 2249 of SEQ ID NO: 588202
auguaaaguacuuggucuu

SEQ ID NO: 848911 - RNA, 19 nt, Artificial Sequence
  Description of Artificial Sequence: Synthetic oligonucleotide
  Antisense strand to SEQ ID NO: 848910
aagaccaaguacuuuacau

SEQ ID NO: 848912 - RNA, 19 nt, Artificial Sequence
  Description of Artificial Sequence: Synthetic oligonucleotide
  Sense strand starting at position 2250 of SEQ ID NO: 588202
uguaaaguacuuggucuua

SEQ ID NO: 848913 - RNA, 19 nt, Artificial Sequence
  Description of Artificial Sequence: Synthetic oligonucleotide
  Antisense strand to SEQ ID NO: 848912
uaagaccaaguacuuuaca

SEQ ID NO: 848914 - RNA, 19 nt, Artificial Sequence
  Description of Artificial Sequence: Synthetic oligonucleotide
  Sense strand starting at position 2454 of SEQ ID NO: 588202
gagugucuccuccaaaugu

SEQ ID NO: 848915 - RNA, 19 nt, Artificial Sequence
  Description of Artificial Sequence: Synthetic oligonucleotide
  Antisense strand to SEQ ID NO: 848914
acauuuggaggagacacuc

SEQ ID NO: 848916 - RNA, 19 nt, Artificial Sequence
  Description of Artificial Sequence: Synthetic oligonucleotide
  Sense strand starting at position 2483 of SEQ ID NO: 588202
ucaauauguuggguaucuu

SEQ ID NO: 848917 - RNA, 19 nt, Artificial Sequence
  Description of Artificial Sequence: Synthetic oligonucleotide
  Antisense strand to SEQ ID NO: 848916
aagauacccaacauauuga

SEQ ID NO: 848918 - RNA, 19 nt, Artificial Sequence
  Description of Artificial Sequence: Synthetic oligonucleotide
  Sense strand starting at position 2484 of SEQ ID NO: 588202
caauauguuggguaucuuu

SEQ ID NO: 848919 - RNA, 19 nt, Artificial Sequence
  Description of Artificial Sequence: Synthetic oligonucleotide
  Antisense strand to SEQ ID NO: 848918
aaagauacccaacauauug

SEQ ID NO: 848920 - RNA, 19 nt, Artificial Sequence
  Description of Artificial Sequence: Synthetic oligonucleotide
  Sense strand starting at position 2574 of SEQ ID NO: 588202
auaacauaggauuguguau

SEQ ID NO: 848921 - RNA, 19 nt, Artificial Sequence
  Description of Artificial Sequence: Synthetic oligonucleotide
  Antisense strand to SEQ ID NO: 848920
auacacaauccuauguuau

SEQ ID NO: 848922 - RNA, 19 nt, Artificial Sequence
  Description of Artificial Sequence: Synthetic oligonucleotide
  Sense strand starting at position 2688 of SEQ ID NO: 588202
uuaugucagucuucuuaug

SEQ ID NO: 848923 - RNA, 19 nt, Artificial Sequence
  Description of Artificial Sequence: Synthetic oligonucleotide
  Antisense strand to SEQ ID NO: 848922
cauaagaagacugacauaa

SEQ ID NO: 848924 - RNA, 19 nt, Artificial Sequence
  Description of Artificial Sequence: Synthetic oligonucleotide
  Sense strand starting at position 2690 of SEQ ID NO: 588202
augucagucuucuuaugaa

SEQ ID NO: 848925 - RNA, 19 nt, Artificial Sequence
  Description of Artificial Sequence: Synthetic oligonucleotide
  Antisense strand to SEQ ID NO: 848924
uucauaagaagacugacau

SEQ ID NO: 848926 - RNA, 19 nt, Artificial Sequence
  Description of Artificial Sequence: Synthetic oligonucleotide
  Sense strand starting at position 2784 of SEQ ID NO: 588202
ccugguugaugagcacaua

SEQ ID NO: 848927 - RNA, 19 nt, Artificial Sequence
  Description of Artificial Sequence: Synthetic oligonucleotide
  Antisense strand to SEQ ID NO: 848926
uaugugcucaucaaccagg

SEQ ID NO: 848928 - RNA, 19 nt, Artificial Sequence
  Description of Artificial Sequence: Synthetic oligonucleotide
  Sense strand starting at position 2864 of SEQ ID NO: 588202
ugcaaauuguuucucuaag

SEQ ID NO: 848929 - RNA, 19 nt, Artificial Sequence
  Description of Artificial Sequence: Synthetic oligonucleotide
  Antisense strand to SEQ ID NO: 848928
cuuagagaaacaauuugca

SEQ ID NO: 848930 - RNA, 19 nt, Artificial Sequence
  Description of Artificial Sequence: Synthetic oligonucleotide
  Sense strand starting at position 2865 of SEQ ID NO: 588202
gcaaauuguuucucuaaga

SEQ ID NO: 848931 - RNA, 19 nt, Artificial Sequence
  Description of Artificial Sequence: Synthetic oligonucleotide
  Antisense strand to SEQ ID NO: 848930
ucuuagagaaacaauuugc

SEQ ID NO: 848932 - RNA, 19 nt, Artificial Sequence
  Description of Artificial Sequence: Synthetic oligonucleotide
  Sense strand starting at position 2931 of SEQ ID NO: 588202
cccugaaaguagcuauaga

SEQ ID NO: 848933 - RNA, 19 nt, Artificial Sequence
  Description of Artificial Sequence: Synthetic oligonucleotide
  Antisense strand to SEQ ID NO: 848932
ucuauagcuacuuucaggg

SEQ ID NO: 848934 - RNA, 19 nt, Artificial Sequence
  Description of Artificial Sequence: Synthetic oligonucleotide
  Sense strand starting at position 3398 of SEQ ID NO: 588202
uagcaaguugcagagauga

SEQ ID NO: 848935 - RNA, 19 nt, Artificial Sequence
  Description of Artificial Sequence: Synthetic oligonucleotide
  Antisense strand to SEQ ID NO: 848934
ucaucucugcaacuugcua

SEQ ID NO: 848936 - RNA, 19 nt, Artificial Sequence
  Description of Artificial Sequence: Synthetic oligonucleotide
  Sense strand starting at position 3400 of SEQ ID NO: 588202
gcaaguugcagagaugaag

SEQ ID NO: 848937 - RNA, 19 nt, Artificial Sequence
  Description of Artificial Sequence: Synthetic oligonucleotide
  Antisense strand to SEQ ID NO: 848936
cuucaucucugcaacuugc

SEQ ID NO: 848938 - RNA, 19 nt, Artificial Sequence
  Description of Artificial Sequence: Synthetic oligonucleotide
  Sense strand starting at position 3438 of SEQ ID NO: 588202
gacaaaggguguucucaag

SEQ ID NO: 848939 - RNA, 19 nt, Artificial Sequence
  Description of Artificial Sequence: Synthetic oligonucleotide
  Antisense strand to SEQ ID NO: 848938
cuugagaacacccuuuguc

SEQ ID NO: 848940 - RNA, 19 nt, Artificial Sequence
  Description of Artificial Sequence: Synthetic oligonucleotide
  Sense strand starting at position 3445 of SEQ ID NO: 588202
gguguucucaaguaugcac

SEQ ID NO: 848941 - RNA, 19 nt, Artificial Sequence
  Description of Artificial Sequence: Synthetic oligonucleotide
  Antisense strand to SEQ ID NO: 848940
gugcauacuugagaacacc

SEQ ID NO: 848942 - RNA, 19 nt, Artificial Sequence
  Description of Artificial Sequence: Synthetic oligonucleotide
  Sense strand starting at position 3480 of SEQ ID NO: 588202
gggaaauguaaaugagugu

SEQ ID NO: 848943 - RNA, 19 nt, Artificial Sequence
  Description of Artificial Sequence: Synthetic oligonucleotide
  Antisense strand to SEQ ID NO: 848942
acacucauuuacauuuccc

SEQ ID NO: 848944 - RNA, 19 nt, Artificial Sequence
  Description of Artificial Sequence: Synthetic oligonucleotide
  Sense strand starting at position 3521 of SEQ ID NO: 588202
auacauauguuaguaccua

SEQ ID NO: 848945 - RNA, 19 nt, Artificial Sequence
  Description of Artificial Sequence: Synthetic oligonucleotide
  Antisense strand to SEQ ID NO: 848944
uagguacuaacauauguau

SEQ ID NO: 848946 - RNA, 19 nt, Artificial Sequence
  Description of Artificial Sequence: Synthetic oligonucleotide
  Sense strand starting at position 3525 of SEQ ID NO: 588202
auauguuaguaccuauacu

SEQ ID NO: 848947 - RNA, 19 nt, Artificial Sequence
  Description of Artificial Sequence: Synthetic oligonucleotide
  Antisense strand to SEQ ID NO: 848946
aguauagguacuaacauau

SEQ ID NO: 848948 - RNA, 19 nt, Artificial Sequence
  Description of Artificial Sequence: Synthetic oligonucleotide
  Sense strand starting at position 3920 of SEQ ID NO: 588202
acgaaauuaucagaacaaa

SEQ ID NO: 848949 - RNA, 19 nt, Artificial Sequence
  Description of Artificial Sequence: Synthetic oligonucleotide
  Antisense strand to SEQ ID NO: 848948
uuuguucugauaauuucgu

SEQ ID NO: 848950 - RNA, 19 nt, Artificial Sequence
  Description of Artificial Sequence: Synthetic oligonucleotide
  Sense strand starting at position 90 of SEQ ID NO: 588203
agcugucucucgcauguga

SEQ ID NO: 848951 - RNA, 19 nt, Artificial Sequence
  Description of Artificial Sequence: Synthetic oligonucleotide
  Antisense strand to SEQ ID NO: 848950
ucacaugcgagagacagcu

SEQ ID NO: 848952 - RNA, 19 nt, Artificial Sequence
  Description of Artificial Sequence: Synthetic oligonucleotide
  Sense strand starting at position 92 of SEQ ID NO: 588203
cugucucucgcaugugaug

SEQ ID NO: 848953 - RNA, 19 nt, Artificial Sequence
  Description of Artificial Sequence: Synthetic oligonucleotide
  Antisense strand to SEQ ID NO: 848952
caucacaugcgagagacag

SEQ ID NO: 848954 - RNA, 19 nt, Artificial Sequence
  Description of Artificial Sequence: Synthetic oligonucleotide
  Sense strand starting at position 176 of SEQ ID NO: 588203
cggccugugcccuuuacau

SEQ ID NO: 848955 - RNA, 19 nt, Artificial Sequence
  Description of Artificial Sequence: Synthetic oligonucleotide
  Antisense strand to SEQ ID NO: 848954
auguaaagggcacaggccg

SEQ ID NO: 848956 - RNA, 19 nt, Artificial Sequence
  Description of Artificial Sequence: Synthetic oligonucleotide
  Sense strand starting at position 268 of SEQ ID NO: 588203
cacgaauugcuguguggca

SEQ ID NO: 848957 - RNA, 19 nt, Artificial Sequence
  Description of Artificial Sequence: Synthetic oligonucleotide
  Antisense strand to SEQ ID NO: 848956
ugccacacagcaauucgug

SEQ ID NO: 848958 - RNA, 19 nt, Artificial Sequence
  Description of Artificial Sequence: Synthetic oligonucleotide
  Sense strand starting at position 269 of SEQ ID NO: 588203
acgaauugcuguguggcau

SEQ ID NO: 848959 - RNA, 19 nt, Artificial Sequence
  Description of Artificial Sequence: Synthetic oligonucleotide
  Antisense strand to SEQ ID NO: 848958
augccacacagcaauucgu

SEQ ID NO: 848960 - RNA, 19 nt, Artificial Sequence
  Description of Artificial Sequence: Synthetic oligonucleotide
  Sense strand starting at position 273 of SEQ ID NO: 588203
auugcuguguggcaugaau

SEQ ID NO: 848961 - RNA, 19 nt, Artificial Sequence
  Description of Artificial Sequence: Synthetic oligonucleotide
  Antisense strand to SEQ ID NO: 848960
auucaugccacacagcaau

SEQ ID NO: 848962 - RNA, 19 nt, Artificial Sequence
  Description of Artificial Sequence: Synthetic oligonucleotide
  Sense strand starting at position 281 of SEQ ID NO: 588203
guggcaugaaugugagauc

SEQ ID NO: 848963 - RNA, 19 nt, Artificial Sequence
  Description of Artificial Sequence: Synthetic oligonucleotide
  Antisense strand to SEQ ID NO: 848962
gaucucacauucaugccac

SEQ ID NO: 848964 - RNA, 19 nt, Artificial Sequence
  Description of Artificial Sequence: Synthetic oligonucleotide
  Sense strand starting at position 284 of SEQ ID NO: 588203
gcaugaaugugagaucccu

SEQ ID NO: 848965 - RNA, 19 nt, Artificial Sequence
  Description of Artificial Sequence: Synthetic oligonucleotide
  Antisense strand to SEQ ID NO: 848964
agggaucucacauucaugc

SEQ ID NO: 848966 - RNA, 19 nt, Artificial Sequence
  Description of Artificial Sequence: Synthetic oligonucleotide
  Sense strand starting at position 290 of SEQ ID NO: 588203
augugagaucccugccaug

SEQ ID NO: 848967 - RNA, 19 nt, Artificial Sequence
  Description of Artificial Sequence: Synthetic oligonucleotide
  Antisense strand to SEQ ID NO: 848966
cauggcagggaucucacau

SEQ ID NO: 848968 - RNA, 19 nt, Artificial Sequence
  Description of Artificial Sequence: Synthetic oligonucleotide
  Sense strand starting at position 293 of SEQ ID NO: 588203
ugagaucccugccauggua

SEQ ID NO: 848969 - RNA, 19 nt, Artificial Sequence
  Description of Artificial Sequence: Synthetic oligonucleotide
  Antisense strand to SEQ ID NO: 848968
uaccauggcagggaucuca

SEQ ID NO: 848970 - RNA, 19 nt, Artificial Sequence
  Description of Artificial Sequence: Synthetic oligonucleotide
  Sense strand starting at position 427 of SEQ ID NO: 588203
gguggucacuguggugaga

SEQ ID NO: 848971 - RNA, 19 nt, Artificial Sequence
  Description of Artificial Sequence: Synthetic oligonucleotide
  Antisense strand to SEQ ID NO: 848970
ucucaccacagugaccacc

SEQ ID NO: 848972 - RNA, 19 nt, Artificial Sequence
  Description of Artificial Sequence: Synthetic oligonucleotide
  Sense strand starting at position 429 of SEQ ID NO: 588203
uggucacuguggugagaaa

SEQ ID NO: 848973 - RNA, 19 nt, Artificial Sequence
  Description of Artificial Sequence: Synthetic oligonucleotide
  Antisense strand to SEQ ID NO: 848972
uuucucaccacagugacca

SEQ ID NO: 848974 - RNA, 19 nt, Artificial Sequence
  Description of Artificial Sequence: Synthetic oligonucleotide
  Sense strand starting at position 479 of SEQ ID NO: 588203
gggugaagaugucuugucu

SEQ ID NO: 848975 - RNA, 19 nt, Artificial Sequence
  Description of Artificial Sequence: Synthetic oligonucleotide
  Antisense strand to SEQ ID NO: 848974
agacaagacaucuucaccc

SEQ ID NO: 848976 - RNA, 19 nt, Artificial Sequence
  Description of Artificial Sequence: Synthetic oligonucleotide
  Sense strand starting at position 483 of SEQ ID NO: 588203
gaagaugucuugucuagag

SEQ ID NO: 848977 - RNA, 19 nt, Artificial Sequence
  Description of Artificial Sequence: Synthetic oligonucleotide
  Antisense strand to SEQ ID NO: 848976
cucuagacaagacaucuuc

SEQ ID NO: 848978 - RNA, 19 nt, Artificial Sequence
  Description of Artificial Sequence: Synthetic oligonucleotide
  Sense strand starting at position 597 of SEQ ID NO: 588203
ggaauuagagcuugaugug

SEQ ID NO: 848979 - RNA, 19 nt, Artificial Sequence
  Description of Artificial Sequence: Synthetic oligonucleotide
  Antisense strand to SEQ ID NO: 848978
cacaucaagcucuaauucc

SEQ ID NO: 848980 - RNA, 19 nt, Artificial Sequence
  Description of Artificial Sequence: Synthetic oligonucleotide
  Sense strand starting at position 1287 of SEQ ID NO: 588203
uucgcucacugcuggagaa

SEQ ID NO: 848981 - RNA, 19 nt, Artificial Sequence
  Description of Artificial Sequence: Synthetic oligonucleotide
  Antisense strand to SEQ ID NO: 848980
uucuccagcagugagcgaa

SEQ ID NO: 848982 - RNA, 19 nt, Artificial Sequence
  Description of Artificial Sequence: Synthetic oligonucleotide
  Sense strand starting at position 1416 of SEQ ID NO: 588203
gugcauucugugcaaggau

SEQ ID NO: 848983 - RNA, 19 nt, Artificial Sequence
  Description of Artificial Sequence: Synthetic oligonucleotide
  Antisense strand to SEQ ID NO: 848982
auccuugcacagaaugcac

SEQ ID NO: 848984 - RNA, 19 nt, Artificial Sequence
  Description of Artificial Sequence: Synthetic oligonucleotide
  Sense strand starting at position 1485 of SEQ ID NO: 588203
ccgugugcucuugugcaua

SEQ ID NO: 848985 - RNA, 19 nt, Artificial Sequence
  Description of Artificial Sequence: Synthetic oligonucleotide
  Antisense strand to SEQ ID NO: 848984
uaugcacaagagcacacgg

SEQ ID NO: 848986 - RNA, 19 nt, Artificial Sequence
  Description of Artificial Sequence: Synthetic oligonucleotide
  Sense strand starting at position 1569 of SEQ ID NO: 588203
ggaggcuagcccuguguau

SEQ ID NO: 848987 - RNA, 19 nt, Artificial Sequence
  Description of Artificial Sequence: Synthetic oligonucleotide
  Antisense strand to SEQ ID NO: 848986
auacacagggcuagccucc

SEQ ID NO: 848988 - RNA, 19 nt, Artificial Sequence
  Description of Artificial Sequence: Synthetic oligonucleotide
  Sense strand starting at position 1754 of SEQ ID NO: 588203
gacgcaaagugacaucgau

SEQ ID NO: 848989 - RNA, 19 nt, Artificial Sequence
  Description of Artificial Sequence: Synthetic oligonucleotide
  Antisense strand to SEQ ID NO: 848988
aucgaugucacuuugcguc

SEQ ID NO: 848990 - RNA, 19 nt, Artificial Sequence
  Description of Artificial Sequence: Synthetic oligonucleotide
  Sense strand starting at position 2220 of SEQ ID NO: 588203
gcucgaucaccagacuucu

SEQ ID NO: 848991 - RNA, 19 nt, Artificial Sequence
  Description of Artificial Sequence: Synthetic oligonucleotide
  Antisense strand to SEQ ID NO: 848990
agaagucuggugaucgagc

SEQ ID NO: 848992 - RNA, 19 nt, Artificial Sequence
  Description of Artificial Sequence: Synthetic oligonucleotide
  Sense strand starting at position 2285 of SEQ ID NO: 588203
gggaaugugucauugggag

SEQ ID NO: 848993 - RNA, 19 nt, Artificial Sequence
  Description of Artificial Sequence: Synthetic oligonucleotide
  Antisense strand to SEQ ID NO: 848992
cucccaaugacacauuccc

SEQ ID NO: 848994 - RNA, 19 nt, Artificial Sequence
  Description of Artificial Sequence: Synthetic oligonucleotide
  Sense strand starting at position 2316 of SEQ ID NO: 588203
ucaacuaguccuggccuaa

SEQ ID NO: 848995 - RNA, 19 nt, Artificial Sequence
  Description of Artificial Sequence: Synthetic oligonucleotide
  Antisense strand to SEQ ID NO: 848994
uuaggccaggacuaguuga

SEQ ID NO: 848996 - RNA, 19 nt, Artificial Sequence
  Description of Artificial Sequence: Synthetic oligonucleotide
  Sense strand starting at position 2448 of SEQ ID NO: 588203
gagucacucccgggugaaa

SEQ ID NO: 848997 - RNA, 19 nt, Artificial Sequence
  Description of Artificial Sequence: Synthetic oligonucleotide
  Antisense strand to SEQ ID NO: 848996
uuucacccgggagugacuc

SEQ ID NO: 848998 - RNA, 19 nt, Artificial Sequence
  Description of Artificial Sequence: Synthetic oligonucleotide
  Sense strand starting at position 2615 of SEQ ID NO: 588203
ggacaagauuucuggacga

SEQ ID NO: 848999 - RNA, 19 nt, Artificial Sequence
  Description of Artificial Sequence: Synthetic oligonucleotide
  Antisense strand to SEQ ID NO: 848998
ucguccagaaaucuugucc

SEQ ID NO: 849000 - RNA, 19 nt, Artificial Sequence
  Description of Artificial Sequence: Synthetic oligonucleotide
  Sense strand starting at position 2681 of SEQ ID NO: 588203
uugcgaaccugucaguaau

SEQ ID NO: 849001 - RNA, 19 nt, Artificial Sequence
  Description of Artificial Sequence: Synthetic oligonucleotide
  Antisense strand to SEQ ID NO: 849000
auuacugacagguucgcaa

SEQ ID NO: 849002 - RNA, 19 nt, Artificial Sequence
  Description of Artificial Sequence: Synthetic oligonucleotide
  Sense strand starting at position 2683 of SEQ ID NO: 588203
gcgaaccugucaguaauug

SEQ ID NO: 849003 - RNA, 19 nt, Artificial Sequence
  Description of Artificial Sequence: Synthetic oligonucleotide
  Antisense strand to SEQ ID NO: 849002
caauuacugacagguucgc

SEQ ID NO: 849004 - RNA, 19 nt, Artificial Sequence
  Description of Artificial Sequence: Synthetic oligonucleotide
  Sense strand starting at position 2935 of SEQ ID NO: 588203
ccuucuugguuugcacaaa

SEQ ID NO: 849005 - RNA, 19 nt, Artificial Sequence
  Description of Artificial Sequence: Synthetic oligonucleotide
  Antisense strand to SEQ ID NO: 849004
uuugugcaaaccaagaagg

SEQ ID NO: 849006 - RNA, 19 nt, Artificial Sequence
  Description of Artificial Sequence: Synthetic oligonucleotide
  Sense strand starting at position 3135 of SEQ ID NO: 588203
cccuguccaugguaggaaa

SEQ ID NO: 849007 - RNA, 19 nt, Artificial Sequence
  Description of Artificial Sequence: Synthetic oligonucleotide
  Antisense strand to SEQ ID NO: 849006
uuuccuaccauggacaggg

SEQ ID NO: 849008 - RNA, 19 nt, Artificial Sequence
  Description of Artificial Sequence: Synthetic oligonucleotide
  Sense strand starting at position 3153 of SEQ ID NO: 588203
agaggacaguauuagugau

SEQ ID NO: 849009 - RNA, 19 nt, Artificial Sequence
  Description of Artificial Sequence: Synthetic oligonucleotide
  Antisense strand to SEQ ID NO: 849008
aucacuaauacuguccucu

SEQ ID NO: 849010 - RNA, 19 nt, Artificial Sequence
  Description of Artificial Sequence: Synthetic oligonucleotide
  Sense strand starting at position 3208 of SEQ ID NO: 588203
cuuggagugucugauuuag

SEQ ID NO: 849011 - RNA, 19 nt, Artificial Sequence
  Description of Artificial Sequence: Synthetic oligonucleotide
  Antisense strand to SEQ ID NO: 849010
cuaaaucagacacuccaag

SEQ ID NO: 849012 - RNA, 19 nt, Artificial Sequence
  Description of Artificial Sequence: Synthetic oligonucleotide
  Sense strand starting at position 3210 of SEQ ID NO: 588203
uggagugucugauuuaguc

SEQ ID NO: 849013 - RNA, 19 nt, Artificial Sequence
  Description of Artificial Sequence: Synthetic oligonucleotide
  Antisense strand to SEQ ID NO: 849012
gacuaaaucagacacucca

SEQ ID NO: 849014 - RNA, 19 nt, Artificial Sequence
  Description of Artificial Sequence: Synthetic oligonucleotide
  Sense strand starting at position 3218 of SEQ ID NO: 588203
cugauuuagucaugagaca

SEQ ID NO: 849015 - RNA, 19 nt, Artificial Sequence
  Description of Artificial Sequence: Synthetic oligonucleotide
  Antisense strand to SEQ ID NO: 849014
ugucucaugacuaaaucag

SEQ ID NO: 849016 - RNA, 19 nt, Artificial Sequence
  Description of Artificial Sequence: Synthetic oligonucleotide
  Sense strand starting at position 3247 of SEQ ID NO: 588203
gggagaacuuucuucccau

SEQ ID NO: 849017 - RNA, 19 nt, Artificial Sequence
  Description of Artificial Sequence: Synthetic oligonucleotide
  Antisense strand to SEQ ID NO: 849016
augggaagaaaguucuccc

SEQ ID NO: 849018 - RNA, 19 nt, Artificial Sequence
  Description of Artificial Sequence: Synthetic oligonucleotide
  Sense strand starting at position 3248 of SEQ ID NO: 588203
ggagaacuuucuucccauu

SEQ ID NO: 849019 - RNA, 19 nt, Artificial Sequence
  Description of Artificial Sequence: Synthetic oligonucleotide
  Antisense strand to SEQ ID NO: 849018
aaugggaagaaaguucucc

SEQ ID NO: 849020 - RNA, 19 nt, Artificial Sequence
  Description of Artificial Sequence: Synthetic oligonucleotide
  Sense strand starting at position 3737 of SEQ ID NO: 588203
uagagccuuccguagcaaa

SEQ ID NO: 849021 - RNA, 19 nt, Artificial Sequence
  Description of Artificial Sequence: Synthetic oligonucleotide
  Antisense strand to SEQ ID NO: 849020
uuugcuacggaaggcucua

SEQ ID NO: 849022 - RNA, 19 nt, Artificial Sequence
  Description of Artificial Sequence: Synthetic oligonucleotide
  Sense strand starting at position 3791 of SEQ ID NO: 588203
uggugaggcuuucuauaaa

SEQ ID NO: 849023 - RNA, 19 nt, Artificial Sequence
  Description of Artificial Sequence: Synthetic oligonucleotide
  Antisense strand to SEQ ID NO: 849022
uuuauagaaagccucacca

SEQ ID NO: 849024 - RNA, 19 nt, Artificial Sequence
  Description of Artificial Sequence: Synthetic oligonucleotide
  Sense strand starting at position 3958 of SEQ ID NO: 588203
agagccaacuuguuacagu

SEQ ID NO: 849025 - RNA, 19 nt, Artificial Sequence
  Description of Artificial Sequence: Synthetic oligonucleotide
  Antisense strand to SEQ ID NO: 849024
acuguaacaaguuggcucu

SEQ ID NO: 849026 - RNA, 19 nt, Artificial Sequence
  Description of Artificial Sequence: Synthetic oligonucleotide
  Sense strand starting at position 3959 of SEQ ID NO: 588203
gagccaacuuguuacaguu

SEQ ID NO: 849027 - RNA, 19 nt, Artificial Sequence
  Description of Artificial Sequence: Synthetic oligonucleotide
  Antisense strand to SEQ ID NO: 849026
aacuguaacaaguuggcuc

SEQ ID NO: 849028 - RNA, 19 nt, Artificial Sequence
  Description of Artificial Sequence: Synthetic oligonucleotide
  Sense strand starting at position 3967 of SEQ ID NO: 588203
uuguuacaguuugcagaga

SEQ ID NO: 849029 - RNA, 19 nt, Artificial Sequence
  Description of Artificial Sequence: Synthetic oligonucleotide
  Antisense strand to SEQ ID NO: 849028
ucucugcaaacuguaacaa

SEQ ID NO: 849030 - RNA, 19 nt, Artificial Sequence
  Description of Artificial Sequence: Synthetic oligonucleotide
  Sense strand starting at position 212 of SEQ ID NO: 588204
ggcugaggcgaccagauua

SEQ ID NO: 849031 - RNA, 19 nt, Artificial Sequence
  Description of Artificial Sequence: Synthetic oligonucleotide
  Antisense strand to SEQ ID NO: 849030
uaaucuggucgccucagcc

SEQ ID NO: 849032 - RNA, 19 nt, Artificial Sequence
  Description of Artificial Sequence: Synthetic oligonucleotide
  Sense strand starting at position 641 of SEQ ID NO: 588204
gagucacaucucuguaaga

SEQ ID NO: 849033 - RNA, 19 nt, Artificial Sequence
  Description of Artificial Sequence: Synthetic oligonucleotide
  Antisense strand to SEQ ID NO: 849032
ucuuacagagaugugacuc

SEQ ID NO: 849034 - RNA, 19 nt, Artificial Sequence
  Description of Artificial Sequence: Synthetic oligonucleotide
  Sense strand starting at position 642 of SEQ ID NO: 588204
agucacaucucuguaagaa

SEQ ID NO: 849035 - RNA, 19 nt, Artificial Sequence
  Description of Artificial Sequence: Synthetic oligonucleotide
  Antisense strand to SEQ ID NO: 849034
uucuuacagagaugugacu

SEQ ID NO: 849036 - RNA, 19 nt, Artificial Sequence
  Description of Artificial Sequence: Synthetic oligonucleotide
  Sense strand starting at position 643 of SEQ ID NO: 588204
gucacaucucuguaagaag

SEQ ID NO: 849037 - RNA, 19 nt, Artificial Sequence
  Description of Artificial Sequence: Synthetic oligonucleotide
  Antisense strand to SEQ ID NO: 849036
cuucuuacagagaugugac

SEQ ID NO: 849038 - RNA, 19 nt, Artificial Sequence
  Description of Artificial Sequence: Synthetic oligonucleotide
  Sense strand starting at position 772 of SEQ ID NO: 588204
uugagaauccgaugccucu

SEQ ID NO: 849039 - RNA, 19 nt, Artificial Sequence
  Description of Artificial Sequence: Synthetic oligonucleotide
  Antisense strand to SEQ ID NO: 849038
agaggcaucggauucucaa

SEQ ID NO: 849040 - RNA, 19 nt, Artificial Sequence
  Description of Artificial Sequence: Synthetic oligonucleotide
  Sense strand starting at position 815 of SEQ ID NO: 588204
cugugucagaacgaaguau

SEQ ID NO: 849041 - RNA, 19 nt, Artificial Sequence
  Description of Artificial Sequence: Synthetic oligonucleotide
  Antisense strand to SEQ ID NO: 849040
auacuucguucugacacag

SEQ ID NO: 849042 - RNA, 19 nt, Artificial Sequence
  Description of Artificial Sequence: Synthetic oligonucleotide
  Sense strand starting at position 819 of SEQ ID NO: 588204
gucagaacgaaguauauuc

SEQ ID NO: 849043 - RNA, 19 nt, Artificial Sequence
  Description of Artificial Sequence: Synthetic oligonucleotide
  Antisense strand to SEQ ID NO: 849042
gaauauacuucguucugac

SEQ ID NO: 849044 - RNA, 19 nt, Artificial Sequence
  Description of Artificial Sequence: Synthetic oligonucleotide
  Sense strand starting at position 879 of SEQ ID NO: 588204
aguuauugguaucccuuua

SEQ ID NO: 849045 - RNA, 19 nt, Artificial Sequence
  Description of Artificial Sequence: Synthetic oligonucleotide
  Antisense strand to SEQ ID NO: 849044
uaaagggauaccaauaacu

SEQ ID NO: 849046 - RNA, 19 nt, Artificial Sequence
  Description of Artificial Sequence: Synthetic oligonucleotide
  Sense strand starting at position 884 of SEQ ID NO: 588204
uugguaucccuuuagugaa

SEQ ID NO: 849047 - RNA, 19 nt, Artificial Sequence
  Description of Artificial Sequence: Synthetic oligonucleotide
  Antisense strand to SEQ ID NO: 849046
uucacuaaagggauaccaa

SEQ ID NO: 849048 - RNA, 19 nt, Artificial Sequence
  Description of Artificial Sequence: Synthetic oligonucleotide
  Sense strand starting at position 926 of SEQ ID NO: 588204
gucauacuuccauaugcau

SEQ ID NO: 849049 - RNA, 19 nt, Artificial Sequence
  Description of Artificial Sequence: Synthetic oligonucleotide
  Antisense strand to SEQ ID NO: 849048
augcauauggaaguaugac

SEQ ID NO: 849050 - RNA, 19 nt, Artificial Sequence
  Description of Artificial Sequence: Synthetic oligonucleotide
  Sense strand starting at position 966 of SEQ ID NO: 588204
uggaauuaauaugaaacca

SEQ ID NO: 849051 - RNA, 19 nt, Artificial Sequence
  Description of Artificial Sequence: Synthetic oligonucleotide
  Antisense strand to SEQ ID NO: 849050
ugguuucauauuaauucca

SEQ ID NO: 849052 - RNA, 19 nt, Artificial Sequence
  Description of Artificial Sequence: Synthetic oligonucleotide
  Sense strand starting at position 979 of SEQ ID NO: 588204
aaaccaaaugagugguaua

SEQ ID NO: 849053 - RNA, 19 nt, Artificial Sequence
  Description of Artificial Sequence: Synthetic oligonucleotide
  Antisense strand to SEQ ID NO: 849052
uauaccacucauuugguuu

SEQ ID NO: 849054 - RNA, 19 nt, Artificial Sequence
  Description of Artificial Sequence: Synthetic oligonucleotide
  Sense strand starting at position 1089 of SEQ ID NO: 588204
gcaauauuacaucagaugu

SEQ ID NO: 849055 - RNA, 19 nt, Artificial Sequence
  Description of Artificial Sequence: Synthetic oligonucleotide
  Antisense strand to SEQ ID NO: 849054
acaucugauguaauauugc

SEQ ID NO: 849056 - RNA, 19 nt, Artificial Sequence
  Description of Artificial Sequence: Synthetic oligonucleotide
  Sense strand starting at position 1103 of SEQ ID NO: 588204
gauguauucugaguaaauu

SEQ ID NO: 849057 - RNA, 19 nt, Artificial Sequence
  Description of Artificial Sequence: Synthetic oligonucleotide
  Antisense strand to SEQ ID NO: 849056
aauuuacucagaauacauc

SEQ ID NO: 849058 - RNA, 19 nt, Artificial Sequence
  Description of Artificial Sequence: Synthetic oligonucleotide
  Sense strand starting at position 1104 of SEQ ID NO: 588204
auguauucugaguaaauug

SEQ ID NO: 849059 - RNA, 19 nt, Artificial Sequence
  Description of Artificial Sequence: Synthetic oligonucleotide
  Antisense strand to SEQ ID NO: 849058
caauuuacucagaauacau

SEQ ID NO: 849060 - RNA, 19 nt, Artificial Sequence
  Description of Artificial Sequence: Synthetic oligonucleotide
  Sense strand starting at position 1111 of SEQ ID NO: 588204
cugaguaaauugcuuuaua

SEQ ID NO: 849061 - RNA, 19 nt, Artificial Sequence
  Description of Artificial Sequence: Synthetic oligonucleotide
  Antisense strand to SEQ ID NO: 849060
uauaaagcaauuuacucag

SEQ ID NO: 849062 - RNA, 19 nt, Artificial Sequence
  Description of Artificial Sequence: Synthetic oligonucleotide
  Sense strand starting at position 1670 of SEQ ID NO: 588204
acgccuccgcugucaauaa

SEQ ID NO: 849063 - RNA, 19 nt, Artificial Sequence
  Description of Artificial Sequence: Synthetic oligonucleotide
  Antisense strand to SEQ ID NO: 849062
uuauugacagcggaggcgu

SEQ ID NO: 849064 - RNA, 19 nt, Artificial Sequence
  Description of Artificial Sequence: Synthetic oligonucleotide
  Sense strand starting at position 1927 of SEQ ID NO: 588204
cguugcccugauuaggaaa

SEQ ID NO: 849065 - RNA, 19 nt, Artificial Sequence
  Description of Artificial Sequence: Synthetic oligonucleotide
  Antisense strand to SEQ ID NO: 849064
uuuccuaaucagggcaacg

SEQ ID NO: 849066 - RNA, 19 nt, Artificial Sequence
  Description of Artificial Sequence: Synthetic oligonucleotide
  Sense strand starting at position 2049 of SEQ ID NO: 588204
guuccaaaggucuggaaac

SEQ ID NO: 849067 - RNA, 19 nt, Artificial Sequence
  Description of Artificial Sequence: Synthetic oligonucleotide
  Antisense strand to SEQ ID NO: 849066
guuuccagaccuuuggaac

SEQ ID NO: 849068 - RNA, 19 nt, Artificial Sequence
  Description of Artificial Sequence: Synthetic oligonucleotide
  Sense strand starting at position 2427 of SEQ ID NO: 588204
aagugaauuccuggcccau

SEQ ID NO: 849069 - RNA, 19 nt, Artificial Sequence
  Description of Artificial Sequence: Synthetic oligonucleotide
  Antisense strand to SEQ ID NO: 849068
augggccaggaauucacuu

SEQ ID NO: 849070 - RNA, 19 nt, Artificial Sequence
  Description of Artificial Sequence: Synthetic oligonucleotide
  Sense strand starting at position 2429 of SEQ ID NO: 588204
gugaauuccuggcccauuu

SEQ ID NO: 849071 - RNA, 19 nt, Artificial Sequence
  Description of Artificial Sequence: Synthetic oligonucleotide
  Antisense strand to SEQ ID NO: 849070
aaaugggccaggaauucac

SEQ ID NO: 849072 - RNA, 19 nt, Artificial Sequence
  Description of Artificial Sequence: Synthetic oligonucleotide
  Sense strand starting at position 2450 of SEQ ID NO: 588204
ccgaacgaacguuaggauu

SEQ ID NO: 849073 - RNA, 19 nt, Artificial Sequence
  Description of Artificial Sequence: Synthetic oligonucleotide
  Antisense strand to SEQ ID NO: 849072
aauccuaacguucguucgg

SEQ ID NO: 849074 - RNA, 19 nt, Artificial Sequence
  Description of Artificial Sequence: Synthetic oligonucleotide
  Sense strand starting at position 2458 of SEQ ID NO: 588204
acguuaggauuaguuggaa

SEQ ID NO: 849075 - RNA, 19 nt, Artificial Sequence
  Description of Artificial Sequence: Synthetic oligonucleotide
  Antisense strand to SEQ ID NO: 849074
uuccaacuaauccuaacgu

SEQ ID NO: 849076 - RNA, 19 nt, Artificial Sequence
  Description of Artificial Sequence: Synthetic oligonucleotide
  Sense strand starting at position 2461 of SEQ ID NO: 588204
uuaggauuaguuggaaggu

SEQ ID NO: 849077 - RNA, 19 nt, Artificial Sequence
  Description of Artificial Sequence: Synthetic oligonucleotide
  Antisense strand to SEQ ID NO: 849076
accuuccaacuaauccuaa

SEQ ID NO: 849078 - RNA, 19 nt, Artificial Sequence
  Description of Artificial Sequence: Synthetic oligonucleotide
  Sense strand starting at position 2493 of SEQ ID NO: 588204
ugaggaaacaaauguguua

SEQ ID NO: 849079 - RNA, 19 nt, Artificial Sequence
  Description of Artificial Sequence: Synthetic oligonucleotide
  Antisense strand to SEQ ID NO: 849078
uaacacauuuguuuccuca

SEQ ID NO: 849080 - RNA, 19 nt, Artificial Sequence
  Description of Artificial Sequence: Synthetic oligonucleotide
  Sense strand starting at position 2590 of SEQ ID NO: 588204
gcuauugugaucccgcuuu

SEQ ID NO: 849081 - RNA, 19 nt, Artificial Sequence
  Description of Artificial Sequence: Synthetic oligonucleotide
  Antisense strand to SEQ ID NO: 849080
aaagcgggaucacaauagc

SEQ ID NO: 849082 - RNA, 19 nt, Artificial Sequence
  Description of Artificial Sequence: Synthetic oligonucleotide
  Sense strand starting at position 2618 of SEQ ID NO: 588204
agcugagugguucauugau

SEQ ID NO: 849083 - RNA, 19 nt, Artificial Sequence
  Description of Artificial Sequence: Synthetic oligonucleotide
  Antisense strand to SEQ ID NO: 849082
aucaaugaaccacucagcu

SEQ ID NO: 849084 - RNA, 19 nt, Artificial Sequence
  Description of Artificial Sequence: Synthetic oligonucleotide
  Sense strand starting at position 2653 of SEQ ID NO: 588204
aaugguuugggcuaggauu

SEQ ID NO: 849085 - RNA, 19 nt, Artificial Sequence
  Description of Artificial Sequence: Synthetic oligonucleotide
  Antisense strand to SEQ ID NO: 849084
aauccuagcccaaaccauu

SEQ ID NO: 849086 - RNA, 19 nt, Artificial Sequence
  Description of Artificial Sequence: Synthetic oligonucleotide
  Sense strand starting at position 2735 of SEQ ID NO: 588204
ccauucuggucagucaaau

SEQ ID NO: 849087 - RNA, 19 nt, Artificial Sequence
  Description of Artificial Sequence: Synthetic oligonucleotide
  Antisense strand to SEQ ID NO: 849086
auuugacugaccagaaugg

SEQ ID NO: 849088 - RNA, 19 nt, Artificial Sequence
  Description of Artificial Sequence: Synthetic oligonucleotide
  Sense strand starting at position 2747 of SEQ ID NO: 588204
gucaaauagugacuauauc

SEQ ID NO: 849089 - RNA, 19 nt, Artificial Sequence
  Description of Artificial Sequence: Synthetic oligonucleotide
  Antisense strand to SEQ ID NO: 849088
gauauagucacuauuugac

SEQ ID NO: 849090 - RNA, 19 nt, Artificial Sequence
  Description of Artificial Sequence: Synthetic oligonucleotide
  Sense strand starting at position 2794 of SEQ ID NO: 588204
ugaggaaauaagugucuca

SEQ ID NO: 849091 - RNA, 19 nt, Artificial Sequence
  Description of Artificial Sequence: Synthetic oligonucleotide
  Antisense strand to SEQ ID NO: 849090
ugagacacuuauuuccuca

SEQ ID NO: 849092 - RNA, 19 nt, Artificial Sequence
  Description of Artificial Sequence: Synthetic oligonucleotide
  Sense strand starting at position 2797 of SEQ ID NO: 588204
ggaaauaagugucucacaa

SEQ ID NO: 849093 - RNA, 19 nt, Artificial Sequence
  Description of Artificial Sequence: Synthetic oligonucleotide
  Antisense strand to SEQ ID NO: 849092
uugugagacacuuauuucc

SEQ ID NO: 849094 - RNA, 19 nt, Artificial Sequence
  Description of Artificial Sequence: Synthetic oligonucleotide
  Sense strand starting at position 2880 of SEQ ID NO: 588204
aaauuugacuggugaugaa

SEQ ID NO: 849095 - RNA, 19 nt, Artificial Sequence
  Description of Artificial Sequence: Synthetic oligonucleotide
  Antisense strand to SEQ ID NO: 849094
uucaucaccagucaaauuu

SEQ ID NO: 849096 - RNA, 19 nt, Artificial Sequence
  Description of Artificial Sequence: Synthetic oligonucleotide
  Sense strand starting at position 3637 of SEQ ID NO: 588204
gacagcuguuacccuagaa

SEQ ID NO: 849097 - RNA, 19 nt, Artificial Sequence
  Description of Artificial Sequence: Synthetic oligonucleotide
  Antisense strand to SEQ ID NO: 849096
uucuaggguaacagcuguc

SEQ ID NO: 849098 - RNA, 19 nt, Artificial Sequence
  Description of Artificial Sequence: Synthetic oligonucleotide
  Sense strand starting at position 3754 of SEQ ID NO: 588204
uuaauacaguuguuaagga

SEQ ID NO: 849099 - RNA, 19 nt, Artificial Sequence
  Description of Artificial Sequence: Synthetic oligonucleotide
  Antisense strand to SEQ ID NO: 849098
uccuuaacaacuguauuaa

SEQ ID NO: 849100 - RNA, 19 nt, Artificial Sequence
  Description of Artificial Sequence: Synthetic oligonucleotide
  Sense strand starting at position 3759 of SEQ ID NO: 588204
acaguuguuaaggaaaugu

SEQ ID NO: 849101 - RNA, 19 nt, Artificial Sequence
  Description of Artificial Sequence: Synthetic oligonucleotide
  Antisense strand to SEQ ID NO: 849100
acauuuccuuaacaacugu

SEQ ID NO: 849102 - RNA, 19 nt, Artificial Sequence
  Description of Artificial Sequence: Synthetic oligonucleotide
  Sense strand starting at position 3763 of SEQ ID NO: 588204
uuguuaaggaaauguaagu

SEQ ID NO: 849103 - RNA, 19 nt, Artificial Sequence
  Description of Artificial Sequence: Synthetic oligonucleotide
  Antisense strand to SEQ ID NO: 849102
acuuacauuuccuuaacaa

SEQ ID NO: 849104 - RNA, 19 nt, Artificial Sequence
  Description of Artificial Sequence: Synthetic oligonucleotide
  Sense strand starting at position 3768 of SEQ ID NO: 588204
aaggaaauguaagucuguu

SEQ ID NO: 849105 - RNA, 19 nt, Artificial Sequence
  Description of Artificial Sequence: Synthetic oligonucleotide
  Antisense strand to SEQ ID NO: 849104
aacagacuuacauuuccuu

SEQ ID NO: 849106 - RNA, 19 nt, Artificial Sequence
  Description of Artificial Sequence: Synthetic oligonucleotide
  Sense strand starting at position 3906 of SEQ ID NO: 588204
cucacugagguuuauugau

SEQ ID NO: 849107 - RNA, 19 nt, Artificial Sequence
  Description of Artificial Sequence: Synthetic oligonucleotide
  Antisense strand to SEQ ID NO: 849106
aucaauaaaccucagugag

SEQ ID NO: 849108 - RNA, 19 nt, Artificial Sequence
  Description of Artificial Sequence: Synthetic oligonucleotide
  Sense strand starting at position 3908 of SEQ ID NO: 588204
cacugagguuuauugauag

SEQ ID NO: 849109 - RNA, 19 nt, Artificial Sequence
  Description of Artificial Sequence: Synthetic oligonucleotide
  Antisense strand to SEQ ID NO: 849108
cuaucaauaaaccucagug

SEQ ID NO: 849110 - RNA, 19 nt, Artificial Sequence
  Description of Artificial Sequence: Synthetic oligonucleotide
  Sense strand starting at position 147 of SEQ ID NO: 588205
uuaagagcaaguugguaaa

SEQ ID NO: 849111 - RNA, 19 nt, Artificial Sequence
  Description of Artificial Sequence: Synthetic oligonucleotide
  Antisense strand to SEQ ID NO: 849110
uuuaccaacuugcucuuaa

SEQ ID NO: 849112 - RNA, 19 nt, Artificial Sequence
  Description of Artificial Sequence: Synthetic oligonucleotide
  Sense strand starting at position 158 of SEQ ID NO: 588205
uugguaaauggaggcauua

SEQ ID NO: 849113 - RNA, 19 nt, Artificial Sequence
  Description of Artificial Sequence: Synthetic oligonucleotide
  Antisense strand to SEQ ID NO: 849112
uaaugccuccauuuaccaa

SEQ ID NO: 849114 - RNA, 19 nt, Artificial Sequence
  Description of Artificial Sequence: Synthetic oligonucleotide
  Sense strand starting at position 171 of SEQ ID NO: 588205
gcauuauauggagagugcu

SEQ ID NO: 849115 - RNA, 19 nt, Artificial Sequence
  Description of Artificial Sequence: Synthetic oligonucleotide
  Antisense strand to SEQ ID NO: 849114
agcacucuccauauaaugc

SEQ ID NO: 849116 - RNA, 19 nt, Artificial Sequence
  Description of Artificial Sequence: Synthetic oligonucleotide
  Sense strand starting at position 179 of SEQ ID NO: 588205
uggagagugcucgaguaua

SEQ ID NO: 849117 - RNA, 19 nt, Artificial Sequence
  Description of Artificial Sequence: Synthetic oligonucleotide
  Antisense strand to SEQ ID NO: 849116
uauacucgagcacucucca

SEQ ID NO: 849118 - RNA, 19 nt, Artificial Sequence
  Description of Artificial Sequence: Synthetic oligonucleotide
  Sense strand starting at position 445 of SEQ ID NO: 588205
aauguuuauuccuuggaug

SEQ ID NO: 849119 - RNA, 19 nt, Artificial Sequence
  Description of Artificial Sequence: Synthetic oligonucleotide
  Antisense strand to SEQ ID NO: 849118
cauccaaggaauaaacauu

SEQ ID NO: 849120 - RNA, 19 nt, Artificial Sequence
  Description of Artificial Sequence: Synthetic oligonucleotide
  Sense strand starting at position 446 of SEQ ID NO: 588205
auguuuauuccuuggauga

SEQ ID NO: 849121 - RNA, 19 nt, Artificial Sequence
  Description of Artificial Sequence: Synthetic oligonucleotide
  Antisense strand to SEQ ID NO: 849120
ucauccaaggaauaaacau

SEQ ID NO: 849122 - RNA, 19 nt, Artificial Sequence
  Description of Artificial Sequence: Synthetic oligonucleotide
  Sense strand starting at position 447 of SEQ ID NO: 588205
uguuuauuccuuggaugaa

SEQ ID NO: 849123 - RNA, 19 nt, Artificial Sequence
  Description of Artificial Sequence: Synthetic oligonucleotide
  Antisense strand to SEQ ID NO: 849122
uucauccaaggaauaaaca

SEQ ID NO: 849124 - RNA, 19 nt, Artificial Sequence
  Description of Artificial Sequence: Synthetic oligonucleotide
  Sense strand starting at position 483 of SEQ ID NO: 588205
gugucucaggaaggaugau

SEQ ID NO: 849125 - RNA, 19 nt, Artificial Sequence
  Description of Artificial Sequence: Synthetic oligonucleotide
  Antisense strand to SEQ ID NO: 849124
aucauccuuccugagacac

SEQ ID NO: 849126 - RNA, 19 nt, Artificial Sequence
  Description of Artificial Sequence: Synthetic oligonucleotide
  Sense strand starting at position 523 of SEQ ID NO: 588205
ugauuugaauccugauaga

SEQ ID NO: 849127 - RNA, 19 nt, Artificial Sequence
  Description of Artificial Sequence: Synthetic oligonucleotide
  Antisense strand to SEQ ID NO: 849126
ucuaucaggauucaaauca

SEQ ID NO: 849128 - RNA, 19 nt, Artificial Sequence
  Description of Artificial Sequence: Synthetic oligonucleotide
  Sense strand starting at position 589 of SEQ ID NO: 588205
ggugucaacccuuaauaac

SEQ ID NO: 849129 - RNA, 19 nt, Artificial Sequence
  Description of Artificial Sequence: Synthetic oligonucleotide
  Antisense strand to SEQ ID NO: 849128
guuauuaaggguugacacc

SEQ ID NO: 849130 - RNA, 19 nt, Artificial Sequence
  Description of Artificial Sequence: Synthetic oligonucleotide
  Sense strand starting at position 931 of SEQ ID NO: 588205
cggcuuagaagguggaaau

SEQ ID NO: 849131 - RNA, 19 nt, Artificial Sequence
  Description of Artificial Sequence: Synthetic oligonucleotide
  Antisense strand to SEQ ID NO: 849130
auuuccaccuucuaagccg

SEQ ID NO: 849132 - RNA, 19 nt, Artificial Sequence
  Description of Artificial Sequence: Synthetic oligonucleotide
  Sense strand starting at position 1547 of SEQ ID NO: 588205
aagugaaguggcugaaauu

SEQ ID NO: 849133 - RNA, 19 nt, Artificial Sequence
  Description of Artificial Sequence: Synthetic oligonucleotide
  Antisense strand to SEQ ID NO: 849132
aauuucagccacuucacuu

SEQ ID NO: 849134 - RNA, 19 nt, Artificial Sequence
  Description of Artificial Sequence: Synthetic oligonucleotide
  Sense strand starting at position 1548 of SEQ ID NO: 588205
agugaaguggcugaaauua

SEQ ID NO: 849135 - RNA, 19 nt, Artificial Sequence
  Description of Artificial Sequence: Synthetic oligonucleotide
  Antisense strand to SEQ ID NO: 849134
uaauuucagccacuucacu

SEQ ID NO: 849136 - RNA, 19 nt, Artificial Sequence
  Description of Artificial Sequence: Synthetic oligonucleotide
  Sense strand starting at position 1882 of SEQ ID NO: 588205
caaaguucucaguaaaggu

SEQ ID NO: 849137 - RNA, 19 nt, Artificial Sequence
  Description of Artificial Sequence: Synthetic oligonucleotide
  Antisense strand to SEQ ID NO: 849136
accuuuacugagaacuuug

SEQ ID NO: 849138 - RNA, 19 nt, Artificial Sequence
  Description of Artificial Sequence: Synthetic oligonucleotide
  Sense strand starting at position 1938 of SEQ ID NO: 588205
acaaguaauugggacauuu

SEQ ID NO: 849139 - RNA, 19 nt, Artificial Sequence
  Description of Artificial Sequence: Synthetic oligonucleotide
  Antisense strand to SEQ ID NO: 849138
aaaugucccaauuacuugu

SEQ ID NO: 849140 - RNA, 19 nt, Artificial Sequence
  Description of Artificial Sequence: Synthetic oligonucleotide
  Sense strand starting at position 1957 of SEQ ID NO: 588205
uugucuugcccugagaaag

SEQ ID NO: 849141 - RNA, 19 nt, Artificial Sequence
  Description of Artificial Sequence: Synthetic oligonucleotide
  Antisense strand to SEQ ID NO: 849140
cuuucucagggcaagacaa

SEQ ID NO: 849142 - RNA, 19 nt, Artificial Sequence
  Description of Artificial Sequence: Synthetic oligonucleotide
  Sense strand starting at position 2044 of SEQ ID NO: 588205
ggcuguccgauuuguuaau

SEQ ID NO: 849143 - RNA, 19 nt, Artificial Sequence
  Description of Artificial Sequence: Synthetic oligonucleotide
  Antisense strand to SEQ ID NO: 849142
auuaacaaaucggacagcc

SEQ ID NO: 849144 - RNA, 19 nt, Artificial Sequence
  Description of Artificial Sequence: Synthetic oligonucleotide
  Sense strand starting at position 2046 of SEQ ID NO: 588205
cuguccgauuuguuaaucu

SEQ ID NO: 849145 - RNA, 19 nt, Artificial Sequence
  Description of Artificial Sequence: Synthetic oligonucleotide
  Antisense strand to SEQ ID NO: 849144
agauuaacaaaucggacag

SEQ ID NO: 849146 - RNA, 19 nt, Artificial Sequence
  Description of Artificial Sequence: Synthetic oligonucleotide
  Sense strand starting at position 2079 of SEQ ID NO: 588205
cugugaaagguggauucca

SEQ ID NO: 849147 - RNA, 19 nt, Artificial Sequence
  Description of Artificial Sequence: Synthetic oligonucleotide
  Antisense strand to SEQ ID NO: 849146
uggaauccaccuuucacag

SEQ ID NO: 849148 - RNA, 19 nt, Artificial Sequence
  Description of Artificial Sequence: Synthetic oligonucleotide
  Sense strand starting at position 2113 of SEQ ID NO: 588205
ugugcuguuagugugugaa

SEQ ID NO: 849149 - RNA, 19 nt, Artificial Sequence
  Description of Artificial Sequence: Synthetic oligonucleotide
  Antisense strand to SEQ ID NO: 849148
uucacacacuaacagcaca

SEQ ID NO: 849150 - RNA, 19 nt, Artificial Sequence
  Description of Artificial Sequence: Synthetic oligonucleotide
  Sense strand starting at position 2126 of SEQ ID NO: 588205
ugugaagagguuugaacaa

SEQ ID NO: 849151 - RNA, 19 nt, Artificial Sequence
  Description of Artificial Sequence: Synthetic oligonucleotide
  Antisense strand to SEQ ID NO: 849150
uuguucaaaccucuucaca

SEQ ID NO: 849152 - RNA, 19 nt, Artificial Sequence
  Description of Artificial Sequence: Synthetic oligonucleotide
  Sense strand starting at position 2176 of SEQ ID NO: 588205
aggucuucuagagggcaua

SEQ ID NO: 849153 - RNA, 19 nt, Artificial Sequence
  Description of Artificial Sequence: Synthetic oligonucleotide
  Antisense strand to SEQ ID NO: 849152
uaugcccucuagaagaccu

SEQ ID NO: 849154 - RNA, 19 nt, Artificial Sequence
  Description of Artificial Sequence: Synthetic oligonucleotide
  Sense strand starting at position 2260 of SEQ ID NO: 588205
uuacuauuucgucaucugu

SEQ ID NO: 849155 - RNA, 19 nt, Artificial Sequence
  Description of Artificial Sequence: Synthetic oligonucleotide
  Antisense strand to SEQ ID NO: 849154
acagaugacgaaauaguaa

SEQ ID NO: 849156 - RNA, 19 nt, Artificial Sequence
  Description of Artificial Sequence: Synthetic oligonucleotide
  Sense strand starting at position 2262 of SEQ ID NO: 588205
acuauuucgucaucuguaa

SEQ ID NO: 849157 - RNA, 19 nt, Artificial Sequence
  Description of Artificial Sequence: Synthetic oligonucleotide
  Antisense strand to SEQ ID NO: 849156
uuacagaugacgaaauagu

SEQ ID NO: 849158 - RNA, 19 nt, Artificial Sequence
  Description of Artificial Sequence: Synthetic oligonucleotide
  Sense strand starting at position 2311 of SEQ ID NO: 588205
auuaauguuggaggccaaa

SEQ ID NO: 849159 - RNA, 19 nt, Artificial Sequence
  Description of Artificial Sequence: Synthetic oligonucleotide
  Antisense strand to SEQ ID NO: 849158
uuuggccuccaacauuaau

SEQ ID NO: 849160 - RNA, 19 nt, Artificial Sequence
  Description of Artificial Sequence: Synthetic oligonucleotide
  Sense strand starting at position 2678 of SEQ ID NO: 588205
gaaguauaucagggaucuc

SEQ ID NO: 849161 - RNA, 19 nt, Artificial Sequence
  Description of Artificial Sequence: Synthetic oligonucleotide
  Antisense strand to SEQ ID NO: 849160
gagaucccugauauacuuc

SEQ ID NO: 849162 - RNA, 19 nt, Artificial Sequence
  Description of Artificial Sequence: Synthetic oligonucleotide
  Sense strand starting at position 2784 of SEQ ID NO: 588205
gaaguuacugaugggugua

SEQ ID NO: 849163 - RNA, 19 nt, Artificial Sequence
  Description of Artificial Sequence: Synthetic oligonucleotide
  Antisense strand to SEQ ID NO: 849162
uacacccaucaguaacuuc

SEQ ID NO: 849164 - RNA, 19 nt, Artificial Sequence
  Description of Artificial Sequence: Synthetic oligonucleotide
  Sense strand starting at position 2789 of SEQ ID NO: 588205
uacugauggguguauuauu

SEQ ID NO: 849165 - RNA, 19 nt, Artificial Sequence
  Description of Artificial Sequence: Synthetic oligonucleotide
  Antisense strand to SEQ ID NO: 849164
aauaauacacccaucagua

SEQ ID NO: 849166 - RNA, 19 nt, Artificial Sequence
  Description of Artificial Sequence: Synthetic oligonucleotide
  Sense strand starting at position 2794 of SEQ ID NO: 588205
auggguguauuauuugcua

SEQ ID NO: 849167 - RNA, 19 nt, Artificial Sequence
  Description of Artificial Sequence: Synthetic oligonucleotide
  Antisense strand to SEQ ID NO: 849166
uagcaaauaauacacccau

SEQ ID NO: 849168 - RNA, 19 nt, Artificial Sequence
  Description of Artificial Sequence: Synthetic oligonucleotide
  Sense strand starting at position 2796 of SEQ ID NO: 588205
ggguguauuauuugcuaua

SEQ ID NO: 849169 - RNA, 19 nt, Artificial Sequence
  Description of Artificial Sequence: Synthetic oligonucleotide
  Antisense strand to SEQ ID NO: 849168
uauagcaaauaauacaccc

SEQ ID NO: 849170 - RNA, 19 nt, Artificial Sequence
  Description of Artificial Sequence: Synthetic oligonucleotide
  Sense strand starting at position 2797 of SEQ ID NO: 588205
gguguauuauuugcuauag

SEQ ID NO: 849171 - RNA, 19 nt, Artificial Sequence
  Description of Artificial Sequence: Synthetic oligonucleotide
  Antisense strand to SEQ ID NO: 849170
cuauagcaaauaauacacc

SEQ ID NO: 849172 - RNA, 19 nt, Artificial Sequence
  Description of Artificial Sequence: Synthetic oligonucleotide
  Sense strand starting at position 2917 of SEQ ID NO: 588205
ggccgagacccggacuaau

SEQ ID NO: 849173 - RNA, 19 nt, Artificial Sequence
  Description of Artificial Sequence: Synthetic oligonucleotide
  Antisense strand to SEQ ID NO: 849172
auuaguccgggucucggcc

SEQ ID NO: 849174 - RNA, 19 nt, Artificial Sequence
  Description of Artificial Sequence: Synthetic oligonucleotide
  Sense strand starting at position 3051 of SEQ ID NO: 588205
ugcaacauuggacauguua

SEQ ID NO: 849175 - RNA, 19 nt, Artificial Sequence
  Description of Artificial Sequence: Synthetic oligonucleotide
  Antisense strand to SEQ ID NO: 849174
uaacauguccaauguugca

SEQ ID NO: 849176 - RNA, 19 nt, Artificial Sequence
  Description of Artificial Sequence: Synthetic oligonucleotide
  Sense strand starting at position 3106 of SEQ ID NO: 588205
aguagaguugaucauagua

SEQ ID NO: 849177 - RNA, 19 nt, Artificial Sequence
  Description of Artificial Sequence: Synthetic oligonucleotide
  Antisense strand to SEQ ID NO: 849176
uacuaugaucaacucuacu

SEQ ID NO: 849178 - RNA, 19 nt, Artificial Sequence
  Description of Artificial Sequence: Synthetic oligonucleotide
  Sense strand starting at position 3288 of SEQ ID NO: 588205
uagugucuggcucagaaua

SEQ ID NO: 849179 - RNA, 19 nt, Artificial Sequence
  Description of Artificial Sequence: Synthetic oligonucleotide
  Antisense strand to SEQ ID NO: 849178
uauucugagccagacacua

SEQ ID NO: 849180 - RNA, 19 nt, Artificial Sequence
  Description of Artificial Sequence: Synthetic oligonucleotide
  Sense strand starting at position 3310 of SEQ ID NO: 588205
ggugaauaauucuuaguug

SEQ ID NO: 849181 - RNA, 19 nt, Artificial Sequence
  Description of Artificial Sequence: Synthetic oligonucleotide
  Antisense strand to SEQ ID NO: 849180
caacuaagaauuauucacc

SEQ ID NO: 849182 - RNA, 19 nt, Artificial Sequence
  Description of Artificial Sequence: Synthetic oligonucleotide
  Sense strand starting at position 3441 of SEQ ID NO: 588205
cagagaucaguuuggguua

SEQ ID NO: 849183 - RNA, 19 nt, Artificial Sequence
  Description of Artificial Sequence: Synthetic oligonucleotide
  Antisense strand to SEQ ID NO: 849182
uaacccaaacugaucucug

SEQ ID NO: 849184 - RNA, 19 nt, Artificial Sequence
  Description of Artificial Sequence: Synthetic oligonucleotide
  Sense strand starting at position 3446 of SEQ ID NO: 588205
aucaguuuggguuagguau

SEQ ID NO: 849185 - RNA, 19 nt, Artificial Sequence
  Description of Artificial Sequence: Synthetic oligonucleotide
  Antisense strand to SEQ ID NO: 849184
auaccuaacccaaacugau

SEQ ID NO: 849186 - RNA, 19 nt, Artificial Sequence
  Description of Artificial Sequence: Synthetic oligonucleotide
  Sense strand starting at position 3452 of SEQ ID NO: 588205
uuggguuagguauggagau

SEQ ID NO: 849187 - RNA, 19 nt, Artificial Sequence
  Description of Artificial Sequence: Synthetic oligonucleotide
  Antisense strand to SEQ ID NO: 849186
aucuccauaccuaacccaa

SEQ ID NO: 849188 - RNA, 19 nt, Artificial Sequence
  Description of Artificial Sequence: Synthetic oligonucleotide
  Sense strand starting at position 3654 of SEQ ID NO: 588205
ggaaauucguauucuuaga

SEQ ID NO: 849189 - RNA, 19 nt, Artificial Sequence
  Description of Artificial Sequence: Synthetic oligonucleotide
  Antisense strand to SEQ ID NO: 849188
ucuaagaauacgaauuucc

SEQ ID NO: 849190 - RNA, 19 nt, Artificial Sequence
  Description of Artificial Sequence: Synthetic oligonucleotide
  Sense strand starting at position 322 of SEQ ID NO: 588206
gccagcgcgucuugaugua

SEQ ID NO: 849191 - RNA, 19 nt, Artificial Sequence
  Description of Artificial Sequence: Synthetic oligonucleotide
  Antisense strand to SEQ ID NO: 849190
uacaucaagacgcgcuggc

SEQ ID NO: 849192 - RNA, 19 nt, Artificial Sequence
  Description of Artificial Sequence: Synthetic oligonucleotide
  Sense strand starting at position 331 of SEQ ID NO: 588206
ucuugauguacacgucgaa

SEQ ID NO: 849193 - RNA, 19 nt, Artificial Sequence
  Description of Artificial Sequence: Synthetic oligonucleotide
  Antisense strand to SEQ ID NO: 849192
uucgacguguacaucaaga

SEQ ID NO: 849194 - RNA, 19 nt, Artificial Sequence
  Description of Artificial Sequence: Synthetic oligonucleotide
  Sense strand starting at position 334 of SEQ ID NO: 588206
ugauguacacgucgaaguu

SEQ ID NO: 849195 - RNA, 19 nt, Artificial Sequence
  Description of Artificial Sequence: Synthetic oligonucleotide
  Antisense strand to SEQ ID NO: 849194
aacuucgacguguacauca

SEQ ID NO: 849196 - RNA, 19 nt, Artificial Sequence
  Description of Artificial Sequence: Synthetic oligonucleotide
  Sense strand starting at position 343 of SEQ ID NO: 588206
cgucgaaguuguuguacuu

SEQ ID NO: 849197 - RNA, 19 nt, Artificial Sequence
  Description of Artificial Sequence: Synthetic oligonucleotide
  Antisense strand to SEQ ID NO: 849196
aaguacaacaacuucgacg

SEQ ID NO: 849198 - RNA, 19 nt, Artificial Sequence
  Description of Artificial Sequence: Synthetic oligonucleotide
  Sense strand starting at position 652 of SEQ ID NO: 588206
aggcaaucagcuggcgaaa

SEQ ID NO: 849199 - RNA, 19 nt, Artificial Sequence
  Description of Artificial Sequence: Synthetic oligonucleotide
  Antisense strand to SEQ ID NO: 849198
uuucgccagcugauugccu

SEQ ID NO: 849200 - RNA, 19 nt, Artificial Sequence
  Description of Artificial Sequence: Synthetic oligonucleotide
  Sense strand starting at position 654 of SEQ ID NO: 588206
gcaaucagcuggcgaaagu

SEQ ID NO: 849201 - RNA, 19 nt, Artificial Sequence
  Description of Artificial Sequence: Synthetic oligonucleotide
  Antisense strand to SEQ ID NO: 849200
acuuucgccagcugauugc

SEQ ID NO: 849202 - RNA, 19 nt, Artificial Sequence
  Description of Artificial Sequence: Synthetic oligonucleotide
  Sense strand starting at position 796 of SEQ ID NO: 588206
agccaaagugcuuguucua

SEQ ID NO: 849203 - RNA, 19 nt, Artificial Sequence
  Description of Artificial Sequence: Synthetic oligonucleotide
  Antisense strand to SEQ ID NO: 849202
uagaacaagcacuuuggcu

SEQ ID NO: 849204 - RNA, 19 nt, Artificial Sequence
  Description of Artificial Sequence: Synthetic oligonucleotide
  Sense strand starting at position 867 of SEQ ID NO: 588206
ggaaguggucaaugccaaa

SEQ ID NO: 849205 - RNA, 19 nt, Artificial Sequence
  Description of Artificial Sequence: Synthetic oligonucleotide
  Antisense strand to SEQ ID NO: 849204
uuuggcauugaccacuucc

SEQ ID NO: 849206 - RNA, 19 nt, Artificial Sequence
  Description of Artificial Sequence: Synthetic oligonucleotide
  Sense strand starting at position 1424 of SEQ ID NO: 588206
gccguuuauaccuugccga

SEQ ID NO: 849207 - RNA, 19 nt, Artificial Sequence
  Description of Artificial Sequence: Synthetic oligonucleotide
  Antisense strand to SEQ ID NO: 849206
ucggcaagguauaaacggc

SEQ ID NO: 849208 - RNA, 19 nt, Artificial Sequence
  Description of Artificial Sequence: Synthetic oligonucleotide
  Sense strand starting at position 1425 of SEQ ID NO: 588206
ccguuuauaccuugccgaa

SEQ ID NO: 849209 - RNA, 19 nt, Artificial Sequence
  Description of Artificial Sequence: Synthetic oligonucleotide
  Antisense strand to SEQ ID NO: 849208
uucggcaagguauaaacgg

SEQ ID NO: 849210 - RNA, 19 nt, Artificial Sequence
  Description of Artificial Sequence: Synthetic oligonucleotide
  Sense strand starting at position 1427 of SEQ ID NO: 588206
guuuauaccuugccgaaau

SEQ ID NO: 849211 - RNA, 19 nt, Artificial Sequence
  Description of Artificial Sequence: Synthetic oligonucleotide
  Antisense strand to SEQ ID NO: 849210
auuucggcaagguauaaac

SEQ ID NO: 849212 - RNA, 19 nt, Artificial Sequence
  Description of Artificial Sequence: Synthetic oligonucleotide
  Sense strand starting at position 1428 of SEQ ID NO: 588206
uuuauaccuugccgaaaua

SEQ ID NO: 849213 - RNA, 19 nt, Artificial Sequence
  Description of Artificial Sequence: Synthetic oligonucleotide
  Antisense strand to SEQ ID NO: 849212
uauuucggcaagguauaaa

SEQ ID NO: 849214 - RNA, 19 nt, Artificial Sequence
  Description of Artificial Sequence: Synthetic oligonucleotide
  Sense strand starting at position 1429 of SEQ ID NO: 588206
uuauaccuugccgaaauaa

SEQ ID NO: 849215 - RNA, 19 nt, Artificial Sequence
  Description of Artificial Sequence: Synthetic oligonucleotide
  Antisense strand to SEQ ID NO: 849214
uuauuucggcaagguauaa

SEQ ID NO: 849216 - RNA, 19 nt, Artificial Sequence
  Description of Artificial Sequence: Synthetic oligonucleotide
  Sense strand starting at position 1438 of SEQ ID NO: 588206
gccgaaauaaucuguagac

SEQ ID NO: 849217 - RNA, 19 nt, Artificial Sequence
  Description of Artificial Sequence: Synthetic oligonucleotide
  Antisense strand to SEQ ID NO: 849216
gucuacagauuauuucggc

SEQ ID NO: 849218 - RNA, 19 nt, Artificial Sequence
  Description of Artificial Sequence: Synthetic oligonucleotide
  Sense strand starting at position 1464 of SEQ ID NO: 588206
acucaaaggucaggaaaua

SEQ ID NO: 849219 - RNA, 19 nt, Artificial Sequence
  Description of Artificial Sequence: Synthetic oligonucleotide
  Antisense strand to SEQ ID NO: 849218
uauuuccugaccuuugagu

SEQ ID NO: 849220 - RNA, 19 nt, Artificial Sequence
  Description of Artificial Sequence: Synthetic oligonucleotide
  Sense strand starting at position 1491 of SEQ ID NO: 588206
gcaggaaaguugguaacau

SEQ ID NO: 849221 - RNA, 19 nt, Artificial Sequence
  Description of Artificial Sequence: Synthetic oligonucleotide
  Antisense strand to SEQ ID NO: 849220
auguuaccaacuuuccugc

SEQ ID NO: 849222 - RNA, 19 nt, Artificial Sequence
  Description of Artificial Sequence: Synthetic oligonucleotide
  Sense strand starting at position 1492 of SEQ ID NO: 588206
caggaaaguugguaacauu

SEQ ID NO: 849223 - RNA, 19 nt, Artificial Sequence
  Description of Artificial Sequence: Synthetic oligonucleotide
  Antisense strand to SEQ ID NO: 849222
aauguuaccaacuuuccug

SEQ ID NO: 849224 - RNA, 19 nt, Artificial Sequence
  Description of Artificial Sequence: Synthetic oligonucleotide
  Sense strand starting at position 1495 of SEQ ID NO: 588206
gaaaguugguaacauuaca

SEQ ID NO: 849225 - RNA, 19 nt, Artificial Sequence
  Description of Artificial Sequence: Synthetic oligonucleotide
  Antisense strand to SEQ ID NO: 849224
uguaauguuaccaacuuuc

SEQ ID NO: 849226 - RNA, 19 nt, Artificial Sequence
  Description of Artificial Sequence: Synthetic oligonucleotide
  Sense strand starting at position 3417 of SEQ ID NO: 588206
gcaggaguucgaggaacau

SEQ ID NO: 849227 - RNA, 19 nt, Artificial Sequence
  Description of Artificial Sequence: Synthetic oligonucleotide
  Antisense strand to SEQ ID NO: 849226
auguuccucgaacuccugc

SEQ ID NO: 849228 - RNA, 19 nt, Artificial Sequence
  Description of Artificial Sequence: Synthetic oligonucleotide
  Sense strand starting at position 3429 of SEQ ID NO: 588206
ggaacaucuggacgagcaa

SEQ ID NO: 849229 - RNA, 19 nt, Artificial Sequence
  Description of Artificial Sequence: Synthetic oligonucleotide
  Antisense strand to SEQ ID NO: 849228
uugcucguccagauguucc

SEQ ID NO: 849230 - RNA, 19 nt, Artificial Sequence
  Description of Artificial Sequence: Synthetic oligonucleotide
  Sense strand starting at position 3501 of SEQ ID NO: 588206
gauggcuggcggcaaauau

SEQ ID NO: 849231 - RNA, 19 nt, Artificial Sequence
  Description of Artificial Sequence: Synthetic oligonucleotide
  Antisense strand to SEQ ID NO: 849230
auauuugccgccagccauc

SEQ ID NO: 849232 - RNA, 19 nt, Artificial Sequence
  Description of Artificial Sequence: Synthetic oligonucleotide
  Sense strand starting at position 3508 of SEQ ID NO: 588206
ggcggcaaauauuccgaaa

SEQ ID NO: 849233 - RNA, 19 nt, Artificial Sequence
  Description of Artificial Sequence: Synthetic oligonucleotide
  Antisense strand to SEQ ID NO: 849232
uuucggaauauuugccgcc

SEQ ID NO: 849234 - RNA, 19 nt, Artificial Sequence
  Description of Artificial Sequence: Synthetic oligonucleotide
  Sense strand starting at position 3510 of SEQ ID NO: 588206
cggcaaauauuccgaaaga

SEQ ID NO: 849235 - RNA, 19 nt, Artificial Sequence
  Description of Artificial Sequence: Synthetic oligonucleotide
  Antisense strand to SEQ ID NO: 849234
ucuuucggaauauuugccg

SEQ ID NO: 849236 - RNA, 19 nt, Artificial Sequence
  Description of Artificial Sequence: Synthetic oligonucleotide
  Sense strand starting at position 3511 of SEQ ID NO: 588206
ggcaaauauuccgaaagaa

SEQ ID NO: 849237 - RNA, 19 nt, Artificial Sequence
  Description of Artificial Sequence: Synthetic oligonucleotide
  Antisense strand to SEQ ID NO: 849236
uucuuucggaauauuugcc

SEQ ID NO: 849238 - RNA, 19 nt, Artificial Sequence
  Description of Artificial Sequence: Synthetic oligonucleotide
  Sense strand starting at position 3524 of SEQ ID NO: 588206
aaagaaacgugucaggcaa

SEQ ID NO: 849239 - RNA, 19 nt, Artificial Sequence
  Description of Artificial Sequence: Synthetic oligonucleotide
  Antisense strand to SEQ ID NO: 849238
uugccugacacguuucuuu

SEQ ID NO: 849240 - RNA, 19 nt, Artificial Sequence
  Description of Artificial Sequence: Synthetic oligonucleotide
  Sense strand starting at position 3528 of SEQ ID NO: 588206
aaacgugucaggcaagaag

SEQ ID NO: 849241 - RNA, 19 nt, Artificial Sequence
  Description of Artificial Sequence: Synthetic oligonucleotide
  Antisense strand to SEQ ID NO: 849240
cuucuugccugacacguuu

SEQ ID NO: 849242 - RNA, 19 nt, Artificial Sequence
  Description of Artificial Sequence: Synthetic oligonucleotide
  Sense strand starting at position 3693 of SEQ ID NO: 588206
ccucaauaguccuguuggu

SEQ ID NO: 849243 - RNA, 19 nt, Artificial Sequence
  Description of Artificial Sequence: Synthetic oligonucleotide
  Antisense strand to SEQ ID NO: 849242
accaacaggacuauugagg

SEQ ID NO: 849244 - RNA, 19 nt, Artificial Sequence
  Description of Artificial Sequence: Synthetic oligonucleotide
  Sense strand starting at position 3739 of SEQ ID NO: 588206
gaggcagauccacacguuu

SEQ ID NO: 849245 - RNA, 19 nt, Artificial Sequence
  Description of Artificial Sequence: Synthetic oligonucleotide
  Antisense strand to SEQ ID NO: 849244
aaacguguggaucugccuc

SEQ ID NO: 849246 - RNA, 19 nt, Artificial Sequence
  Description of Artificial Sequence: Synthetic oligonucleotide
  Sense strand starting at position 3741 of SEQ ID NO: 588206
ggcagauccacacguuuag

SEQ ID NO: 849247 - RNA, 19 nt, Artificial Sequence
  Description of Artificial Sequence: Synthetic oligonucleotide
  Antisense strand to SEQ ID NO: 849246
cuaaacguguggaucugcc

SEQ ID NO: 849248 - RNA, 19 nt, Artificial Sequence
  Description of Artificial Sequence: Synthetic oligonucleotide
  Sense strand starting at position 3745 of SEQ ID NO: 588206
gauccacacguuuagcuau

SEQ ID NO: 849249 - RNA, 19 nt, Artificial Sequence
  Description of Artificial Sequence: Synthetic oligonucleotide
  Antisense strand to SEQ ID NO: 849248
auagcuaaacguguggauc

SEQ ID NO: 849250 - RNA, 19 nt, Artificial Sequence
  Description of Artificial Sequence: Synthetic oligonucleotide
  Sense strand starting at position 3752 of SEQ ID NO: 588206
acguuuagcuauugagaua

SEQ ID NO: 849251 - RNA, 19 nt, Artificial Sequence
  Description of Artificial Sequence: Synthetic oligonucleotide
  Antisense strand to SEQ ID NO: 849250
uaucucaauagcuaaacgu

SEQ ID NO: 849252 - RNA, 19 nt, Artificial Sequence
  Description of Artificial Sequence: Synthetic oligonucleotide
  Sense strand starting at position 3753 of SEQ ID NO: 588206
cguuuagcuauugagauaa

SEQ ID NO: 849253 - RNA, 19 nt, Artificial Sequence
  Description of Artificial Sequence: Synthetic oligonucleotide
  Antisense strand to SEQ ID NO: 849252
uuaucucaauagcuaaacg

SEQ ID NO: 849254 - RNA, 19 nt, Artificial Sequence
  Description of Artificial Sequence: Synthetic oligonucleotide
  Sense strand starting at position 198 of SEQ ID NO: 588207
aggcaaucagcuggcgaaa

SEQ ID NO: 849255 - RNA, 19 nt, Artificial Sequence
  Description of Artificial Sequence: Synthetic oligonucleotide
  Antisense strand to SEQ ID NO: 849254
uuucgccagcugauugccu

SEQ ID NO: 849256 - RNA, 19 nt, Artificial Sequence
  Description of Artificial Sequence: Synthetic oligonucleotide
  Sense strand starting at position 200 of SEQ ID NO: 588207
gcaaucagcuggcgaaagu

SEQ ID NO: 849257 - RNA, 19 nt, Artificial Sequence
  Description of Artificial Sequence: Synthetic oligonucleotide
  Antisense strand to SEQ ID NO: 849256
acuuucgccagcugauugc

SEQ ID NO: 849258 - RNA, 19 nt, Artificial Sequence
  Description of Artificial Sequence: Synthetic oligonucleotide
  Sense strand starting at position 342 of SEQ ID NO: 588207
agccaaagugcuuguucua

SEQ ID NO: 849259 - RNA, 19 nt, Artificial Sequence
  Description of Artificial Sequence: Synthetic oligonucleotide
  Antisense strand to SEQ ID NO: 849258
uagaacaagcacuuuggcu

SEQ ID NO: 849260 - RNA, 19 nt, Artificial Sequence
  Description of Artificial Sequence: Synthetic oligonucleotide
  Sense strand starting at position 413 of SEQ ID NO: 588207
ggaaguggucaaugccaaa

SEQ ID NO: 849261 - RNA, 19 nt, Artificial Sequence
  Description of Artificial Sequence: Synthetic oligonucleotide
  Antisense strand to SEQ ID NO: 849260
uuuggcauugaccacuucc

SEQ ID NO: 849262 - RNA, 19 nt, Artificial Sequence
  Description of Artificial Sequence: Synthetic oligonucleotide
  Sense strand starting at position 970 of SEQ ID NO: 588207
gccguuuauaccuugccga

SEQ ID NO: 849263 - RNA, 19 nt, Artificial Sequence
  Description of Artificial Sequence: Synthetic oligonucleotide
  Antisense strand to SEQ ID NO: 849262
ucggcaagguauaaacggc

SEQ ID NO: 849264 - RNA, 19 nt, Artificial Sequence
  Description of Artificial Sequence: Synthetic oligonucleotide
  Sense strand starting at position 971 of SEQ ID NO: 588207
ccguuuauaccuugccgaa

SEQ ID NO: 849265 - RNA, 19 nt, Artificial Sequence
  Description of Artificial Sequence: Synthetic oligonucleotide
  Antisense strand to SEQ ID NO: 849264
uucggcaagguauaaacgg

SEQ ID NO: 849266 - RNA, 19 nt, Artificial Sequence
  Description of Artificial Sequence: Synthetic oligonucleotide
  Sense strand starting at position 973 of SEQ ID NO: 588207
guuuauaccuugccgaaau

SEQ ID NO: 849267 - RNA, 19 nt, Artificial Sequence
  Description of Artificial Sequence: Synthetic oligonucleotide
  Antisense strand to SEQ ID NO: 849266
auuucggcaagguauaaac

SEQ ID NO: 849268 - RNA, 19 nt, Artificial Sequence
  Description of Artificial Sequence: Synthetic oligonucleotide
  Sense strand starting at position 974 of SEQ ID NO: 588207
uuuauaccuugccgaaaua

SEQ ID NO: 849269 - RNA, 19 nt, Artificial Sequence
  Description of Artificial Sequence: Synthetic oligonucleotide
  Antisense strand to SEQ ID NO: 849268
uauuucggcaagguauaaa

SEQ ID NO: 849270 - RNA, 19 nt, Artificial Sequence
  Description of Artificial Sequence: Synthetic oligonucleotide
  Sense strand starting at position 975 of SEQ ID NO: 588207
uuauaccuugccgaaauaa

SEQ ID NO: 849271 - RNA, 19 nt, Artificial Sequence
  Description of Artificial Sequence: Synthetic oligonucleotide
  Antisense strand to SEQ ID NO: 849270
uuauuucggcaagguauaa

SEQ ID NO: 849272 - RNA, 19 nt, Artificial Sequence
  Description of Artificial Sequence: Synthetic oligonucleotide
  Sense strand starting at position 984 of SEQ ID NO: 588207
gccgaaauaaucuguagac

SEQ ID NO: 849273 - RNA, 19 nt, Artificial Sequence
  Description of Artificial Sequence: Synthetic oligonucleotide
  Antisense strand to SEQ ID NO: 849272
gucuacagauuauuucggc

SEQ ID NO: 849274 - RNA, 19 nt, Artificial Sequence
  Description of Artificial Sequence: Synthetic oligonucleotide
  Sense strand starting at position 1010 of SEQ ID NO: 588207
acucaaaggucaggaaaua

SEQ ID NO: 849275 - RNA, 19 nt, Artificial Sequence
  Description of Artificial Sequence: Synthetic oligonucleotide
  Antisense strand to SEQ ID NO: 849274
uauuuccugaccuuugagu

SEQ ID NO: 849276 - RNA, 19 nt, Artificial Sequence
  Description of Artificial Sequence: Synthetic oligonucleotide
  Sense strand starting at position 1037 of SEQ ID NO: 588207
gcaggaaaguugguaacau

SEQ ID NO: 849277 - RNA, 19 nt, Artificial Sequence
  Description of Artificial Sequence: Synthetic oligonucleotide
  Antisense strand to SEQ ID NO: 849276
auguuaccaacuuuccugc

SEQ ID NO: 849278 - RNA, 19 nt, Artificial Sequence
  Description of Artificial Sequence: Synthetic oligonucleotide
  Sense strand starting at position 1038 of SEQ ID NO: 588207
caggaaaguugguaacauu

SEQ ID NO: 849279 - RNA, 19 nt, Artificial Sequence
  Description of Artificial Sequence: Synthetic oligonucleotide
  Antisense strand to SEQ ID NO: 849278
aauguuaccaacuuuccug

SEQ ID NO: 849280 - RNA, 19 nt, Artificial Sequence
  Description of Artificial Sequence: Synthetic oligonucleotide
  Sense strand starting at position 1041 of SEQ ID NO: 588207
gaaaguugguaacauuaca

SEQ ID NO: 849281 - RNA, 19 nt, Artificial Sequence
  Description of Artificial Sequence: Synthetic oligonucleotide
  Antisense strand to SEQ ID NO: 849280
uguaauguuaccaacuuuc

SEQ ID NO: 849282 - RNA, 19 nt, Artificial Sequence
  Description of Artificial Sequence: Synthetic oligonucleotide
  Sense strand starting at position 2963 of SEQ ID NO: 588207
gcaggaguucgaggaacau

SEQ ID NO: 849283 - RNA, 19 nt, Artificial Sequence
  Description of Artificial Sequence: Synthetic oligonucleotide
  Antisense strand to SEQ ID NO: 849282
auguuccucgaacuccugc

SEQ ID NO: 849284 - RNA, 19 nt, Artificial Sequence
  Description of Artificial Sequence: Synthetic oligonucleotide
  Sense strand starting at position 2975 of SEQ ID NO: 588207
ggaacaucuggacgagcaa

SEQ ID NO: 849285 - RNA, 19 nt, Artificial Sequence
  Description of Artificial Sequence: Synthetic oligonucleotide
  Antisense strand to SEQ ID NO: 849284
uugcucguccagauguucc

SEQ ID NO: 849286 - RNA, 19 nt, Artificial Sequence
  Description of Artificial Sequence: Synthetic oligonucleotide
  Sense strand starting at position 3047 of SEQ ID NO: 588207
gauggcuggcggcaaauau

SEQ ID NO: 849287 - RNA, 19 nt, Artificial Sequence
  Description of Artificial Sequence: Synthetic oligonucleotide
  Antisense strand to SEQ ID NO: 849286
auauuugccgccagccauc

SEQ ID NO: 849288 - RNA, 19 nt, Artificial Sequence
  Description of Artificial Sequence: Synthetic oligonucleotide
  Sense strand starting at position 3054 of SEQ ID NO: 588207
ggcggcaaauauuccgaaa

SEQ ID NO: 849289 - RNA, 19 nt, Artificial Sequence
  Description of Artificial Sequence: Synthetic oligonucleotide
  Antisense strand to SEQ ID NO: 849288
uuucggaauauuugccgcc

SEQ ID NO: 849290 - RNA, 19 nt, Artificial Sequence
  Description of Artificial Sequence: Synthetic oligonucleotide
  Sense strand starting at position 3056 of SEQ ID NO: 588207
cggcaaauauuccgaaaga

SEQ ID NO: 849291 - RNA, 19 nt, Artificial Sequence
  Description of Artificial Sequence: Synthetic oligonucleotide
  Antisense strand to SEQ ID NO: 849290
ucuuucggaauauuugccg

SEQ ID NO: 849292 - RNA, 19 nt, Artificial Sequence
  Description of Artificial Sequence: Synthetic oligonucleotide
  Sense strand starting at position 3057 of SEQ ID NO: 588207
ggcaaauauuccgaaagaa

SEQ ID NO: 849293 - RNA, 19 nt, Artificial Sequence
  Description of Artificial Sequence: Synthetic oligonucleotide
  Antisense strand to SEQ ID NO: 849292
uucuuucggaauauuugcc

SEQ ID NO: 849294 - RNA, 19 nt, Artificial Sequence
  Description of Artificial Sequence: Synthetic oligonucleotide
  Sense strand starting at position 3070 of SEQ ID NO: 588207
aaagaaacgugucaggcaa

SEQ ID NO: 849295 - RNA, 19 nt, Artificial Sequence
  Description of Artificial Sequence: Synthetic oligonucleotide
  Antisense strand to SEQ ID NO: 849294
uugccugacacguuucuuu

SEQ ID NO: 849296 - RNA, 19 nt, Artificial Sequence
  Description of Artificial Sequence: Synthetic oligonucleotide
  Sense strand starting at position 3074 of SEQ ID NO: 588207
aaacgugucaggcaagaag

SEQ ID NO: 849297 - RNA, 19 nt, Artificial Sequence
  Description of Artificial Sequence: Synthetic oligonucleotide
  Antisense strand to SEQ ID NO: 849296
cuucuugccugacacguuu

SEQ ID NO: 849298 - RNA, 19 nt, Artificial Sequence
  Description of Artificial Sequence: Synthetic oligonucleotide
  Sense strand starting at position 3239 of SEQ ID NO: 588207
ccucaauaguccuguuggu

SEQ ID NO: 849299 - RNA, 19 nt, Artificial Sequence
  Description of Artificial Sequence: Synthetic oligonucleotide
  Antisense strand to SEQ ID NO: 849298
accaacaggacuauugagg

SEQ ID NO: 849300 - RNA, 19 nt, Artificial Sequence
  Description of Artificial Sequence: Synthetic oligonucleotide
  Sense strand starting at position 3285 of SEQ ID NO: 588207
gaggcagauccacacguuu

SEQ ID NO: 849301 - RNA, 19 nt, Artificial Sequence
  Description of Artificial Sequence: Synthetic oligonucleotide
  Antisense strand to SEQ ID NO: 849300
aaacguguggaucugccuc

SEQ ID NO: 849302 - RNA, 19 nt, Artificial Sequence
  Description of Artificial Sequence: Synthetic oligonucleotide
  Sense strand starting at position 3287 of SEQ ID NO: 588207
ggcagauccacacguuuag

SEQ ID NO: 849303 - RNA, 19 nt, Artificial Sequence
  Description of Artificial Sequence: Synthetic oligonucleotide
  Antisense strand to SEQ ID NO: 849302
cuaaacguguggaucugcc

SEQ ID NO: 849304 - RNA, 19 nt, Artificial Sequence
  Description of Artificial Sequence: Synthetic oligonucleotide
  Sense strand starting at position 3291 of SEQ ID NO: 588207
gauccacacguuuagcuau

SEQ ID NO: 849305 - RNA, 19 nt, Artificial Sequence
  Description of Artificial Sequence: Synthetic oligonucleotide
  Antisense strand to SEQ ID NO: 849304
auagcuaaacguguggauc

SEQ ID NO: 849306 - RNA, 19 nt, Artificial Sequence
  Description of Artificial Sequence: Synthetic oligonucleotide
  Sense strand starting at position 3298 of SEQ ID NO: 588207
acguuuagcuauugagaua

SEQ ID NO: 849307 - RNA, 19 nt, Artificial Sequence
  Description of Artificial Sequence: Synthetic oligonucleotide
  Antisense strand to SEQ ID NO: 849306
uaucucaauagcuaaacgu

SEQ ID NO: 849308 - RNA, 19 nt, Artificial Sequence
  Description of Artificial Sequence: Synthetic oligonucleotide
  Sense strand starting at position 3299 of SEQ ID NO: 588207
cguuuagcuauugagauaa

SEQ ID NO: 849309 - RNA, 19 nt, Artificial Sequence
  Description of Artificial Sequence: Synthetic oligonucleotide
  Antisense strand to SEQ ID NO: 849308
uuaucucaauagcuaaacg

SEQ ID NO: 849310 - RNA, 19 nt, Artificial Sequence
  Description of Artificial Sequence: Synthetic oligonucleotide
  Sense strand starting at position 3664 of SEQ ID NO: 588207
gucgcauguccauggauca

SEQ ID NO: 849311 - RNA, 19 nt, Artificial Sequence
  Description of Artificial Sequence: Synthetic oligonucleotide
  Antisense strand to SEQ ID NO: 849310
ugauccauggacaugcgac

SEQ ID NO: 849312 - RNA, 19 nt, Artificial Sequence
  Description of Artificial Sequence: Synthetic oligonucleotide
  Sense strand starting at position 3787 of SEQ ID NO: 588207
ugacuccagcucuggauua

SEQ ID NO: 849313 - RNA, 19 nt, Artificial Sequence
  Description of Artificial Sequence: Synthetic oligonucleotide
  Antisense strand to SEQ ID NO: 849312
uaauccagagcuggaguca

SEQ ID NO: 849314 - RNA, 19 nt, Artificial Sequence
  Description of Artificial Sequence: Synthetic oligonucleotide
  Sense strand starting at position 3789 of SEQ ID NO: 588207
acuccagcucuggauuaga

SEQ ID NO: 849315 - RNA, 19 nt, Artificial Sequence
  Description of Artificial Sequence: Synthetic oligonucleotide
  Antisense strand to SEQ ID NO: 849314
ucuaauccagagcuggagu

SEQ ID NO: 849316 - RNA, 19 nt, Artificial Sequence
  Description of Artificial Sequence: Synthetic oligonucleotide
  Sense strand starting at position 7 of SEQ ID NO: 588208
uuuacaguaccagaaaguu

SEQ ID NO: 849317 - RNA, 19 nt, Artificial Sequence
  Description of Artificial Sequence: Synthetic oligonucleotide
  Antisense strand to SEQ ID NO: 849316
aacuuucugguacuguaaa

SEQ ID NO: 849318 - RNA, 19 nt, Artificial Sequence
  Description of Artificial Sequence: Synthetic oligonucleotide
  Sense strand starting at position 103 of SEQ ID NO: 588208
guuccaaguuucucagaca

SEQ ID NO: 849319 - RNA, 19 nt, Artificial Sequence
  Description of Artificial Sequence: Synthetic oligonucleotide
  Antisense strand to SEQ ID NO: 849318
ugucugagaaacuuggaac

SEQ ID NO: 849320 - RNA, 19 nt, Artificial Sequence
  Description of Artificial Sequence: Synthetic oligonucleotide
  Sense strand starting at position 135 of SEQ ID NO: 588208
ccuaguccuccugggaacu

SEQ ID NO: 849321 - RNA, 19 nt, Artificial Sequence
  Description of Artificial Sequence: Synthetic oligonucleotide
  Antisense strand to SEQ ID NO: 849320
aguucccaggaggacuagg

SEQ ID NO: 849322 - RNA, 19 nt, Artificial Sequence
  Description of Artificial Sequence: Synthetic oligonucleotide
  Sense strand starting at position 136 of SEQ ID NO: 588208
cuaguccuccugggaacua

SEQ ID NO: 849323 - RNA, 19 nt, Artificial Sequence
  Description of Artificial Sequence: Synthetic oligonucleotide
  Antisense strand to SEQ ID NO: 849322
uaguucccaggaggacuag

SEQ ID NO: 849324 - RNA, 19 nt, Artificial Sequence
  Description of Artificial Sequence: Synthetic oligonucleotide
  Sense strand starting at position 148 of SEQ ID NO: 588208
ggaacuaucuaauuaacgu

SEQ ID NO: 849325 - RNA, 19 nt, Artificial Sequence
  Description of Artificial Sequence: Synthetic oligonucleotide
  Antisense strand to SEQ ID NO: 849324
acguuaauuagauaguucc

SEQ ID NO: 849326 - RNA, 19 nt, Artificial Sequence
  Description of Artificial Sequence: Synthetic oligonucleotide
  Sense strand starting at position 198 of SEQ ID NO: 588208
agaaguccuccuugguuua

SEQ ID NO: 849327 - RNA, 19 nt, Artificial Sequence
  Description of Artificial Sequence: Synthetic oligonucleotide
  Antisense strand to SEQ ID NO: 849326
uaaaccaaggaggacuucu

SEQ ID NO: 849328 - RNA, 19 nt, Artificial Sequence
  Description of Artificial Sequence: Synthetic oligonucleotide
  Sense strand starting at position 483 of SEQ ID NO: 588208
guauucugacuccagguua

SEQ ID NO: 849329 - RNA, 19 nt, Artificial Sequence
  Description of Artificial Sequence: Synthetic oligonucleotide
  Antisense strand to SEQ ID NO: 849328
uaaccuggagucagaauac

SEQ ID NO: 849330 - RNA, 19 nt, Artificial Sequence
  Description of Artificial Sequence: Synthetic oligonucleotide
  Sense strand starting at position 488 of SEQ ID NO: 588208
cugacuccagguuauuaau

SEQ ID NO: 849331 - RNA, 19 nt, Artificial Sequence
  Description of Artificial Sequence: Synthetic oligonucleotide
  Antisense strand to SEQ ID NO: 849330
auuaauaaccuggagucag

SEQ ID NO: 849332 - RNA, 19 nt, Artificial Sequence
  Description of Artificial Sequence: Synthetic oligonucleotide
  Sense strand starting at position 511 of SEQ ID NO: 588208
ccuauaugauagucuuguu

SEQ ID NO: 849333 - RNA, 19 nt, Artificial Sequence
  Description of Artificial Sequence: Synthetic oligonucleotide
  Antisense strand to SEQ ID NO: 849332
aacaagacuaucauauagg

SEQ ID NO: 849334 - RNA, 19 nt, Artificial Sequence
  Description of Artificial Sequence: Synthetic oligonucleotide
  Sense strand starting at position 559 of SEQ ID NO: 588208
uuucccaaagucugagaaa

SEQ ID NO: 849335 - RNA, 19 nt, Artificial Sequence
  Description of Artificial Sequence: Synthetic oligonucleotide
  Antisense strand to SEQ ID NO: 849334
uuucucagacuuugggaaa

SEQ ID NO: 849336 - RNA, 19 nt, Artificial Sequence
  Description of Artificial Sequence: Synthetic oligonucleotide
  Sense strand starting at position 676 of SEQ ID NO: 588208
cauggcaacuguuugaaua

SEQ ID NO: 849337 - RNA, 19 nt, Artificial Sequence
  Description of Artificial Sequence: Synthetic oligonucleotide
  Antisense strand to SEQ ID NO: 849336
uauucaaacaguugccaug

SEQ ID NO: 849338 - RNA, 19 nt, Artificial Sequence
  Description of Artificial Sequence: Synthetic oligonucleotide
  Sense strand starting at position 893 of SEQ ID NO: 588208
ugauuaccaucagucaagu

SEQ ID NO: 849339 - RNA, 19 nt, Artificial Sequence
  Description of Artificial Sequence: Synthetic oligonucleotide
  Antisense strand to SEQ ID NO: 849338
acuugacugaugguaauca

SEQ ID NO: 849340 - RNA, 19 nt, Artificial Sequence
  Description of Artificial Sequence: Synthetic oligonucleotide
  Sense strand starting at position 906 of SEQ ID NO: 588208
ucaagugaugcccaaguca

SEQ ID NO: 849341 - RNA, 19 nt, Artificial Sequence
  Description of Artificial Sequence: Synthetic oligonucleotide
  Antisense strand to SEQ ID NO: 849340
ugacuugggcaucacuuga

SEQ ID NO: 849342 - RNA, 19 nt, Artificial Sequence
  Description of Artificial Sequence: Synthetic oligonucleotide
  Sense strand starting at position 952 of SEQ ID NO: 588208
gugucaucucggagcugug

SEQ ID NO: 849343 - RNA, 19 nt, Artificial Sequence
  Description of Artificial Sequence: Synthetic oligonucleotide
  Antisense strand to SEQ ID NO: 849342
cacagcuccgagaugacac

SEQ ID NO: 849344 - RNA, 19 nt, Artificial Sequence
  Description of Artificial Sequence: Synthetic oligonucleotide
  Sense strand starting at position 980 of SEQ ID NO: 588208
ggucaugucccacagaaug

SEQ ID NO: 849345 - RNA, 19 nt, Artificial Sequence
  Description of Artificial Sequence: Synthetic oligonucleotide
  Antisense strand to SEQ ID NO: 849344
cauucugugggacaugacc

SEQ ID NO: 849346 - RNA, 19 nt, Artificial Sequence
  Description of Artificial Sequence: Synthetic oligonucleotide
  Sense strand starting at position 1051 of SEQ ID NO: 588208
cuagaagcuugggcugaaa

SEQ ID NO: 849347 - RNA, 19 nt, Artificial Sequence
  Description of Artificial Sequence: Synthetic oligonucleotide
  Antisense strand to SEQ ID NO: 849346
uuucagcccaagcuucuag

SEQ ID NO: 849348 - RNA, 19 nt, Artificial Sequence
  Description of Artificial Sequence: Synthetic oligonucleotide
  Sense strand starting at position 1053 of SEQ ID NO: 588208
agaagcuugggcugaaauu

SEQ ID NO: 849349 - RNA, 19 nt, Artificial Sequence
  Description of Artificial Sequence: Synthetic oligonucleotide
  Antisense strand to SEQ ID NO: 849348
aauuucagcccaagcuucu

SEQ ID NO: 849350 - RNA, 19 nt, Artificial Sequence
  Description of Artificial Sequence: Synthetic oligonucleotide
  Sense strand starting at position 1054 of SEQ ID NO: 588208
gaagcuugggcugaaauug

SEQ ID NO: 849351 - RNA, 19 nt, Artificial Sequence
  Description of Artificial Sequence: Synthetic oligonucleotide
  Antisense strand to SEQ ID NO: 849350
caauuucagcccaagcuuc

SEQ ID NO: 849352 - RNA, 19 nt, Artificial Sequence
  Description of Artificial Sequence: Synthetic oligonucleotide
  Sense strand starting at position 1428 of SEQ ID NO: 588208
cccagcuucggucagagaa

SEQ ID NO: 849353 - RNA, 19 nt, Artificial Sequence
  Description of Artificial Sequence: Synthetic oligonucleotide
  Antisense strand to SEQ ID NO: 849352
uucucugaccgaagcuggg

SEQ ID NO: 849354 - RNA, 19 nt, Artificial Sequence
  Description of Artificial Sequence: Synthetic oligonucleotide
  Sense strand starting at position 1745 of SEQ ID NO: 588208
ucugguuaaucuuuaucag

SEQ ID NO: 849355 - RNA, 19 nt, Artificial Sequence
  Description of Artificial Sequence: Synthetic oligonucleotide
  Antisense strand to SEQ ID NO: 849354
cugauaaagauuaaccaga

SEQ ID NO: 849356 - RNA, 19 nt, Artificial Sequence
  Description of Artificial Sequence: Synthetic oligonucleotide
  Sense strand starting at position 1748 of SEQ ID NO: 588208
gguuaaucuuuaucagguc

SEQ ID NO: 849357 - RNA, 19 nt, Artificial Sequence
  Description of Artificial Sequence: Synthetic oligonucleotide
  Antisense strand to SEQ ID NO: 849356
gaccugauaaagauuaacc

SEQ ID NO: 849358 - RNA, 19 nt, Artificial Sequence
  Description of Artificial Sequence: Synthetic oligonucleotide
  Sense strand starting at position 1785 of SEQ ID NO: 588208
gcgaguacugugagagcaa

SEQ ID NO: 849359 - RNA, 19 nt, Artificial Sequence
  Description of Artificial Sequence: Synthetic oligonucleotide
  Antisense strand to SEQ ID NO: 849358
uugcucucacaguacucgc

SEQ ID NO: 849360 - RNA, 19 nt, Artificial Sequence
  Description of Artificial Sequence: Synthetic oligonucleotide
  Sense strand starting at position 1942 of SEQ ID NO: 588208
gcggaacuugucgcuguuu

SEQ ID NO: 849361 - RNA, 19 nt, Artificial Sequence
  Description of Artificial Sequence: Synthetic oligonucleotide
  Antisense strand to SEQ ID NO: 849360
aaacagcgacaaguuccgc

SEQ ID NO: 849362 - RNA, 19 nt, Artificial Sequence
  Description of Artificial Sequence: Synthetic oligonucleotide
  Sense strand starting at position 1992 of SEQ ID NO: 588208
agguuacgucugucuguuu

SEQ ID NO: 849363 - RNA, 19 nt, Artificial Sequence
  Description of Artificial Sequence: Synthetic oligonucleotide
  Antisense strand to SEQ ID NO: 849362
aaacagacagacguaaccu

SEQ ID NO: 849364 - RNA, 19 nt, Artificial Sequence
  Description of Artificial Sequence: Synthetic oligonucleotide
  Sense strand starting at position 2115 of SEQ ID NO: 588208
gcgugugcgaaccuuaaua

SEQ ID NO: 849365 - RNA, 19 nt, Artificial Sequence
  Description of Artificial Sequence: Synthetic oligonucleotide
  Antisense strand to SEQ ID NO: 849364
uauuaagguucgcacacgc

SEQ ID NO: 849366 - RNA, 19 nt, Artificial Sequence
  Description of Artificial Sequence: Synthetic oligonucleotide
  Sense strand starting at position 2251 of SEQ ID NO: 588208
accguaagacacuguuaag

SEQ ID NO: 849367 - RNA, 19 nt, Artificial Sequence
  Description of Artificial Sequence: Synthetic oligonucleotide
  Antisense strand to SEQ ID NO: 849366
cuuaacagugucuuacggu

SEQ ID NO: 849368 - RNA, 19 nt, Artificial Sequence
  Description of Artificial Sequence: Synthetic oligonucleotide
  Sense strand starting at position 2371 of SEQ ID NO: 588208
auguaagaauucucucaag

SEQ ID NO: 849369 - RNA, 19 nt, Artificial Sequence
  Description of Artificial Sequence: Synthetic oligonucleotide
  Antisense strand to SEQ ID NO: 849368
cuugagagaauucuuacau

SEQ ID NO: 849370 - RNA, 19 nt, Artificial Sequence
  Description of Artificial Sequence: Synthetic oligonucleotide
  Sense strand starting at position 2424 of SEQ ID NO: 588208
aguugcaauauguggauga

SEQ ID NO: 849371 - RNA, 19 nt, Artificial Sequence
  Description of Artificial Sequence: Synthetic oligonucleotide
  Antisense strand to SEQ ID NO: 849370
ucauccacauauugcaacu

SEQ ID NO: 849372 - RNA, 19 nt, Artificial Sequence
  Description of Artificial Sequence: Synthetic oligonucleotide
  Sense strand starting at position 2426 of SEQ ID NO: 588208
uugcaauauguggaugagu

SEQ ID NO: 849373 - RNA, 19 nt, Artificial Sequence
  Description of Artificial Sequence: Synthetic oligonucleotide
  Antisense strand to SEQ ID NO: 849372
acucauccacauauugcaa

SEQ ID NO: 849374 - RNA, 19 nt, Artificial Sequence
  Description of Artificial Sequence: Synthetic oligonucleotide
  Sense strand starting at position 2428 of SEQ ID NO: 588208
gcaauauguggaugaguug

SEQ ID NO: 849375 - RNA, 19 nt, Artificial Sequence
  Description of Artificial Sequence: Synthetic oligonucleotide
  Antisense strand to SEQ ID NO: 849374
caacucauccacauauugc

SEQ ID NO: 849376 - RNA, 19 nt, Artificial Sequence
  Description of Artificial Sequence: Synthetic oligonucleotide
  Sense strand starting at position 2553 of SEQ ID NO: 588208
acuacagaugaguagcauu

SEQ ID NO: 849377 - RNA, 19 nt, Artificial Sequence
  Description of Artificial Sequence: Synthetic oligonucleotide
  Antisense strand to SEQ ID NO: 849376
aaugcuacucaucuguagu

SEQ ID NO: 849378 - RNA, 19 nt, Artificial Sequence
  Description of Artificial Sequence: Synthetic oligonucleotide
  Sense strand starting at position 2623 of SEQ ID NO: 588208
uugaucugcaagugugaga

SEQ ID NO: 849379 - RNA, 19 nt, Artificial Sequence
  Description of Artificial Sequence: Synthetic oligonucleotide
  Antisense strand to SEQ ID NO: 849378
ucucacacuugcagaucaa

SEQ ID NO: 849380 - RNA, 19 nt, Artificial Sequence
  Description of Artificial Sequence: Synthetic oligonucleotide
  Sense strand starting at position 3080 of SEQ ID NO: 588208
cucaaagagcacuauguaa

SEQ ID NO: 849381 - RNA, 19 nt, Artificial Sequence
  Description of Artificial Sequence: Synthetic oligonucleotide
  Antisense strand to SEQ ID NO: 849380
uuacauagugcucuuugag

SEQ ID NO: 849382 - RNA, 19 nt, Artificial Sequence
  Description of Artificial Sequence: Synthetic oligonucleotide
  Sense strand starting at position 3157 of SEQ ID NO: 588208
ccaucugaucuacauguau

SEQ ID NO: 849383 - RNA, 19 nt, Artificial Sequence
  Description of Artificial Sequence: Synthetic oligonucleotide
  Antisense strand to SEQ ID NO: 849382
auacauguagaucagaugg

SEQ ID NO: 849384 - RNA, 19 nt, Artificial Sequence
  Description of Artificial Sequence: Synthetic oligonucleotide
  Sense strand starting at position 3304 of SEQ ID NO: 588208
ucacuuauacguggaauua

SEQ ID NO: 849385 - RNA, 19 nt, Artificial Sequence
  Description of Artificial Sequence: Synthetic oligonucleotide
  Antisense strand to SEQ ID NO: 849384
uaauuccacguauaaguga

SEQ ID NO: 849386 - RNA, 19 nt, Artificial Sequence
  Description of Artificial Sequence: Synthetic oligonucleotide
  Sense strand starting at position 3305 of SEQ ID NO: 588208
cacuuauacguggaauuaa

SEQ ID NO: 849387 - RNA, 19 nt, Artificial Sequence
  Description of Artificial Sequence: Synthetic oligonucleotide
  Antisense strand to SEQ ID NO: 849386
uuaauuccacguauaagug

SEQ ID NO: 849388 - RNA, 19 nt, Artificial Sequence
  Description of Artificial Sequence: Synthetic oligonucleotide
  Sense strand starting at position 3450 of SEQ ID NO: 588208
gaggacuagcguuaauaau

SEQ ID NO: 849389 - RNA, 19 nt, Artificial Sequence
  Description of Artificial Sequence: Synthetic oligonucleotide
  Antisense strand to SEQ ID NO: 849388
auuauuaacgcuaguccuc

SEQ ID NO: 849390 - RNA, 19 nt, Artificial Sequence
  Description of Artificial Sequence: Synthetic oligonucleotide
  Sense strand starting at position 3532 of SEQ ID NO: 588208
aguuuaauggcucacaguu

SEQ ID NO: 849391 - RNA, 19 nt, Artificial Sequence
  Description of Artificial Sequence: Synthetic oligonucleotide
  Antisense strand to SEQ ID NO: 849390
aacugugagccauuaaacu

SEQ ID NO: 849392 - RNA, 19 nt, Artificial Sequence
  Description of Artificial Sequence: Synthetic oligonucleotide
  Sense strand starting at position 3669 of SEQ ID NO: 588208
agagaaaugggaggugcua

SEQ ID NO: 849393 - RNA, 19 nt, Artificial Sequence
  Description of Artificial Sequence: Synthetic oligonucleotide
  Antisense strand to SEQ ID NO: 849392
uagcaccucccauuucucu

SEQ ID NO: 849394 - RNA, 19 nt, Artificial Sequence
  Description of Artificial Sequence: Synthetic oligonucleotide
  Sense strand starting at position 3684 of SEQ ID NO: 588208
gcuacauacguuuaaacaa

SEQ ID NO: 849395 - RNA, 19 nt, Artificial Sequence
  Description of Artificial Sequence: Synthetic oligonucleotide
  Antisense strand to SEQ ID NO: 849394
uuguuuaaacguauguagc

SEQ ID NO: 849396 - RNA, 19 nt, Artificial Sequence
  Description of Artificial Sequence: Synthetic oligonucleotide
  Sense strand starting at position 370 of SEQ ID NO: 588209
cagugaacuguuuacagua

SEQ ID NO: 849397 - RNA, 19 nt, Artificial Sequence
  Description of Artificial Sequence: Synthetic oligonucleotide
  Antisense strand to SEQ ID NO: 849396
uacuguaaacaguucacug

SEQ ID NO: 849398 - RNA, 19 nt, Artificial Sequence
  Description of Artificial Sequence: Synthetic oligonucleotide
  Sense strand starting at position 380 of SEQ ID NO: 588209
uuuacaguaccagaaaguu

SEQ ID NO: 849399 - RNA, 19 nt, Artificial Sequence
  Description of Artificial Sequence: Synthetic oligonucleotide
  Antisense strand to SEQ ID NO: 849398
aacuuucugguacuguaaa

SEQ ID NO: 849400 - RNA, 19 nt, Artificial Sequence
  Description of Artificial Sequence: Synthetic oligonucleotide
  Sense strand starting at position 476 of SEQ ID NO: 588209
guuccaaguuucucagaca

SEQ ID NO: 849401 - RNA, 19 nt, Artificial Sequence
  Description of Artificial Sequence: Synthetic oligonucleotide
  Antisense strand to SEQ ID NO: 849400
ugucugagaaacuuggaac

SEQ ID NO: 849402 - RNA, 19 nt, Artificial Sequence
  Description of Artificial Sequence: Synthetic oligonucleotide
  Sense strand starting at position 508 of SEQ ID NO: 588209
ccuaguccuccugggaacu

SEQ ID NO: 849403 - RNA, 19 nt, Artificial Sequence
  Description of Artificial Sequence: Synthetic oligonucleotide
  Antisense strand to SEQ ID NO: 849402
aguucccaggaggacuagg

SEQ ID NO: 849404 - RNA, 19 nt, Artificial Sequence
  Description of Artificial Sequence: Synthetic oligonucleotide
  Sense strand starting at position 509 of SEQ ID NO: 588209
cuaguccuccugggaacua

SEQ ID NO: 849405 - RNA, 19 nt, Artificial Sequence
  Description of Artificial Sequence: Synthetic oligonucleotide
  Antisense strand to SEQ ID NO: 849404
uaguucccaggaggacuag

SEQ ID NO: 849406 - RNA, 19 nt, Artificial Sequence
  Description of Artificial Sequence: Synthetic oligonucleotide
  Sense strand starting at position 521 of SEQ ID NO: 588209
ggaacuaucuaauuaacgu

SEQ ID NO: 849407 - RNA, 19 nt, Artificial Sequence
  Description of Artificial Sequence: Synthetic oligonucleotide
  Antisense strand to SEQ ID NO: 849406
acguuaauuagauaguucc

SEQ ID NO: 849408 - RNA, 19 nt, Artificial Sequence
  Description of Artificial Sequence: Synthetic oligonucleotide
  Sense strand starting at position 571 of SEQ ID NO: 588209
agaaguccuccuugguuua

SEQ ID NO: 849409 - RNA, 19 nt, Artificial Sequence
  Description of Artificial Sequence: Synthetic oligonucleotide
  Antisense strand to SEQ ID NO: 849408
uaaaccaaggaggacuucu

SEQ ID NO: 849410 - RNA, 19 nt, Artificial Sequence
  Description of Artificial Sequence: Synthetic oligonucleotide
  Sense strand starting at position 744 of SEQ ID NO: 588209
gauguacuaucagcaugua

SEQ ID NO: 849411 - RNA, 19 nt, Artificial Sequence
  Description of Artificial Sequence: Synthetic oligonucleotide
  Antisense strand to SEQ ID NO: 849410
uacaugcugauaguacauc

SEQ ID NO: 849412 - RNA, 19 nt, Artificial Sequence
  Description of Artificial Sequence: Synthetic oligonucleotide
  Sense strand starting at position 856 of SEQ ID NO: 588209
guauucugacuccagguua

SEQ ID NO: 849413 - RNA, 19 nt, Artificial Sequence
  Description of Artificial Sequence: Synthetic oligonucleotide
  Antisense strand to SEQ ID NO: 849412
uaaccuggagucagaauac

SEQ ID NO: 849414 - RNA, 19 nt, Artificial Sequence
  Description of Artificial Sequence: Synthetic oligonucleotide
  Sense strand starting at position 861 of SEQ ID NO: 588209
cugacuccagguuauuaau

SEQ ID NO: 849415 - RNA, 19 nt, Artificial Sequence
  Description of Artificial Sequence: Synthetic oligonucleotide
  Antisense strand to SEQ ID NO: 849414
auuaauaaccuggagucag

SEQ ID NO: 849416 - RNA, 19 nt, Artificial Sequence
  Description of Artificial Sequence: Synthetic oligonucleotide
  Sense strand starting at position 884 of SEQ ID NO: 588209
ccuauaugauagucuuguu

SEQ ID NO: 849417 - RNA, 19 nt, Artificial Sequence
  Description of Artificial Sequence: Synthetic oligonucleotide
  Antisense strand to SEQ ID NO: 849416
aacaagacuaucauauagg

SEQ ID NO: 849418 - RNA, 19 nt, Artificial Sequence
  Description of Artificial Sequence: Synthetic oligonucleotide
  Sense strand starting at position 932 of SEQ ID NO: 588209
uuucccaaagucugagaaa

SEQ ID NO: 849419 - RNA, 19 nt, Artificial Sequence
  Description of Artificial Sequence: Synthetic oligonucleotide
  Antisense strand to SEQ ID NO: 849418
uuucucagacuuugggaaa

SEQ ID NO: 849420 - RNA, 19 nt, Artificial Sequence
  Description of Artificial Sequence: Synthetic oligonucleotide
  Sense strand starting at position 1049 of SEQ ID NO: 588209
cauggcaacuguuugaaua

SEQ ID NO: 849421 - RNA, 19 nt, Artificial Sequence
  Description of Artificial Sequence: Synthetic oligonucleotide
  Antisense strand to SEQ ID NO: 849420
uauucaaacaguugccaug

SEQ ID NO: 849422 - RNA, 19 nt, Artificial Sequence
  Description of Artificial Sequence: Synthetic oligonucleotide
  Sense strand starting at position 1266 of SEQ ID NO: 588209
ugauuaccaucagucaagu

SEQ ID NO: 849423 - RNA, 19 nt, Artificial Sequence
  Description of Artificial Sequence: Synthetic oligonucleotide
  Antisense strand to SEQ ID NO: 849422
acuugacugaugguaauca

SEQ ID NO: 849424 - RNA, 19 nt, Artificial Sequence
  Description of Artificial Sequence: Synthetic oligonucleotide
  Sense strand starting at position 1279 of SEQ ID NO: 588209
ucaagugaugcccaaguca

SEQ ID NO: 849425 - RNA, 19 nt, Artificial Sequence
  Description of Artificial Sequence: Synthetic oligonucleotide
  Antisense strand to SEQ ID NO: 849424
ugacuugggcaucacuuga

SEQ ID NO: 849426 - RNA, 19 nt, Artificial Sequence
  Description of Artificial Sequence: Synthetic oligonucleotide
  Sense strand starting at position 1325 of SEQ ID NO: 588209
gugucaucucggagcugug

SEQ ID NO: 849427 - RNA, 19 nt, Artificial Sequence
  Description of Artificial Sequence: Synthetic oligonucleotide
  Antisense strand to SEQ ID NO: 849426
cacagcuccgagaugacac

SEQ ID NO: 849428 - RNA, 19 nt, Artificial Sequence
  Description of Artificial Sequence: Synthetic oligonucleotide
  Sense strand starting at position 1353 of SEQ ID NO: 588209
ggucaugucccacagaaug

SEQ ID NO: 849429 - RNA, 19 nt, Artificial Sequence
  Description of Artificial Sequence: Synthetic oligonucleotide
  Antisense strand to SEQ ID NO: 849428
cauucugugggacaugacc

SEQ ID NO: 849430 - RNA, 19 nt, Artificial Sequence
  Description of Artificial Sequence: Synthetic oligonucleotide
  Sense strand starting at position 1424 of SEQ ID NO: 588209
cuagaagcuugggcugaaa

SEQ ID NO: 849431 - RNA, 19 nt, Artificial Sequence
  Description of Artificial Sequence: Synthetic oligonucleotide
  Antisense strand to SEQ ID NO: 849430
uuucagcccaagcuucuag

SEQ ID NO: 849432 - RNA, 19 nt, Artificial Sequence
  Description of Artificial Sequence: Synthetic oligonucleotide
  Sense strand starting at position 1426 of SEQ ID NO: 588209
agaagcuugggcugaaauu

SEQ ID NO: 849433 - RNA, 19 nt, Artificial Sequence
  Description of Artificial Sequence: Synthetic oligonucleotide
  Antisense strand to SEQ ID NO: 849432
aauuucagcccaagcuucu

SEQ ID NO: 849434 - RNA, 19 nt, Artificial Sequence
  Description of Artificial Sequence: Synthetic oligonucleotide
  Sense strand starting at position 1427 of SEQ ID NO: 588209
gaagcuugggcugaaauug

SEQ ID NO: 849435 - RNA, 19 nt, Artificial Sequence
  Description of Artificial Sequence: Synthetic oligonucleotide
  Antisense strand to SEQ ID NO: 849434
caauuucagcccaagcuuc

SEQ ID NO: 849436 - RNA, 19 nt, Artificial Sequence
  Description of Artificial Sequence: Synthetic oligonucleotide
  Sense strand starting at position 1801 of SEQ ID NO: 588209
cccagcuucggucagagaa

SEQ ID NO: 849437 - RNA, 19 nt, Artificial Sequence
  Description of Artificial Sequence: Synthetic oligonucleotide
  Antisense strand to SEQ ID NO: 849436
uucucugaccgaagcuggg

SEQ ID NO: 849438 - RNA, 19 nt, Artificial Sequence
  Description of Artificial Sequence: Synthetic oligonucleotide
  Sense strand starting at position 2118 of SEQ ID NO: 588209
ucugguuaaucuuuaucag

SEQ ID NO: 849439 - RNA, 19 nt, Artificial Sequence
  Description of Artificial Sequence: Synthetic oligonucleotide
  Antisense strand to SEQ ID NO: 849438
cugauaaagauuaaccaga

SEQ ID NO: 849440 - RNA, 19 nt, Artificial Sequence
  Description of Artificial Sequence: Synthetic oligonucleotide
  Sense strand starting at position 2121 of SEQ ID NO: 588209
gguuaaucuuuaucagguc

SEQ ID NO: 849441 - RNA, 19 nt, Artificial Sequence
  Description of Artificial Sequence: Synthetic oligonucleotide
  Antisense strand to SEQ ID NO: 849440
gaccugauaaagauuaacc

SEQ ID NO: 849442 - RNA, 19 nt, Artificial Sequence
  Description of Artificial Sequence: Synthetic oligonucleotide
  Sense strand starting at position 2158 of SEQ ID NO: 588209
gcgaguacugugagagcaa

SEQ ID NO: 849443 - RNA, 19 nt, Artificial Sequence
  Description of Artificial Sequence: Synthetic oligonucleotide
  Antisense strand to SEQ ID NO: 849442
uugcucucacaguacucgc

SEQ ID NO: 849444 - RNA, 19 nt, Artificial Sequence
  Description of Artificial Sequence: Synthetic oligonucleotide
  Sense strand starting at position 2315 of SEQ ID NO: 588209
gcggaacuugucgcuguuu

SEQ ID NO: 849445 - RNA, 19 nt, Artificial Sequence
  Description of Artificial Sequence: Synthetic oligonucleotide
  Antisense strand to SEQ ID NO: 849444
aaacagcgacaaguuccgc

SEQ ID NO: 849446 - RNA, 19 nt, Artificial Sequence
  Description of Artificial Sequence: Synthetic oligonucleotide
  Sense strand starting at position 2365 of SEQ ID NO: 588209
agguuacgucugucuguuu

SEQ ID NO: 849447 - RNA, 19 nt, Artificial Sequence
  Description of Artificial Sequence: Synthetic oligonucleotide
  Antisense strand to SEQ ID NO: 849446
aaacagacagacguaaccu

SEQ ID NO: 849448 - RNA, 19 nt, Artificial Sequence
  Description of Artificial Sequence: Synthetic oligonucleotide
  Sense strand starting at position 2488 of SEQ ID NO: 588209
gcgugugcgaaccuuaaua

SEQ ID NO: 849449 - RNA, 19 nt, Artificial Sequence
  Description of Artificial Sequence: Synthetic oligonucleotide
  Antisense strand to SEQ ID NO: 849448
uauuaagguucgcacacgc

SEQ ID NO: 849450 - RNA, 19 nt, Artificial Sequence
  Description of Artificial Sequence: Synthetic oligonucleotide
  Sense strand starting at position 2624 of SEQ ID NO: 588209
accguaagacacuguuaag

SEQ ID NO: 849451 - RNA, 19 nt, Artificial Sequence
  Description of Artificial Sequence: Synthetic oligonucleotide
  Antisense strand to SEQ ID NO: 849450
cuuaacagugucuuacggu

SEQ ID NO: 849452 - RNA, 19 nt, Artificial Sequence
  Description of Artificial Sequence: Synthetic oligonucleotide
  Sense strand starting at position 2744 of SEQ ID NO: 588209
auguaagaauucucucaag

SEQ ID NO: 849453 - RNA, 19 nt, Artificial Sequence
  Description of Artificial Sequence: Synthetic oligonucleotide
  Antisense strand to SEQ ID NO: 849452
cuugagagaauucuuacau

SEQ ID NO: 849454 - RNA, 19 nt, Artificial Sequence
  Description of Artificial Sequence: Synthetic oligonucleotide
  Sense strand starting at position 2797 of SEQ ID NO: 588209
aguugcaauauguggauga

SEQ ID NO: 849455 - RNA, 19 nt, Artificial Sequence
  Description of Artificial Sequence: Synthetic oligonucleotide
  Antisense strand to SEQ ID NO: 849454
ucauccacauauugcaacu

SEQ ID NO: 849456 - RNA, 19 nt, Artificial Sequence
  Description of Artificial Sequence: Synthetic oligonucleotide
  Sense strand starting at position 2799 of SEQ ID NO: 588209
uugcaauauguggaugagu

SEQ ID NO: 849457 - RNA, 19 nt, Artificial Sequence
  Description of Artificial Sequence: Synthetic oligonucleotide
  Antisense strand to SEQ ID NO: 849456
acucauccacauauugcaa

SEQ ID NO: 849458 - RNA, 19 nt, Artificial Sequence
  Description of Artificial Sequence: Synthetic oligonucleotide
  Sense strand starting at position 2801 of SEQ ID NO: 588209
gcaauauguggaugaguug

SEQ ID NO: 849459 - RNA, 19 nt, Artificial Sequence
  Description of Artificial Sequence: Synthetic oligonucleotide
  Antisense strand to SEQ ID NO: 849458
caacucauccacauauugc

SEQ ID NO: 849460 - RNA, 19 nt, Artificial Sequence
  Description of Artificial Sequence: Synthetic oligonucleotide
  Sense strand starting at position 2926 of SEQ ID NO: 588209
acuacagaugaguagcauu

SEQ ID NO: 849461 - RNA, 19 nt, Artificial Sequence
  Description of Artificial Sequence: Synthetic oligonucleotide
  Antisense strand to SEQ ID NO: 849460
aaugcuacucaucuguagu

SEQ ID NO: 849462 - RNA, 19 nt, Artificial Sequence
  Description of Artificial Sequence: Synthetic oligonucleotide
  Sense strand starting at position 2996 of SEQ ID NO: 588209
uugaucugcaagugugaga

SEQ ID NO: 849463 - RNA, 19 nt, Artificial Sequence
  Description of Artificial Sequence: Synthetic oligonucleotide
  Antisense strand to SEQ ID NO: 849462
ucucacacuugcagaucaa

SEQ ID NO: 849464 - RNA, 19 nt, Artificial Sequence
  Description of Artificial Sequence: Synthetic oligonucleotide
  Sense strand starting at position 3453 of SEQ ID NO: 588209
cucaaagagcacuauguaa

SEQ ID NO: 849465 - RNA, 19 nt, Artificial Sequence
  Description of Artificial Sequence: Synthetic oligonucleotide
  Antisense strand to SEQ ID NO: 849464
uuacauagugcucuuugag

SEQ ID NO: 849466 - RNA, 19 nt, Artificial Sequence
  Description of Artificial Sequence: Synthetic oligonucleotide
  Sense strand starting at position 3530 of SEQ ID NO: 588209
ccaucugaucuacauguau

SEQ ID NO: 849467 - RNA, 19 nt, Artificial Sequence
  Description of Artificial Sequence: Synthetic oligonucleotide
  Antisense strand to SEQ ID NO: 849466
auacauguagaucagaugg

SEQ ID NO: 849468 - RNA, 19 nt, Artificial Sequence
  Description of Artificial Sequence: Synthetic oligonucleotide
  Sense strand starting at position 3677 of SEQ ID NO: 588209
ucacuuauacguggaauua

SEQ ID NO: 849469 - RNA, 19 nt, Artificial Sequence
  Description of Artificial Sequence: Synthetic oligonucleotide
  Antisense strand to SEQ ID NO: 849468
uaauuccacguauaaguga

SEQ ID NO: 849470 - RNA, 19 nt, Artificial Sequence
  Description of Artificial Sequence: Synthetic oligonucleotide
  Sense strand starting at position 3678 of SEQ ID NO: 588209
cacuuauacguggaauuaa

SEQ ID NO: 849471 - RNA, 19 nt, Artificial Sequence
  Description of Artificial Sequence: Synthetic oligonucleotide
  Antisense strand to SEQ ID NO: 849470
uuaauuccacguauaagug

SEQ ID NO: 849472 - RNA, 19 nt, Artificial Sequence
  Description of Artificial Sequence: Synthetic oligonucleotide
  Sense strand starting at position 3823 of SEQ ID NO: 588209
gaggacuagcguuaauaau

SEQ ID NO: 849473 - RNA, 19 nt, Artificial Sequence
  Description of Artificial Sequence: Synthetic oligonucleotide
  Antisense strand to SEQ ID NO: 849472
auuauuaacgcuaguccuc

SEQ ID NO: 849474 - RNA, 19 nt, Artificial Sequence
  Description of Artificial Sequence: Synthetic oligonucleotide
  Sense strand starting at position 3905 of SEQ ID NO: 588209
aguuuaauggcucacaguu

SEQ ID NO: 849475 - RNA, 19 nt, Artificial Sequence
  Description of Artificial Sequence: Synthetic oligonucleotide
  Antisense strand to SEQ ID NO: 849474
aacugugagccauuaaacu

SEQ ID NO: 849476 - RNA, 19 nt, Artificial Sequence
  Description of Artificial Sequence: Synthetic oligonucleotide
  Sense strand starting at position 330 of SEQ ID NO: 588210
ugccauaacuacucaggga

SEQ ID NO: 849477 - RNA, 19 nt, Artificial Sequence
  Description of Artificial Sequence: Synthetic oligonucleotide
  Antisense strand to SEQ ID NO: 849476
ucccugaguaguuauggca

SEQ ID NO: 849478 - RNA, 19 nt, Artificial Sequence
  Description of Artificial Sequence: Synthetic oligonucleotide
  Sense strand starting at position 497 of SEQ ID NO: 588210
ugcggauugcaacauuagu

SEQ ID NO: 849479 - RNA, 19 nt, Artificial Sequence
  Description of Artificial Sequence: Synthetic oligonucleotide
  Antisense strand to SEQ ID NO: 849478
acuaauguugcaauccgca

SEQ ID NO: 849480 - RNA, 19 nt, Artificial Sequence
  Description of Artificial Sequence: Synthetic oligonucleotide
  Sense strand starting at position 664 of SEQ ID NO: 588210
ggcauuaucuuggccugga

SEQ ID NO: 849481 - RNA, 19 nt, Artificial Sequence
  Description of Artificial Sequence: Synthetic oligonucleotide
  Antisense strand to SEQ ID NO: 849480
uccaggccaagauaaugcc

SEQ ID NO: 849482 - RNA, 19 nt, Artificial Sequence
  Description of Artificial Sequence: Synthetic oligonucleotide
  Sense strand starting at position 665 of SEQ ID NO: 588210
gcauuaucuuggccuggaa

SEQ ID NO: 849483 - RNA, 19 nt, Artificial Sequence
  Description of Artificial Sequence: Synthetic oligonucleotide
  Antisense strand to SEQ ID NO: 849482
uuccaggccaagauaaugc

SEQ ID NO: 849484 - RNA, 19 nt, Artificial Sequence
  Description of Artificial Sequence: Synthetic oligonucleotide
  Sense strand starting at position 667 of SEQ ID NO: 588210
auuaucuuggccuggaaau

SEQ ID NO: 849485 - RNA, 19 nt, Artificial Sequence
  Description of Artificial Sequence: Synthetic oligonucleotide
  Antisense strand to SEQ ID NO: 849484
auuuccaggccaagauaau

SEQ ID NO: 849486 - RNA, 19 nt, Artificial Sequence
  Description of Artificial Sequence: Synthetic oligonucleotide
  Sense strand starting at position 668 of SEQ ID NO: 588210
uuaucuuggccuggaaauc

SEQ ID NO: 849487 - RNA, 19 nt, Artificial Sequence
  Description of Artificial Sequence: Synthetic oligonucleotide
  Antisense strand to SEQ ID NO: 849486
gauuuccaggccaagauaa

SEQ ID NO: 849488 - RNA, 19 nt, Artificial Sequence
  Description of Artificial Sequence: Synthetic oligonucleotide
  Sense strand starting at position 753 of SEQ ID NO: 588210
agccuuauuugauaguaaa

SEQ ID NO: 849489 - RNA, 19 nt, Artificial Sequence
  Description of Artificial Sequence: Synthetic oligonucleotide
  Antisense strand to SEQ ID NO: 849488
uuuacuaucaaauaaggcu

SEQ ID NO: 849490 - RNA, 19 nt, Artificial Sequence
  Description of Artificial Sequence: Synthetic oligonucleotide
  Sense strand starting at position 805 of SEQ ID NO: 588210
gggauuuguuaacaaauua

SEQ ID NO: 849491 - RNA, 19 nt, Artificial Sequence
  Description of Artificial Sequence: Synthetic oligonucleotide
  Antisense strand to SEQ ID NO: 849490
uaauuuguuaacaaauccc

SEQ ID NO: 849492 - RNA, 19 nt, Artificial Sequence
  Description of Artificial Sequence: Synthetic oligonucleotide
  Sense strand starting at position 829 of SEQ ID NO: 588210
cacacaucugguggaauau

SEQ ID NO: 849493 - RNA, 19 nt, Artificial Sequence
  Description of Artificial Sequence: Synthetic oligonucleotide
  Antisense strand to SEQ ID NO: 849492
auauuccaccagaugugug

SEQ ID NO: 849494 - RNA, 19 nt, Artificial Sequence
  Description of Artificial Sequence: Synthetic oligonucleotide
  Sense strand starting at position 887 of SEQ ID NO: 588210
augggugaaugcccacaau

SEQ ID NO: 849495 - RNA, 19 nt, Artificial Sequence
  Description of Artificial Sequence: Synthetic oligonucleotide
  Antisense strand to SEQ ID NO: 849494
auugugggcauucacccau

SEQ ID NO: 849496 - RNA, 19 nt, Artificial Sequence
  Description of Artificial Sequence: Synthetic oligonucleotide
  Sense strand starting at position 890 of SEQ ID NO: 588210
ggugaaugcccacaauguc

SEQ ID NO: 849497 - RNA, 19 nt, Artificial Sequence
  Description of Artificial Sequence: Synthetic oligonucleotide
  Antisense strand to SEQ ID NO: 849496
gacauugugggcauucacc

SEQ ID NO: 849498 - RNA, 19 nt, Artificial Sequence
  Description of Artificial Sequence: Synthetic oligonucleotide
  Sense strand starting at position 904 of SEQ ID NO: 588210
augucauaaugaguugaaa

SEQ ID NO: 849499 - RNA, 19 nt, Artificial Sequence
  Description of Artificial Sequence: Synthetic oligonucleotide
  Antisense strand to SEQ ID NO: 849498
uuucaacucauuaugacau

SEQ ID NO: 849500 - RNA, 19 nt, Artificial Sequence
  Description of Artificial Sequence: Synthetic oligonucleotide
  Sense strand starting at position 1076 of SEQ ID NO: 588210
gggagaauuaugggugcuu

SEQ ID NO: 849501 - RNA, 19 nt, Artificial Sequence
  Description of Artificial Sequence: Synthetic oligonucleotide
  Antisense strand to SEQ ID NO: 849500
aagcacccauaauucuccc

SEQ ID NO: 849502 - RNA, 19 nt, Artificial Sequence
  Description of Artificial Sequence: Synthetic oligonucleotide
  Sense strand starting at position 1077 of SEQ ID NO: 588210
ggagaauuaugggugcuuu

SEQ ID NO: 849503 - RNA, 19 nt, Artificial Sequence
  Description of Artificial Sequence: Synthetic oligonucleotide
  Antisense strand to SEQ ID NO: 849502
aaagcacccauaauucucc

SEQ ID NO: 849504 - RNA, 19 nt, Artificial Sequence
  Description of Artificial Sequence: Synthetic oligonucleotide
  Sense strand starting at position 1131 of SEQ ID NO: 588210
acucuuaacgaucgauaug

SEQ ID NO: 849505 - RNA, 19 nt, Artificial Sequence
  Description of Artificial Sequence: Synthetic oligonucleotide
  Antisense strand to SEQ ID NO: 849504
cauaucgaucguuaagagu

SEQ ID NO: 849506 - RNA, 19 nt, Artificial Sequence
  Description of Artificial Sequence: Synthetic oligonucleotide
  Sense strand starting at position 1134 of SEQ ID NO: 588210
cuuaacgaucgauaugcau

SEQ ID NO: 849507 - RNA, 19 nt, Artificial Sequence
  Description of Artificial Sequence: Synthetic oligonucleotide
  Antisense strand to SEQ ID NO: 849506
augcauaucgaucguuaag

SEQ ID NO: 849508 - RNA, 19 nt, Artificial Sequence
  Description of Artificial Sequence: Synthetic oligonucleotide
  Sense strand starting at position 1200 of SEQ ID NO: 588210
ucuguaucucuggagcaca

SEQ ID NO: 849509 - RNA, 19 nt, Artificial Sequence
  Description of Artificial Sequence: Synthetic oligonucleotide
  Antisense strand to SEQ ID NO: 849508
ugugcuccagagauacaga

SEQ ID NO: 849510 - RNA, 19 nt, Artificial Sequence
  Description of Artificial Sequence: Synthetic oligonucleotide
  Sense strand starting at position 1238 of SEQ ID NO: 588210
agggcauguccugguuaaa

SEQ ID NO: 849511 - RNA, 19 nt, Artificial Sequence
  Description of Artificial Sequence: Synthetic oligonucleotide
  Antisense strand to SEQ ID NO: 849510
uuuaaccaggacaugcccu

SEQ ID NO: 849512 - RNA, 19 nt, Artificial Sequence
  Description of Artificial Sequence: Synthetic oligonucleotide
  Sense strand starting at position 1241 of SEQ ID NO: 588210
gcauguccugguuaaacau

SEQ ID NO: 849513 - RNA, 19 nt, Artificial Sequence
  Description of Artificial Sequence: Synthetic oligonucleotide
  Antisense strand to SEQ ID NO: 849512
auguuuaaccaggacaugc

SEQ ID NO: 849514 - RNA, 19 nt, Artificial Sequence
  Description of Artificial Sequence: Synthetic oligonucleotide
  Sense strand starting at position 1251 of SEQ ID NO: 588210
guuaaacauuugcaaagaa

SEQ ID NO: 849515 - RNA, 19 nt, Artificial Sequence
  Description of Artificial Sequence: Synthetic oligonucleotide
  Antisense strand to SEQ ID NO: 849514
uucuuugcaaauguuuaac

SEQ ID NO: 849516 - RNA, 19 nt, Artificial Sequence
  Description of Artificial Sequence: Synthetic oligonucleotide
  Sense strand starting at position 1497 of SEQ ID NO: 588210
aaugcauaagcugagugau

SEQ ID NO: 849517 - RNA, 19 nt, Artificial Sequence
  Description of Artificial Sequence: Synthetic oligonucleotide
  Antisense strand to SEQ ID NO: 849516
aucacucagcuuaugcauu

SEQ ID NO: 849518 - RNA, 19 nt, Artificial Sequence
  Description of Artificial Sequence: Synthetic oligonucleotide
  Sense strand starting at position 1713 of SEQ ID NO: 588210
aauuucugcguccgcagaa

SEQ ID NO: 849519 - RNA, 19 nt, Artificial Sequence
  Description of Artificial Sequence: Synthetic oligonucleotide
  Antisense strand to SEQ ID NO: 849518
uucugcggacgcagaaauu

SEQ ID NO: 849520 - RNA, 19 nt, Artificial Sequence
  Description of Artificial Sequence: Synthetic oligonucleotide
  Sense strand starting at position 1931 of SEQ ID NO: 588210
ugacaacggccgaguugua

SEQ ID NO: 849521 - RNA, 19 nt, Artificial Sequence
  Description of Artificial Sequence: Synthetic oligonucleotide
  Antisense strand to SEQ ID NO: 849520
uacaacucggccguuguca

SEQ ID NO: 849522 - RNA, 19 nt, Artificial Sequence
  Description of Artificial Sequence: Synthetic oligonucleotide
  Sense strand starting at position 2491 of SEQ ID NO: 588210
ugaccuagcguugaaagca

SEQ ID NO: 849523 - RNA, 19 nt, Artificial Sequence
  Description of Artificial Sequence: Synthetic oligonucleotide
  Antisense strand to SEQ ID NO: 849522
ugcuuucaacgcuagguca

SEQ ID NO: 849524 - RNA, 19 nt, Artificial Sequence
  Description of Artificial Sequence: Synthetic oligonucleotide
  Sense strand starting at position 2869 of SEQ ID NO: 588210
ucagcaaacgcuuaggaaa

SEQ ID NO: 849525 - RNA, 19 nt, Artificial Sequence
  Description of Artificial Sequence: Synthetic oligonucleotide
  Antisense strand to SEQ ID NO: 849524
uuuccuaagcguuugcuga

SEQ ID NO: 849526 - RNA, 19 nt, Artificial Sequence
  Description of Artificial Sequence: Synthetic oligonucleotide
  Sense strand starting at position 2963 of SEQ ID NO: 588210
gucaucccuuacuuugaga

SEQ ID NO: 849527 - RNA, 19 nt, Artificial Sequence
  Description of Artificial Sequence: Synthetic oligonucleotide
  Antisense strand to SEQ ID NO: 849526
ucucaaaguaagggaugac

SEQ ID NO: 849528 - RNA, 19 nt, Artificial Sequence
  Description of Artificial Sequence: Synthetic oligonucleotide
  Sense strand starting at position 3021 of SEQ ID NO: 588210
ggcaaagcaucaucucauu

SEQ ID NO: 849529 - RNA, 19 nt, Artificial Sequence
  Description of Artificial Sequence: Synthetic oligonucleotide
  Antisense strand to SEQ ID NO: 849528
aaugagaugaugcuuugcc

SEQ ID NO: 849530 - RNA, 19 nt, Artificial Sequence
  Description of Artificial Sequence: Synthetic oligonucleotide
  Sense strand starting at position 3048 of SEQ ID NO: 588210
ccagcaauccuuugaggua

SEQ ID NO: 849531 - RNA, 19 nt, Artificial Sequence
  Description of Artificial Sequence: Synthetic oligonucleotide
  Antisense strand to SEQ ID NO: 849530
uaccucaaaggauugcugg

SEQ ID NO: 849532 - RNA, 19 nt, Artificial Sequence
  Description of Artificial Sequence: Synthetic oligonucleotide
  Sense strand starting at position 3055 of SEQ ID NO: 588210
uccuuugagguagauuguu

SEQ ID NO: 849533 - RNA, 19 nt, Artificial Sequence
  Description of Artificial Sequence: Synthetic oligonucleotide
  Antisense strand to SEQ ID NO: 849532
aacaaucuaccucaaagga

SEQ ID NO: 849534 - RNA, 19 nt, Artificial Sequence
  Description of Artificial Sequence: Synthetic oligonucleotide
  Sense strand starting at position 3204 of SEQ ID NO: 588210
guaggagugcaguagaugu

SEQ ID NO: 849535 - RNA, 19 nt, Artificial Sequence
  Description of Artificial Sequence: Synthetic oligonucleotide
  Antisense strand to SEQ ID NO: 849534
acaucuacugcacuccuac

SEQ ID NO: 849536 - RNA, 19 nt, Artificial Sequence
  Description of Artificial Sequence: Synthetic oligonucleotide
  Sense strand starting at position 3331 of SEQ ID NO: 588210
ucuagaaugccuuacguuu

SEQ ID NO: 849537 - RNA, 19 nt, Artificial Sequence
  Description of Artificial Sequence: Synthetic oligonucleotide
  Antisense strand to SEQ ID NO: 849536
aaacguaaggcauucuaga

SEQ ID NO: 849538 - RNA, 19 nt, Artificial Sequence
  Description of Artificial Sequence: Synthetic oligonucleotide
  Sense strand starting at position 3368 of SEQ ID NO: 588210
cugagauuguucuucucuu

SEQ ID NO: 849539 - RNA, 19 nt, Artificial Sequence
  Description of Artificial Sequence: Synthetic oligonucleotide
  Antisense strand to SEQ ID NO: 849538
aagagaagaacaaucucag

SEQ ID NO: 849540 - RNA, 19 nt, Artificial Sequence
  Description of Artificial Sequence: Synthetic oligonucleotide
  Sense strand starting at position 3369 of SEQ ID NO: 588210
ugagauuguucuucucuuc

SEQ ID NO: 849541 - RNA, 19 nt, Artificial Sequence
  Description of Artificial Sequence: Synthetic oligonucleotide
  Antisense strand to SEQ ID NO: 849540
gaagagaagaacaaucuca

SEQ ID NO: 849542 - RNA, 19 nt, Artificial Sequence
  Description of Artificial Sequence: Synthetic oligonucleotide
  Sense strand starting at position 3534 of SEQ ID NO: 588210
gucccugucagaugaugga

SEQ ID NO: 849543 - RNA, 19 nt, Artificial Sequence
  Description of Artificial Sequence: Synthetic oligonucleotide
  Antisense strand to SEQ ID NO: 849542
uccaucaucugacagggac

SEQ ID NO: 849544 - RNA, 19 nt, Artificial Sequence
  Description of Artificial Sequence: Synthetic oligonucleotide
  Sense strand starting at position 3562 of SEQ ID NO: 588210
ugggaauugcugcaggagu

SEQ ID NO: 849545 - RNA, 19 nt, Artificial Sequence
  Description of Artificial Sequence: Synthetic oligonucleotide
  Antisense strand to SEQ ID NO: 849544
acuccugcagcaauuccca

SEQ ID NO: 849546 - RNA, 19 nt, Artificial Sequence
  Description of Artificial Sequence: Synthetic oligonucleotide
  Sense strand starting at position 3812 of SEQ ID NO: 588210
gaucuaauugagugcucuu

SEQ ID NO: 849547 - RNA, 19 nt, Artificial Sequence
  Description of Artificial Sequence: Synthetic oligonucleotide
  Antisense strand to SEQ ID NO: 849546
aagagcacucaauuagauc

SEQ ID NO: 849548 - RNA, 19 nt, Artificial Sequence
  Description of Artificial Sequence: Synthetic oligonucleotide
  Sense strand starting at position 3815 of SEQ ID NO: 588210
cuaauugagugcucuuuag

SEQ ID NO: 849549 - RNA, 19 nt, Artificial Sequence
  Description of Artificial Sequence: Synthetic oligonucleotide
  Antisense strand to SEQ ID NO: 849548
cuaaagagcacucaauuag

SEQ ID NO: 849550 - RNA, 19 nt, Artificial Sequence
  Description of Artificial Sequence: Synthetic oligonucleotide
  Sense strand starting at position 3819 of SEQ ID NO: 588210
uugagugcucuuuagcaaa

SEQ ID NO: 849551 - RNA, 19 nt, Artificial Sequence
  Description of Artificial Sequence: Synthetic oligonucleotide
  Antisense strand to SEQ ID NO: 849550
uuugcuaaagagcacucaa

SEQ ID NO: 849552 - RNA, 19 nt, Artificial Sequence
  Description of Artificial Sequence: Synthetic oligonucleotide
  Sense strand starting at position 3931 of SEQ ID NO: 588210
ggaugagacugucucucaa

SEQ ID NO: 849553 - RNA, 19 nt, Artificial Sequence
  Description of Artificial Sequence: Synthetic oligonucleotide
  Antisense strand to SEQ ID NO: 849552
uugagagacagucucaucc

SEQ ID NO: 849554 - RNA, 19 nt, Artificial Sequence
  Description of Artificial Sequence: Synthetic oligonucleotide
  Sense strand starting at position 3959 of SEQ ID NO: 588210
ccgagaaauacagguucua

SEQ ID NO: 849555 - RNA, 19 nt, Artificial Sequence
  Description of Artificial Sequence: Synthetic oligonucleotide
  Antisense strand to SEQ ID NO: 849554
uagaaccuguauuucucgg

SEQ ID NO: 849556 - RNA, 19 nt, Artificial Sequence
  Description of Artificial Sequence: Synthetic oligonucleotide
  Sense strand starting at position 20 of SEQ ID NO: 588211
cuaaaugcaucuuugagaa

SEQ ID NO: 849557 - RNA, 19 nt, Artificial Sequence
  Description of Artificial Sequence: Synthetic oligonucleotide
  Antisense strand to SEQ ID NO: 849556
uucucaaagaugcauuuag

SEQ ID NO: 849558 - RNA, 19 nt, Artificial Sequence
  Description of Artificial Sequence: Synthetic oligonucleotide
  Sense strand starting at position 33 of SEQ ID NO: 588211
ugagaaguuuggccuuuaa

SEQ ID NO: 849559 - RNA, 19 nt, Artificial Sequence
  Description of Artificial Sequence: Synthetic oligonucleotide
  Antisense strand to SEQ ID NO: 849558
uuaaaggccaaacuucuca

SEQ ID NO: 849560 - RNA, 19 nt, Artificial Sequence
  Description of Artificial Sequence: Synthetic oligonucleotide
  Sense strand starting at position 37 of SEQ ID NO: 588211
aaguuuggccuuuaauaug

SEQ ID NO: 849561 - RNA, 19 nt, Artificial Sequence
  Description of Artificial Sequence: Synthetic oligonucleotide
  Antisense strand to SEQ ID NO: 849560
cauauuaaaggccaaacuu

SEQ ID NO: 849562 - RNA, 19 nt, Artificial Sequence
  Description of Artificial Sequence: Synthetic oligonucleotide
  Sense strand starting at position 73 of SEQ ID NO: 588211
cuuguuaaacacuggcaga

SEQ ID NO: 849563 - RNA, 19 nt, Artificial Sequence
  Description of Artificial Sequence: Synthetic oligonucleotide
  Antisense strand to SEQ ID NO: 849562
ucugccaguguuuaacaag

SEQ ID NO: 849564 - RNA, 19 nt, Artificial Sequence
  Description of Artificial Sequence: Synthetic oligonucleotide
  Sense strand starting at position 233 of SEQ ID NO: 588211
uuuccuauaccagguauau

SEQ ID NO: 849565 - RNA, 19 nt, Artificial Sequence
  Description of Artificial Sequence: Synthetic oligonucleotide
  Antisense strand to SEQ ID NO: 849564
auauaccugguauaggaaa

SEQ ID NO: 849566 - RNA, 19 nt, Artificial Sequence
  Description of Artificial Sequence: Synthetic oligonucleotide
  Sense strand starting at position 457 of SEQ ID NO: 588211
auuugacaauuguagacaa

SEQ ID NO: 849567 - RNA, 19 nt, Artificial Sequence
  Description of Artificial Sequence: Synthetic oligonucleotide
  Antisense strand to SEQ ID NO: 849566
uugucuacaauugucaaau

SEQ ID NO: 849568 - RNA, 19 nt, Artificial Sequence
  Description of Artificial Sequence: Synthetic oligonucleotide
  Sense strand starting at position 530 of SEQ ID NO: 588211
auugaaagccaguauuaca

SEQ ID NO: 849569 - RNA, 19 nt, Artificial Sequence
  Description of Artificial Sequence: Synthetic oligonucleotide
  Antisense strand to SEQ ID NO: 849568
uguaauacuggcuuucaau

SEQ ID NO: 849570 - RNA, 19 nt, Artificial Sequence
  Description of Artificial Sequence: Synthetic oligonucleotide
  Sense strand starting at position 632 of SEQ ID NO: 588211
uuccaaaguuucuugaaga

SEQ ID NO: 849571 - RNA, 19 nt, Artificial Sequence
  Description of Artificial Sequence: Synthetic oligonucleotide
  Antisense strand to SEQ ID NO: 849570
ucuucaagaaacuuuggaa

SEQ ID NO: 849572 - RNA, 19 nt, Artificial Sequence
  Description of Artificial Sequence: Synthetic oligonucleotide
  Sense strand starting at position 1142 of SEQ ID NO: 588211
uuggucaauuaaguaagua

SEQ ID NO: 849573 - RNA, 19 nt, Artificial Sequence
  Description of Artificial Sequence: Synthetic oligonucleotide
  Antisense strand to SEQ ID NO: 849572
uacuuacuuaauugaccaa

SEQ ID NO: 849574 - RNA, 19 nt, Artificial Sequence
  Description of Artificial Sequence: Synthetic oligonucleotide
  Sense strand starting at position 1150 of SEQ ID NO: 588211
uuaaguaaguaccuggaaa

SEQ ID NO: 849575 - RNA, 19 nt, Artificial Sequence
  Description of Artificial Sequence: Synthetic oligonucleotide
  Antisense strand to SEQ ID NO: 849574
uuuccagguacuuacuuaa

SEQ ID NO: 849576 - RNA, 19 nt, Artificial Sequence
  Description of Artificial Sequence: Synthetic oligonucleotide
  Sense strand starting at position 1168 of SEQ ID NO: 588211
aaauuagcuucugugaaga

SEQ ID NO: 849577 - RNA, 19 nt, Artificial Sequence
  Description of Artificial Sequence: Synthetic oligonucleotide
  Antisense strand to SEQ ID NO: 849576
ucuucacagaagcuaauuu

SEQ ID NO: 849578 - RNA, 19 nt, Artificial Sequence
  Description of Artificial Sequence: Synthetic oligonucleotide
  Sense strand starting at position 1182 of SEQ ID NO: 588211
gaagaucuguccuuugaaa

SEQ ID NO: 849579 - RNA, 19 nt, Artificial Sequence
  Description of Artificial Sequence: Synthetic oligonucleotide
  Antisense strand to SEQ ID NO: 849578
uuucaaaggacagaucuuc

SEQ ID NO: 849580 - RNA, 19 nt, Artificial Sequence
  Description of Artificial Sequence: Synthetic oligonucleotide
  Sense strand starting at position 1184 of SEQ ID NO: 588211
agaucuguccuuugaaauc

SEQ ID NO: 849581 - RNA, 19 nt, Artificial Sequence
  Description of Artificial Sequence: Synthetic oligonucleotide
  Antisense strand to SEQ ID NO: 849580
gauuucaaaggacagaucu

SEQ ID NO: 849582 - RNA, 19 nt, Artificial Sequence
  Description of Artificial Sequence: Synthetic oligonucleotide
  Sense strand starting at position 1252 of SEQ ID NO: 588211
ggcaaaguugguagguguu

SEQ ID NO: 849583 - RNA, 19 nt, Artificial Sequence
  Description of Artificial Sequence: Synthetic oligonucleotide
  Antisense strand to SEQ ID NO: 849582
aacaccuaccaacuuugcc

SEQ ID NO: 849584 - RNA, 19 nt, Artificial Sequence
  Description of Artificial Sequence: Synthetic oligonucleotide
  Sense strand starting at position 1372 of SEQ ID NO: 588211
agaucuagauaguuaaugu

SEQ ID NO: 849585 - RNA, 19 nt, Artificial Sequence
  Description of Artificial Sequence: Synthetic oligonucleotide
  Antisense strand to SEQ ID NO: 849584
acauuaacuaucuagaucu

SEQ ID NO: 849586 - RNA, 19 nt, Artificial Sequence
  Description of Artificial Sequence: Synthetic oligonucleotide
  Sense strand starting at position 1388 of SEQ ID NO: 588211
uguaaucagucauuagaua

SEQ ID NO: 849587 - RNA, 19 nt, Artificial Sequence
  Description of Artificial Sequence: Synthetic oligonucleotide
  Antisense strand to SEQ ID NO: 849586
uaucuaaugacugauuaca

SEQ ID NO: 849588 - RNA, 19 nt, Artificial Sequence
  Description of Artificial Sequence: Synthetic oligonucleotide
  Sense strand starting at position 1389 of SEQ ID NO: 588211
guaaucagucauuagauac

SEQ ID NO: 849589 - RNA, 19 nt, Artificial Sequence
  Description of Artificial Sequence: Synthetic oligonucleotide
  Antisense strand to SEQ ID NO: 849588
guaucuaaugacugauuac

SEQ ID NO: 849590 - RNA, 19 nt, Artificial Sequence
  Description of Artificial Sequence: Synthetic oligonucleotide
  Sense strand starting at position 1399 of SEQ ID NO: 588211
auuagauacagcuggguuu

SEQ ID NO: 849591 - RNA, 19 nt, Artificial Sequence
  Description of Artificial Sequence: Synthetic oligonucleotide
  Antisense strand to SEQ ID NO: 849590
aaacccagcuguaucuaau

SEQ ID NO: 849592 - RNA, 19 nt, Artificial Sequence
  Description of Artificial Sequence: Synthetic oligonucleotide
  Sense strand starting at position 1565 of SEQ ID NO: 588211
cggcuaauacuuuaucaau

SEQ ID NO: 849593 - RNA, 19 nt, Artificial Sequence
  Description of Artificial Sequence: Synthetic oligonucleotide
  Antisense strand to SEQ ID NO: 849592
auugauaaaguauuagccg

SEQ ID NO: 849594 - RNA, 19 nt, Artificial Sequence
  Description of Artificial Sequence: Synthetic oligonucleotide
  Sense strand starting at position 1745 of SEQ ID NO: 588211
gucucugacauguagggaa

SEQ ID NO: 849595 - RNA, 19 nt, Artificial Sequence
  Description of Artificial Sequence: Synthetic oligonucleotide
  Antisense strand to SEQ ID NO: 849594
uucccuacaugucagagac

SEQ ID NO: 849596 - RNA, 19 nt, Artificial Sequence
  Description of Artificial Sequence: Synthetic oligonucleotide
  Sense strand starting at position 1997 of SEQ ID NO: 588211
gucuaacagcuuuaacagu

SEQ ID NO: 849597 - RNA, 19 nt, Artificial Sequence
  Description of Artificial Sequence: Synthetic oligonucleotide
  Antisense strand to SEQ ID NO: 849596
acuguuaaagcuguuagac

SEQ ID NO: 849598 - RNA, 19 nt, Artificial Sequence
  Description of Artificial Sequence: Synthetic oligonucleotide
  Sense strand starting at position 2169 of SEQ ID NO: 588211
uucucauccuggguauuga

SEQ ID NO: 849599 - RNA, 19 nt, Artificial Sequence
  Description of Artificial Sequence: Synthetic oligonucleotide
  Antisense strand to SEQ ID NO: 849598
ucaauacccaggaugagaa

SEQ ID NO: 849600 - RNA, 19 nt, Artificial Sequence
  Description of Artificial Sequence: Synthetic oligonucleotide
  Sense strand starting at position 2204 of SEQ ID NO: 588211
cgcugaauggcauaagaaa

SEQ ID NO: 849601 - RNA, 19 nt, Artificial Sequence
  Description of Artificial Sequence: Synthetic oligonucleotide
  Antisense strand to SEQ ID NO: 849600
uuucuuaugccauucagcg

SEQ ID NO: 849602 - RNA, 19 nt, Artificial Sequence
  Description of Artificial Sequence: Synthetic oligonucleotide
  Sense strand starting at position 2336 of SEQ ID NO: 588211
gaacuugugguaugaacua

SEQ ID NO: 849603 - RNA, 19 nt, Artificial Sequence
  Description of Artificial Sequence: Synthetic oligonucleotide
  Antisense strand to SEQ ID NO: 849602
uaguucauaccacaaguuc

SEQ ID NO: 849604 - RNA, 19 nt, Artificial Sequence
  Description of Artificial Sequence: Synthetic oligonucleotide
  Sense strand starting at position 2365 of SEQ ID NO: 588211
agagauuuaucugaacuua

SEQ ID NO: 849605 - RNA, 19 nt, Artificial Sequence
  Description of Artificial Sequence: Synthetic oligonucleotide
  Antisense strand to SEQ ID NO: 849604
uaaguucagauaaaucucu

SEQ ID NO: 849606 - RNA, 19 nt, Artificial Sequence
  Description of Artificial Sequence: Synthetic oligonucleotide
  Sense strand starting at position 2390 of SEQ ID NO: 588211
ugacaaucucauggccaaa

SEQ ID NO: 849607 - RNA, 19 nt, Artificial Sequence
  Description of Artificial Sequence: Synthetic oligonucleotide
  Antisense strand to SEQ ID NO: 849606
uuuggccaugagauuguca

SEQ ID NO: 849608 - RNA, 19 nt, Artificial Sequence
  Description of Artificial Sequence: Synthetic oligonucleotide
  Sense strand starting at position 2443 of SEQ ID NO: 588211
ucaauuccaugucuaagga

SEQ ID NO: 849609 - RNA, 19 nt, Artificial Sequence
  Description of Artificial Sequence: Synthetic oligonucleotide
  Antisense strand to SEQ ID NO: 849608
uccuuagacauggaauuga

SEQ ID NO: 849610 - RNA, 19 nt, Artificial Sequence
  Description of Artificial Sequence: Synthetic oligonucleotide
  Sense strand starting at position 2477 of SEQ ID NO: 588211
aguuaaauaugguuuacug

SEQ ID NO: 849611 - RNA, 19 nt, Artificial Sequence
  Description of Artificial Sequence: Synthetic oligonucleotide
  Antisense strand to SEQ ID NO: 849610
caguaaaccauauuuaacu

SEQ ID NO: 849612 - RNA, 19 nt, Artificial Sequence
  Description of Artificial Sequence: Synthetic oligonucleotide
  Sense strand starting at position 2487 of SEQ ID NO: 588211
gguuuacugguauaaucca

SEQ ID NO: 849613 - RNA, 19 nt, Artificial Sequence
  Description of Artificial Sequence: Synthetic oligonucleotide
  Antisense strand to SEQ ID NO: 849612
uggauuauaccaguaaacc

SEQ ID NO: 849614 - RNA, 19 nt, Artificial Sequence
  Description of Artificial Sequence: Synthetic oligonucleotide
  Sense strand starting at position 2498 of SEQ ID NO: 588211
auaauccauucuguaagua

SEQ ID NO: 849615 - RNA, 19 nt, Artificial Sequence
  Description of Artificial Sequence: Synthetic oligonucleotide
  Antisense strand to SEQ ID NO: 849614
uacuuacagaauggauuau

SEQ ID NO: 849616 - RNA, 19 nt, Artificial Sequence
  Description of Artificial Sequence: Synthetic oligonucleotide
  Sense strand starting at position 2502 of SEQ ID NO: 588211
uccauucuguaaguauuaa

SEQ ID NO: 849617 - RNA, 19 nt, Artificial Sequence
  Description of Artificial Sequence: Synthetic oligonucleotide
  Antisense strand to SEQ ID NO: 849616
uuaauacuuacagaaugga

SEQ ID NO: 849618 - RNA, 19 nt, Artificial Sequence
  Description of Artificial Sequence: Synthetic oligonucleotide
  Sense strand starting at position 2641 of SEQ ID NO: 588211
ggaacuaaauggcugacau

SEQ ID NO: 849619 - RNA, 19 nt, Artificial Sequence
  Description of Artificial Sequence: Synthetic oligonucleotide
  Antisense strand to SEQ ID NO: 849618
augucagccauuuaguucc

SEQ ID NO: 849620 - RNA, 19 nt, Artificial Sequence
  Description of Artificial Sequence: Synthetic oligonucleotide
  Sense strand starting at position 2924 of SEQ ID NO: 588211
uuggcuaguuaacuaugaa

SEQ ID NO: 849621 - RNA, 19 nt, Artificial Sequence
  Description of Artificial Sequence: Synthetic oligonucleotide
  Antisense strand to SEQ ID NO: 849620
uucauaguuaacuagccaa

SEQ ID NO: 849622 - RNA, 19 nt, Artificial Sequence
  Description of Artificial Sequence: Synthetic oligonucleotide
  Sense strand starting at position 2978 of SEQ ID NO: 588211
agagguuuauucuuuacaa

SEQ ID NO: 849623 - RNA, 19 nt, Artificial Sequence
  Description of Artificial Sequence: Synthetic oligonucleotide
  Antisense strand to SEQ ID NO: 849622
uuguaaagaauaaaccucu

SEQ ID NO: 849624 - RNA, 19 nt, Artificial Sequence
  Description of Artificial Sequence: Synthetic oligonucleotide
  Sense strand starting at position 3188 of SEQ ID NO: 588211
aaaguauaugcaggaaaug

SEQ ID NO: 849625 - RNA, 19 nt, Artificial Sequence
  Description of Artificial Sequence: Synthetic oligonucleotide
  Antisense strand to SEQ ID NO: 849624
cauuuccugcauauacuuu

SEQ ID NO: 849626 - RNA, 19 nt, Artificial Sequence
  Description of Artificial Sequence: Synthetic oligonucleotide
  Sense strand starting at position 3514 of SEQ ID NO: 588211
auucuaaugugguuaagga

SEQ ID NO: 849627 - RNA, 19 nt, Artificial Sequence
  Description of Artificial Sequence: Synthetic oligonucleotide
  Antisense strand to SEQ ID NO: 849626
uccuuaaccacauuagaau

SEQ ID NO: 849628 - RNA, 19 nt, Artificial Sequence
  Description of Artificial Sequence: Synthetic oligonucleotide
  Sense strand starting at position 3515 of SEQ ID NO: 588211
uucuaaugugguuaaggau

SEQ ID NO: 849629 - RNA, 19 nt, Artificial Sequence
  Description of Artificial Sequence: Synthetic oligonucleotide
  Antisense strand to SEQ ID NO: 849628
auccuuaaccacauuagaa

SEQ ID NO: 849630 - RNA, 19 nt, Artificial Sequence
  Description of Artificial Sequence: Synthetic oligonucleotide
  Sense strand starting at position 3538 of SEQ ID NO: 588211
uauauaaugugaguggcau

SEQ ID NO: 849631 - RNA, 19 nt, Artificial Sequence
  Description of Artificial Sequence: Synthetic oligonucleotide
  Antisense strand to SEQ ID NO: 849630
augccacucacauuauaua

SEQ ID NO: 849632 - RNA, 19 nt, Artificial Sequence
  Description of Artificial Sequence: Synthetic oligonucleotide
  Sense strand starting at position 3556 of SEQ ID NO: 588211
uuucuaaucagugggaaag

SEQ ID NO: 849633 - RNA, 19 nt, Artificial Sequence
  Description of Artificial Sequence: Synthetic oligonucleotide
  Antisense strand to SEQ ID NO: 849632
cuuucccacugauuagaaa

SEQ ID NO: 849634 - RNA, 19 nt, Artificial Sequence
  Description of Artificial Sequence: Synthetic oligonucleotide
  Sense strand starting at position 3743 of SEQ ID NO: 588211
cagaucacuggaugucaga

SEQ ID NO: 849635 - RNA, 19 nt, Artificial Sequence
  Description of Artificial Sequence: Synthetic oligonucleotide
  Antisense strand to SEQ ID NO: 849634
ucugacauccagugaucug

SEQ ID NO: 849636 - RNA, 19 nt, Artificial Sequence
  Description of Artificial Sequence: Synthetic oligonucleotide
  Sense strand starting at position 130 of SEQ ID NO: 588212
aggagaauaccucgaaccu

SEQ ID NO: 849637 - RNA, 19 nt, Artificial Sequence
  Description of Artificial Sequence: Synthetic oligonucleotide
  Antisense strand to SEQ ID NO: 849636
agguucgagguauucuccu

SEQ ID NO: 849638 - RNA, 19 nt, Artificial Sequence
  Description of Artificial Sequence: Synthetic oligonucleotide
  Sense strand starting at position 288 of SEQ ID NO: 588212
accuuugguuccuuaagga

SEQ ID NO: 849639 - RNA, 19 nt, Artificial Sequence
  Description of Artificial Sequence: Synthetic oligonucleotide
  Antisense strand to SEQ ID NO: 849638
uccuuaaggaaccaaaggu

SEQ ID NO: 849640 - RNA, 19 nt, Artificial Sequence
  Description of Artificial Sequence: Synthetic oligonucleotide
  Sense strand starting at position 360 of SEQ ID NO: 588212
ccaccaguguuacuucuua

SEQ ID NO: 849641 - RNA, 19 nt, Artificial Sequence
  Description of Artificial Sequence: Synthetic oligonucleotide
  Antisense strand to SEQ ID NO: 849640
uaagaaguaacacuggugg

SEQ ID NO: 849642 - RNA, 19 nt, Artificial Sequence
  Description of Artificial Sequence: Synthetic oligonucleotide
  Sense strand starting at position 415 of SEQ ID NO: 588212
aagccugugccucauugaa

SEQ ID NO: 849643 - RNA, 19 nt, Artificial Sequence
  Description of Artificial Sequence: Synthetic oligonucleotide
  Antisense strand to SEQ ID NO: 849642
uucaaugaggcacaggcuu

SEQ ID NO: 849644 - RNA, 19 nt, Artificial Sequence
  Description of Artificial Sequence: Synthetic oligonucleotide
  Sense strand starting at position 730 of SEQ ID NO: 588212
aaaguuuagugguuaagag

SEQ ID NO: 849645 - RNA, 19 nt, Artificial Sequence
  Description of Artificial Sequence: Synthetic oligonucleotide
  Antisense strand to SEQ ID NO: 849644
cucuuaaccacuaaacuuu

SEQ ID NO: 849646 - RNA, 19 nt, Artificial Sequence
  Description of Artificial Sequence: Synthetic oligonucleotide
  Sense strand starting at position 731 of SEQ ID NO: 588212
aaguuuagugguuaagagu

SEQ ID NO: 849647 - RNA, 19 nt, Artificial Sequence
  Description of Artificial Sequence: Synthetic oligonucleotide
  Antisense strand to SEQ ID NO: 849646
acucuuaaccacuaaacuu

SEQ ID NO: 849648 - RNA, 19 nt, Artificial Sequence
  Description of Artificial Sequence: Synthetic oligonucleotide
  Sense strand starting at position 786 of SEQ ID NO: 588212
uuggacugcuacuuauuau

SEQ ID NO: 849649 - RNA, 19 nt, Artificial Sequence
  Description of Artificial Sequence: Synthetic oligonucleotide
  Antisense strand to SEQ ID NO: 849648
auaauaaguagcaguccaa

SEQ ID NO: 849650 - RNA, 19 nt, Artificial Sequence
  Description of Artificial Sequence: Synthetic oligonucleotide
  Sense strand starting at position 807 of SEQ ID NO: 588212
auaugaucuuggguaaaca

SEQ ID NO: 849651 - RNA, 19 nt, Artificial Sequence
  Description of Artificial Sequence: Synthetic oligonucleotide
  Antisense strand to SEQ ID NO: 849650
uguuuacccaagaucauau

SEQ ID NO: 849652 - RNA, 19 nt, Artificial Sequence
  Description of Artificial Sequence: Synthetic oligonucleotide
  Sense strand starting at position 889 of SEQ ID NO: 588212
ugucguuguaaagauuaaa

SEQ ID NO: 849653 - RNA, 19 nt, Artificial Sequence
  Description of Artificial Sequence: Synthetic oligonucleotide
  Antisense strand to SEQ ID NO: 849652
uuuaaucuuuacaacgaca

SEQ ID NO: 849654 - RNA, 19 nt, Artificial Sequence
  Description of Artificial Sequence: Synthetic oligonucleotide
  Sense strand starting at position 892 of SEQ ID NO: 588212
cguuguaaagauuaaaugu

SEQ ID NO: 849655 - RNA, 19 nt, Artificial Sequence
  Description of Artificial Sequence: Synthetic oligonucleotide
  Antisense strand to SEQ ID NO: 849654
acauuuaaucuuuacaacg

SEQ ID NO: 849656 - RNA, 19 nt, Artificial Sequence
  Description of Artificial Sequence: Synthetic oligonucleotide
  Sense strand starting at position 1189 of SEQ ID NO: 588212
uggcuuucuugaccacaga

SEQ ID NO: 849657 - RNA, 19 nt, Artificial Sequence
  Description of Artificial Sequence: Synthetic oligonucleotide
  Antisense strand to SEQ ID NO: 849656
ucuguggucaagaaagcca

SEQ ID NO: 849658 - RNA, 19 nt, Artificial Sequence
  Description of Artificial Sequence: Synthetic oligonucleotide
  Sense strand starting at position 1190 of SEQ ID NO: 588212
ggcuuucuugaccacagau

SEQ ID NO: 849659 - RNA, 19 nt, Artificial Sequence
  Description of Artificial Sequence: Synthetic oligonucleotide
  Antisense strand to SEQ ID NO: 849658
aucuguggucaagaaagcc

SEQ ID NO: 849660 - RNA, 19 nt, Artificial Sequence
  Description of Artificial Sequence: Synthetic oligonucleotide
  Sense strand starting at position 1414 of SEQ ID NO: 588212
uggcauaaguaccugcaaa

SEQ ID NO: 849661 - RNA, 19 nt, Artificial Sequence
  Description of Artificial Sequence: Synthetic oligonucleotide
  Antisense strand to SEQ ID NO: 849660
uuugcagguacuuaugcca

SEQ ID NO: 849662 - RNA, 19 nt, Artificial Sequence
  Description of Artificial Sequence: Synthetic oligonucleotide
  Sense strand starting at position 1675 of SEQ ID NO: 588212
cccauaaguuaguccauca

SEQ ID NO: 849663 - RNA, 19 nt, Artificial Sequence
  Description of Artificial Sequence: Synthetic oligonucleotide
  Antisense strand to SEQ ID NO: 849662
ugauggacuaacuuauggg

SEQ ID NO: 849664 - RNA, 19 nt, Artificial Sequence
  Description of Artificial Sequence: Synthetic oligonucleotide
  Sense strand starting at position 1993 of SEQ ID NO: 588212
uuagaauucuaugccagaa

SEQ ID NO: 849665 - RNA, 19 nt, Artificial Sequence
  Description of Artificial Sequence: Synthetic oligonucleotide
  Antisense strand to SEQ ID NO: 849664
uucuggcauagaauucuaa

SEQ ID NO: 849666 - RNA, 19 nt, Artificial Sequence
  Description of Artificial Sequence: Synthetic oligonucleotide
  Sense strand starting at position 2090 of SEQ ID NO: 588212
uguccuaggucuucuaauc

SEQ ID NO: 849667 - RNA, 19 nt, Artificial Sequence
  Description of Artificial Sequence: Synthetic oligonucleotide
  Antisense strand to SEQ ID NO: 849666
gauuagaagaccuaggaca

SEQ ID NO: 849668 - RNA, 19 nt, Artificial Sequence
  Description of Artificial Sequence: Synthetic oligonucleotide
  Sense strand starting at position 2225 of SEQ ID NO: 588212
uuaccaacuuguuugagua

SEQ ID NO: 849669 - RNA, 19 nt, Artificial Sequence
  Description of Artificial Sequence: Synthetic oligonucleotide
  Antisense strand to SEQ ID NO: 849668
uacucaaacaaguugguaa

SEQ ID NO: 849670 - RNA, 19 nt, Artificial Sequence
  Description of Artificial Sequence: Synthetic oligonucleotide
  Sense strand starting at position 2229 of SEQ ID NO: 588212
caacuuguuugaguauggu

SEQ ID NO: 849671 - RNA, 19 nt, Artificial Sequence
  Description of Artificial Sequence: Synthetic oligonucleotide
  Antisense strand to SEQ ID NO: 849670
accauacucaaacaaguug

SEQ ID NO: 849672 - RNA, 19 nt, Artificial Sequence
  Description of Artificial Sequence: Synthetic oligonucleotide
  Sense strand starting at position 2348 of SEQ ID NO: 588212
ucccguaaggcucaggaaa

SEQ ID NO: 849673 - RNA, 19 nt, Artificial Sequence
  Description of Artificial Sequence: Synthetic oligonucleotide
  Antisense strand to SEQ ID NO: 849672
uuuccugagccuuacggga

SEQ ID NO: 849674 - RNA, 19 nt, Artificial Sequence
  Description of Artificial Sequence: Synthetic oligonucleotide
  Sense strand starting at position 2441 of SEQ ID NO: 588212
uggguuugauguucugaga

SEQ ID NO: 849675 - RNA, 19 nt, Artificial Sequence
  Description of Artificial Sequence: Synthetic oligonucleotide
  Antisense strand to SEQ ID NO: 849674
ucucagaacaucaaaccca

SEQ ID NO: 849676 - RNA, 19 nt, Artificial Sequence
  Description of Artificial Sequence: Synthetic oligonucleotide
  Sense strand starting at position 2656 of SEQ ID NO: 588212
agcugugcucaagauuaau

SEQ ID NO: 849677 - RNA, 19 nt, Artificial Sequence
  Description of Artificial Sequence: Synthetic oligonucleotide
  Antisense strand to SEQ ID NO: 849676
auuaaucuugagcacagcu

SEQ ID NO: 849678 - RNA, 19 nt, Artificial Sequence
  Description of Artificial Sequence: Synthetic oligonucleotide
  Sense strand starting at position 2659 of SEQ ID NO: 588212
ugugcucaagauuaaugua

SEQ ID NO: 849679 - RNA, 19 nt, Artificial Sequence
  Description of Artificial Sequence: Synthetic oligonucleotide
  Antisense strand to SEQ ID NO: 849678
uacauuaaucuugagcaca

SEQ ID NO: 849680 - RNA, 19 nt, Artificial Sequence
  Description of Artificial Sequence: Synthetic oligonucleotide
  Sense strand starting at position 2712 of SEQ ID NO: 588212
uaauaaucuggccgaagca

SEQ ID NO: 849681 - RNA, 19 nt, Artificial Sequence
  Description of Artificial Sequence: Synthetic oligonucleotide
  Antisense strand to SEQ ID NO: 849680
ugcuucggccagauuauua

SEQ ID NO: 849682 - RNA, 19 nt, Artificial Sequence
  Description of Artificial Sequence: Synthetic oligonucleotide
  Sense strand starting at position 2735 of SEQ ID NO: 588212
uguugacucugaccacaaa

SEQ ID NO: 849683 - RNA, 19 nt, Artificial Sequence
  Description of Artificial Sequence: Synthetic oligonucleotide
  Antisense strand to SEQ ID NO: 849682
uuuguggucagagucaaca

SEQ ID NO: 849684 - RNA, 19 nt, Artificial Sequence
  Description of Artificial Sequence: Synthetic oligonucleotide
  Sense strand starting at position 2784 of SEQ ID NO: 588212
aggaaauggcacugucauc

SEQ ID NO: 849685 - RNA, 19 nt, Artificial Sequence
  Description of Artificial Sequence: Synthetic oligonucleotide
  Antisense strand to SEQ ID NO: 849684
gaugacagugccauuuccu

SEQ ID NO: 849686 - RNA, 19 nt, Artificial Sequence
  Description of Artificial Sequence: Synthetic oligonucleotide
  Sense strand starting at position 2798 of SEQ ID NO: 588212
ucaucuaccugguuucuca

SEQ ID NO: 849687 - RNA, 19 nt, Artificial Sequence
  Description of Artificial Sequence: Synthetic oligonucleotide
  Antisense strand to SEQ ID NO: 849686
ugagaaaccagguagauga

SEQ ID NO: 849688 - RNA, 19 nt, Artificial Sequence
  Description of Artificial Sequence: Synthetic oligonucleotide
  Sense strand starting at position 2909 of SEQ ID NO: 588212
ucacaucuccguuacuaua

SEQ ID NO: 849689 - RNA, 19 nt, Artificial Sequence
  Description of Artificial Sequence: Synthetic oligonucleotide
  Antisense strand to SEQ ID NO: 849688
uauaguaacggagauguga

SEQ ID NO: 849690 - RNA, 19 nt, Artificial Sequence
  Description of Artificial Sequence: Synthetic oligonucleotide
  Sense strand starting at position 2923 of SEQ ID NO: 588212
cuauaagccuuguccaaga

SEQ ID NO: 849691 - RNA, 19 nt, Artificial Sequence
  Description of Artificial Sequence: Synthetic oligonucleotide
  Antisense strand to SEQ ID NO: 849690
ucuuggacaaggcuuauag

SEQ ID NO: 849692 - RNA, 19 nt, Artificial Sequence
  Description of Artificial Sequence: Synthetic oligonucleotide
  Sense strand starting at position 2925 of SEQ ID NO: 588212
auaagccuuguccaagaca

SEQ ID NO: 849693 - RNA, 19 nt, Artificial Sequence
  Description of Artificial Sequence: Synthetic oligonucleotide
  Antisense strand to SEQ ID NO: 849692
ugucuuggacaaggcuuau

SEQ ID NO: 849694 - RNA, 19 nt, Artificial Sequence
  Description of Artificial Sequence: Synthetic oligonucleotide
  Sense strand starting at position 2933 of SEQ ID NO: 588212
uguccaagacacuguaaua

SEQ ID NO: 849695 - RNA, 19 nt, Artificial Sequence
  Description of Artificial Sequence: Synthetic oligonucleotide
  Antisense strand to SEQ ID NO: 849694
uauuacagugucuuggaca

SEQ ID NO: 849696 - RNA, 19 nt, Artificial Sequence
  Description of Artificial Sequence: Synthetic oligonucleotide
  Sense strand starting at position 2964 of SEQ ID NO: 588212
uuuagauucugggcuacua

SEQ ID NO: 849697 - RNA, 19 nt, Artificial Sequence
  Description of Artificial Sequence: Synthetic oligonucleotide
  Antisense strand to SEQ ID NO: 849696
uaguagcccagaaucuaaa

SEQ ID NO: 849698 - RNA, 19 nt, Artificial Sequence
  Description of Artificial Sequence: Synthetic oligonucleotide
  Sense strand starting at position 2982 of SEQ ID NO: 588212
acaauagcucccugauaga

SEQ ID NO: 849699 - RNA, 19 nt, Artificial Sequence
  Description of Artificial Sequence: Synthetic oligonucleotide
  Antisense strand to SEQ ID NO: 849698
ucuaucagggagcuauugu

SEQ ID NO: 849700 - RNA, 19 nt, Artificial Sequence
  Description of Artificial Sequence: Synthetic oligonucleotide
  Sense strand starting at position 3114 of SEQ ID NO: 588212
uccagugacuucccauauc

SEQ ID NO: 849701 - RNA, 19 nt, Artificial Sequence
  Description of Artificial Sequence: Synthetic oligonucleotide
  Antisense strand to SEQ ID NO: 849700
gauaugggaagucacugga

SEQ ID NO: 849702 - RNA, 19 nt, Artificial Sequence
  Description of Artificial Sequence: Synthetic oligonucleotide
  Sense strand starting at position 3503 of SEQ ID NO: 588212
acuguuauggccuacaaag

SEQ ID NO: 849703 - RNA, 19 nt, Artificial Sequence
  Description of Artificial Sequence: Synthetic oligonucleotide
  Antisense strand to SEQ ID NO: 849702
cuuuguaggccauaacagu

SEQ ID NO: 849704 - RNA, 19 nt, Artificial Sequence
  Description of Artificial Sequence: Synthetic oligonucleotide
  Sense strand starting at position 3528 of SEQ ID NO: 588212
ucggaaauugccuacuucu

SEQ ID NO: 849705 - RNA, 19 nt, Artificial Sequence
  Description of Artificial Sequence: Synthetic oligonucleotide
  Antisense strand to SEQ ID NO: 849704
agaaguaggcaauuuccga

SEQ ID NO: 849706 - RNA, 19 nt, Artificial Sequence
  Description of Artificial Sequence: Synthetic oligonucleotide
  Sense strand starting at position 3600 of SEQ ID NO: 588212
acaucaaguucguucuuga

SEQ ID NO: 849707 - RNA, 19 nt, Artificial Sequence
  Description of Artificial Sequence: Synthetic oligonucleotide
  Antisense strand to SEQ ID NO: 849706
ucaagaacgaacuugaugu

SEQ ID NO: 849708 - RNA, 19 nt, Artificial Sequence
  Description of Artificial Sequence: Synthetic oligonucleotide
  Sense strand starting at position 3853 of SEQ ID NO: 588212
cuguauccuccuuaccagu

SEQ ID NO: 849709 - RNA, 19 nt, Artificial Sequence
  Description of Artificial Sequence: Synthetic oligonucleotide
  Antisense strand to SEQ ID NO: 849708
acugguaaggaggauacag

SEQ ID NO: 849710 - RNA, 19 nt, Artificial Sequence
  Description of Artificial Sequence: Synthetic oligonucleotide
  Sense strand starting at position 3887 of SEQ ID NO: 588212
agcagagacuacuucuaug

SEQ ID NO: 849711 - RNA, 19 nt, Artificial Sequence
  Description of Artificial Sequence: Synthetic oligonucleotide
  Antisense strand to SEQ ID NO: 849710
cauagaaguagucucugcu

SEQ ID NO: 849712 - RNA, 19 nt, Artificial Sequence
  Description of Artificial Sequence: Synthetic oligonucleotide
  Sense strand starting at position 3892 of SEQ ID NO: 588212
agacuacuucuaugucuuu

SEQ ID NO: 849713 - RNA, 19 nt, Artificial Sequence
  Description of Artificial Sequence: Synthetic oligonucleotide
  Antisense strand to SEQ ID NO: 849712
aaagacauagaaguagucu

SEQ ID NO: 849714 - RNA, 19 nt, Artificial Sequence
  Description of Artificial Sequence: Synthetic oligonucleotide
  Sense strand starting at position 3920 of SEQ ID NO: 588212
uguccuuaguacuuauaac

SEQ ID NO: 849715 - RNA, 19 nt, Artificial Sequence
  Description of Artificial Sequence: Synthetic oligonucleotide
  Antisense strand to SEQ ID NO: 849714
guuauaaguacuaaggaca

SEQ ID NO: 849716 - RNA, 19 nt, Artificial Sequence
  Description of Artificial Sequence: Synthetic oligonucleotide
  Sense strand starting at position 143 of SEQ ID NO: 588213
aagggagagucagcucuuu

SEQ ID NO: 849717 - RNA, 19 nt, Artificial Sequence
  Description of Artificial Sequence: Synthetic oligonucleotide
  Antisense strand to SEQ ID NO: 849716
aaagagcugacucucccuu

SEQ ID NO: 849718 - RNA, 19 nt, Artificial Sequence
  Description of Artificial Sequence: Synthetic oligonucleotide
  Sense strand starting at position 167 of SEQ ID NO: 588213
acgguauaccuaugaacac

SEQ ID NO: 849719 - RNA, 19 nt, Artificial Sequence
  Description of Artificial Sequence: Synthetic oligonucleotide
  Antisense strand to SEQ ID NO: 849718
guguucauagguauaccgu

SEQ ID NO: 849720 - RNA, 19 nt, Artificial Sequence
  Description of Artificial Sequence: Synthetic oligonucleotide
  Sense strand starting at position 198 of SEQ ID NO: 588213
acggaaggugcuuauuaaa

SEQ ID NO: 849721 - RNA, 19 nt, Artificial Sequence
  Description of Artificial Sequence: Synthetic oligonucleotide
  Antisense strand to SEQ ID NO: 849720
uuuaauaagcaccuuccgu

SEQ ID NO: 849722 - RNA, 19 nt, Artificial Sequence
  Description of Artificial Sequence: Synthetic oligonucleotide
  Sense strand starting at position 280 of SEQ ID NO: 588213
agaugacuuugcuuuccca

SEQ ID NO: 849723 - RNA, 19 nt, Artificial Sequence
  Description of Artificial Sequence: Synthetic oligonucleotide
  Antisense strand to SEQ ID NO: 849722
ugggaaagcaaagucaucu

SEQ ID NO: 849724 - RNA, 19 nt, Artificial Sequence
  Description of Artificial Sequence: Synthetic oligonucleotide
  Sense strand starting at position 296 of SEQ ID NO: 588213
ccaaucaaugucgggaaau

SEQ ID NO: 849725 - RNA, 19 nt, Artificial Sequence
  Description of Artificial Sequence: Synthetic oligonucleotide
  Antisense strand to SEQ ID NO: 849724
auuucccgacauugauugg

SEQ ID NO: 849726 - RNA, 19 nt, Artificial Sequence
  Description of Artificial Sequence: Synthetic oligonucleotide
  Sense strand starting at position 306 of SEQ ID NO: 588213
ucgggaaauuaaucacuua

SEQ ID NO: 849727 - RNA, 19 nt, Artificial Sequence
  Description of Artificial Sequence: Synthetic oligonucleotide
  Antisense strand to SEQ ID NO: 849726
uaagugauuaauuucccga

SEQ ID NO: 849728 - RNA, 19 nt, Artificial Sequence
  Description of Artificial Sequence: Synthetic oligonucleotide
  Sense strand starting at position 489 of SEQ ID NO: 588213
ugugaauauuagguuuauc

SEQ ID NO: 849729 - RNA, 19 nt, Artificial Sequence
  Description of Artificial Sequence: Synthetic oligonucleotide
  Antisense strand to SEQ ID NO: 849728
gauaaaccuaauauucaca

SEQ ID NO: 849730 - RNA, 19 nt, Artificial Sequence
  Description of Artificial Sequence: Synthetic oligonucleotide
  Sense strand starting at position 494 of SEQ ID NO: 588213
auauuagguuuaucugagu

SEQ ID NO: 849731 - RNA, 19 nt, Artificial Sequence
  Description of Artificial Sequence: Synthetic oligonucleotide
  Antisense strand to SEQ ID NO: 849730
acucagauaaaccuaauau

SEQ ID NO: 849732 - RNA, 19 nt, Artificial Sequence
  Description of Artificial Sequence: Synthetic oligonucleotide
  Sense strand starting at position 1301 of SEQ ID NO: 588213
ugcauaaacuugguguaaa

SEQ ID NO: 849733 - RNA, 19 nt, Artificial Sequence
  Description of Artificial Sequence: Synthetic oligonucleotide
  Antisense strand to SEQ ID NO: 849732
uuuacaccaaguuuaugca

SEQ ID NO: 849734 - RNA, 19 nt, Artificial Sequence
  Description of Artificial Sequence: Synthetic oligonucleotide
  Sense strand starting at position 1359 of SEQ ID NO: 588213
cugcuaaugugauccagau

SEQ ID NO: 849735 - RNA, 19 nt, Artificial Sequence
  Description of Artificial Sequence: Synthetic oligonucleotide
  Antisense strand to SEQ ID NO: 849734
aucuggaucacauuagcag

SEQ ID NO: 849736 - RNA, 19 nt, Artificial Sequence
  Description of Artificial Sequence: Synthetic oligonucleotide
  Sense strand starting at position 1455 of SEQ ID NO: 588213
aagugugcugaccaucaaa

SEQ ID NO: 849737 - RNA, 19 nt, Artificial Sequence
  Description of Artificial Sequence: Synthetic oligonucleotide
  Antisense strand to SEQ ID NO: 849736
uuugauggucagcacacuu

SEQ ID NO: 849738 - RNA, 19 nt, Artificial Sequence
  Description of Artificial Sequence: Synthetic oligonucleotide
  Sense strand starting at position 1458 of SEQ ID NO: 588213
ugugcugaccaucaaauau

SEQ ID NO: 849739 - RNA, 19 nt, Artificial Sequence
  Description of Artificial Sequence: Synthetic oligonucleotide
  Antisense strand to SEQ ID NO: 849738
auauuugauggucagcaca

SEQ ID NO: 849740 - RNA, 19 nt, Artificial Sequence
  Description of Artificial Sequence: Synthetic oligonucleotide
  Sense strand starting at position 1469 of SEQ ID NO: 588213
ucaaauauuuaccaggaga

SEQ ID NO: 849741 - RNA, 19 nt, Artificial Sequence
  Description of Artificial Sequence: Synthetic oligonucleotide
  Antisense strand to SEQ ID NO: 849740
ucuccugguaaauauuuga

SEQ ID NO: 849742 - RNA, 19 nt, Artificial Sequence
  Description of Artificial Sequence: Synthetic oligonucleotide
  Sense strand starting at position 1487 of SEQ ID NO: 588213
acaacauguccaggucaaa

SEQ ID NO: 849743 - RNA, 19 nt, Artificial Sequence
  Description of Artificial Sequence: Synthetic oligonucleotide
  Antisense strand to SEQ ID NO: 849742
uuugaccuggacauguugu

SEQ ID NO: 849744 - RNA, 19 nt, Artificial Sequence
  Description of Artificial Sequence: Synthetic oligonucleotide
  Sense strand starting at position 1503 of SEQ ID NO: 588213
aaagaaagggcgugagaau

SEQ ID NO: 849745 - RNA, 19 nt, Artificial Sequence
  Description of Artificial Sequence: Synthetic oligonucleotide
  Antisense strand to SEQ ID NO: 849744
auucucacgcccuuucuuu

SEQ ID NO: 849746 - RNA, 19 nt, Artificial Sequence
  Description of Artificial Sequence: Synthetic oligonucleotide
  Sense strand starting at position 1626 of SEQ ID NO: 588213
ccauuccuuccuggaguca

SEQ ID NO: 849747 - RNA, 19 nt, Artificial Sequence
  Description of Artificial Sequence: Synthetic oligonucleotide
  Antisense strand to SEQ ID NO: 849746
ugacuccaggaaggaaugg

SEQ ID NO: 849748 - RNA, 19 nt, Artificial Sequence
  Description of Artificial Sequence: Synthetic oligonucleotide
  Sense strand starting at position 2048 of SEQ ID NO: 588213
ucccacuuucuucgaaaug

SEQ ID NO: 849749 - RNA, 19 nt, Artificial Sequence
  Description of Artificial Sequence: Synthetic oligonucleotide
  Antisense strand to SEQ ID NO: 849748
cauuucgaagaaaguggga

SEQ ID NO: 849750 - RNA, 19 nt, Artificial Sequence
  Description of Artificial Sequence: Synthetic oligonucleotide
  Sense strand starting at position 2086 of SEQ ID NO: 588213
gaauguguaguccaucaaa

SEQ ID NO: 849751 - RNA, 19 nt, Artificial Sequence
  Description of Artificial Sequence: Synthetic oligonucleotide
  Antisense strand to SEQ ID NO: 849750
uuugauggacuacacauuc

SEQ ID NO: 849752 - RNA, 19 nt, Artificial Sequence
  Description of Artificial Sequence: Synthetic oligonucleotide
  Sense strand starting at position 2089 of SEQ ID NO: 588213
uguguaguccaucaaauca

SEQ ID NO: 849753 - RNA, 19 nt, Artificial Sequence
  Description of Artificial Sequence: Synthetic oligonucleotide
  Antisense strand to SEQ ID NO: 849752
ugauuugauggacuacaca

SEQ ID NO: 849754 - RNA, 19 nt, Artificial Sequence
  Description of Artificial Sequence: Synthetic oligonucleotide
  Sense strand starting at position 2116 of SEQ ID NO: 588213
gggaaccuuuguuccuauu

SEQ ID NO: 849755 - RNA, 19 nt, Artificial Sequence
  Description of Artificial Sequence: Synthetic oligonucleotide
  Antisense strand to SEQ ID NO: 849754
aauaggaacaaagguuccc

SEQ ID NO: 849756 - RNA, 19 nt, Artificial Sequence
  Description of Artificial Sequence: Synthetic oligonucleotide
  Sense strand starting at position 2222 of SEQ ID NO: 588213
cucugauugguggaaguga

SEQ ID NO: 849757 - RNA, 19 nt, Artificial Sequence
  Description of Artificial Sequence: Synthetic oligonucleotide
  Antisense strand to SEQ ID NO: 849756
ucacuuccaccaaucagag

SEQ ID NO: 849758 - RNA, 19 nt, Artificial Sequence
  Description of Artificial Sequence: Synthetic oligonucleotide
  Sense strand starting at position 2985 of SEQ ID NO: 588213
gcgggaagcgucuuuguug

SEQ ID NO: 849759 - RNA, 19 nt, Artificial Sequence
  Description of Artificial Sequence: Synthetic oligonucleotide
  Antisense strand to SEQ ID NO: 849758
caacaaagacgcuucccgc

SEQ ID NO: 849760 - RNA, 19 nt, Artificial Sequence
  Description of Artificial Sequence: Synthetic oligonucleotide
  Sense strand starting at position 3429 of SEQ ID NO: 588213
uuagaugguugggcuuuaa

SEQ ID NO: 849761 - RNA, 19 nt, Artificial Sequence
  Description of Artificial Sequence: Synthetic oligonucleotide
  Antisense strand to SEQ ID NO: 849760
uuaaagcccaaccaucuaa

SEQ ID NO: 849762 - RNA, 19 nt, Artificial Sequence
  Description of Artificial Sequence: Synthetic oligonucleotide
  Sense strand starting at position 3469 of SEQ ID NO: 588213
aagguaggcuuaucaggaa

SEQ ID NO: 849763 - RNA, 19 nt, Artificial Sequence
  Description of Artificial Sequence: Synthetic oligonucleotide
  Antisense strand to SEQ ID NO: 849762
uuccugauaagccuaccuu

SEQ ID NO: 849764 - RNA, 19 nt, Artificial Sequence
  Description of Artificial Sequence: Synthetic oligonucleotide
  Sense strand starting at position 3473 of SEQ ID NO: 588213
uaggcuuaucaggaaucgu

SEQ ID NO: 849765 - RNA, 19 nt, Artificial Sequence
  Description of Artificial Sequence: Synthetic oligonucleotide
  Antisense strand to SEQ ID NO: 849764
acgauuccugauaagccua

SEQ ID NO: 849766 - RNA, 19 nt, Artificial Sequence
  Description of Artificial Sequence: Synthetic oligonucleotide
  Sense strand starting at position 3554 of SEQ ID NO: 588213
gucaaauuagauuguacug

SEQ ID NO: 849767 - RNA, 19 nt, Artificial Sequence
  Description of Artificial Sequence: Synthetic oligonucleotide
  Antisense strand to SEQ ID NO: 849766
caguacaaucuaauuugac

SEQ ID NO: 849768 - RNA, 19 nt, Artificial Sequence
  Description of Artificial Sequence: Synthetic oligonucleotide
  Sense strand starting at position 3579 of SEQ ID NO: 588213
ggcucucgugaaggaaaga

SEQ ID NO: 849769 - RNA, 19 nt, Artificial Sequence
  Description of Artificial Sequence: Synthetic oligonucleotide
  Antisense strand to SEQ ID NO: 849768
ucuuuccuucacgagagcc

SEQ ID NO: 849770 - RNA, 19 nt, Artificial Sequence
  Description of Artificial Sequence: Synthetic oligonucleotide
  Sense strand starting at position 3642 of SEQ ID NO: 588213
gaucuuugaucuuugguga

SEQ ID NO: 849771 - RNA, 19 nt, Artificial Sequence
  Description of Artificial Sequence: Synthetic oligonucleotide
  Antisense strand to SEQ ID NO: 849770
ucaccaaagaucaaagauc

SEQ ID NO: 849772 - RNA, 19 nt, Artificial Sequence
  Description of Artificial Sequence: Synthetic oligonucleotide
  Sense strand starting at position 3645 of SEQ ID NO: 588213
cuuugaucuuuggugagau

SEQ ID NO: 849773 - RNA, 19 nt, Artificial Sequence
  Description of Artificial Sequence: Synthetic oligonucleotide
  Antisense strand to SEQ ID NO: 849772
aucucaccaaagaucaaag

SEQ ID NO: 849774 - RNA, 19 nt, Artificial Sequence
  Description of Artificial Sequence: Synthetic oligonucleotide
  Sense strand starting at position 3647 of SEQ ID NO: 588213
uugaucuuuggugagaucu

SEQ ID NO: 849775 - RNA, 19 nt, Artificial Sequence
  Description of Artificial Sequence: Synthetic oligonucleotide
  Antisense strand to SEQ ID NO: 849774
agaucucaccaaagaucaa

SEQ ID NO: 849776 - RNA, 19 nt, Artificial Sequence
  Description of Artificial Sequence: Synthetic oligonucleotide
  Sense strand starting at position 3666 of SEQ ID NO: 588213
cugccaaugccagaagaga

SEQ ID NO: 849777 - RNA, 19 nt, Artificial Sequence
  Description of Artificial Sequence: Synthetic oligonucleotide
  Antisense strand to SEQ ID NO: 849776
ucucuucuggcauuggcag

SEQ ID NO: 849778 - RNA, 19 nt, Artificial Sequence
  Description of Artificial Sequence: Synthetic oligonucleotide
  Sense strand starting at position 3765 of SEQ ID NO: 588213
ccuuuaaauuucgcuguuu

SEQ ID NO: 849779 - RNA, 19 nt, Artificial Sequence
  Description of Artificial Sequence: Synthetic oligonucleotide
  Antisense strand to SEQ ID NO: 849778
aaacagcgaaauuuaaagg

SEQ ID NO: 849780 - RNA, 19 nt, Artificial Sequence
  Description of Artificial Sequence: Synthetic oligonucleotide
  Sense strand starting at position 3766 of SEQ ID NO: 588213
cuuuaaauuucgcuguuua

SEQ ID NO: 849781 - RNA, 19 nt, Artificial Sequence
  Description of Artificial Sequence: Synthetic oligonucleotide
  Antisense strand to SEQ ID NO: 849780
uaaacagcgaaauuuaaag

SEQ ID NO: 849782 - RNA, 19 nt, Artificial Sequence
  Description of Artificial Sequence: Synthetic oligonucleotide
  Sense strand starting at position 3815 of SEQ ID NO: 588213
gauauaugaugcuugaucu

SEQ ID NO: 849783 - RNA, 19 nt, Artificial Sequence
  Description of Artificial Sequence: Synthetic oligonucleotide
  Antisense strand to SEQ ID NO: 849782
agaucaagcaucauauauc

SEQ ID NO: 849784 - RNA, 19 nt, Artificial Sequence
  Description of Artificial Sequence: Synthetic oligonucleotide
  Sense strand starting at position 3816 of SEQ ID NO: 588213
auauaugaugcuugaucua

SEQ ID NO: 849785 - RNA, 19 nt, Artificial Sequence
  Description of Artificial Sequence: Synthetic oligonucleotide
  Antisense strand to SEQ ID NO: 849784
uagaucaagcaucauauau

SEQ ID NO: 849786 - RNA, 19 nt, Artificial Sequence
  Description of Artificial Sequence: Synthetic oligonucleotide
  Sense strand starting at position 3819 of SEQ ID NO: 588213
uaugaugcuugaucuauag

SEQ ID NO: 849787 - RNA, 19 nt, Artificial Sequence
  Description of Artificial Sequence: Synthetic oligonucleotide
  Antisense strand to SEQ ID NO: 849786
cuauagaucaagcaucaua

SEQ ID NO: 849788 - RNA, 19 nt, Artificial Sequence
  Description of Artificial Sequence: Synthetic oligonucleotide
  Sense strand starting at position 3878 of SEQ ID NO: 588213
uggagaucuugugccaaca

SEQ ID NO: 849789 - RNA, 19 nt, Artificial Sequence
  Description of Artificial Sequence: Synthetic oligonucleotide
  Antisense strand to SEQ ID NO: 849788
uguuggcacaagaucucca

SEQ ID NO: 849790 - RNA, 19 nt, Artificial Sequence
  Description of Artificial Sequence: Synthetic oligonucleotide
  Sense strand starting at position 3910 of SEQ ID NO: 588213
uaccuaaugagucggagua

SEQ ID NO: 849791 - RNA, 19 nt, Artificial Sequence
  Description of Artificial Sequence: Synthetic oligonucleotide
  Antisense strand to SEQ ID NO: 849790
uacuccgacucauuaggua

SEQ ID NO: 849792 - RNA, 19 nt, Artificial Sequence
  Description of Artificial Sequence: Synthetic oligonucleotide
  Sense strand starting at position 3945 of SEQ ID NO: 588213
uuguaauaacguuaaucug

SEQ ID NO: 849793 - RNA, 19 nt, Artificial Sequence
  Description of Artificial Sequence: Synthetic oligonucleotide
  Antisense strand to SEQ ID NO: 849792
cagauuaacguuauuacaa

SEQ ID NO: 849794 - RNA, 19 nt, Artificial Sequence
  Description of Artificial Sequence: Synthetic oligonucleotide
  Sense strand starting at position 3954 of SEQ ID NO: 588213
cguuaaucuguuuagauua

SEQ ID NO: 849795 - RNA, 19 nt, Artificial Sequence
  Description of Artificial Sequence: Synthetic oligonucleotide
  Antisense strand to SEQ ID NO: 849794
uaaucuaaacagauuaacg

SEQ ID NO: 849796 - RNA, 19 nt, Artificial Sequence
  Description of Artificial Sequence: Synthetic oligonucleotide
  Sense strand starting at position 170 of SEQ ID NO: 588214
ggcagugagccugggacua

SEQ ID NO: 849797 - RNA, 19 nt, Artificial Sequence
  Description of Artificial Sequence: Synthetic oligonucleotide
  Antisense strand to SEQ ID NO: 849796
uagucccaggcucacugcc

SEQ ID NO: 849798 - RNA, 19 nt, Artificial Sequence
  Description of Artificial Sequence: Synthetic oligonucleotide
  Sense strand starting at position 345 of SEQ ID NO: 588214
ggccuauagucagagccuu

SEQ ID NO: 849799 - RNA, 19 nt, Artificial Sequence
  Description of Artificial Sequence: Synthetic oligonucleotide
  Antisense strand to SEQ ID NO: 849798
aaggcucugacuauaggcc

SEQ ID NO: 849800 - RNA, 19 nt, Artificial Sequence
  Description of Artificial Sequence: Synthetic oligonucleotide
  Sense strand starting at position 545 of SEQ ID NO: 588214
cugaguugugucccacgca

SEQ ID NO: 849801 - RNA, 19 nt, Artificial Sequence
  Description of Artificial Sequence: Synthetic oligonucleotide
  Antisense strand to SEQ ID NO: 849800
ugcgugggacacaacucag

SEQ ID NO: 849802 - RNA, 19 nt, Artificial Sequence
  Description of Artificial Sequence: Synthetic oligonucleotide
  Sense strand starting at position 546 of SEQ ID NO: 588214
ugaguugugucccacgcau

SEQ ID NO: 849803 - RNA, 19 nt, Artificial Sequence
  Description of Artificial Sequence: Synthetic oligonucleotide
  Antisense strand to SEQ ID NO: 849802
augcgugggacacaacuca

SEQ ID NO: 849804 - RNA, 19 nt, Artificial Sequence
  Description of Artificial Sequence: Synthetic oligonucleotide
  Sense strand starting at position 559 of SEQ ID NO: 588214
acgcauucugaugaacuca

SEQ ID NO: 849805 - RNA, 19 nt, Artificial Sequence
  Description of Artificial Sequence: Synthetic oligonucleotide
  Antisense strand to SEQ ID NO: 849804
ugaguucaucagaaugcgu

SEQ ID NO: 849806 - RNA, 19 nt, Artificial Sequence
  Description of Artificial Sequence: Synthetic oligonucleotide
  Sense strand starting at position 570 of SEQ ID NO: 588214
ugaacucacuaagggaauu

SEQ ID NO: 849807 - RNA, 19 nt, Artificial Sequence
  Description of Artificial Sequence: Synthetic oligonucleotide
  Antisense strand to SEQ ID NO: 849806
aauucccuuagugaguuca

SEQ ID NO: 849808 - RNA, 19 nt, Artificial Sequence
  Description of Artificial Sequence: Synthetic oligonucleotide
  Sense strand starting at position 637 of SEQ ID NO: 588214
ucuguacacagacgagaua

SEQ ID NO: 849809 - RNA, 19 nt, Artificial Sequence
  Description of Artificial Sequence: Synthetic oligonucleotide
  Antisense strand to SEQ ID NO: 849808
uaucucgucuguguacaga

SEQ ID NO: 849810 - RNA, 19 nt, Artificial Sequence
  Description of Artificial Sequence: Synthetic oligonucleotide
  Sense strand starting at position 715 of SEQ ID NO: 588214
cacaguaagugcucagaaa

SEQ ID NO: 849811 - RNA, 19 nt, Artificial Sequence
  Description of Artificial Sequence: Synthetic oligonucleotide
  Antisense strand to SEQ ID NO: 849810
uuucugagcacuuacugug

SEQ ID NO: 849812 - RNA, 19 nt, Artificial Sequence
  Description of Artificial Sequence: Synthetic oligonucleotide
  Sense strand starting at position 716 of SEQ ID NO: 588214
acaguaagugcucagaaau

SEQ ID NO: 849813 - RNA, 19 nt, Artificial Sequence
  Description of Artificial Sequence: Synthetic oligonucleotide
  Antisense strand to SEQ ID NO: 849812
auuucugagcacuuacugu

SEQ ID NO: 849814 - RNA, 19 nt, Artificial Sequence
  Description of Artificial Sequence: Synthetic oligonucleotide
  Sense strand starting at position 828 of SEQ ID NO: 588214
ccugguguccuggaaguca

SEQ ID NO: 849815 - RNA, 19 nt, Artificial Sequence
  Description of Artificial Sequence: Synthetic oligonucleotide
  Antisense strand to SEQ ID NO: 849814
ugacuuccaggacaccagg

SEQ ID NO: 849816 - RNA, 19 nt, Artificial Sequence
  Description of Artificial Sequence: Synthetic oligonucleotide
  Sense strand starting at position 956 of SEQ ID NO: 588214
agccaauucugcuccauga

SEQ ID NO: 849817 - RNA, 19 nt, Artificial Sequence
  Description of Artificial Sequence: Synthetic oligonucleotide
  Antisense strand to SEQ ID NO: 849816
ucauggagcagaauuggcu

SEQ ID NO: 849818 - RNA, 19 nt, Artificial Sequence
  Description of Artificial Sequence: Synthetic oligonucleotide
  Sense strand starting at position 984 of SEQ ID NO: 588214
guaagaaugaaguguagcu

SEQ ID NO: 849819 - RNA, 19 nt, Artificial Sequence
  Description of Artificial Sequence: Synthetic oligonucleotide
  Antisense strand to SEQ ID NO: 849818
agcuacacuucauucuuac

SEQ ID NO: 849820 - RNA, 19 nt, Artificial Sequence
  Description of Artificial Sequence: Synthetic oligonucleotide
  Sense strand starting at position 993 of SEQ ID NO: 588214
aaguguagcuucugggaac

SEQ ID NO: 849821 - RNA, 19 nt, Artificial Sequence
  Description of Artificial Sequence: Synthetic oligonucleotide
  Antisense strand to SEQ ID NO: 849820
guucccagaagcuacacuu

SEQ ID NO: 849822 - RNA, 19 nt, Artificial Sequence
  Description of Artificial Sequence: Synthetic oligonucleotide
  Sense strand starting at position 1102 of SEQ ID NO: 588214
gagucacccuguuugggau

SEQ ID NO: 849823 - RNA, 19 nt, Artificial Sequence
  Description of Artificial Sequence: Synthetic oligonucleotide
  Antisense strand to SEQ ID NO: 849822
aucccaaacagggugacuc

SEQ ID NO: 849824 - RNA, 19 nt, Artificial Sequence
  Description of Artificial Sequence: Synthetic oligonucleotide
  Sense strand starting at position 1229 of SEQ ID NO: 588214
ccgauucucuuagaacuaa

SEQ ID NO: 849825 - RNA, 19 nt, Artificial Sequence
  Description of Artificial Sequence: Synthetic oligonucleotide
  Antisense strand to SEQ ID NO: 849824
uuaguucuaagagaaucgg

SEQ ID NO: 849826 - RNA, 19 nt, Artificial Sequence
  Description of Artificial Sequence: Synthetic oligonucleotide
  Sense strand starting at position 1376 of SEQ ID NO: 588214
cguuguuuccguggccaga

SEQ ID NO: 849827 - RNA, 19 nt, Artificial Sequence
  Description of Artificial Sequence: Synthetic oligonucleotide
  Antisense strand to SEQ ID NO: 849826
ucuggccacggaaacaacg

SEQ ID NO: 849828 - RNA, 19 nt, Artificial Sequence
  Description of Artificial Sequence: Synthetic oligonucleotide
  Sense strand starting at position 1378 of SEQ ID NO: 588214
uuguuuccguggccagaau

SEQ ID NO: 849829 - RNA, 19 nt, Artificial Sequence
  Description of Artificial Sequence: Synthetic oligonucleotide
  Antisense strand to SEQ ID NO: 849828
auucuggccacggaaacaa

SEQ ID NO: 849830 - RNA, 19 nt, Artificial Sequence
  Description of Artificial Sequence: Synthetic oligonucleotide
  Sense strand starting at position 1401 of SEQ ID NO: 588214
gcaggaccgcugugaauuc

SEQ ID NO: 849831 - RNA, 19 nt, Artificial Sequence
  Description of Artificial Sequence: Synthetic oligonucleotide
  Antisense strand to SEQ ID NO: 849830
gaauucacagcgguccugc

SEQ ID NO: 849832 - RNA, 19 nt, Artificial Sequence
  Description of Artificial Sequence: Synthetic oligonucleotide
  Sense strand starting at position 1411 of SEQ ID NO: 588214
ugugaauucucuccggugu

SEQ ID NO: 849833 - RNA, 19 nt, Artificial Sequence
  Description of Artificial Sequence: Synthetic oligonucleotide
  Antisense strand to SEQ ID NO: 849832
acaccggagagaauucaca

SEQ ID NO: 849834 - RNA, 19 nt, Artificial Sequence
  Description of Artificial Sequence: Synthetic oligonucleotide
  Sense strand starting at position 1413 of SEQ ID NO: 588214
ugaauucucuccgguguca

SEQ ID NO: 849835 - RNA, 19 nt, Artificial Sequence
  Description of Artificial Sequence: Synthetic oligonucleotide
  Antisense strand to SEQ ID NO: 849834
ugacaccggagagaauuca

SEQ ID NO: 849836 - RNA, 19 nt, Artificial Sequence
  Description of Artificial Sequence: Synthetic oligonucleotide
  Sense strand starting at position 1415 of SEQ ID NO: 588214
aauucucuccggugucauu

SEQ ID NO: 849837 - RNA, 19 nt, Artificial Sequence
  Description of Artificial Sequence: Synthetic oligonucleotide
  Antisense strand to SEQ ID NO: 849836
aaugacaccggagagaauu

SEQ ID NO: 849838 - RNA, 19 nt, Artificial Sequence
  Description of Artificial Sequence: Synthetic oligonucleotide
  Sense strand starting at position 2432 of SEQ ID NO: 588214
cucccagcgucaguuaaga

SEQ ID NO: 849839 - RNA, 19 nt, Artificial Sequence
  Description of Artificial Sequence: Synthetic oligonucleotide
  Antisense strand to SEQ ID NO: 849838
ucuuaacugacgcugggag

SEQ ID NO: 849840 - RNA, 19 nt, Artificial Sequence
  Description of Artificial Sequence: Synthetic oligonucleotide
  Sense strand starting at position 2794 of SEQ ID NO: 588214
gauccaacgucauacagaa

SEQ ID NO: 849841 - RNA, 19 nt, Artificial Sequence
  Description of Artificial Sequence: Synthetic oligonucleotide
  Antisense strand to SEQ ID NO: 849840
uucuguaugacguuggauc

SEQ ID NO: 849842 - RNA, 19 nt, Artificial Sequence
  Description of Artificial Sequence: Synthetic oligonucleotide
  Sense strand starting at position 2906 of SEQ ID NO: 588214
agugaugcuuucccaaauc

SEQ ID NO: 849843 - RNA, 19 nt, Artificial Sequence
  Description of Artificial Sequence: Synthetic oligonucleotide
  Antisense strand to SEQ ID NO: 849842
gauuugggaaagcaucacu

SEQ ID NO: 849844 - RNA, 19 nt, Artificial Sequence
  Description of Artificial Sequence: Synthetic oligonucleotide
  Sense strand starting at position 3028 of SEQ ID NO: 588214
gacagugugacccgaacua

SEQ ID NO: 849845 - RNA, 19 nt, Artificial Sequence
  Description of Artificial Sequence: Synthetic oligonucleotide
  Antisense strand to SEQ ID NO: 849844
uaguucgggucacacuguc

SEQ ID NO: 849846 - RNA, 19 nt, Artificial Sequence
  Description of Artificial Sequence: Synthetic oligonucleotide
  Sense strand starting at position 3093 of SEQ ID NO: 588214
augagugaccuugggccaa

SEQ ID NO: 849847 - RNA, 19 nt, Artificial Sequence
  Description of Artificial Sequence: Synthetic oligonucleotide
  Antisense strand to SEQ ID NO: 849846
uuggcccaaggucacucau

SEQ ID NO: 849848 - RNA, 19 nt, Artificial Sequence
  Description of Artificial Sequence: Synthetic oligonucleotide
  Sense strand starting at position 3135 of SEQ ID NO: 588214
uccugcuuucccucucgua

SEQ ID NO: 849849 - RNA, 19 nt, Artificial Sequence
  Description of Artificial Sequence: Synthetic oligonucleotide
  Antisense strand to SEQ ID NO: 849848
uacgagagggaaagcagga

SEQ ID NO: 849850 - RNA, 19 nt, Artificial Sequence
  Description of Artificial Sequence: Synthetic oligonucleotide
  Sense strand starting at position 3340 of SEQ ID NO: 588214
gcucuaauuugagaugcca

SEQ ID NO: 849851 - RNA, 19 nt, Artificial Sequence
  Description of Artificial Sequence: Synthetic oligonucleotide
  Antisense strand to SEQ ID NO: 849850
uggcaucucaaauuagagc

SEQ ID NO: 849852 - RNA, 19 nt, Artificial Sequence
  Description of Artificial Sequence: Synthetic oligonucleotide
  Sense strand starting at position 3514 of SEQ ID NO: 588214
gcaguugucaccuggaaac

SEQ ID NO: 849853 - RNA, 19 nt, Artificial Sequence
  Description of Artificial Sequence: Synthetic oligonucleotide
  Antisense strand to SEQ ID NO: 849852
guuuccaggugacaacugc

SEQ ID NO: 849854 - RNA, 19 nt, Artificial Sequence
  Description of Artificial Sequence: Synthetic oligonucleotide
  Sense strand starting at position 3516 of SEQ ID NO: 588214
aguugucaccuggaaaccu

SEQ ID NO: 849855 - RNA, 19 nt, Artificial Sequence
  Description of Artificial Sequence: Synthetic oligonucleotide
  Antisense strand to SEQ ID NO: 849854
agguuuccaggugacaacu

SEQ ID NO: 849856 - RNA, 19 nt, Artificial Sequence
  Description of Artificial Sequence: Synthetic oligonucleotide
  Sense strand starting at position 3549 of SEQ ID NO: 588214
cccagucauggucacuaua

SEQ ID NO: 849857 - RNA, 19 nt, Artificial Sequence
  Description of Artificial Sequence: Synthetic oligonucleotide
  Antisense strand to SEQ ID NO: 849856
uauagugaccaugacuggg

SEQ ID NO: 849858 - RNA, 19 nt, Artificial Sequence
  Description of Artificial Sequence: Synthetic oligonucleotide
  Sense strand starting at position 3866 of SEQ ID NO: 588214
acuguuaugacguguagua

SEQ ID NO: 849859 - RNA, 19 nt, Artificial Sequence
  Description of Artificial Sequence: Synthetic oligonucleotide
  Antisense strand to SEQ ID NO: 849858
uacuacacgucauaacagu

SEQ ID NO: 849860 - RNA, 19 nt, Artificial Sequence
  Description of Artificial Sequence: Synthetic oligonucleotide
  Sense strand starting at position 3868 of SEQ ID NO: 588214
uguuaugacguguaguacu

SEQ ID NO: 849861 - RNA, 19 nt, Artificial Sequence
  Description of Artificial Sequence: Synthetic oligonucleotide
  Antisense strand to SEQ ID NO: 849860
aguacuacacgucauaaca

SEQ ID NO: 849862 - RNA, 19 nt, Artificial Sequence
  Description of Artificial Sequence: Synthetic oligonucleotide
  Sense strand starting at position 3882 of SEQ ID NO: 588214
guacuuacuucucuggguu

SEQ ID NO: 849863 - RNA, 19 nt, Artificial Sequence
  Description of Artificial Sequence: Synthetic oligonucleotide
  Antisense strand to SEQ ID NO: 849862
aacccagagaaguaaguac

SEQ ID NO: 849864 - RNA, 19 nt, Artificial Sequence
  Description of Artificial Sequence: Synthetic oligonucleotide
  Sense strand starting at position 3884 of SEQ ID NO: 588214
acuuacuucucuggguuua

SEQ ID NO: 849865 - RNA, 19 nt, Artificial Sequence
  Description of Artificial Sequence: Synthetic oligonucleotide
  Antisense strand to SEQ ID NO: 849864
uaaacccagagaaguaagu

SEQ ID NO: 849866 - RNA, 19 nt, Artificial Sequence
  Description of Artificial Sequence: Synthetic oligonucleotide
  Sense strand starting at position 3885 of SEQ ID NO: 588214
cuuacuucucuggguuuau

SEQ ID NO: 849867 - RNA, 19 nt, Artificial Sequence
  Description of Artificial Sequence: Synthetic oligonucleotide
  Antisense strand to SEQ ID NO: 849866
auaaacccagagaaguaag

SEQ ID NO: 849868 - RNA, 19 nt, Artificial Sequence
  Description of Artificial Sequence: Synthetic oligonucleotide
  Sense strand starting at position 3886 of SEQ ID NO: 588214
uuacuucucuggguuuauu

SEQ ID NO: 849869 - RNA, 19 nt, Artificial Sequence
  Description of Artificial Sequence: Synthetic oligonucleotide
  Antisense strand to SEQ ID NO: 849868
aauaaacccagagaaguaa

SEQ ID NO: 849870 - RNA, 19 nt, Artificial Sequence
  Description of Artificial Sequence: Synthetic oligonucleotide
  Sense strand starting at position 3930 of SEQ ID NO: 588214
augucagagccauaagggu

SEQ ID NO: 849871 - RNA, 19 nt, Artificial Sequence
  Description of Artificial Sequence: Synthetic oligonucleotide
  Antisense strand to SEQ ID NO: 849870
acccuuauggcucugacau

SEQ ID NO: 849872 - RNA, 19 nt, Artificial Sequence
  Description of Artificial Sequence: Synthetic oligonucleotide
  Sense strand starting at position 260 of SEQ ID NO: 588215
ccggcacucccuuaaguuu

SEQ ID NO: 849873 - RNA, 19 nt, Artificial Sequence
  Description of Artificial Sequence: Synthetic oligonucleotide
  Antisense strand to SEQ ID NO: 849872
aaacuuaagggagugccgg

SEQ ID NO: 849874 - RNA, 19 nt, Artificial Sequence
  Description of Artificial Sequence: Synthetic oligonucleotide
  Sense strand starting at position 297 of SEQ ID NO: 588215
cuugccuugcccuaauguu

SEQ ID NO: 849875 - RNA, 19 nt, Artificial Sequence
  Description of Artificial Sequence: Synthetic oligonucleotide
  Antisense strand to SEQ ID NO: 849874
aacauuagggcaaggcaag

SEQ ID NO: 849876 - RNA, 19 nt, Artificial Sequence
  Description of Artificial Sequence: Synthetic oligonucleotide
  Sense strand starting at position 376 of SEQ ID NO: 588215
gguggaguuccagggagaa

SEQ ID NO: 849877 - RNA, 19 nt, Artificial Sequence
  Description of Artificial Sequence: Synthetic oligonucleotide
  Antisense strand to SEQ ID NO: 849876
uucucccuggaacuccacc

SEQ ID NO: 849878 - RNA, 19 nt, Artificial Sequence
  Description of Artificial Sequence: Synthetic oligonucleotide
  Sense strand starting at position 508 of SEQ ID NO: 588215
ccaggaaugucaugagagg

SEQ ID NO: 849879 - RNA, 19 nt, Artificial Sequence
  Description of Artificial Sequence: Synthetic oligonucleotide
  Antisense strand to SEQ ID NO: 849878
ccucucaugacauuccugg

SEQ ID NO: 849880 - RNA, 19 nt, Artificial Sequence
  Description of Artificial Sequence: Synthetic oligonucleotide
  Sense strand starting at position 528 of SEQ ID NO: 588215
gcuguaauaagcuauccga

SEQ ID NO: 849881 - RNA, 19 nt, Artificial Sequence
  Description of Artificial Sequence: Synthetic oligonucleotide
  Antisense strand to SEQ ID NO: 849880
ucggauagcuuauuacagc

SEQ ID NO: 849882 - RNA, 19 nt, Artificial Sequence
  Description of Artificial Sequence: Synthetic oligonucleotide
  Sense strand starting at position 531 of SEQ ID NO: 588215
guaauaagcuauccgaagu

SEQ ID NO: 849883 - RNA, 19 nt, Artificial Sequence
  Description of Artificial Sequence: Synthetic oligonucleotide
  Antisense strand to SEQ ID NO: 849882
acuucggauagcuuauuac

SEQ ID NO: 849884 - RNA, 19 nt, Artificial Sequence
  Description of Artificial Sequence: Synthetic oligonucleotide
  Sense strand starting at position 546 of SEQ ID NO: 588215
aagugaucgucccuugaac

SEQ ID NO: 849885 - RNA, 19 nt, Artificial Sequence
  Description of Artificial Sequence: Synthetic oligonucleotide
  Antisense strand to SEQ ID NO: 849884
guucaagggacgaucacuu

SEQ ID NO: 849886 - RNA, 19 nt, Artificial Sequence
  Description of Artificial Sequence: Synthetic oligonucleotide
  Sense strand starting at position 548 of SEQ ID NO: 588215
gugaucgucccuugaacga

SEQ ID NO: 849887 - RNA, 19 nt, Artificial Sequence
  Description of Artificial Sequence: Synthetic oligonucleotide
  Antisense strand to SEQ ID NO: 849886
ucguucaagggacgaucac

SEQ ID NO: 849888 - RNA, 19 nt, Artificial Sequence
  Description of Artificial Sequence: Synthetic oligonucleotide
  Sense strand starting at position 578 of SEQ ID NO: 588215
gccaaauuaguguggauga

SEQ ID NO: 849889 - RNA, 19 nt, Artificial Sequence
  Description of Artificial Sequence: Synthetic oligonucleotide
  Antisense strand to SEQ ID NO: 849888
ucauccacacuaauuuggc

SEQ ID NO: 849890 - RNA, 19 nt, Artificial Sequence
  Description of Artificial Sequence: Synthetic oligonucleotide
  Sense strand starting at position 708 of SEQ ID NO: 588215
auugaaucaugguaggaaa

SEQ ID NO: 849891 - RNA, 19 nt, Artificial Sequence
  Description of Artificial Sequence: Synthetic oligonucleotide
  Antisense strand to SEQ ID NO: 849890
uuuccuaccaugauucaau

SEQ ID NO: 849892 - RNA, 19 nt, Artificial Sequence
  Description of Artificial Sequence: Synthetic oligonucleotide
  Sense strand starting at position 771 of SEQ ID NO: 588215
cagaaauguccaggaagca

SEQ ID NO: 849893 - RNA, 19 nt, Artificial Sequence
  Description of Artificial Sequence: Synthetic oligonucleotide
  Antisense strand to SEQ ID NO: 849892
ugcuuccuggacauuucug

SEQ ID NO: 849894 - RNA, 19 nt, Artificial Sequence
  Description of Artificial Sequence: Synthetic oligonucleotide
  Sense strand starting at position 867 of SEQ ID NO: 588215
cccagcuaucuuuacaguu

SEQ ID NO: 849895 - RNA, 19 nt, Artificial Sequence
  Description of Artificial Sequence: Synthetic oligonucleotide
  Antisense strand to SEQ ID NO: 849894
aacuguaaagauagcuggg

SEQ ID NO: 849896 - RNA, 19 nt, Artificial Sequence
  Description of Artificial Sequence: Synthetic oligonucleotide
  Sense strand starting at position 907 of SEQ ID NO: 588215
guguacacacuuugaggaa

SEQ ID NO: 849897 - RNA, 19 nt, Artificial Sequence
  Description of Artificial Sequence: Synthetic oligonucleotide
  Antisense strand to SEQ ID NO: 849896
uuccucaaaguguguacac

SEQ ID NO: 849898 - RNA, 19 nt, Artificial Sequence
  Description of Artificial Sequence: Synthetic oligonucleotide
  Sense strand starting at position 1101 of SEQ ID NO: 588215
guuuauccaucugucaaau

SEQ ID NO: 849899 - RNA, 19 nt, Artificial Sequence
  Description of Artificial Sequence: Synthetic oligonucleotide
  Antisense strand to SEQ ID NO: 849898
auuugacagauggauaaac

SEQ ID NO: 849900 - RNA, 19 nt, Artificial Sequence
  Description of Artificial Sequence: Synthetic oligonucleotide
  Sense strand starting at position 1158 of SEQ ID NO: 588215
ugguucuaaggcuguauga

SEQ ID NO: 849901 - RNA, 19 nt, Artificial Sequence
  Description of Artificial Sequence: Synthetic oligonucleotide
  Antisense strand to SEQ ID NO: 849900
ucauacagccuuagaacca

SEQ ID NO: 849902 - RNA, 19 nt, Artificial Sequence
  Description of Artificial Sequence: Synthetic oligonucleotide
  Sense strand starting at position 1160 of SEQ ID NO: 588215
guucuaaggcuguaugauc

SEQ ID NO: 849903 - RNA, 19 nt, Artificial Sequence
  Description of Artificial Sequence: Synthetic oligonucleotide
  Antisense strand to SEQ ID NO: 849902
gaucauacagccuuagaac

SEQ ID NO: 849904 - RNA, 19 nt, Artificial Sequence
  Description of Artificial Sequence: Synthetic oligonucleotide
  Sense strand starting at position 1176 of SEQ ID NO: 588215
aucaacaacugaugagaaa

SEQ ID NO: 849905 - RNA, 19 nt, Artificial Sequence
  Description of Artificial Sequence: Synthetic oligonucleotide
  Antisense strand to SEQ ID NO: 849904
uuucucaucaguuguugau

SEQ ID NO: 849906 - RNA, 19 nt, Artificial Sequence
  Description of Artificial Sequence: Synthetic oligonucleotide
  Sense strand starting at position 1320 of SEQ ID NO: 588215
acgauuaaaugagauacua

SEQ ID NO: 849907 - RNA, 19 nt, Artificial Sequence
  Description of Artificial Sequence: Synthetic oligonucleotide
  Antisense strand to SEQ ID NO: 849906
uaguaucucauuuaaucgu

SEQ ID NO: 849908 - RNA, 19 nt, Artificial Sequence
  Description of Artificial Sequence: Synthetic oligonucleotide
  Sense strand starting at position 1353 of SEQ ID NO: 588215
cccauauauugugugcuua

SEQ ID NO: 849909 - RNA, 19 nt, Artificial Sequence
  Description of Artificial Sequence: Synthetic oligonucleotide
  Antisense strand to SEQ ID NO: 849908
uaagcacacaauauauggg

SEQ ID NO: 849910 - RNA, 19 nt, Artificial Sequence
  Description of Artificial Sequence: Synthetic oligonucleotide
  Sense strand starting at position 1354 of SEQ ID NO: 588215
ccauauauugugugcuuac

SEQ ID NO: 849911 - RNA, 19 nt, Artificial Sequence
  Description of Artificial Sequence: Synthetic oligonucleotide
  Antisense strand to SEQ ID NO: 849910
guaagcacacaauauaugg

SEQ ID NO: 849912 - RNA, 19 nt, Artificial Sequence
  Description of Artificial Sequence: Synthetic oligonucleotide
  Sense strand starting at position 1365 of SEQ ID NO: 588215
gugcuuacugcaugccaau

SEQ ID NO: 849913 - RNA, 19 nt, Artificial Sequence
  Description of Artificial Sequence: Synthetic oligonucleotide
  Antisense strand to SEQ ID NO: 849912
auuggcaugcaguaagcac

SEQ ID NO: 849914 - RNA, 19 nt, Artificial Sequence
  Description of Artificial Sequence: Synthetic oligonucleotide
  Sense strand starting at position 1522 of SEQ ID NO: 588215
cugcauugacugugccauu

SEQ ID NO: 849915 - RNA, 19 nt, Artificial Sequence
  Description of Artificial Sequence: Synthetic oligonucleotide
  Antisense strand to SEQ ID NO: 849914
aauggcacagucaaugcag

SEQ ID NO: 849916 - RNA, 19 nt, Artificial Sequence
  Description of Artificial Sequence: Synthetic oligonucleotide
  Sense strand starting at position 1616 of SEQ ID NO: 588215
uacgauuaacggcaacaga

SEQ ID NO: 849917 - RNA, 19 nt, Artificial Sequence
  Description of Artificial Sequence: Synthetic oligonucleotide
  Antisense strand to SEQ ID NO: 849916
ucuguugccguuaaucgua

SEQ ID NO: 849918 - RNA, 19 nt, Artificial Sequence
  Description of Artificial Sequence: Synthetic oligonucleotide
  Sense strand starting at position 1656 of SEQ ID NO: 588215
caguguugcgacuaauaaa

SEQ ID NO: 849919 - RNA, 19 nt, Artificial Sequence
  Description of Artificial Sequence: Synthetic oligonucleotide
  Antisense strand to SEQ ID NO: 849918
uuuauuagucgcaacacug

SEQ ID NO: 849920 - RNA, 19 nt, Artificial Sequence
  Description of Artificial Sequence: Synthetic oligonucleotide
  Sense strand starting at position 2129 of SEQ ID NO: 588215
gggcucgacucuaggaguu

SEQ ID NO: 849921 - RNA, 19 nt, Artificial Sequence
  Description of Artificial Sequence: Synthetic oligonucleotide
  Antisense strand to SEQ ID NO: 849920
aacuccuagagucgagccc

SEQ ID NO: 849922 - RNA, 19 nt, Artificial Sequence
  Description of Artificial Sequence: Synthetic oligonucleotide
  Sense strand starting at position 2227 of SEQ ID NO: 588215
cauuuauucccgcgucugu

SEQ ID NO: 849923 - RNA, 19 nt, Artificial Sequence
  Description of Artificial Sequence: Synthetic oligonucleotide
  Antisense strand to SEQ ID NO: 849922
acagacgcgggaauaaaug

SEQ ID NO: 849924 - RNA, 19 nt, Artificial Sequence
  Description of Artificial Sequence: Synthetic oligonucleotide
  Sense strand starting at position 2858 of SEQ ID NO: 588215
ggauguacgauucgugugu

SEQ ID NO: 849925 - RNA, 19 nt, Artificial Sequence
  Description of Artificial Sequence: Synthetic oligonucleotide
  Antisense strand to SEQ ID NO: 849924
acacacgaaucguacaucc

SEQ ID NO: 849926 - RNA, 19 nt, Artificial Sequence
  Description of Artificial Sequence: Synthetic oligonucleotide
  Sense strand starting at position 3003 of SEQ ID NO: 588215
cgggccuuauggucuggaa

SEQ ID NO: 849927 - RNA, 19 nt, Artificial Sequence
  Description of Artificial Sequence: Synthetic oligonucleotide
  Antisense strand to SEQ ID NO: 849926
uuccagaccauaaggcccg

SEQ ID NO: 849928 - RNA, 19 nt, Artificial Sequence
  Description of Artificial Sequence: Synthetic oligonucleotide
  Sense strand starting at position 3053 of SEQ ID NO: 588215
ugugaaaugccagguugca

SEQ ID NO: 849929 - RNA, 19 nt, Artificial Sequence
  Description of Artificial Sequence: Synthetic oligonucleotide
  Antisense strand to SEQ ID NO: 849928
ugcaaccuggcauuucaca

SEQ ID NO: 849930 - RNA, 19 nt, Artificial Sequence
  Description of Artificial Sequence: Synthetic oligonucleotide
  Sense strand starting at position 3108 of SEQ ID NO: 588215
auuaccaucugucgaauuu

SEQ ID NO: 849931 - RNA, 19 nt, Artificial Sequence
  Description of Artificial Sequence: Synthetic oligonucleotide
  Antisense strand to SEQ ID NO: 849930
aaauucgacagaugguaau

SEQ ID NO: 849932 - RNA, 19 nt, Artificial Sequence
  Description of Artificial Sequence: Synthetic oligonucleotide
  Sense strand starting at position 3182 of SEQ ID NO: 588215
gcaucuccauccucagaga

SEQ ID NO: 849933 - RNA, 19 nt, Artificial Sequence
  Description of Artificial Sequence: Synthetic oligonucleotide
  Antisense strand to SEQ ID NO: 849932
ucucugaggauggagaugc

SEQ ID NO: 849934 - RNA, 19 nt, Artificial Sequence
  Description of Artificial Sequence: Synthetic oligonucleotide
  Sense strand starting at position 3479 of SEQ ID NO: 588215
gucugcuucccaggguaca

SEQ ID NO: 849935 - RNA, 19 nt, Artificial Sequence
  Description of Artificial Sequence: Synthetic oligonucleotide
  Antisense strand to SEQ ID NO: 849934
uguacccugggaagcagac

SEQ ID NO: 849936 - RNA, 19 nt, Artificial Sequence
  Description of Artificial Sequence: Synthetic oligonucleotide
  Sense strand starting at position 3619 of SEQ ID NO: 588215
acauuucccucggaaagug

SEQ ID NO: 849937 - RNA, 19 nt, Artificial Sequence
  Description of Artificial Sequence: Synthetic oligonucleotide
  Antisense strand to SEQ ID NO: 849936
cacuuuccgagggaaaugu

SEQ ID NO: 849938 - RNA, 19 nt, Artificial Sequence
  Description of Artificial Sequence: Synthetic oligonucleotide
  Sense strand starting at position 3700 of SEQ ID NO: 588215
auagcuagcuggguuagaa

SEQ ID NO: 849939 - RNA, 19 nt, Artificial Sequence
  Description of Artificial Sequence: Synthetic oligonucleotide
  Antisense strand to SEQ ID NO: 849938
uucuaacccagcuagcuau

SEQ ID NO: 849940 - RNA, 19 nt, Artificial Sequence
  Description of Artificial Sequence: Synthetic oligonucleotide
  Sense strand starting at position 3712 of SEQ ID NO: 588215
guuagaagucagcagguca

SEQ ID NO: 849941 - RNA, 19 nt, Artificial Sequence
  Description of Artificial Sequence: Synthetic oligonucleotide
  Antisense strand to SEQ ID NO: 849940
ugaccugcugacuucuaac

SEQ ID NO: 849942 - RNA, 19 nt, Artificial Sequence
  Description of Artificial Sequence: Synthetic oligonucleotide
  Sense strand starting at position 3757 of SEQ ID NO: 588215
ccuguugucugcucuagag

SEQ ID NO: 849943 - RNA, 19 nt, Artificial Sequence
  Description of Artificial Sequence: Synthetic oligonucleotide
  Antisense strand to SEQ ID NO: 849942
cucuagagcagacaacagg

SEQ ID NO: 849944 - RNA, 19 nt, Artificial Sequence
  Description of Artificial Sequence: Synthetic oligonucleotide
  Sense strand starting at position 3759 of SEQ ID NO: 588215
uguugucugcucuagagaa

SEQ ID NO: 849945 - RNA, 19 nt, Artificial Sequence
  Description of Artificial Sequence: Synthetic oligonucleotide
  Antisense strand to SEQ ID NO: 849944
uucucuagagcagacaaca

SEQ ID NO: 849946 - RNA, 19 nt, Artificial Sequence
  Description of Artificial Sequence: Synthetic oligonucleotide
  Sense strand starting at position 3796 of SEQ ID NO: 588215
uugauuguuggaggaauug

SEQ ID NO: 849947 - RNA, 19 nt, Artificial Sequence
  Description of Artificial Sequence: Synthetic oligonucleotide
  Antisense strand to SEQ ID NO: 849946
caauuccuccaacaaucaa

SEQ ID NO: 849948 - RNA, 19 nt, Artificial Sequence
  Description of Artificial Sequence: Synthetic oligonucleotide
  Sense strand starting at position 3808 of SEQ ID NO: 588215
ggaauugcccaggaaagcu

SEQ ID NO: 849949 - RNA, 19 nt, Artificial Sequence
  Description of Artificial Sequence: Synthetic oligonucleotide
  Antisense strand to SEQ ID NO: 849948
agcuuuccugggcaauucc

SEQ ID NO: 849950 - RNA, 19 nt, Artificial Sequence
  Description of Artificial Sequence: Synthetic oligonucleotide
  Sense strand starting at position 3931 of SEQ ID NO: 588215
cugccuuagucccuccaga

SEQ ID NO: 849951 - RNA, 19 nt, Artificial Sequence
  Description of Artificial Sequence: Synthetic oligonucleotide
  Antisense strand to SEQ ID NO: 849950
ucuggagggacuaaggcag

SEQ ID NO: 849952 - RNA, 19 nt, Artificial Sequence
  Description of Artificial Sequence: Synthetic oligonucleotide
  Sense strand starting at position 123 of SEQ ID NO: 588216
cguggaagguuccauuugu

SEQ ID NO: 849953 - RNA, 19 nt, Artificial Sequence
  Description of Artificial Sequence: Synthetic oligonucleotide
  Antisense strand to SEQ ID NO: 849952
acaaauggaaccuuccacg

SEQ ID NO: 849954 - RNA, 19 nt, Artificial Sequence
  Description of Artificial Sequence: Synthetic oligonucleotide
  Sense strand starting at position 129 of SEQ ID NO: 588216
agguuccauuuguugcaaa

SEQ ID NO: 849955 - RNA, 19 nt, Artificial Sequence
  Description of Artificial Sequence: Synthetic oligonucleotide
  Antisense strand to SEQ ID NO: 849954
uuugcaacaaauggaaccu

SEQ ID NO: 849956 - RNA, 19 nt, Artificial Sequence
  Description of Artificial Sequence: Synthetic oligonucleotide
  Sense strand starting at position 251 of SEQ ID NO: 588216
ggaggcuguuuccuguaau

SEQ ID NO: 849957 - RNA, 19 nt, Artificial Sequence
  Description of Artificial Sequence: Synthetic oligonucleotide
  Antisense strand to SEQ ID NO: 849956
auuacaggaaacagccucc

SEQ ID NO: 849958 - RNA, 19 nt, Artificial Sequence
  Description of Artificial Sequence: Synthetic oligonucleotide
  Sense strand starting at position 254 of SEQ ID NO: 588216
ggcuguuuccuguaauagc

SEQ ID NO: 849959 - RNA, 19 nt, Artificial Sequence
  Description of Artificial Sequence: Synthetic oligonucleotide
  Antisense strand to SEQ ID NO: 849958
gcuauuacaggaaacagcc

SEQ ID NO: 849960 - RNA, 19 nt, Artificial Sequence
  Description of Artificial Sequence: Synthetic oligonucleotide
  Sense strand starting at position 321 of SEQ ID NO: 588216
guaaguuacuucucugccu

SEQ ID NO: 849961 - RNA, 19 nt, Artificial Sequence
  Description of Artificial Sequence: Synthetic oligonucleotide
  Antisense strand to SEQ ID NO: 849960
aggcagagaaguaacuuac

SEQ ID NO: 849962 - RNA, 19 nt, Artificial Sequence
  Description of Artificial Sequence: Synthetic oligonucleotide
  Sense strand starting at position 385 of SEQ ID NO: 588216
gguugugagguuuaaagag

SEQ ID NO: 849963 - RNA, 19 nt, Artificial Sequence
  Description of Artificial Sequence: Synthetic oligonucleotide
  Antisense strand to SEQ ID NO: 849962
cucuuuaaaccucacaacc

SEQ ID NO: 849964 - RNA, 19 nt, Artificial Sequence
  Description of Artificial Sequence: Synthetic oligonucleotide
  Sense strand starting at position 521 of SEQ ID NO: 588216
gugcuaucuugagcacgaa

SEQ ID NO: 849965 - RNA, 19 nt, Artificial Sequence
  Description of Artificial Sequence: Synthetic oligonucleotide
  Antisense strand to SEQ ID NO: 849964
uucgugcucaagauagcac

SEQ ID NO: 849966 - RNA, 19 nt, Artificial Sequence
  Description of Artificial Sequence: Synthetic oligonucleotide
  Sense strand starting at position 522 of SEQ ID NO: 588216
ugcuaucuugagcacgaaa

SEQ ID NO: 849967 - RNA, 19 nt, Artificial Sequence
  Description of Artificial Sequence: Synthetic oligonucleotide
  Antisense strand to SEQ ID NO: 849966
uuucgugcucaagauagca

SEQ ID NO: 849968 - RNA, 19 nt, Artificial Sequence
  Description of Artificial Sequence: Synthetic oligonucleotide
  Sense strand starting at position 524 of SEQ ID NO: 588216
cuaucuugagcacgaaacu

SEQ ID NO: 849969 - RNA, 19 nt, Artificial Sequence
  Description of Artificial Sequence: Synthetic oligonucleotide
  Antisense strand to SEQ ID NO: 849968
aguuucgugcucaagauag

SEQ ID NO: 849970 - RNA, 19 nt, Artificial Sequence
  Description of Artificial Sequence: Synthetic oligonucleotide
  Sense strand starting at position 586 of SEQ ID NO: 588216
aucaccaucugguaggaaa

SEQ ID NO: 849971 - RNA, 19 nt, Artificial Sequence
  Description of Artificial Sequence: Synthetic oligonucleotide
  Antisense strand to SEQ ID NO: 849970
uuuccuaccagauggugau

SEQ ID NO: 849972 - RNA, 19 nt, Artificial Sequence
  Description of Artificial Sequence: Synthetic oligonucleotide
  Sense strand starting at position 893 of SEQ ID NO: 588216
agggcagaugccuaucaua

SEQ ID NO: 849973 - RNA, 19 nt, Artificial Sequence
  Description of Artificial Sequence: Synthetic oligonucleotide
  Antisense strand to SEQ ID NO: 849972
uaugauaggcaucugcccu

SEQ ID NO: 849974 - RNA, 19 nt, Artificial Sequence
  Description of Artificial Sequence: Synthetic oligonucleotide
  Sense strand starting at position 1248 of SEQ ID NO: 588216
agcacugagauucgucagu

SEQ ID NO: 849975 - RNA, 19 nt, Artificial Sequence
  Description of Artificial Sequence: Synthetic oligonucleotide
  Antisense strand to SEQ ID NO: 849974
acugacgaaucucagugcu

SEQ ID NO: 849976 - RNA, 19 nt, Artificial Sequence
  Description of Artificial Sequence: Synthetic oligonucleotide
  Sense strand starting at position 1250 of SEQ ID NO: 588216
cacugagauucgucaguuu

SEQ ID NO: 849977 - RNA, 19 nt, Artificial Sequence
  Description of Artificial Sequence: Synthetic oligonucleotide
  Antisense strand to SEQ ID NO: 849976
aaacugacgaaucucagug

SEQ ID NO: 849978 - RNA, 19 nt, Artificial Sequence
  Description of Artificial Sequence: Synthetic oligonucleotide
  Sense strand starting at position 1253 of SEQ ID NO: 588216
ugagauucgucaguuuccu

SEQ ID NO: 849979 - RNA, 19 nt, Artificial Sequence
  Description of Artificial Sequence: Synthetic oligonucleotide
  Antisense strand to SEQ ID NO: 849978
aggaaacugacgaaucuca

SEQ ID NO: 849980 - RNA, 19 nt, Artificial Sequence
  Description of Artificial Sequence: Synthetic oligonucleotide
  Sense strand starting at position 1257 of SEQ ID NO: 588216
auucgucaguuuccuaagu

SEQ ID NO: 849981 - RNA, 19 nt, Artificial Sequence
  Description of Artificial Sequence: Synthetic oligonucleotide
  Antisense strand to SEQ ID NO: 849980
acuuaggaaacugacgaau

SEQ ID NO: 849982 - RNA, 19 nt, Artificial Sequence
  Description of Artificial Sequence: Synthetic oligonucleotide
  Sense strand starting at position 1321 of SEQ ID NO: 588216
gggccuguuacagaaguuu

SEQ ID NO: 849983 - RNA, 19 nt, Artificial Sequence
  Description of Artificial Sequence: Synthetic oligonucleotide
  Antisense strand to SEQ ID NO: 849982
aaacuucuguaacaggccc

SEQ ID NO: 849984 - RNA, 19 nt, Artificial Sequence
  Description of Artificial Sequence: Synthetic oligonucleotide
  Sense strand starting at position 1447 of SEQ ID NO: 588216
ccuggacugggccagaauu

SEQ ID NO: 849985 - RNA, 19 nt, Artificial Sequence
  Description of Artificial Sequence: Synthetic oligonucleotide
  Antisense strand to SEQ ID NO: 849984
aauucuggcccaguccagg

SEQ ID NO: 849986 - RNA, 19 nt, Artificial Sequence
  Description of Artificial Sequence: Synthetic oligonucleotide
  Sense strand starting at position 1492 of SEQ ID NO: 588216
ggagcugucucgccauaca

SEQ ID NO: 849987 - RNA, 19 nt, Artificial Sequence
  Description of Artificial Sequence: Synthetic oligonucleotide
  Antisense strand to SEQ ID NO: 849986
uguauggcgagacagcucc

SEQ ID NO: 849988 - RNA, 19 nt, Artificial Sequence
  Description of Artificial Sequence: Synthetic oligonucleotide
  Sense strand starting at position 2117 of SEQ ID NO: 588216
gcuggaggccgcguuucau

SEQ ID NO: 849989 - RNA, 19 nt, Artificial Sequence
  Description of Artificial Sequence: Synthetic oligonucleotide
  Antisense strand to SEQ ID NO: 849988
augaaacgcggccuccagc

SEQ ID NO: 849990 - RNA, 19 nt, Artificial Sequence
  Description of Artificial Sequence: Synthetic oligonucleotide
  Sense strand starting at position 2297 of SEQ ID NO: 588216
ggcaguauuugagaccaga

SEQ ID NO: 849991 - RNA, 19 nt, Artificial Sequence
  Description of Artificial Sequence: Synthetic oligonucleotide
  Antisense strand to SEQ ID NO: 849990
ucuggucucaaauacugcc

SEQ ID NO: 849992 - RNA, 19 nt, Artificial Sequence
  Description of Artificial Sequence: Synthetic oligonucleotide
  Sense strand starting at position 2489 of SEQ ID NO: 588216
gggacuuguuucuaaugga

SEQ ID NO: 849993 - RNA, 19 nt, Artificial Sequence
  Description of Artificial Sequence: Synthetic oligonucleotide
  Antisense strand to SEQ ID NO: 849992
uccauuagaaacaaguccc

SEQ ID NO: 849994 - RNA, 19 nt, Artificial Sequence
  Description of Artificial Sequence: Synthetic oligonucleotide
  Sense strand starting at position 2512 of SEQ ID NO: 588216
uguguaugugcuguauugu

SEQ ID NO: 849995 - RNA, 19 nt, Artificial Sequence
  Description of Artificial Sequence: Synthetic oligonucleotide
  Antisense strand to SEQ ID NO: 849994
acaauacagcacauacaca

SEQ ID NO: 849996 - RNA, 19 nt, Artificial Sequence
  Description of Artificial Sequence: Synthetic oligonucleotide
  Sense strand starting at position 2513 of SEQ ID NO: 588216
guguaugugcuguauuguu

SEQ ID NO: 849997 - RNA, 19 nt, Artificial Sequence
  Description of Artificial Sequence: Synthetic oligonucleotide
  Antisense strand to SEQ ID NO: 849996
aacaauacagcacauacac

SEQ ID NO: 849998 - RNA, 19 nt, Artificial Sequence
  Description of Artificial Sequence: Synthetic oligonucleotide
  Sense strand starting at position 2518 of SEQ ID NO: 588216
ugugcuguauuguuaagag

SEQ ID NO: 849999 - RNA, 19 nt, Artificial Sequence
  Description of Artificial Sequence: Synthetic oligonucleotide
  Antisense strand to SEQ ID NO: 849998
cucuuaacaauacagcaca

SEQ ID NO: 850000 - RNA, 19 nt, Artificial Sequence
  Description of Artificial Sequence: Synthetic oligonucleotide
  Sense strand starting at position 2549 of SEQ ID NO: 588216
gucagacuaggcugugauu

SEQ ID NO: 850001 - RNA, 19 nt, Artificial Sequence
  Description of Artificial Sequence: Synthetic oligonucleotide
  Antisense strand to SEQ ID NO: 850000
aaucacagccuagucugac

SEQ ID NO: 850002 - RNA, 19 nt, Artificial Sequence
  Description of Artificial Sequence: Synthetic oligonucleotide
  Sense strand starting at position 2584 of SEQ ID NO: 588216
uuauuaucgucuuugguaa

SEQ ID NO: 850003 - RNA, 19 nt, Artificial Sequence
  Description of Artificial Sequence: Synthetic oligonucleotide
  Antisense strand to SEQ ID NO: 850002
uuaccaaagacgauaauaa

SEQ ID NO: 850004 - RNA, 19 nt, Artificial Sequence
  Description of Artificial Sequence: Synthetic oligonucleotide
  Sense strand starting at position 2585 of SEQ ID NO: 588216
uauuaucgucuuugguaaa

SEQ ID NO: 850005 - RNA, 19 nt, Artificial Sequence
  Description of Artificial Sequence: Synthetic oligonucleotide
  Antisense strand to SEQ ID NO: 850004
uuuaccaaagacgauaaua

SEQ ID NO: 850006 - RNA, 19 nt, Artificial Sequence
  Description of Artificial Sequence: Synthetic oligonucleotide
  Sense strand starting at position 2657 of SEQ ID NO: 588216
acuucaugaggucguguga

SEQ ID NO: 850007 - RNA, 19 nt, Artificial Sequence
  Description of Artificial Sequence: Synthetic oligonucleotide
  Antisense strand to SEQ ID NO: 850006
ucacacgaccucaugaagu

SEQ ID NO: 850008 - RNA, 19 nt, Artificial Sequence
  Description of Artificial Sequence: Synthetic oligonucleotide
  Sense strand starting at position 2725 of SEQ ID NO: 588216
acucacucguguucccaau

SEQ ID NO: 850009 - RNA, 19 nt, Artificial Sequence
  Description of Artificial Sequence: Synthetic oligonucleotide
  Antisense strand to SEQ ID NO: 850008
auugggaacacgagugagu

SEQ ID NO: 850010 - RNA, 19 nt, Artificial Sequence
  Description of Artificial Sequence: Synthetic oligonucleotide
  Sense strand starting at position 2770 of SEQ ID NO: 588216
aucgccauccuucguaauu

SEQ ID NO: 850011 - RNA, 19 nt, Artificial Sequence
  Description of Artificial Sequence: Synthetic oligonucleotide
  Antisense strand to SEQ ID NO: 850010
aauuacgaaggauggcgau

SEQ ID NO: 850012 - RNA, 19 nt, Artificial Sequence
  Description of Artificial Sequence: Synthetic oligonucleotide
  Sense strand starting at position 2771 of SEQ ID NO: 588216
ucgccauccuucguaauuu

SEQ ID NO: 850013 - RNA, 19 nt, Artificial Sequence
  Description of Artificial Sequence: Synthetic oligonucleotide
  Antisense strand to SEQ ID NO: 850012
aaauuacgaaggauggcga

SEQ ID NO: 850014 - RNA, 19 nt, Artificial Sequence
  Description of Artificial Sequence: Synthetic oligonucleotide
  Sense strand starting at position 2842 of SEQ ID NO: 588216
ccuugugcuuuccuuguau

SEQ ID NO: 850015 - RNA, 19 nt, Artificial Sequence
  Description of Artificial Sequence: Synthetic oligonucleotide
  Antisense strand to SEQ ID NO: 850014
auacaaggaaagcacaagg

SEQ ID NO: 850016 - RNA, 19 nt, Artificial Sequence
  Description of Artificial Sequence: Synthetic oligonucleotide
  Sense strand starting at position 2888 of SEQ ID NO: 588216
gcgugugugcguuuacaca

SEQ ID NO: 850017 - RNA, 19 nt, Artificial Sequence
  Description of Artificial Sequence: Synthetic oligonucleotide
  Antisense strand to SEQ ID NO: 850016
uguguaaacgcacacacgc

SEQ ID NO: 850018 - RNA, 19 nt, Artificial Sequence
  Description of Artificial Sequence: Synthetic oligonucleotide
  Sense strand starting at position 3034 of SEQ ID NO: 588216
uaauauuagguuugcgcaa

SEQ ID NO: 850019 - RNA, 19 nt, Artificial Sequence
  Description of Artificial Sequence: Synthetic oligonucleotide
  Antisense strand to SEQ ID NO: 850018
uugcgcaaaccuaauauua

SEQ ID NO: 850020 - RNA, 19 nt, Artificial Sequence
  Description of Artificial Sequence: Synthetic oligonucleotide
  Sense strand starting at position 3035 of SEQ ID NO: 588216
aauauuagguuugcgcaaa

SEQ ID NO: 850021 - RNA, 19 nt, Artificial Sequence
  Description of Artificial Sequence: Synthetic oligonucleotide
  Antisense strand to SEQ ID NO: 850020
uuugcgcaaaccuaauauu

SEQ ID NO: 850022 - RNA, 19 nt, Artificial Sequence
  Description of Artificial Sequence: Synthetic oligonucleotide
  Sense strand starting at position 3445 of SEQ ID NO: 588216
ccuucuuucuuaguggaca

SEQ ID NO: 850023 - RNA, 19 nt, Artificial Sequence
  Description of Artificial Sequence: Synthetic oligonucleotide
  Antisense strand to SEQ ID NO: 850022
uguccacuaagaaagaagg

SEQ ID NO: 850024 - RNA, 19 nt, Artificial Sequence
  Description of Artificial Sequence: Synthetic oligonucleotide
  Sense strand starting at position 3465 of SEQ ID NO: 588216
gaaggugauuuccagccuu

SEQ ID NO: 850025 - RNA, 19 nt, Artificial Sequence
  Description of Artificial Sequence: Synthetic oligonucleotide
  Antisense strand to SEQ ID NO: 850024
aaggcuggaaaucaccuuc

SEQ ID NO: 850026 - RNA, 19 nt, Artificial Sequence
  Description of Artificial Sequence: Synthetic oligonucleotide
  Sense strand starting at position 3489 of SEQ ID NO: 588216
caggccuugcccugauaca

SEQ ID NO: 850027 - RNA, 19 nt, Artificial Sequence
  Description of Artificial Sequence: Synthetic oligonucleotide
  Antisense strand to SEQ ID NO: 850026
uguaucagggcaaggccug

SEQ ID NO: 850028 - RNA, 19 nt, Artificial Sequence
  Description of Artificial Sequence: Synthetic oligonucleotide
  Sense strand starting at position 3848 of SEQ ID NO: 588216
ucugguagaugggucuaaa

SEQ ID NO: 850029 - RNA, 19 nt, Artificial Sequence
  Description of Artificial Sequence: Synthetic oligonucleotide
  Antisense strand to SEQ ID NO: 850028
uuuagacccaucuaccaga

SEQ ID NO: 850030 - RNA, 19 nt, Artificial Sequence
  Description of Artificial Sequence: Synthetic oligonucleotide
  Sense strand starting at position 3925 of SEQ ID NO: 588216
gaugcagggucuuacuaug

SEQ ID NO: 850031 - RNA, 19 nt, Artificial Sequence
  Description of Artificial Sequence: Synthetic oligonucleotide
  Antisense strand to SEQ ID NO: 850030
cauaguaagacccugcauc

SEQ ID NO: 850032 - RNA, 19 nt, Artificial Sequence
  Description of Artificial Sequence: Synthetic oligonucleotide
  Sense strand starting at position 48 of SEQ ID NO: 588217
uuuaguaagcaugauugaa

SEQ ID NO: 850033 - RNA, 19 nt, Artificial Sequence
  Description of Artificial Sequence: Synthetic oligonucleotide
  Antisense strand to SEQ ID NO: 850032
uucaaucaugcuuacuaaa

SEQ ID NO: 850034 - RNA, 19 nt, Artificial Sequence
  Description of Artificial Sequence: Synthetic oligonucleotide
  Sense strand starting at position 50 of SEQ ID NO: 588217
uaguaagcaugauugaaac

SEQ ID NO: 850035 - RNA, 19 nt, Artificial Sequence
  Description of Artificial Sequence: Synthetic oligonucleotide
  Antisense strand to SEQ ID NO: 850034
guuucaaucaugcuuacua

SEQ ID NO: 850036 - RNA, 19 nt, Artificial Sequence
  Description of Artificial Sequence: Synthetic oligonucleotide
  Sense strand starting at position 93 of SEQ ID NO: 588217
uucuguuagccagaauauu

SEQ ID NO: 850037 - RNA, 19 nt, Artificial Sequence
  Description of Artificial Sequence: Synthetic oligonucleotide
  Antisense strand to SEQ ID NO: 850036
aauauucuggcuaacagaa

SEQ ID NO: 850038 - RNA, 19 nt, Artificial Sequence
  Description of Artificial Sequence: Synthetic oligonucleotide
  Sense strand starting at position 123 of SEQ ID NO: 588217
auaauucugguugguugaa

SEQ ID NO: 850039 - RNA, 19 nt, Artificial Sequence
  Description of Artificial Sequence: Synthetic oligonucleotide
  Antisense strand to SEQ ID NO: 850038
uucaaccaaccagaauuau

SEQ ID NO: 850040 - RNA, 19 nt, Artificial Sequence
  Description of Artificial Sequence: Synthetic oligonucleotide
  Sense strand starting at position 145 of SEQ ID NO: 588217
uucuuauacccucaggguu

SEQ ID NO: 850041 - RNA, 19 nt, Artificial Sequence
  Description of Artificial Sequence: Synthetic oligonucleotide
  Antisense strand to SEQ ID NO: 850040
aacccugaggguauaagaa

SEQ ID NO: 850042 - RNA, 19 nt, Artificial Sequence
  Description of Artificial Sequence: Synthetic oligonucleotide
  Sense strand starting at position 178 of SEQ ID NO: 588217
caaaguauugccuagcaag

SEQ ID NO: 850043 - RNA, 19 nt, Artificial Sequence
  Description of Artificial Sequence: Synthetic oligonucleotide
  Antisense strand to SEQ ID NO: 850042
cuugcuaggcaauacuuug

SEQ ID NO: 850044 - RNA, 19 nt, Artificial Sequence
  Description of Artificial Sequence: Synthetic oligonucleotide
  Sense strand starting at position 545 of SEQ ID NO: 588217
ccgugugaucuggaaauuc

SEQ ID NO: 850045 - RNA, 19 nt, Artificial Sequence
  Description of Artificial Sequence: Synthetic oligonucleotide
  Antisense strand to SEQ ID NO: 850044
gaauuuccagaucacacgg

SEQ ID NO: 850046 - RNA, 19 nt, Artificial Sequence
  Description of Artificial Sequence: Synthetic oligonucleotide
  Sense strand starting at position 711 of SEQ ID NO: 588217
gguauauacauacgagaga

SEQ ID NO: 850047 - RNA, 19 nt, Artificial Sequence
  Description of Artificial Sequence: Synthetic oligonucleotide
  Antisense strand to SEQ ID NO: 850046
ucucucguauguauauacc

SEQ ID NO: 850048 - RNA, 19 nt, Artificial Sequence
  Description of Artificial Sequence: Synthetic oligonucleotide
  Sense strand starting at position 939 of SEQ ID NO: 588217
ccuggaaggaguuguugaa

SEQ ID NO: 850049 - RNA, 19 nt, Artificial Sequence
  Description of Artificial Sequence: Synthetic oligonucleotide
  Antisense strand to SEQ ID NO: 850048
uucaacaacuccuuccagg

SEQ ID NO: 850050 - RNA, 19 nt, Artificial Sequence
  Description of Artificial Sequence: Synthetic oligonucleotide
  Sense strand starting at position 946 of SEQ ID NO: 588217
ggaguuguugaaugaguag

SEQ ID NO: 850051 - RNA, 19 nt, Artificial Sequence
  Description of Artificial Sequence: Synthetic oligonucleotide
  Antisense strand to SEQ ID NO: 850050
cuacucauucaacaacucc

SEQ ID NO: 850052 - RNA, 19 nt, Artificial Sequence
  Description of Artificial Sequence: Synthetic oligonucleotide
  Sense strand starting at position 960 of SEQ ID NO: 588217
aguagaguuucaguaugga

SEQ ID NO: 850053 - RNA, 19 nt, Artificial Sequence
  Description of Artificial Sequence: Synthetic oligonucleotide
  Antisense strand to SEQ ID NO: 850052
uccauacugaaacucuacu

SEQ ID NO: 850054 - RNA, 19 nt, Artificial Sequence
  Description of Artificial Sequence: Synthetic oligonucleotide
  Sense strand starting at position 963 of SEQ ID NO: 588217
agaguuucaguauggaaag

SEQ ID NO: 850055 - RNA, 19 nt, Artificial Sequence
  Description of Artificial Sequence: Synthetic oligonucleotide
  Antisense strand to SEQ ID NO: 850054
cuuuccauacugaaacucu

SEQ ID NO: 850056 - RNA, 19 nt, Artificial Sequence
  Description of Artificial Sequence: Synthetic oligonucleotide
  Sense strand starting at position 1007 of SEQ ID NO: 588217
uggugauaauugcccaaug

SEQ ID NO: 850057 - RNA, 19 nt, Artificial Sequence
  Description of Artificial Sequence: Synthetic oligonucleotide
  Antisense strand to SEQ ID NO: 850056
cauugggcaauuaucacca

SEQ ID NO: 850058 - RNA, 19 nt, Artificial Sequence
  Description of Artificial Sequence: Synthetic oligonucleotide
  Sense strand starting at position 1008 of SEQ ID NO: 588217
ggugauaauugcccaauga

SEQ ID NO: 850059 - RNA, 19 nt, Artificial Sequence
  Description of Artificial Sequence: Synthetic oligonucleotide
  Antisense strand to SEQ ID NO: 850058
ucauugggcaauuaucacc

SEQ ID NO: 850060 - RNA, 19 nt, Artificial Sequence
  Description of Artificial Sequence: Synthetic oligonucleotide
  Sense strand starting at position 1009 of SEQ ID NO: 588217
gugauaauugcccaaugau

SEQ ID NO: 850061 - RNA, 19 nt, Artificial Sequence
  Description of Artificial Sequence: Synthetic oligonucleotide
  Antisense strand to SEQ ID NO: 850060
aucauugggcaauuaucac

SEQ ID NO: 850062 - RNA, 19 nt, Artificial Sequence
  Description of Artificial Sequence: Synthetic oligonucleotide
  Sense strand starting at position 1215 of SEQ ID NO: 588217
uuguuuaugccacagagga

SEQ ID NO: 850063 - RNA, 19 nt, Artificial Sequence
  Description of Artificial Sequence: Synthetic oligonucleotide
  Antisense strand to SEQ ID NO: 850062
uccucuguggcauaaacaa

SEQ ID NO: 850064 - RNA, 19 nt, Artificial Sequence
  Description of Artificial Sequence: Synthetic oligonucleotide
  Sense strand starting at position 1264 of SEQ ID NO: 588217
uccaauaaggaguguguaa

SEQ ID NO: 850065 - RNA, 19 nt, Artificial Sequence
  Description of Artificial Sequence: Synthetic oligonucleotide
  Antisense strand to SEQ ID NO: 850064
uuacacacuccuuauugga

SEQ ID NO: 850066 - RNA, 19 nt, Artificial Sequence
  Description of Artificial Sequence: Synthetic oligonucleotide
  Sense strand starting at position 1454 of SEQ ID NO: 588217
gagcauaaugaauguugua

SEQ ID NO: 850067 - RNA, 19 nt, Artificial Sequence
  Description of Artificial Sequence: Synthetic oligonucleotide
  Antisense strand to SEQ ID NO: 850066
uacaacauucauuaugcuc

SEQ ID NO: 850068 - RNA, 19 nt, Artificial Sequence
  Description of Artificial Sequence: Synthetic oligonucleotide
  Sense strand starting at position 1730 of SEQ ID NO: 588217
gggagacauuaguuaugca

SEQ ID NO: 850069 - RNA, 19 nt, Artificial Sequence
  Description of Artificial Sequence: Synthetic oligonucleotide
  Antisense strand to SEQ ID NO: 850068
ugcauaacuaaugucuccc

SEQ ID NO: 850070 - RNA, 19 nt, Artificial Sequence
  Description of Artificial Sequence: Synthetic oligonucleotide
  Sense strand starting at position 1780 of SEQ ID NO: 588217
aagggucuguuccuauaac

SEQ ID NO: 850071 - RNA, 19 nt, Artificial Sequence
  Description of Artificial Sequence: Synthetic oligonucleotide
  Antisense strand to SEQ ID NO: 850070
guuauaggaacagacccuu

SEQ ID NO: 850072 - RNA, 19 nt, Artificial Sequence
  Description of Artificial Sequence: Synthetic oligonucleotide
  Sense strand starting at position 2081 of SEQ ID NO: 588217
cuuugauuugcuggcucuu

SEQ ID NO: 850073 - RNA, 19 nt, Artificial Sequence
  Description of Artificial Sequence: Synthetic oligonucleotide
  Antisense strand to SEQ ID NO: 850072
aagagccagcaaaucaaag

SEQ ID NO: 850074 - RNA, 19 nt, Artificial Sequence
  Description of Artificial Sequence: Synthetic oligonucleotide
  Sense strand starting at position 2104 of SEQ ID NO: 588217
ccugguaaaucagugggaa

SEQ ID NO: 850075 - RNA, 19 nt, Artificial Sequence
  Description of Artificial Sequence: Synthetic oligonucleotide
  Antisense strand to SEQ ID NO: 850074
uucccacugauuuaccagg

SEQ ID NO: 850076 - RNA, 19 nt, Artificial Sequence
  Description of Artificial Sequence: Synthetic oligonucleotide
  Sense strand starting at position 2105 of SEQ ID NO: 588217
cugguaaaucagugggaau

SEQ ID NO: 850077 - RNA, 19 nt, Artificial Sequence
  Description of Artificial Sequence: Synthetic oligonucleotide
  Antisense strand to SEQ ID NO: 850076
auucccacugauuuaccag

SEQ ID NO: 850078 - RNA, 19 nt, Artificial Sequence
  Description of Artificial Sequence: Synthetic oligonucleotide
  Sense strand starting at position 2106 of SEQ ID NO: 588217
ugguaaaucagugggaauu

SEQ ID NO: 850079 - RNA, 19 nt, Artificial Sequence
  Description of Artificial Sequence: Synthetic oligonucleotide
  Antisense strand to SEQ ID NO: 850078
aauucccacugauuuacca

SEQ ID NO: 850080 - RNA, 19 nt, Artificial Sequence
  Description of Artificial Sequence: Synthetic oligonucleotide
  Sense strand starting at position 2107 of SEQ ID NO: 588217
gguaaaucagugggaauuc

SEQ ID NO: 850081 - RNA, 19 nt, Artificial Sequence
  Description of Artificial Sequence: Synthetic oligonucleotide
  Antisense strand to SEQ ID NO: 850080
gaauucccacugauuuacc

SEQ ID NO: 850082 - RNA, 19 nt, Artificial Sequence
  Description of Artificial Sequence: Synthetic oligonucleotide
  Sense strand starting at position 2174 of SEQ ID NO: 588217
accucuggcuuauugagaa

SEQ ID NO: 850083 - RNA, 19 nt, Artificial Sequence
  Description of Artificial Sequence: Synthetic oligonucleotide
  Antisense strand to SEQ ID NO: 850082
uucucaauaagccagaggu

SEQ ID NO: 850084 - RNA, 19 nt, Artificial Sequence
  Description of Artificial Sequence: Synthetic oligonucleotide
  Sense strand starting at position 3135 of SEQ ID NO: 588217
ggcucuaugccagaugaga

SEQ ID NO: 850085 - RNA, 19 nt, Artificial Sequence
  Description of Artificial Sequence: Synthetic oligonucleotide
  Antisense strand to SEQ ID NO: 850084
ucucaucuggcauagagcc

SEQ ID NO: 850086 - RNA, 19 nt, Artificial Sequence
  Description of Artificial Sequence: Synthetic oligonucleotide
  Sense strand starting at position 3178 of SEQ ID NO: 588217
acguguucgucuaugagug

SEQ ID NO: 850087 - RNA, 19 nt, Artificial Sequence
  Description of Artificial Sequence: Synthetic oligonucleotide
  Antisense strand to SEQ ID NO: 850086
cacucauagacgaacacgu

SEQ ID NO: 850088 - RNA, 19 nt, Artificial Sequence
  Description of Artificial Sequence: Synthetic oligonucleotide
  Sense strand starting at position 3200 of SEQ ID NO: 588217
aguauugcuaaauggagua

SEQ ID NO: 850089 - RNA, 19 nt, Artificial Sequence
  Description of Artificial Sequence: Synthetic oligonucleotide
  Antisense strand to SEQ ID NO: 850088
uacuccauuuagcaauacu

SEQ ID NO: 850090 - RNA, 19 nt, Artificial Sequence
  Description of Artificial Sequence: Synthetic oligonucleotide
  Sense strand starting at position 3205 of SEQ ID NO: 588217
ugcuaaauggaguauaauu

SEQ ID NO: 850091 - RNA, 19 nt, Artificial Sequence
  Description of Artificial Sequence: Synthetic oligonucleotide
  Antisense strand to SEQ ID NO: 850090
aauuauacuccauuuagca

SEQ ID NO: 850092 - RNA, 19 nt, Artificial Sequence
  Description of Artificial Sequence: Synthetic oligonucleotide
  Sense strand starting at position 3293 of SEQ ID NO: 588217
gaaaucuggcaaggugaau

SEQ ID NO: 850093 - RNA, 19 nt, Artificial Sequence
  Description of Artificial Sequence: Synthetic oligonucleotide
  Antisense strand to SEQ ID NO: 850092
auucaccuugccagauuuc

SEQ ID NO: 850094 - RNA, 19 nt, Artificial Sequence
  Description of Artificial Sequence: Synthetic oligonucleotide
  Sense strand starting at position 3390 of SEQ ID NO: 588217
ugggaaaccuucccuuguu

SEQ ID NO: 850095 - RNA, 19 nt, Artificial Sequence
  Description of Artificial Sequence: Synthetic oligonucleotide
  Antisense strand to SEQ ID NO: 850094
aacaagggaagguuuccca

SEQ ID NO: 850096 - RNA, 19 nt, Artificial Sequence
  Description of Artificial Sequence: Synthetic oligonucleotide
  Sense strand starting at position 3402 of SEQ ID NO: 588217
ccuuguuggguuuaaagga

SEQ ID NO: 850097 - RNA, 19 nt, Artificial Sequence
  Description of Artificial Sequence: Synthetic oligonucleotide
  Antisense strand to SEQ ID NO: 850096
uccuuuaaacccaacaagg

SEQ ID NO: 850098 - RNA, 19 nt, Artificial Sequence
  Description of Artificial Sequence: Synthetic oligonucleotide
  Sense strand starting at position 3575 of SEQ ID NO: 588217
cuauucuaaucagucagua

SEQ ID NO: 850099 - RNA, 19 nt, Artificial Sequence
  Description of Artificial Sequence: Synthetic oligonucleotide
  Antisense strand to SEQ ID NO: 850098
uacugacugauuagaauag

SEQ ID NO: 850100 - RNA, 19 nt, Artificial Sequence
  Description of Artificial Sequence: Synthetic oligonucleotide
  Sense strand starting at position 3597 of SEQ ID NO: 588217
uuuggaaggccucaguaaa

SEQ ID NO: 850101 - RNA, 19 nt, Artificial Sequence
  Description of Artificial Sequence: Synthetic oligonucleotide
  Antisense strand to SEQ ID NO: 850100
uuuacugaggccuuccaaa

SEQ ID NO: 850102 - RNA, 19 nt, Artificial Sequence
  Description of Artificial Sequence: Synthetic oligonucleotide
  Sense strand starting at position 3670 of SEQ ID NO: 588217
cccaguagugaggauguca

SEQ ID NO: 850103 - RNA, 19 nt, Artificial Sequence
  Description of Artificial Sequence: Synthetic oligonucleotide
  Antisense strand to SEQ ID NO: 850102
ugacauccucacuacuggg

SEQ ID NO: 850104 - RNA, 19 nt, Artificial Sequence
  Description of Artificial Sequence: Synthetic oligonucleotide
  Sense strand starting at position 3678 of SEQ ID NO: 588217
ugaggaugucagcauucca

SEQ ID NO: 850105 - RNA, 19 nt, Artificial Sequence
  Description of Artificial Sequence: Synthetic oligonucleotide
  Antisense strand to SEQ ID NO: 850104
uggaaugcugacauccuca

SEQ ID NO: 850106 - RNA, 19 nt, Artificial Sequence
  Description of Artificial Sequence: Synthetic oligonucleotide
  Sense strand starting at position 3803 of SEQ ID NO: 588217
gaagguugcccucagggau

SEQ ID NO: 850107 - RNA, 19 nt, Artificial Sequence
  Description of Artificial Sequence: Synthetic oligonucleotide
  Antisense strand to SEQ ID NO: 850106
aucccugagggcaaccuuc

SEQ ID NO: 850108 - RNA, 19 nt, Artificial Sequence
  Description of Artificial Sequence: Synthetic oligonucleotide
  Sense strand starting at position 3816 of SEQ ID NO: 588217
agggauugcccaggaguuu

SEQ ID NO: 850109 - RNA, 19 nt, Artificial Sequence
  Description of Artificial Sequence: Synthetic oligonucleotide
  Antisense strand to SEQ ID NO: 850108
aaacuccugggcaaucccu

SEQ ID NO: 850110 - RNA, 19 nt, Artificial Sequence
  Description of Artificial Sequence: Synthetic oligonucleotide
  Sense strand starting at position 3963 of SEQ ID NO: 588217
gagauaacccugugcucag

SEQ ID NO: 850111 - RNA, 19 nt, Artificial Sequence
  Description of Artificial Sequence: Synthetic oligonucleotide
  Antisense strand to SEQ ID NO: 850110
cugagcacaggguuaucuc

SEQ ID NO: 850112 - RNA, 19 nt, Artificial Sequence
  Description of Artificial Sequence: Synthetic oligonucleotide
  Sense strand starting at position 170 of SEQ ID NO: 588218
gaguauagugaggaagucu

SEQ ID NO: 850113 - RNA, 19 nt, Artificial Sequence
  Description of Artificial Sequence: Synthetic oligonucleotide
  Antisense strand to SEQ ID NO: 850112
agacuuccucacuauacuc

SEQ ID NO: 850114 - RNA, 19 nt, Artificial Sequence
  Description of Artificial Sequence: Synthetic oligonucleotide
  Sense strand starting at position 305 of SEQ ID NO: 588218
agagcuggguucccagauu

SEQ ID NO: 850115 - RNA, 19 nt, Artificial Sequence
  Description of Artificial Sequence: Synthetic oligonucleotide
  Antisense strand to SEQ ID NO: 850114
aaucugggaacccagcucu

SEQ ID NO: 850116 - RNA, 19 nt, Artificial Sequence
  Description of Artificial Sequence: Synthetic oligonucleotide
  Sense strand starting at position 397 of SEQ ID NO: 588218
ggaugaaccgcucaagcuu

SEQ ID NO: 850117 - RNA, 19 nt, Artificial Sequence
  Description of Artificial Sequence: Synthetic oligonucleotide
  Antisense strand to SEQ ID NO: 850116
aagcuugagcgguucaucc

SEQ ID NO: 850118 - RNA, 19 nt, Artificial Sequence
  Description of Artificial Sequence: Synthetic oligonucleotide
  Sense strand starting at position 472 of SEQ ID NO: 588218
aggagcauuacggguaaca

SEQ ID NO: 850119 - RNA, 19 nt, Artificial Sequence
  Description of Artificial Sequence: Synthetic oligonucleotide
  Antisense strand to SEQ ID NO: 850118
uguuacccguaaugcuccu

SEQ ID NO: 850120 - RNA, 19 nt, Artificial Sequence
  Description of Artificial Sequence: Synthetic oligonucleotide
  Sense strand starting at position 474 of SEQ ID NO: 588218
gagcauuacggguaacaaa

SEQ ID NO: 850121 - RNA, 19 nt, Artificial Sequence
  Description of Artificial Sequence: Synthetic oligonucleotide
  Antisense strand to SEQ ID NO: 850120
uuuguuacccguaaugcuc

SEQ ID NO: 850122 - RNA, 19 nt, Artificial Sequence
  Description of Artificial Sequence: Synthetic oligonucleotide
  Sense strand starting at position 579 of SEQ ID NO: 588218
gcuugcaaucauugucuua

SEQ ID NO: 850123 - RNA, 19 nt, Artificial Sequence
  Description of Artificial Sequence: Synthetic oligonucleotide
  Antisense strand to SEQ ID NO: 850122
uaagacaaugauugcaagc

SEQ ID NO: 850124 - RNA, 19 nt, Artificial Sequence
  Description of Artificial Sequence: Synthetic oligonucleotide
  Sense strand starting at position 895 of SEQ ID NO: 588218
aagugaaaguuugucucaa

SEQ ID NO: 850125 - RNA, 19 nt, Artificial Sequence
  Description of Artificial Sequence: Synthetic oligonucleotide
  Antisense strand to SEQ ID NO: 850124
uugagacaaacuuucacuu

SEQ ID NO: 850126 - RNA, 19 nt, Artificial Sequence
  Description of Artificial Sequence: Synthetic oligonucleotide
  Sense strand starting at position 950 of SEQ ID NO: 588218
cugagucccaaaugaguga

SEQ ID NO: 850127 - RNA, 19 nt, Artificial Sequence
  Description of Artificial Sequence: Synthetic oligonucleotide
  Antisense strand to SEQ ID NO: 850126
ucacucauuugggacucag

SEQ ID NO: 850128 - RNA, 19 nt, Artificial Sequence
  Description of Artificial Sequence: Synthetic oligonucleotide
  Sense strand starting at position 963 of SEQ ID NO: 588218
gagugaguacaccaucuuu

SEQ ID NO: 850129 - RNA, 19 nt, Artificial Sequence
  Description of Artificial Sequence: Synthetic oligonucleotide
  Antisense strand to SEQ ID NO: 850128
aaagaugguguacucacuc

SEQ ID NO: 850130 - RNA, 19 nt, Artificial Sequence
  Description of Artificial Sequence: Synthetic oligonucleotide
  Sense strand starting at position 1018 of SEQ ID NO: 588218
ugccuuguauggucuccaa

SEQ ID NO: 850131 - RNA, 19 nt, Artificial Sequence
  Description of Artificial Sequence: Synthetic oligonucleotide
  Antisense strand to SEQ ID NO: 850130
uuggagaccauacaaggca

SEQ ID NO: 850132 - RNA, 19 nt, Artificial Sequence
  Description of Artificial Sequence: Synthetic oligonucleotide
  Sense strand starting at position 1046 of SEQ ID NO: 588218
ccaaauuccuggcuuggga

SEQ ID NO: 850133 - RNA, 19 nt, Artificial Sequence
  Description of Artificial Sequence: Synthetic oligonucleotide
  Antisense strand to SEQ ID NO: 850132
ucccaagccaggaauuugg

SEQ ID NO: 850134 - RNA, 19 nt, Artificial Sequence
  Description of Artificial Sequence: Synthetic oligonucleotide
  Sense strand starting at position 1110 of SEQ ID NO: 588218
gucucaauuuccucauugu

SEQ ID NO: 850135 - RNA, 19 nt, Artificial Sequence
  Description of Artificial Sequence: Synthetic oligonucleotide
  Antisense strand to SEQ ID NO: 850134
acaaugaggaaauugagac

SEQ ID NO: 850136 - RNA, 19 nt, Artificial Sequence
  Description of Artificial Sequence: Synthetic oligonucleotide
  Sense strand starting at position 1119 of SEQ ID NO: 588218
uccucauuguagccuaaga

SEQ ID NO: 850137 - RNA, 19 nt, Artificial Sequence
  Description of Artificial Sequence: Synthetic oligonucleotide
  Antisense strand to SEQ ID NO: 850136
ucuuaggcuacaaugagga

SEQ ID NO: 850138 - RNA, 19 nt, Artificial Sequence
  Description of Artificial Sequence: Synthetic oligonucleotide
  Sense strand starting at position 1121 of SEQ ID NO: 588218
cucauuguagccuaagaug

SEQ ID NO: 850139 - RNA, 19 nt, Artificial Sequence
  Description of Artificial Sequence: Synthetic oligonucleotide
  Antisense strand to SEQ ID NO: 850138
caucuuaggcuacaaugag

SEQ ID NO: 850140 - RNA, 19 nt, Artificial Sequence
  Description of Artificial Sequence: Synthetic oligonucleotide
  Sense strand starting at position 1385 of SEQ ID NO: 588218
ccuuucuaccuccgagagu

SEQ ID NO: 850141 - RNA, 19 nt, Artificial Sequence
  Description of Artificial Sequence: Synthetic oligonucleotide
  Antisense strand to SEQ ID NO: 850140
acucucggagguagaaagg

SEQ ID NO: 850142 - RNA, 19 nt, Artificial Sequence
  Description of Artificial Sequence: Synthetic oligonucleotide
  Sense strand starting at position 1462 of SEQ ID NO: 588218
cccuccuucccugagugaa

SEQ ID NO: 850143 - RNA, 19 nt, Artificial Sequence
  Description of Artificial Sequence: Synthetic oligonucleotide
  Antisense strand to SEQ ID NO: 850142
uucacucagggaaggaggg

SEQ ID NO: 850144 - RNA, 19 nt, Artificial Sequence
  Description of Artificial Sequence: Synthetic oligonucleotide
  Sense strand starting at position 1464 of SEQ ID NO: 588218
cuccuucccugagugaaca

SEQ ID NO: 850145 - RNA, 19 nt, Artificial Sequence
  Description of Artificial Sequence: Synthetic oligonucleotide
  Antisense strand to SEQ ID NO: 850144
uguucacucagggaaggag

SEQ ID NO: 850146 - RNA, 19 nt, Artificial Sequence
  Description of Artificial Sequence: Synthetic oligonucleotide
  Sense strand starting at position 1525 of SEQ ID NO: 588218
gaaccuggauuuggagauu

SEQ ID NO: 850147 - RNA, 19 nt, Artificial Sequence
  Description of Artificial Sequence: Synthetic oligonucleotide
  Antisense strand to SEQ ID NO: 850146
aaucuccaaauccagguuc

SEQ ID NO: 850148 - RNA, 19 nt, Artificial Sequence
  Description of Artificial Sequence: Synthetic oligonucleotide
  Sense strand starting at position 1999 of SEQ ID NO: 588218
ggcuguacgugcauuggaa

SEQ ID NO: 850149 - RNA, 19 nt, Artificial Sequence
  Description of Artificial Sequence: Synthetic oligonucleotide
  Antisense strand to SEQ ID NO: 850148
uuccaaugcacguacagcc

SEQ ID NO: 850150 - RNA, 19 nt, Artificial Sequence
  Description of Artificial Sequence: Synthetic oligonucleotide
  Sense strand starting at position 2371 of SEQ ID NO: 588218
gggaaagcagcucauguau

SEQ ID NO: 850151 - RNA, 19 nt, Artificial Sequence
  Description of Artificial Sequence: Synthetic oligonucleotide
  Antisense strand to SEQ ID NO: 850150
auacaugagcugcuuuccc

SEQ ID NO: 850152 - RNA, 19 nt, Artificial Sequence
  Description of Artificial Sequence: Synthetic oligonucleotide
  Sense strand starting at position 2455 of SEQ ID NO: 588218
gaguuaaguaauggguaug

SEQ ID NO: 850153 - RNA, 19 nt, Artificial Sequence
  Description of Artificial Sequence: Synthetic oligonucleotide
  Antisense strand to SEQ ID NO: 850152
cauacccauuacuuaacuc

SEQ ID NO: 850154 - RNA, 19 nt, Artificial Sequence
  Description of Artificial Sequence: Synthetic oligonucleotide
  Sense strand starting at position 2460 of SEQ ID NO: 588218
aaguaauggguauguggga

SEQ ID NO: 850155 - RNA, 19 nt, Artificial Sequence
  Description of Artificial Sequence: Synthetic oligonucleotide
  Antisense strand to SEQ ID NO: 850154
ucccacauacccauuacuu

SEQ ID NO: 850156 - RNA, 19 nt, Artificial Sequence
  Description of Artificial Sequence: Synthetic oligonucleotide
  Sense strand starting at position 2475 of SEQ ID NO: 588218
gggagacaaacuugagcuu

SEQ ID NO: 850157 - RNA, 19 nt, Artificial Sequence
  Description of Artificial Sequence: Synthetic oligonucleotide
  Antisense strand to SEQ ID NO: 850156
aagcucaaguuugucuccc

SEQ ID NO: 850158 - RNA, 19 nt, Artificial Sequence
  Description of Artificial Sequence: Synthetic oligonucleotide
  Sense strand starting at position 2525 of SEQ ID NO: 588218
cucugauagguuuaaccua

SEQ ID NO: 850159 - RNA, 19 nt, Artificial Sequence
  Description of Artificial Sequence: Synthetic oligonucleotide
  Antisense strand to SEQ ID NO: 850158
uagguuaaaccuaucagag

SEQ ID NO: 850160 - RNA, 19 nt, Artificial Sequence
  Description of Artificial Sequence: Synthetic oligonucleotide
  Sense strand starting at position 2621 of SEQ ID NO: 588218
guguacuucugacuuccaa

SEQ ID NO: 850161 - RNA, 19 nt, Artificial Sequence
  Description of Artificial Sequence: Synthetic oligonucleotide
  Antisense strand to SEQ ID NO: 850160
uuggaagucagaaguacac

SEQ ID NO: 850162 - RNA, 19 nt, Artificial Sequence
  Description of Artificial Sequence: Synthetic oligonucleotide
  Sense strand starting at position 2757 of SEQ ID NO: 588218
ucuaguucuugcucccuga

SEQ ID NO: 850163 - RNA, 19 nt, Artificial Sequence
  Description of Artificial Sequence: Synthetic oligonucleotide
  Antisense strand to SEQ ID NO: 850162
ucagggagcaagaacuaga

SEQ ID NO: 850164 - RNA, 19 nt, Artificial Sequence
  Description of Artificial Sequence: Synthetic oligonucleotide
  Sense strand starting at position 2760 of SEQ ID NO: 588218
aguucuugcucccugaaau

SEQ ID NO: 850165 - RNA, 19 nt, Artificial Sequence
  Description of Artificial Sequence: Synthetic oligonucleotide
  Antisense strand to SEQ ID NO: 850164
auuucagggagcaagaacu

SEQ ID NO: 850166 - RNA, 19 nt, Artificial Sequence
  Description of Artificial Sequence: Synthetic oligonucleotide
  Sense strand starting at position 2761 of SEQ ID NO: 588218
guucuugcucccugaaaug

SEQ ID NO: 850167 - RNA, 19 nt, Artificial Sequence
  Description of Artificial Sequence: Synthetic oligonucleotide
  Antisense strand to SEQ ID NO: 850166
cauuucagggagcaagaac

SEQ ID NO: 850168 - RNA, 19 nt, Artificial Sequence
  Description of Artificial Sequence: Synthetic oligonucleotide
  Sense strand starting at position 3028 of SEQ ID NO: 588218
gcugaaaugggaugauggu

SEQ ID NO: 850169 - RNA, 19 nt, Artificial Sequence
  Description of Artificial Sequence: Synthetic oligonucleotide
  Antisense strand to SEQ ID NO: 850168
accaucaucccauuucagc

SEQ ID NO: 850170 - RNA, 19 nt, Artificial Sequence
  Description of Artificial Sequence: Synthetic oligonucleotide
  Sense strand starting at position 3197 of SEQ ID NO: 588218
gagggcaaacccugucaau

SEQ ID NO: 850171 - RNA, 19 nt, Artificial Sequence
  Description of Artificial Sequence: Synthetic oligonucleotide
  Antisense strand to SEQ ID NO: 850170
auugacaggguuugcccuc

SEQ ID NO: 850172 - RNA, 19 nt, Artificial Sequence
  Description of Artificial Sequence: Synthetic oligonucleotide
  Sense strand starting at position 3214 of SEQ ID NO: 588218
auaucaucauauugaggga

SEQ ID NO: 850173 - RNA, 19 nt, Artificial Sequence
  Description of Artificial Sequence: Synthetic oligonucleotide
  Antisense strand to SEQ ID NO: 850172
ucccucaauaugaugauau

SEQ ID NO: 850174 - RNA, 19 nt, Artificial Sequence
  Description of Artificial Sequence: Synthetic oligonucleotide
  Sense strand starting at position 3279 of SEQ ID NO: 588218
uugaucauguccuugaaga

SEQ ID NO: 850175 - RNA, 19 nt, Artificial Sequence
  Description of Artificial Sequence: Synthetic oligonucleotide
  Antisense strand to SEQ ID NO: 850174
ucuucaaggacaugaucaa

SEQ ID NO: 850176 - RNA, 19 nt, Artificial Sequence
  Description of Artificial Sequence: Synthetic oligonucleotide
  Sense strand starting at position 3280 of SEQ ID NO: 588218
ugaucauguccuugaagaa

SEQ ID NO: 850177 - RNA, 19 nt, Artificial Sequence
  Description of Artificial Sequence: Synthetic oligonucleotide
  Antisense strand to SEQ ID NO: 850176
uucuucaaggacaugauca

SEQ ID NO: 850178 - RNA, 19 nt, Artificial Sequence
  Description of Artificial Sequence: Synthetic oligonucleotide
  Sense strand starting at position 3331 of SEQ ID NO: 588218
aaugauauucugggcaaag

SEQ ID NO: 850179 - RNA, 19 nt, Artificial Sequence
  Description of Artificial Sequence: Synthetic oligonucleotide
  Antisense strand to SEQ ID NO: 850178
cuuugcccagaauaucauu

SEQ ID NO: 850180 - RNA, 19 nt, Artificial Sequence
  Description of Artificial Sequence: Synthetic oligonucleotide
  Sense strand starting at position 3362 of SEQ ID NO: 588218
auauuaugagcaggagagu

SEQ ID NO: 850181 - RNA, 19 nt, Artificial Sequence
  Description of Artificial Sequence: Synthetic oligonucleotide
  Antisense strand to SEQ ID NO: 850180
acucuccugcucauaauau

SEQ ID NO: 850182 - RNA, 19 nt, Artificial Sequence
  Description of Artificial Sequence: Synthetic oligonucleotide
  Sense strand starting at position 3425 of SEQ ID NO: 588218
gcuaguauggagcacagau

SEQ ID NO: 850183 - RNA, 19 nt, Artificial Sequence
  Description of Artificial Sequence: Synthetic oligonucleotide
  Antisense strand to SEQ ID NO: 850182
aucugugcuccauacuagc

SEQ ID NO: 850184 - RNA, 19 nt, Artificial Sequence
  Description of Artificial Sequence: Synthetic oligonucleotide
  Sense strand starting at position 3934 of SEQ ID NO: 588218
cccuguuacugaucagcau

SEQ ID NO: 850185 - RNA, 19 nt, Artificial Sequence
  Description of Artificial Sequence: Synthetic oligonucleotide
  Antisense strand to SEQ ID NO: 850184
augcugaucaguaacaggg

SEQ ID NO: 850186 - RNA, 19 nt, Artificial Sequence
  Description of Artificial Sequence: Synthetic oligonucleotide
  Sense strand starting at position 3935 of SEQ ID NO: 588218
ccuguuacugaucagcauu

SEQ ID NO: 850187 - RNA, 19 nt, Artificial Sequence
  Description of Artificial Sequence: Synthetic oligonucleotide
  Antisense strand to SEQ ID NO: 850186
aaugcugaucaguaacagg

SEQ ID NO: 850188 - RNA, 19 nt, Artificial Sequence
  Description of Artificial Sequence: Synthetic oligonucleotide
  Sense strand starting at position 3937 of SEQ ID NO: 588218
uguuacugaucagcauuga

SEQ ID NO: 850189 - RNA, 19 nt, Artificial Sequence
  Description of Artificial Sequence: Synthetic oligonucleotide
  Antisense strand to SEQ ID NO: 850188
ucaaugcugaucaguaaca

SEQ ID NO: 850190 - RNA, 19 nt, Artificial Sequence
  Description of Artificial Sequence: Synthetic oligonucleotide
  Sense strand starting at position 3941 of SEQ ID NO: 588218
acugaucagcauugaguuu

SEQ ID NO: 850191 - RNA, 19 nt, Artificial Sequence
  Description of Artificial Sequence: Synthetic oligonucleotide
  Antisense strand to SEQ ID NO: 850190
aaacucaaugcugaucagu

SEQ ID NO: 850192 - RNA, 19 nt, Artificial Sequence
  Description of Artificial Sequence: Synthetic oligonucleotide
  Sense strand starting at position 570 of SEQ ID NO: 588219
auauauacuguuuggacua

SEQ ID NO: 850193 - RNA, 19 nt, Artificial Sequence
  Description of Artificial Sequence: Synthetic oligonucleotide
  Antisense strand to SEQ ID NO: 850192
uaguccaaacaguauauau

SEQ ID NO: 850194 - RNA, 19 nt, Artificial Sequence
  Description of Artificial Sequence: Synthetic oligonucleotide
  Sense strand starting at position 577 of SEQ ID NO: 588219
cuguuuggacuauaaaucu

SEQ ID NO: 850195 - RNA, 19 nt, Artificial Sequence
  Description of Artificial Sequence: Synthetic oligonucleotide
  Antisense strand to SEQ ID NO: 850194
agauuuauaguccaaacag

SEQ ID NO: 850196 - RNA, 19 nt, Artificial Sequence
  Description of Artificial Sequence: Synthetic oligonucleotide
  Sense strand starting at position 692 of SEQ ID NO: 588219
auaacucuuguaggagaua

SEQ ID NO: 850197 - RNA, 19 nt, Artificial Sequence
  Description of Artificial Sequence: Synthetic oligonucleotide
  Antisense strand to SEQ ID NO: 850196
uaucuccuacaagaguuau

SEQ ID NO: 850198 - RNA, 19 nt, Artificial Sequence
  Description of Artificial Sequence: Synthetic oligonucleotide
  Sense strand starting at position 852 of SEQ ID NO: 588219
gguauucaacagcgggaau

SEQ ID NO: 850199 - RNA, 19 nt, Artificial Sequence
  Description of Artificial Sequence: Synthetic oligonucleotide
  Antisense strand to SEQ ID NO: 850198
auucccgcuguugaauacc

SEQ ID NO: 850200 - RNA, 19 nt, Artificial Sequence
  Description of Artificial Sequence: Synthetic oligonucleotide
  Sense strand starting at position 905 of SEQ ID NO: 588219
cacguaucucacgaggagu

SEQ ID NO: 850201 - RNA, 19 nt, Artificial Sequence
  Description of Artificial Sequence: Synthetic oligonucleotide
  Antisense strand to SEQ ID NO: 850200
acuccucgugagauacgug

SEQ ID NO: 850202 - RNA, 19 nt, Artificial Sequence
  Description of Artificial Sequence: Synthetic oligonucleotide
  Sense strand starting at position 908 of SEQ ID NO: 588219
guaucucacgaggagugau

SEQ ID NO: 850203 - RNA, 19 nt, Artificial Sequence
  Description of Artificial Sequence: Synthetic oligonucleotide
  Antisense strand to SEQ ID NO: 850202
aucacuccucgugagauac

SEQ ID NO: 850204 - RNA, 19 nt, Artificial Sequence
  Description of Artificial Sequence: Synthetic oligonucleotide
  Sense strand starting at position 911 of SEQ ID NO: 588219
ucucacgaggagugauuaa

SEQ ID NO: 850205 - RNA, 19 nt, Artificial Sequence
  Description of Artificial Sequence: Synthetic oligonucleotide
  Antisense strand to SEQ ID NO: 850204
uuaaucacuccucgugaga

SEQ ID NO: 850206 - RNA, 19 nt, Artificial Sequence
  Description of Artificial Sequence: Synthetic oligonucleotide
  Sense strand starting at position 1082 of SEQ ID NO: 588219
acugguggcguauaaagaa

SEQ ID NO: 850207 - RNA, 19 nt, Artificial Sequence
  Description of Artificial Sequence: Synthetic oligonucleotide
  Antisense strand to SEQ ID NO: 850206
uucuuuauacgccaccagu

SEQ ID NO: 850208 - RNA, 19 nt, Artificial Sequence
  Description of Artificial Sequence: Synthetic oligonucleotide
  Sense strand starting at position 1201 of SEQ ID NO: 588219
aucucuaaugcggaguuaa

SEQ ID NO: 850209 - RNA, 19 nt, Artificial Sequence
  Description of Artificial Sequence: Synthetic oligonucleotide
  Antisense strand to SEQ ID NO: 850208
uuaacuccgcauuagagau

SEQ ID NO: 850210 - RNA, 19 nt, Artificial Sequence
  Description of Artificial Sequence: Synthetic oligonucleotide
  Sense strand starting at position 1209 of SEQ ID NO: 588219
ugcggaguuaaccauaucu

SEQ ID NO: 850211 - RNA, 19 nt, Artificial Sequence
  Description of Artificial Sequence: Synthetic oligonucleotide
  Antisense strand to SEQ ID NO: 850210
agauaugguuaacuccgca

SEQ ID NO: 850212 - RNA, 19 nt, Artificial Sequence
  Description of Artificial Sequence: Synthetic oligonucleotide
  Sense strand starting at position 1211 of SEQ ID NO: 588219
cggaguuaaccauaucuac

SEQ ID NO: 850213 - RNA, 19 nt, Artificial Sequence
  Description of Artificial Sequence: Synthetic oligonucleotide
  Antisense strand to SEQ ID NO: 850212
guagauaugguuaacuccg

SEQ ID NO: 850214 - RNA, 19 nt, Artificial Sequence
  Description of Artificial Sequence: Synthetic oligonucleotide
  Sense strand starting at position 1214 of SEQ ID NO: 588219
aguuaaccauaucuacgaa

SEQ ID NO: 850215 - RNA, 19 nt, Artificial Sequence
  Description of Artificial Sequence: Synthetic oligonucleotide
  Antisense strand to SEQ ID NO: 850214
uucguagauaugguuaacu

SEQ ID NO: 850216 - RNA, 19 nt, Artificial Sequence
  Description of Artificial Sequence: Synthetic oligonucleotide
  Sense strand starting at position 1294 of SEQ ID NO: 588219
cguauucuuccggcagagu

SEQ ID NO: 850217 - RNA, 19 nt, Artificial Sequence
  Description of Artificial Sequence: Synthetic oligonucleotide
  Antisense strand to SEQ ID NO: 850216
acucugccggaagaauacg

SEQ ID NO: 850218 - RNA, 19 nt, Artificial Sequence
  Description of Artificial Sequence: Synthetic oligonucleotide
  Sense strand starting at position 1297 of SEQ ID NO: 588219
auucuuccggcagagugaa

SEQ ID NO: 850219 - RNA, 19 nt, Artificial Sequence
  Description of Artificial Sequence: Synthetic oligonucleotide
  Antisense strand to SEQ ID NO: 850218
uucacucugccggaagaau

SEQ ID NO: 850220 - RNA, 19 nt, Artificial Sequence
  Description of Artificial Sequence: Synthetic oligonucleotide
  Sense strand starting at position 1461 of SEQ ID NO: 588219
gacggacgaccuugagauu

SEQ ID NO: 850221 - RNA, 19 nt, Artificial Sequence
  Description of Artificial Sequence: Synthetic oligonucleotide
  Antisense strand to SEQ ID NO: 850220
aaucucaaggucguccguc

SEQ ID NO: 850222 - RNA, 19 nt, Artificial Sequence
  Description of Artificial Sequence: Synthetic oligonucleotide
  Sense strand starting at position 1981 of SEQ ID NO: 588219
gcagguuaugcgucacuuc

SEQ ID NO: 850223 - RNA, 19 nt, Artificial Sequence
  Description of Artificial Sequence: Synthetic oligonucleotide
  Antisense strand to SEQ ID NO: 850222
gaagugacgcauaaccugc

SEQ ID NO: 850224 - RNA, 19 nt, Artificial Sequence
  Description of Artificial Sequence: Synthetic oligonucleotide
  Sense strand starting at position 2090 of SEQ ID NO: 588219
ggucgauuugaguguguag

SEQ ID NO: 850225 - RNA, 19 nt, Artificial Sequence
  Description of Artificial Sequence: Synthetic oligonucleotide
  Antisense strand to SEQ ID NO: 850224
cuacacacucaaaucgacc

SEQ ID NO: 850226 - RNA, 19 nt, Artificial Sequence
  Description of Artificial Sequence: Synthetic oligonucleotide
  Sense strand starting at position 2221 of SEQ ID NO: 588219
gucuguuuacaauaagguu

SEQ ID NO: 850227 - RNA, 19 nt, Artificial Sequence
  Description of Artificial Sequence: Synthetic oligonucleotide
  Antisense strand to SEQ ID NO: 850226
aaccuuauuguaaacagac

SEQ ID NO: 850228 - RNA, 19 nt, Artificial Sequence
  Description of Artificial Sequence: Synthetic oligonucleotide
  Sense strand starting at position 2227 of SEQ ID NO: 588219
uuacaauaagguugaagua

SEQ ID NO: 850229 - RNA, 19 nt, Artificial Sequence
  Description of Artificial Sequence: Synthetic oligonucleotide
  Antisense strand to SEQ ID NO: 850228
uacuucaaccuuauuguaa

SEQ ID NO: 850230 - RNA, 19 nt, Artificial Sequence
  Description of Artificial Sequence: Synthetic oligonucleotide
  Sense strand starting at position 2291 of SEQ ID NO: 588219
uuaacaacgcuaugacaau

SEQ ID NO: 850231 - RNA, 19 nt, Artificial Sequence
  Description of Artificial Sequence: Synthetic oligonucleotide
  Antisense strand to SEQ ID NO: 850230
auugucauagcguuguuaa

SEQ ID NO: 850232 - RNA, 19 nt, Artificial Sequence
  Description of Artificial Sequence: Synthetic oligonucleotide
  Sense strand starting at position 2346 of SEQ ID NO: 588219
cucaucaccugggcaaauu

SEQ ID NO: 850233 - RNA, 19 nt, Artificial Sequence
  Description of Artificial Sequence: Synthetic oligonucleotide
  Antisense strand to SEQ ID NO: 850232
aauuugcccaggugaugag

SEQ ID NO: 850234 - RNA, 19 nt, Artificial Sequence
  Description of Artificial Sequence: Synthetic oligonucleotide
  Sense strand starting at position 2347 of SEQ ID NO: 588219
ucaucaccugggcaaauua

SEQ ID NO: 850235 - RNA, 19 nt, Artificial Sequence
  Description of Artificial Sequence: Synthetic oligonucleotide
  Antisense strand to SEQ ID NO: 850234
uaauuugcccaggugauga

SEQ ID NO: 850236 - RNA, 19 nt, Artificial Sequence
  Description of Artificial Sequence: Synthetic oligonucleotide
  Sense strand starting at position 2366 of SEQ ID NO: 588219
gguauuucuugcguagagu

SEQ ID NO: 850237 - RNA, 19 nt, Artificial Sequence
  Description of Artificial Sequence: Synthetic oligonucleotide
  Antisense strand to SEQ ID NO: 850236
acucuacgcaagaaauacc

SEQ ID NO: 850238 - RNA, 19 nt, Artificial Sequence
  Description of Artificial Sequence: Synthetic oligonucleotide
  Sense strand starting at position 2367 of SEQ ID NO: 588219
guauuucuugcguagaguc

SEQ ID NO: 850239 - RNA, 19 nt, Artificial Sequence
  Description of Artificial Sequence: Synthetic oligonucleotide
  Antisense strand to SEQ ID NO: 850238
gacucuacgcaagaaauac

SEQ ID NO: 850240 - RNA, 19 nt, Artificial Sequence
  Description of Artificial Sequence: Synthetic oligonucleotide
  Sense strand starting at position 2527 of SEQ ID NO: 588219
ggucuuugucguuucagca

SEQ ID NO: 850241 - RNA, 19 nt, Artificial Sequence
  Description of Artificial Sequence: Synthetic oligonucleotide
  Antisense strand to SEQ ID NO: 850240
ugcugaaacgacaaagacc

SEQ ID NO: 850242 - RNA, 19 nt, Artificial Sequence
  Description of Artificial Sequence: Synthetic oligonucleotide
  Sense strand starting at position 2667 of SEQ ID NO: 588219
cuauuugucucagucauuc

SEQ ID NO: 850243 - RNA, 19 nt, Artificial Sequence
  Description of Artificial Sequence: Synthetic oligonucleotide
  Antisense strand to SEQ ID NO: 850242
gaaugacugagacaaauag

SEQ ID NO: 850244 - RNA, 19 nt, Artificial Sequence
  Description of Artificial Sequence: Synthetic oligonucleotide
  Sense strand starting at position 2841 of SEQ ID NO: 588219
guaucacacucauuggagu

SEQ ID NO: 850245 - RNA, 19 nt, Artificial Sequence
  Description of Artificial Sequence: Synthetic oligonucleotide
  Antisense strand to SEQ ID NO: 850244
acuccaaugagugugauac

SEQ ID NO: 850246 - RNA, 19 nt, Artificial Sequence
  Description of Artificial Sequence: Synthetic oligonucleotide
  Sense strand starting at position 2943 of SEQ ID NO: 588219
uaugaauugugucccugaa

SEQ ID NO: 850247 - RNA, 19 nt, Artificial Sequence
  Description of Artificial Sequence: Synthetic oligonucleotide
  Antisense strand to SEQ ID NO: 850246
uucagggacacaauucaua

SEQ ID NO: 850248 - RNA, 19 nt, Artificial Sequence
  Description of Artificial Sequence: Synthetic oligonucleotide
  Sense strand starting at position 2945 of SEQ ID NO: 588219
ugaauugugucccugaaac

SEQ ID NO: 850249 - RNA, 19 nt, Artificial Sequence
  Description of Artificial Sequence: Synthetic oligonucleotide
  Antisense strand to SEQ ID NO: 850248
guuucagggacacaauuca

SEQ ID NO: 850250 - RNA, 19 nt, Artificial Sequence
  Description of Artificial Sequence: Synthetic oligonucleotide
  Sense strand starting at position 3338 of SEQ ID NO: 588219
uuaguagaagcauagcuaa

SEQ ID NO: 850251 - RNA, 19 nt, Artificial Sequence
  Description of Artificial Sequence: Synthetic oligonucleotide
  Antisense strand to SEQ ID NO: 850250
uuagcuaugcuucuacuaa

SEQ ID NO: 850252 - RNA, 19 nt, Artificial Sequence
  Description of Artificial Sequence: Synthetic oligonucleotide
  Sense strand starting at position 3349 of SEQ ID NO: 588219
auagcuaaacguuaaccaa

SEQ ID NO: 850253 - RNA, 19 nt, Artificial Sequence
  Description of Artificial Sequence: Synthetic oligonucleotide
  Antisense strand to SEQ ID NO: 850252
uugguuaacguuuagcuau

SEQ ID NO: 850254 - RNA, 19 nt, Artificial Sequence
  Description of Artificial Sequence: Synthetic oligonucleotide
  Sense strand starting at position 3415 of SEQ ID NO: 588219
aucuuugacucgguuaaga

SEQ ID NO: 850255 - RNA, 19 nt, Artificial Sequence
  Description of Artificial Sequence: Synthetic oligonucleotide
  Antisense strand to SEQ ID NO: 850254
ucuuaaccgagucaaagau

SEQ ID NO: 850256 - RNA, 19 nt, Artificial Sequence
  Description of Artificial Sequence: Synthetic oligonucleotide
  Sense strand starting at position 3417 of SEQ ID NO: 588219
cuuugacucgguuaagaaa

SEQ ID NO: 850257 - RNA, 19 nt, Artificial Sequence
  Description of Artificial Sequence: Synthetic oligonucleotide
  Antisense strand to SEQ ID NO: 850256
uuucuuaaccgagucaaag

SEQ ID NO: 850258 - RNA, 19 nt, Artificial Sequence
  Description of Artificial Sequence: Synthetic oligonucleotide
  Sense strand starting at position 3453 of SEQ ID NO: 588219
ugagauauuuaccagauuc

SEQ ID NO: 850259 - RNA, 19 nt, Artificial Sequence
  Description of Artificial Sequence: Synthetic oligonucleotide
  Antisense strand to SEQ ID NO: 850258
gaaucugguaaauaucuca

SEQ ID NO: 850260 - RNA, 19 nt, Artificial Sequence
  Description of Artificial Sequence: Synthetic oligonucleotide
  Sense strand starting at position 3631 of SEQ ID NO: 588219
guuagaaacuggguuuacu

SEQ ID NO: 850261 - RNA, 19 nt, Artificial Sequence
  Description of Artificial Sequence: Synthetic oligonucleotide
  Antisense strand to SEQ ID NO: 850260
aguaaacccaguuucuaac

SEQ ID NO: 850262 - RNA, 19 nt, Artificial Sequence
  Description of Artificial Sequence: Synthetic oligonucleotide
  Sense strand starting at position 3718 of SEQ ID NO: 588219
cccacauguguagaacauu

SEQ ID NO: 850263 - RNA, 19 nt, Artificial Sequence
  Description of Artificial Sequence: Synthetic oligonucleotide
  Antisense strand to SEQ ID NO: 850262
aauguucuacacauguggg

SEQ ID NO: 850264 - RNA, 19 nt, Artificial Sequence
  Description of Artificial Sequence: Synthetic oligonucleotide
  Sense strand starting at position 3793 of SEQ ID NO: 588219
aggcuacgugaaugacaua

SEQ ID NO: 850265 - RNA, 19 nt, Artificial Sequence
  Description of Artificial Sequence: Synthetic oligonucleotide
  Antisense strand to SEQ ID NO: 850264
uaugucauucacguagccu

SEQ ID NO: 850266 - RNA, 19 nt, Artificial Sequence
  Description of Artificial Sequence: Synthetic oligonucleotide
  Sense strand starting at position 3821 of SEQ ID NO: 588219
accaauucccugggucaua

SEQ ID NO: 850267 - RNA, 19 nt, Artificial Sequence
  Description of Artificial Sequence: Synthetic oligonucleotide
  Antisense strand to SEQ ID NO: 850266
uaugacccagggaauuggu

SEQ ID NO: 850268 - RNA, 19 nt, Artificial Sequence
  Description of Artificial Sequence: Synthetic oligonucleotide
  Sense strand starting at position 3822 of SEQ ID NO: 588219
ccaauucccugggucauau

SEQ ID NO: 850269 - RNA, 19 nt, Artificial Sequence
  Description of Artificial Sequence: Synthetic oligonucleotide
  Antisense strand to SEQ ID NO: 850268
auaugacccagggaauugg

SEQ ID NO: 850270 - RNA, 19 nt, Artificial Sequence
  Description of Artificial Sequence: Synthetic oligonucleotide
  Sense strand starting at position 3935 of SEQ ID NO: 588219
ucugguucuguaugaggga

SEQ ID NO: 850271 - RNA, 19 nt, Artificial Sequence
  Description of Artificial Sequence: Synthetic oligonucleotide
  Antisense strand to SEQ ID NO: 850270
ucccucauacagaaccaga

SEQ ID NO: 850272 - RNA, 19 nt, Artificial Sequence
  Description of Artificial Sequence: Synthetic oligonucleotide
  Sense strand starting at position 88 of SEQ ID NO: 588220
gcacacaacccuugucuga

SEQ ID NO: 850273 - RNA, 19 nt, Artificial Sequence
  Description of Artificial Sequence: Synthetic oligonucleotide
  Antisense strand to SEQ ID NO: 850272
ucagacaaggguugugugc

SEQ ID NO: 850274 - RNA, 19 nt, Artificial Sequence
  Description of Artificial Sequence: Synthetic oligonucleotide
  Sense strand starting at position 220 of SEQ ID NO: 588220
agggcaaugccacaaguuu

SEQ ID NO: 850275 - RNA, 19 nt, Artificial Sequence
  Description of Artificial Sequence: Synthetic oligonucleotide
  Antisense strand to SEQ ID NO: 850274
aaacuuguggcauugcccu

SEQ ID NO: 850276 - RNA, 19 nt, Artificial Sequence
  Description of Artificial Sequence: Synthetic oligonucleotide
  Sense strand starting at position 229 of SEQ ID NO: 588220
ccacaaguuucuccugaag

SEQ ID NO: 850277 - RNA, 19 nt, Artificial Sequence
  Description of Artificial Sequence: Synthetic oligonucleotide
  Antisense strand to SEQ ID NO: 850276
cuucaggagaaacuugugg

SEQ ID NO: 850278 - RNA, 19 nt, Artificial Sequence
  Description of Artificial Sequence: Synthetic oligonucleotide
  Sense strand starting at position 324 of SEQ ID NO: 588220
ugaguaagacuccacagca

SEQ ID NO: 850279 - RNA, 19 nt, Artificial Sequence
  Description of Artificial Sequence: Synthetic oligonucleotide
  Antisense strand to SEQ ID NO: 850278
ugcuguggagucuuacuca

SEQ ID NO: 850280 - RNA, 19 nt, Artificial Sequence
  Description of Artificial Sequence: Synthetic oligonucleotide
  Sense strand starting at position 549 of SEQ ID NO: 588220
gcguacuugcccugaagag

SEQ ID NO: 850281 - RNA, 19 nt, Artificial Sequence
  Description of Artificial Sequence: Synthetic oligonucleotide
  Antisense strand to SEQ ID NO: 850280
cucuucagggcaaguacgc

SEQ ID NO: 850282 - RNA, 19 nt, Artificial Sequence
  Description of Artificial Sequence: Synthetic oligonucleotide
  Sense strand starting at position 624 of SEQ ID NO: 588220
auccguugccucuggauaa

SEQ ID NO: 850283 - RNA, 19 nt, Artificial Sequence
  Description of Artificial Sequence: Synthetic oligonucleotide
  Antisense strand to SEQ ID NO: 850282
uuauccagaggcaacggau

SEQ ID NO: 850284 - RNA, 19 nt, Artificial Sequence
  Description of Artificial Sequence: Synthetic oligonucleotide
  Sense strand starting at position 756 of SEQ ID NO: 588220
ugguccuucuggcaggauu

SEQ ID NO: 850285 - RNA, 19 nt, Artificial Sequence
  Description of Artificial Sequence: Synthetic oligonucleotide
  Antisense strand to SEQ ID NO: 850284
aauccugccagaaggacca

SEQ ID NO: 850286 - RNA, 19 nt, Artificial Sequence
  Description of Artificial Sequence: Synthetic oligonucleotide
  Sense strand starting at position 843 of SEQ ID NO: 588220
ugcagacauccucgacaga

SEQ ID NO: 850287 - RNA, 19 nt, Artificial Sequence
  Description of Artificial Sequence: Synthetic oligonucleotide
  Antisense strand to SEQ ID NO: 850286
ucugucgaggaugucugca

SEQ ID NO: 850288 - RNA, 19 nt, Artificial Sequence
  Description of Artificial Sequence: Synthetic oligonucleotide
  Sense strand starting at position 924 of SEQ ID NO: 588220
ggguaucacucagacagac

SEQ ID NO: 850289 - RNA, 19 nt, Artificial Sequence
  Description of Artificial Sequence: Synthetic oligonucleotide
  Antisense strand to SEQ ID NO: 850288
gucugucugagugauaccc

SEQ ID NO: 850290 - RNA, 19 nt, Artificial Sequence
  Description of Artificial Sequence: Synthetic oligonucleotide
  Sense strand starting at position 939 of SEQ ID NO: 588220
agacuugucuuucccugga

SEQ ID NO: 850291 - RNA, 19 nt, Artificial Sequence
  Description of Artificial Sequence: Synthetic oligonucleotide
  Antisense strand to SEQ ID NO: 850290
uccagggaaagacaagucu

SEQ ID NO: 850292 - RNA, 19 nt, Artificial Sequence
  Description of Artificial Sequence: Synthetic oligonucleotide
  Sense strand starting at position 1254 of SEQ ID NO: 588220
guggcuuccugccagaaau

SEQ ID NO: 850293 - RNA, 19 nt, Artificial Sequence
  Description of Artificial Sequence: Synthetic oligonucleotide
  Antisense strand to SEQ ID NO: 850292
auuucuggcaggaagccac

SEQ ID NO: 850294 - RNA, 19 nt, Artificial Sequence
  Description of Artificial Sequence: Synthetic oligonucleotide
  Sense strand starting at position 1256 of SEQ ID NO: 588220
ggcuuccugccagaaaucu

SEQ ID NO: 850295 - RNA, 19 nt, Artificial Sequence
  Description of Artificial Sequence: Synthetic oligonucleotide
  Antisense strand to SEQ ID NO: 850294
agauuucuggcaggaagcc

SEQ ID NO: 850296 - RNA, 19 nt, Artificial Sequence
  Description of Artificial Sequence: Synthetic oligonucleotide
  Sense strand starting at position 1524 of SEQ ID NO: 588220
ccgggaauguucccagaag

SEQ ID NO: 850297 - RNA, 19 nt, Artificial Sequence
  Description of Artificial Sequence: Synthetic oligonucleotide
  Antisense strand to SEQ ID NO: 850296
cuucugggaacauucccgg

SEQ ID NO: 850298 - RNA, 19 nt, Artificial Sequence
  Description of Artificial Sequence: Synthetic oligonucleotide
  Sense strand starting at position 1525 of SEQ ID NO: 588220
cgggaauguucccagaagc

SEQ ID NO: 850299 - RNA, 19 nt, Artificial Sequence
  Description of Artificial Sequence: Synthetic oligonucleotide
  Antisense strand to SEQ ID NO: 850298
gcuucugggaacauucccg

SEQ ID NO: 850300 - RNA, 19 nt, Artificial Sequence
  Description of Artificial Sequence: Synthetic oligonucleotide
  Sense strand starting at position 1984 of SEQ ID NO: 588220
gagggagcauauuagcaua

SEQ ID NO: 850301 - RNA, 19 nt, Artificial Sequence
  Description of Artificial Sequence: Synthetic oligonucleotide
  Antisense strand to SEQ ID NO: 850300
uaugcuaauaugcucccuc

SEQ ID NO: 850302 - RNA, 19 nt, Artificial Sequence
  Description of Artificial Sequence: Synthetic oligonucleotide
  Sense strand starting at position 2047 of SEQ ID NO: 588220
gcgggugcucauuaacaua

SEQ ID NO: 850303 - RNA, 19 nt, Artificial Sequence
  Description of Artificial Sequence: Synthetic oligonucleotide
  Antisense strand to SEQ ID NO: 850302
uauguuaaugagcacccgc

SEQ ID NO: 850304 - RNA, 19 nt, Artificial Sequence
  Description of Artificial Sequence: Synthetic oligonucleotide
  Sense strand starting at position 2106 of SEQ ID NO: 588220
ggagguaggugcucauuau

SEQ ID NO: 850305 - RNA, 19 nt, Artificial Sequence
  Description of Artificial Sequence: Synthetic oligonucleotide
  Antisense strand to SEQ ID NO: 850304
auaaugagcaccuaccucc

SEQ ID NO: 850306 - RNA, 19 nt, Artificial Sequence
  Description of Artificial Sequence: Synthetic oligonucleotide
  Sense strand starting at position 2107 of SEQ ID NO: 588220
gagguaggugcucauuauu

SEQ ID NO: 850307 - RNA, 19 nt, Artificial Sequence
  Description of Artificial Sequence: Synthetic oligonucleotide
  Antisense strand to SEQ ID NO: 850306
aauaaugagcaccuaccuc

SEQ ID NO: 850308 - RNA, 19 nt, Artificial Sequence
  Description of Artificial Sequence: Synthetic oligonucleotide
  Sense strand starting at position 2110 of SEQ ID NO: 588220
guaggugcucauuauugua

SEQ ID NO: 850309 - RNA, 19 nt, Artificial Sequence
  Description of Artificial Sequence: Synthetic oligonucleotide
  Antisense strand to SEQ ID NO: 850308
uacaauaaugagcaccuac

SEQ ID NO: 850310 - RNA, 19 nt, Artificial Sequence
  Description of Artificial Sequence: Synthetic oligonucleotide
  Sense strand starting at position 2271 of SEQ ID NO: 588220
gcgacuugcucccaaagga

SEQ ID NO: 850311 - RNA, 19 nt, Artificial Sequence
  Description of Artificial Sequence: Synthetic oligonucleotide
  Antisense strand to SEQ ID NO: 850310
uccuuugggagcaagucgc

SEQ ID NO: 850312 - RNA, 19 nt, Artificial Sequence
  Description of Artificial Sequence: Synthetic oligonucleotide
  Sense strand starting at position 2401 of SEQ ID NO: 588220
cgccauccucggaguggaa

SEQ ID NO: 850313 - RNA, 19 nt, Artificial Sequence
  Description of Artificial Sequence: Synthetic oligonucleotide
  Antisense strand to SEQ ID NO: 850312
uuccacuccgaggauggcg

SEQ ID NO: 850314 - RNA, 19 nt, Artificial Sequence
  Description of Artificial Sequence: Synthetic oligonucleotide
  Sense strand starting at position 2414 of SEQ ID NO: 588220
guggaauccugauuggauu

SEQ ID NO: 850315 - RNA, 19 nt, Artificial Sequence
  Description of Artificial Sequence: Synthetic oligonucleotide
  Antisense strand to SEQ ID NO: 850314
aauccaaucaggauuccac

SEQ ID NO: 850316 - RNA, 19 nt, Artificial Sequence
  Description of Artificial Sequence: Synthetic oligonucleotide
  Sense strand starting at position 2474 of SEQ ID NO: 588220
gcuugcucagaucaagaua

SEQ ID NO: 850317 - RNA, 19 nt, Artificial Sequence
  Description of Artificial Sequence: Synthetic oligonucleotide
  Antisense strand to SEQ ID NO: 850316
uaucuugaucugagcaagc

SEQ ID NO: 850318 - RNA, 19 nt, Artificial Sequence
  Description of Artificial Sequence: Synthetic oligonucleotide
  Sense strand starting at position 2551 of SEQ ID NO: 588220
cuggacagcuuauaagaaa

SEQ ID NO: 850319 - RNA, 19 nt, Artificial Sequence
  Description of Artificial Sequence: Synthetic oligonucleotide
  Antisense strand to SEQ ID NO: 850318
uuucuuauaagcuguccag

SEQ ID NO: 850320 - RNA, 19 nt, Artificial Sequence
  Description of Artificial Sequence: Synthetic oligonucleotide
  Sense strand starting at position 2978 of SEQ ID NO: 588220
gugggugucccggaucuga

SEQ ID NO: 850321 - RNA, 19 nt, Artificial Sequence
  Description of Artificial Sequence: Synthetic oligonucleotide
  Antisense strand to SEQ ID NO: 850320
ucagauccgggacacccac

SEQ ID NO: 850322 - RNA, 19 nt, Artificial Sequence
  Description of Artificial Sequence: Synthetic oligonucleotide
  Sense strand starting at position 3060 of SEQ ID NO: 588220
ugugcaagggcucacagau

SEQ ID NO: 850323 - RNA, 19 nt, Artificial Sequence
  Description of Artificial Sequence: Synthetic oligonucleotide
  Antisense strand to SEQ ID NO: 850322
aucugugagcccuugcaca

SEQ ID NO: 850324 - RNA, 19 nt, Artificial Sequence
  Description of Artificial Sequence: Synthetic oligonucleotide
  Sense strand starting at position 3111 of SEQ ID NO: 588220
cuaggaauacgccauuacu

SEQ ID NO: 850325 - RNA, 19 nt, Artificial Sequence
  Description of Artificial Sequence: Synthetic oligonucleotide
  Antisense strand to SEQ ID NO: 850324
aguaauggcguauuccuag

SEQ ID NO: 850326 - RNA, 19 nt, Artificial Sequence
  Description of Artificial Sequence: Synthetic oligonucleotide
  Sense strand starting at position 3114 of SEQ ID NO: 588220
ggaauacgccauuacucua

SEQ ID NO: 850327 - RNA, 19 nt, Artificial Sequence
  Description of Artificial Sequence: Synthetic oligonucleotide
  Antisense strand to SEQ ID NO: 850326
uagaguaauggcguauucc

SEQ ID NO: 850328 - RNA, 19 nt, Artificial Sequence
  Description of Artificial Sequence: Synthetic oligonucleotide
  Sense strand starting at position 3226 of SEQ ID NO: 588220
gcugauacccugcagaaca

SEQ ID NO: 850329 - RNA, 19 nt, Artificial Sequence
  Description of Artificial Sequence: Synthetic oligonucleotide
  Antisense strand to SEQ ID NO: 850328
uguucugcaggguaucagc

SEQ ID NO: 850330 - RNA, 19 nt, Artificial Sequence
  Description of Artificial Sequence: Synthetic oligonucleotide
  Sense strand starting at position 3244 of SEQ ID NO: 588220
acaguucucccaggacacu

SEQ ID NO: 850331 - RNA, 19 nt, Artificial Sequence
  Description of Artificial Sequence: Synthetic oligonucleotide
  Antisense strand to SEQ ID NO: 850330
aguguccugggagaacugu

SEQ ID NO: 850332 - RNA, 19 nt, Artificial Sequence
  Description of Artificial Sequence: Synthetic oligonucleotide
  Sense strand starting at position 3287 of SEQ ID NO: 588220
ugcuauucuguccaaguua

SEQ ID NO: 850333 - RNA, 19 nt, Artificial Sequence
  Description of Artificial Sequence: Synthetic oligonucleotide
  Antisense strand to SEQ ID NO: 850332
uaacuuggacagaauagca

SEQ ID NO: 850334 - RNA, 19 nt, Artificial Sequence
  Description of Artificial Sequence: Synthetic oligonucleotide
  Sense strand starting at position 3294 of SEQ ID NO: 588220
cuguccaaguuauaucaga

SEQ ID NO: 850335 - RNA, 19 nt, Artificial Sequence
  Description of Artificial Sequence: Synthetic oligonucleotide
  Antisense strand to SEQ ID NO: 850334
ucugauauaacuuggacag

SEQ ID NO: 850336 - RNA, 19 nt, Artificial Sequence
  Description of Artificial Sequence: Synthetic oligonucleotide
  Sense strand starting at position 3342 of SEQ ID NO: 588220
gcugucagucuacaucaga

SEQ ID NO: 850337 - RNA, 19 nt, Artificial Sequence
  Description of Artificial Sequence: Synthetic oligonucleotide
  Antisense strand to SEQ ID NO: 850336
ucugauguagacugacagc

SEQ ID NO: 850338 - RNA, 19 nt, Artificial Sequence
  Description of Artificial Sequence: Synthetic oligonucleotide
  Sense strand starting at position 3347 of SEQ ID NO: 588220
cagucuacaucagaaaggu

SEQ ID NO: 850339 - RNA, 19 nt, Artificial Sequence
  Description of Artificial Sequence: Synthetic oligonucleotide
  Antisense strand to SEQ ID NO: 850338
accuuucugauguagacug

SEQ ID NO: 850340 - RNA, 19 nt, Artificial Sequence
  Description of Artificial Sequence: Synthetic oligonucleotide
  Sense strand starting at position 3356 of SEQ ID NO: 588220
ucagaaaggucuuuaccau

SEQ ID NO: 850341 - RNA, 19 nt, Artificial Sequence
  Description of Artificial Sequence: Synthetic oligonucleotide
  Antisense strand to SEQ ID NO: 850340
augguaaagaccuuucuga

SEQ ID NO: 850342 - RNA, 19 nt, Artificial Sequence
  Description of Artificial Sequence: Synthetic oligonucleotide
  Sense strand starting at position 3451 of SEQ ID NO: 588220
ggugcgaucugggcuuagu

SEQ ID NO: 850343 - RNA, 19 nt, Artificial Sequence
  Description of Artificial Sequence: Synthetic oligonucleotide
  Antisense strand to SEQ ID NO: 850342
acuaagcccagaucgcacc

SEQ ID NO: 850344 - RNA, 19 nt, Artificial Sequence
  Description of Artificial Sequence: Synthetic oligonucleotide
  Sense strand starting at position 3718 of SEQ ID NO: 588220
uggugaauauguggaggaa

SEQ ID NO: 850345 - RNA, 19 nt, Artificial Sequence
  Description of Artificial Sequence: Synthetic oligonucleotide
  Antisense strand to SEQ ID NO: 850344
uuccuccacauauucacca

SEQ ID NO: 850346 - RNA, 19 nt, Artificial Sequence
  Description of Artificial Sequence: Synthetic oligonucleotide
  Sense strand starting at position 3823 of SEQ ID NO: 588220
agggaaagcuguccagaau

SEQ ID NO: 850347 - RNA, 19 nt, Artificial Sequence
  Description of Artificial Sequence: Synthetic oligonucleotide
  Antisense strand to SEQ ID NO: 850346
auucuggacagcuuucccu

SEQ ID NO: 850348 - RNA, 19 nt, Artificial Sequence
  Description of Artificial Sequence: Synthetic oligonucleotide
  Sense strand starting at position 3826 of SEQ ID NO: 588220
gaaagcuguccagaaucac

SEQ ID NO: 850349 - RNA, 19 nt, Artificial Sequence
  Description of Artificial Sequence: Synthetic oligonucleotide
  Antisense strand to SEQ ID NO: 850348
gugauucuggacagcuuuc

SEQ ID NO: 850350 - RNA, 19 nt, Artificial Sequence
  Description of Artificial Sequence: Synthetic oligonucleotide
  Sense strand starting at position 3835 of SEQ ID NO: 588220
ccagaaucacagcacaagu

SEQ ID NO: 850351 - RNA, 19 nt, Artificial Sequence
  Description of Artificial Sequence: Synthetic oligonucleotide
  Antisense strand to SEQ ID NO: 850350
acuugugcugugauucugg

SEQ ID NO: 850352 - RNA, 19 nt, Artificial Sequence
  Description of Artificial Sequence: Synthetic oligonucleotide
  Sense strand starting at position 116 of SEQ ID NO: 588221
cagaauguuugagaaggaa

SEQ ID NO: 850353 - RNA, 19 nt, Artificial Sequence
  Description of Artificial Sequence: Synthetic oligonucleotide
  Antisense strand to SEQ ID NO: 850352
uuccuucucaaacauucug

SEQ ID NO: 850354 - RNA, 19 nt, Artificial Sequence
  Description of Artificial Sequence: Synthetic oligonucleotide
  Sense strand starting at position 130 of SEQ ID NO: 588221
aggaaugcuucccacagga

SEQ ID NO: 850355 - RNA, 19 nt, Artificial Sequence
  Description of Artificial Sequence: Synthetic oligonucleotide
  Antisense strand to SEQ ID NO: 850354
uccugugggaagcauuccu

SEQ ID NO: 850356 - RNA, 19 nt, Artificial Sequence
  Description of Artificial Sequence: Synthetic oligonucleotide
  Sense strand starting at position 381 of SEQ ID NO: 588221
aggaguagcucguggcaca

SEQ ID NO: 850357 - RNA, 19 nt, Artificial Sequence
  Description of Artificial Sequence: Synthetic oligonucleotide
  Antisense strand to SEQ ID NO: 850356
ugugccacgagcuacuccu

SEQ ID NO: 850358 - RNA, 19 nt, Artificial Sequence
  Description of Artificial Sequence: Synthetic oligonucleotide
  Sense strand starting at position 467 of SEQ ID NO: 588221
ccucgaggaagguguuauc

SEQ ID NO: 850359 - RNA, 19 nt, Artificial Sequence
  Description of Artificial Sequence: Synthetic oligonucleotide
  Antisense strand to SEQ ID NO: 850358
gauaacaccuuccucgagg

SEQ ID NO: 850360 - RNA, 19 nt, Artificial Sequence
  Description of Artificial Sequence: Synthetic oligonucleotide
  Sense strand starting at position 477 of SEQ ID NO: 588221
gguguuaucugccaggccu

SEQ ID NO: 850361 - RNA, 19 nt, Artificial Sequence
  Description of Artificial Sequence: Synthetic oligonucleotide
  Antisense strand to SEQ ID NO: 850360
aggccuggcagauaacacc

SEQ ID NO: 850362 - RNA, 19 nt, Artificial Sequence
  Description of Artificial Sequence: Synthetic oligonucleotide
  Sense strand starting at position 731 of SEQ ID NO: 588221
aauggagugcgugaguuaa

SEQ ID NO: 850363 - RNA, 19 nt, Artificial Sequence
  Description of Artificial Sequence: Synthetic oligonucleotide
  Antisense strand to SEQ ID NO: 850362
uuaacucacgcacuccauu

SEQ ID NO: 850364 - RNA, 19 nt, Artificial Sequence
  Description of Artificial Sequence: Synthetic oligonucleotide
  Sense strand starting at position 2779 of SEQ ID NO: 588221
gggagaccuucgggaacaa

SEQ ID NO: 850365 - RNA, 19 nt, Artificial Sequence
  Description of Artificial Sequence: Synthetic oligonucleotide
  Antisense strand to SEQ ID NO: 850364
uuguucccgaaggucuccc

SEQ ID NO: 850366 - RNA, 19 nt, Artificial Sequence
  Description of Artificial Sequence: Synthetic oligonucleotide
  Sense strand starting at position 2969 of SEQ ID NO: 588221
ggugcugaaucacuuagga

SEQ ID NO: 850367 - RNA, 19 nt, Artificial Sequence
  Description of Artificial Sequence: Synthetic oligonucleotide
  Antisense strand to SEQ ID NO: 850366
uccuaagugauucagcacc

SEQ ID NO: 850368 - RNA, 19 nt, Artificial Sequence
  Description of Artificial Sequence: Synthetic oligonucleotide
  Sense strand starting at position 3032 of SEQ ID NO: 588221
gcacgaugccauugugauc

SEQ ID NO: 850369 - RNA, 19 nt, Artificial Sequence
  Description of Artificial Sequence: Synthetic oligonucleotide
  Antisense strand to SEQ ID NO: 850368
gaucacaauggcaucgugc

SEQ ID NO: 850370 - RNA, 19 nt, Artificial Sequence
  Description of Artificial Sequence: Synthetic oligonucleotide
  Sense strand starting at position 3043 of SEQ ID NO: 588221
uugugaucucacugaauac

SEQ ID NO: 850371 - RNA, 19 nt, Artificial Sequence
  Description of Artificial Sequence: Synthetic oligonucleotide
  Antisense strand to SEQ ID NO: 850370
guauucagugagaucacaa

SEQ ID NO: 850372 - RNA, 19 nt, Artificial Sequence
  Description of Artificial Sequence: Synthetic oligonucleotide
  Sense strand starting at position 3192 of SEQ ID NO: 588221
ggaaguggcagguguacaa

SEQ ID NO: 850373 - RNA, 19 nt, Artificial Sequence
  Description of Artificial Sequence: Synthetic oligonucleotide
  Antisense strand to SEQ ID NO: 850372
uuguacaccugccacuucc

SEQ ID NO: 850374 - RNA, 19 nt, Artificial Sequence
  Description of Artificial Sequence: Synthetic oligonucleotide
  Sense strand starting at position 3212 of SEQ ID NO: 588221
ggaugaccacuuugugaau

SEQ ID NO: 850375 - RNA, 19 nt, Artificial Sequence
  Description of Artificial Sequence: Synthetic oligonucleotide
  Antisense strand to SEQ ID NO: 850374
auucacaaaguggucaucc

SEQ ID NO: 850376 - RNA, 19 nt, Artificial Sequence
  Description of Artificial Sequence: Synthetic oligonucleotide
  Sense strand starting at position 3214 of SEQ ID NO: 588221
augaccacuuugugaauca

SEQ ID NO: 850377 - RNA, 19 nt, Artificial Sequence
  Description of Artificial Sequence: Synthetic oligonucleotide
  Antisense strand to SEQ ID NO: 850376
ugauucacaaaguggucau

SEQ ID NO: 850378 - RNA, 19 nt, Artificial Sequence
  Description of Artificial Sequence: Synthetic oligonucleotide
  Sense strand starting at position 3224 of SEQ ID NO: 588221
ugugaaucagguuacgauu

SEQ ID NO: 850379 - RNA, 19 nt, Artificial Sequence
  Description of Artificial Sequence: Synthetic oligonucleotide
  Antisense strand to SEQ ID NO: 850378
aaucguaaccugauucaca

SEQ ID NO: 850380 - RNA, 19 nt, Artificial Sequence
  Description of Artificial Sequence: Synthetic oligonucleotide
  Sense strand starting at position 3280 of SEQ ID NO: 588221
cccugcaagugucucuuua

SEQ ID NO: 850381 - RNA, 19 nt, Artificial Sequence
  Description of Artificial Sequence: Synthetic oligonucleotide
  Antisense strand to SEQ ID NO: 850380
uaaagagacacuugcaggg

SEQ ID NO: 850382 - RNA, 19 nt, Artificial Sequence
  Description of Artificial Sequence: Synthetic oligonucleotide
  Sense strand starting at position 3282 of SEQ ID NO: 588221
cugcaagugucucuuuaac

SEQ ID NO: 850383 - RNA, 19 nt, Artificial Sequence
  Description of Artificial Sequence: Synthetic oligonucleotide
  Antisense strand to SEQ ID NO: 850382
guuaaagagacacuugcag

SEQ ID NO: 850384 - RNA, 19 nt, Artificial Sequence
  Description of Artificial Sequence: Synthetic oligonucleotide
  Sense strand starting at position 3539 of SEQ ID NO: 588221
gaugaugugguuugaacau

SEQ ID NO: 850385 - RNA, 19 nt, Artificial Sequence
  Description of Artificial Sequence: Synthetic oligonucleotide
  Antisense strand to SEQ ID NO: 850384
auguucaaaccacaucauc

SEQ ID NO: 850386 - RNA, 19 nt, Artificial Sequence
  Description of Artificial Sequence: Synthetic oligonucleotide
  Sense strand starting at position 3571 of SEQ ID NO: 588221
agugccucuuucucuuaga

SEQ ID NO: 850387 - RNA, 19 nt, Artificial Sequence
  Description of Artificial Sequence: Synthetic oligonucleotide
  Antisense strand to SEQ ID NO: 850386
ucuaagagaaagaggcacu

SEQ ID NO: 850388 - RNA, 19 nt, Artificial Sequence
  Description of Artificial Sequence: Synthetic oligonucleotide
  Sense strand starting at position 3574 of SEQ ID NO: 588221
gccucuuucucuuagagag

SEQ ID NO: 850389 - RNA, 19 nt, Artificial Sequence
  Description of Artificial Sequence: Synthetic oligonucleotide
  Antisense strand to SEQ ID NO: 850388
cucucuaagagaaagaggc

SEQ ID NO: 850390 - RNA, 19 nt, Artificial Sequence
  Description of Artificial Sequence: Synthetic oligonucleotide
  Sense strand starting at position 3592 of SEQ ID NO: 588221
gagugcguccaguguaaau

SEQ ID NO: 850391 - RNA, 19 nt, Artificial Sequence
  Description of Artificial Sequence: Synthetic oligonucleotide
  Antisense strand to SEQ ID NO: 850390
auuuacacuggacgcacuc

SEQ ID NO: 850392 - RNA, 19 nt, Artificial Sequence
  Description of Artificial Sequence: Synthetic oligonucleotide
  Sense strand starting at position 3594 of SEQ ID NO: 588221
gugcguccaguguaaaugu

SEQ ID NO: 850393 - RNA, 19 nt, Artificial Sequence
  Description of Artificial Sequence: Synthetic oligonucleotide
  Antisense strand to SEQ ID NO: 850392
acauuuacacuggacgcac

SEQ ID NO: 850394 - RNA, 19 nt, Artificial Sequence
  Description of Artificial Sequence: Synthetic oligonucleotide
  Sense strand starting at position 3596 of SEQ ID NO: 588221
gcguccaguguaaauguga

SEQ ID NO: 850395 - RNA, 19 nt, Artificial Sequence
  Description of Artificial Sequence: Synthetic oligonucleotide
  Antisense strand to SEQ ID NO: 850394
ucacauuuacacuggacgc

SEQ ID NO: 850396 - RNA, 19 nt, Artificial Sequence
  Description of Artificial Sequence: Synthetic oligonucleotide
  Sense strand starting at position 3603 of SEQ ID NO: 588221
guguaaaugugaaggagag

SEQ ID NO: 850397 - RNA, 19 nt, Artificial Sequence
  Description of Artificial Sequence: Synthetic oligonucleotide
  Antisense strand to SEQ ID NO: 850396
cucuccuucacauuuacac

SEQ ID NO: 850398 - RNA, 19 nt, Artificial Sequence
  Description of Artificial Sequence: Synthetic oligonucleotide
  Sense strand starting at position 3699 of SEQ ID NO: 588221
gagggaagagcuuguuagu

SEQ ID NO: 850399 - RNA, 19 nt, Artificial Sequence
  Description of Artificial Sequence: Synthetic oligonucleotide
  Antisense strand to SEQ ID NO: 850398
acuaacaagcucuucccuc

SEQ ID NO: 850400 - RNA, 19 nt, Artificial Sequence
  Description of Artificial Sequence: Synthetic oligonucleotide
  Sense strand starting at position 3702 of SEQ ID NO: 588221
ggaagagcuuguuagucac

SEQ ID NO: 850401 - RNA, 19 nt, Artificial Sequence
  Description of Artificial Sequence: Synthetic oligonucleotide
  Antisense strand to SEQ ID NO: 850400
gugacuaacaagcucuucc

SEQ ID NO: 850402 - RNA, 19 nt, Artificial Sequence
  Description of Artificial Sequence: Synthetic oligonucleotide
  Sense strand starting at position 3775 of SEQ ID NO: 588221
gguggaguuucucgaggga

SEQ ID NO: 850403 - RNA, 19 nt, Artificial Sequence
  Description of Artificial Sequence: Synthetic oligonucleotide
  Antisense strand to SEQ ID NO: 850402
ucccucgagaaacuccacc

SEQ ID NO: 850404 - RNA, 19 nt, Artificial Sequence
  Description of Artificial Sequence: Synthetic oligonucleotide
  Sense strand starting at position 3776 of SEQ ID NO: 588221
guggaguuucucgagggau

SEQ ID NO: 850405 - RNA, 19 nt, Artificial Sequence
  Description of Artificial Sequence: Synthetic oligonucleotide
  Antisense strand to SEQ ID NO: 850404
aucccucgagaaacuccac

SEQ ID NO: 850406 - RNA, 19 nt, Artificial Sequence
  Description of Artificial Sequence: Synthetic oligonucleotide
  Sense strand starting at position 3777 of SEQ ID NO: 588221
uggaguuucucgagggaug

SEQ ID NO: 850407 - RNA, 19 nt, Artificial Sequence
  Description of Artificial Sequence: Synthetic oligonucleotide
  Antisense strand to SEQ ID NO: 850406
caucccucgagaaacucca

SEQ ID NO: 850408 - RNA, 19 nt, Artificial Sequence
  Description of Artificial Sequence: Synthetic oligonucleotide
  Sense strand starting at position 3778 of SEQ ID NO: 588221
ggaguuucucgagggaugc

SEQ ID NO: 850409 - RNA, 19 nt, Artificial Sequence
  Description of Artificial Sequence: Synthetic oligonucleotide
  Antisense strand to SEQ ID NO: 850408
gcaucccucgagaaacucc

SEQ ID NO: 850410 - RNA, 19 nt, Artificial Sequence
  Description of Artificial Sequence: Synthetic oligonucleotide
  Sense strand starting at position 3923 of SEQ ID NO: 588221
accugugguuucugguuau

SEQ ID NO: 850411 - RNA, 19 nt, Artificial Sequence
  Description of Artificial Sequence: Synthetic oligonucleotide
  Antisense strand to SEQ ID NO: 850410
auaaccagaaaccacaggu

SEQ ID NO: 850412 - RNA, 19 nt, Artificial Sequence
  Description of Artificial Sequence: Synthetic oligonucleotide
  Sense strand starting at position 3926 of SEQ ID NO: 588221
ugugguuucugguuaugcu

SEQ ID NO: 850413 - RNA, 19 nt, Artificial Sequence
  Description of Artificial Sequence: Synthetic oligonucleotide
  Antisense strand to SEQ ID NO: 850412
agcauaaccagaaaccaca

SEQ ID NO: 850414 - RNA, 19 nt, Artificial Sequence
  Description of Artificial Sequence: Synthetic oligonucleotide
  Sense strand starting at position 3927 of SEQ ID NO: 588221
gugguuucugguuaugcua

SEQ ID NO: 850415 - RNA, 19 nt, Artificial Sequence
  Description of Artificial Sequence: Synthetic oligonucleotide
  Antisense strand to SEQ ID NO: 850414
uagcauaaccagaaaccac

SEQ ID NO: 850416 - RNA, 19 nt, Artificial Sequence
  Description of Artificial Sequence: Synthetic oligonucleotide
  Sense strand starting at position 3935 of SEQ ID NO: 588221
ugguuaugcuagcccaaca

SEQ ID NO: 850417 - RNA, 19 nt, Artificial Sequence
  Description of Artificial Sequence: Synthetic oligonucleotide
  Antisense strand to SEQ ID NO: 850416
uguugggcuagcauaacca

SEQ ID NO: 850418 - RNA, 19 nt, Artificial Sequence
  Description of Artificial Sequence: Synthetic oligonucleotide
  Sense strand starting at position 16 of SEQ ID NO: 588222
ucaucauccgaugagucaa

SEQ ID NO: 850419 - RNA, 19 nt, Artificial Sequence
  Description of Artificial Sequence: Synthetic oligonucleotide
  Antisense strand to SEQ ID NO: 850418
uugacucaucggaugauga

SEQ ID NO: 850420 - RNA, 19 nt, Artificial Sequence
  Description of Artificial Sequence: Synthetic oligonucleotide
  Sense strand starting at position 40 of SEQ ID NO: 588222
auuaaagagugaccuggua

SEQ ID NO: 850421 - RNA, 19 nt, Artificial Sequence
  Description of Artificial Sequence: Synthetic oligonucleotide
  Antisense strand to SEQ ID NO: 850420
uaccaggucacucuuuaau

SEQ ID NO: 850422 - RNA, 19 nt, Artificial Sequence
  Description of Artificial Sequence: Synthetic oligonucleotide
  Sense strand starting at position 93 of SEQ ID NO: 588222
cagagacacgcguacuuau

SEQ ID NO: 850423 - RNA, 19 nt, Artificial Sequence
  Description of Artificial Sequence: Synthetic oligonucleotide
  Antisense strand to SEQ ID NO: 850422
auaaguacgcgugucucug

SEQ ID NO: 850424 - RNA, 19 nt, Artificial Sequence
  Description of Artificial Sequence: Synthetic oligonucleotide
  Sense strand starting at position 123 of SEQ ID NO: 588222
ugacaaaucccaugcugaa

SEQ ID NO: 850425 - RNA, 19 nt, Artificial Sequence
  Description of Artificial Sequence: Synthetic oligonucleotide
  Antisense strand to SEQ ID NO: 850424
uucagcaugggauuuguca

SEQ ID NO: 850426 - RNA, 19 nt, Artificial Sequence
  Description of Artificial Sequence: Synthetic oligonucleotide
  Sense strand starting at position 148 of SEQ ID NO: 588222
agcuaaaugcaaugaaaua

SEQ ID NO: 850427 - RNA, 19 nt, Artificial Sequence
  Description of Artificial Sequence: Synthetic oligonucleotide
  Antisense strand to SEQ ID NO: 850426
uauuucauugcauuuagcu

SEQ ID NO: 850428 - RNA, 19 nt, Artificial Sequence
  Description of Artificial Sequence: Synthetic oligonucleotide
  Sense strand starting at position 171 of SEQ ID NO: 588222
augcaugcaccuugcuaaa

SEQ ID NO: 850429 - RNA, 19 nt, Artificial Sequence
  Description of Artificial Sequence: Synthetic oligonucleotide
  Antisense strand to SEQ ID NO: 850428
uuuagcaaggugcaugcau

SEQ ID NO: 850430 - RNA, 19 nt, Artificial Sequence
  Description of Artificial Sequence: Synthetic oligonucleotide
  Sense strand starting at position 173 of SEQ ID NO: 588222
gcaugcaccuugcuaaaga

SEQ ID NO: 850431 - RNA, 19 nt, Artificial Sequence
  Description of Artificial Sequence: Synthetic oligonucleotide
  Antisense strand to SEQ ID NO: 850430
ucuuuagcaaggugcaugc

SEQ ID NO: 850432 - RNA, 19 nt, Artificial Sequence
  Description of Artificial Sequence: Synthetic oligonucleotide
  Sense strand starting at position 195 of SEQ ID NO: 588222
uggaaagcagaucgugaaa

SEQ ID NO: 850433 - RNA, 19 nt, Artificial Sequence
  Description of Artificial Sequence: Synthetic oligonucleotide
  Antisense strand to SEQ ID NO: 850432
uuucacgaucugcuuucca

SEQ ID NO: 850434 - RNA, 19 nt, Artificial Sequence
  Description of Artificial Sequence: Synthetic oligonucleotide
  Sense strand starting at position 198 of SEQ ID NO: 588222
aaagcagaucgugaaaguu

SEQ ID NO: 850435 - RNA, 19 nt, Artificial Sequence
  Description of Artificial Sequence: Synthetic oligonucleotide
  Antisense strand to SEQ ID NO: 850434
aacuuucacgaucugcuuu

SEQ ID NO: 850436 - RNA, 19 nt, Artificial Sequence
  Description of Artificial Sequence: Synthetic oligonucleotide
  Sense strand starting at position 321 of SEQ ID NO: 588222
aggagccaugcccaagaau

SEQ ID NO: 850437 - RNA, 19 nt, Artificial Sequence
  Description of Artificial Sequence: Synthetic oligonucleotide
  Antisense strand to SEQ ID NO: 850436
auucuugggcauggcuccu

SEQ ID NO: 850438 - RNA, 19 nt, Artificial Sequence
  Description of Artificial Sequence: Synthetic oligonucleotide
  Sense strand starting at position 394 of SEQ ID NO: 588222
ggugaacaguccucaguga

SEQ ID NO: 850439 - RNA, 19 nt, Artificial Sequence
  Description of Artificial Sequence: Synthetic oligonucleotide
  Antisense strand to SEQ ID NO: 850438
ucacugaggacuguucacc

SEQ ID NO: 850440 - RNA, 19 nt, Artificial Sequence
  Description of Artificial Sequence: Synthetic oligonucleotide
  Sense strand starting at position 398 of SEQ ID NO: 588222
aacaguccucagugagaca

SEQ ID NO: 850441 - RNA, 19 nt, Artificial Sequence
  Description of Artificial Sequence: Synthetic oligonucleotide
  Antisense strand to SEQ ID NO: 850440
ugucucacugaggacuguu

SEQ ID NO: 850442 - RNA, 19 nt, Artificial Sequence
  Description of Artificial Sequence: Synthetic oligonucleotide
  Sense strand starting at position 468 of SEQ ID NO: 588222
aagaacguaacgugggaua

SEQ ID NO: 850443 - RNA, 19 nt, Artificial Sequence
  Description of Artificial Sequence: Synthetic oligonucleotide
  Antisense strand to SEQ ID NO: 850442
uaucccacguuacguucuu

SEQ ID NO: 850444 - RNA, 19 nt, Artificial Sequence
  Description of Artificial Sequence: Synthetic oligonucleotide
  Sense strand starting at position 539 of SEQ ID NO: 588222
aaacuaguucgugguguaa

SEQ ID NO: 850445 - RNA, 19 nt, Artificial Sequence
  Description of Artificial Sequence: Synthetic oligonucleotide
  Antisense strand to SEQ ID NO: 850444
uuacaccacgaacuaguuu

SEQ ID NO: 850446 - RNA, 19 nt, Artificial Sequence
  Description of Artificial Sequence: Synthetic oligonucleotide
  Sense strand starting at position 734 of SEQ ID NO: 588222
augugaagucuuggaugua

SEQ ID NO: 850447 - RNA, 19 nt, Artificial Sequence
  Description of Artificial Sequence: Synthetic oligonucleotide
  Antisense strand to SEQ ID NO: 850446
uacauccaagacuucacau

SEQ ID NO: 850448 - RNA, 19 nt, Artificial Sequence
  Description of Artificial Sequence: Synthetic oligonucleotide
  Sense strand starting at position 737 of SEQ ID NO: 588222
ugaagucuuggauguagca

SEQ ID NO: 850449 - RNA, 19 nt, Artificial Sequence
  Description of Artificial Sequence: Synthetic oligonucleotide
  Antisense strand to SEQ ID NO: 850448
ugcuacauccaagacuuca

SEQ ID NO: 850450 - RNA, 19 nt, Artificial Sequence
  Description of Artificial Sequence: Synthetic oligonucleotide
  Sense strand starting at position 755 of SEQ ID NO: 588222
aguguuucuuccucauuac

SEQ ID NO: 850451 - RNA, 19 nt, Artificial Sequence
  Description of Artificial Sequence: Synthetic oligonucleotide
  Antisense strand to SEQ ID NO: 850450
guaaugaggaagaaacacu

SEQ ID NO: 850452 - RNA, 19 nt, Artificial Sequence
  Description of Artificial Sequence: Synthetic oligonucleotide
  Sense strand starting at position 756 of SEQ ID NO: 588222
guguuucuuccucauuaca

SEQ ID NO: 850453 - RNA, 19 nt, Artificial Sequence
  Description of Artificial Sequence: Synthetic oligonucleotide
  Antisense strand to SEQ ID NO: 850452
uguaaugaggaagaaacac

SEQ ID NO: 850454 - RNA, 19 nt, Artificial Sequence
  Description of Artificial Sequence: Synthetic oligonucleotide
  Sense strand starting at position 882 of SEQ ID NO: 588222
uuugaaauaaggcgaguua

SEQ ID NO: 850455 - RNA, 19 nt, Artificial Sequence
  Description of Artificial Sequence: Synthetic oligonucleotide
  Antisense strand to SEQ ID NO: 850454
uaacucgccuuauuucaaa

SEQ ID NO: 850456 - RNA, 19 nt, Artificial Sequence
  Description of Artificial Sequence: Synthetic oligonucleotide
  Sense strand starting at position 883 of SEQ ID NO: 588222
uugaaauaaggcgaguuau

SEQ ID NO: 850457 - RNA, 19 nt, Artificial Sequence
  Description of Artificial Sequence: Synthetic oligonucleotide
  Antisense strand to SEQ ID NO: 850456
auaacucgccuuauuucaa

SEQ ID NO: 850458 - RNA, 19 nt, Artificial Sequence
  Description of Artificial Sequence: Synthetic oligonucleotide
  Sense strand starting at position 936 of SEQ ID NO: 588222
uaugacuaacucgagucua

SEQ ID NO: 850459 - RNA, 19 nt, Artificial Sequence
  Description of Artificial Sequence: Synthetic oligonucleotide
  Antisense strand to SEQ ID NO: 850458
uagacucgaguuagucaua

SEQ ID NO: 850460 - RNA, 19 nt, Artificial Sequence
  Description of Artificial Sequence: Synthetic oligonucleotide
  Sense strand starting at position 1016 of SEQ ID NO: 588222
acugaacucuucucuggaa

SEQ ID NO: 850461 - RNA, 19 nt, Artificial Sequence
  Description of Artificial Sequence: Synthetic oligonucleotide
  Antisense strand to SEQ ID NO: 850460
uuccagagaagaguucagu

SEQ ID NO: 850462 - RNA, 19 nt, Artificial Sequence
  Description of Artificial Sequence: Synthetic oligonucleotide
  Sense strand starting at position 1036 of SEQ ID NO: 588222
ggcugucuccuuuagucuu

SEQ ID NO: 850463 - RNA, 19 nt, Artificial Sequence
  Description of Artificial Sequence: Synthetic oligonucleotide
  Antisense strand to SEQ ID NO: 850462
aagacuaaaggagacagcc

SEQ ID NO: 850464 - RNA, 19 nt, Artificial Sequence
  Description of Artificial Sequence: Synthetic oligonucleotide
  Sense strand starting at position 1196 of SEQ ID NO: 588222
cgagaaucacuaggucugu

SEQ ID NO: 850465 - RNA, 19 nt, Artificial Sequence
  Description of Artificial Sequence: Synthetic oligonucleotide
  Antisense strand to SEQ ID NO: 850464
acagaccuagugauucucg

SEQ ID NO: 850466 - RNA, 19 nt, Artificial Sequence
  Description of Artificial Sequence: Synthetic oligonucleotide
  Sense strand starting at position 1294 of SEQ ID NO: 588222
guuaccuaguucuuccaaa

SEQ ID NO: 850467 - RNA, 19 nt, Artificial Sequence
  Description of Artificial Sequence: Synthetic oligonucleotide
  Antisense strand to SEQ ID NO: 850466
uuuggaagaacuagguaac

SEQ ID NO: 850468 - RNA, 19 nt, Artificial Sequence
  Description of Artificial Sequence: Synthetic oligonucleotide
  Sense strand starting at position 1330 of SEQ ID NO: 588222
ggaucauuaugauuaagca

SEQ ID NO: 850469 - RNA, 19 nt, Artificial Sequence
  Description of Artificial Sequence: Synthetic oligonucleotide
  Antisense strand to SEQ ID NO: 850468
ugcuuaaucauaaugaucc

SEQ ID NO: 850470 - RNA, 19 nt, Artificial Sequence
  Description of Artificial Sequence: Synthetic oligonucleotide
  Sense strand starting at position 3096 of SEQ ID NO: 588222
ccgcgcugggcugagaauu

SEQ ID NO: 850471 - RNA, 19 nt, Artificial Sequence
  Description of Artificial Sequence: Synthetic oligonucleotide
  Antisense strand to SEQ ID NO: 850470
aauucucagcccagcgcgg

SEQ ID NO: 850472 - RNA, 19 nt, Artificial Sequence
  Description of Artificial Sequence: Synthetic oligonucleotide
  Sense strand starting at position 3097 of SEQ ID NO: 588222
cgcgcugggcugagaauua

SEQ ID NO: 850473 - RNA, 19 nt, Artificial Sequence
  Description of Artificial Sequence: Synthetic oligonucleotide
  Antisense strand to SEQ ID NO: 850472
uaauucucagcccagcgcg

SEQ ID NO: 850474 - RNA, 19 nt, Artificial Sequence
  Description of Artificial Sequence: Synthetic oligonucleotide
  Sense strand starting at position 3117 of SEQ ID NO: 588222
gggaacgccgugagaguuu

SEQ ID NO: 850475 - RNA, 19 nt, Artificial Sequence
  Description of Artificial Sequence: Synthetic oligonucleotide
  Antisense strand to SEQ ID NO: 850474
aaacucucacggcguuccc

SEQ ID NO: 850476 - RNA, 19 nt, Artificial Sequence
  Description of Artificial Sequence: Synthetic oligonucleotide
  Sense strand starting at position 3122 of SEQ ID NO: 588222
cgccgugagaguuugcauu

SEQ ID NO: 850477 - RNA, 19 nt, Artificial Sequence
  Description of Artificial Sequence: Synthetic oligonucleotide
  Antisense strand to SEQ ID NO: 850476
aaugcaaacucucacggcg

SEQ ID NO: 850478 - RNA, 19 nt, Artificial Sequence
  Description of Artificial Sequence: Synthetic oligonucleotide
  Sense strand starting at position 3144 of SEQ ID NO: 588222
aggauuuggucugagaacc

SEQ ID NO: 850479 - RNA, 19 nt, Artificial Sequence
  Description of Artificial Sequence: Synthetic oligonucleotide
  Antisense strand to SEQ ID NO: 850478
gguucucagaccaaauccu

SEQ ID NO: 850480 - RNA, 19 nt, Artificial Sequence
  Description of Artificial Sequence: Synthetic oligonucleotide
  Sense strand starting at position 3318 of SEQ ID NO: 588222
gcggaacauguaugaaaug

SEQ ID NO: 850481 - RNA, 19 nt, Artificial Sequence
  Description of Artificial Sequence: Synthetic oligonucleotide
  Antisense strand to SEQ ID NO: 850480
cauuucauacauguuccgc

SEQ ID NO: 850482 - RNA, 19 nt, Artificial Sequence
  Description of Artificial Sequence: Synthetic oligonucleotide
  Sense strand starting at position 3493 of SEQ ID NO: 588222
gucuguugagauugucuau

SEQ ID NO: 850483 - RNA, 19 nt, Artificial Sequence
  Description of Artificial Sequence: Synthetic oligonucleotide
  Antisense strand to SEQ ID NO: 850482
auagacaaucucaacagac

SEQ ID NO: 850484 - RNA, 19 nt, Artificial Sequence
  Description of Artificial Sequence: Synthetic oligonucleotide
  Sense strand starting at position 3586 of SEQ ID NO: 588222
gggcacuuauuugagcaaa

SEQ ID NO: 850485 - RNA, 19 nt, Artificial Sequence
  Description of Artificial Sequence: Synthetic oligonucleotide
  Antisense strand to SEQ ID NO: 850484
uuugcucaaauaagugccc

SEQ ID NO: 850486 - RNA, 19 nt, Artificial Sequence
  Description of Artificial Sequence: Synthetic oligonucleotide
  Sense strand starting at position 3628 of SEQ ID NO: 588222
ggguaaggauaucugcaga

SEQ ID NO: 850487 - RNA, 19 nt, Artificial Sequence
  Description of Artificial Sequence: Synthetic oligonucleotide
  Antisense strand to SEQ ID NO: 850486
ucugcagauauccuuaccc

SEQ ID NO: 850488 - RNA, 19 nt, Artificial Sequence
  Description of Artificial Sequence: Synthetic oligonucleotide
  Sense strand starting at position 3696 of SEQ ID NO: 588222
gagccuggaguguaagaaa

SEQ ID NO: 850489 - RNA, 19 nt, Artificial Sequence
  Description of Artificial Sequence: Synthetic oligonucleotide
  Antisense strand to SEQ ID NO: 850488
uuucuuacacuccaggcuc

SEQ ID NO: 850490 - RNA, 19 nt, Artificial Sequence
  Description of Artificial Sequence: Synthetic oligonucleotide
  Sense strand starting at position 3902 of SEQ ID NO: 588222
uucugacuccugggugaag

SEQ ID NO: 850491 - RNA, 19 nt, Artificial Sequence
  Description of Artificial Sequence: Synthetic oligonucleotide
  Antisense strand to SEQ ID NO: 850490
cuucacccaggagucagaa

SEQ ID NO: 850492 - RNA, 19 nt, Artificial Sequence
  Description of Artificial Sequence: Synthetic oligonucleotide
  Sense strand starting at position 3903 of SEQ ID NO: 588222
ucugacuccugggugaaga

SEQ ID NO: 850493 - RNA, 19 nt, Artificial Sequence
  Description of Artificial Sequence: Synthetic oligonucleotide
  Antisense strand to SEQ ID NO: 850492
ucuucacccaggagucaga

SEQ ID NO: 850494 - RNA, 19 nt, Artificial Sequence
  Description of Artificial Sequence: Synthetic oligonucleotide
  Sense strand starting at position 3904 of SEQ ID NO: 588222
cugacuccugggugaagaa

SEQ ID NO: 850495 - RNA, 19 nt, Artificial Sequence
  Description of Artificial Sequence: Synthetic oligonucleotide
  Antisense strand to SEQ ID NO: 850494
uucuucacccaggagucag

SEQ ID NO: 850496 - RNA, 19 nt, Artificial Sequence
  Description of Artificial Sequence: Synthetic oligonucleotide
  Sense strand starting at position 3980 of SEQ ID NO: 588222
gagugugacccggaaaggu

SEQ ID NO: 850497 - RNA, 19 nt, Artificial Sequence
  Description of Artificial Sequence: Synthetic oligonucleotide
  Antisense strand to SEQ ID NO: 850496
accuuuccgggucacacuc

SEQ ID NO: 850498 - RNA, 19 nt, Artificial Sequence
  Description of Artificial Sequence: Synthetic oligonucleotide
  Sense strand starting at position 370 of SEQ ID NO: 588223
acucgucaucguucucgua

SEQ ID NO: 850499 - RNA, 19 nt, Artificial Sequence
  Description of Artificial Sequence: Synthetic oligonucleotide
  Antisense strand to SEQ ID NO: 850498
uacgagaacgaugacgagu

SEQ ID NO: 850500 - RNA, 19 nt, Artificial Sequence
  Description of Artificial Sequence: Synthetic oligonucleotide
  Sense strand starting at position 372 of SEQ ID NO: 588223
ucgucaucguucucguagu

SEQ ID NO: 850501 - RNA, 19 nt, Artificial Sequence
  Description of Artificial Sequence: Synthetic oligonucleotide
  Antisense strand to SEQ ID NO: 850500
acuacgagaacgaugacga

SEQ ID NO: 850502 - RNA, 19 nt, Artificial Sequence
  Description of Artificial Sequence: Synthetic oligonucleotide
  Sense strand starting at position 683 of SEQ ID NO: 588223
gcauccaugucacccagau

SEQ ID NO: 850503 - RNA, 19 nt, Artificial Sequence
  Description of Artificial Sequence: Synthetic oligonucleotide
  Antisense strand to SEQ ID NO: 850502
aucugggugacauggaugc

SEQ ID NO: 850504 - RNA, 19 nt, Artificial Sequence
  Description of Artificial Sequence: Synthetic oligonucleotide
  Sense strand starting at position 1216 of SEQ ID NO: 588223
cagugaaucccuggacucu

SEQ ID NO: 850505 - RNA, 19 nt, Artificial Sequence
  Description of Artificial Sequence: Synthetic oligonucleotide
  Antisense strand to SEQ ID NO: 850504
agaguccagggauucacug

SEQ ID NO: 850506 - RNA, 19 nt, Artificial Sequence
  Description of Artificial Sequence: Synthetic oligonucleotide
  Sense strand starting at position 1217 of SEQ ID NO: 588223
agugaaucccuggacucuu

SEQ ID NO: 850507 - RNA, 19 nt, Artificial Sequence
  Description of Artificial Sequence: Synthetic oligonucleotide
  Antisense strand to SEQ ID NO: 850506
aagaguccagggauucacu

SEQ ID NO: 850508 - RNA, 19 nt, Artificial Sequence
  Description of Artificial Sequence: Synthetic oligonucleotide
  Sense strand starting at position 1462 of SEQ ID NO: 588223
gucacugcuccuggagaca

SEQ ID NO: 850509 - RNA, 19 nt, Artificial Sequence
  Description of Artificial Sequence: Synthetic oligonucleotide
  Antisense strand to SEQ ID NO: 850508
ugucuccaggagcagugac

SEQ ID NO: 850510 - RNA, 19 nt, Artificial Sequence
  Description of Artificial Sequence: Synthetic oligonucleotide
  Sense strand starting at position 1595 of SEQ ID NO: 588223
guagacaguccugggaaca

SEQ ID NO: 850511 - RNA, 19 nt, Artificial Sequence
  Description of Artificial Sequence: Synthetic oligonucleotide
  Antisense strand to SEQ ID NO: 850510
uguucccaggacugucuac

SEQ ID NO: 850512 - RNA, 19 nt, Artificial Sequence
  Description of Artificial Sequence: Synthetic oligonucleotide
  Sense strand starting at position 1654 of SEQ ID NO: 588223
cccaucugccaccguaauu

SEQ ID NO: 850513 - RNA, 19 nt, Artificial Sequence
  Description of Artificial Sequence: Synthetic oligonucleotide
  Antisense strand to SEQ ID NO: 850512
aauuacgguggcagauggg

SEQ ID NO: 850514 - RNA, 19 nt, Artificial Sequence
  Description of Artificial Sequence: Synthetic oligonucleotide
  Sense strand starting at position 1665 of SEQ ID NO: 588223
ccguaauuccacugaaaug

SEQ ID NO: 850515 - RNA, 19 nt, Artificial Sequence
  Description of Artificial Sequence: Synthetic oligonucleotide
  Antisense strand to SEQ ID NO: 850514
cauuucaguggaauuacgg

SEQ ID NO: 850516 - RNA, 19 nt, Artificial Sequence
  Description of Artificial Sequence: Synthetic oligonucleotide
  Sense strand starting at position 1780 of SEQ ID NO: 588223
gugccaggauccugaacua

SEQ ID NO: 850517 - RNA, 19 nt, Artificial Sequence
  Description of Artificial Sequence: Synthetic oligonucleotide
  Antisense strand to SEQ ID NO: 850516
uaguucaggauccuggcac

SEQ ID NO: 850518 - RNA, 19 nt, Artificial Sequence
  Description of Artificial Sequence: Synthetic oligonucleotide
  Sense strand starting at position 1972 of SEQ ID NO: 588223
ccugauggguucugcuuaa

SEQ ID NO: 850519 - RNA, 19 nt, Artificial Sequence
  Description of Artificial Sequence: Synthetic oligonucleotide
  Antisense strand to SEQ ID NO: 850518
uuaagcagaacccaucagg

SEQ ID NO: 850520 - RNA, 19 nt, Artificial Sequence
  Description of Artificial Sequence: Synthetic oligonucleotide
  Sense strand starting at position 2249 of SEQ ID NO: 588223
ccacuuugaccuggucaca

SEQ ID NO: 850521 - RNA, 19 nt, Artificial Sequence
  Description of Artificial Sequence: Synthetic oligonucleotide
  Antisense strand to SEQ ID NO: 850520
ugugaccaggucaaagugg

SEQ ID NO: 850522 - RNA, 19 nt, Artificial Sequence
  Description of Artificial Sequence: Synthetic oligonucleotide
  Sense strand starting at position 2294 of SEQ ID NO: 588223
caugcuuugcucugugcga

SEQ ID NO: 850523 - RNA, 19 nt, Artificial Sequence
  Description of Artificial Sequence: Synthetic oligonucleotide
  Antisense strand to SEQ ID NO: 850522
ucgcacagagcaaagcaug

SEQ ID NO: 850524 - RNA, 19 nt, Artificial Sequence
  Description of Artificial Sequence: Synthetic oligonucleotide
  Sense strand starting at position 2295 of SEQ ID NO: 588223
augcuuugcucugugcgaa

SEQ ID NO: 850525 - RNA, 19 nt, Artificial Sequence
  Description of Artificial Sequence: Synthetic oligonucleotide
  Antisense strand to SEQ ID NO: 850524
uucgcacagagcaaagcau

SEQ ID NO: 850526 - RNA, 19 nt, Artificial Sequence
  Description of Artificial Sequence: Synthetic oligonucleotide
  Sense strand starting at position 2514 of SEQ ID NO: 588223
ccagaagugucguuauccu

SEQ ID NO: 850527 - RNA, 19 nt, Artificial Sequence
  Description of Artificial Sequence: Synthetic oligonucleotide
  Antisense strand to SEQ ID NO: 850526
aggauaacgacacuucugg

SEQ ID NO: 850528 - RNA, 19 nt, Artificial Sequence
  Description of Artificial Sequence: Synthetic oligonucleotide
  Sense strand starting at position 2519 of SEQ ID NO: 588223
agugucguuauccucguua

SEQ ID NO: 850529 - RNA, 19 nt, Artificial Sequence
  Description of Artificial Sequence: Synthetic oligonucleotide
  Antisense strand to SEQ ID NO: 850528
uaacgaggauaacgacacu

SEQ ID NO: 850530 - RNA, 19 nt, Artificial Sequence
  Description of Artificial Sequence: Synthetic oligonucleotide
  Sense strand starting at position 2521 of SEQ ID NO: 588223
ugucguuauccucguuauc

SEQ ID NO: 850531 - RNA, 19 nt, Artificial Sequence
  Description of Artificial Sequence: Synthetic oligonucleotide
  Antisense strand to SEQ ID NO: 850530
gauaacgaggauaacgaca

SEQ ID NO: 850532 - RNA, 19 nt, Artificial Sequence
  Description of Artificial Sequence: Synthetic oligonucleotide
  Sense strand starting at position 2763 of SEQ ID NO: 588223
cccgguaaagcugguugaa

SEQ ID NO: 850533 - RNA, 19 nt, Artificial Sequence
  Description of Artificial Sequence: Synthetic oligonucleotide
  Antisense strand to SEQ ID NO: 850532
uucaaccagcuuuaccggg

SEQ ID NO: 850534 - RNA, 19 nt, Artificial Sequence
  Description of Artificial Sequence: Synthetic oligonucleotide
  Sense strand starting at position 2765 of SEQ ID NO: 588223
cgguaaagcugguugaacu

SEQ ID NO: 850535 - RNA, 19 nt, Artificial Sequence
  Description of Artificial Sequence: Synthetic oligonucleotide
  Antisense strand to SEQ ID NO: 850534
aguucaaccagcuuuaccg

SEQ ID NO: 850536 - RNA, 19 nt, Artificial Sequence
  Description of Artificial Sequence: Synthetic oligonucleotide
  Sense strand starting at position 2891 of SEQ ID NO: 588223
cggacaacgucugacauca

SEQ ID NO: 850537 - RNA, 19 nt, Artificial Sequence
  Description of Artificial Sequence: Synthetic oligonucleotide
  Antisense strand to SEQ ID NO: 850536
ugaugucagacguuguccg

SEQ ID NO: 850538 - RNA, 19 nt, Artificial Sequence
  Description of Artificial Sequence: Synthetic oligonucleotide
  Sense strand starting at position 3132 of SEQ ID NO: 588223
guguguccuuaggagugaa

SEQ ID NO: 850539 - RNA, 19 nt, Artificial Sequence
  Description of Artificial Sequence: Synthetic oligonucleotide
  Antisense strand to SEQ ID NO: 850538
uucacuccuaaggacacac

SEQ ID NO: 850540 - RNA, 19 nt, Artificial Sequence
  Description of Artificial Sequence: Synthetic oligonucleotide
  Sense strand starting at position 3163 of SEQ ID NO: 588223
guucucuaaccauaucgga

SEQ ID NO: 850541 - RNA, 19 nt, Artificial Sequence
  Description of Artificial Sequence: Synthetic oligonucleotide
  Antisense strand to SEQ ID NO: 850540
uccgauaugguuagagaac

SEQ ID NO: 850542 - RNA, 19 nt, Artificial Sequence
  Description of Artificial Sequence: Synthetic oligonucleotide
  Sense strand starting at position 3168 of SEQ ID NO: 588223
cuaaccauaucggaagcua

SEQ ID NO: 850543 - RNA, 19 nt, Artificial Sequence
  Description of Artificial Sequence: Synthetic oligonucleotide
  Antisense strand to SEQ ID NO: 850542
uagcuuccgauaugguuag

SEQ ID NO: 850544 - RNA, 19 nt, Artificial Sequence
  Description of Artificial Sequence: Synthetic oligonucleotide
  Sense strand starting at position 3193 of SEQ ID NO: 588223
gguaacagauaucggcaaa

SEQ ID NO: 850545 - RNA, 19 nt, Artificial Sequence
  Description of Artificial Sequence: Synthetic oligonucleotide
  Antisense strand to SEQ ID NO: 850544
uuugccgauaucuguuacc

SEQ ID NO: 850546 - RNA, 19 nt, Artificial Sequence
  Description of Artificial Sequence: Synthetic oligonucleotide
  Sense strand starting at position 3310 of SEQ ID NO: 588223
aacacauacucaggaguga

SEQ ID NO: 850547 - RNA, 19 nt, Artificial Sequence
  Description of Artificial Sequence: Synthetic oligonucleotide
  Antisense strand to SEQ ID NO: 850546
ucacuccugaguauguguu

SEQ ID NO: 850548 - RNA, 19 nt, Artificial Sequence
  Description of Artificial Sequence: Synthetic oligonucleotide
  Sense strand starting at position 3385 of SEQ ID NO: 588223
gcuccagugaaggaucgaa

SEQ ID NO: 850549 - RNA, 19 nt, Artificial Sequence
  Description of Artificial Sequence: Synthetic oligonucleotide
  Antisense strand to SEQ ID NO: 850548
uucgauccuucacuggagc

SEQ ID NO: 850550 - RNA, 19 nt, Artificial Sequence
  Description of Artificial Sequence: Synthetic oligonucleotide
  Sense strand starting at position 3484 of SEQ ID NO: 588223
gggcuagucuuaugccaau

SEQ ID NO: 850551 - RNA, 19 nt, Artificial Sequence
  Description of Artificial Sequence: Synthetic oligonucleotide
  Antisense strand to SEQ ID NO: 850550
auuggcauaagacuagccc

SEQ ID NO: 850552 - RNA, 19 nt, Artificial Sequence
  Description of Artificial Sequence: Synthetic oligonucleotide
  Sense strand starting at position 3562 of SEQ ID NO: 588223
ggucaucuguuccagggaa

SEQ ID NO: 850553 - RNA, 19 nt, Artificial Sequence
  Description of Artificial Sequence: Synthetic oligonucleotide
  Antisense strand to SEQ ID NO: 850552
uucccuggaacagaugacc

SEQ ID NO: 850554 - RNA, 19 nt, Artificial Sequence
  Description of Artificial Sequence: Synthetic oligonucleotide
  Sense strand starting at position 3658 of SEQ ID NO: 588223
acagaugcuuuccaggaaa

SEQ ID NO: 850555 - RNA, 19 nt, Artificial Sequence
  Description of Artificial Sequence: Synthetic oligonucleotide
  Antisense strand to SEQ ID NO: 850554
uuuccuggaaagcaucugu

SEQ ID NO: 850556 - RNA, 19 nt, Artificial Sequence
  Description of Artificial Sequence: Synthetic oligonucleotide
  Sense strand starting at position 3660 of SEQ ID NO: 588223
agaugcuuuccaggaaaug

SEQ ID NO: 850557 - RNA, 19 nt, Artificial Sequence
  Description of Artificial Sequence: Synthetic oligonucleotide
  Antisense strand to SEQ ID NO: 850556
cauuuccuggaaagcaucu

SEQ ID NO: 850558 - RNA, 19 nt, Artificial Sequence
  Description of Artificial Sequence: Synthetic oligonucleotide
  Sense strand starting at position 3063 of SEQ ID NO: 588225
uugagugucuaagaguuga

SEQ ID NO: 850559 - RNA, 19 nt, Artificial Sequence
  Description of Artificial Sequence: Synthetic oligonucleotide
  Antisense strand to SEQ ID NO: 850558
ucaacucuuagacacucaa

SEQ ID NO: 850560 - RNA, 19 nt, Artificial Sequence
  Description of Artificial Sequence: Synthetic oligonucleotide
  Sense strand starting at position 3067 of SEQ ID NO: 588225
gugucuaagaguugaauug

SEQ ID NO: 850561 - RNA, 19 nt, Artificial Sequence
  Description of Artificial Sequence: Synthetic oligonucleotide
  Antisense strand to SEQ ID NO: 850560
caauucaacucuuagacac

SEQ ID NO: 850562 - RNA, 19 nt, Artificial Sequence
  Description of Artificial Sequence: Synthetic oligonucleotide
  Sense strand starting at position 3326 of SEQ ID NO: 588225
ggcaauauguaauucuuag

SEQ ID NO: 850563 - RNA, 19 nt, Artificial Sequence
  Description of Artificial Sequence: Synthetic oligonucleotide
  Antisense strand to SEQ ID NO: 850562
cuaagaauuacauauugcc

SEQ ID NO: 850564 - RNA, 19 nt, Artificial Sequence
  Description of Artificial Sequence: Synthetic oligonucleotide
  Sense strand starting at position 3332 of SEQ ID NO: 588225
auguaauucuuagaaugac

SEQ ID NO: 850565 - RNA, 19 nt, Artificial Sequence
  Description of Artificial Sequence: Synthetic oligonucleotide
  Antisense strand to SEQ ID NO: 850564
gucauucuaagaauuacau

SEQ ID NO: 850566 - RNA, 19 nt, Artificial Sequence
  Description of Artificial Sequence: Synthetic oligonucleotide
  Sense strand starting at position 3728 of SEQ ID NO: 588225
aggcaaauaccuuaggugu

SEQ ID NO: 850567 - RNA, 19 nt, Artificial Sequence
  Description of Artificial Sequence: Synthetic oligonucleotide
  Antisense strand to SEQ ID NO: 850566
acaccuaagguauuugccu

SEQ ID NO: 850568 - RNA, 19 nt, Artificial Sequence
  Description of Artificial Sequence: Synthetic oligonucleotide
  Sense strand starting at position 3760 of SEQ ID NO: 588225
acuguauucugccaaagga

SEQ ID NO: 850569 - RNA, 19 nt, Artificial Sequence
  Description of Artificial Sequence: Synthetic oligonucleotide
  Antisense strand to SEQ ID NO: 850568
uccuuuggcagaauacagu

SEQ ID NO: 850570 - RNA, 19 nt, Artificial Sequence
  Description of Artificial Sequence: Synthetic oligonucleotide
  Sense strand starting at position 867 of SEQ ID NO: 588226
gcacacaacuaggaauauu

SEQ ID NO: 850571 - RNA, 19 nt, Artificial Sequence
  Description of Artificial Sequence: Synthetic oligonucleotide
  Antisense strand to SEQ ID NO: 850570
aauauuccuaguugugugc

SEQ ID NO: 850572 - RNA, 19 nt, Artificial Sequence
  Description of Artificial Sequence: Synthetic oligonucleotide
  Sense strand starting at position 2494 of SEQ ID NO: 588226
gaccucagguaaucuaagu

SEQ ID NO: 850573 - RNA, 19 nt, Artificial Sequence
  Description of Artificial Sequence: Synthetic oligonucleotide
  Antisense strand to SEQ ID NO: 850572
acuuagauuaccugagguc

SEQ ID NO: 850574 - RNA, 19 nt, Artificial Sequence
  Description of Artificial Sequence: Synthetic oligonucleotide
  Sense strand starting at position 2602 of SEQ ID NO: 588226
ugaccucauuccugacgua

SEQ ID NO: 850575 - RNA, 19 nt, Artificial Sequence
  Description of Artificial Sequence: Synthetic oligonucleotide
  Antisense strand to SEQ ID NO: 850574
uacgucaggaaugagguca

SEQ ID NO: 850576 - RNA, 19 nt, Artificial Sequence
  Description of Artificial Sequence: Synthetic oligonucleotide
  Sense strand starting at position 2603 of SEQ ID NO: 588226
gaccucauuccugacguaa

SEQ ID NO: 850577 - RNA, 19 nt, Artificial Sequence
  Description of Artificial Sequence: Synthetic oligonucleotide
  Antisense strand to SEQ ID NO: 850576
uuacgucaggaaugagguc

SEQ ID NO: 850578 - RNA, 19 nt, Artificial Sequence
  Description of Artificial Sequence: Synthetic oligonucleotide
  Sense strand starting at position 3011 of SEQ ID NO: 588226
gugucuguguaagaguuga

SEQ ID NO: 850579 - RNA, 19 nt, Artificial Sequence
  Description of Artificial Sequence: Synthetic oligonucleotide
  Antisense strand to SEQ ID NO: 850578
ucaacucuuacacagacac

SEQ ID NO: 850580 - RNA, 19 nt, Artificial Sequence
  Description of Artificial Sequence: Synthetic oligonucleotide
  Sense strand starting at position 3015 of SEQ ID NO: 588226
cuguguaagaguugaauug

SEQ ID NO: 850581 - RNA, 19 nt, Artificial Sequence
  Description of Artificial Sequence: Synthetic oligonucleotide
  Antisense strand to SEQ ID NO: 850580
caauucaacucuuacacag

SEQ ID NO: 850582 - RNA, 19 nt, Artificial Sequence
  Description of Artificial Sequence: Synthetic oligonucleotide
  Sense strand starting at position 3403 of SEQ ID NO: 588226
cuacuauccugaugccaga

SEQ ID NO: 850583 - RNA, 19 nt, Artificial Sequence
  Description of Artificial Sequence: Synthetic oligonucleotide
  Antisense strand to SEQ ID NO: 850582
ucuggcaucaggauaguag

SEQ ID NO: 850584 - RNA, 19 nt, Artificial Sequence
  Description of Artificial Sequence: Synthetic oligonucleotide
  Sense strand starting at position 3406 of SEQ ID NO: 588226
cuauccugaugccagauaa

SEQ ID NO: 850585 - RNA, 19 nt, Artificial Sequence
  Description of Artificial Sequence: Synthetic oligonucleotide
  Antisense strand to SEQ ID NO: 850584
uuaucuggcaucaggauag

SEQ ID NO: 850586 - RNA, 19 nt, Artificial Sequence
  Description of Artificial Sequence: Synthetic oligonucleotide
  Sense strand starting at position 676 of SEQ ID NO: 588227
ucaucuucucaguagagca

SEQ ID NO: 850587 - RNA, 19 nt, Artificial Sequence
  Description of Artificial Sequence: Synthetic oligonucleotide
  Antisense strand to SEQ ID NO: 850586
ugcucuacugagaagauga

SEQ ID NO: 850588 - RNA, 19 nt, Artificial Sequence
  Description of Artificial Sequence: Synthetic oligonucleotide
  Sense strand starting at position 1437 of SEQ ID NO: 588227
gggcgugucuuagcuucaa

SEQ ID NO: 850589 - RNA, 19 nt, Artificial Sequence
  Description of Artificial Sequence: Synthetic oligonucleotide
  Antisense strand to SEQ ID NO: 850588
uugaagcuaagacacgccc

SEQ ID NO: 850590 - RNA, 19 nt, Artificial Sequence
  Description of Artificial Sequence: Synthetic oligonucleotide
  Sense strand starting at position 1814 of SEQ ID NO: 588227
gcaggauccucuuccucau

SEQ ID NO: 850591 - RNA, 19 nt, Artificial Sequence
  Description of Artificial Sequence: Synthetic oligonucleotide
  Antisense strand to SEQ ID NO: 850590
augaggaagaggauccugc

SEQ ID NO: 850592 - RNA, 19 nt, Artificial Sequence
  Description of Artificial Sequence: Synthetic oligonucleotide
  Sense strand starting at position 2209 of SEQ ID NO: 588227
aggccagccugcuggaaau

SEQ ID NO: 850593 - RNA, 19 nt, Artificial Sequence
  Description of Artificial Sequence: Synthetic oligonucleotide
  Antisense strand to SEQ ID NO: 850592
auuuccagcaggcuggccu

SEQ ID NO: 850594 - RNA, 19 nt, Artificial Sequence
  Description of Artificial Sequence: Synthetic oligonucleotide
  Sense strand starting at position 2589 of SEQ ID NO: 588227
agugaacuccuuugaccuc

SEQ ID NO: 850595 - RNA, 19 nt, Artificial Sequence
  Description of Artificial Sequence: Synthetic oligonucleotide
  Antisense strand to SEQ ID NO: 850594
gaggucaaaggaguucacu

SEQ ID NO: 850596 - RNA, 19 nt, Artificial Sequence
  Description of Artificial Sequence: Synthetic oligonucleotide
  Sense strand starting at position 2757 of SEQ ID NO: 588227
ucacauaucccacguaugu

SEQ ID NO: 850597 - RNA, 19 nt, Artificial Sequence
  Description of Artificial Sequence: Synthetic oligonucleotide
  Antisense strand to SEQ ID NO: 850596
acauacgugggauauguga

SEQ ID NO: 850598 - RNA, 19 nt, Artificial Sequence
  Description of Artificial Sequence: Synthetic oligonucleotide
  Sense strand starting at position 2766 of SEQ ID NO: 588227
ccacguauguacuuagaga

SEQ ID NO: 850599 - RNA, 19 nt, Artificial Sequence
  Description of Artificial Sequence: Synthetic oligonucleotide
  Antisense strand to SEQ ID NO: 850598
ucucuaaguacauacgugg

SEQ ID NO: 850600 - RNA, 19 nt, Artificial Sequence
  Description of Artificial Sequence: Synthetic oligonucleotide
  Sense strand starting at position 2846 of SEQ ID NO: 588227
uccugaggcuugcuauauu

SEQ ID NO: 850601 - RNA, 19 nt, Artificial Sequence
  Description of Artificial Sequence: Synthetic oligonucleotide
  Antisense strand to SEQ ID NO: 850600
aauauagcaagccucagga

SEQ ID NO: 850602 - RNA, 19 nt, Artificial Sequence
  Description of Artificial Sequence: Synthetic oligonucleotide
  Sense strand starting at position 3134 of SEQ ID NO: 588227
agaucucauuggucuguau

SEQ ID NO: 850603 - RNA, 19 nt, Artificial Sequence
  Description of Artificial Sequence: Synthetic oligonucleotide
  Antisense strand to SEQ ID NO: 850602
auacagaccaaugagaucu

SEQ ID NO: 850604 - RNA, 19 nt, Artificial Sequence
  Description of Artificial Sequence: Synthetic oligonucleotide
  Sense strand starting at position 3136 of SEQ ID NO: 588227
aucucauuggucuguaugu

SEQ ID NO: 850605 - RNA, 19 nt, Artificial Sequence
  Description of Artificial Sequence: Synthetic oligonucleotide
  Antisense strand to SEQ ID NO: 850604
acauacagaccaaugagau

SEQ ID NO: 850606 - RNA, 19 nt, Artificial Sequence
  Description of Artificial Sequence: Synthetic oligonucleotide
  Sense strand starting at position 3138 of SEQ ID NO: 588227
cucauuggucuguauguca

SEQ ID NO: 850607 - RNA, 19 nt, Artificial Sequence
  Description of Artificial Sequence: Synthetic oligonucleotide
  Antisense strand to SEQ ID NO: 850606
ugacauacagaccaaugag

SEQ ID NO: 850608 - RNA, 19 nt, Artificial Sequence
  Description of Artificial Sequence: Synthetic oligonucleotide
  Sense strand starting at position 3141 of SEQ ID NO: 588227
auuggucuguaugucaaua

SEQ ID NO: 850609 - RNA, 19 nt, Artificial Sequence
  Description of Artificial Sequence: Synthetic oligonucleotide
  Antisense strand to SEQ ID NO: 850608
uauugacauacagaccaau

SEQ ID NO: 850610 - RNA, 19 nt, Artificial Sequence
  Description of Artificial Sequence: Synthetic oligonucleotide
  Sense strand starting at position 3143 of SEQ ID NO: 588227
uggucuguaugucaauauu

SEQ ID NO: 850611 - RNA, 19 nt, Artificial Sequence
  Description of Artificial Sequence: Synthetic oligonucleotide
  Antisense strand to SEQ ID NO: 850610
aauauugacauacagacca

SEQ ID NO: 850612 - RNA, 19 nt, Artificial Sequence
  Description of Artificial Sequence: Synthetic oligonucleotide
  Sense strand starting at position 3146 of SEQ ID NO: 588227
ucuguaugucaauauuauc

SEQ ID NO: 850613 - RNA, 19 nt, Artificial Sequence
  Description of Artificial Sequence: Synthetic oligonucleotide
  Antisense strand to SEQ ID NO: 850612
gauaauauugacauacaga

SEQ ID NO: 850614 - RNA, 19 nt, Artificial Sequence
  Description of Artificial Sequence: Synthetic oligonucleotide
  Sense strand starting at position 3152 of SEQ ID NO: 588227
ugucaauauuaucaggcau

SEQ ID NO: 850615 - RNA, 19 nt, Artificial Sequence
  Description of Artificial Sequence: Synthetic oligonucleotide
  Antisense strand to SEQ ID NO: 850614
augccugauaauauugaca

SEQ ID NO: 850616 - RNA, 19 nt, Artificial Sequence
  Description of Artificial Sequence: Synthetic oligonucleotide
  Sense strand starting at position 3273 of SEQ ID NO: 588227
ggcaauauguaauucuuag

SEQ ID NO: 850617 - RNA, 19 nt, Artificial Sequence
  Description of Artificial Sequence: Synthetic oligonucleotide
  Antisense strand to SEQ ID NO: 850616
cuaagaauuacauauugcc

SEQ ID NO: 850618 - RNA, 19 nt, Artificial Sequence
  Description of Artificial Sequence: Synthetic oligonucleotide
  Sense strand starting at position 3279 of SEQ ID NO: 588227
auguaauucuuagaaugac

SEQ ID NO: 850619 - RNA, 19 nt, Artificial Sequence
  Description of Artificial Sequence: Synthetic oligonucleotide
  Antisense strand to SEQ ID NO: 850618
gucauucuaagaauuacau

SEQ ID NO: 850620 - RNA, 19 nt, Artificial Sequence
  Description of Artificial Sequence: Synthetic oligonucleotide
  Sense strand starting at position 3609 of SEQ ID NO: 588227
gaaaucaggucuugaaugu

SEQ ID NO: 850621 - RNA, 19 nt, Artificial Sequence
  Description of Artificial Sequence: Synthetic oligonucleotide
  Antisense strand to SEQ ID NO: 850620
acauucaagaccugauuuc

SEQ ID NO: 850622 - RNA, 19 nt, Artificial Sequence
  Description of Artificial Sequence: Synthetic oligonucleotide
  Sense strand starting at position 3610 of SEQ ID NO: 588227
aaaucaggucuugaauguu

SEQ ID NO: 850623 - RNA, 19 nt, Artificial Sequence
  Description of Artificial Sequence: Synthetic oligonucleotide
  Antisense strand to SEQ ID NO: 850622
aacauucaagaccugauuu

SEQ ID NO: 850624 - RNA, 19 nt, Artificial Sequence
  Description of Artificial Sequence: Synthetic oligonucleotide
  Sense strand starting at position 3707 of SEQ ID NO: 588227
acuguauucugccaaagga

SEQ ID NO: 850625 - RNA, 19 nt, Artificial Sequence
  Description of Artificial Sequence: Synthetic oligonucleotide
  Antisense strand to SEQ ID NO: 850624
uccuuuggcagaauacagu

SEQ ID NO: 850626 - RNA, 19 nt, Artificial Sequence
  Description of Artificial Sequence: Synthetic oligonucleotide
  Sense strand starting at position 3007 of SEQ ID NO: 588228
uugagugucuaagaguuga

SEQ ID NO: 850627 - RNA, 19 nt, Artificial Sequence
  Description of Artificial Sequence: Synthetic oligonucleotide
  Antisense strand to SEQ ID NO: 850626
ucaacucuuagacacucaa

SEQ ID NO: 850628 - RNA, 19 nt, Artificial Sequence
  Description of Artificial Sequence: Synthetic oligonucleotide
  Sense strand starting at position 3011 of SEQ ID NO: 588228
gugucuaagaguugaauug

SEQ ID NO: 850629 - RNA, 19 nt, Artificial Sequence
  Description of Artificial Sequence: Synthetic oligonucleotide
  Antisense strand to SEQ ID NO: 850628
caauucaacucuuagacac

SEQ ID NO: 850630 - RNA, 19 nt, Artificial Sequence
  Description of Artificial Sequence: Synthetic oligonucleotide
  Sense strand starting at position 3270 of SEQ ID NO: 588228
ggcaauauguaauucuuag

SEQ ID NO: 850631 - RNA, 19 nt, Artificial Sequence
  Description of Artificial Sequence: Synthetic oligonucleotide
  Antisense strand to SEQ ID NO: 850630
cuaagaauuacauauugcc

SEQ ID NO: 850632 - RNA, 19 nt, Artificial Sequence
  Description of Artificial Sequence: Synthetic oligonucleotide
  Sense strand starting at position 3276 of SEQ ID NO: 588228
auguaauucuuagaaugac

SEQ ID NO: 850633 - RNA, 19 nt, Artificial Sequence
  Description of Artificial Sequence: Synthetic oligonucleotide
  Antisense strand to SEQ ID NO: 850632
gucauucuaagaauuacau

SEQ ID NO: 850634 - RNA, 19 nt, Artificial Sequence
  Description of Artificial Sequence: Synthetic oligonucleotide
  Sense strand starting at position 3672 of SEQ ID NO: 588228
aggcaaauaccuuaggugu

SEQ ID NO: 850635 - RNA, 19 nt, Artificial Sequence
  Description of Artificial Sequence: Synthetic oligonucleotide
  Antisense strand to SEQ ID NO: 850634
acaccuaagguauuugccu

SEQ ID NO: 850636 - RNA, 19 nt, Artificial Sequence
  Description of Artificial Sequence: Synthetic oligonucleotide
  Sense strand starting at position 3704 of SEQ ID NO: 588228
acuguauucugccaaagga

SEQ ID NO: 850637 - RNA, 19 nt, Artificial Sequence
  Description of Artificial Sequence: Synthetic oligonucleotide
  Antisense strand to SEQ ID NO: 850636
uccuuuggcagaauacagu

SEQ ID NO: 850638 - RNA, 19 nt, Artificial Sequence
  Description of Artificial Sequence: Synthetic oligonucleotide
  Sense strand starting at position 713 of SEQ ID NO: 588229
ucaucuucucaguagagca

SEQ ID NO: 850639 - RNA, 19 nt, Artificial Sequence
  Description of Artificial Sequence: Synthetic oligonucleotide
  Antisense strand to SEQ ID NO: 850638
ugcucuacugagaagauga

SEQ ID NO: 850640 - RNA, 19 nt, Artificial Sequence
  Description of Artificial Sequence: Synthetic oligonucleotide
  Sense strand starting at position 1474 of SEQ ID NO: 588229
gggcgugucuuagcuucaa

SEQ ID NO: 850641 - RNA, 19 nt, Artificial Sequence
  Description of Artificial Sequence: Synthetic oligonucleotide
  Antisense strand to SEQ ID NO: 850640
uugaagcuaagacacgccc

SEQ ID NO: 850642 - RNA, 19 nt, Artificial Sequence
  Description of Artificial Sequence: Synthetic oligonucleotide
  Sense strand starting at position 1851 of SEQ ID NO: 588229
gcaggauccucuuccucau

SEQ ID NO: 850643 - RNA, 19 nt, Artificial Sequence
  Description of Artificial Sequence: Synthetic oligonucleotide
  Antisense strand to SEQ ID NO: 850642
augaggaagaggauccugc

SEQ ID NO: 850644 - RNA, 19 nt, Artificial Sequence
  Description of Artificial Sequence: Synthetic oligonucleotide
  Sense strand starting at position 2246 of SEQ ID NO: 588229
aggccagccugcuggaaau

SEQ ID NO: 850645 - RNA, 19 nt, Artificial Sequence
  Description of Artificial Sequence: Synthetic oligonucleotide
  Antisense strand to SEQ ID NO: 850644
auuuccagcaggcuggccu

SEQ ID NO: 850646 - RNA, 19 nt, Artificial Sequence
  Description of Artificial Sequence: Synthetic oligonucleotide
  Sense strand starting at position 2626 of SEQ ID NO: 588229
agugaacuccuuugaccuc

SEQ ID NO: 850647 - RNA, 19 nt, Artificial Sequence
  Description of Artificial Sequence: Synthetic oligonucleotide
  Antisense strand to SEQ ID NO: 850646
gaggucaaaggaguucacu

SEQ ID NO: 850648 - RNA, 19 nt, Artificial Sequence
  Description of Artificial Sequence: Synthetic oligonucleotide
  Sense strand starting at position 2794 of SEQ ID NO: 588229
ucacauaucccacguaugu

SEQ ID NO: 850649 - RNA, 19 nt, Artificial Sequence
  Description of Artificial Sequence: Synthetic oligonucleotide
  Antisense strand to SEQ ID NO: 850648
acauacgugggauauguga

SEQ ID NO: 850650 - RNA, 19 nt, Artificial Sequence
  Description of Artificial Sequence: Synthetic oligonucleotide
  Sense strand starting at position 2803 of SEQ ID NO: 588229
ccacguauguacuuagaga

SEQ ID NO: 850651 - RNA, 19 nt, Artificial Sequence
  Description of Artificial Sequence: Synthetic oligonucleotide
  Antisense strand to SEQ ID NO: 850650
ucucuaaguacauacgugg

SEQ ID NO: 850652 - RNA, 19 nt, Artificial Sequence
  Description of Artificial Sequence: Synthetic oligonucleotide
  Sense strand starting at position 2883 of SEQ ID NO: 588229
uccugaggcuugcuauauu

SEQ ID NO: 850653 - RNA, 19 nt, Artificial Sequence
  Description of Artificial Sequence: Synthetic oligonucleotide
  Antisense strand to SEQ ID NO: 850652
aauauagcaagccucagga

SEQ ID NO: 850654 - RNA, 19 nt, Artificial Sequence
  Description of Artificial Sequence: Synthetic oligonucleotide
  Sense strand starting at position 3171 of SEQ ID NO: 588229
agaucucauuggucuguau

SEQ ID NO: 850655 - RNA, 19 nt, Artificial Sequence
  Description of Artificial Sequence: Synthetic oligonucleotide
  Antisense strand to SEQ ID NO: 850654
auacagaccaaugagaucu

SEQ ID NO: 850656 - RNA, 19 nt, Artificial Sequence
  Description of Artificial Sequence: Synthetic oligonucleotide
  Sense strand starting at position 3173 of SEQ ID NO: 588229
aucucauuggucuguaugu

SEQ ID NO: 850657 - RNA, 19 nt, Artificial Sequence
  Description of Artificial Sequence: Synthetic oligonucleotide
  Antisense strand to SEQ ID NO: 850656
acauacagaccaaugagau

SEQ ID NO: 850658 - RNA, 19 nt, Artificial Sequence
  Description of Artificial Sequence: Synthetic oligonucleotide
  Sense strand starting at position 3175 of SEQ ID NO: 588229
cucauuggucuguauguca

SEQ ID NO: 850659 - RNA, 19 nt, Artificial Sequence
  Description of Artificial Sequence: Synthetic oligonucleotide
  Antisense strand to SEQ ID NO: 850658
ugacauacagaccaaugag

SEQ ID NO: 850660 - RNA, 19 nt, Artificial Sequence
  Description of Artificial Sequence: Synthetic oligonucleotide
  Sense strand starting at position 3178 of SEQ ID NO: 588229
auuggucuguaugucaaua

SEQ ID NO: 850661 - RNA, 19 nt, Artificial Sequence
  Description of Artificial Sequence: Synthetic oligonucleotide
  Antisense strand to SEQ ID NO: 850660
uauugacauacagaccaau

SEQ ID NO: 850662 - RNA, 19 nt, Artificial Sequence
  Description of Artificial Sequence: Synthetic oligonucleotide
  Sense strand starting at position 3180 of SEQ ID NO: 588229
uggucuguaugucaauauu

SEQ ID NO: 850663 - RNA, 19 nt, Artificial Sequence
  Description of Artificial Sequence: Synthetic oligonucleotide
  Antisense strand to SEQ ID NO: 850662
aauauugacauacagacca

SEQ ID NO: 850664 - RNA, 19 nt, Artificial Sequence
  Description of Artificial Sequence: Synthetic oligonucleotide
  Sense strand starting at position 3183 of SEQ ID NO: 588229
ucuguaugucaauauuauc

SEQ ID NO: 850665 - RNA, 19 nt, Artificial Sequence
  Description of Artificial Sequence: Synthetic oligonucleotide
  Antisense strand to SEQ ID NO: 850664
gauaauauugacauacaga

SEQ ID NO: 850666 - RNA, 19 nt, Artificial Sequence
  Description of Artificial Sequence: Synthetic oligonucleotide
  Sense strand starting at position 3189 of SEQ ID NO: 588229
ugucaauauuaucaggcau

SEQ ID NO: 850667 - RNA, 19 nt, Artificial Sequence
  Description of Artificial Sequence: Synthetic oligonucleotide
  Antisense strand to SEQ ID NO: 850666
augccugauaauauugaca

SEQ ID NO: 850668 - RNA, 19 nt, Artificial Sequence
  Description of Artificial Sequence: Synthetic oligonucleotide
  Sense strand starting at position 3310 of SEQ ID NO: 588229
ggcaauauguaauucuuag

SEQ ID NO: 850669 - RNA, 19 nt, Artificial Sequence
  Description of Artificial Sequence: Synthetic oligonucleotide
  Antisense strand to SEQ ID NO: 850668
cuaagaauuacauauugcc

SEQ ID NO: 850670 - RNA, 19 nt, Artificial Sequence
  Description of Artificial Sequence: Synthetic oligonucleotide
  Sense strand starting at position 3316 of SEQ ID NO: 588229
auguaauucuuagaaugac

SEQ ID NO: 850671 - RNA, 19 nt, Artificial Sequence
  Description of Artificial Sequence: Synthetic oligonucleotide
  Antisense strand to SEQ ID NO: 850670
gucauucuaagaauuacau

SEQ ID NO: 850672 - RNA, 19 nt, Artificial Sequence
  Description of Artificial Sequence: Synthetic oligonucleotide
  Sense strand starting at position 3646 of SEQ ID NO: 588229
gaaaucaggucuugaaugu

SEQ ID NO: 850673 - RNA, 19 nt, Artificial Sequence
  Description of Artificial Sequence: Synthetic oligonucleotide
  Antisense strand to SEQ ID NO: 850672
acauucaagaccugauuuc

SEQ ID NO: 850674 - RNA, 19 nt, Artificial Sequence
  Description of Artificial Sequence: Synthetic oligonucleotide
  Sense strand starting at position 3647 of SEQ ID NO: 588229
aaaucaggucuugaauguu

SEQ ID NO: 850675 - RNA, 19 nt, Artificial Sequence
  Description of Artificial Sequence: Synthetic oligonucleotide
  Antisense strand to SEQ ID NO: 850674
aacauucaagaccugauuu

SEQ ID NO: 850676 - RNA, 19 nt, Artificial Sequence
  Description of Artificial Sequence: Synthetic oligonucleotide
  Sense strand starting at position 3744 of SEQ ID NO: 588229
acuguauucugccaaagga

SEQ ID NO: 850677 - RNA, 19 nt, Artificial Sequence
  Description of Artificial Sequence: Synthetic oligonucleotide
  Antisense strand to SEQ ID NO: 850676
uccuuuggcagaauacagu

SEQ ID NO: 850678 - RNA, 19 nt, Artificial Sequence
  Description of Artificial Sequence: Synthetic oligonucleotide
  Sense strand starting at position 15 of SEQ ID NO: 588230
aaaguauaauacgugggaa

SEQ ID NO: 850679 - RNA, 19 nt, Artificial Sequence
  Description of Artificial Sequence: Synthetic oligonucleotide
  Antisense strand to SEQ ID NO: 850678
uucccacguauuauacuuu

SEQ ID NO: 850680 - RNA, 19 nt, Artificial Sequence
  Description of Artificial Sequence: Synthetic oligonucleotide
  Sense strand starting at position 17 of SEQ ID NO: 588230
aguauaauacgugggaaca

SEQ ID NO: 850681 - RNA, 19 nt, Artificial Sequence
  Description of Artificial Sequence: Synthetic oligonucleotide
  Antisense strand to SEQ ID NO: 850680
uguucccacguauuauacu

SEQ ID NO: 850682 - RNA, 19 nt, Artificial Sequence
  Description of Artificial Sequence: Synthetic oligonucleotide
  Sense strand starting at position 18 of SEQ ID NO: 588230
guauaauacgugggaacau

SEQ ID NO: 850683 - RNA, 19 nt, Artificial Sequence
  Description of Artificial Sequence: Synthetic oligonucleotide
  Antisense strand to SEQ ID NO: 850682
auguucccacguauuauac

SEQ ID NO: 850684 - RNA, 19 nt, Artificial Sequence
  Description of Artificial Sequence: Synthetic oligonucleotide
  Sense strand starting at position 19 of SEQ ID NO: 588230
uauaauacgugggaacauu

SEQ ID NO: 850685 - RNA, 19 nt, Artificial Sequence
  Description of Artificial Sequence: Synthetic oligonucleotide
  Antisense strand to SEQ ID NO: 850684
aauguucccacguauuaua

SEQ ID NO: 850686 - RNA, 19 nt, Artificial Sequence
  Description of Artificial Sequence: Synthetic oligonucleotide
  Sense strand starting at position 250 of SEQ ID NO: 588230
acggguguugcgugacuga

SEQ ID NO: 850687 - RNA, 19 nt, Artificial Sequence
  Description of Artificial Sequence: Synthetic oligonucleotide
  Antisense strand to SEQ ID NO: 850686
ucagucacgcaacacccgu

SEQ ID NO: 850688 - RNA, 19 nt, Artificial Sequence
  Description of Artificial Sequence: Synthetic oligonucleotide
  Sense strand starting at position 253 of SEQ ID NO: 588230
gguguugcgugacugacaa

SEQ ID NO: 850689 - RNA, 19 nt, Artificial Sequence
  Description of Artificial Sequence: Synthetic oligonucleotide
  Antisense strand to SEQ ID NO: 850688
uugucagucacgcaacacc

SEQ ID NO: 850690 - RNA, 19 nt, Artificial Sequence
  Description of Artificial Sequence: Synthetic oligonucleotide
  Sense strand starting at position 300 of SEQ ID NO: 588230
aagcuagaucaugggcauu

SEQ ID NO: 850691 - RNA, 19 nt, Artificial Sequence
  Description of Artificial Sequence: Synthetic oligonucleotide
  Antisense strand to SEQ ID NO: 850690
aaugcccaugaucuagcuu

SEQ ID NO: 850692 - RNA, 19 nt, Artificial Sequence
  Description of Artificial Sequence: Synthetic oligonucleotide
  Sense strand starting at position 303 of SEQ ID NO: 588230
cuagaucaugggcauuagu

SEQ ID NO: 850693 - RNA, 19 nt, Artificial Sequence
  Description of Artificial Sequence: Synthetic oligonucleotide
  Antisense strand to SEQ ID NO: 850692
acuaaugcccaugaucuag

SEQ ID NO: 850694 - RNA, 19 nt, Artificial Sequence
  Description of Artificial Sequence: Synthetic oligonucleotide
  Sense strand starting at position 306 of SEQ ID NO: 588230
gaucaugggcauuagugua

SEQ ID NO: 850695 - RNA, 19 nt, Artificial Sequence
  Description of Artificial Sequence: Synthetic oligonucleotide
  Antisense strand to SEQ ID NO: 850694
uacacuaaugcccaugauc

SEQ ID NO: 850696 - RNA, 19 nt, Artificial Sequence
  Description of Artificial Sequence: Synthetic oligonucleotide
  Sense strand starting at position 311 of SEQ ID NO: 588230
ugggcauuaguguaaaucu

SEQ ID NO: 850697 - RNA, 19 nt, Artificial Sequence
  Description of Artificial Sequence: Synthetic oligonucleotide
  Antisense strand to SEQ ID NO: 850696
agauuuacacuaaugccca

SEQ ID NO: 850698 - RNA, 19 nt, Artificial Sequence
  Description of Artificial Sequence: Synthetic oligonucleotide
  Sense strand starting at position 320 of SEQ ID NO: 588230
guguaaaucucccaggguu

SEQ ID NO: 850699 - RNA, 19 nt, Artificial Sequence
  Description of Artificial Sequence: Synthetic oligonucleotide
  Antisense strand to SEQ ID NO: 850698
aacccugggagauuuacac

SEQ ID NO: 850700 - RNA, 19 nt, Artificial Sequence
  Description of Artificial Sequence: Synthetic oligonucleotide
  Sense strand starting at position 353 of SEQ ID NO: 588230
uccacuuccuggcuaugau

SEQ ID NO: 850701 - RNA, 19 nt, Artificial Sequence
  Description of Artificial Sequence: Synthetic oligonucleotide
  Antisense strand to SEQ ID NO: 850700
aucauagccaggaagugga

SEQ ID NO: 850702 - RNA, 19 nt, Artificial Sequence
  Description of Artificial Sequence: Synthetic oligonucleotide
  Sense strand starting at position 354 of SEQ ID NO: 588230
ccacuuccuggcuaugauu

SEQ ID NO: 850703 - RNA, 19 nt, Artificial Sequence
  Description of Artificial Sequence: Synthetic oligonucleotide
  Antisense strand to SEQ ID NO: 850702
aaucauagccaggaagugg

SEQ ID NO: 850704 - RNA, 19 nt, Artificial Sequence
  Description of Artificial Sequence: Synthetic oligonucleotide
  Sense strand starting at position 662 of SEQ ID NO: 588230
cggcccuggcuaugauauu

SEQ ID NO: 850705 - RNA, 19 nt, Artificial Sequence
  Description of Artificial Sequence: Synthetic oligonucleotide
  Antisense strand to SEQ ID NO: 850704
aauaucauagccagggccg

SEQ ID NO: 850706 - RNA, 19 nt, Artificial Sequence
  Description of Artificial Sequence: Synthetic oligonucleotide
  Sense strand starting at position 671 of SEQ ID NO: 588230
cuaugauauugcuaaguuu

SEQ ID NO: 850707 - RNA, 19 nt, Artificial Sequence
  Description of Artificial Sequence: Synthetic oligonucleotide
  Antisense strand to SEQ ID NO: 850706
aaacuuagcaauaucauag

SEQ ID NO: 850708 - RNA, 19 nt, Artificial Sequence
  Description of Artificial Sequence: Synthetic oligonucleotide
  Sense strand starting at position 767 of SEQ ID NO: 588230
uggcuuaacacgugaugga

SEQ ID NO: 850709 - RNA, 19 nt, Artificial Sequence
  Description of Artificial Sequence: Synthetic oligonucleotide
  Antisense strand to SEQ ID NO: 850708
uccaucacguguuaagcca

SEQ ID NO: 850710 - RNA, 19 nt, Artificial Sequence
  Description of Artificial Sequence: Synthetic oligonucleotide
  Sense strand starting at position 768 of SEQ ID NO: 588230
ggcuuaacacgugauggau

SEQ ID NO: 850711 - RNA, 19 nt, Artificial Sequence
  Description of Artificial Sequence: Synthetic oligonucleotide
  Antisense strand to SEQ ID NO: 850710
auccaucacguguuaagcc

SEQ ID NO: 850712 - RNA, 19 nt, Artificial Sequence
  Description of Artificial Sequence: Synthetic oligonucleotide
  Sense strand starting at position 821 of SEQ ID NO: 588230
auuaucuaucugugcacau

SEQ ID NO: 850713 - RNA, 19 nt, Artificial Sequence
  Description of Artificial Sequence: Synthetic oligonucleotide
  Antisense strand to SEQ ID NO: 850712
augugcacagauagauaau

SEQ ID NO: 850714 - RNA, 19 nt, Artificial Sequence
  Description of Artificial Sequence: Synthetic oligonucleotide
  Sense strand starting at position 833 of SEQ ID NO: 588230
ugcacaugguaguaaauuu

SEQ ID NO: 850715 - RNA, 19 nt, Artificial Sequence
  Description of Artificial Sequence: Synthetic oligonucleotide
  Antisense strand to SEQ ID NO: 850714
aaauuuacuaccaugugca

SEQ ID NO: 850716 - RNA, 19 nt, Artificial Sequence
  Description of Artificial Sequence: Synthetic oligonucleotide
  Sense strand starting at position 878 of SEQ ID NO: 588230
cccaauucugucggagaca

SEQ ID NO: 850717 - RNA, 19 nt, Artificial Sequence
  Description of Artificial Sequence: Synthetic oligonucleotide
  Antisense strand to SEQ ID NO: 850716
ugucuccgacagaauuggg

SEQ ID NO: 850718 - RNA, 19 nt, Artificial Sequence
  Description of Artificial Sequence: Synthetic oligonucleotide
  Sense strand starting at position 879 of SEQ ID NO: 588230
ccaauucugucggagacaa

SEQ ID NO: 850719 - RNA, 19 nt, Artificial Sequence
  Description of Artificial Sequence: Synthetic oligonucleotide
  Antisense strand to SEQ ID NO: 850718
uugucuccgacagaauugg

SEQ ID NO: 850720 - RNA, 19 nt, Artificial Sequence
  Description of Artificial Sequence: Synthetic oligonucleotide
  Sense strand starting at position 889 of SEQ ID NO: 588230
cggagacaaccgcaauuaa

SEQ ID NO: 850721 - RNA, 19 nt, Artificial Sequence
  Description of Artificial Sequence: Synthetic oligonucleotide
  Antisense strand to SEQ ID NO: 850720
uuaauugcgguugucuccg

SEQ ID NO: 850722 - RNA, 19 nt, Artificial Sequence
  Description of Artificial Sequence: Synthetic oligonucleotide
  Sense strand starting at position 915 of SEQ ID NO: 588230
uugugcaucuuaucagaca

SEQ ID NO: 850723 - RNA, 19 nt, Artificial Sequence
  Description of Artificial Sequence: Synthetic oligonucleotide
  Antisense strand to SEQ ID NO: 850722
ugucugauaagaugcacaa

SEQ ID NO: 850724 - RNA, 19 nt, Artificial Sequence
  Description of Artificial Sequence: Synthetic oligonucleotide
  Sense strand starting at position 970 of SEQ ID NO: 588230
gcguccuucuacgcaaaga

SEQ ID NO: 850725 - RNA, 19 nt, Artificial Sequence
  Description of Artificial Sequence: Synthetic oligonucleotide
  Antisense strand to SEQ ID NO: 850724
ucuuugcguagaaggacgc

SEQ ID NO: 850726 - RNA, 19 nt, Artificial Sequence
  Description of Artificial Sequence: Synthetic oligonucleotide
  Sense strand starting at position 971 of SEQ ID NO: 588230
cguccuucuacgcaaagau

SEQ ID NO: 850727 - RNA, 19 nt, Artificial Sequence
  Description of Artificial Sequence: Synthetic oligonucleotide
  Antisense strand to SEQ ID NO: 850726
aucuuugcguagaaggacg

SEQ ID NO: 850728 - RNA, 19 nt, Artificial Sequence
  Description of Artificial Sequence: Synthetic oligonucleotide
  Sense strand starting at position 1341 of SEQ ID NO: 588230
uaagguaucuuagaaguca

SEQ ID NO: 850729 - RNA, 19 nt, Artificial Sequence
  Description of Artificial Sequence: Synthetic oligonucleotide
  Antisense strand to SEQ ID NO: 850728
ugacuucuaagauaccuua

SEQ ID NO: 850730 - RNA, 19 nt, Artificial Sequence
  Description of Artificial Sequence: Synthetic oligonucleotide
  Sense strand starting at position 1361 of SEQ ID NO: 588230
ccuacauuagugcauauua

SEQ ID NO: 850731 - RNA, 19 nt, Artificial Sequence
  Description of Artificial Sequence: Synthetic oligonucleotide
  Antisense strand to SEQ ID NO: 850730
uaauaugcacuaauguagg

SEQ ID NO: 850732 - RNA, 19 nt, Artificial Sequence
  Description of Artificial Sequence: Synthetic oligonucleotide
  Sense strand starting at position 1377 of SEQ ID NO: 588230
uuaaacauuguucgucuua

SEQ ID NO: 850733 - RNA, 19 nt, Artificial Sequence
  Description of Artificial Sequence: Synthetic oligonucleotide
  Antisense strand to SEQ ID NO: 850732
uaagacgaacaauguuuaa

SEQ ID NO: 850734 - RNA, 19 nt, Artificial Sequence
  Description of Artificial Sequence: Synthetic oligonucleotide
  Sense strand starting at position 1448 of SEQ ID NO: 588230
acuguuaucagccagggaa

SEQ ID NO: 850735 - RNA, 19 nt, Artificial Sequence
  Description of Artificial Sequence: Synthetic oligonucleotide
  Antisense strand to SEQ ID NO: 850734
uucccuggcugauaacagu

SEQ ID NO: 850736 - RNA, 19 nt, Artificial Sequence
  Description of Artificial Sequence: Synthetic oligonucleotide
  Sense strand starting at position 1450 of SEQ ID NO: 588230
uguuaucagccagggaauu

SEQ ID NO: 850737 - RNA, 19 nt, Artificial Sequence
  Description of Artificial Sequence: Synthetic oligonucleotide
  Antisense strand to SEQ ID NO: 850736
aauucccuggcugauaaca

SEQ ID NO: 850738 - RNA, 19 nt, Artificial Sequence
  Description of Artificial Sequence: Synthetic oligonucleotide
  Sense strand starting at position 1530 of SEQ ID NO: 588230
cccagaucuguccagaauu

SEQ ID NO: 850739 - RNA, 19 nt, Artificial Sequence
  Description of Artificial Sequence: Synthetic oligonucleotide
  Antisense strand to SEQ ID NO: 850738
aauucuggacagaucuggg

SEQ ID NO: 850740 - RNA, 19 nt, Artificial Sequence
  Description of Artificial Sequence: Synthetic oligonucleotide
  Sense strand starting at position 1550 of SEQ ID NO: 588230
uguugucucggguaucauc

SEQ ID NO: 850741 - RNA, 19 nt, Artificial Sequence
  Description of Artificial Sequence: Synthetic oligonucleotide
  Antisense strand to SEQ ID NO: 850740
gaugauacccgagacaaca

SEQ ID NO: 850742 - RNA, 19 nt, Artificial Sequence
  Description of Artificial Sequence: Synthetic oligonucleotide
  Sense strand starting at position 1697 of SEQ ID NO: 588230
ccguuauacuuaguagcau

SEQ ID NO: 850743 - RNA, 19 nt, Artificial Sequence
  Description of Artificial Sequence: Synthetic oligonucleotide
  Antisense strand to SEQ ID NO: 850742
augcuacuaaguauaacgg

SEQ ID NO: 850744 - RNA, 19 nt, Artificial Sequence
  Description of Artificial Sequence: Synthetic oligonucleotide
  Sense strand starting at position 1970 of SEQ ID NO: 588230
ccgcuagaauucuccucau

SEQ ID NO: 850745 - RNA, 19 nt, Artificial Sequence
  Description of Artificial Sequence: Synthetic oligonucleotide
  Antisense strand to SEQ ID NO: 850744
augaggagaauucuagcgg

SEQ ID NO: 850746 - RNA, 19 nt, Artificial Sequence
  Description of Artificial Sequence: Synthetic oligonucleotide
  Sense strand starting at position 2970 of SEQ ID NO: 588230
gguucucagcuguugcgau

SEQ ID NO: 850747 - RNA, 19 nt, Artificial Sequence
  Description of Artificial Sequence: Synthetic oligonucleotide
  Antisense strand to SEQ ID NO: 850746
aucgcaacagcugagaacc

SEQ ID NO: 850748 - RNA, 19 nt, Artificial Sequence
  Description of Artificial Sequence: Synthetic oligonucleotide
  Sense strand starting at position 3211 of SEQ ID NO: 588230
uccaccucuucuguuagua

SEQ ID NO: 850749 - RNA, 19 nt, Artificial Sequence
  Description of Artificial Sequence: Synthetic oligonucleotide
  Antisense strand to SEQ ID NO: 850748
uacuaacagaagaggugga

SEQ ID NO: 850750 - RNA, 19 nt, Artificial Sequence
  Description of Artificial Sequence: Synthetic oligonucleotide
  Sense strand starting at position 3323 of SEQ ID NO: 588230
ugcugauacuuccugugga

SEQ ID NO: 850751 - RNA, 19 nt, Artificial Sequence
  Description of Artificial Sequence: Synthetic oligonucleotide
  Antisense strand to SEQ ID NO: 850750
uccacaggaaguaucagca

SEQ ID NO: 850752 - RNA, 19 nt, Artificial Sequence
  Description of Artificial Sequence: Synthetic oligonucleotide
  Sense strand starting at position 3354 of SEQ ID NO: 588230
gugggaguuuguucagaga

SEQ ID NO: 850753 - RNA, 19 nt, Artificial Sequence
  Description of Artificial Sequence: Synthetic oligonucleotide
  Antisense strand to SEQ ID NO: 850752
ucucugaacaaacucccac

SEQ ID NO: 850754 - RNA, 19 nt, Artificial Sequence
  Description of Artificial Sequence: Synthetic oligonucleotide
  Sense strand starting at position 3357 of SEQ ID NO: 588230
ggaguuuguucagagagac

SEQ ID NO: 850755 - RNA, 19 nt, Artificial Sequence
  Description of Artificial Sequence: Synthetic oligonucleotide
  Antisense strand to SEQ ID NO: 850754
gucucucugaacaaacucc

SEQ ID NO: 850756 - RNA, 19 nt, Artificial Sequence
  Description of Artificial Sequence: Synthetic oligonucleotide
  Sense strand starting at position 3577 of SEQ ID NO: 588230
cugcguucuagggaccaua

SEQ ID NO: 850757 - RNA, 19 nt, Artificial Sequence
  Description of Artificial Sequence: Synthetic oligonucleotide
  Antisense strand to SEQ ID NO: 850756
uauggucccuagaacgcag

SEQ ID NO: 850758 - RNA, 19 nt, Artificial Sequence
  Description of Artificial Sequence: Synthetic oligonucleotide
  Sense strand starting at position 81 of SEQ ID NO: 588231
cauggucaguuugcugaaa

SEQ ID NO: 850759 - RNA, 19 nt, Artificial Sequence
  Description of Artificial Sequence: Synthetic oligonucleotide
  Antisense strand to SEQ ID NO: 850758
uuucagcaaacugaccaug

SEQ ID NO: 850760 - RNA, 19 nt, Artificial Sequence
  Description of Artificial Sequence: Synthetic oligonucleotide
  Sense strand starting at position 440 of SEQ ID NO: 588231
aaacuuugguuguuagaca

SEQ ID NO: 850761 - RNA, 19 nt, Artificial Sequence
  Description of Artificial Sequence: Synthetic oligonucleotide
  Antisense strand to SEQ ID NO: 850760
ugucuaacaaccaaaguuu

SEQ ID NO: 850762 - RNA, 19 nt, Artificial Sequence
  Description of Artificial Sequence: Synthetic oligonucleotide
  Sense strand starting at position 500 of SEQ ID NO: 588231
uuccauagugcuuacugga

SEQ ID NO: 850763 - RNA, 19 nt, Artificial Sequence
  Description of Artificial Sequence: Synthetic oligonucleotide
  Antisense strand to SEQ ID NO: 850762
uccaguaagcacuauggaa

SEQ ID NO: 850764 - RNA, 19 nt, Artificial Sequence
  Description of Artificial Sequence: Synthetic oligonucleotide
  Sense strand starting at position 532 of SEQ ID NO: 588231
augucuccucaaggugaca

SEQ ID NO: 850765 - RNA, 19 nt, Artificial Sequence
  Description of Artificial Sequence: Synthetic oligonucleotide
  Antisense strand to SEQ ID NO: 850764
ugucaccuugaggagacau

SEQ ID NO: 850766 - RNA, 19 nt, Artificial Sequence
  Description of Artificial Sequence: Synthetic oligonucleotide
  Sense strand starting at position 630 of SEQ ID NO: 588231
uacagucagugcucauuga

SEQ ID NO: 850767 - RNA, 19 nt, Artificial Sequence
  Description of Artificial Sequence: Synthetic oligonucleotide
  Antisense strand to SEQ ID NO: 850766
ucaaugagcacugacugua

SEQ ID NO: 850768 - RNA, 19 nt, Artificial Sequence
  Description of Artificial Sequence: Synthetic oligonucleotide
  Sense strand starting at position 660 of SEQ ID NO: 588231
ucugguuguuuccugaaca

SEQ ID NO: 850769 - RNA, 19 nt, Artificial Sequence
  Description of Artificial Sequence: Synthetic oligonucleotide
  Antisense strand to SEQ ID NO: 850768
uguucaggaaacaaccaga

SEQ ID NO: 850770 - RNA, 19 nt, Artificial Sequence
  Description of Artificial Sequence: Synthetic oligonucleotide
  Sense strand starting at position 730 of SEQ ID NO: 588231
uucugauuggcaggugaag

SEQ ID NO: 850771 - RNA, 19 nt, Artificial Sequence
  Description of Artificial Sequence: Synthetic oligonucleotide
  Antisense strand to SEQ ID NO: 850770
cuucaccugccaaucagaa

SEQ ID NO: 850772 - RNA, 19 nt, Artificial Sequence
  Description of Artificial Sequence: Synthetic oligonucleotide
  Sense strand starting at position 756 of SEQ ID NO: 588231
ccauguucccagcacugau

SEQ ID NO: 850773 - RNA, 19 nt, Artificial Sequence
  Description of Artificial Sequence: Synthetic oligonucleotide
  Antisense strand to SEQ ID NO: 850772
aucagugcugggaacaugg

SEQ ID NO: 850774 - RNA, 19 nt, Artificial Sequence
  Description of Artificial Sequence: Synthetic oligonucleotide
  Sense strand starting at position 776 of SEQ ID NO: 588231
ugggaaguggcuugucaca

SEQ ID NO: 850775 - RNA, 19 nt, Artificial Sequence
  Description of Artificial Sequence: Synthetic oligonucleotide
  Antisense strand to SEQ ID NO: 850774
ugugacaagccacuuccca

SEQ ID NO: 850776 - RNA, 19 nt, Artificial Sequence
  Description of Artificial Sequence: Synthetic oligonucleotide
  Sense strand starting at position 778 of SEQ ID NO: 588231
ggaaguggcuugucacauc

SEQ ID NO: 850777 - RNA, 19 nt, Artificial Sequence
  Description of Artificial Sequence: Synthetic oligonucleotide
  Antisense strand to SEQ ID NO: 850776
gaugugacaagccacuucc

SEQ ID NO: 850778 - RNA, 19 nt, Artificial Sequence
  Description of Artificial Sequence: Synthetic oligonucleotide
  Sense strand starting at position 788 of SEQ ID NO: 588231
ugucacaucccacagugaa

SEQ ID NO: 850779 - RNA, 19 nt, Artificial Sequence
  Description of Artificial Sequence: Synthetic oligonucleotide
  Antisense strand to SEQ ID NO: 850778
uucacugugggaugugaca

SEQ ID NO: 850780 - RNA, 19 nt, Artificial Sequence
  Description of Artificial Sequence: Synthetic oligonucleotide
  Sense strand starting at position 853 of SEQ ID NO: 588231
acauuauguuucucccaga

SEQ ID NO: 850781 - RNA, 19 nt, Artificial Sequence
  Description of Artificial Sequence: Synthetic oligonucleotide
  Antisense strand to SEQ ID NO: 850780
ucugggagaaacauaaugu

SEQ ID NO: 850782 - RNA, 19 nt, Artificial Sequence
  Description of Artificial Sequence: Synthetic oligonucleotide
  Sense strand starting at position 902 of SEQ ID NO: 588231
agucuauccuucucaaagu

SEQ ID NO: 850783 - RNA, 19 nt, Artificial Sequence
  Description of Artificial Sequence: Synthetic oligonucleotide
  Antisense strand to SEQ ID NO: 850782
acuuugagaaggauagacu

SEQ ID NO: 850784 - RNA, 19 nt, Artificial Sequence
  Description of Artificial Sequence: Synthetic oligonucleotide
  Sense strand starting at position 967 of SEQ ID NO: 588231
gggucauuauuagcuaucu

SEQ ID NO: 850785 - RNA, 19 nt, Artificial Sequence
  Description of Artificial Sequence: Synthetic oligonucleotide
  Antisense strand to SEQ ID NO: 850784
agauagcuaauaaugaccc

SEQ ID NO: 850786 - RNA, 19 nt, Artificial Sequence
  Description of Artificial Sequence: Synthetic oligonucleotide
  Sense strand starting at position 1290 of SEQ ID NO: 588231
gugacuacuccucacugga

SEQ ID NO: 850787 - RNA, 19 nt, Artificial Sequence
  Description of Artificial Sequence: Synthetic oligonucleotide
  Antisense strand to SEQ ID NO: 850786
uccagugaggaguagucac

SEQ ID NO: 850788 - RNA, 19 nt, Artificial Sequence
  Description of Artificial Sequence: Synthetic oligonucleotide
  Sense strand starting at position 1416 of SEQ ID NO: 588231
acggacuacugucuuuauu

SEQ ID NO: 850789 - RNA, 19 nt, Artificial Sequence
  Description of Artificial Sequence: Synthetic oligonucleotide
  Antisense strand to SEQ ID NO: 850788
aauaaagacaguaguccgu

SEQ ID NO: 850790 - RNA, 19 nt, Artificial Sequence
  Description of Artificial Sequence: Synthetic oligonucleotide
  Sense strand starting at position 2050 of SEQ ID NO: 588231
agaccauauuugcauaaga

SEQ ID NO: 850791 - RNA, 19 nt, Artificial Sequence
  Description of Artificial Sequence: Synthetic oligonucleotide
  Antisense strand to SEQ ID NO: 850790
ucuuaugcaaauauggucu

SEQ ID NO: 850792 - RNA, 19 nt, Artificial Sequence
  Description of Artificial Sequence: Synthetic oligonucleotide
  Sense strand starting at position 2065 of SEQ ID NO: 588231
aagauagugucauucuagc

SEQ ID NO: 850793 - RNA, 19 nt, Artificial Sequence
  Description of Artificial Sequence: Synthetic oligonucleotide
  Antisense strand to SEQ ID NO: 850792
gcuagaaugacacuaucuu

SEQ ID NO: 850794 - RNA, 19 nt, Artificial Sequence
  Description of Artificial Sequence: Synthetic oligonucleotide
  Sense strand starting at position 2079 of SEQ ID NO: 588231
cuagcuuuccuguauuugu

SEQ ID NO: 850795 - RNA, 19 nt, Artificial Sequence
  Description of Artificial Sequence: Synthetic oligonucleotide
  Antisense strand to SEQ ID NO: 850794
acaaauacaggaaagcuag

SEQ ID NO: 850796 - RNA, 19 nt, Artificial Sequence
  Description of Artificial Sequence: Synthetic oligonucleotide
  Sense strand starting at position 2138 of SEQ ID NO: 588231
ucugaaagccuauagucuu

SEQ ID NO: 850797 - RNA, 19 nt, Artificial Sequence
  Description of Artificial Sequence: Synthetic oligonucleotide
  Antisense strand to SEQ ID NO: 850796
aagacuauaggcuuucaga

SEQ ID NO: 850798 - RNA, 19 nt, Artificial Sequence
  Description of Artificial Sequence: Synthetic oligonucleotide
  Sense strand starting at position 2141 of SEQ ID NO: 588231
gaaagccuauagucuuaga

SEQ ID NO: 850799 - RNA, 19 nt, Artificial Sequence
  Description of Artificial Sequence: Synthetic oligonucleotide
  Antisense strand to SEQ ID NO: 850798
ucuaagacuauaggcuuuc

SEQ ID NO: 850800 - RNA, 19 nt, Artificial Sequence
  Description of Artificial Sequence: Synthetic oligonucleotide
  Sense strand starting at position 2155 of SEQ ID NO: 588231
uuagaaaguuaugcccgaa

SEQ ID NO: 850801 - RNA, 19 nt, Artificial Sequence
  Description of Artificial Sequence: Synthetic oligonucleotide
  Antisense strand to SEQ ID NO: 850800
uucgggcauaacuuucuaa

SEQ ID NO: 850802 - RNA, 19 nt, Artificial Sequence
  Description of Artificial Sequence: Synthetic oligonucleotide
  Sense strand starting at position 2280 of SEQ ID NO: 588231
gcugaaggccuguauccua

SEQ ID NO: 850803 - RNA, 19 nt, Artificial Sequence
  Description of Artificial Sequence: Synthetic oligonucleotide
  Antisense strand to SEQ ID NO: 850802
uaggauacaggccuucagc

SEQ ID NO: 850804 - RNA, 19 nt, Artificial Sequence
  Description of Artificial Sequence: Synthetic oligonucleotide
  Sense strand starting at position 2464 of SEQ ID NO: 588231
ccgucagcucccucuaguu

SEQ ID NO: 850805 - RNA, 19 nt, Artificial Sequence
  Description of Artificial Sequence: Synthetic oligonucleotide
  Antisense strand to SEQ ID NO: 850804
aacuagagggagcugacgg

SEQ ID NO: 850806 - RNA, 19 nt, Artificial Sequence
  Description of Artificial Sequence: Synthetic oligonucleotide
  Sense strand starting at position 2968 of SEQ ID NO: 588231
gacucugcuugggcuagaa

SEQ ID NO: 850807 - RNA, 19 nt, Artificial Sequence
  Description of Artificial Sequence: Synthetic oligonucleotide
  Antisense strand to SEQ ID NO: 850806
uucuagcccaagcagaguc

SEQ ID NO: 850808 - RNA, 19 nt, Artificial Sequence
  Description of Artificial Sequence: Synthetic oligonucleotide
  Sense strand starting at position 3017 of SEQ ID NO: 588231
uugugaaacuuaguucucu

SEQ ID NO: 850809 - RNA, 19 nt, Artificial Sequence
  Description of Artificial Sequence: Synthetic oligonucleotide
  Antisense strand to SEQ ID NO: 850808
agagaacuaaguuucacaa

SEQ ID NO: 850810 - RNA, 19 nt, Artificial Sequence
  Description of Artificial Sequence: Synthetic oligonucleotide
  Sense strand starting at position 3046 of SEQ ID NO: 588231
uccuuuccacucugaggaa

SEQ ID NO: 850811 - RNA, 19 nt, Artificial Sequence
  Description of Artificial Sequence: Synthetic oligonucleotide
  Antisense strand to SEQ ID NO: 850810
uuccucagaguggaaagga

SEQ ID NO: 850812 - RNA, 19 nt, Artificial Sequence
  Description of Artificial Sequence: Synthetic oligonucleotide
  Sense strand starting at position 3087 of SEQ ID NO: 588231
gagcuaugaugauuaaaug

SEQ ID NO: 850813 - RNA, 19 nt, Artificial Sequence
  Description of Artificial Sequence: Synthetic oligonucleotide
  Antisense strand to SEQ ID NO: 850812
cauuuaaucaucauagcuc

SEQ ID NO: 850814 - RNA, 19 nt, Artificial Sequence
  Description of Artificial Sequence: Synthetic oligonucleotide
  Sense strand starting at position 3128 of SEQ ID NO: 588231
gccuacuuauuagugauuu

SEQ ID NO: 850815 - RNA, 19 nt, Artificial Sequence
  Description of Artificial Sequence: Synthetic oligonucleotide
  Antisense strand to SEQ ID NO: 850814
aaaucacuaauaaguaggc

SEQ ID NO: 850816 - RNA, 19 nt, Artificial Sequence
  Description of Artificial Sequence: Synthetic oligonucleotide
  Sense strand starting at position 3293 of SEQ ID NO: 588231
uacuguaagccagacaguu

SEQ ID NO: 850817 - RNA, 19 nt, Artificial Sequence
  Description of Artificial Sequence: Synthetic oligonucleotide
  Antisense strand to SEQ ID NO: 850816
aacugucuggcuuacagua

SEQ ID NO: 850818 - RNA, 19 nt, Artificial Sequence
  Description of Artificial Sequence: Synthetic oligonucleotide
  Sense strand starting at position 3556 of SEQ ID NO: 588231
gagggaugguuuccggaug

SEQ ID NO: 850819 - RNA, 19 nt, Artificial Sequence
  Description of Artificial Sequence: Synthetic oligonucleotide
  Antisense strand to SEQ ID NO: 850818
cauccggaaaccaucccuc

SEQ ID NO: 850820 - RNA, 19 nt, Artificial Sequence
  Description of Artificial Sequence: Synthetic oligonucleotide
  Sense strand starting at position 3710 of SEQ ID NO: 588231
gagcucaggcgguaaugau

SEQ ID NO: 850821 - RNA, 19 nt, Artificial Sequence
  Description of Artificial Sequence: Synthetic oligonucleotide
  Antisense strand to SEQ ID NO: 850820
aucauuaccgccugagcuc

SEQ ID NO: 850822 - RNA, 19 nt, Artificial Sequence
  Description of Artificial Sequence: Synthetic oligonucleotide
  Sense strand starting at position 3808 of SEQ ID NO: 588231
guuggagacccuugagcua

SEQ ID NO: 850823 - RNA, 19 nt, Artificial Sequence
  Description of Artificial Sequence: Synthetic oligonucleotide
  Antisense strand to SEQ ID NO: 850822
uagcucaagggucuccaac

SEQ ID NO: 850824 - RNA, 19 nt, Artificial Sequence
  Description of Artificial Sequence: Synthetic oligonucleotide
  Sense strand starting at position 3821 of SEQ ID NO: 588231
gagcuaggcugguccuaaa

SEQ ID NO: 850825 - RNA, 19 nt, Artificial Sequence
  Description of Artificial Sequence: Synthetic oligonucleotide
  Antisense strand to SEQ ID NO: 850824
uuuaggaccagccuagcuc

SEQ ID NO: 850826 - RNA, 19 nt, Artificial Sequence
  Description of Artificial Sequence: Synthetic oligonucleotide
  Sense strand starting at position 3930 of SEQ ID NO: 588231
cucaaugaaucguuguuga

SEQ ID NO: 850827 - RNA, 19 nt, Artificial Sequence
  Description of Artificial Sequence: Synthetic oligonucleotide
  Antisense strand to SEQ ID NO: 850826
ucaacaacgauucauugag

SEQ ID NO: 850828 - RNA, 19 nt, Artificial Sequence
  Description of Artificial Sequence: Synthetic oligonucleotide
  Sense strand starting at position 3933 of SEQ ID NO: 588231
aaugaaucguuguugaaug

SEQ ID NO: 850829 - RNA, 19 nt, Artificial Sequence
  Description of Artificial Sequence: Synthetic oligonucleotide
  Antisense strand to SEQ ID NO: 850828
cauucaacaacgauucauu

SEQ ID NO: 850830 - RNA, 19 nt, Artificial Sequence
  Description of Artificial Sequence: Synthetic oligonucleotide
  Sense strand starting at position 3935 of SEQ ID NO: 588231
ugaaucguuguugaaugaa

SEQ ID NO: 850831 - RNA, 19 nt, Artificial Sequence
  Description of Artificial Sequence: Synthetic oligonucleotide
  Antisense strand to SEQ ID NO: 850830
uucauucaacaacgauuca

SEQ ID NO: 850832 - RNA, 19 nt, Artificial Sequence
  Description of Artificial Sequence: Synthetic oligonucleotide
  Sense strand starting at position 3938 of SEQ ID NO: 588231
aucguuguugaaugaaauu

SEQ ID NO: 850833 - RNA, 19 nt, Artificial Sequence
  Description of Artificial Sequence: Synthetic oligonucleotide
  Antisense strand to SEQ ID NO: 850832
aauuucauucaacaacgau

SEQ ID NO: 850834 - RNA, 19 nt, Artificial Sequence
  Description of Artificial Sequence: Synthetic oligonucleotide
  Sense strand starting at position 3981 of SEQ ID NO: 588231
aggguaauauaguuaagcu

SEQ ID NO: 850835 - RNA, 19 nt, Artificial Sequence
  Description of Artificial Sequence: Synthetic oligonucleotide
  Antisense strand to SEQ ID NO: 850834
agcuuaacuauauuacccu

SEQ ID NO: 850836 - RNA, 19 nt, Artificial Sequence
  Description of Artificial Sequence: Synthetic oligonucleotide
  Sense strand starting at position 3982 of SEQ ID NO: 588231
ggguaauauaguuaagcuc

SEQ ID NO: 850837 - RNA, 19 nt, Artificial Sequence
  Description of Artificial Sequence: Synthetic oligonucleotide
  Antisense strand to SEQ ID NO: 850836
gagcuuaacuauauuaccc

SEQ ID NO: 850838 - RNA, 19 nt, Artificial Sequence
  Description of Artificial Sequence: Synthetic oligonucleotide
  Sense strand starting at position 512 of SEQ ID NO: 588233
gggauuggcugaguaaaca

SEQ ID NO: 850839 - RNA, 19 nt, Artificial Sequence
  Description of Artificial Sequence: Synthetic oligonucleotide
  Antisense strand to SEQ ID NO: 850838
uguuuacucagccaauccc

SEQ ID NO: 850840 - RNA, 19 nt, Artificial Sequence
  Description of Artificial Sequence: Synthetic oligonucleotide
  Sense strand starting at position 537 of SEQ ID NO: 588233
gucuguuugauggaauguu

SEQ ID NO: 850841 - RNA, 19 nt, Artificial Sequence
  Description of Artificial Sequence: Synthetic oligonucleotide
  Antisense strand to SEQ ID NO: 850840
aacauuccaucaaacagac

SEQ ID NO: 850842 - RNA, 19 nt, Artificial Sequence
  Description of Artificial Sequence: Synthetic oligonucleotide
  Sense strand starting at position 607 of SEQ ID NO: 588233
augcuuaggagaugauaua

SEQ ID NO: 850843 - RNA, 19 nt, Artificial Sequence
  Description of Artificial Sequence: Synthetic oligonucleotide
  Antisense strand to SEQ ID NO: 850842
uauaucaucuccuaagcau

SEQ ID NO: 850844 - RNA, 19 nt, Artificial Sequence
  Description of Artificial Sequence: Synthetic oligonucleotide
  Sense strand starting at position 751 of SEQ ID NO: 588233
gaaguaugccaugaguuaa

SEQ ID NO: 850845 - RNA, 19 nt, Artificial Sequence
  Description of Artificial Sequence: Synthetic oligonucleotide
  Antisense strand to SEQ ID NO: 850844
uuaacucauggcauacuuc

SEQ ID NO: 850846 - RNA, 19 nt, Artificial Sequence
  Description of Artificial Sequence: Synthetic oligonucleotide
  Sense strand starting at position 762 of SEQ ID NO: 588233
ugaguuaagaauggccuua

SEQ ID NO: 850847 - RNA, 19 nt, Artificial Sequence
  Description of Artificial Sequence: Synthetic oligonucleotide
  Antisense strand to SEQ ID NO: 850846
uaaggccauucuuaacuca

SEQ ID NO: 850848 - RNA, 19 nt, Artificial Sequence
  Description of Artificial Sequence: Synthetic oligonucleotide
  Sense strand starting at position 789 of SEQ ID NO: 588233
aggaucaugugagugaugu

SEQ ID NO: 850849 - RNA, 19 nt, Artificial Sequence
  Description of Artificial Sequence: Synthetic oligonucleotide
  Antisense strand to SEQ ID NO: 850848
acaucacucacaugauccu

SEQ ID NO: 850850 - RNA, 19 nt, Artificial Sequence
  Description of Artificial Sequence: Synthetic oligonucleotide
  Sense strand starting at position 790 of SEQ ID NO: 588233
ggaucaugugagugaugua

SEQ ID NO: 850851 - RNA, 19 nt, Artificial Sequence
  Description of Artificial Sequence: Synthetic oligonucleotide
  Antisense strand to SEQ ID NO: 850850
uacaucacucacaugaucc

SEQ ID NO: 850852 - RNA, 19 nt, Artificial Sequence
  Description of Artificial Sequence: Synthetic oligonucleotide
  Sense strand starting at position 791 of SEQ ID NO: 588233
gaucaugugagugauguaa

SEQ ID NO: 850853 - RNA, 19 nt, Artificial Sequence
  Description of Artificial Sequence: Synthetic oligonucleotide
  Antisense strand to SEQ ID NO: 850852
uuacaucacucacaugauc

SEQ ID NO: 850854 - RNA, 19 nt, Artificial Sequence
  Description of Artificial Sequence: Synthetic oligonucleotide
  Sense strand starting at position 795 of SEQ ID NO: 588233
augugagugauguaauugu

SEQ ID NO: 850855 - RNA, 19 nt, Artificial Sequence
  Description of Artificial Sequence: Synthetic oligonucleotide
  Antisense strand to SEQ ID NO: 850854
acaauuacaucacucacau

SEQ ID NO: 850856 - RNA, 19 nt, Artificial Sequence
  Description of Artificial Sequence: Synthetic oligonucleotide
  Sense strand starting at position 927 of SEQ ID NO: 588233
agaauuugggucugugugu

SEQ ID NO: 850857 - RNA, 19 nt, Artificial Sequence
  Description of Artificial Sequence: Synthetic oligonucleotide
  Antisense strand to SEQ ID NO: 850856
acacacagacccaaauucu

SEQ ID NO: 850858 - RNA, 19 nt, Artificial Sequence
  Description of Artificial Sequence: Synthetic oligonucleotide
  Sense strand starting at position 928 of SEQ ID NO: 588233
gaauuugggucuguguguu

SEQ ID NO: 850859 - RNA, 19 nt, Artificial Sequence
  Description of Artificial Sequence: Synthetic oligonucleotide
  Antisense strand to SEQ ID NO: 850858
aacacacagacccaaauuc

SEQ ID NO: 850860 - RNA, 19 nt, Artificial Sequence
  Description of Artificial Sequence: Synthetic oligonucleotide
  Sense strand starting at position 969 of SEQ ID NO: 588233
uauacagugcuuuagagag

SEQ ID NO: 850861 - RNA, 19 nt, Artificial Sequence
  Description of Artificial Sequence: Synthetic oligonucleotide
  Antisense strand to SEQ ID NO: 850860
cucucuaaagcacuguaua

SEQ ID NO: 850862 - RNA, 19 nt, Artificial Sequence
  Description of Artificial Sequence: Synthetic oligonucleotide
  Sense strand starting at position 1019 of SEQ ID NO: 588233
ucaagagggcuuuacuuua

SEQ ID NO: 850863 - RNA, 19 nt, Artificial Sequence
  Description of Artificial Sequence: Synthetic oligonucleotide
  Antisense strand to SEQ ID NO: 850862
uaaaguaaagcccucuuga

SEQ ID NO: 850864 - RNA, 19 nt, Artificial Sequence
  Description of Artificial Sequence: Synthetic oligonucleotide
  Sense strand starting at position 1024 of SEQ ID NO: 588233
agggcuuuacuuuaauaca

SEQ ID NO: 850865 - RNA, 19 nt, Artificial Sequence
  Description of Artificial Sequence: Synthetic oligonucleotide
  Antisense strand to SEQ ID NO: 850864
uguauuaaaguaaagcccu

SEQ ID NO: 850866 - RNA, 19 nt, Artificial Sequence
  Description of Artificial Sequence: Synthetic oligonucleotide
  Sense strand starting at position 1046 of SEQ ID NO: 588233
augggaguccuaggucaac

SEQ ID NO: 850867 - RNA, 19 nt, Artificial Sequence
  Description of Artificial Sequence: Synthetic oligonucleotide
  Antisense strand to SEQ ID NO: 850866
guugaccuaggacucccau

SEQ ID NO: 850868 - RNA, 19 nt, Artificial Sequence
  Description of Artificial Sequence: Synthetic oligonucleotide
  Sense strand starting at position 1120 of SEQ ID NO: 588233
gggucugugagauacuguu

SEQ ID NO: 850869 - RNA, 19 nt, Artificial Sequence
  Description of Artificial Sequence: Synthetic oligonucleotide
  Antisense strand to SEQ ID NO: 850868
aacaguaucucacagaccc

SEQ ID NO: 850870 - RNA, 19 nt, Artificial Sequence
  Description of Artificial Sequence: Synthetic oligonucleotide
  Sense strand starting at position 1328 of SEQ ID NO: 588233
uuuguauugguacgauuua

SEQ ID NO: 850871 - RNA, 19 nt, Artificial Sequence
  Description of Artificial Sequence: Synthetic oligonucleotide
  Antisense strand to SEQ ID NO: 850870
uaaaucguaccaauacaaa

SEQ ID NO: 850872 - RNA, 19 nt, Artificial Sequence
  Description of Artificial Sequence: Synthetic oligonucleotide
  Sense strand starting at position 1493 of SEQ ID NO: 588233
cuaccucagccuggaagau

SEQ ID NO: 850873 - RNA, 19 nt, Artificial Sequence
  Description of Artificial Sequence: Synthetic oligonucleotide
  Antisense strand to SEQ ID NO: 850872
aucuuccaggcugagguag

SEQ ID NO: 850874 - RNA, 19 nt, Artificial Sequence
  Description of Artificial Sequence: Synthetic oligonucleotide
  Sense strand starting at position 1643 of SEQ ID NO: 588233
auuccugagguugggaaau

SEQ ID NO: 850875 - RNA, 19 nt, Artificial Sequence
  Description of Artificial Sequence: Synthetic oligonucleotide
  Antisense strand to SEQ ID NO: 850874
auuucccaaccucaggaau

SEQ ID NO: 850876 - RNA, 19 nt, Artificial Sequence
  Description of Artificial Sequence: Synthetic oligonucleotide
  Sense strand starting at position 1993 of SEQ ID NO: 588233
cucuaaugcggcgcagaau

SEQ ID NO: 850877 - RNA, 19 nt, Artificial Sequence
  Description of Artificial Sequence: Synthetic oligonucleotide
  Antisense strand to SEQ ID NO: 850876
auucugcgccgcauuagag

SEQ ID NO: 850878 - RNA, 19 nt, Artificial Sequence
  Description of Artificial Sequence: Synthetic oligonucleotide
  Sense strand starting at position 2500 of SEQ ID NO: 588233
aauguucugaaagguggua

SEQ ID NO: 850879 - RNA, 19 nt, Artificial Sequence
  Description of Artificial Sequence: Synthetic oligonucleotide
  Antisense strand to SEQ ID NO: 850878
uaccaccuuucagaacauu

SEQ ID NO: 850880 - RNA, 19 nt, Artificial Sequence
  Description of Artificial Sequence: Synthetic oligonucleotide
  Sense strand starting at position 2519 of SEQ ID NO: 588233
ggauauaugagauguagca

SEQ ID NO: 850881 - RNA, 19 nt, Artificial Sequence
  Description of Artificial Sequence: Synthetic oligonucleotide
  Antisense strand to SEQ ID NO: 850880
ugcuacaucucauauaucc

SEQ ID NO: 850882 - RNA, 19 nt, Artificial Sequence
  Description of Artificial Sequence: Synthetic oligonucleotide
  Sense strand starting at position 2570 of SEQ ID NO: 588233
acuuauuugccuugguuaa

SEQ ID NO: 850883 - RNA, 19 nt, Artificial Sequence
  Description of Artificial Sequence: Synthetic oligonucleotide
  Antisense strand to SEQ ID NO: 850882
uuaaccaaggcaaauaagu

SEQ ID NO: 850884 - RNA, 19 nt, Artificial Sequence
  Description of Artificial Sequence: Synthetic oligonucleotide
  Sense strand starting at position 2571 of SEQ ID NO: 588233
cuuauuugccuugguuaaa

SEQ ID NO: 850885 - RNA, 19 nt, Artificial Sequence
  Description of Artificial Sequence: Synthetic oligonucleotide
  Antisense strand to SEQ ID NO: 850884
uuuaaccaaggcaaauaag

SEQ ID NO: 850886 - RNA, 19 nt, Artificial Sequence
  Description of Artificial Sequence: Synthetic oligonucleotide
  Sense strand starting at position 2619 of SEQ ID NO: 588233
uaguguuugccuguaaguu

SEQ ID NO: 850887 - RNA, 19 nt, Artificial Sequence
  Description of Artificial Sequence: Synthetic oligonucleotide
  Antisense strand to SEQ ID NO: 850886
aacuuacaggcaaacacua

SEQ ID NO: 850888 - RNA, 19 nt, Artificial Sequence
  Description of Artificial Sequence: Synthetic oligonucleotide
  Sense strand starting at position 2766 of SEQ ID NO: 588233
ucggguuucccauacauau

SEQ ID NO: 850889 - RNA, 19 nt, Artificial Sequence
  Description of Artificial Sequence: Synthetic oligonucleotide
  Antisense strand to SEQ ID NO: 850888
auauguaugggaaacccga

SEQ ID NO: 850890 - RNA, 19 nt, Artificial Sequence
  Description of Artificial Sequence: Synthetic oligonucleotide
  Sense strand starting at position 2869 of SEQ ID NO: 588233
ucuagaaugagugauuguu

SEQ ID NO: 850891 - RNA, 19 nt, Artificial Sequence
  Description of Artificial Sequence: Synthetic oligonucleotide
  Antisense strand to SEQ ID NO: 850890
aacaaucacucauucuaga

SEQ ID NO: 850892 - RNA, 19 nt, Artificial Sequence
  Description of Artificial Sequence: Synthetic oligonucleotide
  Sense strand starting at position 2871 of SEQ ID NO: 588233
uagaaugagugauuguucu

SEQ ID NO: 850893 - RNA, 19 nt, Artificial Sequence
  Description of Artificial Sequence: Synthetic oligonucleotide
  Antisense strand to SEQ ID NO: 850892
agaacaaucacucauucua

SEQ ID NO: 850894 - RNA, 19 nt, Artificial Sequence
  Description of Artificial Sequence: Synthetic oligonucleotide
  Sense strand starting at position 2881 of SEQ ID NO: 588233
gauuguucuguccagacua

SEQ ID NO: 850895 - RNA, 19 nt, Artificial Sequence
  Description of Artificial Sequence: Synthetic oligonucleotide
  Antisense strand to SEQ ID NO: 850894
uagucuggacagaacaauc

SEQ ID NO: 850896 - RNA, 19 nt, Artificial Sequence
  Description of Artificial Sequence: Synthetic oligonucleotide
  Sense strand starting at position 2883 of SEQ ID NO: 588233
uuguucuguccagacuaga

SEQ ID NO: 850897 - RNA, 19 nt, Artificial Sequence
  Description of Artificial Sequence: Synthetic oligonucleotide
  Antisense strand to SEQ ID NO: 850896
ucuagucuggacagaacaa

SEQ ID NO: 850898 - RNA, 19 nt, Artificial Sequence
  Description of Artificial Sequence: Synthetic oligonucleotide
  Sense strand starting at position 3066 of SEQ ID NO: 588233
agguaauguccaggaauua

SEQ ID NO: 850899 - RNA, 19 nt, Artificial Sequence
  Description of Artificial Sequence: Synthetic oligonucleotide
  Antisense strand to SEQ ID NO: 850898
uaauuccuggacauuaccu

SEQ ID NO: 850900 - RNA, 19 nt, Artificial Sequence
  Description of Artificial Sequence: Synthetic oligonucleotide
  Sense strand starting at position 3257 of SEQ ID NO: 588233
acaugugaaguaugggauu

SEQ ID NO: 850901 - RNA, 19 nt, Artificial Sequence
  Description of Artificial Sequence: Synthetic oligonucleotide
  Antisense strand to SEQ ID NO: 850900
aaucccauacuucacaugu

SEQ ID NO: 850902 - RNA, 19 nt, Artificial Sequence
  Description of Artificial Sequence: Synthetic oligonucleotide
  Sense strand starting at position 3420 of SEQ ID NO: 588233
gcaucaaacguggaaauuc

SEQ ID NO: 850903 - RNA, 19 nt, Artificial Sequence
  Description of Artificial Sequence: Synthetic oligonucleotide
  Antisense strand to SEQ ID NO: 850902
gaauuuccacguuugaugc

SEQ ID NO: 850904 - RNA, 19 nt, Artificial Sequence
  Description of Artificial Sequence: Synthetic oligonucleotide
  Sense strand starting at position 3493 of SEQ ID NO: 588233
gcgaaagacuaaccaguua

SEQ ID NO: 850905 - RNA, 19 nt, Artificial Sequence
  Description of Artificial Sequence: Synthetic oligonucleotide
  Antisense strand to SEQ ID NO: 850904
uaacugguuagucuuucgc

SEQ ID NO: 850906 - RNA, 19 nt, Artificial Sequence
  Description of Artificial Sequence: Synthetic oligonucleotide
  Sense strand starting at position 3513 of SEQ ID NO: 588233
agaucaucugguuagucca

SEQ ID NO: 850907 - RNA, 19 nt, Artificial Sequence
  Description of Artificial Sequence: Synthetic oligonucleotide
  Antisense strand to SEQ ID NO: 850906
uggacuaaccagaugaucu

SEQ ID NO: 850908 - RNA, 19 nt, Artificial Sequence
  Description of Artificial Sequence: Synthetic oligonucleotide
  Sense strand starting at position 3716 of SEQ ID NO: 588233
cugcauaguccagacaaag

SEQ ID NO: 850909 - RNA, 19 nt, Artificial Sequence
  Description of Artificial Sequence: Synthetic oligonucleotide
  Antisense strand to SEQ ID NO: 850908
cuuugucuggacuaugcag

SEQ ID NO: 850910 - RNA, 19 nt, Artificial Sequence
  Description of Artificial Sequence: Synthetic oligonucleotide
  Sense strand starting at position 3761 of SEQ ID NO: 588233
gcaaauauuuaaugagaag

SEQ ID NO: 850911 - RNA, 19 nt, Artificial Sequence
  Description of Artificial Sequence: Synthetic oligonucleotide
  Antisense strand to SEQ ID NO: 850910
cuucucauuaaauauuugc

SEQ ID NO: 850912 - RNA, 19 nt, Artificial Sequence
  Description of Artificial Sequence: Synthetic oligonucleotide
  Sense strand starting at position 3787 of SEQ ID NO: 588233
gccuguagugacuaugaga

SEQ ID NO: 850913 - RNA, 19 nt, Artificial Sequence
  Description of Artificial Sequence: Synthetic oligonucleotide
  Antisense strand to SEQ ID NO: 850912
ucucauagucacuacaggc

SEQ ID NO: 850914 - RNA, 19 nt, Artificial Sequence
  Description of Artificial Sequence: Synthetic oligonucleotide
  Sense strand starting at position 3865 of SEQ ID NO: 588233
uggccaagaucuccaagau

SEQ ID NO: 850915 - RNA, 19 nt, Artificial Sequence
  Description of Artificial Sequence: Synthetic oligonucleotide
  Antisense strand to SEQ ID NO: 850914
aucuuggagaucuuggcca

SEQ ID NO: 850916 - RNA, 19 nt, Artificial Sequence
  Description of Artificial Sequence: Synthetic oligonucleotide
  Sense strand starting at position 3938 of SEQ ID NO: 588233
accugugacuagccagaaa

SEQ ID NO: 850917 - RNA, 19 nt, Artificial Sequence
  Description of Artificial Sequence: Synthetic oligonucleotide
  Antisense strand to SEQ ID NO: 850916
uuucuggcuagucacaggu

SEQ ID NO: 850918 - RNA, 19 nt, Artificial Sequence
  Description of Artificial Sequence: Synthetic oligonucleotide
  Sense strand starting at position 1086 of SEQ ID NO: 588234
aggaaucuuuaucaugaau

SEQ ID NO: 850919 - RNA, 19 nt, Artificial Sequence
  Description of Artificial Sequence: Synthetic oligonucleotide
  Antisense strand to SEQ ID NO: 850918
auucaugauaaagauuccu

SEQ ID NO: 850920 - RNA, 19 nt, Artificial Sequence
  Description of Artificial Sequence: Synthetic oligonucleotide
  Sense strand starting at position 1410 of SEQ ID NO: 588234
augguaagaucuuuccuuu

SEQ ID NO: 850921 - RNA, 19 nt, Artificial Sequence
  Description of Artificial Sequence: Synthetic oligonucleotide
  Antisense strand to SEQ ID NO: 850920
aaaggaaagaucuuaccau

SEQ ID NO: 850922 - RNA, 19 nt, Artificial Sequence
  Description of Artificial Sequence: Synthetic oligonucleotide
  Sense strand starting at position 1526 of SEQ ID NO: 588234
cugugucccugguuaauca

SEQ ID NO: 850923 - RNA, 19 nt, Artificial Sequence
  Description of Artificial Sequence: Synthetic oligonucleotide
  Antisense strand to SEQ ID NO: 850922
ugauuaaccagggacacag

SEQ ID NO: 850924 - RNA, 19 nt, Artificial Sequence
  Description of Artificial Sequence: Synthetic oligonucleotide
  Sense strand starting at position 2047 of SEQ ID NO: 588234
ugaugagagccaggauucu

SEQ ID NO: 850925 - RNA, 19 nt, Artificial Sequence
  Description of Artificial Sequence: Synthetic oligonucleotide
  Antisense strand to SEQ ID NO: 850924
agaauccuggcucucauca

SEQ ID NO: 850926 - RNA, 19 nt, Artificial Sequence
  Description of Artificial Sequence: Synthetic oligonucleotide
  Sense strand starting at position 2137 of SEQ ID NO: 588234
ccagacauguguccuaauu

SEQ ID NO: 850927 - RNA, 19 nt, Artificial Sequence
  Description of Artificial Sequence: Synthetic oligonucleotide
  Antisense strand to SEQ ID NO: 850926
aauuaggacacaugucugg

SEQ ID NO: 850928 - RNA, 19 nt, Artificial Sequence
  Description of Artificial Sequence: Synthetic oligonucleotide
  Sense strand starting at position 2139 of SEQ ID NO: 588234
agacauguguccuaauuga

SEQ ID NO: 850929 - RNA, 19 nt, Artificial Sequence
  Description of Artificial Sequence: Synthetic oligonucleotide
  Antisense strand to SEQ ID NO: 850928
ucaauuaggacacaugucu

SEQ ID NO: 850930 - RNA, 19 nt, Artificial Sequence
  Description of Artificial Sequence: Synthetic oligonucleotide
  Sense strand starting at position 2155 of SEQ ID NO: 588234
ugaaaugagucuccuggca

SEQ ID NO: 850931 - RNA, 19 nt, Artificial Sequence
  Description of Artificial Sequence: Synthetic oligonucleotide
  Antisense strand to SEQ ID NO: 850930
ugccaggagacucauuuca

SEQ ID NO: 850932 - RNA, 19 nt, Artificial Sequence
  Description of Artificial Sequence: Synthetic oligonucleotide
  Sense strand starting at position 2224 of SEQ ID NO: 588234
ggagguuugugaugggucu

SEQ ID NO: 850933 - RNA, 19 nt, Artificial Sequence
  Description of Artificial Sequence: Synthetic oligonucleotide
  Antisense strand to SEQ ID NO: 850932
agacccaucacaaaccucc

SEQ ID NO: 850934 - RNA, 19 nt, Artificial Sequence
  Description of Artificial Sequence: Synthetic oligonucleotide
  Sense strand starting at position 2230 of SEQ ID NO: 588234
uugugaugggucugcagca

SEQ ID NO: 850935 - RNA, 19 nt, Artificial Sequence
  Description of Artificial Sequence: Synthetic oligonucleotide
  Antisense strand to SEQ ID NO: 850934
ugcugcagacccaucacaa

SEQ ID NO: 850936 - RNA, 19 nt, Artificial Sequence
  Description of Artificial Sequence: Synthetic oligonucleotide
  Sense strand starting at position 2517 of SEQ ID NO: 588234
cccacuuuccuuugggaau

SEQ ID NO: 850937 - RNA, 19 nt, Artificial Sequence
  Description of Artificial Sequence: Synthetic oligonucleotide
  Antisense strand to SEQ ID NO: 850936
auucccaaaggaaaguggg

SEQ ID NO: 850938 - RNA, 19 nt, Artificial Sequence
  Description of Artificial Sequence: Synthetic oligonucleotide
  Sense strand starting at position 2518 of SEQ ID NO: 588234
ccacuuuccuuugggaauu

SEQ ID NO: 850939 - RNA, 19 nt, Artificial Sequence
  Description of Artificial Sequence: Synthetic oligonucleotide
  Antisense strand to SEQ ID NO: 850938
aauucccaaaggaaagugg

SEQ ID NO: 850940 - RNA, 19 nt, Artificial Sequence
  Description of Artificial Sequence: Synthetic oligonucleotide
  Sense strand starting at position 2528 of SEQ ID NO: 588234
uugggaauuacugggucuu

SEQ ID NO: 850941 - RNA, 19 nt, Artificial Sequence
  Description of Artificial Sequence: Synthetic oligonucleotide
  Antisense strand to SEQ ID NO: 850940
aagacccaguaauucccaa

SEQ ID NO: 850942 - RNA, 19 nt, Artificial Sequence
  Description of Artificial Sequence: Synthetic oligonucleotide
  Sense strand starting at position 2568 of SEQ ID NO: 588234
aaggguauguucuccaucu

SEQ ID NO: 850943 - RNA, 19 nt, Artificial Sequence
  Description of Artificial Sequence: Synthetic oligonucleotide
  Antisense strand to SEQ ID NO: 850942
agauggagaacauacccuu

SEQ ID NO: 850944 - RNA, 19 nt, Artificial Sequence
  Description of Artificial Sequence: Synthetic oligonucleotide
  Sense strand starting at position 2570 of SEQ ID NO: 588234
ggguauguucuccaucucu

SEQ ID NO: 850945 - RNA, 19 nt, Artificial Sequence
  Description of Artificial Sequence: Synthetic oligonucleotide
  Antisense strand to SEQ ID NO: 850944
agagauggagaacauaccc

SEQ ID NO: 850946 - RNA, 19 nt, Artificial Sequence
  Description of Artificial Sequence: Synthetic oligonucleotide
  Sense strand starting at position 3567 of SEQ ID NO: 588234
uguccuucuuccucagaua

SEQ ID NO: 850947 - RNA, 19 nt, Artificial Sequence
  Description of Artificial Sequence: Synthetic oligonucleotide
  Antisense strand to SEQ ID NO: 850946
uaucugaggaagaaggaca

SEQ ID NO: 850948 - RNA, 19 nt, Artificial Sequence
  Description of Artificial Sequence: Synthetic oligonucleotide
  Sense strand starting at position 3568 of SEQ ID NO: 588234
guccuucuuccucagauau

SEQ ID NO: 850949 - RNA, 19 nt, Artificial Sequence
  Description of Artificial Sequence: Synthetic oligonucleotide
  Antisense strand to SEQ ID NO: 850948
auaucugaggaagaaggac

SEQ ID NO: 850950 - RNA, 19 nt, Artificial Sequence
  Description of Artificial Sequence: Synthetic oligonucleotide
  Sense strand starting at position 3654 of SEQ ID NO: 588234
cuggaugugccugaugacu

SEQ ID NO: 850951 - RNA, 19 nt, Artificial Sequence
  Description of Artificial Sequence: Synthetic oligonucleotide
  Antisense strand to SEQ ID NO: 850950
agucaucaggcacauccag

SEQ ID NO: 850952 - RNA, 19 nt, Artificial Sequence
  Description of Artificial Sequence: Synthetic oligonucleotide
  Sense strand starting at position 3656 of SEQ ID NO: 588234
ggaugugccugaugacuuc

SEQ ID NO: 850953 - RNA, 19 nt, Artificial Sequence
  Description of Artificial Sequence: Synthetic oligonucleotide
  Antisense strand to SEQ ID NO: 850952
gaagucaucaggcacaucc

SEQ ID NO: 850954 - RNA, 19 nt, Artificial Sequence
  Description of Artificial Sequence: Synthetic oligonucleotide
  Sense strand starting at position 3662 of SEQ ID NO: 588234
gccugaugacuucguucag

SEQ ID NO: 850955 - RNA, 19 nt, Artificial Sequence
  Description of Artificial Sequence: Synthetic oligonucleotide
  Antisense strand to SEQ ID NO: 850954
cugaacgaagucaucaggc

SEQ ID NO: 850956 - RNA, 19 nt, Artificial Sequence
  Description of Artificial Sequence: Synthetic oligonucleotide
  Sense strand starting at position 3729 of SEQ ID NO: 588234
ccucuuaaaugagauaaag

SEQ ID NO: 850957 - RNA, 19 nt, Artificial Sequence
  Description of Artificial Sequence: Synthetic oligonucleotide
  Antisense strand to SEQ ID NO: 850956
cuuuaucucauuuaagagg

SEQ ID NO: 850958 - RNA, 19 nt, Artificial Sequence
  Description of Artificial Sequence: Synthetic oligonucleotide
  Sense strand starting at position 2011 of SEQ ID NO: 588235
aagagaggaugaugucaua

SEQ ID NO: 850959 - RNA, 19 nt, Artificial Sequence
  Description of Artificial Sequence: Synthetic oligonucleotide
  Antisense strand to SEQ ID NO: 850958
uaugacaucauccucucuu

SEQ ID NO: 850960 - RNA, 19 nt, Artificial Sequence
  Description of Artificial Sequence: Synthetic oligonucleotide
  Sense strand starting at position 2014 of SEQ ID NO: 588235
agaggaugaugucauagag

SEQ ID NO: 850961 - RNA, 19 nt, Artificial Sequence
  Description of Artificial Sequence: Synthetic oligonucleotide
  Antisense strand to SEQ ID NO: 850960
cucuaugacaucauccucu

SEQ ID NO: 850962 - RNA, 19 nt, Artificial Sequence
  Description of Artificial Sequence: Synthetic oligonucleotide
  Sense strand starting at position 2021 of SEQ ID NO: 588235
gaugucauagaguggauca

SEQ ID NO: 850963 - RNA, 19 nt, Artificial Sequence
  Description of Artificial Sequence: Synthetic oligonucleotide
  Antisense strand to SEQ ID NO: 850962
ugauccacucuaugacauc

SEQ ID NO: 850964 - RNA, 19 nt, Artificial Sequence
  Description of Artificial Sequence: Synthetic oligonucleotide
  Sense strand starting at position 2033 of SEQ ID NO: 588235
uggaucaggucaucacaau

SEQ ID NO: 850965 - RNA, 19 nt, Artificial Sequence
  Description of Artificial Sequence: Synthetic oligonucleotide
  Antisense strand to SEQ ID NO: 850964
auugugaugaccugaucca

SEQ ID NO: 850966 - RNA, 19 nt, Artificial Sequence
  Description of Artificial Sequence: Synthetic oligonucleotide
  Sense strand starting at position 2218 of SEQ ID NO: 588235
guuaaaggcuucuggaaua

SEQ ID NO: 850967 - RNA, 19 nt, Artificial Sequence
  Description of Artificial Sequence: Synthetic oligonucleotide
  Antisense strand to SEQ ID NO: 850966
uauuccagaagccuuuaac

SEQ ID NO: 850968 - RNA, 19 nt, Artificial Sequence
  Description of Artificial Sequence: Synthetic oligonucleotide
  Sense strand starting at position 2263 of SEQ ID NO: 588235
gggagcaguuuguguagga

SEQ ID NO: 850969 - RNA, 19 nt, Artificial Sequence
  Description of Artificial Sequence: Synthetic oligonucleotide
  Antisense strand to SEQ ID NO: 850968
uccuacacaaacugcuccc

SEQ ID NO: 850970 - RNA, 19 nt, Artificial Sequence
  Description of Artificial Sequence: Synthetic oligonucleotide
  Sense strand starting at position 2267 of SEQ ID NO: 588235
gcaguuuguguaggagaga

SEQ ID NO: 850971 - RNA, 19 nt, Artificial Sequence
  Description of Artificial Sequence: Synthetic oligonucleotide
  Antisense strand to SEQ ID NO: 850970
ucucuccuacacaaacugc

SEQ ID NO: 850972 - RNA, 19 nt, Artificial Sequence
  Description of Artificial Sequence: Synthetic oligonucleotide
  Sense strand starting at position 2268 of SEQ ID NO: 588235
caguuuguguaggagagau

SEQ ID NO: 850973 - RNA, 19 nt, Artificial Sequence
  Description of Artificial Sequence: Synthetic oligonucleotide
  Antisense strand to SEQ ID NO: 850972
aucucuccuacacaaacug

SEQ ID NO: 850974 - RNA, 19 nt, Artificial Sequence
  Description of Artificial Sequence: Synthetic oligonucleotide
  Sense strand starting at position 2270 of SEQ ID NO: 588235
guuuguguaggagagauaa

SEQ ID NO: 850975 - RNA, 19 nt, Artificial Sequence
  Description of Artificial Sequence: Synthetic oligonucleotide
  Antisense strand to SEQ ID NO: 850974
uuaucucuccuacacaaac

SEQ ID NO: 850976 - RNA, 19 nt, Artificial Sequence
  Description of Artificial Sequence: Synthetic oligonucleotide
  Sense strand starting at position 2305 of SEQ ID NO: 588235
ggaagagauuauuagaccu

SEQ ID NO: 850977 - RNA, 19 nt, Artificial Sequence
  Description of Artificial Sequence: Synthetic oligonucleotide
  Antisense strand to SEQ ID NO: 850976
aggucuaauaaucucuucc

SEQ ID NO: 850978 - RNA, 19 nt, Artificial Sequence
  Description of Artificial Sequence: Synthetic oligonucleotide
  Sense strand starting at position 2667 of SEQ ID NO: 588235
ucuuuaaagaccggaugau

SEQ ID NO: 850979 - RNA, 19 nt, Artificial Sequence
  Description of Artificial Sequence: Synthetic oligonucleotide
  Antisense strand to SEQ ID NO: 850978
aucauccggucuuuaaaga

SEQ ID NO: 850980 - RNA, 19 nt, Artificial Sequence
  Description of Artificial Sequence: Synthetic oligonucleotide
  Sense strand starting at position 2761 of SEQ ID NO: 588235
gggucagcuuucuccauca

SEQ ID NO: 850981 - RNA, 19 nt, Artificial Sequence
  Description of Artificial Sequence: Synthetic oligonucleotide
  Antisense strand to SEQ ID NO: 850980
ugauggagaaagcugaccc

SEQ ID NO: 850982 - RNA, 19 nt, Artificial Sequence
  Description of Artificial Sequence: Synthetic oligonucleotide
  Sense strand starting at position 2766 of SEQ ID NO: 588235
agcuuucuccaucaaaggu

SEQ ID NO: 850983 - RNA, 19 nt, Artificial Sequence
  Description of Artificial Sequence: Synthetic oligonucleotide
  Antisense strand to SEQ ID NO: 850982
accuuugauggagaaagcu

SEQ ID NO: 850984 - RNA, 19 nt, Artificial Sequence
  Description of Artificial Sequence: Synthetic oligonucleotide
  Sense strand starting at position 2791 of SEQ ID NO: 588235
gggcgaguugaucagacuu

SEQ ID NO: 850985 - RNA, 19 nt, Artificial Sequence
  Description of Artificial Sequence: Synthetic oligonucleotide
  Antisense strand to SEQ ID NO: 850984
aagucugaucaacucgccc

SEQ ID NO: 850986 - RNA, 19 nt, Artificial Sequence
  Description of Artificial Sequence: Synthetic oligonucleotide
  Sense strand starting at position 2793 of SEQ ID NO: 588235
gcgaguugaucagacuuuc

SEQ ID NO: 850987 - RNA, 19 nt, Artificial Sequence
  Description of Artificial Sequence: Synthetic oligonucleotide
  Antisense strand to SEQ ID NO: 850986
gaaagucugaucaacucgc

SEQ ID NO: 850988 - RNA, 19 nt, Artificial Sequence
  Description of Artificial Sequence: Synthetic oligonucleotide
  Sense strand starting at position 2825 of SEQ ID NO: 588235
ccuccucugugagauggaa

SEQ ID NO: 850989 - RNA, 19 nt, Artificial Sequence
  Description of Artificial Sequence: Synthetic oligonucleotide
  Antisense strand to SEQ ID NO: 850988
uuccaucucacagaggagg

SEQ ID NO: 850990 - RNA, 19 nt, Artificial Sequence
  Description of Artificial Sequence: Synthetic oligonucleotide
  Sense strand starting at position 2958 of SEQ ID NO: 588235
gcgaucucagcuugaaaca

SEQ ID NO: 850991 - RNA, 19 nt, Artificial Sequence
  Description of Artificial Sequence: Synthetic oligonucleotide
  Antisense strand to SEQ ID NO: 850990
uguuucaagcugagaucgc

SEQ ID NO: 850992 - RNA, 19 nt, Artificial Sequence
  Description of Artificial Sequence: Synthetic oligonucleotide
  Sense strand starting at position 3056 of SEQ ID NO: 588235
cuugcucauuccuuggcaa

SEQ ID NO: 850993 - RNA, 19 nt, Artificial Sequence
  Description of Artificial Sequence: Synthetic oligonucleotide
  Antisense strand to SEQ ID NO: 850992
uugccaaggaaugagcaag

SEQ ID NO: 850994 - RNA, 19 nt, Artificial Sequence
  Description of Artificial Sequence: Synthetic oligonucleotide
  Sense strand starting at position 3057 of SEQ ID NO: 588235
uugcucauuccuuggcaaa

SEQ ID NO: 850995 - RNA, 19 nt, Artificial Sequence
  Description of Artificial Sequence: Synthetic oligonucleotide
  Antisense strand to SEQ ID NO: 850994
uuugccaaggaaugagcaa

SEQ ID NO: 850996 - RNA, 19 nt, Artificial Sequence
  Description of Artificial Sequence: Synthetic oligonucleotide
  Sense strand starting at position 3058 of SEQ ID NO: 588235
ugcucauuccuuggcaaag

SEQ ID NO: 850997 - RNA, 19 nt, Artificial Sequence
  Description of Artificial Sequence: Synthetic oligonucleotide
  Antisense strand to SEQ ID NO: 850996
cuuugccaaggaaugagca

SEQ ID NO: 850998 - RNA, 19 nt, Artificial Sequence
  Description of Artificial Sequence: Synthetic oligonucleotide
  Sense strand starting at position 3104 of SEQ ID NO: 588235
auguauaguuuacgguuua

SEQ ID NO: 850999 - RNA, 19 nt, Artificial Sequence
  Description of Artificial Sequence: Synthetic oligonucleotide
  Antisense strand to SEQ ID NO: 850998
uaaaccguaaacuauacau

SEQ ID NO: 851000 - RNA, 19 nt, Artificial Sequence
  Description of Artificial Sequence: Synthetic oligonucleotide
  Sense strand starting at position 3105 of SEQ ID NO: 588235
uguauaguuuacgguuuaa

SEQ ID NO: 851001 - RNA, 19 nt, Artificial Sequence
  Description of Artificial Sequence: Synthetic oligonucleotide
  Antisense strand to SEQ ID NO: 851000
uuaaaccguaaacuauaca

SEQ ID NO: 851002 - RNA, 19 nt, Artificial Sequence
  Description of Artificial Sequence: Synthetic oligonucleotide
  Sense strand starting at position 3109 of SEQ ID NO: 588235
uaguuuacgguuuaaacaa

SEQ ID NO: 851003 - RNA, 19 nt, Artificial Sequence
  Description of Artificial Sequence: Synthetic oligonucleotide
  Antisense strand to SEQ ID NO: 851002
uuguuuaaaccguaaacua

SEQ ID NO: 851004 - RNA, 19 nt, Artificial Sequence
  Description of Artificial Sequence: Synthetic oligonucleotide
  Sense strand starting at position 3276 of SEQ ID NO: 588235
aagaccagugcuugagauu

SEQ ID NO: 851005 - RNA, 19 nt, Artificial Sequence
  Description of Artificial Sequence: Synthetic oligonucleotide
  Antisense strand to SEQ ID NO: 851004
aaucucaagcacuggucuu

SEQ ID NO: 851006 - RNA, 19 nt, Artificial Sequence
  Description of Artificial Sequence: Synthetic oligonucleotide
  Sense strand starting at position 3587 of SEQ ID NO: 588235
ccggccggugcuugagaua

SEQ ID NO: 851007 - RNA, 19 nt, Artificial Sequence
  Description of Artificial Sequence: Synthetic oligonucleotide
  Antisense strand to SEQ ID NO: 851006
uaucucaagcaccggccgg

SEQ ID NO: 851008 - RNA, 19 nt, Artificial Sequence
  Description of Artificial Sequence: Synthetic oligonucleotide
  Sense strand starting at position 3590 of SEQ ID NO: 588235
gccggugcuugagauauuu

SEQ ID NO: 851009 - RNA, 19 nt, Artificial Sequence
  Description of Artificial Sequence: Synthetic oligonucleotide
  Antisense strand to SEQ ID NO: 851008
aaauaucucaagcaccggc

SEQ ID NO: 851010 - RNA, 19 nt, Artificial Sequence
  Description of Artificial Sequence: Synthetic oligonucleotide
  Sense strand starting at position 3813 of SEQ ID NO: 588235
cccaaugcuccgggagacu

SEQ ID NO: 851011 - RNA, 19 nt, Artificial Sequence
  Description of Artificial Sequence: Synthetic oligonucleotide
  Antisense strand to SEQ ID NO: 851010
agucucccggagcauuggg

SEQ ID NO: 851012 - RNA, 19 nt, Artificial Sequence
  Description of Artificial Sequence: Synthetic oligonucleotide
  Sense strand starting at position 3869 of SEQ ID NO: 588235
gccucaugcuuguaauccu

SEQ ID NO: 851013 - RNA, 19 nt, Artificial Sequence
  Description of Artificial Sequence: Synthetic oligonucleotide
  Antisense strand to SEQ ID NO: 851012
aggauuacaagcaugaggc

SEQ ID NO: 851014 - RNA, 19 nt, Artificial Sequence
  Description of Artificial Sequence: Synthetic oligonucleotide
  Sense strand starting at position 3924 of SEQ ID NO: 588235
ggucaugguuucgagacca

SEQ ID NO: 851015 - RNA, 19 nt, Artificial Sequence
  Description of Artificial Sequence: Synthetic oligonucleotide
  Antisense strand to SEQ ID NO: 851014
uggucucgaaaccaugacc

SEQ ID NO: 851016 - RNA, 19 nt, Artificial Sequence
  Description of Artificial Sequence: Synthetic oligonucleotide
  Sense strand starting at position 21 of SEQ ID NO: 588236
cuuagugucgcugaacuau

SEQ ID NO: 851017 - RNA, 19 nt, Artificial Sequence
  Description of Artificial Sequence: Synthetic oligonucleotide
  Antisense strand to SEQ ID NO: 851016
auaguucagcgacacuaag

SEQ ID NO: 851018 - RNA, 19 nt, Artificial Sequence
  Description of Artificial Sequence: Synthetic oligonucleotide
  Sense strand starting at position 50 of SEQ ID NO: 588236
gaggcugauccugagagca

SEQ ID NO: 851019 - RNA, 19 nt, Artificial Sequence
  Description of Artificial Sequence: Synthetic oligonucleotide
  Antisense strand to SEQ ID NO: 851018
ugcucucaggaucagccuc

SEQ ID NO: 851020 - RNA, 19 nt, Artificial Sequence
  Description of Artificial Sequence: Synthetic oligonucleotide
  Sense strand starting at position 235 of SEQ ID NO: 588236
cuaguuaagcaguaggagu

SEQ ID NO: 851021 - RNA, 19 nt, Artificial Sequence
  Description of Artificial Sequence: Synthetic oligonucleotide
  Antisense strand to SEQ ID NO: 851020
acuccuacugcuuaacuag

SEQ ID NO: 851022 - RNA, 19 nt, Artificial Sequence
  Description of Artificial Sequence: Synthetic oligonucleotide
  Sense strand starting at position 272 of SEQ ID NO: 588236
ucuguaacagguugugauc

SEQ ID NO: 851023 - RNA, 19 nt, Artificial Sequence
  Description of Artificial Sequence: Synthetic oligonucleotide
  Antisense strand to SEQ ID NO: 851022
gaucacaaccuguuacaga

SEQ ID NO: 851024 - RNA, 19 nt, Artificial Sequence
  Description of Artificial Sequence: Synthetic oligonucleotide
  Sense strand starting at position 584 of SEQ ID NO: 588236
ggaucaugggcuggaaucu

SEQ ID NO: 851025 - RNA, 19 nt, Artificial Sequence
  Description of Artificial Sequence: Synthetic oligonucleotide
  Antisense strand to SEQ ID NO: 851024
agauuccagcccaugaucc

SEQ ID NO: 851026 - RNA, 19 nt, Artificial Sequence
  Description of Artificial Sequence: Synthetic oligonucleotide
  Sense strand starting at position 797 of SEQ ID NO: 588236
ggaccaugucugggaaccu

SEQ ID NO: 851027 - RNA, 19 nt, Artificial Sequence
  Description of Artificial Sequence: Synthetic oligonucleotide
  Antisense strand to SEQ ID NO: 851026
agguucccagacauggucc

SEQ ID NO: 851028 - RNA, 19 nt, Artificial Sequence
  Description of Artificial Sequence: Synthetic oligonucleotide
  Sense strand starting at position 840 of SEQ ID NO: 588236
uugggcuuggcauggagaa

SEQ ID NO: 851029 - RNA, 19 nt, Artificial Sequence
  Description of Artificial Sequence: Synthetic oligonucleotide
  Antisense strand to SEQ ID NO: 851028
uucuccaugccaagcccaa

SEQ ID NO: 851030 - RNA, 19 nt, Artificial Sequence
  Description of Artificial Sequence: Synthetic oligonucleotide
  Sense strand starting at position 950 of SEQ ID NO: 588236
gcagccauccuugaugaga

SEQ ID NO: 851031 - RNA, 19 nt, Artificial Sequence
  Description of Artificial Sequence: Synthetic oligonucleotide
  Antisense strand to SEQ ID NO: 851030
ucucaucaaggauggcugc

SEQ ID NO: 851032 - RNA, 19 nt, Artificial Sequence
  Description of Artificial Sequence: Synthetic oligonucleotide
  Sense strand starting at position 973 of SEQ ID NO: 588236
aguggaaguuccucacgau

SEQ ID NO: 851033 - RNA, 19 nt, Artificial Sequence
  Description of Artificial Sequence: Synthetic oligonucleotide
  Antisense strand to SEQ ID NO: 851032
aucgugaggaacuuccacu

SEQ ID NO: 851034 - RNA, 19 nt, Artificial Sequence
  Description of Artificial Sequence: Synthetic oligonucleotide
  Sense strand starting at position 974 of SEQ ID NO: 588236
guggaaguuccucacgaug

SEQ ID NO: 851035 - RNA, 19 nt, Artificial Sequence
  Description of Artificial Sequence: Synthetic oligonucleotide
  Antisense strand to SEQ ID NO: 851034
caucgugaggaacuuccac

SEQ ID NO: 851036 - RNA, 19 nt, Artificial Sequence
  Description of Artificial Sequence: Synthetic oligonucleotide
  Sense strand starting at position 985 of SEQ ID NO: 588236
ucacgauguacccagggau

SEQ ID NO: 851037 - RNA, 19 nt, Artificial Sequence
  Description of Artificial Sequence: Synthetic oligonucleotide
  Antisense strand to SEQ ID NO: 851036
aucccuggguacaucguga

SEQ ID NO: 851038 - RNA, 19 nt, Artificial Sequence
  Description of Artificial Sequence: Synthetic oligonucleotide
  Sense strand starting at position 1043 of SEQ ID NO: 588236
auuggugccacucagaguu

SEQ ID NO: 851039 - RNA, 19 nt, Artificial Sequence
  Description of Artificial Sequence: Synthetic oligonucleotide
  Antisense strand to SEQ ID NO: 851038
aacucugaguggcaccaau

SEQ ID NO: 851040 - RNA, 19 nt, Artificial Sequence
  Description of Artificial Sequence: Synthetic oligonucleotide
  Sense strand starting at position 1208 of SEQ ID NO: 588236
aggaguuagaccugguauu

SEQ ID NO: 851041 - RNA, 19 nt, Artificial Sequence
  Description of Artificial Sequence: Synthetic oligonucleotide
  Antisense strand to SEQ ID NO: 851040
aauaccaggucuaacuccu

SEQ ID NO: 851042 - RNA, 19 nt, Artificial Sequence
  Description of Artificial Sequence: Synthetic oligonucleotide
  Sense strand starting at position 1209 of SEQ ID NO: 588236
ggaguuagaccugguauuc

SEQ ID NO: 851043 - RNA, 19 nt, Artificial Sequence
  Description of Artificial Sequence: Synthetic oligonucleotide
  Antisense strand to SEQ ID NO: 851042
gaauaccaggucuaacucc

SEQ ID NO: 851044 - RNA, 19 nt, Artificial Sequence
  Description of Artificial Sequence: Synthetic oligonucleotide
  Sense strand starting at position 1252 of SEQ ID NO: 588236
uggcucuacugguugcuaa

SEQ ID NO: 851045 - RNA, 19 nt, Artificial Sequence
  Description of Artificial Sequence: Synthetic oligonucleotide
  Antisense strand to SEQ ID NO: 851044
uuagcaaccaguagagcca

SEQ ID NO: 851046 - RNA, 19 nt, Artificial Sequence
  Description of Artificial Sequence: Synthetic oligonucleotide
  Sense strand starting at position 1386 of SEQ ID NO: 588236
agaguuaaugcaggucaca

SEQ ID NO: 851047 - RNA, 19 nt, Artificial Sequence
  Description of Artificial Sequence: Synthetic oligonucleotide
  Antisense strand to SEQ ID NO: 851046
ugugaccugcauuaacucu

SEQ ID NO: 851048 - RNA, 19 nt, Artificial Sequence
  Description of Artificial Sequence: Synthetic oligonucleotide
  Sense strand starting at position 1439 of SEQ ID NO: 588236
uuaggagccuuauuaauug

SEQ ID NO: 851049 - RNA, 19 nt, Artificial Sequence
  Description of Artificial Sequence: Synthetic oligonucleotide
  Antisense strand to SEQ ID NO: 851048
caauuaauaaggcuccuaa

SEQ ID NO: 851050 - RNA, 19 nt, Artificial Sequence
  Description of Artificial Sequence: Synthetic oligonucleotide
  Sense strand starting at position 1548 of SEQ ID NO: 588236
ggaaauagagcuugcagag

SEQ ID NO: 851051 - RNA, 19 nt, Artificial Sequence
  Description of Artificial Sequence: Synthetic oligonucleotide
  Antisense strand to SEQ ID NO: 851050
cucugcaagcucuauuucc

SEQ ID NO: 851052 - RNA, 19 nt, Artificial Sequence
  Description of Artificial Sequence: Synthetic oligonucleotide
  Sense strand starting at position 1922 of SEQ ID NO: 588236
gcaggaucugugugaggcu

SEQ ID NO: 851053 - RNA, 19 nt, Artificial Sequence
  Description of Artificial Sequence: Synthetic oligonucleotide
  Antisense strand to SEQ ID NO: 851052
agccucacacagauccugc

SEQ ID NO: 851054 - RNA, 19 nt, Artificial Sequence
  Description of Artificial Sequence: Synthetic oligonucleotide
  Sense strand starting at position 1962 of SEQ ID NO: 588236
ggugaaaugcaagguguga

SEQ ID NO: 851055 - RNA, 19 nt, Artificial Sequence
  Description of Artificial Sequence: Synthetic oligonucleotide
  Antisense strand to SEQ ID NO: 851054
ucacaccuugcauuucacc

SEQ ID NO: 851056 - RNA, 19 nt, Artificial Sequence
  Description of Artificial Sequence: Synthetic oligonucleotide
  Sense strand starting at position 1971 of SEQ ID NO: 588236
caaggugugagugauguga

SEQ ID NO: 851057 - RNA, 19 nt, Artificial Sequence
  Description of Artificial Sequence: Synthetic oligonucleotide
  Antisense strand to SEQ ID NO: 851056
ucacaucacucacaccuug

SEQ ID NO: 851058 - RNA, 19 nt, Artificial Sequence
  Description of Artificial Sequence: Synthetic oligonucleotide
  Sense strand starting at position 1981 of SEQ ID NO: 588236
gugaugugaggcugggaau

SEQ ID NO: 851059 - RNA, 19 nt, Artificial Sequence
  Description of Artificial Sequence: Synthetic oligonucleotide
  Antisense strand to SEQ ID NO: 851058
auucccagccucacaucac

SEQ ID NO: 851060 - RNA, 19 nt, Artificial Sequence
  Description of Artificial Sequence: Synthetic oligonucleotide
  Sense strand starting at position 2016 of SEQ ID NO: 588236
acuccuauuuauggccaga

SEQ ID NO: 851061 - RNA, 19 nt, Artificial Sequence
  Description of Artificial Sequence: Synthetic oligonucleotide
  Antisense strand to SEQ ID NO: 851060
ucuggccauaaauaggagu

SEQ ID NO: 851062 - RNA, 19 nt, Artificial Sequence
  Description of Artificial Sequence: Synthetic oligonucleotide
  Sense strand starting at position 2165 of SEQ ID NO: 588236
cuuggcuccugcucugaga

SEQ ID NO: 851063 - RNA, 19 nt, Artificial Sequence
  Description of Artificial Sequence: Synthetic oligonucleotide
  Antisense strand to SEQ ID NO: 851062
ucucagagcaggagccaag

SEQ ID NO: 851064 - RNA, 19 nt, Artificial Sequence
  Description of Artificial Sequence: Synthetic oligonucleotide
  Sense strand starting at position 2193 of SEQ ID NO: 588236
ugcagucuggcccaguaaa

SEQ ID NO: 851065 - RNA, 19 nt, Artificial Sequence
  Description of Artificial Sequence: Synthetic oligonucleotide
  Antisense strand to SEQ ID NO: 851064
uuuacugggccagacugca

SEQ ID NO: 851066 - RNA, 19 nt, Artificial Sequence
  Description of Artificial Sequence: Synthetic oligonucleotide
  Sense strand starting at position 2220 of SEQ ID NO: 588236
ugcacuguuucuccagaga

SEQ ID NO: 851067 - RNA, 19 nt, Artificial Sequence
  Description of Artificial Sequence: Synthetic oligonucleotide
  Antisense strand to SEQ ID NO: 851066
ucucuggagaaacagugca

SEQ ID NO: 851068 - RNA, 19 nt, Artificial Sequence
  Description of Artificial Sequence: Synthetic oligonucleotide
  Sense strand starting at position 2239 of SEQ ID NO: 588236
gagggauugcccugucauc

SEQ ID NO: 851069 - RNA, 19 nt, Artificial Sequence
  Description of Artificial Sequence: Synthetic oligonucleotide
  Antisense strand to SEQ ID NO: 851068
gaugacagggcaaucccuc

SEQ ID NO: 851070 - RNA, 19 nt, Artificial Sequence
  Description of Artificial Sequence: Synthetic oligonucleotide
  Sense strand starting at position 2620 of SEQ ID NO: 588236
guccaacaccugggucaaa

SEQ ID NO: 851071 - RNA, 19 nt, Artificial Sequence
  Description of Artificial Sequence: Synthetic oligonucleotide
  Antisense strand to SEQ ID NO: 851070
uuugacccagguguuggac

SEQ ID NO: 851072 - RNA, 19 nt, Artificial Sequence
  Description of Artificial Sequence: Synthetic oligonucleotide
  Sense strand starting at position 2651 of SEQ ID NO: 588236
gggagacuggcuuggaaua

SEQ ID NO: 851073 - RNA, 19 nt, Artificial Sequence
  Description of Artificial Sequence: Synthetic oligonucleotide
  Antisense strand to SEQ ID NO: 851072
uauuccaagccagucuccc

SEQ ID NO: 851074 - RNA, 19 nt, Artificial Sequence
  Description of Artificial Sequence: Synthetic oligonucleotide
  Sense strand starting at position 2816 of SEQ ID NO: 588236
ugagaaaggucagaagaga

SEQ ID NO: 851075 - RNA, 19 nt, Artificial Sequence
  Description of Artificial Sequence: Synthetic oligonucleotide
  Antisense strand to SEQ ID NO: 851074
ucucuucugaccuuucuca

SEQ ID NO: 851076 - RNA, 19 nt, Artificial Sequence
  Description of Artificial Sequence: Synthetic oligonucleotide
  Sense strand starting at position 3010 of SEQ ID NO: 588236
ugugcuaggcucuauguca

SEQ ID NO: 851077 - RNA, 19 nt, Artificial Sequence
  Description of Artificial Sequence: Synthetic oligonucleotide
  Antisense strand to SEQ ID NO: 851076
ugacauagagccuagcaca

SEQ ID NO: 851078 - RNA, 19 nt, Artificial Sequence
  Description of Artificial Sequence: Synthetic oligonucleotide
  Sense strand starting at position 3018 of SEQ ID NO: 588236
gcucuaugucaaggacuuu

SEQ ID NO: 851079 - RNA, 19 nt, Artificial Sequence
  Description of Artificial Sequence: Synthetic oligonucleotide
  Antisense strand to SEQ ID NO: 851078
aaaguccuugacauagagc

SEQ ID NO: 851080 - RNA, 19 nt, Artificial Sequence
  Description of Artificial Sequence: Synthetic oligonucleotide
  Sense strand starting at position 3159 of SEQ ID NO: 588236
cuaguaaguacuggagcau

SEQ ID NO: 851081 - RNA, 19 nt, Artificial Sequence
  Description of Artificial Sequence: Synthetic oligonucleotide
  Antisense strand to SEQ ID NO: 851080
augcuccaguacuuacuag

SEQ ID NO: 851082 - RNA, 19 nt, Artificial Sequence
  Description of Artificial Sequence: Synthetic oligonucleotide
  Sense strand starting at position 3163 of SEQ ID NO: 588236
uaaguacuggagcaugauu

SEQ ID NO: 851083 - RNA, 19 nt, Artificial Sequence
  Description of Artificial Sequence: Synthetic oligonucleotide
  Antisense strand to SEQ ID NO: 851082
aaucaugcuccaguacuua

SEQ ID NO: 851084 - RNA, 19 nt, Artificial Sequence
  Description of Artificial Sequence: Synthetic oligonucleotide
  Sense strand starting at position 3187 of SEQ ID NO: 588236
ccaggugugcucuaggguu

SEQ ID NO: 851085 - RNA, 19 nt, Artificial Sequence
  Description of Artificial Sequence: Synthetic oligonucleotide
  Antisense strand to SEQ ID NO: 851084
aacccuagagcacaccugg

SEQ ID NO: 851086 - RNA, 19 nt, Artificial Sequence
  Description of Artificial Sequence: Synthetic oligonucleotide
  Sense strand starting at position 3372 of SEQ ID NO: 588236
gucuuaguguccuuauuug

SEQ ID NO: 851087 - RNA, 19 nt, Artificial Sequence
  Description of Artificial Sequence: Synthetic oligonucleotide
  Antisense strand to SEQ ID NO: 851086
caaauaaggacacuaagac

SEQ ID NO: 851088 - RNA, 19 nt, Artificial Sequence
  Description of Artificial Sequence: Synthetic oligonucleotide
  Sense strand starting at position 3442 of SEQ ID NO: 588236
gaguaaagcccuuagcuua

SEQ ID NO: 851089 - RNA, 19 nt, Artificial Sequence
  Description of Artificial Sequence: Synthetic oligonucleotide
  Antisense strand to SEQ ID NO: 851088
uaagcuaagggcuuuacuc

SEQ ID NO: 851090 - RNA, 19 nt, Artificial Sequence
  Description of Artificial Sequence: Synthetic oligonucleotide
  Sense strand starting at position 3728 of SEQ ID NO: 588236
ucgaacuccugguuucgaa

SEQ ID NO: 851091 - RNA, 19 nt, Artificial Sequence
  Description of Artificial Sequence: Synthetic oligonucleotide
  Antisense strand to SEQ ID NO: 851090
uucgaaaccaggaguucga

SEQ ID NO: 851092 - RNA, 19 nt, Artificial Sequence
  Description of Artificial Sequence: Synthetic oligonucleotide
  Sense strand starting at position 3894 of SEQ ID NO: 588236
ucuucuguccaugaugguu

SEQ ID NO: 851093 - RNA, 19 nt, Artificial Sequence
  Description of Artificial Sequence: Synthetic oligonucleotide
  Antisense strand to SEQ ID NO: 851092
aaccaucauggacagaaga

SEQ ID NO: 851094 - RNA, 19 nt, Artificial Sequence
  Description of Artificial Sequence: Synthetic oligonucleotide
  Sense strand starting at position 3978 of SEQ ID NO: 588236
aaggcugaccucugcagau

SEQ ID NO: 851095 - RNA, 19 nt, Artificial Sequence
  Description of Artificial Sequence: Synthetic oligonucleotide
  Antisense strand to SEQ ID NO: 851094
aucugcagaggucagccuu

SEQ ID NO: 851096 - RNA, 19 nt, Artificial Sequence
  Description of Artificial Sequence: Synthetic oligonucleotide
  Sense strand starting at position 109 of SEQ ID NO: 588237
gguuaaaugggcuaaagua

SEQ ID NO: 851097 - RNA, 19 nt, Artificial Sequence
  Description of Artificial Sequence: Synthetic oligonucleotide
  Antisense strand to SEQ ID NO: 851096
uacuuuagcccauuuaacc

SEQ ID NO: 851098 - RNA, 19 nt, Artificial Sequence
  Description of Artificial Sequence: Synthetic oligonucleotide
  Sense strand starting at position 117 of SEQ ID NO: 588237
gggcuaaaguagucuggau

SEQ ID NO: 851099 - RNA, 19 nt, Artificial Sequence
  Description of Artificial Sequence: Synthetic oligonucleotide
  Antisense strand to SEQ ID NO: 851098
auccagacuacuuuagccc

SEQ ID NO: 851100 - RNA, 19 nt, Artificial Sequence
  Description of Artificial Sequence: Synthetic oligonucleotide
  Sense strand starting at position 121 of SEQ ID NO: 588237
uaaaguagucuggauccca

SEQ ID NO: 851101 - RNA, 19 nt, Artificial Sequence
  Description of Artificial Sequence: Synthetic oligonucleotide
  Antisense strand to SEQ ID NO: 851100
ugggauccagacuacuuua

SEQ ID NO: 851102 - RNA, 19 nt, Artificial Sequence
  Description of Artificial Sequence: Synthetic oligonucleotide
  Sense strand starting at position 387 of SEQ ID NO: 588237
guguuauagaugggcccaa

SEQ ID NO: 851103 - RNA, 19 nt, Artificial Sequence
  Description of Artificial Sequence: Synthetic oligonucleotide
  Antisense strand to SEQ ID NO: 851102
uugggcccaucuauaacac

SEQ ID NO: 851104 - RNA, 19 nt, Artificial Sequence
  Description of Artificial Sequence: Synthetic oligonucleotide
  Sense strand starting at position 448 of SEQ ID NO: 588237
gagggucucauugaauagu

SEQ ID NO: 851105 - RNA, 19 nt, Artificial Sequence
  Description of Artificial Sequence: Synthetic oligonucleotide
  Antisense strand to SEQ ID NO: 851104
acuauucaaugagacccuc

SEQ ID NO: 851106 - RNA, 19 nt, Artificial Sequence
  Description of Artificial Sequence: Synthetic oligonucleotide
  Sense strand starting at position 457 of SEQ ID NO: 588237
auugaauaguucccaggga

SEQ ID NO: 851107 - RNA, 19 nt, Artificial Sequence
  Description of Artificial Sequence: Synthetic oligonucleotide
  Antisense strand to SEQ ID NO: 851106
ucccugggaacuauucaau

SEQ ID NO: 851108 - RNA, 19 nt, Artificial Sequence
  Description of Artificial Sequence: Synthetic oligonucleotide
  Sense strand starting at position 480 of SEQ ID NO: 588237
agaggaagccucugggaua

SEQ ID NO: 851109 - RNA, 19 nt, Artificial Sequence
  Description of Artificial Sequence: Synthetic oligonucleotide
  Antisense strand to SEQ ID NO: 851108
uaucccagaggcuuccucu

SEQ ID NO: 851110 - RNA, 19 nt, Artificial Sequence
  Description of Artificial Sequence: Synthetic oligonucleotide
  Sense strand starting at position 547 of SEQ ID NO: 588237
ggaguuagugcaggacaga

SEQ ID NO: 851111 - RNA, 19 nt, Artificial Sequence
  Description of Artificial Sequence: Synthetic oligonucleotide
  Antisense strand to SEQ ID NO: 851110
ucuguccugcacuaacucc

SEQ ID NO: 851112 - RNA, 19 nt, Artificial Sequence
  Description of Artificial Sequence: Synthetic oligonucleotide
  Sense strand starting at position 548 of SEQ ID NO: 588237
gaguuagugcaggacagaa

SEQ ID NO: 851113 - RNA, 19 nt, Artificial Sequence
  Description of Artificial Sequence: Synthetic oligonucleotide
  Antisense strand to SEQ ID NO: 851112
uucuguccugcacuaacuc

SEQ ID NO: 851114 - RNA, 19 nt, Artificial Sequence
  Description of Artificial Sequence: Synthetic oligonucleotide
  Sense strand starting at position 641 of SEQ ID NO: 588237
cucagaagacuggguccua

SEQ ID NO: 851115 - RNA, 19 nt, Artificial Sequence
  Description of Artificial Sequence: Synthetic oligonucleotide
  Antisense strand to SEQ ID NO: 851114
uaggacccagucuucugag

SEQ ID NO: 851116 - RNA, 19 nt, Artificial Sequence
  Description of Artificial Sequence: Synthetic oligonucleotide
  Sense strand starting at position 757 of SEQ ID NO: 588237
gagcuuucggcucagagug

SEQ ID NO: 851117 - RNA, 19 nt, Artificial Sequence
  Description of Artificial Sequence: Synthetic oligonucleotide
  Antisense strand to SEQ ID NO: 851116
cacucugagccgaaagcuc

SEQ ID NO: 851118 - RNA, 19 nt, Artificial Sequence
  Description of Artificial Sequence: Synthetic oligonucleotide
  Sense strand starting at position 800 of SEQ ID NO: 588237
uggcaucucgguggacaua

SEQ ID NO: 851119 - RNA, 19 nt, Artificial Sequence
  Description of Artificial Sequence: Synthetic oligonucleotide
  Antisense strand to SEQ ID NO: 851118
uauguccaccgagaugcca

SEQ ID NO: 851120 - RNA, 19 nt, Artificial Sequence
  Description of Artificial Sequence: Synthetic oligonucleotide
  Sense strand starting at position 801 of SEQ ID NO: 588237
ggcaucucgguggacauaa

SEQ ID NO: 851121 - RNA, 19 nt, Artificial Sequence
  Description of Artificial Sequence: Synthetic oligonucleotide
  Antisense strand to SEQ ID NO: 851120
uuauguccaccgagaugcc

SEQ ID NO: 851122 - RNA, 19 nt, Artificial Sequence
  Description of Artificial Sequence: Synthetic oligonucleotide
  Sense strand starting at position 977 of SEQ ID NO: 588237
ucucaugcucccugggaga

SEQ ID NO: 851123 - RNA, 19 nt, Artificial Sequence
  Description of Artificial Sequence: Synthetic oligonucleotide
  Antisense strand to SEQ ID NO: 851122
ucucccagggagcaugaga

SEQ ID NO: 851124 - RNA, 19 nt, Artificial Sequence
  Description of Artificial Sequence: Synthetic oligonucleotide
  Sense strand starting at position 1076 of SEQ ID NO: 588237
gugguuaaagcaggagaaa

SEQ ID NO: 851125 - RNA, 19 nt, Artificial Sequence
  Description of Artificial Sequence: Synthetic oligonucleotide
  Antisense strand to SEQ ID NO: 851124
uuucuccugcuuuaaccac

SEQ ID NO: 851126 - RNA, 19 nt, Artificial Sequence
  Description of Artificial Sequence: Synthetic oligonucleotide
  Sense strand starting at position 1420 of SEQ ID NO: 588237
gauggugucuuguccagau

SEQ ID NO: 851127 - RNA, 19 nt, Artificial Sequence
  Description of Artificial Sequence: Synthetic oligonucleotide
  Antisense strand to SEQ ID NO: 851126
aucuggacaagacaccauc

SEQ ID NO: 851128 - RNA, 19 nt, Artificial Sequence
  Description of Artificial Sequence: Synthetic oligonucleotide
  Sense strand starting at position 1465 of SEQ ID NO: 588237
uccuuugggucugcacaua

SEQ ID NO: 851129 - RNA, 19 nt, Artificial Sequence
  Description of Artificial Sequence: Synthetic oligonucleotide
  Antisense strand to SEQ ID NO: 851128
uaugugcagacccaaagga

SEQ ID NO: 851130 - RNA, 19 nt, Artificial Sequence
  Description of Artificial Sequence: Synthetic oligonucleotide
  Sense strand starting at position 1674 of SEQ ID NO: 588237
cgggaaucuuccuuuggcu

SEQ ID NO: 851131 - RNA, 19 nt, Artificial Sequence
  Description of Artificial Sequence: Synthetic oligonucleotide
  Antisense strand to SEQ ID NO: 851130
agccaaaggaagauucccg

SEQ ID NO: 851132 - RNA, 19 nt, Artificial Sequence
  Description of Artificial Sequence: Synthetic oligonucleotide
  Sense strand starting at position 1977 of SEQ ID NO: 588237
cugggauuggccugcuauu

SEQ ID NO: 851133 - RNA, 19 nt, Artificial Sequence
  Description of Artificial Sequence: Synthetic oligonucleotide
  Antisense strand to SEQ ID NO: 851132
aauagcaggccaaucccag

SEQ ID NO: 851134 - RNA, 19 nt, Artificial Sequence
  Description of Artificial Sequence: Synthetic oligonucleotide
  Sense strand starting at position 1983 of SEQ ID NO: 588237
uuggccugcuauuuaugua

SEQ ID NO: 851135 - RNA, 19 nt, Artificial Sequence
  Description of Artificial Sequence: Synthetic oligonucleotide
  Antisense strand to SEQ ID NO: 851134
uacauaaauagcaggccaa

SEQ ID NO: 851136 - RNA, 19 nt, Artificial Sequence
  Description of Artificial Sequence: Synthetic oligonucleotide
  Sense strand starting at position 1987 of SEQ ID NO: 588237
ccugcuauuuauguagcua

SEQ ID NO: 851137 - RNA, 19 nt, Artificial Sequence
  Description of Artificial Sequence: Synthetic oligonucleotide
  Antisense strand to SEQ ID NO: 851136
uagcuacauaaauagcagg

SEQ ID NO: 851138 - RNA, 19 nt, Artificial Sequence
  Description of Artificial Sequence: Synthetic oligonucleotide
  Sense strand starting at position 2121 of SEQ ID NO: 588237
uuauguccucauuaguuga

SEQ ID NO: 851139 - RNA, 19 nt, Artificial Sequence
  Description of Artificial Sequence: Synthetic oligonucleotide
  Antisense strand to SEQ ID NO: 851138
ucaacuaaugaggacauaa

SEQ ID NO: 851140 - RNA, 19 nt, Artificial Sequence
  Description of Artificial Sequence: Synthetic oligonucleotide
  Sense strand starting at position 2123 of SEQ ID NO: 588237
auguccucauuaguugaau

SEQ ID NO: 851141 - RNA, 19 nt, Artificial Sequence
  Description of Artificial Sequence: Synthetic oligonucleotide
  Antisense strand to SEQ ID NO: 851140
auucaacuaaugaggacau

SEQ ID NO: 851142 - RNA, 19 nt, Artificial Sequence
  Description of Artificial Sequence: Synthetic oligonucleotide
  Sense strand starting at position 2124 of SEQ ID NO: 588237
uguccucauuaguugaaua

SEQ ID NO: 851143 - RNA, 19 nt, Artificial Sequence
  Description of Artificial Sequence: Synthetic oligonucleotide
  Antisense strand to SEQ ID NO: 851142
uauucaacuaaugaggaca

SEQ ID NO: 851144 - RNA, 19 nt, Artificial Sequence
  Description of Artificial Sequence: Synthetic oligonucleotide
  Sense strand starting at position 2126 of SEQ ID NO: 588237
uccucauuaguugaauaug

SEQ ID NO: 851145 - RNA, 19 nt, Artificial Sequence
  Description of Artificial Sequence: Synthetic oligonucleotide
  Antisense strand to SEQ ID NO: 851144
cauauucaacuaaugagga

SEQ ID NO: 851146 - RNA, 19 nt, Artificial Sequence
  Description of Artificial Sequence: Synthetic oligonucleotide
  Sense strand starting at position 2129 of SEQ ID NO: 588237
ucauuaguugaauaugucu

SEQ ID NO: 851147 - RNA, 19 nt, Artificial Sequence
  Description of Artificial Sequence: Synthetic oligonucleotide
  Antisense strand to SEQ ID NO: 851146
agacauauucaacuaauga

SEQ ID NO: 851148 - RNA, 19 nt, Artificial Sequence
  Description of Artificial Sequence: Synthetic oligonucleotide
  Sense strand starting at position 2137 of SEQ ID NO: 588237
ugaauaugucugggccuga

SEQ ID NO: 851149 - RNA, 19 nt, Artificial Sequence
  Description of Artificial Sequence: Synthetic oligonucleotide
  Antisense strand to SEQ ID NO: 851148
ucaggcccagacauauuca

SEQ ID NO: 851150 - RNA, 19 nt, Artificial Sequence
  Description of Artificial Sequence: Synthetic oligonucleotide
  Sense strand starting at position 2494 of SEQ ID NO: 588237
gagguuucacgaugucuag

SEQ ID NO: 851151 - RNA, 19 nt, Artificial Sequence
  Description of Artificial Sequence: Synthetic oligonucleotide
  Antisense strand to SEQ ID NO: 851150
cuagacaucgugaaaccuc

SEQ ID NO: 851152 - RNA, 19 nt, Artificial Sequence
  Description of Artificial Sequence: Synthetic oligonucleotide
  Sense strand starting at position 2745 of SEQ ID NO: 588237
gcaccuggucuguagcaua

SEQ ID NO: 851153 - RNA, 19 nt, Artificial Sequence
  Description of Artificial Sequence: Synthetic oligonucleotide
  Antisense strand to SEQ ID NO: 851152
uaugcuacagaccaggugc

SEQ ID NO: 851154 - RNA, 19 nt, Artificial Sequence
  Description of Artificial Sequence: Synthetic oligonucleotide
  Sense strand starting at position 2750 of SEQ ID NO: 588237
uggucuguagcauaaccau

SEQ ID NO: 851155 - RNA, 19 nt, Artificial Sequence
  Description of Artificial Sequence: Synthetic oligonucleotide
  Antisense strand to SEQ ID NO: 851154
augguuaugcuacagacca

SEQ ID NO: 851156 - RNA, 19 nt, Artificial Sequence
  Description of Artificial Sequence: Synthetic oligonucleotide
  Sense strand starting at position 2819 of SEQ ID NO: 588237
aauggauaccuuggugauu

SEQ ID NO: 851157 - RNA, 19 nt, Artificial Sequence
  Description of Artificial Sequence: Synthetic oligonucleotide
  Antisense strand to SEQ ID NO: 851156
aaucaccaagguauccauu

SEQ ID NO: 851158 - RNA, 19 nt, Artificial Sequence
  Description of Artificial Sequence: Synthetic oligonucleotide
  Sense strand starting at position 2820 of SEQ ID NO: 588237
auggauaccuuggugauua

SEQ ID NO: 851159 - RNA, 19 nt, Artificial Sequence
  Description of Artificial Sequence: Synthetic oligonucleotide
  Antisense strand to SEQ ID NO: 851158
uaaucaccaagguauccau

SEQ ID NO: 851160 - RNA, 19 nt, Artificial Sequence
  Description of Artificial Sequence: Synthetic oligonucleotide
  Sense strand starting at position 2824 of SEQ ID NO: 588237
auaccuuggugauuauaau

SEQ ID NO: 851161 - RNA, 19 nt, Artificial Sequence
  Description of Artificial Sequence: Synthetic oligonucleotide
  Antisense strand to SEQ ID NO: 851160
auuauaaucaccaagguau

SEQ ID NO: 851162 - RNA, 19 nt, Artificial Sequence
  Description of Artificial Sequence: Synthetic oligonucleotide
  Sense strand starting at position 2974 of SEQ ID NO: 588237
uuguguucccauugacaua

SEQ ID NO: 851163 - RNA, 19 nt, Artificial Sequence
  Description of Artificial Sequence: Synthetic oligonucleotide
  Antisense strand to SEQ ID NO: 851162
uaugucaaugggaacacaa

SEQ ID NO: 851164 - RNA, 19 nt, Artificial Sequence
  Description of Artificial Sequence: Synthetic oligonucleotide
  Sense strand starting at position 3711 of SEQ ID NO: 588237
cuuuguguggcugugaguu

SEQ ID NO: 851165 - RNA, 19 nt, Artificial Sequence
  Description of Artificial Sequence: Synthetic oligonucleotide
  Antisense strand to SEQ ID NO: 851164
aacucacagccacacaaag

SEQ ID NO: 851166 - RNA, 19 nt, Artificial Sequence
  Description of Artificial Sequence: Synthetic oligonucleotide
  Sense strand starting at position 3717 of SEQ ID NO: 588237
guggcugugaguuauuauu

SEQ ID NO: 851167 - RNA, 19 nt, Artificial Sequence
  Description of Artificial Sequence: Synthetic oligonucleotide
  Antisense strand to SEQ ID NO: 851166
aauaauaacucacagccac

SEQ ID NO: 851168 - RNA, 19 nt, Artificial Sequence
  Description of Artificial Sequence: Synthetic oligonucleotide
  Sense strand starting at position 3800 of SEQ ID NO: 588237
uucuuucucccguuagcuu

SEQ ID NO: 851169 - RNA, 19 nt, Artificial Sequence
  Description of Artificial Sequence: Synthetic oligonucleotide
  Antisense strand to SEQ ID NO: 851168
aagcuaacgggagaaagaa

SEQ ID NO: 851170 - RNA, 19 nt, Artificial Sequence
  Description of Artificial Sequence: Synthetic oligonucleotide
  Sense strand starting at position 3867 of SEQ ID NO: 588237
cuggaaaugucuuauuucu

SEQ ID NO: 851171 - RNA, 19 nt, Artificial Sequence
  Description of Artificial Sequence: Synthetic oligonucleotide
  Antisense strand to SEQ ID NO: 851170
agaaauaagacauuuccag

SEQ ID NO: 851172 - RNA, 19 nt, Artificial Sequence
  Description of Artificial Sequence: Synthetic oligonucleotide
  Sense strand starting at position 3919 of SEQ ID NO: 588237
auagaauucuuguuugacu

SEQ ID NO: 851173 - RNA, 19 nt, Artificial Sequence
  Description of Artificial Sequence: Synthetic oligonucleotide
  Antisense strand to SEQ ID NO: 851172
agucaaacaagaauucuau

SEQ ID NO: 851174 - RNA, 19 nt, Artificial Sequence
  Description of Artificial Sequence: Synthetic oligonucleotide
  Sense strand starting at position 3921 of SEQ ID NO: 588237
agaauucuuguuugacuuu

SEQ ID NO: 851175 - RNA, 19 nt, Artificial Sequence
  Description of Artificial Sequence: Synthetic oligonucleotide
  Antisense strand to SEQ ID NO: 851174
aaagucaaacaagaauucu

SEQ ID NO: 851176 - RNA, 19 nt, Artificial Sequence
  Description of Artificial Sequence: Synthetic oligonucleotide
  Sense strand starting at position 1 of SEQ ID NO: 588238
gcugaaccugucugauucu

SEQ ID NO: 851177 - RNA, 19 nt, Artificial Sequence
  Description of Artificial Sequence: Synthetic oligonucleotide
  Antisense strand to SEQ ID NO: 851176
agaaucagacagguucagc

SEQ ID NO: 851178 - RNA, 19 nt, Artificial Sequence
  Description of Artificial Sequence: Synthetic oligonucleotide
  Sense strand starting at position 4 of SEQ ID NO: 588238
gaaccugucugauucugga

SEQ ID NO: 851179 - RNA, 19 nt, Artificial Sequence
  Description of Artificial Sequence: Synthetic oligonucleotide
  Antisense strand to SEQ ID NO: 851178
uccagaaucagacagguuc

SEQ ID NO: 851180 - RNA, 19 nt, Artificial Sequence
  Description of Artificial Sequence: Synthetic oligonucleotide
  Sense strand starting at position 135 of SEQ ID NO: 588238
agagacagcugccuuucua

SEQ ID NO: 851181 - RNA, 19 nt, Artificial Sequence
  Description of Artificial Sequence: Synthetic oligonucleotide
  Antisense strand to SEQ ID NO: 851180
uagaaaggcagcugucucu

SEQ ID NO: 851182 - RNA, 19 nt, Artificial Sequence
  Description of Artificial Sequence: Synthetic oligonucleotide
  Sense strand starting at position 266 of SEQ ID NO: 588238
uuuggacuuggagauguuu

SEQ ID NO: 851183 - RNA, 19 nt, Artificial Sequence
  Description of Artificial Sequence: Synthetic oligonucleotide
  Antisense strand to SEQ ID NO: 851182
aaacaucuccaaguccaaa

SEQ ID NO: 851184 - RNA, 19 nt, Artificial Sequence
  Description of Artificial Sequence: Synthetic oligonucleotide
  Sense strand starting at position 351 of SEQ ID NO: 588238
caaguugggucuccucauu

SEQ ID NO: 851185 - RNA, 19 nt, Artificial Sequence
  Description of Artificial Sequence: Synthetic oligonucleotide
  Antisense strand to SEQ ID NO: 851184
aaugaggagacccaacuug

SEQ ID NO: 851186 - RNA, 19 nt, Artificial Sequence
  Description of Artificial Sequence: Synthetic oligonucleotide
  Sense strand starting at position 507 of SEQ ID NO: 588238
auacucuuccaggguauua

SEQ ID NO: 851187 - RNA, 19 nt, Artificial Sequence
  Description of Artificial Sequence: Synthetic oligonucleotide
  Antisense strand to SEQ ID NO: 851186
uaauacccuggaagaguau

SEQ ID NO: 851188 - RNA, 19 nt, Artificial Sequence
  Description of Artificial Sequence: Synthetic oligonucleotide
  Sense strand starting at position 518 of SEQ ID NO: 588238
ggguauuagacucagagcu

SEQ ID NO: 851189 - RNA, 19 nt, Artificial Sequence
  Description of Artificial Sequence: Synthetic oligonucleotide
  Antisense strand to SEQ ID NO: 851188
agcucugagucuaauaccc

SEQ ID NO: 851190 - RNA, 19 nt, Artificial Sequence
  Description of Artificial Sequence: Synthetic oligonucleotide
  Sense strand starting at position 525 of SEQ ID NO: 588238
agacucagagcuggauauu

SEQ ID NO: 851191 - RNA, 19 nt, Artificial Sequence
  Description of Artificial Sequence: Synthetic oligonucleotide
  Antisense strand to SEQ ID NO: 851190
aauauccagcucugagucu

SEQ ID NO: 851192 - RNA, 19 nt, Artificial Sequence
  Description of Artificial Sequence: Synthetic oligonucleotide
  Sense strand starting at position 689 of SEQ ID NO: 588238
gaguguuaagcuuagaacu

SEQ ID NO: 851193 - RNA, 19 nt, Artificial Sequence
  Description of Artificial Sequence: Synthetic oligonucleotide
  Antisense strand to SEQ ID NO: 851192
aguucuaagcuuaacacuc

SEQ ID NO: 851194 - RNA, 19 nt, Artificial Sequence
  Description of Artificial Sequence: Synthetic oligonucleotide
  Sense strand starting at position 752 of SEQ ID NO: 588238
cuuacugucucuccugauu

SEQ ID NO: 851195 - RNA, 19 nt, Artificial Sequence
  Description of Artificial Sequence: Synthetic oligonucleotide
  Antisense strand to SEQ ID NO: 851194
aaucaggagagacaguaag

SEQ ID NO: 851196 - RNA, 19 nt, Artificial Sequence
  Description of Artificial Sequence: Synthetic oligonucleotide
  Sense strand starting at position 1224 of SEQ ID NO: 588238
cugcuuuauuauuuggcua

SEQ ID NO: 851197 - RNA, 19 nt, Artificial Sequence
  Description of Artificial Sequence: Synthetic oligonucleotide
  Antisense strand to SEQ ID NO: 851196
uagccaaauaauaaagcag

SEQ ID NO: 851198 - RNA, 19 nt, Artificial Sequence
  Description of Artificial Sequence: Synthetic oligonucleotide
  Sense strand starting at position 1367 of SEQ ID NO: 588238
cugcguugagccaggugaa

SEQ ID NO: 851199 - RNA, 19 nt, Artificial Sequence
  Description of Artificial Sequence: Synthetic oligonucleotide
  Antisense strand to SEQ ID NO: 851198
uucaccuggcucaacgcag

SEQ ID NO: 851200 - RNA, 19 nt, Artificial Sequence
  Description of Artificial Sequence: Synthetic oligonucleotide
  Sense strand starting at position 1401 of SEQ ID NO: 588238
gguccaaagcuaugaccau

SEQ ID NO: 851201 - RNA, 19 nt, Artificial Sequence
  Description of Artificial Sequence: Synthetic oligonucleotide
  Antisense strand to SEQ ID NO: 851200
auggucauagcuuuggacc

SEQ ID NO: 851202 - RNA, 19 nt, Artificial Sequence
  Description of Artificial Sequence: Synthetic oligonucleotide
  Sense strand starting at position 1492 of SEQ ID NO: 588238
cugaguuggcaacagaauu

SEQ ID NO: 851203 - RNA, 19 nt, Artificial Sequence
  Description of Artificial Sequence: Synthetic oligonucleotide
  Antisense strand to SEQ ID NO: 851202
aauucuguugccaacucag

SEQ ID NO: 851204 - RNA, 19 nt, Artificial Sequence
  Description of Artificial Sequence: Synthetic oligonucleotide
  Sense strand starting at position 1500 of SEQ ID NO: 588238
gcaacagaauuagcaguua

SEQ ID NO: 851205 - RNA, 19 nt, Artificial Sequence
  Description of Artificial Sequence: Synthetic oligonucleotide
  Antisense strand to SEQ ID NO: 851204
uaacugcuaauucuguugc

SEQ ID NO: 851206 - RNA, 19 nt, Artificial Sequence
  Description of Artificial Sequence: Synthetic oligonucleotide
  Sense strand starting at position 1628 of SEQ ID NO: 588238
ugcaguuccaccuggauga

SEQ ID NO: 851207 - RNA, 19 nt, Artificial Sequence
  Description of Artificial Sequence: Synthetic oligonucleotide
  Antisense strand to SEQ ID NO: 851206
ucauccagguggaacugca

SEQ ID NO: 851208 - RNA, 19 nt, Artificial Sequence
  Description of Artificial Sequence: Synthetic oligonucleotide
  Sense strand starting at position 1641 of SEQ ID NO: 588238
ggaugaccuuccucaguag

SEQ ID NO: 851209 - RNA, 19 nt, Artificial Sequence
  Description of Artificial Sequence: Synthetic oligonucleotide
  Antisense strand to SEQ ID NO: 851208
cuacugaggaaggucaucc

SEQ ID NO: 851210 - RNA, 19 nt, Artificial Sequence
  Description of Artificial Sequence: Synthetic oligonucleotide
  Sense strand starting at position 1652 of SEQ ID NO: 588238
cucaguagcuugucugaga

SEQ ID NO: 851211 - RNA, 19 nt, Artificial Sequence
  Description of Artificial Sequence: Synthetic oligonucleotide
  Antisense strand to SEQ ID NO: 851210
ucucagacaagcuacugag

SEQ ID NO: 851212 - RNA, 19 nt, Artificial Sequence
  Description of Artificial Sequence: Synthetic oligonucleotide
  Sense strand starting at position 1742 of SEQ ID NO: 588238
auguguucagagggauccu

SEQ ID NO: 851213 - RNA, 19 nt, Artificial Sequence
  Description of Artificial Sequence: Synthetic oligonucleotide
  Antisense strand to SEQ ID NO: 851212
aggaucccucugaacacau

SEQ ID NO: 851214 - RNA, 19 nt, Artificial Sequence
  Description of Artificial Sequence: Synthetic oligonucleotide
  Sense strand starting at position 1797 of SEQ ID NO: 588238
guuggauuuccugggucuu

SEQ ID NO: 851215 - RNA, 19 nt, Artificial Sequence
  Description of Artificial Sequence: Synthetic oligonucleotide
  Antisense strand to SEQ ID NO: 851214
aagacccaggaaauccaac

SEQ ID NO: 851216 - RNA, 19 nt, Artificial Sequence
  Description of Artificial Sequence: Synthetic oligonucleotide
  Sense strand starting at position 2040 of SEQ ID NO: 588238
ggagauguacuguguaacc

SEQ ID NO: 851217 - RNA, 19 nt, Artificial Sequence
  Description of Artificial Sequence: Synthetic oligonucleotide
  Antisense strand to SEQ ID NO: 851216
gguuacacaguacaucucc

SEQ ID NO: 851218 - RNA, 19 nt, Artificial Sequence
  Description of Artificial Sequence: Synthetic oligonucleotide
  Sense strand starting at position 2049 of SEQ ID NO: 588238
cuguguaaccugugacacu

SEQ ID NO: 851219 - RNA, 19 nt, Artificial Sequence
  Description of Artificial Sequence: Synthetic oligonucleotide
  Antisense strand to SEQ ID NO: 851218
agugucacagguuacacag

SEQ ID NO: 851220 - RNA, 19 nt, Artificial Sequence
  Description of Artificial Sequence: Synthetic oligonucleotide
  Sense strand starting at position 2165 of SEQ ID NO: 588238
gaaggauuagugugugaug

SEQ ID NO: 851221 - RNA, 19 nt, Artificial Sequence
  Description of Artificial Sequence: Synthetic oligonucleotide
  Antisense strand to SEQ ID NO: 851220
caucacacacuaauccuuc

SEQ ID NO: 851222 - RNA, 19 nt, Artificial Sequence
  Description of Artificial Sequence: Synthetic oligonucleotide
  Sense strand starting at position 2166 of SEQ ID NO: 588238
aaggauuagugugugaugu

SEQ ID NO: 851223 - RNA, 19 nt, Artificial Sequence
  Description of Artificial Sequence: Synthetic oligonucleotide
  Antisense strand to SEQ ID NO: 851222
acaucacacacuaauccuu

SEQ ID NO: 851224 - RNA, 19 nt, Artificial Sequence
  Description of Artificial Sequence: Synthetic oligonucleotide
  Sense strand starting at position 2167 of SEQ ID NO: 588238
aggauuagugugugaugua

SEQ ID NO: 851225 - RNA, 19 nt, Artificial Sequence
  Description of Artificial Sequence: Synthetic oligonucleotide
  Antisense strand to SEQ ID NO: 851224
uacaucacacacuaauccu

SEQ ID NO: 851226 - RNA, 19 nt, Artificial Sequence
  Description of Artificial Sequence: Synthetic oligonucleotide
  Sense strand starting at position 2176 of SEQ ID NO: 588238
gugugauguagggacugau

SEQ ID NO: 851227 - RNA, 19 nt, Artificial Sequence
  Description of Artificial Sequence: Synthetic oligonucleotide
  Antisense strand to SEQ ID NO: 851226
aucagucccuacaucacac

SEQ ID NO: 851228 - RNA, 19 nt, Artificial Sequence
  Description of Artificial Sequence: Synthetic oligonucleotide
  Sense strand starting at position 2534 of SEQ ID NO: 588238
cugccugucuuaucagaag

SEQ ID NO: 851229 - RNA, 19 nt, Artificial Sequence
  Description of Artificial Sequence: Synthetic oligonucleotide
  Antisense strand to SEQ ID NO: 851228
cuucugauaagacaggcag

SEQ ID NO: 851230 - RNA, 19 nt, Artificial Sequence
  Description of Artificial Sequence: Synthetic oligonucleotide
  Sense strand starting at position 2653 of SEQ ID NO: 588238
gguaauauuaaggguguuu

SEQ ID NO: 851231 - RNA, 19 nt, Artificial Sequence
  Description of Artificial Sequence: Synthetic oligonucleotide
  Antisense strand to SEQ ID NO: 851230
aaacacccuuaauauuacc

SEQ ID NO: 851232 - RNA, 19 nt, Artificial Sequence
  Description of Artificial Sequence: Synthetic oligonucleotide
  Sense strand starting at position 2885 of SEQ ID NO: 588238
gucccugacuuguugaaga

SEQ ID NO: 851233 - RNA, 19 nt, Artificial Sequence
  Description of Artificial Sequence: Synthetic oligonucleotide
  Antisense strand to SEQ ID NO: 851232
ucuucaacaagucagggac

SEQ ID NO: 851234 - RNA, 19 nt, Artificial Sequence
  Description of Artificial Sequence: Synthetic oligonucleotide
  Sense strand starting at position 3081 of SEQ ID NO: 588238
gcugucacuccguucuuua

SEQ ID NO: 851235 - RNA, 19 nt, Artificial Sequence
  Description of Artificial Sequence: Synthetic oligonucleotide
  Antisense strand to SEQ ID NO: 851234
uaaagaacggagugacagc

SEQ ID NO: 851236 - RNA, 19 nt, Artificial Sequence
  Description of Artificial Sequence: Synthetic oligonucleotide
  Sense strand starting at position 3139 of SEQ ID NO: 588238
caguccuuuccaggaagcu

SEQ ID NO: 851237 - RNA, 19 nt, Artificial Sequence
  Description of Artificial Sequence: Synthetic oligonucleotide
  Antisense strand to SEQ ID NO: 851236
agcuuccuggaaaggacug

SEQ ID NO: 851238 - RNA, 19 nt, Artificial Sequence
  Description of Artificial Sequence: Synthetic oligonucleotide
  Sense strand starting at position 3235 of SEQ ID NO: 588238
gggaucucaaucugcaagu

SEQ ID NO: 851239 - RNA, 19 nt, Artificial Sequence
  Description of Artificial Sequence: Synthetic oligonucleotide
  Antisense strand to SEQ ID NO: 851238
acuugcagauugagauccc

SEQ ID NO: 851240 - RNA, 19 nt, Artificial Sequence
  Description of Artificial Sequence: Synthetic oligonucleotide
  Sense strand starting at position 3336 of SEQ ID NO: 588238
agccacucucuauggagua

SEQ ID NO: 851241 - RNA, 19 nt, Artificial Sequence
  Description of Artificial Sequence: Synthetic oligonucleotide
  Antisense strand to SEQ ID NO: 851240
uacuccauagagaguggcu

SEQ ID NO: 851242 - RNA, 19 nt, Artificial Sequence
  Description of Artificial Sequence: Synthetic oligonucleotide
  Sense strand starting at position 3354 of SEQ ID NO: 588238
aggcuuucucuugggauag

SEQ ID NO: 851243 - RNA, 19 nt, Artificial Sequence
  Description of Artificial Sequence: Synthetic oligonucleotide
  Antisense strand to SEQ ID NO: 851242
cuaucccaagagaaagccu

SEQ ID NO: 851244 - RNA, 19 nt, Artificial Sequence
  Description of Artificial Sequence: Synthetic oligonucleotide
  Sense strand starting at position 3408 of SEQ ID NO: 588238
ggguguagccacugaggaa

SEQ ID NO: 851245 - RNA, 19 nt, Artificial Sequence
  Description of Artificial Sequence: Synthetic oligonucleotide
  Antisense strand to SEQ ID NO: 851244
uuccucaguggcuacaccc

SEQ ID NO: 851246 - RNA, 19 nt, Artificial Sequence
  Description of Artificial Sequence: Synthetic oligonucleotide
  Sense strand starting at position 3434 of SEQ ID NO: 588238
ggaaaucucccagguuccu

SEQ ID NO: 851247 - RNA, 19 nt, Artificial Sequence
  Description of Artificial Sequence: Synthetic oligonucleotide
  Antisense strand to SEQ ID NO: 851246
aggaaccugggagauuucc

SEQ ID NO: 851248 - RNA, 19 nt, Artificial Sequence
  Description of Artificial Sequence: Synthetic oligonucleotide
  Sense strand starting at position 3480 of SEQ ID NO: 588238
cuuggcugugcgcuacaua

SEQ ID NO: 851249 - RNA, 19 nt, Artificial Sequence
  Description of Artificial Sequence: Synthetic oligonucleotide
  Antisense strand to SEQ ID NO: 851248
uauguagcgcacagccaag

SEQ ID NO: 851250 - RNA, 19 nt, Artificial Sequence
  Description of Artificial Sequence: Synthetic oligonucleotide
  Sense strand starting at position 3645 of SEQ ID NO: 588238
ugggccaucucuuucuuua

SEQ ID NO: 851251 - RNA, 19 nt, Artificial Sequence
  Description of Artificial Sequence: Synthetic oligonucleotide
  Antisense strand to SEQ ID NO: 851250
uaaagaaagagauggccca

SEQ ID NO: 851252 - RNA, 19 nt, Artificial Sequence
  Description of Artificial Sequence: Synthetic oligonucleotide
  Sense strand starting at position 3694 of SEQ ID NO: 588238
ggguccagucccuaacuga

SEQ ID NO: 851253 - RNA, 19 nt, Artificial Sequence
  Description of Artificial Sequence: Synthetic oligonucleotide
  Antisense strand to SEQ ID NO: 851252
ucaguuagggacuggaccc

SEQ ID NO: 851254 - RNA, 19 nt, Artificial Sequence
  Description of Artificial Sequence: Synthetic oligonucleotide
  Sense strand starting at position 3857 of SEQ ID NO: 588238
ugccaaggaucucuaaacu

SEQ ID NO: 851255 - RNA, 19 nt, Artificial Sequence
  Description of Artificial Sequence: Synthetic oligonucleotide
  Antisense strand to SEQ ID NO: 851254
aguuuagagauccuuggca

SEQ ID NO: 851256 - RNA, 19 nt, Artificial Sequence
  Description of Artificial Sequence: Synthetic oligonucleotide
  Sense strand starting at position 47 of SEQ ID NO: 588239
ggaagaagugauggcucau

SEQ ID NO: 851257 - RNA, 19 nt, Artificial Sequence
  Description of Artificial Sequence: Synthetic oligonucleotide
  Antisense strand to SEQ ID NO: 851256
augagccaucacuucuucc

SEQ ID NO: 851258 - RNA, 19 nt, Artificial Sequence
  Description of Artificial Sequence: Synthetic oligonucleotide
  Sense strand starting at position 135 of SEQ ID NO: 588239
cuaucuuccaaggguagga

SEQ ID NO: 851259 - RNA, 19 nt, Artificial Sequence
  Description of Artificial Sequence: Synthetic oligonucleotide
  Antisense strand to SEQ ID NO: 851258
uccuacccuuggaagauag

SEQ ID NO: 851260 - RNA, 19 nt, Artificial Sequence
  Description of Artificial Sequence: Synthetic oligonucleotide
  Sense strand starting at position 817 of SEQ ID NO: 588239
guauuucugugacuuccuu

SEQ ID NO: 851261 - RNA, 19 nt, Artificial Sequence
  Description of Artificial Sequence: Synthetic oligonucleotide
  Antisense strand to SEQ ID NO: 851260
aaggaagucacagaaauac

SEQ ID NO: 851262 - RNA, 19 nt, Artificial Sequence
  Description of Artificial Sequence: Synthetic oligonucleotide
  Sense strand starting at position 821 of SEQ ID NO: 588239
uucugugacuuccuugaag

SEQ ID NO: 851263 - RNA, 19 nt, Artificial Sequence
  Description of Artificial Sequence: Synthetic oligonucleotide
  Antisense strand to SEQ ID NO: 851262
cuucaaggaagucacagaa

SEQ ID NO: 851264 - RNA, 19 nt, Artificial Sequence
  Description of Artificial Sequence: Synthetic oligonucleotide
  Sense strand starting at position 823 of SEQ ID NO: 588239
cugugacuuccuugaagac

SEQ ID NO: 851265 - RNA, 19 nt, Artificial Sequence
  Description of Artificial Sequence: Synthetic oligonucleotide
  Antisense strand to SEQ ID NO: 851264
gucuucaaggaagucacag

SEQ ID NO: 851266 - RNA, 19 nt, Artificial Sequence
  Description of Artificial Sequence: Synthetic oligonucleotide
  Sense strand starting at position 963 of SEQ ID NO: 588239
acauccuuucuggaaagca

SEQ ID NO: 851267 - RNA, 19 nt, Artificial Sequence
  Description of Artificial Sequence: Synthetic oligonucleotide
  Antisense strand to SEQ ID NO: 851266
ugcuuuccagaaaggaugu

SEQ ID NO: 851268 - RNA, 19 nt, Artificial Sequence
  Description of Artificial Sequence: Synthetic oligonucleotide
  Sense strand starting at position 1274 of SEQ ID NO: 588239
gagguagaacaaugguacu

SEQ ID NO: 851269 - RNA, 19 nt, Artificial Sequence
  Description of Artificial Sequence: Synthetic oligonucleotide
  Antisense strand to SEQ ID NO: 851268
aguaccauuguucuaccuc

SEQ ID NO: 851270 - RNA, 19 nt, Artificial Sequence
  Description of Artificial Sequence: Synthetic oligonucleotide
  Sense strand starting at position 1344 of SEQ ID NO: 588239
aggucaaugugucuaagaa

SEQ ID NO: 851271 - RNA, 19 nt, Artificial Sequence
  Description of Artificial Sequence: Synthetic oligonucleotide
  Antisense strand to SEQ ID NO: 851270
uucuuagacacauugaccu

SEQ ID NO: 851272 - RNA, 19 nt, Artificial Sequence
  Description of Artificial Sequence: Synthetic oligonucleotide
  Sense strand starting at position 1345 of SEQ ID NO: 588239
ggucaaugugucuaagaaa

SEQ ID NO: 851273 - RNA, 19 nt, Artificial Sequence
  Description of Artificial Sequence: Synthetic oligonucleotide
  Antisense strand to SEQ ID NO: 851272
uuucuuagacacauugacc

SEQ ID NO: 851274 - RNA, 19 nt, Artificial Sequence
  Description of Artificial Sequence: Synthetic oligonucleotide
  Sense strand starting at position 1416 of SEQ ID NO: 588239
uccuuuggguucucagaau

SEQ ID NO: 851275 - RNA, 19 nt, Artificial Sequence
  Description of Artificial Sequence: Synthetic oligonucleotide
  Antisense strand to SEQ ID NO: 851274
auucugagaacccaaagga

SEQ ID NO: 851276 - RNA, 19 nt, Artificial Sequence
  Description of Artificial Sequence: Synthetic oligonucleotide
  Sense strand starting at position 1588 of SEQ ID NO: 588239
gcaucagagcuauauucug

SEQ ID NO: 851277 - RNA, 19 nt, Artificial Sequence
  Description of Artificial Sequence: Synthetic oligonucleotide
  Antisense strand to SEQ ID NO: 851276
cagaauauagcucugaugc

SEQ ID NO: 851278 - RNA, 19 nt, Artificial Sequence
  Description of Artificial Sequence: Synthetic oligonucleotide
  Sense strand starting at position 1609 of SEQ ID NO: 588239
cacacagucgcauaagaau

SEQ ID NO: 851279 - RNA, 19 nt, Artificial Sequence
  Description of Artificial Sequence: Synthetic oligonucleotide
  Antisense strand to SEQ ID NO: 851278
auucuuaugcgacugugug

SEQ ID NO: 851280 - RNA, 19 nt, Artificial Sequence
  Description of Artificial Sequence: Synthetic oligonucleotide
  Sense strand starting at position 1618 of SEQ ID NO: 588239
gcauaagaaugacuaccua

SEQ ID NO: 851281 - RNA, 19 nt, Artificial Sequence
  Description of Artificial Sequence: Synthetic oligonucleotide
  Antisense strand to SEQ ID NO: 851280
uagguagucauucuuaugc

SEQ ID NO: 851282 - RNA, 19 nt, Artificial Sequence
  Description of Artificial Sequence: Synthetic oligonucleotide
  Sense strand starting at position 2124 of SEQ ID NO: 588239
guguccuaggaauaaagcu

SEQ ID NO: 851283 - RNA, 19 nt, Artificial Sequence
  Description of Artificial Sequence: Synthetic oligonucleotide
  Antisense strand to SEQ ID NO: 851282
agcuuuauuccuaggacac

SEQ ID NO: 851284 - RNA, 19 nt, Artificial Sequence
  Description of Artificial Sequence: Synthetic oligonucleotide
  Sense strand starting at position 2132 of SEQ ID NO: 588239
ggaauaaagcuguguauag

SEQ ID NO: 851285 - RNA, 19 nt, Artificial Sequence
  Description of Artificial Sequence: Synthetic oligonucleotide
  Antisense strand to SEQ ID NO: 851284
cuauacacagcuuuauucc

SEQ ID NO: 851286 - RNA, 19 nt, Artificial Sequence
  Description of Artificial Sequence: Synthetic oligonucleotide
  Sense strand starting at position 2133 of SEQ ID NO: 588239
gaauaaagcuguguauaga

SEQ ID NO: 851287 - RNA, 19 nt, Artificial Sequence
  Description of Artificial Sequence: Synthetic oligonucleotide
  Antisense strand to SEQ ID NO: 851286
ucuauacacagcuuuauuc

SEQ ID NO: 851288 - RNA, 19 nt, Artificial Sequence
  Description of Artificial Sequence: Synthetic oligonucleotide
  Sense strand starting at position 2134 of SEQ ID NO: 588239
aauaaagcuguguauagaa

SEQ ID NO: 851289 - RNA, 19 nt, Artificial Sequence
  Description of Artificial Sequence: Synthetic oligonucleotide
  Antisense strand to SEQ ID NO: 851288
uucuauacacagcuuuauu

SEQ ID NO: 851290 - RNA, 19 nt, Artificial Sequence
  Description of Artificial Sequence: Synthetic oligonucleotide
  Sense strand starting at position 2136 of SEQ ID NO: 588239
uaaagcuguguauagaaau

SEQ ID NO: 851291 - RNA, 19 nt, Artificial Sequence
  Description of Artificial Sequence: Synthetic oligonucleotide
  Antisense strand to SEQ ID NO: 851290
auuucuauacacagcuuua

SEQ ID NO: 851292 - RNA, 19 nt, Artificial Sequence
  Description of Artificial Sequence: Synthetic oligonucleotide
  Sense strand starting at position 2497 of SEQ ID NO: 588239
uguguauggguguauaaua

SEQ ID NO: 851293 - RNA, 19 nt, Artificial Sequence
  Description of Artificial Sequence: Synthetic oligonucleotide
  Antisense strand to SEQ ID NO: 851292
uauuauacacccauacaca

SEQ ID NO: 851294 - RNA, 19 nt, Artificial Sequence
  Description of Artificial Sequence: Synthetic oligonucleotide
  Sense strand starting at position 2540 of SEQ ID NO: 588239
uucugugacuuccucaaag

SEQ ID NO: 851295 - RNA, 19 nt, Artificial Sequence
  Description of Artificial Sequence: Synthetic oligonucleotide
  Antisense strand to SEQ ID NO: 851294
cuuugaggaagucacagaa

SEQ ID NO: 851296 - RNA, 19 nt, Artificial Sequence
  Description of Artificial Sequence: Synthetic oligonucleotide
  Sense strand starting at position 2542 of SEQ ID NO: 588239
cugugacuuccucaaaguu

SEQ ID NO: 851297 - RNA, 19 nt, Artificial Sequence
  Description of Artificial Sequence: Synthetic oligonucleotide
  Antisense strand to SEQ ID NO: 851296
aacuuugaggaagucacag

SEQ ID NO: 851298 - RNA, 19 nt, Artificial Sequence
  Description of Artificial Sequence: Synthetic oligonucleotide
  Sense strand starting at position 2555 of SEQ ID NO: 588239
aaaguuccucgacauaaug

SEQ ID NO: 851299 - RNA, 19 nt, Artificial Sequence
  Description of Artificial Sequence: Synthetic oligonucleotide
  Antisense strand to SEQ ID NO: 851298
cauuaugucgaggaacuuu

SEQ ID NO: 851300 - RNA, 19 nt, Artificial Sequence
  Description of Artificial Sequence: Synthetic oligonucleotide
  Sense strand starting at position 2775 of SEQ ID NO: 588239
aaguauuaucccgcgcuga

SEQ ID NO: 851301 - RNA, 19 nt, Artificial Sequence
  Description of Artificial Sequence: Synthetic oligonucleotide
  Antisense strand to SEQ ID NO: 851300
ucagcgcgggauaauacuu

SEQ ID NO: 851302 - RNA, 19 nt, Artificial Sequence
  Description of Artificial Sequence: Synthetic oligonucleotide
  Sense strand starting at position 2777 of SEQ ID NO: 588239
guauuaucccgcgcugaac

SEQ ID NO: 851303 - RNA, 19 nt, Artificial Sequence
  Description of Artificial Sequence: Synthetic oligonucleotide
  Antisense strand to SEQ ID NO: 851302
guucagcgcgggauaauac

SEQ ID NO: 851304 - RNA, 19 nt, Artificial Sequence
  Description of Artificial Sequence: Synthetic oligonucleotide
  Sense strand starting at position 3009 of SEQ ID NO: 588239
ccuugcauugguuaugaca

SEQ ID NO: 851305 - RNA, 19 nt, Artificial Sequence
  Description of Artificial Sequence: Synthetic oligonucleotide
  Antisense strand to SEQ ID NO: 851304
ugucauaaccaaugcaagg

SEQ ID NO: 851306 - RNA, 19 nt, Artificial Sequence
  Description of Artificial Sequence: Synthetic oligonucleotide
  Sense strand starting at position 3050 of SEQ ID NO: 588239
ucacauucugauuguauca

SEQ ID NO: 851307 - RNA, 19 nt, Artificial Sequence
  Description of Artificial Sequence: Synthetic oligonucleotide
  Antisense strand to SEQ ID NO: 851306
ugauacaaucagaauguga

SEQ ID NO: 851308 - RNA, 19 nt, Artificial Sequence
  Description of Artificial Sequence: Synthetic oligonucleotide
  Sense strand starting at position 3251 of SEQ ID NO: 588239
uugggugacuucccaaagu

SEQ ID NO: 851309 - RNA, 19 nt, Artificial Sequence
  Description of Artificial Sequence: Synthetic oligonucleotide
  Antisense strand to SEQ ID NO: 851308
acuuugggaagucacccaa

SEQ ID NO: 851310 - RNA, 19 nt, Artificial Sequence
  Description of Artificial Sequence: Synthetic oligonucleotide
  Sense strand starting at position 3278 of SEQ ID NO: 588239
uugggugacuucccaacuu

SEQ ID NO: 851311 - RNA, 19 nt, Artificial Sequence
  Description of Artificial Sequence: Synthetic oligonucleotide
  Antisense strand to SEQ ID NO: 851310
aaguugggaagucacccaa

SEQ ID NO: 851312 - RNA, 19 nt, Artificial Sequence
  Description of Artificial Sequence: Synthetic oligonucleotide
  Sense strand starting at position 3584 of SEQ ID NO: 588239
cuaacuagcugaguuaacu

SEQ ID NO: 851313 - RNA, 19 nt, Artificial Sequence
  Description of Artificial Sequence: Synthetic oligonucleotide
  Antisense strand to SEQ ID NO: 851312
aguuaacucagcuaguuag

SEQ ID NO: 851314 - RNA, 19 nt, Artificial Sequence
  Description of Artificial Sequence: Synthetic oligonucleotide
  Sense strand starting at position 3594 of SEQ ID NO: 588239
gaguuaacuugggcaaaua

SEQ ID NO: 851315 - RNA, 19 nt, Artificial Sequence
  Description of Artificial Sequence: Synthetic oligonucleotide
  Antisense strand to SEQ ID NO: 851314
uauuugcccaaguuaacuc

SEQ ID NO: 851316 - RNA, 19 nt, Artificial Sequence
  Description of Artificial Sequence: Synthetic oligonucleotide
  Sense strand starting at position 3646 of SEQ ID NO: 588239
ccuagauggccuggaugau

SEQ ID NO: 851317 - RNA, 19 nt, Artificial Sequence
  Description of Artificial Sequence: Synthetic oligonucleotide
  Antisense strand to SEQ ID NO: 851316
aucauccaggccaucuagg

SEQ ID NO: 851318 - RNA, 19 nt, Artificial Sequence
  Description of Artificial Sequence: Synthetic oligonucleotide
  Sense strand starting at position 3652 of SEQ ID NO: 588239
uggccuggaugaucuauga

SEQ ID NO: 851319 - RNA, 19 nt, Artificial Sequence
  Description of Artificial Sequence: Synthetic oligonucleotide
  Antisense strand to SEQ ID NO: 851318
ucauagaucauccaggcca

SEQ ID NO: 851320 - RNA, 19 nt, Artificial Sequence
  Description of Artificial Sequence: Synthetic oligonucleotide
  Sense strand starting at position 3736 of SEQ ID NO: 588239
cuaaaugaucaaugaggca

SEQ ID NO: 851321 - RNA, 19 nt, Artificial Sequence
  Description of Artificial Sequence: Synthetic oligonucleotide
  Antisense strand to SEQ ID NO: 851320
ugccucauugaucauuuag

SEQ ID NO: 851322 - RNA, 19 nt, Artificial Sequence
  Description of Artificial Sequence: Synthetic oligonucleotide
  Sense strand starting at position 3775 of SEQ ID NO: 588239
aaaguugcugaugggaauu

SEQ ID NO: 851323 - RNA, 19 nt, Artificial Sequence
  Description of Artificial Sequence: Synthetic oligonucleotide
  Antisense strand to SEQ ID NO: 851322
aauucccaucagcaacuuu

SEQ ID NO: 851324 - RNA, 19 nt, Artificial Sequence
  Description of Artificial Sequence: Synthetic oligonucleotide
  Sense strand starting at position 3794 of SEQ ID NO: 588239
gaggguauuugcucagcuu

SEQ ID NO: 851325 - RNA, 19 nt, Artificial Sequence
  Description of Artificial Sequence: Synthetic oligonucleotide
  Antisense strand to SEQ ID NO: 851324
aagcugagcaaauacccuc

SEQ ID NO: 851326 - RNA, 19 nt, Artificial Sequence
  Description of Artificial Sequence: Synthetic oligonucleotide
  Sense strand starting at position 3819 of SEQ ID NO: 588239
cagugauuugcguauuagu

SEQ ID NO: 851327 - RNA, 19 nt, Artificial Sequence
  Description of Artificial Sequence: Synthetic oligonucleotide
  Antisense strand to SEQ ID NO: 851326
acuaauacgcaaaucacug

SEQ ID NO: 851328 - RNA, 19 nt, Artificial Sequence
  Description of Artificial Sequence: Synthetic oligonucleotide
  Sense strand starting at position 3830 of SEQ ID NO: 588239
guauuaguaaugugaggau

SEQ ID NO: 851329 - RNA, 19 nt, Artificial Sequence
  Description of Artificial Sequence: Synthetic oligonucleotide
  Antisense strand to SEQ ID NO: 851328
auccucacauuacuaauac

SEQ ID NO: 851330 - RNA, 19 nt, Artificial Sequence
  Description of Artificial Sequence: Synthetic oligonucleotide
  Sense strand starting at position 3834 of SEQ ID NO: 588239
uaguaaugugaggauucgu

SEQ ID NO: 851331 - RNA, 19 nt, Artificial Sequence
  Description of Artificial Sequence: Synthetic oligonucleotide
  Antisense strand to SEQ ID NO: 851330
acgaauccucacauuacua

SEQ ID NO: 851332 - RNA, 19 nt, Artificial Sequence
  Description of Artificial Sequence: Synthetic oligonucleotide
  Sense strand starting at position 3912 of SEQ ID NO: 588239
ugaucaacuacccggagau

SEQ ID NO: 851333 - RNA, 19 nt, Artificial Sequence
  Description of Artificial Sequence: Synthetic oligonucleotide
  Antisense strand to SEQ ID NO: 851332
aucuccggguaguugauca

SEQ ID NO: 851334 - RNA, 19 nt, Artificial Sequence
  Description of Artificial Sequence: Synthetic oligonucleotide
  Sense strand starting at position 3913 of SEQ ID NO: 588239
gaucaacuacccggagauu

SEQ ID NO: 851335 - RNA, 19 nt, Artificial Sequence
  Description of Artificial Sequence: Synthetic oligonucleotide
  Antisense strand to SEQ ID NO: 851334
aaucuccggguaguugauc

SEQ ID NO: 851336 - RNA, 19 nt, Artificial Sequence
  Description of Artificial Sequence: Synthetic oligonucleotide
  Sense strand starting at position 70 of SEQ ID NO: 588240
ggugguagugacuaugauc

SEQ ID NO: 851337 - RNA, 19 nt, Artificial Sequence
  Description of Artificial Sequence: Synthetic oligonucleotide
  Antisense strand to SEQ ID NO: 851336
gaucauagucacuaccacc

SEQ ID NO: 851338 - RNA, 19 nt, Artificial Sequence
  Description of Artificial Sequence: Synthetic oligonucleotide
  Sense strand starting at position 78 of SEQ ID NO: 588240
ugacuaugaucccugcuga

SEQ ID NO: 851339 - RNA, 19 nt, Artificial Sequence
  Description of Artificial Sequence: Synthetic oligonucleotide
  Antisense strand to SEQ ID NO: 851338
ucagcagggaucauaguca

SEQ ID NO: 851340 - RNA, 19 nt, Artificial Sequence
  Description of Artificial Sequence: Synthetic oligonucleotide
  Sense strand starting at position 79 of SEQ ID NO: 588240
gacuaugaucccugcugag

SEQ ID NO: 851341 - RNA, 19 nt, Artificial Sequence
  Description of Artificial Sequence: Synthetic oligonucleotide
  Antisense strand to SEQ ID NO: 851340
cucagcagggaucauaguc

SEQ ID NO: 851342 - RNA, 19 nt, Artificial Sequence
  Description of Artificial Sequence: Synthetic oligonucleotide
  Sense strand starting at position 125 of SEQ ID NO: 588240
gacgaaagucguucggugu

SEQ ID NO: 851343 - RNA, 19 nt, Artificial Sequence
  Description of Artificial Sequence: Synthetic oligonucleotide
  Antisense strand to SEQ ID NO: 851342
acaccgaacgacuuucguc

SEQ ID NO: 851344 - RNA, 19 nt, Artificial Sequence
  Description of Artificial Sequence: Synthetic oligonucleotide
  Sense strand starting at position 438 of SEQ ID NO: 588240
gggagaggguguuccagaa

SEQ ID NO: 851345 - RNA, 19 nt, Artificial Sequence
  Description of Artificial Sequence: Synthetic oligonucleotide
  Antisense strand to SEQ ID NO: 851344
uucuggaacacccucuccc

SEQ ID NO: 851346 - RNA, 19 nt, Artificial Sequence
  Description of Artificial Sequence: Synthetic oligonucleotide
  Sense strand starting at position 478 of SEQ ID NO: 588240
gggcguuaccugggagaag

SEQ ID NO: 851347 - RNA, 19 nt, Artificial Sequence
  Description of Artificial Sequence: Synthetic oligonucleotide
  Antisense strand to SEQ ID NO: 851346
cuucucccagguaacgccc

SEQ ID NO: 851348 - RNA, 19 nt, Artificial Sequence
  Description of Artificial Sequence: Synthetic oligonucleotide
  Sense strand starting at position 643 of SEQ ID NO: 588240
cggguuuaucccggaagga

SEQ ID NO: 851349 - RNA, 19 nt, Artificial Sequence
  Description of Artificial Sequence: Synthetic oligonucleotide
  Antisense strand to SEQ ID NO: 851348
uccuuccgggauaaacccg

SEQ ID NO: 851350 - RNA, 19 nt, Artificial Sequence
  Description of Artificial Sequence: Synthetic oligonucleotide
  Sense strand starting at position 829 of SEQ ID NO: 588240
gggagcauccagugugaga

SEQ ID NO: 851351 - RNA, 19 nt, Artificial Sequence
  Description of Artificial Sequence: Synthetic oligonucleotide
  Antisense strand to SEQ ID NO: 851350
ucucacacuggaugcuccc

SEQ ID NO: 851352 - RNA, 19 nt, Artificial Sequence
  Description of Artificial Sequence: Synthetic oligonucleotide
  Sense strand starting at position 1058 of SEQ ID NO: 588240
ccuuuaucguuuccucaga

SEQ ID NO: 851353 - RNA, 19 nt, Artificial Sequence
  Description of Artificial Sequence: Synthetic oligonucleotide
  Antisense strand to SEQ ID NO: 851352
ucugaggaaacgauaaagg

SEQ ID NO: 851354 - RNA, 19 nt, Artificial Sequence
  Description of Artificial Sequence: Synthetic oligonucleotide
  Sense strand starting at position 1158 of SEQ ID NO: 588240
cccguuucccauuagaacu

SEQ ID NO: 851355 - RNA, 19 nt, Artificial Sequence
  Description of Artificial Sequence: Synthetic oligonucleotide
  Antisense strand to SEQ ID NO: 851354
aguucuaaugggaaacggg

SEQ ID NO: 851356 - RNA, 19 nt, Artificial Sequence
  Description of Artificial Sequence: Synthetic oligonucleotide
  Sense strand starting at position 1244 of SEQ ID NO: 588240
ggaggaaucuuucuuccuc

SEQ ID NO: 851357 - RNA, 19 nt, Artificial Sequence
  Description of Artificial Sequence: Synthetic oligonucleotide
  Antisense strand to SEQ ID NO: 851356
gaggaagaaagauuccucc

SEQ ID NO: 851358 - RNA, 19 nt, Artificial Sequence
  Description of Artificial Sequence: Synthetic oligonucleotide
  Sense strand starting at position 1328 of SEQ ID NO: 588240
aggguauugugcucucaag

SEQ ID NO: 851359 - RNA, 19 nt, Artificial Sequence
  Description of Artificial Sequence: Synthetic oligonucleotide
  Antisense strand to SEQ ID NO: 851358
cuugagagcacaauacccu

SEQ ID NO: 851360 - RNA, 19 nt, Artificial Sequence
  Description of Artificial Sequence: Synthetic oligonucleotide
  Sense strand starting at position 1334 of SEQ ID NO: 588240
uugugcucucaagaauacu

SEQ ID NO: 851361 - RNA, 19 nt, Artificial Sequence
  Description of Artificial Sequence: Synthetic oligonucleotide
  Antisense strand to SEQ ID NO: 851360
aguauucuugagagcacaa

SEQ ID NO: 851362 - RNA, 19 nt, Artificial Sequence
  Description of Artificial Sequence: Synthetic oligonucleotide
  Sense strand starting at position 1651 of SEQ ID NO: 588240
aacauucucguaggugauu

SEQ ID NO: 851363 - RNA, 19 nt, Artificial Sequence
  Description of Artificial Sequence: Synthetic oligonucleotide
  Antisense strand to SEQ ID NO: 851362
aaucaccuacgagaauguu

SEQ ID NO: 851364 - RNA, 19 nt, Artificial Sequence
  Description of Artificial Sequence: Synthetic oligonucleotide
  Sense strand starting at position 1652 of SEQ ID NO: 588240
acauucucguaggugauuu

SEQ ID NO: 851365 - RNA, 19 nt, Artificial Sequence
  Description of Artificial Sequence: Synthetic oligonucleotide
  Antisense strand to SEQ ID NO: 851364
aaaucaccuacgagaaugu

SEQ ID NO: 851366 - RNA, 19 nt, Artificial Sequence
  Description of Artificial Sequence: Synthetic oligonucleotide
  Sense strand starting at position 1798 of SEQ ID NO: 588240
guccuaaccggcuggagau

SEQ ID NO: 851367 - RNA, 19 nt, Artificial Sequence
  Description of Artificial Sequence: Synthetic oligonucleotide
  Antisense strand to SEQ ID NO: 851366
aucuccagccgguuaggac

SEQ ID NO: 851368 - RNA, 19 nt, Artificial Sequence
  Description of Artificial Sequence: Synthetic oligonucleotide
  Sense strand starting at position 1845 of SEQ ID NO: 588240
cucagaucugcauagguga

SEQ ID NO: 851369 - RNA, 19 nt, Artificial Sequence
  Description of Artificial Sequence: Synthetic oligonucleotide
  Antisense strand to SEQ ID NO: 851368
ucaccuaugcagaucugag

SEQ ID NO: 851370 - RNA, 19 nt, Artificial Sequence
  Description of Artificial Sequence: Synthetic oligonucleotide
  Sense strand starting at position 1940 of SEQ ID NO: 588240
cgucucuguccguuuacaa

SEQ ID NO: 851371 - RNA, 19 nt, Artificial Sequence
  Description of Artificial Sequence: Synthetic oligonucleotide
  Antisense strand to SEQ ID NO: 851370
uuguaaacggacagagacg

SEQ ID NO: 851372 - RNA, 19 nt, Artificial Sequence
  Description of Artificial Sequence: Synthetic oligonucleotide
  Sense strand starting at position 1994 of SEQ ID NO: 588240
agcaauuggcccugugacu

SEQ ID NO: 851373 - RNA, 19 nt, Artificial Sequence
  Description of Artificial Sequence: Synthetic oligonucleotide
  Antisense strand to SEQ ID NO: 851372
agucacagggccaauugcu

SEQ ID NO: 851374 - RNA, 19 nt, Artificial Sequence
  Description of Artificial Sequence: Synthetic oligonucleotide
  Sense strand starting at position 2167 of SEQ ID NO: 588240
gugcuuccucuccaugcau

SEQ ID NO: 851375 - RNA, 19 nt, Artificial Sequence
  Description of Artificial Sequence: Synthetic oligonucleotide
  Antisense strand to SEQ ID NO: 851374
augcauggagaggaagcac

SEQ ID NO: 851376 - RNA, 19 nt, Artificial Sequence
  Description of Artificial Sequence: Synthetic oligonucleotide
  Sense strand starting at position 2229 of SEQ ID NO: 588240
cugguuaucugcccugauc

SEQ ID NO: 851377 - RNA, 19 nt, Artificial Sequence
  Description of Artificial Sequence: Synthetic oligonucleotide
  Antisense strand to SEQ ID NO: 851376
gaucagggcagauaaccag

SEQ ID NO: 851378 - RNA, 19 nt, Artificial Sequence
  Description of Artificial Sequence: Synthetic oligonucleotide
  Sense strand starting at position 2231 of SEQ ID NO: 588240
gguuaucugcccugaucug

SEQ ID NO: 851379 - RNA, 19 nt, Artificial Sequence
  Description of Artificial Sequence: Synthetic oligonucleotide
  Antisense strand to SEQ ID NO: 851378
cagaucagggcagauaacc

SEQ ID NO: 851380 - RNA, 19 nt, Artificial Sequence
  Description of Artificial Sequence: Synthetic oligonucleotide
  Sense strand starting at position 2551 of SEQ ID NO: 588240
gggaguugcagagggcuua

SEQ ID NO: 851381 - RNA, 19 nt, Artificial Sequence
  Description of Artificial Sequence: Synthetic oligonucleotide
  Antisense strand to SEQ ID NO: 851380
uaagcccucugcaacuccc

SEQ ID NO: 851382 - RNA, 19 nt, Artificial Sequence
  Description of Artificial Sequence: Synthetic oligonucleotide
  Sense strand starting at position 2578 of SEQ ID NO: 588240
gcagcuuccuaggugaagu

SEQ ID NO: 851383 - RNA, 19 nt, Artificial Sequence
  Description of Artificial Sequence: Synthetic oligonucleotide
  Antisense strand to SEQ ID NO: 851382
acuucaccuaggaagcugc

SEQ ID NO: 851384 - RNA, 19 nt, Artificial Sequence
  Description of Artificial Sequence: Synthetic oligonucleotide
  Sense strand starting at position 2878 of SEQ ID NO: 588240
gcccaaaggugcucccuaa

SEQ ID NO: 851385 - RNA, 19 nt, Artificial Sequence
  Description of Artificial Sequence: Synthetic oligonucleotide
  Antisense strand to SEQ ID NO: 851384
uuagggagcaccuuugggc

SEQ ID NO: 851386 - RNA, 19 nt, Artificial Sequence
  Description of Artificial Sequence: Synthetic oligonucleotide
  Sense strand starting at position 2882 of SEQ ID NO: 588240
aaaggugcucccuaauguu

SEQ ID NO: 851387 - RNA, 19 nt, Artificial Sequence
  Description of Artificial Sequence: Synthetic oligonucleotide
  Antisense strand to SEQ ID NO: 851386
aacauuagggagcaccuuu

SEQ ID NO: 851388 - RNA, 19 nt, Artificial Sequence
  Description of Artificial Sequence: Synthetic oligonucleotide
  Sense strand starting at position 2941 of SEQ ID NO: 588240
gccuacauccgggauagga

SEQ ID NO: 851389 - RNA, 19 nt, Artificial Sequence
  Description of Artificial Sequence: Synthetic oligonucleotide
  Antisense strand to SEQ ID NO: 851388
uccuaucccggauguaggc

SEQ ID NO: 851390 - RNA, 19 nt, Artificial Sequence
  Description of Artificial Sequence: Synthetic oligonucleotide
  Sense strand starting at position 3137 of SEQ ID NO: 588240
acccuagagcucugccaau

SEQ ID NO: 851391 - RNA, 19 nt, Artificial Sequence
  Description of Artificial Sequence: Synthetic oligonucleotide
  Antisense strand to SEQ ID NO: 851390
auuggcagagcucuagggu

SEQ ID NO: 851392 - RNA, 19 nt, Artificial Sequence
  Description of Artificial Sequence: Synthetic oligonucleotide
  Sense strand starting at position 3358 of SEQ ID NO: 588240
gccugugaucacuguuauu

SEQ ID NO: 851393 - RNA, 19 nt, Artificial Sequence
  Description of Artificial Sequence: Synthetic oligonucleotide
  Antisense strand to SEQ ID NO: 851392
aauaacagugaucacaggc

SEQ ID NO: 851394 - RNA, 19 nt, Artificial Sequence
  Description of Artificial Sequence: Synthetic oligonucleotide
  Sense strand starting at position 3385 of SEQ ID NO: 588240
cagagaaugacgggucauu

SEQ ID NO: 851395 - RNA, 19 nt, Artificial Sequence
  Description of Artificial Sequence: Synthetic oligonucleotide
  Antisense strand to SEQ ID NO: 851394
aaugacccgucauucucug

SEQ ID NO: 851396 - RNA, 19 nt, Artificial Sequence
  Description of Artificial Sequence: Synthetic oligonucleotide
  Sense strand starting at position 3415 of SEQ ID NO: 588240
cgucaaaggucaucacaag

SEQ ID NO: 851397 - RNA, 19 nt, Artificial Sequence
  Description of Artificial Sequence: Synthetic oligonucleotide
  Antisense strand to SEQ ID NO: 851396
cuugugaugaccuuugacg

SEQ ID NO: 851398 - RNA, 19 nt, Artificial Sequence
  Description of Artificial Sequence: Synthetic oligonucleotide
  Sense strand starting at position 3492 of SEQ ID NO: 588240
guuaacuguccuugcuuga

SEQ ID NO: 851399 - RNA, 19 nt, Artificial Sequence
  Description of Artificial Sequence: Synthetic oligonucleotide
  Antisense strand to SEQ ID NO: 851398
ucaagcaaggacaguuaac

SEQ ID NO: 851400 - RNA, 19 nt, Artificial Sequence
  Description of Artificial Sequence: Synthetic oligonucleotide
  Sense strand starting at position 3496 of SEQ ID NO: 588240
acuguccuugcuugauuaa

SEQ ID NO: 851401 - RNA, 19 nt, Artificial Sequence
  Description of Artificial Sequence: Synthetic oligonucleotide
  Antisense strand to SEQ ID NO: 851400
uuaaucaagcaaggacagu

SEQ ID NO: 851402 - RNA, 19 nt, Artificial Sequence
  Description of Artificial Sequence: Synthetic oligonucleotide
  Sense strand starting at position 3497 of SEQ ID NO: 588240
cuguccuugcuugauuaaa

SEQ ID NO: 851403 - RNA, 19 nt, Artificial Sequence
  Description of Artificial Sequence: Synthetic oligonucleotide
  Antisense strand to SEQ ID NO: 851402
uuuaaucaagcaaggacag

SEQ ID NO: 851404 - RNA, 19 nt, Artificial Sequence
  Description of Artificial Sequence: Synthetic oligonucleotide
  Sense strand starting at position 3499 of SEQ ID NO: 588240
guccuugcuugauuaaagu

SEQ ID NO: 851405 - RNA, 19 nt, Artificial Sequence
  Description of Artificial Sequence: Synthetic oligonucleotide
  Antisense strand to SEQ ID NO: 851404
acuuuaaucaagcaaggac

SEQ ID NO: 851406 - RNA, 19 nt, Artificial Sequence
  Description of Artificial Sequence: Synthetic oligonucleotide
  Sense strand starting at position 3691 of SEQ ID NO: 588240
ggcagugugugaguaaauc

SEQ ID NO: 851407 - RNA, 19 nt, Artificial Sequence
  Description of Artificial Sequence: Synthetic oligonucleotide
  Antisense strand to SEQ ID NO: 851406
gauuuacucacacacugcc

SEQ ID NO: 851408 - RNA, 19 nt, Artificial Sequence
  Description of Artificial Sequence: Synthetic oligonucleotide
  Sense strand starting at position 3726 of SEQ ID NO: 588240
gcaggaguuccacaaacug

SEQ ID NO: 851409 - RNA, 19 nt, Artificial Sequence
  Description of Artificial Sequence: Synthetic oligonucleotide
  Antisense strand to SEQ ID NO: 851408
caguuuguggaacuccugc

SEQ ID NO: 851410 - RNA, 19 nt, Artificial Sequence
  Description of Artificial Sequence: Synthetic oligonucleotide
  Sense strand starting at position 3818 of SEQ ID NO: 588240
gcuucuagucugcacucaa

SEQ ID NO: 851411 - RNA, 19 nt, Artificial Sequence
  Description of Artificial Sequence: Synthetic oligonucleotide
  Antisense strand to SEQ ID NO: 851410
uugagugcagacuagaagc

SEQ ID NO: 851412 - RNA, 19 nt, Artificial Sequence
  Description of Artificial Sequence: Synthetic oligonucleotide
  Sense strand starting at position 3839 of SEQ ID NO: 588240
aggugucuguggccaacau

SEQ ID NO: 851413 - RNA, 19 nt, Artificial Sequence
  Description of Artificial Sequence: Synthetic oligonucleotide
  Antisense strand to SEQ ID NO: 851412
auguuggccacagacaccu

SEQ ID NO: 851414 - RNA, 19 nt, Artificial Sequence
  Description of Artificial Sequence: Synthetic oligonucleotide
  Sense strand starting at position 3840 of SEQ ID NO: 588240
ggugucuguggccaacaua

SEQ ID NO: 851415 - RNA, 19 nt, Artificial Sequence
  Description of Artificial Sequence: Synthetic oligonucleotide
  Antisense strand to SEQ ID NO: 851414
uauguuggccacagacacc

SEQ ID NO: 851416 - RNA, 19 nt, Artificial Sequence
  Description of Artificial Sequence: Synthetic oligonucleotide
  Sense strand starting at position 38 of SEQ ID NO: 588241
auuguuaugggccaauaca

SEQ ID NO: 851417 - RNA, 19 nt, Artificial Sequence
  Description of Artificial Sequence: Synthetic oligonucleotide
  Antisense strand to SEQ ID NO: 851416
uguauuggcccauaacaau

SEQ ID NO: 851418 - RNA, 19 nt, Artificial Sequence
  Description of Artificial Sequence: Synthetic oligonucleotide
  Sense strand starting at position 79 of SEQ ID NO: 588241
guggaagacuauucuggua

SEQ ID NO: 851419 - RNA, 19 nt, Artificial Sequence
  Description of Artificial Sequence: Synthetic oligonucleotide
  Antisense strand to SEQ ID NO: 851418
uaccagaauagucuuccac

SEQ ID NO: 851420 - RNA, 19 nt, Artificial Sequence
  Description of Artificial Sequence: Synthetic oligonucleotide
  Sense strand starting at position 94 of SEQ ID NO: 588241
gguaaauaaugccuacuua

SEQ ID NO: 851421 - RNA, 19 nt, Artificial Sequence
  Description of Artificial Sequence: Synthetic oligonucleotide
  Antisense strand to SEQ ID NO: 851420
uaaguaggcauuauuuacc

SEQ ID NO: 851422 - RNA, 19 nt, Artificial Sequence
  Description of Artificial Sequence: Synthetic oligonucleotide
  Sense strand starting at position 126 of SEQ ID NO: 588241
ugcuauaaugccuacaugu

SEQ ID NO: 851423 - RNA, 19 nt, Artificial Sequence
  Description of Artificial Sequence: Synthetic oligonucleotide
  Antisense strand to SEQ ID NO: 851422
acauguaggcauuauagca

SEQ ID NO: 851424 - RNA, 19 nt, Artificial Sequence
  Description of Artificial Sequence: Synthetic oligonucleotide
  Sense strand starting at position 241 of SEQ ID NO: 588241
uuuauaucucauuguagug

SEQ ID NO: 851425 - RNA, 19 nt, Artificial Sequence
  Description of Artificial Sequence: Synthetic oligonucleotide
  Antisense strand to SEQ ID NO: 851424
cacuacaaugagauauaaa

SEQ ID NO: 851426 - RNA, 19 nt, Artificial Sequence
  Description of Artificial Sequence: Synthetic oligonucleotide
  Sense strand starting at position 248 of SEQ ID NO: 588241
cucauuguaguguaaauau

SEQ ID NO: 851427 - RNA, 19 nt, Artificial Sequence
  Description of Artificial Sequence: Synthetic oligonucleotide
  Antisense strand to SEQ ID NO: 851426
auauuuacacuacaaugag

SEQ ID NO: 851428 - RNA, 19 nt, Artificial Sequence
  Description of Artificial Sequence: Synthetic oligonucleotide
  Sense strand starting at position 351 of SEQ ID NO: 588241
acaagcauccuguaauuag

SEQ ID NO: 851429 - RNA, 19 nt, Artificial Sequence
  Description of Artificial Sequence: Synthetic oligonucleotide
  Antisense strand to SEQ ID NO: 851428
cuaauuacaggaugcuugu

SEQ ID NO: 851430 - RNA, 19 nt, Artificial Sequence
  Description of Artificial Sequence: Synthetic oligonucleotide
  Sense strand starting at position 583 of SEQ ID NO: 588241
uguuccuuccuggagguua

SEQ ID NO: 851431 - RNA, 19 nt, Artificial Sequence
  Description of Artificial Sequence: Synthetic oligonucleotide
  Antisense strand to SEQ ID NO: 851430
uaaccuccaggaaggaaca

SEQ ID NO: 851432 - RNA, 19 nt, Artificial Sequence
  Description of Artificial Sequence: Synthetic oligonucleotide
  Sense strand starting at position 684 of SEQ ID NO: 588241
aggagugguaauggguaau

SEQ ID NO: 851433 - RNA, 19 nt, Artificial Sequence
  Description of Artificial Sequence: Synthetic oligonucleotide
  Antisense strand to SEQ ID NO: 851432
auuacccauuaccacuccu

SEQ ID NO: 851434 - RNA, 19 nt, Artificial Sequence
  Description of Artificial Sequence: Synthetic oligonucleotide
  Sense strand starting at position 690 of SEQ ID NO: 588241
gguaauggguaauuacaaa

SEQ ID NO: 851435 - RNA, 19 nt, Artificial Sequence
  Description of Artificial Sequence: Synthetic oligonucleotide
  Antisense strand to SEQ ID NO: 851434
uuuguaauuacccauuacc

SEQ ID NO: 851436 - RNA, 19 nt, Artificial Sequence
  Description of Artificial Sequence: Synthetic oligonucleotide
  Sense strand starting at position 718 of SEQ ID NO: 588241
cuauuugggugggaauaau

SEQ ID NO: 851437 - RNA, 19 nt, Artificial Sequence
  Description of Artificial Sequence: Synthetic oligonucleotide
  Antisense strand to SEQ ID NO: 851436
auuauucccacccaaauag

SEQ ID NO: 851438 - RNA, 19 nt, Artificial Sequence
  Description of Artificial Sequence: Synthetic oligonucleotide
  Sense strand starting at position 906 of SEQ ID NO: 588241
ccuuguaaguuucuagaug

SEQ ID NO: 851439 - RNA, 19 nt, Artificial Sequence
  Description of Artificial Sequence: Synthetic oligonucleotide
  Antisense strand to SEQ ID NO: 851438
caucuagaaacuuacaagg

SEQ ID NO: 851440 - RNA, 19 nt, Artificial Sequence
  Description of Artificial Sequence: Synthetic oligonucleotide
  Sense strand starting at position 1026 of SEQ ID NO: 588241
cgcuuacagcuauagaaca

SEQ ID NO: 851441 - RNA, 19 nt, Artificial Sequence
  Description of Artificial Sequence: Synthetic oligonucleotide
  Antisense strand to SEQ ID NO: 851440
uguucuauagcuguaagcg

SEQ ID NO: 851442 - RNA, 19 nt, Artificial Sequence
  Description of Artificial Sequence: Synthetic oligonucleotide
  Sense strand starting at position 1065 of SEQ ID NO: 588241
guucuuagggaucacuacu

SEQ ID NO: 851443 - RNA, 19 nt, Artificial Sequence
  Description of Artificial Sequence: Synthetic oligonucleotide
  Antisense strand to SEQ ID NO: 851442
aguagugaucccuaagaac

SEQ ID NO: 851444 - RNA, 19 nt, Artificial Sequence
  Description of Artificial Sequence: Synthetic oligonucleotide
  Sense strand starting at position 1092 of SEQ ID NO: 588241
uggaaucacuacuucggua

SEQ ID NO: 851445 - RNA, 19 nt, Artificial Sequence
  Description of Artificial Sequence: Synthetic oligonucleotide
  Antisense strand to SEQ ID NO: 851444
uaccgaaguagugauucca

SEQ ID NO: 851446 - RNA, 19 nt, Artificial Sequence
  Description of Artificial Sequence: Synthetic oligonucleotide
  Sense strand starting at position 1094 of SEQ ID NO: 588241
gaaucacuacuucgguauu

SEQ ID NO: 851447 - RNA, 19 nt, Artificial Sequence
  Description of Artificial Sequence: Synthetic oligonucleotide
  Antisense strand to SEQ ID NO: 851446
aauaccgaaguagugauuc

SEQ ID NO: 851448 - RNA, 19 nt, Artificial Sequence
  Description of Artificial Sequence: Synthetic oligonucleotide
  Sense strand starting at position 1160 of SEQ ID NO: 588241
gcaugaugggucugagaug

SEQ ID NO: 851449 - RNA, 19 nt, Artificial Sequence
  Description of Artificial Sequence: Synthetic oligonucleotide
  Antisense strand to SEQ ID NO: 851448
caucucagacccaucaugc

SEQ ID NO: 851450 - RNA, 19 nt, Artificial Sequence
  Description of Artificial Sequence: Synthetic oligonucleotide
  Sense strand starting at position 1165 of SEQ ID NO: 588241
augggucugagaugaacuu

SEQ ID NO: 851451 - RNA, 19 nt, Artificial Sequence
  Description of Artificial Sequence: Synthetic oligonucleotide
  Antisense strand to SEQ ID NO: 851450
aaguucaucucagacccau

SEQ ID NO: 851452 - RNA, 19 nt, Artificial Sequence
  Description of Artificial Sequence: Synthetic oligonucleotide
  Sense strand starting at position 1171 of SEQ ID NO: 588241
cugagaugaacuuguguug

SEQ ID NO: 851453 - RNA, 19 nt, Artificial Sequence
  Description of Artificial Sequence: Synthetic oligonucleotide
  Antisense strand to SEQ ID NO: 851452
caacacaaguucaucucag

SEQ ID NO: 851454 - RNA, 19 nt, Artificial Sequence
  Description of Artificial Sequence: Synthetic oligonucleotide
  Sense strand starting at position 1212 of SEQ ID NO: 588241
ugagguuagcaagaauggu

SEQ ID NO: 851455 - RNA, 19 nt, Artificial Sequence
  Description of Artificial Sequence: Synthetic oligonucleotide
  Antisense strand to SEQ ID NO: 851454
accauucuugcuaaccuca

SEQ ID NO: 851456 - RNA, 19 nt, Artificial Sequence
  Description of Artificial Sequence: Synthetic oligonucleotide
  Sense strand starting at position 1480 of SEQ ID NO: 588241
cugcguuuauuuccuugua

SEQ ID NO: 851457 - RNA, 19 nt, Artificial Sequence
  Description of Artificial Sequence: Synthetic oligonucleotide
  Antisense strand to SEQ ID NO: 851456
uacaaggaaauaaacgcag

SEQ ID NO: 851458 - RNA, 19 nt, Artificial Sequence
  Description of Artificial Sequence: Synthetic oligonucleotide
  Sense strand starting at position 1481 of SEQ ID NO: 588241
ugcguuuauuuccuuguaa

SEQ ID NO: 851459 - RNA, 19 nt, Artificial Sequence
  Description of Artificial Sequence: Synthetic oligonucleotide
  Antisense strand to SEQ ID NO: 851458
uuacaaggaaauaaacgca

SEQ ID NO: 851460 - RNA, 19 nt, Artificial Sequence
  Description of Artificial Sequence: Synthetic oligonucleotide
  Sense strand starting at position 1482 of SEQ ID NO: 588241
gcguuuauuuccuuguaaa

SEQ ID NO: 851461 - RNA, 19 nt, Artificial Sequence
  Description of Artificial Sequence: Synthetic oligonucleotide
  Antisense strand to SEQ ID NO: 851460
uuuacaaggaaauaaacgc

SEQ ID NO: 851462 - RNA, 19 nt, Artificial Sequence
  Description of Artificial Sequence: Synthetic oligonucleotide
  Sense strand starting at position 1483 of SEQ ID NO: 588241
cguuuauuuccuuguaaac

SEQ ID NO: 851463 - RNA, 19 nt, Artificial Sequence
  Description of Artificial Sequence: Synthetic oligonucleotide
  Antisense strand to SEQ ID NO: 851462
guuuacaaggaaauaaacg

SEQ ID NO: 851464 - RNA, 19 nt, Artificial Sequence
  Description of Artificial Sequence: Synthetic oligonucleotide
  Sense strand starting at position 1548 of SEQ ID NO: 588241
agggcuuaauccuuuccaa

SEQ ID NO: 851465 - RNA, 19 nt, Artificial Sequence
  Description of Artificial Sequence: Synthetic oligonucleotide
  Antisense strand to SEQ ID NO: 851464
uuggaaaggauuaagcccu

SEQ ID NO: 851466 - RNA, 19 nt, Artificial Sequence
  Description of Artificial Sequence: Synthetic oligonucleotide
  Sense strand starting at position 1575 of SEQ ID NO: 588241
accuuugaucccugugaca

SEQ ID NO: 851467 - RNA, 19 nt, Artificial Sequence
  Description of Artificial Sequence: Synthetic oligonucleotide
  Antisense strand to SEQ ID NO: 851466
ugucacagggaucaaaggu

SEQ ID NO: 851468 - RNA, 19 nt, Artificial Sequence
  Description of Artificial Sequence: Synthetic oligonucleotide
  Sense strand starting at position 1577 of SEQ ID NO: 588241
cuuugaucccugugacaga

SEQ ID NO: 851469 - RNA, 19 nt, Artificial Sequence
  Description of Artificial Sequence: Synthetic oligonucleotide
  Antisense strand to SEQ ID NO: 851468
ucugucacagggaucaaag

SEQ ID NO: 851470 - RNA, 19 nt, Artificial Sequence
  Description of Artificial Sequence: Synthetic oligonucleotide
  Sense strand starting at position 1889 of SEQ ID NO: 588241
ggcucaugacuccaaagca

SEQ ID NO: 851471 - RNA, 19 nt, Artificial Sequence
  Description of Artificial Sequence: Synthetic oligonucleotide
  Antisense strand to SEQ ID NO: 851470
ugcuuuggagucaugagcc

SEQ ID NO: 851472 - RNA, 19 nt, Artificial Sequence
  Description of Artificial Sequence: Synthetic oligonucleotide
  Sense strand starting at position 2294 of SEQ ID NO: 588241
gggaaagcuccuuagcgau

SEQ ID NO: 851473 - RNA, 19 nt, Artificial Sequence
  Description of Artificial Sequence: Synthetic oligonucleotide
  Antisense strand to SEQ ID NO: 851472
aucgcuaaggagcuuuccc

SEQ ID NO: 851474 - RNA, 19 nt, Artificial Sequence
  Description of Artificial Sequence: Synthetic oligonucleotide
  Sense strand starting at position 2301 of SEQ ID NO: 588241
cuccuuagcgauuaaagga

SEQ ID NO: 851475 - RNA, 19 nt, Artificial Sequence
  Description of Artificial Sequence: Synthetic oligonucleotide
  Antisense strand to SEQ ID NO: 851474
uccuuuaaucgcuaaggag

SEQ ID NO: 851476 - RNA, 19 nt, Artificial Sequence
  Description of Artificial Sequence: Synthetic oligonucleotide
  Sense strand starting at position 2311 of SEQ ID NO: 588241
auuaaaggacuucgagcaa

SEQ ID NO: 851477 - RNA, 19 nt, Artificial Sequence
  Description of Artificial Sequence: Synthetic oligonucleotide
  Antisense strand to SEQ ID NO: 851476
uugcucgaaguccuuuaau

SEQ ID NO: 851478 - RNA, 19 nt, Artificial Sequence
  Description of Artificial Sequence: Synthetic oligonucleotide
  Sense strand starting at position 2634 of SEQ ID NO: 588241
ggucaugcauuccuuuaaa

SEQ ID NO: 851479 - RNA, 19 nt, Artificial Sequence
  Description of Artificial Sequence: Synthetic oligonucleotide
  Antisense strand to SEQ ID NO: 851478
uuuaaaggaaugcaugacc

SEQ ID NO: 851480 - RNA, 19 nt, Artificial Sequence
  Description of Artificial Sequence: Synthetic oligonucleotide
  Sense strand starting at position 2655 of SEQ ID NO: 588241
gacgguuugggaugguuua

SEQ ID NO: 851481 - RNA, 19 nt, Artificial Sequence
  Description of Artificial Sequence: Synthetic oligonucleotide
  Antisense strand to SEQ ID NO: 851480
uaaaccaucccaaaccguc

SEQ ID NO: 851482 - RNA, 19 nt, Artificial Sequence
  Description of Artificial Sequence: Synthetic oligonucleotide
  Sense strand starting at position 2656 of SEQ ID NO: 588241
acgguuugggaugguuuaa

SEQ ID NO: 851483 - RNA, 19 nt, Artificial Sequence
  Description of Artificial Sequence: Synthetic oligonucleotide
  Antisense strand to SEQ ID NO: 851482
uuaaaccaucccaaaccgu

SEQ ID NO: 851484 - RNA, 19 nt, Artificial Sequence
  Description of Artificial Sequence: Synthetic oligonucleotide
  Sense strand starting at position 2904 of SEQ ID NO: 588241
gugucuguaacauaaagga

SEQ ID NO: 851485 - RNA, 19 nt, Artificial Sequence
  Description of Artificial Sequence: Synthetic oligonucleotide
  Antisense strand to SEQ ID NO: 851484
uccuuuauguuacagacac

SEQ ID NO: 851486 - RNA, 19 nt, Artificial Sequence
  Description of Artificial Sequence: Synthetic oligonucleotide
  Sense strand starting at position 3062 of SEQ ID NO: 588241
auucuaaaccuauguuugu

SEQ ID NO: 851487 - RNA, 19 nt, Artificial Sequence
  Description of Artificial Sequence: Synthetic oligonucleotide
  Antisense strand to SEQ ID NO: 851486
acaaacauagguuuagaau

SEQ ID NO: 851488 - RNA, 19 nt, Artificial Sequence
  Description of Artificial Sequence: Synthetic oligonucleotide
  Sense strand starting at position 3063 of SEQ ID NO: 588241
uucuaaaccuauguuugua

SEQ ID NO: 851489 - RNA, 19 nt, Artificial Sequence
  Description of Artificial Sequence: Synthetic oligonucleotide
  Antisense strand to SEQ ID NO: 851488
uacaaacauagguuuagaa

SEQ ID NO: 851490 - RNA, 19 nt, Artificial Sequence
  Description of Artificial Sequence: Synthetic oligonucleotide
  Sense strand starting at position 3124 of SEQ ID NO: 588241
ugaucucaguuguuauaga

SEQ ID NO: 851491 - RNA, 19 nt, Artificial Sequence
  Description of Artificial Sequence: Synthetic oligonucleotide
  Antisense strand to SEQ ID NO: 851490
ucuauaacaacugagauca

SEQ ID NO: 851492 - RNA, 19 nt, Artificial Sequence
  Description of Artificial Sequence: Synthetic oligonucleotide
  Sense strand starting at position 3517 of SEQ ID NO: 588241
aaaguuccacuaugaggua

SEQ ID NO: 851493 - RNA, 19 nt, Artificial Sequence
  Description of Artificial Sequence: Synthetic oligonucleotide
  Antisense strand to SEQ ID NO: 851492
uaccucauaguggaacuuu

SEQ ID NO: 851494 - RNA, 19 nt, Artificial Sequence
  Description of Artificial Sequence: Synthetic oligonucleotide
  Sense strand starting at position 3620 of SEQ ID NO: 588241
ucaccugugggugggaaua

SEQ ID NO: 851495 - RNA, 19 nt, Artificial Sequence
  Description of Artificial Sequence: Synthetic oligonucleotide
  Antisense strand to SEQ ID NO: 851494
uauucccacccacagguga

SEQ ID NO: 851496 - RNA, 19 nt, Artificial Sequence
  Description of Artificial Sequence: Synthetic oligonucleotide
  Sense strand starting at position 281 of SEQ ID NO: 588242
cgaacuuaguuuccagauu

SEQ ID NO: 851497 - RNA, 19 nt, Artificial Sequence
  Description of Artificial Sequence: Synthetic oligonucleotide
  Antisense strand to SEQ ID NO: 851496
aaucuggaaacuaaguucg

SEQ ID NO: 851498 - RNA, 19 nt, Artificial Sequence
  Description of Artificial Sequence: Synthetic oligonucleotide
  Sense strand starting at position 290 of SEQ ID NO: 588242
uuuccagauuguccaugaa

SEQ ID NO: 851499 - RNA, 19 nt, Artificial Sequence
  Description of Artificial Sequence: Synthetic oligonucleotide
  Antisense strand to SEQ ID NO: 851498
uucauggacaaucuggaaa

SEQ ID NO: 851500 - RNA, 19 nt, Artificial Sequence
  Description of Artificial Sequence: Synthetic oligonucleotide
  Sense strand starting at position 293 of SEQ ID NO: 588242
ccagauuguccaugaaccu

SEQ ID NO: 851501 - RNA, 19 nt, Artificial Sequence
  Description of Artificial Sequence: Synthetic oligonucleotide
  Antisense strand to SEQ ID NO: 851500
agguucauggacaaucugg

SEQ ID NO: 851502 - RNA, 19 nt, Artificial Sequence
  Description of Artificial Sequence: Synthetic oligonucleotide
  Sense strand starting at position 333 of SEQ ID NO: 588242
gucuguguuugucuaaaca

SEQ ID NO: 851503 - RNA, 19 nt, Artificial Sequence
  Description of Artificial Sequence: Synthetic oligonucleotide
  Antisense strand to SEQ ID NO: 851502
uguuuagacaaacacagac

SEQ ID NO: 851504 - RNA, 19 nt, Artificial Sequence
  Description of Artificial Sequence: Synthetic oligonucleotide
  Sense strand starting at position 379 of SEQ ID NO: 588242
gcuuaccugguuuaucaaa

SEQ ID NO: 851505 - RNA, 19 nt, Artificial Sequence
  Description of Artificial Sequence: Synthetic oligonucleotide
  Antisense strand to SEQ ID NO: 851504
uuugauaaaccagguaagc

SEQ ID NO: 851506 - RNA, 19 nt, Artificial Sequence
  Description of Artificial Sequence: Synthetic oligonucleotide
  Sense strand starting at position 619 of SEQ ID NO: 588242
ucgaaucagcacuaacaga

SEQ ID NO: 851507 - RNA, 19 nt, Artificial Sequence
  Description of Artificial Sequence: Synthetic oligonucleotide
  Antisense strand to SEQ ID NO: 851506
ucuguuagugcugauucga

SEQ ID NO: 851508 - RNA, 19 nt, Artificial Sequence
  Description of Artificial Sequence: Synthetic oligonucleotide
  Sense strand starting at position 692 of SEQ ID NO: 588242
aagugacaacccggacauu

SEQ ID NO: 851509 - RNA, 19 nt, Artificial Sequence
  Description of Artificial Sequence: Synthetic oligonucleotide
  Antisense strand to SEQ ID NO: 851508
aauguccggguugucacuu

SEQ ID NO: 851510 - RNA, 19 nt, Artificial Sequence
  Description of Artificial Sequence: Synthetic oligonucleotide
  Sense strand starting at position 979 of SEQ ID NO: 588242
ggcugauucagagguugug

SEQ ID NO: 851511 - RNA, 19 nt, Artificial Sequence
  Description of Artificial Sequence: Synthetic oligonucleotide
  Antisense strand to SEQ ID NO: 851510
cacaaccucugaaucagcc

SEQ ID NO: 851512 - RNA, 19 nt, Artificial Sequence
  Description of Artificial Sequence: Synthetic oligonucleotide
  Sense strand starting at position 982 of SEQ ID NO: 588242
ugauucagagguugugacu

SEQ ID NO: 851513 - RNA, 19 nt, Artificial Sequence
  Description of Artificial Sequence: Synthetic oligonucleotide
  Antisense strand to SEQ ID NO: 851512
agucacaaccucugaauca

SEQ ID NO: 851514 - RNA, 19 nt, Artificial Sequence
  Description of Artificial Sequence: Synthetic oligonucleotide
  Sense strand starting at position 2249 of SEQ ID NO: 588242
uuuagugagucaccaaaca

SEQ ID NO: 851515 - RNA, 19 nt, Artificial Sequence
  Description of Artificial Sequence: Synthetic oligonucleotide
  Antisense strand to SEQ ID NO: 851514
uguuuggugacucacuaaa

SEQ ID NO: 851516 - RNA, 19 nt, Artificial Sequence
  Description of Artificial Sequence: Synthetic oligonucleotide
  Sense strand starting at position 2295 of SEQ ID NO: 588242
acuccaggucuuuggcaua

SEQ ID NO: 851517 - RNA, 19 nt, Artificial Sequence
  Description of Artificial Sequence: Synthetic oligonucleotide
  Antisense strand to SEQ ID NO: 851516
uaugccaaagaccuggagu

SEQ ID NO: 851518 - RNA, 19 nt, Artificial Sequence
  Description of Artificial Sequence: Synthetic oligonucleotide
  Sense strand starting at position 2343 of SEQ ID NO: 588242
cuuguaauucgcgccaaga

SEQ ID NO: 851519 - RNA, 19 nt, Artificial Sequence
  Description of Artificial Sequence: Synthetic oligonucleotide
  Antisense strand to SEQ ID NO: 851518
ucuuggcgcgaauuacaag

SEQ ID NO: 851520 - RNA, 19 nt, Artificial Sequence
  Description of Artificial Sequence: Synthetic oligonucleotide
  Sense strand starting at position 2345 of SEQ ID NO: 588242
uguaauucgcgccaagaga

SEQ ID NO: 851521 - RNA, 19 nt, Artificial Sequence
  Description of Artificial Sequence: Synthetic oligonucleotide
  Antisense strand to SEQ ID NO: 851520
ucucuuggcgcgaauuaca

SEQ ID NO: 851522 - RNA, 19 nt, Artificial Sequence
  Description of Artificial Sequence: Synthetic oligonucleotide
  Sense strand starting at position 2392 of SEQ ID NO: 588242
ggaagaggauggccugauu

SEQ ID NO: 851523 - RNA, 19 nt, Artificial Sequence
  Description of Artificial Sequence: Synthetic oligonucleotide
  Antisense strand to SEQ ID NO: 851522
aaucaggccauccucuucc

SEQ ID NO: 851524 - RNA, 19 nt, Artificial Sequence
  Description of Artificial Sequence: Synthetic oligonucleotide
  Sense strand starting at position 2546 of SEQ ID NO: 588242
gaugaaacuuccguggaac

SEQ ID NO: 851525 - RNA, 19 nt, Artificial Sequence
  Description of Artificial Sequence: Synthetic oligonucleotide
  Antisense strand to SEQ ID NO: 851524
guuccacggaaguuucauc

SEQ ID NO: 851526 - RNA, 19 nt, Artificial Sequence
  Description of Artificial Sequence: Synthetic oligonucleotide
  Sense strand starting at position 2548 of SEQ ID NO: 588242
ugaaacuuccguggaacca

SEQ ID NO: 851527 - RNA, 19 nt, Artificial Sequence
  Description of Artificial Sequence: Synthetic oligonucleotide
  Antisense strand to SEQ ID NO: 851526
ugguuccacggaaguuuca

SEQ ID NO: 851528 - RNA, 19 nt, Artificial Sequence
  Description of Artificial Sequence: Synthetic oligonucleotide
  Sense strand starting at position 2566 of SEQ ID NO: 588242
acaauauaccgugguuguu

SEQ ID NO: 851529 - RNA, 19 nt, Artificial Sequence
  Description of Artificial Sequence: Synthetic oligonucleotide
  Antisense strand to SEQ ID NO: 851528
aacaaccacgguauauugu

SEQ ID NO: 851530 - RNA, 19 nt, Artificial Sequence
  Description of Artificial Sequence: Synthetic oligonucleotide
  Sense strand starting at position 2580 of SEQ ID NO: 588242
uuguuugcaccucagaguu

SEQ ID NO: 851531 - RNA, 19 nt, Artificial Sequence
  Description of Artificial Sequence: Synthetic oligonucleotide
  Antisense strand to SEQ ID NO: 851530
aacucugaggugcaaacaa

SEQ ID NO: 851532 - RNA, 19 nt, Artificial Sequence
  Description of Artificial Sequence: Synthetic oligonucleotide
  Sense strand starting at position 2592 of SEQ ID NO: 588242
cagaguuucucaucucgga

SEQ ID NO: 851533 - RNA, 19 nt, Artificial Sequence
  Description of Artificial Sequence: Synthetic oligonucleotide
  Antisense strand to SEQ ID NO: 851532
uccgagaugagaaacucug

SEQ ID NO: 851534 - RNA, 19 nt, Artificial Sequence
  Description of Artificial Sequence: Synthetic oligonucleotide
  Sense strand starting at position 2645 of SEQ ID NO: 588242
acucauugcuguguauacu

SEQ ID NO: 851535 - RNA, 19 nt, Artificial Sequence
  Description of Artificial Sequence: Synthetic oligonucleotide
  Antisense strand to SEQ ID NO: 851534
aguauacacagcaaugagu

SEQ ID NO: 851536 - RNA, 19 nt, Artificial Sequence
  Description of Artificial Sequence: Synthetic oligonucleotide
  Sense strand starting at position 2668 of SEQ ID NO: 588242
ugucgacagguccgauuau

SEQ ID NO: 851537 - RNA, 19 nt, Artificial Sequence
  Description of Artificial Sequence: Synthetic oligonucleotide
  Antisense strand to SEQ ID NO: 851536
auaaucggaccugucgaca

SEQ ID NO: 851538 - RNA, 19 nt, Artificial Sequence
  Description of Artificial Sequence: Synthetic oligonucleotide
  Sense strand starting at position 2680 of SEQ ID NO: 588242
cgauuauaucaugaaguau

SEQ ID NO: 851539 - RNA, 19 nt, Artificial Sequence
  Description of Artificial Sequence: Synthetic oligonucleotide
  Antisense strand to SEQ ID NO: 851538
auacuucaugauauaaucg

SEQ ID NO: 851540 - RNA, 19 nt, Artificial Sequence
  Description of Artificial Sequence: Synthetic oligonucleotide
  Sense strand starting at position 2749 of SEQ ID NO: 588242
agggucauauccucuucuu

SEQ ID NO: 851541 - RNA, 19 nt, Artificial Sequence
  Description of Artificial Sequence: Synthetic oligonucleotide
  Antisense strand to SEQ ID NO: 851540
aagaagaggauaugacccu

SEQ ID NO: 851542 - RNA, 19 nt, Artificial Sequence
  Description of Artificial Sequence: Synthetic oligonucleotide
  Sense strand starting at position 2968 of SEQ ID NO: 588242
ugcaguuccgcaguuaacu

SEQ ID NO: 851543 - RNA, 19 nt, Artificial Sequence
  Description of Artificial Sequence: Synthetic oligonucleotide
  Antisense strand to SEQ ID NO: 851542
aguuaacugcggaacugca

SEQ ID NO: 851544 - RNA, 19 nt, Artificial Sequence
  Description of Artificial Sequence: Synthetic oligonucleotide
  Sense strand starting at position 3142 of SEQ ID NO: 588242
ugugucugaagcuagagau

SEQ ID NO: 851545 - RNA, 19 nt, Artificial Sequence
  Description of Artificial Sequence: Synthetic oligonucleotide
  Antisense strand to SEQ ID NO: 851544
aucucuagcuucagacaca

SEQ ID NO: 851546 - RNA, 19 nt, Artificial Sequence
  Description of Artificial Sequence: Synthetic oligonucleotide
  Sense strand starting at position 3152 of SEQ ID NO: 588242
gcuagagaucagcaacucu

SEQ ID NO: 851547 - RNA, 19 nt, Artificial Sequence
  Description of Artificial Sequence: Synthetic oligonucleotide
  Antisense strand to SEQ ID NO: 851546
agaguugcugaucucuagc

SEQ ID NO: 851548 - RNA, 19 nt, Artificial Sequence
  Description of Artificial Sequence: Synthetic oligonucleotide
  Sense strand starting at position 3353 of SEQ ID NO: 588242
gggucacaguccuuuguuu

SEQ ID NO: 851549 - RNA, 19 nt, Artificial Sequence
  Description of Artificial Sequence: Synthetic oligonucleotide
  Antisense strand to SEQ ID NO: 851548
aaacaaaggacugugaccc

SEQ ID NO: 851550 - RNA, 19 nt, Artificial Sequence
  Description of Artificial Sequence: Synthetic oligonucleotide
  Sense strand starting at position 3743 of SEQ ID NO: 588242
uuuguauaguaggaacaga

SEQ ID NO: 851551 - RNA, 19 nt, Artificial Sequence
  Description of Artificial Sequence: Synthetic oligonucleotide
  Antisense strand to SEQ ID NO: 851550
ucuguuccuacuauacaaa

SEQ ID NO: 851552 - RNA, 19 nt, Artificial Sequence
  Description of Artificial Sequence: Synthetic oligonucleotide
  Sense strand starting at position 3770 of SEQ ID NO: 588242
aggacuacacuuuguaauu

SEQ ID NO: 851553 - RNA, 19 nt, Artificial Sequence
  Description of Artificial Sequence: Synthetic oligonucleotide
  Antisense strand to SEQ ID NO: 851552
aauuacaaaguguaguccu

SEQ ID NO: 851554 - RNA, 19 nt, Artificial Sequence
  Description of Artificial Sequence: Synthetic oligonucleotide
  Sense strand starting at position 3771 of SEQ ID NO: 588242
ggacuacacuuuguaauua

SEQ ID NO: 851555 - RNA, 19 nt, Artificial Sequence
  Description of Artificial Sequence: Synthetic oligonucleotide
  Antisense strand to SEQ ID NO: 851554
uaauuacaaaguguagucc

SEQ ID NO: 851556 - RNA, 19 nt, Artificial Sequence
  Description of Artificial Sequence: Synthetic oligonucleotide
  Sense strand starting at position 3779 of SEQ ID NO: 588242
cuuuguaauuacgcgaaag

SEQ ID NO: 851557 - RNA, 19 nt, Artificial Sequence
  Description of Artificial Sequence: Synthetic oligonucleotide
  Antisense strand to SEQ ID NO: 851556
cuuucgcguaauuacaaag

SEQ ID NO: 851558 - RNA, 19 nt, Artificial Sequence
  Description of Artificial Sequence: Synthetic oligonucleotide
  Sense strand starting at position 3780 of SEQ ID NO: 588242
uuuguaauuacgcgaaagu

SEQ ID NO: 851559 - RNA, 19 nt, Artificial Sequence
  Description of Artificial Sequence: Synthetic oligonucleotide
  Antisense strand to SEQ ID NO: 851558
acuuucgcguaauuacaaa

SEQ ID NO: 851560 - RNA, 19 nt, Artificial Sequence
  Description of Artificial Sequence: Synthetic oligonucleotide
  Sense strand starting at position 3781 of SEQ ID NO: 588242
uuguaauuacgcgaaagua

SEQ ID NO: 851561 - RNA, 19 nt, Artificial Sequence
  Description of Artificial Sequence: Synthetic oligonucleotide
  Antisense strand to SEQ ID NO: 851560
uacuuucgcguaauuacaa

SEQ ID NO: 851562 - RNA, 19 nt, Artificial Sequence
  Description of Artificial Sequence: Synthetic oligonucleotide
  Sense strand starting at position 3791 of SEQ ID NO: 588242
gcgaaaguaucuucccuuc

SEQ ID NO: 851563 - RNA, 19 nt, Artificial Sequence
  Description of Artificial Sequence: Synthetic oligonucleotide
  Antisense strand to SEQ ID NO: 851562
gaagggaagauacuuucgc

SEQ ID NO: 851564 - RNA, 19 nt, Artificial Sequence
  Description of Artificial Sequence: Synthetic oligonucleotide
  Sense strand starting at position 3817 of SEQ ID NO: 588242
uaggaagucugugugcuga

SEQ ID NO: 851565 - RNA, 19 nt, Artificial Sequence
  Description of Artificial Sequence: Synthetic oligonucleotide
  Antisense strand to SEQ ID NO: 851564
ucagcacacagacuuccua

SEQ ID NO: 851566 - RNA, 19 nt, Artificial Sequence
  Description of Artificial Sequence: Synthetic oligonucleotide
  Sense strand starting at position 3819 of SEQ ID NO: 588242
ggaagucugugugcugagu

SEQ ID NO: 851567 - RNA, 19 nt, Artificial Sequence
  Description of Artificial Sequence: Synthetic oligonucleotide
  Antisense strand to SEQ ID NO: 851566
acucagcacacagacuucc

SEQ ID NO: 851568 - RNA, 19 nt, Artificial Sequence
  Description of Artificial Sequence: Synthetic oligonucleotide
  Sense strand starting at position 3827 of SEQ ID NO: 588242
gugugcugaguauacacau

SEQ ID NO: 851569 - RNA, 19 nt, Artificial Sequence
  Description of Artificial Sequence: Synthetic oligonucleotide
  Antisense strand to SEQ ID NO: 851568
auguguauacucagcacac

SEQ ID NO: 851570 - RNA, 19 nt, Artificial Sequence
  Description of Artificial Sequence: Synthetic oligonucleotide
  Sense strand starting at position 3877 of SEQ ID NO: 588242
uuaggucauguuuagauag

SEQ ID NO: 851571 - RNA, 19 nt, Artificial Sequence
  Description of Artificial Sequence: Synthetic oligonucleotide
  Antisense strand to SEQ ID NO: 851570
cuaucuaaacaugaccuaa

SEQ ID NO: 851572 - RNA, 19 nt, Artificial Sequence
  Description of Artificial Sequence: Synthetic oligonucleotide
  Sense strand starting at position 3908 of SEQ ID NO: 588242
gcuguuuccuagcugauac

SEQ ID NO: 851573 - RNA, 19 nt, Artificial Sequence
  Description of Artificial Sequence: Synthetic oligonucleotide
  Antisense strand to SEQ ID NO: 851572
guaucagcuaggaaacagc

SEQ ID NO: 851574 - RNA, 19 nt, Artificial Sequence
  Description of Artificial Sequence: Synthetic oligonucleotide
  Sense strand starting at position 3973 of SEQ ID NO: 588242
ccucuuugauaaguugacu

SEQ ID NO: 851575 - RNA, 19 nt, Artificial Sequence
  Description of Artificial Sequence: Synthetic oligonucleotide
  Antisense strand to SEQ ID NO: 851574
agucaacuuaucaaagagg

SEQ ID NO: 851576 - RNA, 19 nt, Artificial Sequence
  Description of Artificial Sequence: Synthetic oligonucleotide
  Sense strand starting at position 292 of SEQ ID NO: 588243
agguaauacuauguuaaca

SEQ ID NO: 851577 - RNA, 19 nt, Artificial Sequence
  Description of Artificial Sequence: Synthetic oligonucleotide
  Antisense strand to SEQ ID NO: 851576
uguuaacauaguauuaccu

SEQ ID NO: 851578 - RNA, 19 nt, Artificial Sequence
  Description of Artificial Sequence: Synthetic oligonucleotide
  Sense strand starting at position 359 of SEQ ID NO: 588243
ugaguuuaauaucuguuga

SEQ ID NO: 851579 - RNA, 19 nt, Artificial Sequence
  Description of Artificial Sequence: Synthetic oligonucleotide
  Antisense strand to SEQ ID NO: 851578
ucaacagauauuaaacuca

SEQ ID NO: 851580 - RNA, 19 nt, Artificial Sequence
  Description of Artificial Sequence: Synthetic oligonucleotide
  Sense strand starting at position 361 of SEQ ID NO: 588243
aguuuaauaucuguugaug

SEQ ID NO: 851581 - RNA, 19 nt, Artificial Sequence
  Description of Artificial Sequence: Synthetic oligonucleotide
  Antisense strand to SEQ ID NO: 851580
caucaacagauauuaaacu

SEQ ID NO: 851582 - RNA, 19 nt, Artificial Sequence
  Description of Artificial Sequence: Synthetic oligonucleotide
  Sense strand starting at position 364 of SEQ ID NO: 588243
uuaauaucuguugauggca

SEQ ID NO: 851583 - RNA, 19 nt, Artificial Sequence
  Description of Artificial Sequence: Synthetic oligonucleotide
  Antisense strand to SEQ ID NO: 851582
ugccaucaacagauauuaa

SEQ ID NO: 851584 - RNA, 19 nt, Artificial Sequence
  Description of Artificial Sequence: Synthetic oligonucleotide
  Sense strand starting at position 387 of SEQ ID NO: 588243
uuguauauucuccacagca

SEQ ID NO: 851585 - RNA, 19 nt, Artificial Sequence
  Description of Artificial Sequence: Synthetic oligonucleotide
  Antisense strand to SEQ ID NO: 851584
ugcuguggagaauauacaa

SEQ ID NO: 851586 - RNA, 19 nt, Artificial Sequence
  Description of Artificial Sequence: Synthetic oligonucleotide
  Sense strand starting at position 389 of SEQ ID NO: 588243
guauauucuccacagcauc

SEQ ID NO: 851587 - RNA, 19 nt, Artificial Sequence
  Description of Artificial Sequence: Synthetic oligonucleotide
  Antisense strand to SEQ ID NO: 851586
gaugcuguggagaauauac

SEQ ID NO: 851588 - RNA, 19 nt, Artificial Sequence
  Description of Artificial Sequence: Synthetic oligonucleotide
  Sense strand starting at position 409 of SEQ ID NO: 588243
ccuagaguguaucuauaaa

SEQ ID NO: 851589 - RNA, 19 nt, Artificial Sequence
  Description of Artificial Sequence: Synthetic oligonucleotide
  Antisense strand to SEQ ID NO: 851588
uuuauagauacacucuagg

SEQ ID NO: 851590 - RNA, 19 nt, Artificial Sequence
  Description of Artificial Sequence: Synthetic oligonucleotide
  Sense strand starting at position 439 of SEQ ID NO: 588243
aauguuuguugacuagaag

SEQ ID NO: 851591 - RNA, 19 nt, Artificial Sequence
  Description of Artificial Sequence: Synthetic oligonucleotide
  Antisense strand to SEQ ID NO: 851590
cuucuagucaacaaacauu

SEQ ID NO: 851592 - RNA, 19 nt, Artificial Sequence
  Description of Artificial Sequence: Synthetic oligonucleotide
  Sense strand starting at position 458 of SEQ ID NO: 588243
gugagaucauucuugagca

SEQ ID NO: 851593 - RNA, 19 nt, Artificial Sequence
  Description of Artificial Sequence: Synthetic oligonucleotide
  Antisense strand to SEQ ID NO: 851592
ugcucaagaaugaucucac

SEQ ID NO: 851594 - RNA, 19 nt, Artificial Sequence
  Description of Artificial Sequence: Synthetic oligonucleotide
  Sense strand starting at position 565 of SEQ ID NO: 588243
uaaagaagucaucgaagca

SEQ ID NO: 851595 - RNA, 19 nt, Artificial Sequence
  Description of Artificial Sequence: Synthetic oligonucleotide
  Antisense strand to SEQ ID NO: 851594
ugcuucgaugacuucuuua

SEQ ID NO: 851596 - RNA, 19 nt, Artificial Sequence
  Description of Artificial Sequence: Synthetic oligonucleotide
  Sense strand starting at position 709 of SEQ ID NO: 588243
acguaucuaggaugaaacu

SEQ ID NO: 851597 - RNA, 19 nt, Artificial Sequence
  Description of Artificial Sequence: Synthetic oligonucleotide
  Antisense strand to SEQ ID NO: 851596
aguuucauccuagauacgu

SEQ ID NO: 851598 - RNA, 19 nt, Artificial Sequence
  Description of Artificial Sequence: Synthetic oligonucleotide
  Sense strand starting at position 724 of SEQ ID NO: 588243
aacuaaggacugugaagua

SEQ ID NO: 851599 - RNA, 19 nt, Artificial Sequence
  Description of Artificial Sequence: Synthetic oligonucleotide
  Antisense strand to SEQ ID NO: 851598
uacuucacaguccuuaguu

SEQ ID NO: 851600 - RNA, 19 nt, Artificial Sequence
  Description of Artificial Sequence: Synthetic oligonucleotide
  Sense strand starting at position 781 of SEQ ID NO: 588243
ggauacuacaggugauauu

SEQ ID NO: 851601 - RNA, 19 nt, Artificial Sequence
  Description of Artificial Sequence: Synthetic oligonucleotide
  Antisense strand to SEQ ID NO: 851600
aauaucaccuguaguaucc

SEQ ID NO: 851602 - RNA, 19 nt, Artificial Sequence
  Description of Artificial Sequence: Synthetic oligonucleotide
  Sense strand starting at position 996 of SEQ ID NO: 588243
gccacuagggagcaguaua

SEQ ID NO: 851603 - RNA, 19 nt, Artificial Sequence
  Description of Artificial Sequence: Synthetic oligonucleotide
  Antisense strand to SEQ ID NO: 851602
uauacugcucccuaguggc

SEQ ID NO: 851604 - RNA, 19 nt, Artificial Sequence
  Description of Artificial Sequence: Synthetic oligonucleotide
  Sense strand starting at position 1006 of SEQ ID NO: 588243
agcaguauagauuaacagu

SEQ ID NO: 851605 - RNA, 19 nt, Artificial Sequence
  Description of Artificial Sequence: Synthetic oligonucleotide
  Antisense strand to SEQ ID NO: 851604
acuguuaaucuauacugcu

SEQ ID NO: 851606 - RNA, 19 nt, Artificial Sequence
  Description of Artificial Sequence: Synthetic oligonucleotide
  Sense strand starting at position 1149 of SEQ ID NO: 588243
guaggaagucaauaacgua

SEQ ID NO: 851607 - RNA, 19 nt, Artificial Sequence
  Description of Artificial Sequence: Synthetic oligonucleotide
  Antisense strand to SEQ ID NO: 851606
uacguuauugacuuccuac

SEQ ID NO: 851608 - RNA, 19 nt, Artificial Sequence
  Description of Artificial Sequence: Synthetic oligonucleotide
  Sense strand starting at position 1173 of SEQ ID NO: 588243
gaguaagcucuuggaauau

SEQ ID NO: 851609 - RNA, 19 nt, Artificial Sequence
  Description of Artificial Sequence: Synthetic oligonucleotide
  Antisense strand to SEQ ID NO: 851608
auauuccaagagcuuacuc

SEQ ID NO: 851610 - RNA, 19 nt, Artificial Sequence
  Description of Artificial Sequence: Synthetic oligonucleotide
  Sense strand starting at position 1227 of SEQ ID NO: 588243
cuauuauugcuguaauugu

SEQ ID NO: 851611 - RNA, 19 nt, Artificial Sequence
  Description of Artificial Sequence: Synthetic oligonucleotide
  Antisense strand to SEQ ID NO: 851610
acaauuacagcaauaauag

SEQ ID NO: 851612 - RNA, 19 nt, Artificial Sequence
  Description of Artificial Sequence: Synthetic oligonucleotide
  Sense strand starting at position 1482 of SEQ ID NO: 588243
cgggucuuuauuugacuuu

SEQ ID NO: 851613 - RNA, 19 nt, Artificial Sequence
  Description of Artificial Sequence: Synthetic oligonucleotide
  Antisense strand to SEQ ID NO: 851612
aaagucaaauaaagacccg

SEQ ID NO: 851614 - RNA, 19 nt, Artificial Sequence
  Description of Artificial Sequence: Synthetic oligonucleotide
  Sense strand starting at position 1773 of SEQ ID NO: 588243
gcgcgagucgacucaccua

SEQ ID NO: 851615 - RNA, 19 nt, Artificial Sequence
  Description of Artificial Sequence: Synthetic oligonucleotide
  Antisense strand to SEQ ID NO: 851614
uaggugagucgacucgcgc

SEQ ID NO: 851616 - RNA, 19 nt, Artificial Sequence
  Description of Artificial Sequence: Synthetic oligonucleotide
  Sense strand starting at position 1865 of SEQ ID NO: 588243
ggacuacacuucccagacu

SEQ ID NO: 851617 - RNA, 19 nt, Artificial Sequence
  Description of Artificial Sequence: Synthetic oligonucleotide
  Antisense strand to SEQ ID NO: 851616
agucugggaaguguagucc

SEQ ID NO: 851618 - RNA, 19 nt, Artificial Sequence
  Description of Artificial Sequence: Synthetic oligonucleotide
  Sense strand starting at position 2419 of SEQ ID NO: 588243
cgacucauccaguaacggu

SEQ ID NO: 851619 - RNA, 19 nt, Artificial Sequence
  Description of Artificial Sequence: Synthetic oligonucleotide
  Antisense strand to SEQ ID NO: 851618
accguuacuggaugagucg

SEQ ID NO: 851620 - RNA, 19 nt, Artificial Sequence
  Description of Artificial Sequence: Synthetic oligonucleotide
  Sense strand starting at position 2452 of SEQ ID NO: 588243
aagugucuuggccaagguu

SEQ ID NO: 851621 - RNA, 19 nt, Artificial Sequence
  Description of Artificial Sequence: Synthetic oligonucleotide
  Antisense strand to SEQ ID NO: 851620
aaccuuggccaagacacuu

SEQ ID NO: 851622 - RNA, 19 nt, Artificial Sequence
  Description of Artificial Sequence: Synthetic oligonucleotide
  Sense strand starting at position 2472 of SEQ ID NO: 588243
augccuuuggcagaucuca

SEQ ID NO: 851623 - RNA, 19 nt, Artificial Sequence
  Description of Artificial Sequence: Synthetic oligonucleotide
  Antisense strand to SEQ ID NO: 851622
ugagaucugccaaaggcau

SEQ ID NO: 851624 - RNA, 19 nt, Artificial Sequence
  Description of Artificial Sequence: Synthetic oligonucleotide
  Sense strand starting at position 2538 of SEQ ID NO: 588243
guuugaaauguauacacuu

SEQ ID NO: 851625 - RNA, 19 nt, Artificial Sequence
  Description of Artificial Sequence: Synthetic oligonucleotide
  Antisense strand to SEQ ID NO: 851624
aaguguauacauuucaaac

SEQ ID NO: 851626 - RNA, 19 nt, Artificial Sequence
  Description of Artificial Sequence: Synthetic oligonucleotide
  Sense strand starting at position 2564 of SEQ ID NO: 588243
uguaacuuguuauccuuua

SEQ ID NO: 851627 - RNA, 19 nt, Artificial Sequence
  Description of Artificial Sequence: Synthetic oligonucleotide
  Antisense strand to SEQ ID NO: 851626
uaaaggauaacaaguuaca

SEQ ID NO: 851628 - RNA, 19 nt, Artificial Sequence
  Description of Artificial Sequence: Synthetic oligonucleotide
  Sense strand starting at position 2630 of SEQ ID NO: 588243
agcaguaauccgggaagca

SEQ ID NO: 851629 - RNA, 19 nt, Artificial Sequence
  Description of Artificial Sequence: Synthetic oligonucleotide
  Antisense strand to SEQ ID NO: 851628
ugcuucccggauuacugcu

SEQ ID NO: 851630 - RNA, 19 nt, Artificial Sequence
  Description of Artificial Sequence: Synthetic oligonucleotide
  Sense strand starting at position 2631 of SEQ ID NO: 588243
gcaguaauccgggaagcau

SEQ ID NO: 851631 - RNA, 19 nt, Artificial Sequence
  Description of Artificial Sequence: Synthetic oligonucleotide
  Antisense strand to SEQ ID NO: 851630
augcuucccggauuacugc

SEQ ID NO: 851632 - RNA, 19 nt, Artificial Sequence
  Description of Artificial Sequence: Synthetic oligonucleotide
  Sense strand starting at position 2723 of SEQ ID NO: 588243
ccgagagaaccucacuagu

SEQ ID NO: 851633 - RNA, 19 nt, Artificial Sequence
  Description of Artificial Sequence: Synthetic oligonucleotide
  Antisense strand to SEQ ID NO: 851632
acuagugagguucucucgg

SEQ ID NO: 851634 - RNA, 19 nt, Artificial Sequence
  Description of Artificial Sequence: Synthetic oligonucleotide
  Sense strand starting at position 2725 of SEQ ID NO: 588243
gagagaaccucacuaguuu

SEQ ID NO: 851635 - RNA, 19 nt, Artificial Sequence
  Description of Artificial Sequence: Synthetic oligonucleotide
  Antisense strand to SEQ ID NO: 851634
aaacuagugagguucucuc

SEQ ID NO: 851636 - RNA, 19 nt, Artificial Sequence
  Description of Artificial Sequence: Synthetic oligonucleotide
  Sense strand starting at position 2894 of SEQ ID NO: 588243
ucuggugaaguccgguaaa

SEQ ID NO: 851637 - RNA, 19 nt, Artificial Sequence
  Description of Artificial Sequence: Synthetic oligonucleotide
  Antisense strand to SEQ ID NO: 851636
uuuaccggacuucaccaga

SEQ ID NO: 851638 - RNA, 19 nt, Artificial Sequence
  Description of Artificial Sequence: Synthetic oligonucleotide
  Sense strand starting at position 2897 of SEQ ID NO: 588243
ggugaaguccgguaaauug

SEQ ID NO: 851639 - RNA, 19 nt, Artificial Sequence
  Description of Artificial Sequence: Synthetic oligonucleotide
  Antisense strand to SEQ ID NO: 851638
caauuuaccggacuucacc

SEQ ID NO: 851640 - RNA, 19 nt, Artificial Sequence
  Description of Artificial Sequence: Synthetic oligonucleotide
  Sense strand starting at position 2904 of SEQ ID NO: 588243
uccgguaaauugccaagau

SEQ ID NO: 851641 - RNA, 19 nt, Artificial Sequence
  Description of Artificial Sequence: Synthetic oligonucleotide
  Antisense strand to SEQ ID NO: 851640
aucuuggcaauuuaccgga

SEQ ID NO: 851642 - RNA, 19 nt, Artificial Sequence
  Description of Artificial Sequence: Synthetic oligonucleotide
  Sense strand starting at position 3171 of SEQ ID NO: 588243
uuguguaaugaauaccuuu

SEQ ID NO: 851643 - RNA, 19 nt, Artificial Sequence
  Description of Artificial Sequence: Synthetic oligonucleotide
  Antisense strand to SEQ ID NO: 851642
aaagguauucauuacacaa

SEQ ID NO: 851644 - RNA, 19 nt, Artificial Sequence
  Description of Artificial Sequence: Synthetic oligonucleotide
  Sense strand starting at position 3545 of SEQ ID NO: 588243
cagcuauaaggcuguauuu

SEQ ID NO: 851645 - RNA, 19 nt, Artificial Sequence
  Description of Artificial Sequence: Synthetic oligonucleotide
  Antisense strand to SEQ ID NO: 851644
aaauacagccuuauagcug

SEQ ID NO: 851646 - RNA, 19 nt, Artificial Sequence
  Description of Artificial Sequence: Synthetic oligonucleotide
  Sense strand starting at position 3621 of SEQ ID NO: 588243
uuucuucuaugagugagca

SEQ ID NO: 851647 - RNA, 19 nt, Artificial Sequence
  Description of Artificial Sequence: Synthetic oligonucleotide
  Antisense strand to SEQ ID NO: 851646
ugcucacucauagaagaaa

SEQ ID NO: 851648 - RNA, 19 nt, Artificial Sequence
  Description of Artificial Sequence: Synthetic oligonucleotide
  Sense strand starting at position 3623 of SEQ ID NO: 588243
ucuucuaugagugagcagu

SEQ ID NO: 851649 - RNA, 19 nt, Artificial Sequence
  Description of Artificial Sequence: Synthetic oligonucleotide
  Antisense strand to SEQ ID NO: 851648
acugcucacucauagaaga

SEQ ID NO: 851650 - RNA, 19 nt, Artificial Sequence
  Description of Artificial Sequence: Synthetic oligonucleotide
  Sense strand starting at position 3671 of SEQ ID NO: 588243
ucagauugauuccauuugu

SEQ ID NO: 851651 - RNA, 19 nt, Artificial Sequence
  Description of Artificial Sequence: Synthetic oligonucleotide
  Antisense strand to SEQ ID NO: 851650
acaaauggaaucaaucuga

SEQ ID NO: 851652 - RNA, 19 nt, Artificial Sequence
  Description of Artificial Sequence: Synthetic oligonucleotide
  Sense strand starting at position 3686 of SEQ ID NO: 588243
uugucuucuggagaucuaa

SEQ ID NO: 851653 - RNA, 19 nt, Artificial Sequence
  Description of Artificial Sequence: Synthetic oligonucleotide
  Antisense strand to SEQ ID NO: 851652
uuagaucuccagaagacaa

SEQ ID NO: 851654 - RNA, 19 nt, Artificial Sequence
  Description of Artificial Sequence: Synthetic oligonucleotide
  Sense strand starting at position 3728 of SEQ ID NO: 588243
gcuagagugguucaugaua

SEQ ID NO: 851655 - RNA, 19 nt, Artificial Sequence
  Description of Artificial Sequence: Synthetic oligonucleotide
  Antisense strand to SEQ ID NO: 851654
uaucaugaaccacucuagc

SEQ ID NO: 851656 - RNA, 19 nt, Artificial Sequence
  Description of Artificial Sequence: Synthetic oligonucleotide
  Sense strand starting at position 171 of SEQ ID NO: 588244
gagucauaaguggguucua

SEQ ID NO: 851657 - RNA, 19 nt, Artificial Sequence
  Description of Artificial Sequence: Synthetic oligonucleotide
  Antisense strand to SEQ ID NO: 851656
uagaacccacuuaugacuc

SEQ ID NO: 851658 - RNA, 19 nt, Artificial Sequence
  Description of Artificial Sequence: Synthetic oligonucleotide
  Sense strand starting at position 212 of SEQ ID NO: 588244
guuacauggccucagggaa

SEQ ID NO: 851659 - RNA, 19 nt, Artificial Sequence
  Description of Artificial Sequence: Synthetic oligonucleotide
  Antisense strand to SEQ ID NO: 851658
uucccugaggccauguaac

SEQ ID NO: 851660 - RNA, 19 nt, Artificial Sequence
  Description of Artificial Sequence: Synthetic oligonucleotide
  Sense strand starting at position 330 of SEQ ID NO: 588244
ucucuagauuacuucugua

SEQ ID NO: 851661 - RNA, 19 nt, Artificial Sequence
  Description of Artificial Sequence: Synthetic oligonucleotide
  Antisense strand to SEQ ID NO: 851660
uacagaaguaaucuagaga

SEQ ID NO: 851662 - RNA, 19 nt, Artificial Sequence
  Description of Artificial Sequence: Synthetic oligonucleotide
  Sense strand starting at position 505 of SEQ ID NO: 588244
auuagugggugacuaauga

SEQ ID NO: 851663 - RNA, 19 nt, Artificial Sequence
  Description of Artificial Sequence: Synthetic oligonucleotide
  Antisense strand to SEQ ID NO: 851662
ucauuagucacccacuaau

SEQ ID NO: 851664 - RNA, 19 nt, Artificial Sequence
  Description of Artificial Sequence: Synthetic oligonucleotide
  Sense strand starting at position 579 of SEQ ID NO: 588244
gacuuagcuggccaaagua

SEQ ID NO: 851665 - RNA, 19 nt, Artificial Sequence
  Description of Artificial Sequence: Synthetic oligonucleotide
  Antisense strand to SEQ ID NO: 851664
uacuuuggccagcuaaguc

SEQ ID NO: 851666 - RNA, 19 nt, Artificial Sequence
  Description of Artificial Sequence: Synthetic oligonucleotide
  Sense strand starting at position 596 of SEQ ID NO: 588244
uacagacagugguuaugaa

SEQ ID NO: 851667 - RNA, 19 nt, Artificial Sequence
  Description of Artificial Sequence: Synthetic oligonucleotide
  Antisense strand to SEQ ID NO: 851666
uucauaaccacugucugua

SEQ ID NO: 851668 - RNA, 19 nt, Artificial Sequence
  Description of Artificial Sequence: Synthetic oligonucleotide
  Sense strand starting at position 604 of SEQ ID NO: 588244
gugguuaugaaacagcauu

SEQ ID NO: 851669 - RNA, 19 nt, Artificial Sequence
  Description of Artificial Sequence: Synthetic oligonucleotide
  Antisense strand to SEQ ID NO: 851668
aaugcuguuucauaaccac

SEQ ID NO: 851670 - RNA, 19 nt, Artificial Sequence
  Description of Artificial Sequence: Synthetic oligonucleotide
  Sense strand starting at position 646 of SEQ ID NO: 588244
cccuguuagcuggacauaa

SEQ ID NO: 851671 - RNA, 19 nt, Artificial Sequence
  Description of Artificial Sequence: Synthetic oligonucleotide
  Antisense strand to SEQ ID NO: 851670
uuauguccagcuaacaggg

SEQ ID NO: 851672 - RNA, 19 nt, Artificial Sequence
  Description of Artificial Sequence: Synthetic oligonucleotide
  Sense strand starting at position 648 of SEQ ID NO: 588244
cuguuagcuggacauaaga

SEQ ID NO: 851673 - RNA, 19 nt, Artificial Sequence
  Description of Artificial Sequence: Synthetic oligonucleotide
  Antisense strand to SEQ ID NO: 851672
ucuuauguccagcuaacag

SEQ ID NO: 851674 - RNA, 19 nt, Artificial Sequence
  Description of Artificial Sequence: Synthetic oligonucleotide
  Sense strand starting at position 650 of SEQ ID NO: 588244
guuagcuggacauaagauu

SEQ ID NO: 851675 - RNA, 19 nt, Artificial Sequence
  Description of Artificial Sequence: Synthetic oligonucleotide
  Antisense strand to SEQ ID NO: 851674
aaucuuauguccagcuaac

SEQ ID NO: 851676 - RNA, 19 nt, Artificial Sequence
  Description of Artificial Sequence: Synthetic oligonucleotide
  Sense strand starting at position 680 of SEQ ID NO: 588244
gcuuacugguaagcaauuu

SEQ ID NO: 851677 - RNA, 19 nt, Artificial Sequence
  Description of Artificial Sequence: Synthetic oligonucleotide
  Antisense strand to SEQ ID NO: 851676
aaauugcuuaccaguaagc

SEQ ID NO: 851678 - RNA, 19 nt, Artificial Sequence
  Description of Artificial Sequence: Synthetic oligonucleotide
  Sense strand starting at position 790 of SEQ ID NO: 588244
gcggcagacacuuaugauc

SEQ ID NO: 851679 - RNA, 19 nt, Artificial Sequence
  Description of Artificial Sequence: Synthetic oligonucleotide
  Antisense strand to SEQ ID NO: 851678
gaucauaagugucugccgc

SEQ ID NO: 851680 - RNA, 19 nt, Artificial Sequence
  Description of Artificial Sequence: Synthetic oligonucleotide
  Sense strand starting at position 982 of SEQ ID NO: 588244
gcaggaaugcuggauugaa

SEQ ID NO: 851681 - RNA, 19 nt, Artificial Sequence
  Description of Artificial Sequence: Synthetic oligonucleotide
  Antisense strand to SEQ ID NO: 851680
uucaauccagcauuccugc

SEQ ID NO: 851682 - RNA, 19 nt, Artificial Sequence
  Description of Artificial Sequence: Synthetic oligonucleotide
  Sense strand starting at position 1067 of SEQ ID NO: 588244
uggagaaugacgugaagca

SEQ ID NO: 851683 - RNA, 19 nt, Artificial Sequence
  Description of Artificial Sequence: Synthetic oligonucleotide
  Antisense strand to SEQ ID NO: 851682
ugcuucacgucauucucca

SEQ ID NO: 851684 - RNA, 19 nt, Artificial Sequence
  Description of Artificial Sequence: Synthetic oligonucleotide
  Sense strand starting at position 1202 of SEQ ID NO: 588244
augugaaaucuuugucagg

SEQ ID NO: 851685 - RNA, 19 nt, Artificial Sequence
  Description of Artificial Sequence: Synthetic oligonucleotide
  Antisense strand to SEQ ID NO: 851684
ccugacaaagauuucacau

SEQ ID NO: 851686 - RNA, 19 nt, Artificial Sequence
  Description of Artificial Sequence: Synthetic oligonucleotide
  Sense strand starting at position 1203 of SEQ ID NO: 588244
ugugaaaucuuugucagga

SEQ ID NO: 851687 - RNA, 19 nt, Artificial Sequence
  Description of Artificial Sequence: Synthetic oligonucleotide
  Antisense strand to SEQ ID NO: 851686
uccugacaaagauuucaca

SEQ ID NO: 851688 - RNA, 19 nt, Artificial Sequence
  Description of Artificial Sequence: Synthetic oligonucleotide
  Sense strand starting at position 1204 of SEQ ID NO: 588244
gugaaaucuuugucaggac

SEQ ID NO: 851689 - RNA, 19 nt, Artificial Sequence
  Description of Artificial Sequence: Synthetic oligonucleotide
  Antisense strand to SEQ ID NO: 851688
guccugacaaagauuucac

SEQ ID NO: 851690 - RNA, 19 nt, Artificial Sequence
  Description of Artificial Sequence: Synthetic oligonucleotide
  Sense strand starting at position 1271 of SEQ ID NO: 588244
acaaguaugcuagagccuu

SEQ ID NO: 851691 - RNA, 19 nt, Artificial Sequence
  Description of Artificial Sequence: Synthetic oligonucleotide
  Antisense strand to SEQ ID NO: 851690
aaggcucuagcauacuugu

SEQ ID NO: 851692 - RNA, 19 nt, Artificial Sequence
  Description of Artificial Sequence: Synthetic oligonucleotide
  Sense strand starting at position 2172 of SEQ ID NO: 588244
guuuguuagguagcguuau

SEQ ID NO: 851693 - RNA, 19 nt, Artificial Sequence
  Description of Artificial Sequence: Synthetic oligonucleotide
  Antisense strand to SEQ ID NO: 851692
auaacgcuaccuaacaaac

SEQ ID NO: 851694 - RNA, 19 nt, Artificial Sequence
  Description of Artificial Sequence: Synthetic oligonucleotide
  Sense strand starting at position 2202 of SEQ ID NO: 588244
ugguguucccuauaccgaa

SEQ ID NO: 851695 - RNA, 19 nt, Artificial Sequence
  Description of Artificial Sequence: Synthetic oligonucleotide
  Antisense strand to SEQ ID NO: 851694
uucgguauagggaacacca

SEQ ID NO: 851696 - RNA, 19 nt, Artificial Sequence
  Description of Artificial Sequence: Synthetic oligonucleotide
  Sense strand starting at position 2321 of SEQ ID NO: 588244
gugauucuaaggcagaguu

SEQ ID NO: 851697 - RNA, 19 nt, Artificial Sequence
  Description of Artificial Sequence: Synthetic oligonucleotide
  Antisense strand to SEQ ID NO: 851696
aacucugccuuagaaucac

SEQ ID NO: 851698 - RNA, 19 nt, Artificial Sequence
  Description of Artificial Sequence: Synthetic oligonucleotide
  Sense strand starting at position 2545 of SEQ ID NO: 588244
cuuguuuaagccuaaagau

SEQ ID NO: 851699 - RNA, 19 nt, Artificial Sequence
  Description of Artificial Sequence: Synthetic oligonucleotide
  Antisense strand to SEQ ID NO: 851698
aucuuuaggcuuaaacaag

SEQ ID NO: 851700 - RNA, 19 nt, Artificial Sequence
  Description of Artificial Sequence: Synthetic oligonucleotide
  Sense strand starting at position 2608 of SEQ ID NO: 588244
cagcaugcccgagaucaca

SEQ ID NO: 851701 - RNA, 19 nt, Artificial Sequence
  Description of Artificial Sequence: Synthetic oligonucleotide
  Antisense strand to SEQ ID NO: 851700
ugugaucucgggcaugcug

SEQ ID NO: 851702 - RNA, 19 nt, Artificial Sequence
  Description of Artificial Sequence: Synthetic oligonucleotide
  Sense strand starting at position 2827 of SEQ ID NO: 588244
gugagaaugucauuaguau

SEQ ID NO: 851703 - RNA, 19 nt, Artificial Sequence
  Description of Artificial Sequence: Synthetic oligonucleotide
  Antisense strand to SEQ ID NO: 851702
auacuaaugacauucucac

SEQ ID NO: 851704 - RNA, 19 nt, Artificial Sequence
  Description of Artificial Sequence: Synthetic oligonucleotide
  Sense strand starting at position 2833 of SEQ ID NO: 588244
augucauuaguauaaccuu

SEQ ID NO: 851705 - RNA, 19 nt, Artificial Sequence
  Description of Artificial Sequence: Synthetic oligonucleotide
  Antisense strand to SEQ ID NO: 851704
aagguuauacuaaugacau

SEQ ID NO: 851706 - RNA, 19 nt, Artificial Sequence
  Description of Artificial Sequence: Synthetic oligonucleotide
  Sense strand starting at position 2858 of SEQ ID NO: 588244
ggaguaauuugacaauaug

SEQ ID NO: 851707 - RNA, 19 nt, Artificial Sequence
  Description of Artificial Sequence: Synthetic oligonucleotide
  Antisense strand to SEQ ID NO: 851706
cauauugucaaauuacucc

SEQ ID NO: 851708 - RNA, 19 nt, Artificial Sequence
  Description of Artificial Sequence: Synthetic oligonucleotide
  Sense strand starting at position 2878 of SEQ ID NO: 588244
gaggcuugagcggauugau

SEQ ID NO: 851709 - RNA, 19 nt, Artificial Sequence
  Description of Artificial Sequence: Synthetic oligonucleotide
  Antisense strand to SEQ ID NO: 851708
aucaauccgcucaagccuc

SEQ ID NO: 851710 - RNA, 19 nt, Artificial Sequence
  Description of Artificial Sequence: Synthetic oligonucleotide
  Sense strand starting at position 2912 of SEQ ID NO: 588244
cuaagaaaguaugcaacaa

SEQ ID NO: 851711 - RNA, 19 nt, Artificial Sequence
  Description of Artificial Sequence: Synthetic oligonucleotide
  Antisense strand to SEQ ID NO: 851710
uuguugcauacuuucuuag

SEQ ID NO: 851712 - RNA, 19 nt, Artificial Sequence
  Description of Artificial Sequence: Synthetic oligonucleotide
  Sense strand starting at position 3015 of SEQ ID NO: 588244
auucuaauuguccaucgau

SEQ ID NO: 851713 - RNA, 19 nt, Artificial Sequence
  Description of Artificial Sequence: Synthetic oligonucleotide
  Antisense strand to SEQ ID NO: 851712
aucgauggacaauuagaau

SEQ ID NO: 851714 - RNA, 19 nt, Artificial Sequence
  Description of Artificial Sequence: Synthetic oligonucleotide
  Sense strand starting at position 3018 of SEQ ID NO: 588244
cuaauuguccaucgauaga

SEQ ID NO: 851715 - RNA, 19 nt, Artificial Sequence
  Description of Artificial Sequence: Synthetic oligonucleotide
  Antisense strand to SEQ ID NO: 851714
ucuaucgauggacaauuag

SEQ ID NO: 851716 - RNA, 19 nt, Artificial Sequence
  Description of Artificial Sequence: Synthetic oligonucleotide
  Sense strand starting at position 3098 of SEQ ID NO: 588244
guaucugaauaugcugaua

SEQ ID NO: 851717 - RNA, 19 nt, Artificial Sequence
  Description of Artificial Sequence: Synthetic oligonucleotide
  Antisense strand to SEQ ID NO: 851716
uaucagcauauucagauac

SEQ ID NO: 851718 - RNA, 19 nt, Artificial Sequence
  Description of Artificial Sequence: Synthetic oligonucleotide
  Sense strand starting at position 3345 of SEQ ID NO: 588244
ugaggaucuuuacuuucca

SEQ ID NO: 851719 - RNA, 19 nt, Artificial Sequence
  Description of Artificial Sequence: Synthetic oligonucleotide
  Antisense strand to SEQ ID NO: 851718
uggaaaguaaagauccuca

SEQ ID NO: 851720 - RNA, 19 nt, Artificial Sequence
  Description of Artificial Sequence: Synthetic oligonucleotide
  Sense strand starting at position 3601 of SEQ ID NO: 588244
cacaaagugcuuugaauag

SEQ ID NO: 851721 - RNA, 19 nt, Artificial Sequence
  Description of Artificial Sequence: Synthetic oligonucleotide
  Antisense strand to SEQ ID NO: 851720
cuauucaaagcacuuugug

SEQ ID NO: 851722 - RNA, 19 nt, Artificial Sequence
  Description of Artificial Sequence: Synthetic oligonucleotide
  Sense strand starting at position 3647 of SEQ ID NO: 588244
aacgcuaaugcuguuaguu

SEQ ID NO: 851723 - RNA, 19 nt, Artificial Sequence
  Description of Artificial Sequence: Synthetic oligonucleotide
  Antisense strand to SEQ ID NO: 851722
aacuaacagcauuagcguu

SEQ ID NO: 851724 - RNA, 19 nt, Artificial Sequence
  Description of Artificial Sequence: Synthetic oligonucleotide
  Sense strand starting at position 3648 of SEQ ID NO: 588244
acgcuaaugcuguuaguuu

SEQ ID NO: 851725 - RNA, 19 nt, Artificial Sequence
  Description of Artificial Sequence: Synthetic oligonucleotide
  Antisense strand to SEQ ID NO: 851724
aaacuaacagcauuagcgu

SEQ ID NO: 851726 - RNA, 19 nt, Artificial Sequence
  Description of Artificial Sequence: Synthetic oligonucleotide
  Sense strand starting at position 3724 of SEQ ID NO: 588244
acuuuagaguuccucauau

SEQ ID NO: 851727 - RNA, 19 nt, Artificial Sequence
  Description of Artificial Sequence: Synthetic oligonucleotide
  Antisense strand to SEQ ID NO: 851726
auaugaggaacucuaaagu

SEQ ID NO: 851728 - RNA, 19 nt, Artificial Sequence
  Description of Artificial Sequence: Synthetic oligonucleotide
  Sense strand starting at position 3755 of SEQ ID NO: 588244
ggagaauccuguuuauucc

SEQ ID NO: 851729 - RNA, 19 nt, Artificial Sequence
  Description of Artificial Sequence: Synthetic oligonucleotide
  Antisense strand to SEQ ID NO: 851728
ggaauaaacaggauucucc

SEQ ID NO: 851730 - RNA, 19 nt, Artificial Sequence
  Description of Artificial Sequence: Synthetic oligonucleotide
  Sense strand starting at position 3788 of SEQ ID NO: 588244
acaucuguguaucuauaau

SEQ ID NO: 851731 - RNA, 19 nt, Artificial Sequence
  Description of Artificial Sequence: Synthetic oligonucleotide
  Antisense strand to SEQ ID NO: 851730
auuauagauacacagaugu

SEQ ID NO: 851732 - RNA, 19 nt, Artificial Sequence
  Description of Artificial Sequence: Synthetic oligonucleotide
  Sense strand starting at position 3794 of SEQ ID NO: 588244
guguaucuauaauucucaa

SEQ ID NO: 851733 - RNA, 19 nt, Artificial Sequence
  Description of Artificial Sequence: Synthetic oligonucleotide
  Antisense strand to SEQ ID NO: 851732
uugagaauuauagauacac

SEQ ID NO: 851734 - RNA, 19 nt, Artificial Sequence
  Description of Artificial Sequence: Synthetic oligonucleotide
  Sense strand starting at position 3865 of SEQ ID NO: 588244
gcugauuugucaucucauu

SEQ ID NO: 851735 - RNA, 19 nt, Artificial Sequence
  Description of Artificial Sequence: Synthetic oligonucleotide
  Antisense strand to SEQ ID NO: 851734
aaugagaugacaaaucagc

SEQ ID NO: 851736 - RNA, 19 nt, Artificial Sequence
  Description of Artificial Sequence: Synthetic oligonucleotide
  Sense strand starting at position 205 of SEQ ID NO: 588245
ucaaucuuagaguguauuc

SEQ ID NO: 851737 - RNA, 19 nt, Artificial Sequence
  Description of Artificial Sequence: Synthetic oligonucleotide
  Antisense strand to SEQ ID NO: 851736
gaauacacucuaagauuga

SEQ ID NO: 851738 - RNA, 19 nt, Artificial Sequence
  Description of Artificial Sequence: Synthetic oligonucleotide
  Sense strand starting at position 210 of SEQ ID NO: 588245
cuuagaguguauucuacca

SEQ ID NO: 851739 - RNA, 19 nt, Artificial Sequence
  Description of Artificial Sequence: Synthetic oligonucleotide
  Antisense strand to SEQ ID NO: 851738
ugguagaauacacucuaag

SEQ ID NO: 851740 - RNA, 19 nt, Artificial Sequence
  Description of Artificial Sequence: Synthetic oligonucleotide
  Sense strand starting at position 217 of SEQ ID NO: 588245
uguauucuaccagacuuua

SEQ ID NO: 851741 - RNA, 19 nt, Artificial Sequence
  Description of Artificial Sequence: Synthetic oligonucleotide
  Antisense strand to SEQ ID NO: 851740
uaaagucugguagaauaca

SEQ ID NO: 851742 - RNA, 19 nt, Artificial Sequence
  Description of Artificial Sequence: Synthetic oligonucleotide
  Sense strand starting at position 370 of SEQ ID NO: 588245
ccuguuaacucuccaggga

SEQ ID NO: 851743 - RNA, 19 nt, Artificial Sequence
  Description of Artificial Sequence: Synthetic oligonucleotide
  Antisense strand to SEQ ID NO: 851742
ucccuggagaguuaacagg

SEQ ID NO: 851744 - RNA, 19 nt, Artificial Sequence
  Description of Artificial Sequence: Synthetic oligonucleotide
  Sense strand starting at position 406 of SEQ ID NO: 588245
uuucgacaugggugagaga

SEQ ID NO: 851745 - RNA, 19 nt, Artificial Sequence
  Description of Artificial Sequence: Synthetic oligonucleotide
  Antisense strand to SEQ ID NO: 851744
ucucucacccaugucgaaa

SEQ ID NO: 851746 - RNA, 19 nt, Artificial Sequence
  Description of Artificial Sequence: Synthetic oligonucleotide
  Sense strand starting at position 755 of SEQ ID NO: 588245
ugccuuguacaguaguaaa

SEQ ID NO: 851747 - RNA, 19 nt, Artificial Sequence
  Description of Artificial Sequence: Synthetic oligonucleotide
  Antisense strand to SEQ ID NO: 851746
uuuacuacuguacaaggca

SEQ ID NO: 851748 - RNA, 19 nt, Artificial Sequence
  Description of Artificial Sequence: Synthetic oligonucleotide
  Sense strand starting at position 793 of SEQ ID NO: 588245
guauauaaugccugcagaa

SEQ ID NO: 851749 - RNA, 19 nt, Artificial Sequence
  Description of Artificial Sequence: Synthetic oligonucleotide
  Antisense strand to SEQ ID NO: 851748
uucugcaggcauuauauac

SEQ ID NO: 851750 - RNA, 19 nt, Artificial Sequence
  Description of Artificial Sequence: Synthetic oligonucleotide
  Sense strand starting at position 795 of SEQ ID NO: 588245
auauaaugccugcagaaca

SEQ ID NO: 851751 - RNA, 19 nt, Artificial Sequence
  Description of Artificial Sequence: Synthetic oligonucleotide
  Antisense strand to SEQ ID NO: 851750
uguucugcaggcauuauau

SEQ ID NO: 851752 - RNA, 19 nt, Artificial Sequence
  Description of Artificial Sequence: Synthetic oligonucleotide
  Sense strand starting at position 909 of SEQ ID NO: 588245
ggcaaaugagagugaaugu

SEQ ID NO: 851753 - RNA, 19 nt, Artificial Sequence
  Description of Artificial Sequence: Synthetic oligonucleotide
  Antisense strand to SEQ ID NO: 851752
acauucacucucauuugcc

SEQ ID NO: 851754 - RNA, 19 nt, Artificial Sequence
  Description of Artificial Sequence: Synthetic oligonucleotide
  Sense strand starting at position 1098 of SEQ ID NO: 588245
agcgacugagggugagaau

SEQ ID NO: 851755 - RNA, 19 nt, Artificial Sequence
  Description of Artificial Sequence: Synthetic oligonucleotide
  Antisense strand to SEQ ID NO: 851754
auucucacccucagucgcu

SEQ ID NO: 851756 - RNA, 19 nt, Artificial Sequence
  Description of Artificial Sequence: Synthetic oligonucleotide
  Sense strand starting at position 1099 of SEQ ID NO: 588245
gcgacugagggugagaaua

SEQ ID NO: 851757 - RNA, 19 nt, Artificial Sequence
  Description of Artificial Sequence: Synthetic oligonucleotide
  Antisense strand to SEQ ID NO: 851756
uauucucacccucagucgc

SEQ ID NO: 851758 - RNA, 19 nt, Artificial Sequence
  Description of Artificial Sequence: Synthetic oligonucleotide
  Sense strand starting at position 1250 of SEQ ID NO: 588245
gccagucugcaggauagaa

SEQ ID NO: 851759 - RNA, 19 nt, Artificial Sequence
  Description of Artificial Sequence: Synthetic oligonucleotide
  Antisense strand to SEQ ID NO: 851758
uucuauccugcagacuggc

SEQ ID NO: 851760 - RNA, 19 nt, Artificial Sequence
  Description of Artificial Sequence: Synthetic oligonucleotide
  Sense strand starting at position 1452 of SEQ ID NO: 588245
ggcccaaaguagguuuaga

SEQ ID NO: 851761 - RNA, 19 nt, Artificial Sequence
  Description of Artificial Sequence: Synthetic oligonucleotide
  Antisense strand to SEQ ID NO: 851760
ucuaaaccuacuuugggcc

SEQ ID NO: 851762 - RNA, 19 nt, Artificial Sequence
  Description of Artificial Sequence: Synthetic oligonucleotide
  Sense strand starting at position 1460 of SEQ ID NO: 588245
guagguuuagaauaugagu

SEQ ID NO: 851763 - RNA, 19 nt, Artificial Sequence
  Description of Artificial Sequence: Synthetic oligonucleotide
  Antisense strand to SEQ ID NO: 851762
acucauauucuaaaccuac

SEQ ID NO: 851764 - RNA, 19 nt, Artificial Sequence
  Description of Artificial Sequence: Synthetic oligonucleotide
  Sense strand starting at position 1462 of SEQ ID NO: 588245
agguuuagaauaugaguag

SEQ ID NO: 851765 - RNA, 19 nt, Artificial Sequence
  Description of Artificial Sequence: Synthetic oligonucleotide
  Antisense strand to SEQ ID NO: 851764
cuacucauauucuaaaccu

SEQ ID NO: 851766 - RNA, 19 nt, Artificial Sequence
  Description of Artificial Sequence: Synthetic oligonucleotide
  Sense strand starting at position 1465 of SEQ ID NO: 588245
uuuagaauaugaguagguu

SEQ ID NO: 851767 - RNA, 19 nt, Artificial Sequence
  Description of Artificial Sequence: Synthetic oligonucleotide
  Antisense strand to SEQ ID NO: 851766
aaccuacucauauucuaaa

SEQ ID NO: 851768 - RNA, 19 nt, Artificial Sequence
  Description of Artificial Sequence: Synthetic oligonucleotide
  Sense strand starting at position 2143 of SEQ ID NO: 588245
gcacuauugaugcagacag

SEQ ID NO: 851769 - RNA, 19 nt, Artificial Sequence
  Description of Artificial Sequence: Synthetic oligonucleotide
  Antisense strand to SEQ ID NO: 851768
cugucugcaucaauagugc

SEQ ID NO: 851770 - RNA, 19 nt, Artificial Sequence
  Description of Artificial Sequence: Synthetic oligonucleotide
  Sense strand starting at position 2197 of SEQ ID NO: 588245
uggguccucuugucuuaaa

SEQ ID NO: 851771 - RNA, 19 nt, Artificial Sequence
  Description of Artificial Sequence: Synthetic oligonucleotide
  Antisense strand to SEQ ID NO: 851770
uuuaagacaagaggaccca

SEQ ID NO: 851772 - RNA, 19 nt, Artificial Sequence
  Description of Artificial Sequence: Synthetic oligonucleotide
  Sense strand starting at position 2602 of SEQ ID NO: 588245
cagaguaggccuuaaacuu

SEQ ID NO: 851773 - RNA, 19 nt, Artificial Sequence
  Description of Artificial Sequence: Synthetic oligonucleotide
  Antisense strand to SEQ ID NO: 851772
aaguuuaaggccuacucug

SEQ ID NO: 851774 - RNA, 19 nt, Artificial Sequence
  Description of Artificial Sequence: Synthetic oligonucleotide
  Sense strand starting at position 2621 of SEQ ID NO: 588245
cugaaaggaugcucaacuu

SEQ ID NO: 851775 - RNA, 19 nt, Artificial Sequence
  Description of Artificial Sequence: Synthetic oligonucleotide
  Antisense strand to SEQ ID NO: 851774
aaguugagcauccuuucag

SEQ ID NO: 851776 - RNA, 19 nt, Artificial Sequence
  Description of Artificial Sequence: Synthetic oligonucleotide
  Sense strand starting at position 2679 of SEQ ID NO: 588245
ucacauauuggauggcuaa

SEQ ID NO: 851777 - RNA, 19 nt, Artificial Sequence
  Description of Artificial Sequence: Synthetic oligonucleotide
  Antisense strand to SEQ ID NO: 851776
uuagccauccaauauguga

SEQ ID NO: 851778 - RNA, 19 nt, Artificial Sequence
  Description of Artificial Sequence: Synthetic oligonucleotide
  Sense strand starting at position 2682 of SEQ ID NO: 588245
cauauuggauggcuaaaga

SEQ ID NO: 851779 - RNA, 19 nt, Artificial Sequence
  Description of Artificial Sequence: Synthetic oligonucleotide
  Antisense strand to SEQ ID NO: 851778
ucuuuagccauccaauaug

SEQ ID NO: 851780 - RNA, 19 nt, Artificial Sequence
  Description of Artificial Sequence: Synthetic oligonucleotide
  Sense strand starting at position 2698 of SEQ ID NO: 588245
agaucucaggucuaauagu

SEQ ID NO: 851781 - RNA, 19 nt, Artificial Sequence
  Description of Artificial Sequence: Synthetic oligonucleotide
  Antisense strand to SEQ ID NO: 851780
acuauuagaccugagaucu

SEQ ID NO: 851782 - RNA, 19 nt, Artificial Sequence
  Description of Artificial Sequence: Synthetic oligonucleotide
  Sense strand starting at position 2776 of SEQ ID NO: 588245
ugacgauguugaucaaauc

SEQ ID NO: 851783 - RNA, 19 nt, Artificial Sequence
  Description of Artificial Sequence: Synthetic oligonucleotide
  Antisense strand to SEQ ID NO: 851782
gauuugaucaacaucguca

SEQ ID NO: 851784 - RNA, 19 nt, Artificial Sequence
  Description of Artificial Sequence: Synthetic oligonucleotide
  Sense strand starting at position 2877 of SEQ ID NO: 588245
uguacaaaguuauuccauu

SEQ ID NO: 851785 - RNA, 19 nt, Artificial Sequence
  Description of Artificial Sequence: Synthetic oligonucleotide
  Antisense strand to SEQ ID NO: 851784
aauggaauaacuuuguaca

SEQ ID NO: 851786 - RNA, 19 nt, Artificial Sequence
  Description of Artificial Sequence: Synthetic oligonucleotide
  Sense strand starting at position 2878 of SEQ ID NO: 588245
guacaaaguuauuccauug

SEQ ID NO: 851787 - RNA, 19 nt, Artificial Sequence
  Description of Artificial Sequence: Synthetic oligonucleotide
  Antisense strand to SEQ ID NO: 851786
caauggaauaacuuuguac

SEQ ID NO: 851788 - RNA, 19 nt, Artificial Sequence
  Description of Artificial Sequence: Synthetic oligonucleotide
  Sense strand starting at position 3142 of SEQ ID NO: 588245
agauuuccugagugugguu

SEQ ID NO: 851789 - RNA, 19 nt, Artificial Sequence
  Description of Artificial Sequence: Synthetic oligonucleotide
  Antisense strand to SEQ ID NO: 851788
aaccacacucaggaaaucu

SEQ ID NO: 851790 - RNA, 19 nt, Artificial Sequence
  Description of Artificial Sequence: Synthetic oligonucleotide
  Sense strand starting at position 3299 of SEQ ID NO: 588245
ucacuucuggguuaauaau

SEQ ID NO: 851791 - RNA, 19 nt, Artificial Sequence
  Description of Artificial Sequence: Synthetic oligonucleotide
  Antisense strand to SEQ ID NO: 851790
auuauuaacccagaaguga

SEQ ID NO: 851792 - RNA, 19 nt, Artificial Sequence
  Description of Artificial Sequence: Synthetic oligonucleotide
  Sense strand starting at position 3305 of SEQ ID NO: 588245
cuggguuaauaauugcaga

SEQ ID NO: 851793 - RNA, 19 nt, Artificial Sequence
  Description of Artificial Sequence: Synthetic oligonucleotide
  Antisense strand to SEQ ID NO: 851792
ucugcaauuauuaacccag

SEQ ID NO: 851794 - RNA, 19 nt, Artificial Sequence
  Description of Artificial Sequence: Synthetic oligonucleotide
  Sense strand starting at position 3306 of SEQ ID NO: 588245
uggguuaauaauugcagaa

SEQ ID NO: 851795 - RNA, 19 nt, Artificial Sequence
  Description of Artificial Sequence: Synthetic oligonucleotide
  Antisense strand to SEQ ID NO: 851794
uucugcaauuauuaaccca

SEQ ID NO: 851796 - RNA, 19 nt, Artificial Sequence
  Description of Artificial Sequence: Synthetic oligonucleotide
  Sense strand starting at position 3327 of SEQ ID NO: 588245
augacuugauguccauaca

SEQ ID NO: 851797 - RNA, 19 nt, Artificial Sequence
  Description of Artificial Sequence: Synthetic oligonucleotide
  Antisense strand to SEQ ID NO: 851796
uguauggacaucaagucau

SEQ ID NO: 851798 - RNA, 19 nt, Artificial Sequence
  Description of Artificial Sequence: Synthetic oligonucleotide
  Sense strand starting at position 3350 of SEQ ID NO: 588245
auuccuccuguuugaugau

SEQ ID NO: 851799 - RNA, 19 nt, Artificial Sequence
  Description of Artificial Sequence: Synthetic oligonucleotide
  Antisense strand to SEQ ID NO: 851798
aucaucaaacaggaggaau

SEQ ID NO: 851800 - RNA, 19 nt, Artificial Sequence
  Description of Artificial Sequence: Synthetic oligonucleotide
  Sense strand starting at position 3420 of SEQ ID NO: 588245
aaguuaagggagugccaua

SEQ ID NO: 851801 - RNA, 19 nt, Artificial Sequence
  Description of Artificial Sequence: Synthetic oligonucleotide
  Antisense strand to SEQ ID NO: 851800
uauggcacucccuuaacuu

SEQ ID NO: 851802 - RNA, 19 nt, Artificial Sequence
  Description of Artificial Sequence: Synthetic oligonucleotide
  Sense strand starting at position 3430 of SEQ ID NO: 588245
agugccauagaauggaaua

SEQ ID NO: 851803 - RNA, 19 nt, Artificial Sequence
  Description of Artificial Sequence: Synthetic oligonucleotide
  Antisense strand to SEQ ID NO: 851802
uauuccauucuauggcacu

SEQ ID NO: 851804 - RNA, 19 nt, Artificial Sequence
  Description of Artificial Sequence: Synthetic oligonucleotide
  Sense strand starting at position 3523 of SEQ ID NO: 588245
ccgaguccuacggaucacu

SEQ ID NO: 851805 - RNA, 19 nt, Artificial Sequence
  Description of Artificial Sequence: Synthetic oligonucleotide
  Antisense strand to SEQ ID NO: 851804
agugauccguaggacucgg

SEQ ID NO: 851806 - RNA, 19 nt, Artificial Sequence
  Description of Artificial Sequence: Synthetic oligonucleotide
  Sense strand starting at position 3668 of SEQ ID NO: 588245
gggagaaucguuugaaugg

SEQ ID NO: 851807 - RNA, 19 nt, Artificial Sequence
  Description of Artificial Sequence: Synthetic oligonucleotide
  Antisense strand to SEQ ID NO: 851806
ccauucaaacgauucuccc

SEQ ID NO: 851808 - RNA, 19 nt, Artificial Sequence
  Description of Artificial Sequence: Synthetic oligonucleotide
  Sense strand starting at position 3812 of SEQ ID NO: 588245
acaaauagugcugggucau

SEQ ID NO: 851809 - RNA, 19 nt, Artificial Sequence
  Description of Artificial Sequence: Synthetic oligonucleotide
  Antisense strand to SEQ ID NO: 851808
augacccagcacuauuugu

SEQ ID NO: 851810 - RNA, 19 nt, Artificial Sequence
  Description of Artificial Sequence: Synthetic oligonucleotide
  Sense strand starting at position 3813 of SEQ ID NO: 588245
caaauagugcugggucauu

SEQ ID NO: 851811 - RNA, 19 nt, Artificial Sequence
  Description of Artificial Sequence: Synthetic oligonucleotide
  Antisense strand to SEQ ID NO: 851810
aaugacccagcacuauuug

SEQ ID NO: 851812 - RNA, 19 nt, Artificial Sequence
  Description of Artificial Sequence: Synthetic oligonucleotide
  Sense strand starting at position 3823 of SEQ ID NO: 588245
ugggucauuugagaaguca

SEQ ID NO: 851813 - RNA, 19 nt, Artificial Sequence
  Description of Artificial Sequence: Synthetic oligonucleotide
  Antisense strand to SEQ ID NO: 851812
ugacuucucaaaugaccca

SEQ ID NO: 851814 - RNA, 19 nt, Artificial Sequence
  Description of Artificial Sequence: Synthetic oligonucleotide
  Sense strand starting at position 3958 of SEQ ID NO: 588245
ucuuaauggcuuuggauua

SEQ ID NO: 851815 - RNA, 19 nt, Artificial Sequence
  Description of Artificial Sequence: Synthetic oligonucleotide
  Antisense strand to SEQ ID NO: 851814
uaauccaaagccauuaaga

SEQ ID NO: 851816 - RNA, 19 nt, Artificial Sequence
  Description of Artificial Sequence: Synthetic oligonucleotide
  Sense strand starting at position 284 of SEQ ID NO: 588246
gugccucauacaugaaggu

SEQ ID NO: 851817 - RNA, 19 nt, Artificial Sequence
  Description of Artificial Sequence: Synthetic oligonucleotide
  Antisense strand to SEQ ID NO: 851816
accuucauguaugaggcac

SEQ ID NO: 851818 - RNA, 19 nt, Artificial Sequence
  Description of Artificial Sequence: Synthetic oligonucleotide
  Sense strand starting at position 703 of SEQ ID NO: 588246
acucuuaagugucccaguu

SEQ ID NO: 851819 - RNA, 19 nt, Artificial Sequence
  Description of Artificial Sequence: Synthetic oligonucleotide
  Antisense strand to SEQ ID NO: 851818
aacugggacacuuaagagu

SEQ ID NO: 851820 - RNA, 19 nt, Artificial Sequence
  Description of Artificial Sequence: Synthetic oligonucleotide
  Sense strand starting at position 750 of SEQ ID NO: 588246
caauuaggaucuguugacu

SEQ ID NO: 851821 - RNA, 19 nt, Artificial Sequence
  Description of Artificial Sequence: Synthetic oligonucleotide
  Antisense strand to SEQ ID NO: 851820
agucaacagauccuaauug

SEQ ID NO: 851822 - RNA, 19 nt, Artificial Sequence
  Description of Artificial Sequence: Synthetic oligonucleotide
  Sense strand starting at position 776 of SEQ ID NO: 588246
gcagcuuguccauaguaga

SEQ ID NO: 851823 - RNA, 19 nt, Artificial Sequence
  Description of Artificial Sequence: Synthetic oligonucleotide
  Antisense strand to SEQ ID NO: 851822
ucuacuauggacaagcugc

SEQ ID NO: 851824 - RNA, 19 nt, Artificial Sequence
  Description of Artificial Sequence: Synthetic oligonucleotide
  Sense strand starting at position 786 of SEQ ID NO: 588246
cauaguagagcuggauaaa

SEQ ID NO: 851825 - RNA, 19 nt, Artificial Sequence
  Description of Artificial Sequence: Synthetic oligonucleotide
  Antisense strand to SEQ ID NO: 851824
uuuauccagcucuacuaug

SEQ ID NO: 851826 - RNA, 19 nt, Artificial Sequence
  Description of Artificial Sequence: Synthetic oligonucleotide
  Sense strand starting at position 895 of SEQ ID NO: 588246
agcagaguugcgcucuguu

SEQ ID NO: 851827 - RNA, 19 nt, Artificial Sequence
  Description of Artificial Sequence: Synthetic oligonucleotide
  Antisense strand to SEQ ID NO: 851826
aacagagcgcaacucugcu

SEQ ID NO: 851828 - RNA, 19 nt, Artificial Sequence
  Description of Artificial Sequence: Synthetic oligonucleotide
  Sense strand starting at position 987 of SEQ ID NO: 588246
gccacucuuggccauuauu

SEQ ID NO: 851829 - RNA, 19 nt, Artificial Sequence
  Description of Artificial Sequence: Synthetic oligonucleotide
  Antisense strand to SEQ ID NO: 851828
aauaauggccaagaguggc

SEQ ID NO: 851830 - RNA, 19 nt, Artificial Sequence
  Description of Artificial Sequence: Synthetic oligonucleotide
  Sense strand starting at position 995 of SEQ ID NO: 588246
uggccauuauucccugauu

SEQ ID NO: 851831 - RNA, 19 nt, Artificial Sequence
  Description of Artificial Sequence: Synthetic oligonucleotide
  Antisense strand to SEQ ID NO: 851830
aaucagggaauaauggcca

SEQ ID NO: 851832 - RNA, 19 nt, Artificial Sequence
  Description of Artificial Sequence: Synthetic oligonucleotide
  Sense strand starting at position 996 of SEQ ID NO: 588246
ggccauuauucccugauuc

SEQ ID NO: 851833 - RNA, 19 nt, Artificial Sequence
  Description of Artificial Sequence: Synthetic oligonucleotide
  Antisense strand to SEQ ID NO: 851832
gaaucagggaauaauggcc

SEQ ID NO: 851834 - RNA, 19 nt, Artificial Sequence
  Description of Artificial Sequence: Synthetic oligonucleotide
  Sense strand starting at position 1022 of SEQ ID NO: 588246
cuuugaugacaguaguaau

SEQ ID NO: 851835 - RNA, 19 nt, Artificial Sequence
  Description of Artificial Sequence: Synthetic oligonucleotide
  Antisense strand to SEQ ID NO: 851834
auuacuacugucaucaaag

SEQ ID NO: 851836 - RNA, 19 nt, Artificial Sequence
  Description of Artificial Sequence: Synthetic oligonucleotide
  Sense strand starting at position 1151 of SEQ ID NO: 588246
caacucuguuggguggaua

SEQ ID NO: 851837 - RNA, 19 nt, Artificial Sequence
  Description of Artificial Sequence: Synthetic oligonucleotide
  Antisense strand to SEQ ID NO: 851836
uauccacccaacagaguug

SEQ ID NO: 851838 - RNA, 19 nt, Artificial Sequence
  Description of Artificial Sequence: Synthetic oligonucleotide
  Sense strand starting at position 1152 of SEQ ID NO: 588246
aacucuguuggguggauau

SEQ ID NO: 851839 - RNA, 19 nt, Artificial Sequence
  Description of Artificial Sequence: Synthetic oligonucleotide
  Antisense strand to SEQ ID NO: 851838
auauccacccaacagaguu

SEQ ID NO: 851840 - RNA, 19 nt, Artificial Sequence
  Description of Artificial Sequence: Synthetic oligonucleotide
  Sense strand starting at position 1154 of SEQ ID NO: 588246
cucuguuggguggauauua

SEQ ID NO: 851841 - RNA, 19 nt, Artificial Sequence
  Description of Artificial Sequence: Synthetic oligonucleotide
  Antisense strand to SEQ ID NO: 851840
uaauauccacccaacagag

SEQ ID NO: 851842 - RNA, 19 nt, Artificial Sequence
  Description of Artificial Sequence: Synthetic oligonucleotide
  Sense strand starting at position 1190 of SEQ ID NO: 588246
ugggaaagccggugaaauc

SEQ ID NO: 851843 - RNA, 19 nt, Artificial Sequence
  Description of Artificial Sequence: Synthetic oligonucleotide
  Antisense strand to SEQ ID NO: 851842
gauuucaccggcuuuccca

SEQ ID NO: 851844 - RNA, 19 nt, Artificial Sequence
  Description of Artificial Sequence: Synthetic oligonucleotide
  Sense strand starting at position 1282 of SEQ ID NO: 588246
gguucuuaaucauugcacu

SEQ ID NO: 851845 - RNA, 19 nt, Artificial Sequence
  Description of Artificial Sequence: Synthetic oligonucleotide
  Antisense strand to SEQ ID NO: 851844
agugcaaugauuaagaacc

SEQ ID NO: 851846 - RNA, 19 nt, Artificial Sequence
  Description of Artificial Sequence: Synthetic oligonucleotide
  Sense strand starting at position 1355 of SEQ ID NO: 588246
cggcuacacucucuccaua

SEQ ID NO: 851847 - RNA, 19 nt, Artificial Sequence
  Description of Artificial Sequence: Synthetic oligonucleotide
  Antisense strand to SEQ ID NO: 851846
uauggagagaguguagccg

SEQ ID NO: 851848 - RNA, 19 nt, Artificial Sequence
  Description of Artificial Sequence: Synthetic oligonucleotide
  Sense strand starting at position 1421 of SEQ ID NO: 588246
gucccuguucuccaccaau

SEQ ID NO: 851849 - RNA, 19 nt, Artificial Sequence
  Description of Artificial Sequence: Synthetic oligonucleotide
  Antisense strand to SEQ ID NO: 851848
auugguggagaacagggac

SEQ ID NO: 851850 - RNA, 19 nt, Artificial Sequence
  Description of Artificial Sequence: Synthetic oligonucleotide
  Sense strand starting at position 1799 of SEQ ID NO: 588246
aguccaucauggcuacaga

SEQ ID NO: 851851 - RNA, 19 nt, Artificial Sequence
  Description of Artificial Sequence: Synthetic oligonucleotide
  Antisense strand to SEQ ID NO: 851850
ucuguagccaugauggacu

SEQ ID NO: 851852 - RNA, 19 nt, Artificial Sequence
  Description of Artificial Sequence: Synthetic oligonucleotide
  Sense strand starting at position 2190 of SEQ ID NO: 588246
aucuuuguugagggccaaa

SEQ ID NO: 851853 - RNA, 19 nt, Artificial Sequence
  Description of Artificial Sequence: Synthetic oligonucleotide
  Antisense strand to SEQ ID NO: 851852
uuuggcccucaacaaagau

SEQ ID NO: 851854 - RNA, 19 nt, Artificial Sequence
  Description of Artificial Sequence: Synthetic oligonucleotide
  Sense strand starting at position 2213 of SEQ ID NO: 588246
gcccuaguccguuaauuua

SEQ ID NO: 851855 - RNA, 19 nt, Artificial Sequence
  Description of Artificial Sequence: Synthetic oligonucleotide
  Antisense strand to SEQ ID NO: 851854
uaaauuaacggacuagggc

SEQ ID NO: 851856 - RNA, 19 nt, Artificial Sequence
  Description of Artificial Sequence: Synthetic oligonucleotide
  Sense strand starting at position 2222 of SEQ ID NO: 588246
cguuaauuuacgcgggaga

SEQ ID NO: 851857 - RNA, 19 nt, Artificial Sequence
  Description of Artificial Sequence: Synthetic oligonucleotide
  Antisense strand to SEQ ID NO: 851856
ucucccgcguaaauuaacg

SEQ ID NO: 851858 - RNA, 19 nt, Artificial Sequence
  Description of Artificial Sequence: Synthetic oligonucleotide
  Sense strand starting at position 2223 of SEQ ID NO: 588246
guuaauuuacgcgggagau

SEQ ID NO: 851859 - RNA, 19 nt, Artificial Sequence
  Description of Artificial Sequence: Synthetic oligonucleotide
  Antisense strand to SEQ ID NO: 851858
aucucccgcguaaauuaac

SEQ ID NO: 851860 - RNA, 19 nt, Artificial Sequence
  Description of Artificial Sequence: Synthetic oligonucleotide
  Sense strand starting at position 2412 of SEQ ID NO: 588246
uuugcagacuuaguuugaa

SEQ ID NO: 851861 - RNA, 19 nt, Artificial Sequence
  Description of Artificial Sequence: Synthetic oligonucleotide
  Antisense strand to SEQ ID NO: 851860
uucaaacuaagucugcaaa

SEQ ID NO: 851862 - RNA, 19 nt, Artificial Sequence
  Description of Artificial Sequence: Synthetic oligonucleotide
  Sense strand starting at position 2415 of SEQ ID NO: 588246
gcagacuuaguuugaagca

SEQ ID NO: 851863 - RNA, 19 nt, Artificial Sequence
  Description of Artificial Sequence: Synthetic oligonucleotide
  Antisense strand to SEQ ID NO: 851862
ugcuucaaacuaagucugc

SEQ ID NO: 851864 - RNA, 19 nt, Artificial Sequence
  Description of Artificial Sequence: Synthetic oligonucleotide
  Sense strand starting at position 2520 of SEQ ID NO: 588246
aggcaccuguggucagaaa

SEQ ID NO: 851865 - RNA, 19 nt, Artificial Sequence
  Description of Artificial Sequence: Synthetic oligonucleotide
  Antisense strand to SEQ ID NO: 851864
uuucugaccacaggugccu

SEQ ID NO: 851866 - RNA, 19 nt, Artificial Sequence
  Description of Artificial Sequence: Synthetic oligonucleotide
  Sense strand starting at position 2980 of SEQ ID NO: 588246
auaaucuuggcagagcuua

SEQ ID NO: 851867 - RNA, 19 nt, Artificial Sequence
  Description of Artificial Sequence: Synthetic oligonucleotide
  Antisense strand to SEQ ID NO: 851866
uaagcucugccaagauuau

SEQ ID NO: 851868 - RNA, 19 nt, Artificial Sequence
  Description of Artificial Sequence: Synthetic oligonucleotide
  Sense strand starting at position 2988 of SEQ ID NO: 588246
ggcagagcuuaagcaauga

SEQ ID NO: 851869 - RNA, 19 nt, Artificial Sequence
  Description of Artificial Sequence: Synthetic oligonucleotide
  Antisense strand to SEQ ID NO: 851868
ucauugcuuaagcucugcc

SEQ ID NO: 851870 - RNA, 19 nt, Artificial Sequence
  Description of Artificial Sequence: Synthetic oligonucleotide
  Sense strand starting at position 3059 of SEQ ID NO: 588246
gugagagagcccgaugaaa

SEQ ID NO: 851871 - RNA, 19 nt, Artificial Sequence
  Description of Artificial Sequence: Synthetic oligonucleotide
  Antisense strand to SEQ ID NO: 851870
uuucaucgggcucucucac

SEQ ID NO: 851872 - RNA, 19 nt, Artificial Sequence
  Description of Artificial Sequence: Synthetic oligonucleotide
  Sense strand starting at position 3082 of SEQ ID NO: 588246
cuugaaaugguuggugagu

SEQ ID NO: 851873 - RNA, 19 nt, Artificial Sequence
  Description of Artificial Sequence: Synthetic oligonucleotide
  Antisense strand to SEQ ID NO: 851872
acucaccaaccauuucaag

SEQ ID NO: 851874 - RNA, 19 nt, Artificial Sequence
  Description of Artificial Sequence: Synthetic oligonucleotide
  Sense strand starting at position 3087 of SEQ ID NO: 588246
aaugguuggugaguggaua

SEQ ID NO: 851875 - RNA, 19 nt, Artificial Sequence
  Description of Artificial Sequence: Synthetic oligonucleotide
  Antisense strand to SEQ ID NO: 851874
uauccacucaccaaccauu

SEQ ID NO: 851876 - RNA, 19 nt, Artificial Sequence
  Description of Artificial Sequence: Synthetic oligonucleotide
  Sense strand starting at position 3090 of SEQ ID NO: 588246
gguuggugaguggauagau

SEQ ID NO: 851877 - RNA, 19 nt, Artificial Sequence
  Description of Artificial Sequence: Synthetic oligonucleotide
  Antisense strand to SEQ ID NO: 851876
aucuauccacucaccaacc

SEQ ID NO: 851878 - RNA, 19 nt, Artificial Sequence
  Description of Artificial Sequence: Synthetic oligonucleotide
  Sense strand starting at position 3106 of SEQ ID NO: 588246
gauagugacuuucccagua

SEQ ID NO: 851879 - RNA, 19 nt, Artificial Sequence
  Description of Artificial Sequence: Synthetic oligonucleotide
  Antisense strand to SEQ ID NO: 851878
uacugggaaagucacuauc

SEQ ID NO: 851880 - RNA, 19 nt, Artificial Sequence
  Description of Artificial Sequence: Synthetic oligonucleotide
  Sense strand starting at position 3346 of SEQ ID NO: 588246
agaagccuucccuagucau

SEQ ID NO: 851881 - RNA, 19 nt, Artificial Sequence
  Description of Artificial Sequence: Synthetic oligonucleotide
  Antisense strand to SEQ ID NO: 851880
augacuagggaaggcuucu

SEQ ID NO: 851882 - RNA, 19 nt, Artificial Sequence
  Description of Artificial Sequence: Synthetic oligonucleotide
  Sense strand starting at position 3349 of SEQ ID NO: 588246
agccuucccuagucauuua

SEQ ID NO: 851883 - RNA, 19 nt, Artificial Sequence
  Description of Artificial Sequence: Synthetic oligonucleotide
  Antisense strand to SEQ ID NO: 851882
uaaaugacuagggaaggcu

SEQ ID NO: 851884 - RNA, 19 nt, Artificial Sequence
  Description of Artificial Sequence: Synthetic oligonucleotide
  Sense strand starting at position 3647 of SEQ ID NO: 588246
auaccuauccugcaagguu

SEQ ID NO: 851885 - RNA, 19 nt, Artificial Sequence
  Description of Artificial Sequence: Synthetic oligonucleotide
  Antisense strand to SEQ ID NO: 851884
aaccuugcaggauagguau

SEQ ID NO: 851886 - RNA, 19 nt, Artificial Sequence
  Description of Artificial Sequence: Synthetic oligonucleotide
  Sense strand starting at position 3670 of SEQ ID NO: 588246
ugagaauaaucagagauac

SEQ ID NO: 851887 - RNA, 19 nt, Artificial Sequence
  Description of Artificial Sequence: Synthetic oligonucleotide
  Antisense strand to SEQ ID NO: 851886
guaucucugauuauucuca

SEQ ID NO: 851888 - RNA, 19 nt, Artificial Sequence
  Description of Artificial Sequence: Synthetic oligonucleotide
  Sense strand starting at position 3706 of SEQ ID NO: 588246
auaguaauucuguguaucc

SEQ ID NO: 851889 - RNA, 19 nt, Artificial Sequence
  Description of Artificial Sequence: Synthetic oligonucleotide
  Antisense strand to SEQ ID NO: 851888
ggauacacagaauuacuau

SEQ ID NO: 851890 - RNA, 19 nt, Artificial Sequence
  Description of Artificial Sequence: Synthetic oligonucleotide
  Sense strand starting at position 3708 of SEQ ID NO: 588246
aguaauucuguguauccca

SEQ ID NO: 851891 - RNA, 19 nt, Artificial Sequence
  Description of Artificial Sequence: Synthetic oligonucleotide
  Antisense strand to SEQ ID NO: 851890
ugggauacacagaauuacu

SEQ ID NO: 851892 - RNA, 19 nt, Artificial Sequence
  Description of Artificial Sequence: Synthetic oligonucleotide
  Sense strand starting at position 3972 of SEQ ID NO: 588246
augagauagguguguccaa

SEQ ID NO: 851893 - RNA, 19 nt, Artificial Sequence
  Description of Artificial Sequence: Synthetic oligonucleotide
  Antisense strand to SEQ ID NO: 851892
uuggacacaccuaucucau

SEQ ID NO: 851894 - RNA, 19 nt, Artificial Sequence
  Description of Artificial Sequence: Synthetic oligonucleotide
  Sense strand starting at position 3973 of SEQ ID NO: 588246
ugagauagguguguccaaa

SEQ ID NO: 851895 - RNA, 19 nt, Artificial Sequence
  Description of Artificial Sequence: Synthetic oligonucleotide
  Antisense strand to SEQ ID NO: 851894
uuuggacacaccuaucuca

SEQ ID NO: 851896 - RNA, 19 nt, Artificial Sequence
  Description of Artificial Sequence: Synthetic oligonucleotide
  Sense strand starting at position 309 of SEQ ID NO: 588247
auggguccaucugaguuaa

SEQ ID NO: 851897 - RNA, 19 nt, Artificial Sequence
  Description of Artificial Sequence: Synthetic oligonucleotide
  Antisense strand to SEQ ID NO: 851896
uuaacucagauggacccau

SEQ ID NO: 851898 - RNA, 19 nt, Artificial Sequence
  Description of Artificial Sequence: Synthetic oligonucleotide
  Sense strand starting at position 311 of SEQ ID NO: 588247
ggguccaucugaguuaaga

SEQ ID NO: 851899 - RNA, 19 nt, Artificial Sequence
  Description of Artificial Sequence: Synthetic oligonucleotide
  Antisense strand to SEQ ID NO: 851898
ucuuaacucagauggaccc

SEQ ID NO: 851900 - RNA, 19 nt, Artificial Sequence
  Description of Artificial Sequence: Synthetic oligonucleotide
  Sense strand starting at position 385 of SEQ ID NO: 588247
agugucaucuucucguaag

SEQ ID NO: 851901 - RNA, 19 nt, Artificial Sequence
  Description of Artificial Sequence: Synthetic oligonucleotide
  Antisense strand to SEQ ID NO: 851900
cuuacgagaagaugacacu

SEQ ID NO: 851902 - RNA, 19 nt, Artificial Sequence
  Description of Artificial Sequence: Synthetic oligonucleotide
  Sense strand starting at position 386 of SEQ ID NO: 588247
gugucaucuucucguaaga

SEQ ID NO: 851903 - RNA, 19 nt, Artificial Sequence
  Description of Artificial Sequence: Synthetic oligonucleotide
  Antisense strand to SEQ ID NO: 851902
ucuuacgagaagaugacac

SEQ ID NO: 851904 - RNA, 19 nt, Artificial Sequence
  Description of Artificial Sequence: Synthetic oligonucleotide
  Sense strand starting at position 388 of SEQ ID NO: 588247
gucaucuucucguaagaac

SEQ ID NO: 851905 - RNA, 19 nt, Artificial Sequence
  Description of Artificial Sequence: Synthetic oligonucleotide
  Antisense strand to SEQ ID NO: 851904
guucuuacgagaagaugac

SEQ ID NO: 851906 - RNA, 19 nt, Artificial Sequence
  Description of Artificial Sequence: Synthetic oligonucleotide
  Sense strand starting at position 415 of SEQ ID NO: 588247
uuaccuuugguucgacaaa

SEQ ID NO: 851907 - RNA, 19 nt, Artificial Sequence
  Description of Artificial Sequence: Synthetic oligonucleotide
  Antisense strand to SEQ ID NO: 851906
uuugucgaaccaaagguaa

SEQ ID NO: 851908 - RNA, 19 nt, Artificial Sequence
  Description of Artificial Sequence: Synthetic oligonucleotide
  Sense strand starting at position 416 of SEQ ID NO: 588247
uaccuuugguucgacaaau

SEQ ID NO: 851909 - RNA, 19 nt, Artificial Sequence
  Description of Artificial Sequence: Synthetic oligonucleotide
  Antisense strand to SEQ ID NO: 851908
auuugucgaaccaaaggua

SEQ ID NO: 851910 - RNA, 19 nt, Artificial Sequence
  Description of Artificial Sequence: Synthetic oligonucleotide
  Sense strand starting at position 601 of SEQ ID NO: 588247
gcaagaucaugggcucuga

SEQ ID NO: 851911 - RNA, 19 nt, Artificial Sequence
  Description of Artificial Sequence: Synthetic oligonucleotide
  Antisense strand to SEQ ID NO: 851910
ucagagcccaugaucuugc

SEQ ID NO: 851912 - RNA, 19 nt, Artificial Sequence
  Description of Artificial Sequence: Synthetic oligonucleotide
  Sense strand starting at position 618 of SEQ ID NO: 588247
gaaaccagcugucucagaa

SEQ ID NO: 851913 - RNA, 19 nt, Artificial Sequence
  Description of Artificial Sequence: Synthetic oligonucleotide
  Antisense strand to SEQ ID NO: 851912
uucugagacagcugguuuc

SEQ ID NO: 851914 - RNA, 19 nt, Artificial Sequence
  Description of Artificial Sequence: Synthetic oligonucleotide
  Sense strand starting at position 631 of SEQ ID NO: 588247
ucagaagccuugucuauaa

SEQ ID NO: 851915 - RNA, 19 nt, Artificial Sequence
  Description of Artificial Sequence: Synthetic oligonucleotide
  Antisense strand to SEQ ID NO: 851914
uuauagacaaggcuucuga

SEQ ID NO: 851916 - RNA, 19 nt, Artificial Sequence
  Description of Artificial Sequence: Synthetic oligonucleotide
  Sense strand starting at position 678 of SEQ ID NO: 588247
agaugaugguuugagacaa

SEQ ID NO: 851917 - RNA, 19 nt, Artificial Sequence
  Description of Artificial Sequence: Synthetic oligonucleotide
  Antisense strand to SEQ ID NO: 851916
uugucucaaaccaucaucu

SEQ ID NO: 851918 - RNA, 19 nt, Artificial Sequence
  Description of Artificial Sequence: Synthetic oligonucleotide
  Sense strand starting at position 764 of SEQ ID NO: 588247
gcucuauggcuguuucguu

SEQ ID NO: 851919 - RNA, 19 nt, Artificial Sequence
  Description of Artificial Sequence: Synthetic oligonucleotide
  Antisense strand to SEQ ID NO: 851918
aacgaaacagccauagagc

SEQ ID NO: 851920 - RNA, 19 nt, Artificial Sequence
  Description of Artificial Sequence: Synthetic oligonucleotide
  Sense strand starting at position 769 of SEQ ID NO: 588247
auggcuguuucguuggcaa

SEQ ID NO: 851921 - RNA, 19 nt, Artificial Sequence
  Description of Artificial Sequence: Synthetic oligonucleotide
  Antisense strand to SEQ ID NO: 851920
uugccaacgaaacagccau

SEQ ID NO: 851922 - RNA, 19 nt, Artificial Sequence
  Description of Artificial Sequence: Synthetic oligonucleotide
  Sense strand starting at position 772 of SEQ ID NO: 588247
gcuguuucguuggcaacaa

SEQ ID NO: 851923 - RNA, 19 nt, Artificial Sequence
  Description of Artificial Sequence: Synthetic oligonucleotide
  Antisense strand to SEQ ID NO: 851922
uuguugccaacgaaacagc

SEQ ID NO: 851924 - RNA, 19 nt, Artificial Sequence
  Description of Artificial Sequence: Synthetic oligonucleotide
  Sense strand starting at position 773 of SEQ ID NO: 588247
cuguuucguuggcaacaaa

SEQ ID NO: 851925 - RNA, 19 nt, Artificial Sequence
  Description of Artificial Sequence: Synthetic oligonucleotide
  Antisense strand to SEQ ID NO: 851924
uuuguugccaacgaaacag

SEQ ID NO: 851926 - RNA, 19 nt, Artificial Sequence
  Description of Artificial Sequence: Synthetic oligonucleotide
  Sense strand starting at position 776 of SEQ ID NO: 588247
uuucguuggcaacaaacau

SEQ ID NO: 851927 - RNA, 19 nt, Artificial Sequence
  Description of Artificial Sequence: Synthetic oligonucleotide
  Antisense strand to SEQ ID NO: 851926
auguuuguugccaacgaaa

SEQ ID NO: 851928 - RNA, 19 nt, Artificial Sequence
  Description of Artificial Sequence: Synthetic oligonucleotide
  Sense strand starting at position 836 of SEQ ID NO: 588247
gaagguuuaugggaaguug

SEQ ID NO: 851929 - RNA, 19 nt, Artificial Sequence
  Description of Artificial Sequence: Synthetic oligonucleotide
  Antisense strand to SEQ ID NO: 851928
caacuucccauaaaccuuc

SEQ ID NO: 851930 - RNA, 19 nt, Artificial Sequence
  Description of Artificial Sequence: Synthetic oligonucleotide
  Sense strand starting at position 848 of SEQ ID NO: 588247
gaaguuguacuagagcuaa

SEQ ID NO: 851931 - RNA, 19 nt, Artificial Sequence
  Description of Artificial Sequence: Synthetic oligonucleotide
  Antisense strand to SEQ ID NO: 851930
uuagcucuaguacaacuuc

SEQ ID NO: 851932 - RNA, 19 nt, Artificial Sequence
  Description of Artificial Sequence: Synthetic oligonucleotide
  Sense strand starting at position 966 of SEQ ID NO: 588247
agcgaaauuuaacacuaaa

SEQ ID NO: 851933 - RNA, 19 nt, Artificial Sequence
  Description of Artificial Sequence: Synthetic oligonucleotide
  Antisense strand to SEQ ID NO: 851932
uuuaguguuaaauuucgcu

SEQ ID NO: 851934 - RNA, 19 nt, Artificial Sequence
  Description of Artificial Sequence: Synthetic oligonucleotide
  Sense strand starting at position 1000 of SEQ ID NO: 588247
gcuuccuaacuucgugaaa

SEQ ID NO: 851935 - RNA, 19 nt, Artificial Sequence
  Description of Artificial Sequence: Synthetic oligonucleotide
  Antisense strand to SEQ ID NO: 851934
uuucacgaaguuaggaagc

SEQ ID NO: 851936 - RNA, 19 nt, Artificial Sequence
  Description of Artificial Sequence: Synthetic oligonucleotide
  Sense strand starting at position 1001 of SEQ ID NO: 588247
cuuccuaacuucgugaaau

SEQ ID NO: 851937 - RNA, 19 nt, Artificial Sequence
  Description of Artificial Sequence: Synthetic oligonucleotide
  Antisense strand to SEQ ID NO: 851936
auuucacgaaguuaggaag

SEQ ID NO: 851938 - RNA, 19 nt, Artificial Sequence
  Description of Artificial Sequence: Synthetic oligonucleotide
  Sense strand starting at position 1002 of SEQ ID NO: 588247
uuccuaacuucgugaaaua

SEQ ID NO: 851939 - RNA, 19 nt, Artificial Sequence
  Description of Artificial Sequence: Synthetic oligonucleotide
  Antisense strand to SEQ ID NO: 851938
uauuucacgaaguuaggaa

SEQ ID NO: 851940 - RNA, 19 nt, Artificial Sequence
  Description of Artificial Sequence: Synthetic oligonucleotide
  Sense strand starting at position 1003 of SEQ ID NO: 588247
uccuaacuucgugaaauaa

SEQ ID NO: 851941 - RNA, 19 nt, Artificial Sequence
  Description of Artificial Sequence: Synthetic oligonucleotide
  Antisense strand to SEQ ID NO: 851940
uuauuucacgaaguuagga

SEQ ID NO: 851942 - RNA, 19 nt, Artificial Sequence
  Description of Artificial Sequence: Synthetic oligonucleotide
  Sense strand starting at position 1066 of SEQ ID NO: 588247
auaacugccuaagaaugaa

SEQ ID NO: 851943 - RNA, 19 nt, Artificial Sequence
  Description of Artificial Sequence: Synthetic oligonucleotide
  Antisense strand to SEQ ID NO: 851942
uucauucuuaggcaguuau

SEQ ID NO: 851944 - RNA, 19 nt, Artificial Sequence
  Description of Artificial Sequence: Synthetic oligonucleotide
  Sense strand starting at position 1105 of SEQ ID NO: 588247
agccacauucccuggaaau

SEQ ID NO: 851945 - RNA, 19 nt, Artificial Sequence
  Description of Artificial Sequence: Synthetic oligonucleotide
  Antisense strand to SEQ ID NO: 851944
auuuccagggaauguggcu

SEQ ID NO: 851946 - RNA, 19 nt, Artificial Sequence
  Description of Artificial Sequence: Synthetic oligonucleotide
  Sense strand starting at position 1106 of SEQ ID NO: 588247
gccacauucccuggaaauu

SEQ ID NO: 851947 - RNA, 19 nt, Artificial Sequence
  Description of Artificial Sequence: Synthetic oligonucleotide
  Antisense strand to SEQ ID NO: 851946
aauuuccagggaauguggc

SEQ ID NO: 851948 - RNA, 19 nt, Artificial Sequence
  Description of Artificial Sequence: Synthetic oligonucleotide
  Sense strand starting at position 1115 of SEQ ID NO: 588247
ccuggaaauuucugaacua

SEQ ID NO: 851949 - RNA, 19 nt, Artificial Sequence
  Description of Artificial Sequence: Synthetic oligonucleotide
  Antisense strand to SEQ ID NO: 851948
uaguucagaaauuuccagg

SEQ ID NO: 851950 - RNA, 19 nt, Artificial Sequence
  Description of Artificial Sequence: Synthetic oligonucleotide
  Sense strand starting at position 1116 of SEQ ID NO: 588247
cuggaaauuucugaacuac

SEQ ID NO: 851951 - RNA, 19 nt, Artificial Sequence
  Description of Artificial Sequence: Synthetic oligonucleotide
  Antisense strand to SEQ ID NO: 851950
guaguucagaaauuuccag

SEQ ID NO: 851952 - RNA, 19 nt, Artificial Sequence
  Description of Artificial Sequence: Synthetic oligonucleotide
  Sense strand starting at position 1347 of SEQ ID NO: 588247
ccgagaacucaucaggcca

SEQ ID NO: 851953 - RNA, 19 nt, Artificial Sequence
  Description of Artificial Sequence: Synthetic oligonucleotide
  Antisense strand to SEQ ID NO: 851952
uggccugaugaguucucgg

SEQ ID NO: 851954 - RNA, 19 nt, Artificial Sequence
  Description of Artificial Sequence: Synthetic oligonucleotide
  Sense strand starting at position 1531 of SEQ ID NO: 588247
gggcgucccuuggagagau

SEQ ID NO: 851955 - RNA, 19 nt, Artificial Sequence
  Description of Artificial Sequence: Synthetic oligonucleotide
  Antisense strand to SEQ ID NO: 851954
aucucuccaagggacgccc

SEQ ID NO: 851956 - RNA, 19 nt, Artificial Sequence
  Description of Artificial Sequence: Synthetic oligonucleotide
  Sense strand starting at position 2996 of SEQ ID NO: 588247
uccgcugagucgugccaga

SEQ ID NO: 851957 - RNA, 19 nt, Artificial Sequence
  Description of Artificial Sequence: Synthetic oligonucleotide
  Antisense strand to SEQ ID NO: 851956
ucuggcacgacucagcgga

SEQ ID NO: 851958 - RNA, 19 nt, Artificial Sequence
  Description of Artificial Sequence: Synthetic oligonucleotide
  Sense strand starting at position 3027 of SEQ ID NO: 588247
ccgagucaguaaucgcaaa

SEQ ID NO: 851959 - RNA, 19 nt, Artificial Sequence
  Description of Artificial Sequence: Synthetic oligonucleotide
  Antisense strand to SEQ ID NO: 851958
uuugcgauuacugacucgg

SEQ ID NO: 851960 - RNA, 19 nt, Artificial Sequence
  Description of Artificial Sequence: Synthetic oligonucleotide
  Sense strand starting at position 3068 of SEQ ID NO: 588247
acucuuguguacucaggaa

SEQ ID NO: 851961 - RNA, 19 nt, Artificial Sequence
  Description of Artificial Sequence: Synthetic oligonucleotide
  Antisense strand to SEQ ID NO: 851960
uuccugaguacacaagagu

SEQ ID NO: 851962 - RNA, 19 nt, Artificial Sequence
  Description of Artificial Sequence: Synthetic oligonucleotide
  Sense strand starting at position 3248 of SEQ ID NO: 588247
ucucuugacucacgcuauu

SEQ ID NO: 851963 - RNA, 19 nt, Artificial Sequence
  Description of Artificial Sequence: Synthetic oligonucleotide
  Antisense strand to SEQ ID NO: 851962
aauagcgugagucaagaga

SEQ ID NO: 851964 - RNA, 19 nt, Artificial Sequence
  Description of Artificial Sequence: Synthetic oligonucleotide
  Sense strand starting at position 3557 of SEQ ID NO: 588247
accugaaugugacauugga

SEQ ID NO: 851965 - RNA, 19 nt, Artificial Sequence
  Description of Artificial Sequence: Synthetic oligonucleotide
  Antisense strand to SEQ ID NO: 851964
uccaaugucacauucaggu

SEQ ID NO: 851966 - RNA, 19 nt, Artificial Sequence
  Description of Artificial Sequence: Synthetic oligonucleotide
  Sense strand starting at position 3702 of SEQ ID NO: 588247
ccucucuuccugcaagaag

SEQ ID NO: 851967 - RNA, 19 nt, Artificial Sequence
  Description of Artificial Sequence: Synthetic oligonucleotide
  Antisense strand to SEQ ID NO: 851966
cuucuugcaggaagagagg

SEQ ID NO: 851968 - RNA, 19 nt, Artificial Sequence
  Description of Artificial Sequence: Synthetic oligonucleotide
  Sense strand starting at position 51 of SEQ ID NO: 588248
aguaacccauauguaaaua

SEQ ID NO: 851969 - RNA, 19 nt, Artificial Sequence
  Description of Artificial Sequence: Synthetic oligonucleotide
  Antisense strand to SEQ ID NO: 851968
uauuuacauauggguuacu

SEQ ID NO: 851970 - RNA, 19 nt, Artificial Sequence
  Description of Artificial Sequence: Synthetic oligonucleotide
  Sense strand starting at position 122 of SEQ ID NO: 588248
aaauguguaggaugcuuaa

SEQ ID NO: 851971 - RNA, 19 nt, Artificial Sequence
  Description of Artificial Sequence: Synthetic oligonucleotide
  Antisense strand to SEQ ID NO: 851970
uuaagcauccuacacauuu

SEQ ID NO: 851972 - RNA, 19 nt, Artificial Sequence
  Description of Artificial Sequence: Synthetic oligonucleotide
  Sense strand starting at position 228 of SEQ ID NO: 588248
acaccaauguaguuaggau

SEQ ID NO: 851973 - RNA, 19 nt, Artificial Sequence
  Description of Artificial Sequence: Synthetic oligonucleotide
  Antisense strand to SEQ ID NO: 851972
auccuaacuacauuggugu

SEQ ID NO: 851974 - RNA, 19 nt, Artificial Sequence
  Description of Artificial Sequence: Synthetic oligonucleotide
  Sense strand starting at position 240 of SEQ ID NO: 588248
uuaggauucuaagccaaca

SEQ ID NO: 851975 - RNA, 19 nt, Artificial Sequence
  Description of Artificial Sequence: Synthetic oligonucleotide
  Antisense strand to SEQ ID NO: 851974
uguuggcuuagaauccuaa

SEQ ID NO: 851976 - RNA, 19 nt, Artificial Sequence
  Description of Artificial Sequence: Synthetic oligonucleotide
  Sense strand starting at position 425 of SEQ ID NO: 588248
augcuaaguuacccaugua

SEQ ID NO: 851977 - RNA, 19 nt, Artificial Sequence
  Description of Artificial Sequence: Synthetic oligonucleotide
  Antisense strand to SEQ ID NO: 851976
uacauggguaacuuagcau

SEQ ID NO: 851978 - RNA, 19 nt, Artificial Sequence
  Description of Artificial Sequence: Synthetic oligonucleotide
  Sense strand starting at position 428 of SEQ ID NO: 588248
cuaaguuacccauguauua

SEQ ID NO: 851979 - RNA, 19 nt, Artificial Sequence
  Description of Artificial Sequence: Synthetic oligonucleotide
  Antisense strand to SEQ ID NO: 851978
uaauacauggguaacuuag

SEQ ID NO: 851980 - RNA, 19 nt, Artificial Sequence
  Description of Artificial Sequence: Synthetic oligonucleotide
  Sense strand starting at position 590 of SEQ ID NO: 588248
guuagcagauauucccaaa

SEQ ID NO: 851981 - RNA, 19 nt, Artificial Sequence
  Description of Artificial Sequence: Synthetic oligonucleotide
  Antisense strand to SEQ ID NO: 851980
uuugggaauaucugcuaac

SEQ ID NO: 851982 - RNA, 19 nt, Artificial Sequence
  Description of Artificial Sequence: Synthetic oligonucleotide
  Sense strand starting at position 640 of SEQ ID NO: 588248
acaugaauguggcucauua

SEQ ID NO: 851983 - RNA, 19 nt, Artificial Sequence
  Description of Artificial Sequence: Synthetic oligonucleotide
  Antisense strand to SEQ ID NO: 851982
uaaugagccacauucaugu

SEQ ID NO: 851984 - RNA, 19 nt, Artificial Sequence
  Description of Artificial Sequence: Synthetic oligonucleotide
  Sense strand starting at position 642 of SEQ ID NO: 588248
augaauguggcucauuauu

SEQ ID NO: 851985 - RNA, 19 nt, Artificial Sequence
  Description of Artificial Sequence: Synthetic oligonucleotide
  Antisense strand to SEQ ID NO: 851984
aauaaugagccacauucau

SEQ ID NO: 851986 - RNA, 19 nt, Artificial Sequence
  Description of Artificial Sequence: Synthetic oligonucleotide
  Sense strand starting at position 648 of SEQ ID NO: 588248
guggcucauuauuuccuaa

SEQ ID NO: 851987 - RNA, 19 nt, Artificial Sequence
  Description of Artificial Sequence: Synthetic oligonucleotide
  Antisense strand to SEQ ID NO: 851986
uuaggaaauaaugagccac

SEQ ID NO: 851988 - RNA, 19 nt, Artificial Sequence
  Description of Artificial Sequence: Synthetic oligonucleotide
  Sense strand starting at position 650 of SEQ ID NO: 588248
ggcucauuauuuccuaagu

SEQ ID NO: 851989 - RNA, 19 nt, Artificial Sequence
  Description of Artificial Sequence: Synthetic oligonucleotide
  Antisense strand to SEQ ID NO: 851988
acuuaggaaauaaugagcc

SEQ ID NO: 851990 - RNA, 19 nt, Artificial Sequence
  Description of Artificial Sequence: Synthetic oligonucleotide
  Sense strand starting at position 1062 of SEQ ID NO: 588248
ucugaauaauuucgaucaa

SEQ ID NO: 851991 - RNA, 19 nt, Artificial Sequence
  Description of Artificial Sequence: Synthetic oligonucleotide
  Antisense strand to SEQ ID NO: 851990
uugaucgaaauuauucaga

SEQ ID NO: 851992 - RNA, 19 nt, Artificial Sequence
  Description of Artificial Sequence: Synthetic oligonucleotide
  Sense strand starting at position 1063 of SEQ ID NO: 588248
cugaauaauuucgaucaaa

SEQ ID NO: 851993 - RNA, 19 nt, Artificial Sequence
  Description of Artificial Sequence: Synthetic oligonucleotide
  Antisense strand to SEQ ID NO: 851992
uuugaucgaaauuauucag

SEQ ID NO: 851994 - RNA, 19 nt, Artificial Sequence
  Description of Artificial Sequence: Synthetic oligonucleotide
  Sense strand starting at position 1302 of SEQ ID NO: 588248
agaucuucucagcauucga

SEQ ID NO: 851995 - RNA, 19 nt, Artificial Sequence
  Description of Artificial Sequence: Synthetic oligonucleotide
  Antisense strand to SEQ ID NO: 851994
ucgaaugcugagaagaucu

SEQ ID NO: 851996 - RNA, 19 nt, Artificial Sequence
  Description of Artificial Sequence: Synthetic oligonucleotide
  Sense strand starting at position 1306 of SEQ ID NO: 588248
cuucucagcauucgagaga

SEQ ID NO: 851997 - RNA, 19 nt, Artificial Sequence
  Description of Artificial Sequence: Synthetic oligonucleotide
  Antisense strand to SEQ ID NO: 851996
ucucucgaaugcugagaag

SEQ ID NO: 851998 - RNA, 19 nt, Artificial Sequence
  Description of Artificial Sequence: Synthetic oligonucleotide
  Sense strand starting at position 1309 of SEQ ID NO: 588248
cucagcauucgagagaucu

SEQ ID NO: 851999 - RNA, 19 nt, Artificial Sequence
  Description of Artificial Sequence: Synthetic oligonucleotide
  Antisense strand to SEQ ID NO: 851998
agaucucucgaaugcugag

SEQ ID NO: 852000 - RNA, 19 nt, Artificial Sequence
  Description of Artificial Sequence: Synthetic oligonucleotide
  Sense strand starting at position 1387 of SEQ ID NO: 588248
ggaggaggucugugauuac

SEQ ID NO: 852001 - RNA, 19 nt, Artificial Sequence
  Description of Artificial Sequence: Synthetic oligonucleotide
  Antisense strand to SEQ ID NO: 852000
guaaucacagaccuccucc

SEQ ID NO: 852002 - RNA, 19 nt, Artificial Sequence
  Description of Artificial Sequence: Synthetic oligonucleotide
  Sense strand starting at position 1390 of SEQ ID NO: 588248
ggaggucugugauuacaaa

SEQ ID NO: 852003 - RNA, 19 nt, Artificial Sequence
  Description of Artificial Sequence: Synthetic oligonucleotide
  Antisense strand to SEQ ID NO: 852002
uuuguaaucacagaccucc

SEQ ID NO: 852004 - RNA, 19 nt, Artificial Sequence
  Description of Artificial Sequence: Synthetic oligonucleotide
  Sense strand starting at position 1850 of SEQ ID NO: 588248
gagggaccgcgguaucuuu

SEQ ID NO: 852005 - RNA, 19 nt, Artificial Sequence
  Description of Artificial Sequence: Synthetic oligonucleotide
  Antisense strand to SEQ ID NO: 852004
aaagauaccgcggucccuc

SEQ ID NO: 852006 - RNA, 19 nt, Artificial Sequence
  Description of Artificial Sequence: Synthetic oligonucleotide
  Sense strand starting at position 1890 of SEQ ID NO: 588248
gcgagugcucggaggaggu

SEQ ID NO: 852007 - RNA, 19 nt, Artificial Sequence
  Description of Artificial Sequence: Synthetic oligonucleotide
  Antisense strand to SEQ ID NO: 852006
accuccuccgagcacucgc

SEQ ID NO: 852008 - RNA, 19 nt, Artificial Sequence
  Description of Artificial Sequence: Synthetic oligonucleotide
  Sense strand starting at position 2114 of SEQ ID NO: 588248
guuugagugcguucacucu

SEQ ID NO: 852009 - RNA, 19 nt, Artificial Sequence
  Description of Artificial Sequence: Synthetic oligonucleotide
  Antisense strand to SEQ ID NO: 852008
agagugaacgcacucaaac

SEQ ID NO: 852010 - RNA, 19 nt, Artificial Sequence
  Description of Artificial Sequence: Synthetic oligonucleotide
  Sense strand starting at position 2211 of SEQ ID NO: 588248
uuuggugucauagggaaag

SEQ ID NO: 852011 - RNA, 19 nt, Artificial Sequence
  Description of Artificial Sequence: Synthetic oligonucleotide
  Antisense strand to SEQ ID NO: 852010
cuuucccuaugacaccaaa

SEQ ID NO: 852012 - RNA, 19 nt, Artificial Sequence
  Description of Artificial Sequence: Synthetic oligonucleotide
  Sense strand starting at position 2213 of SEQ ID NO: 588248
uggugucauagggaaagua

SEQ ID NO: 852013 - RNA, 19 nt, Artificial Sequence
  Description of Artificial Sequence: Synthetic oligonucleotide
  Antisense strand to SEQ ID NO: 852012
uacuuucccuaugacacca

SEQ ID NO: 852014 - RNA, 19 nt, Artificial Sequence
  Description of Artificial Sequence: Synthetic oligonucleotide
  Sense strand starting at position 2300 of SEQ ID NO: 588248
aucgaaaucaccuguacga

SEQ ID NO: 852015 - RNA, 19 nt, Artificial Sequence
  Description of Artificial Sequence: Synthetic oligonucleotide
  Antisense strand to SEQ ID NO: 852014
ucguacaggugauuucgau

SEQ ID NO: 852016 - RNA, 19 nt, Artificial Sequence
  Description of Artificial Sequence: Synthetic oligonucleotide
  Sense strand starting at position 2302 of SEQ ID NO: 588248
cgaaaucaccuguacgacu

SEQ ID NO: 852017 - RNA, 19 nt, Artificial Sequence
  Description of Artificial Sequence: Synthetic oligonucleotide
  Antisense strand to SEQ ID NO: 852016
agucguacaggugauuucg

SEQ ID NO: 852018 - RNA, 19 nt, Artificial Sequence
  Description of Artificial Sequence: Synthetic oligonucleotide
  Sense strand starting at position 2553 of SEQ ID NO: 588248
ggagaauucugccuguagg

SEQ ID NO: 852019 - RNA, 19 nt, Artificial Sequence
  Description of Artificial Sequence: Synthetic oligonucleotide
  Antisense strand to SEQ ID NO: 852018
ccuacaggcagaauucucc

SEQ ID NO: 852020 - RNA, 19 nt, Artificial Sequence
  Description of Artificial Sequence: Synthetic oligonucleotide
  Sense strand starting at position 2592 of SEQ ID NO: 588248
gagucauuggaaggacgga

SEQ ID NO: 852021 - RNA, 19 nt, Artificial Sequence
  Description of Artificial Sequence: Synthetic oligonucleotide
  Antisense strand to SEQ ID NO: 852020
uccguccuuccaaugacuc

SEQ ID NO: 852022 - RNA, 19 nt, Artificial Sequence
  Description of Artificial Sequence: Synthetic oligonucleotide
  Sense strand starting at position 2651 of SEQ ID NO: 588248
cucaguguucuagaagcag

SEQ ID NO: 852023 - RNA, 19 nt, Artificial Sequence
  Description of Artificial Sequence: Synthetic oligonucleotide
  Antisense strand to SEQ ID NO: 852022
cugcuucuagaacacugag

SEQ ID NO: 852024 - RNA, 19 nt, Artificial Sequence
  Description of Artificial Sequence: Synthetic oligonucleotide
  Sense strand starting at position 2665 of SEQ ID NO: 588248
agcagaguugcacagugau

SEQ ID NO: 852025 - RNA, 19 nt, Artificial Sequence
  Description of Artificial Sequence: Synthetic oligonucleotide
  Antisense strand to SEQ ID NO: 852024
aucacugugcaacucugcu

SEQ ID NO: 852026 - RNA, 19 nt, Artificial Sequence
  Description of Artificial Sequence: Synthetic oligonucleotide
  Sense strand starting at position 2668 of SEQ ID NO: 588248
agaguugcacagugaucca

SEQ ID NO: 852027 - RNA, 19 nt, Artificial Sequence
  Description of Artificial Sequence: Synthetic oligonucleotide
  Antisense strand to SEQ ID NO: 852026
uggaucacugugcaacucu

SEQ ID NO: 852028 - RNA, 19 nt, Artificial Sequence
  Description of Artificial Sequence: Synthetic oligonucleotide
  Sense strand starting at position 2671 of SEQ ID NO: 588248
guugcacagugauccaaag

SEQ ID NO: 852029 - RNA, 19 nt, Artificial Sequence
  Description of Artificial Sequence: Synthetic oligonucleotide
  Antisense strand to SEQ ID NO: 852028
cuuuggaucacugugcaac

SEQ ID NO: 852030 - RNA, 19 nt, Artificial Sequence
  Description of Artificial Sequence: Synthetic oligonucleotide
  Sense strand starting at position 2821 of SEQ ID NO: 588248
gugaguuuaaaugauguau

SEQ ID NO: 852031 - RNA, 19 nt, Artificial Sequence
  Description of Artificial Sequence: Synthetic oligonucleotide
  Antisense strand to SEQ ID NO: 852030
auacaucauuuaaacucac

SEQ ID NO: 852032 - RNA, 19 nt, Artificial Sequence
  Description of Artificial Sequence: Synthetic oligonucleotide
  Sense strand starting at position 2888 of SEQ ID NO: 588248
cuguuagcucuugaauuau

SEQ ID NO: 852033 - RNA, 19 nt, Artificial Sequence
  Description of Artificial Sequence: Synthetic oligonucleotide
  Antisense strand to SEQ ID NO: 852032
auaauucaagagcuaacag

SEQ ID NO: 852034 - RNA, 19 nt, Artificial Sequence
  Description of Artificial Sequence: Synthetic oligonucleotide
  Sense strand starting at position 2897 of SEQ ID NO: 588248
cuugaauuauccgcuuuga

SEQ ID NO: 852035 - RNA, 19 nt, Artificial Sequence
  Description of Artificial Sequence: Synthetic oligonucleotide
  Antisense strand to SEQ ID NO: 852034
ucaaagcggauaauucaag

SEQ ID NO: 852036 - RNA, 19 nt, Artificial Sequence
  Description of Artificial Sequence: Synthetic oligonucleotide
  Sense strand starting at position 2913 of SEQ ID NO: 588248
ugaggacuggcuugcaauc

SEQ ID NO: 852037 - RNA, 19 nt, Artificial Sequence
  Description of Artificial Sequence: Synthetic oligonucleotide
  Antisense strand to SEQ ID NO: 852036
gauugcaagccaguccuca

SEQ ID NO: 852038 - RNA, 19 nt, Artificial Sequence
  Description of Artificial Sequence: Synthetic oligonucleotide
  Sense strand starting at position 3828 of SEQ ID NO: 588248
gcuuaaucugccuacugga

SEQ ID NO: 852039 - RNA, 19 nt, Artificial Sequence
  Description of Artificial Sequence: Synthetic oligonucleotide
  Antisense strand to SEQ ID NO: 852038
uccaguaggcagauuaagc

SEQ ID NO: 852040 - RNA, 19 nt, Artificial Sequence
  Description of Artificial Sequence: Synthetic oligonucleotide
  Sense strand starting at position 3875 of SEQ ID NO: 588248
ucaaucccugguugacuua

SEQ ID NO: 852041 - RNA, 19 nt, Artificial Sequence
  Description of Artificial Sequence: Synthetic oligonucleotide
  Antisense strand to SEQ ID NO: 852040
uaagucaaccagggauuga

SEQ ID NO: 852042 - RNA, 19 nt, Artificial Sequence
  Description of Artificial Sequence: Synthetic oligonucleotide
  Sense strand starting at position 3887 of SEQ ID NO: 588248
ugacuuaaaccuuguagac

SEQ ID NO: 852043 - RNA, 19 nt, Artificial Sequence
  Description of Artificial Sequence: Synthetic oligonucleotide
  Antisense strand to SEQ ID NO: 852042
gucuacaagguuuaaguca

SEQ ID NO: 852044 - RNA, 19 nt, Artificial Sequence
  Description of Artificial Sequence: Synthetic oligonucleotide
  Sense strand starting at position 3923 of SEQ ID NO: 588248
uuuagugucugcuugauuu

SEQ ID NO: 852045 - RNA, 19 nt, Artificial Sequence
  Description of Artificial Sequence: Synthetic oligonucleotide
  Antisense strand to SEQ ID NO: 852044
aaaucaagcagacacuaaa

SEQ ID NO: 852046 - RNA, 19 nt, Artificial Sequence
  Description of Artificial Sequence: Synthetic oligonucleotide
  Sense strand starting at position 3983 of SEQ ID NO: 588248
ugggaugucaaguauguua

SEQ ID NO: 852047 - RNA, 19 nt, Artificial Sequence
  Description of Artificial Sequence: Synthetic oligonucleotide
  Antisense strand to SEQ ID NO: 852046
uaacauacuugacauccca

SEQ ID NO: 852048 - RNA, 19 nt, Artificial Sequence
  Description of Artificial Sequence: Synthetic oligonucleotide
  Sense strand starting at position 164 of SEQ ID NO: 588249
auguucuacuuuguuacua

SEQ ID NO: 852049 - RNA, 19 nt, Artificial Sequence
  Description of Artificial Sequence: Synthetic oligonucleotide
  Antisense strand to SEQ ID NO: 852048
uaguaacaaaguagaacau

SEQ ID NO: 852050 - RNA, 19 nt, Artificial Sequence
  Description of Artificial Sequence: Synthetic oligonucleotide
  Sense strand starting at position 168 of SEQ ID NO: 588249
ucuacuuuguuacuacaga

SEQ ID NO: 852051 - RNA, 19 nt, Artificial Sequence
  Description of Artificial Sequence: Synthetic oligonucleotide
  Antisense strand to SEQ ID NO: 852050
ucuguaguaacaaaguaga

SEQ ID NO: 852052 - RNA, 19 nt, Artificial Sequence
  Description of Artificial Sequence: Synthetic oligonucleotide
  Sense strand starting at position 324 of SEQ ID NO: 588249
ugcugauacggauaaacca

SEQ ID NO: 852053 - RNA, 19 nt, Artificial Sequence
  Description of Artificial Sequence: Synthetic oligonucleotide
  Antisense strand to SEQ ID NO: 852052
ugguuuauccguaucagca

SEQ ID NO: 852054 - RNA, 19 nt, Artificial Sequence
  Description of Artificial Sequence: Synthetic oligonucleotide
  Sense strand starting at position 332 of SEQ ID NO: 588249
cggauaaaccacuguuaaa

SEQ ID NO: 852055 - RNA, 19 nt, Artificial Sequence
  Description of Artificial Sequence: Synthetic oligonucleotide
  Antisense strand to SEQ ID NO: 852054
uuuaacagugguuuauccg

SEQ ID NO: 852056 - RNA, 19 nt, Artificial Sequence
  Description of Artificial Sequence: Synthetic oligonucleotide
  Sense strand starting at position 491 of SEQ ID NO: 588249
gugcauuuauccuauagau

SEQ ID NO: 852057 - RNA, 19 nt, Artificial Sequence
  Description of Artificial Sequence: Synthetic oligonucleotide
  Antisense strand to SEQ ID NO: 852056
aucuauaggauaaaugcac

SEQ ID NO: 852058 - RNA, 19 nt, Artificial Sequence
  Description of Artificial Sequence: Synthetic oligonucleotide
  Sense strand starting at position 567 of SEQ ID NO: 588249
gguuuauauuuccauguca

SEQ ID NO: 852059 - RNA, 19 nt, Artificial Sequence
  Description of Artificial Sequence: Synthetic oligonucleotide
  Antisense strand to SEQ ID NO: 852058
ugacauggaaauauaaacc

SEQ ID NO: 852060 - RNA, 19 nt, Artificial Sequence
  Description of Artificial Sequence: Synthetic oligonucleotide
  Sense strand starting at position 649 of SEQ ID NO: 588249
cuauauauuccuggcgaag

SEQ ID NO: 852061 - RNA, 19 nt, Artificial Sequence
  Description of Artificial Sequence: Synthetic oligonucleotide
  Antisense strand to SEQ ID NO: 852060
cuucgccaggaauauauag

SEQ ID NO: 852062 - RNA, 19 nt, Artificial Sequence
  Description of Artificial Sequence: Synthetic oligonucleotide
  Sense strand starting at position 652 of SEQ ID NO: 588249
uauauuccuggcgaagcau

SEQ ID NO: 852063 - RNA, 19 nt, Artificial Sequence
  Description of Artificial Sequence: Synthetic oligonucleotide
  Antisense strand to SEQ ID NO: 852062
augcuucgccaggaauaua

SEQ ID NO: 852064 - RNA, 19 nt, Artificial Sequence
  Description of Artificial Sequence: Synthetic oligonucleotide
  Sense strand starting at position 691 of SEQ ID NO: 588249
agugaagccucauuaaauu

SEQ ID NO: 852065 - RNA, 19 nt, Artificial Sequence
  Description of Artificial Sequence: Synthetic oligonucleotide
  Antisense strand to SEQ ID NO: 852064
aauuuaaugaggcuucacu

SEQ ID NO: 852066 - RNA, 19 nt, Artificial Sequence
  Description of Artificial Sequence: Synthetic oligonucleotide
  Sense strand starting at position 810 of SEQ ID NO: 588249
ugucaacauuugucaaugu

SEQ ID NO: 852067 - RNA, 19 nt, Artificial Sequence
  Description of Artificial Sequence: Synthetic oligonucleotide
  Antisense strand to SEQ ID NO: 852066
acauugacaaauguugaca

SEQ ID NO: 852068 - RNA, 19 nt, Artificial Sequence
  Description of Artificial Sequence: Synthetic oligonucleotide
  Sense strand starting at position 888 of SEQ ID NO: 588249
cuaacugucgucugagaug

SEQ ID NO: 852069 - RNA, 19 nt, Artificial Sequence
  Description of Artificial Sequence: Synthetic oligonucleotide
  Antisense strand to SEQ ID NO: 852068
caucucagacgacaguuag

SEQ ID NO: 852070 - RNA, 19 nt, Artificial Sequence
  Description of Artificial Sequence: Synthetic oligonucleotide
  Sense strand starting at position 893 of SEQ ID NO: 588249
ugucgucugagaugacuaa

SEQ ID NO: 852071 - RNA, 19 nt, Artificial Sequence
  Description of Artificial Sequence: Synthetic oligonucleotide
  Antisense strand to SEQ ID NO: 852070
uuagucaucucagacgaca

SEQ ID NO: 852072 - RNA, 19 nt, Artificial Sequence
  Description of Artificial Sequence: Synthetic oligonucleotide
  Sense strand starting at position 894 of SEQ ID NO: 588249
gucgucugagaugacuaaa

SEQ ID NO: 852073 - RNA, 19 nt, Artificial Sequence
  Description of Artificial Sequence: Synthetic oligonucleotide
  Antisense strand to SEQ ID NO: 852072
uuuagucaucucagacgac

SEQ ID NO: 852074 - RNA, 19 nt, Artificial Sequence
  Description of Artificial Sequence: Synthetic oligonucleotide
  Sense strand starting at position 924 of SEQ ID NO: 588249
ugggauuucucaggaacag

SEQ ID NO: 852075 - RNA, 19 nt, Artificial Sequence
  Description of Artificial Sequence: Synthetic oligonucleotide
  Antisense strand to SEQ ID NO: 852074
cuguuccugagaaauccca

SEQ ID NO: 852076 - RNA, 19 nt, Artificial Sequence
  Description of Artificial Sequence: Synthetic oligonucleotide
  Sense strand starting at position 936 of SEQ ID NO: 588249
ggaacaguucuacaguucu

SEQ ID NO: 852077 - RNA, 19 nt, Artificial Sequence
  Description of Artificial Sequence: Synthetic oligonucleotide
  Antisense strand to SEQ ID NO: 852076
agaacuguagaacuguucc

SEQ ID NO: 852078 - RNA, 19 nt, Artificial Sequence
  Description of Artificial Sequence: Synthetic oligonucleotide
  Sense strand starting at position 948 of SEQ ID NO: 588249
caguucugucguuugcuaa

SEQ ID NO: 852079 - RNA, 19 nt, Artificial Sequence
  Description of Artificial Sequence: Synthetic oligonucleotide
  Antisense strand to SEQ ID NO: 852078
uuagcaaacgacagaacug

SEQ ID NO: 852080 - RNA, 19 nt, Artificial Sequence
  Description of Artificial Sequence: Synthetic oligonucleotide
  Sense strand starting at position 1240 of SEQ ID NO: 588249
aaacuuagaugguuagcaa

SEQ ID NO: 852081 - RNA, 19 nt, Artificial Sequence
  Description of Artificial Sequence: Synthetic oligonucleotide
  Antisense strand to SEQ ID NO: 852080
uugcuaaccaucuaaguuu

SEQ ID NO: 852082 - RNA, 19 nt, Artificial Sequence
  Description of Artificial Sequence: Synthetic oligonucleotide
  Sense strand starting at position 1241 of SEQ ID NO: 588249
aacuuagaugguuagcaau

SEQ ID NO: 852083 - RNA, 19 nt, Artificial Sequence
  Description of Artificial Sequence: Synthetic oligonucleotide
  Antisense strand to SEQ ID NO: 852082
auugcuaaccaucuaaguu

SEQ ID NO: 852084 - RNA, 19 nt, Artificial Sequence
  Description of Artificial Sequence: Synthetic oligonucleotide
  Sense strand starting at position 1243 of SEQ ID NO: 588249
cuuagaugguuagcaauaa

SEQ ID NO: 852085 - RNA, 19 nt, Artificial Sequence
  Description of Artificial Sequence: Synthetic oligonucleotide
  Antisense strand to SEQ ID NO: 852084
uuauugcuaaccaucuaag

SEQ ID NO: 852086 - RNA, 19 nt, Artificial Sequence
  Description of Artificial Sequence: Synthetic oligonucleotide
  Sense strand starting at position 1247 of SEQ ID NO: 588249
gaugguuagcaauaauucu

SEQ ID NO: 852087 - RNA, 19 nt, Artificial Sequence
  Description of Artificial Sequence: Synthetic oligonucleotide
  Antisense strand to SEQ ID NO: 852086
agaauuauugcuaaccauc

SEQ ID NO: 852088 - RNA, 19 nt, Artificial Sequence
  Description of Artificial Sequence: Synthetic oligonucleotide
  Sense strand starting at position 1272 of SEQ ID NO: 588249
ggagaaagaaagugugcuu

SEQ ID NO: 852089 - RNA, 19 nt, Artificial Sequence
  Description of Artificial Sequence: Synthetic oligonucleotide
  Antisense strand to SEQ ID NO: 852088
aagcacacuuucuuucucc

SEQ ID NO: 852090 - RNA, 19 nt, Artificial Sequence
  Description of Artificial Sequence: Synthetic oligonucleotide
  Sense strand starting at position 1277 of SEQ ID NO: 588249
aagaaagugugcuugaaau

SEQ ID NO: 852091 - RNA, 19 nt, Artificial Sequence
  Description of Artificial Sequence: Synthetic oligonucleotide
  Antisense strand to SEQ ID NO: 852090
auuucaagcacacuuucuu

SEQ ID NO: 852092 - RNA, 19 nt, Artificial Sequence
  Description of Artificial Sequence: Synthetic oligonucleotide
  Sense strand starting at position 1279 of SEQ ID NO: 588249
gaaagugugcuugaaauac

SEQ ID NO: 852093 - RNA, 19 nt, Artificial Sequence
  Description of Artificial Sequence: Synthetic oligonucleotide
  Antisense strand to SEQ ID NO: 852092
guauuucaagcacacuuuc

SEQ ID NO: 852094 - RNA, 19 nt, Artificial Sequence
  Description of Artificial Sequence: Synthetic oligonucleotide
  Sense strand starting at position 1382 of SEQ ID NO: 588249
gggacucacugacuucuga

SEQ ID NO: 852095 - RNA, 19 nt, Artificial Sequence
  Description of Artificial Sequence: Synthetic oligonucleotide
  Antisense strand to SEQ ID NO: 852094
ucagaagucagugaguccc

SEQ ID NO: 852096 - RNA, 19 nt, Artificial Sequence
  Description of Artificial Sequence: Synthetic oligonucleotide
  Sense strand starting at position 1391 of SEQ ID NO: 588249
ugacuucugagguggguuu

SEQ ID NO: 852097 - RNA, 19 nt, Artificial Sequence
  Description of Artificial Sequence: Synthetic oligonucleotide
  Antisense strand to SEQ ID NO: 852096
aaacccaccucagaaguca

SEQ ID NO: 852098 - RNA, 19 nt, Artificial Sequence
  Description of Artificial Sequence: Synthetic oligonucleotide
  Sense strand starting at position 1392 of SEQ ID NO: 588249
gacuucugagguggguuua

SEQ ID NO: 852099 - RNA, 19 nt, Artificial Sequence
  Description of Artificial Sequence: Synthetic oligonucleotide
  Antisense strand to SEQ ID NO: 852098
uaaacccaccucagaaguc

SEQ ID NO: 852100 - RNA, 19 nt, Artificial Sequence
  Description of Artificial Sequence: Synthetic oligonucleotide
  Sense strand starting at position 1425 of SEQ ID NO: 588249
cucaguuucccacgauuga

SEQ ID NO: 852101 - RNA, 19 nt, Artificial Sequence
  Description of Artificial Sequence: Synthetic oligonucleotide
  Antisense strand to SEQ ID NO: 852100
ucaaucgugggaaacugag

SEQ ID NO: 852102 - RNA, 19 nt, Artificial Sequence
  Description of Artificial Sequence: Synthetic oligonucleotide
  Sense strand starting at position 1481 of SEQ ID NO: 588249
gcgagaaccacaugucuaa

SEQ ID NO: 852103 - RNA, 19 nt, Artificial Sequence
  Description of Artificial Sequence: Synthetic oligonucleotide
  Antisense strand to SEQ ID NO: 852102
uuagacaugugguucucgc

SEQ ID NO: 852104 - RNA, 19 nt, Artificial Sequence
  Description of Artificial Sequence: Synthetic oligonucleotide
  Sense strand starting at position 1558 of SEQ ID NO: 588249
cugggcuagagacgaauua

SEQ ID NO: 852105 - RNA, 19 nt, Artificial Sequence
  Description of Artificial Sequence: Synthetic oligonucleotide
  Antisense strand to SEQ ID NO: 852104
uaauucgucucuagcccag

SEQ ID NO: 852106 - RNA, 19 nt, Artificial Sequence
  Description of Artificial Sequence: Synthetic oligonucleotide
  Sense strand starting at position 1568 of SEQ ID NO: 588249
gacgaauuaucuguuuacg

SEQ ID NO: 852107 - RNA, 19 nt, Artificial Sequence
  Description of Artificial Sequence: Synthetic oligonucleotide
  Antisense strand to SEQ ID NO: 852106
cguaaacagauaauucguc

SEQ ID NO: 852108 - RNA, 19 nt, Artificial Sequence
  Description of Artificial Sequence: Synthetic oligonucleotide
  Sense strand starting at position 1570 of SEQ ID NO: 588249
cgaauuaucuguuuacgaa

SEQ ID NO: 852109 - RNA, 19 nt, Artificial Sequence
  Description of Artificial Sequence: Synthetic oligonucleotide
  Antisense strand to SEQ ID NO: 852108
uucguaaacagauaauucg

SEQ ID NO: 852110 - RNA, 19 nt, Artificial Sequence
  Description of Artificial Sequence: Synthetic oligonucleotide
  Sense strand starting at position 1571 of SEQ ID NO: 588249
gaauuaucuguuuacgaaa

SEQ ID NO: 852111 - RNA, 19 nt, Artificial Sequence
  Description of Artificial Sequence: Synthetic oligonucleotide
  Antisense strand to SEQ ID NO: 852110
uuucguaaacagauaauuc

SEQ ID NO: 852112 - RNA, 19 nt, Artificial Sequence
  Description of Artificial Sequence: Synthetic oligonucleotide
  Sense strand starting at position 1757 of SEQ ID NO: 588249
cgggaugugaaccacgaaa

SEQ ID NO: 852113 - RNA, 19 nt, Artificial Sequence
  Description of Artificial Sequence: Synthetic oligonucleotide
  Antisense strand to SEQ ID NO: 852112
uuucgugguucacaucccg

SEQ ID NO: 852114 - RNA, 19 nt, Artificial Sequence
  Description of Artificial Sequence: Synthetic oligonucleotide
  Sense strand starting at position 2900 of SEQ ID NO: 588249
ccgcguccucgcguagaau

SEQ ID NO: 852115 - RNA, 19 nt, Artificial Sequence
  Description of Artificial Sequence: Synthetic oligonucleotide
  Antisense strand to SEQ ID NO: 852114
auucuacgcgaggacgcgg

SEQ ID NO: 852116 - RNA, 19 nt, Artificial Sequence
  Description of Artificial Sequence: Synthetic oligonucleotide
  Sense strand starting at position 3101 of SEQ ID NO: 588249
cuccuuuccagcugggaga

SEQ ID NO: 852117 - RNA, 19 nt, Artificial Sequence
  Description of Artificial Sequence: Synthetic oligonucleotide
  Antisense strand to SEQ ID NO: 852116
ucucccagcuggaaaggag

SEQ ID NO: 852118 - RNA, 19 nt, Artificial Sequence
  Description of Artificial Sequence: Synthetic oligonucleotide
  Sense strand starting at position 3433 of SEQ ID NO: 588249
gggugugugccagaggauu

SEQ ID NO: 852119 - RNA, 19 nt, Artificial Sequence
  Description of Artificial Sequence: Synthetic oligonucleotide
  Antisense strand to SEQ ID NO: 852118
aauccucuggcacacaccc

SEQ ID NO: 852120 - RNA, 19 nt, Artificial Sequence
  Description of Artificial Sequence: Synthetic oligonucleotide
  Sense strand starting at position 3564 of SEQ ID NO: 588249
ccgacagggccuuacagau

SEQ ID NO: 852121 - RNA, 19 nt, Artificial Sequence
  Description of Artificial Sequence: Synthetic oligonucleotide
  Antisense strand to SEQ ID NO: 852120
aucuguaaggcccugucgg

SEQ ID NO: 852122 - RNA, 19 nt, Artificial Sequence
  Description of Artificial Sequence: Synthetic oligonucleotide
  Sense strand starting at position 3901 of SEQ ID NO: 588249
ccaccuuucugucuaguau

SEQ ID NO: 852123 - RNA, 19 nt, Artificial Sequence
  Description of Artificial Sequence: Synthetic oligonucleotide
  Antisense strand to SEQ ID NO: 852122
auacuagacagaaaggugg

SEQ ID NO: 852124 - RNA, 19 nt, Artificial Sequence
  Description of Artificial Sequence: Synthetic oligonucleotide
  Sense strand starting at position 3981 of SEQ ID NO: 588249
aguagcccuuccucagaaa

SEQ ID NO: 852125 - RNA, 19 nt, Artificial Sequence
  Description of Artificial Sequence: Synthetic oligonucleotide
  Antisense strand to SEQ ID NO: 852124
uuucugaggaagggcuacu

SEQ ID NO: 852126 - RNA, 19 nt, Artificial Sequence
  Description of Artificial Sequence: Synthetic oligonucleotide
  Sense strand starting at position 3982 of SEQ ID NO: 588249
guagcccuuccucagaaau

SEQ ID NO: 852127 - RNA, 19 nt, Artificial Sequence
  Description of Artificial Sequence: Synthetic oligonucleotide
  Antisense strand to SEQ ID NO: 852126
auuucugaggaagggcuac

SEQ ID NO: 852128 - RNA, 19 nt, Artificial Sequence
  Description of Artificial Sequence: Synthetic oligonucleotide
  Sense strand starting at position 10 of SEQ ID NO: 588250
uaggauaacuguuauuugu

SEQ ID NO: 852129 - RNA, 19 nt, Artificial Sequence
  Description of Artificial Sequence: Synthetic oligonucleotide
  Antisense strand to SEQ ID NO: 852128
acaaauaacaguuauccua

SEQ ID NO: 852130 - RNA, 19 nt, Artificial Sequence
  Description of Artificial Sequence: Synthetic oligonucleotide
  Sense strand starting at position 27 of SEQ ID NO: 588250
guuauauuaguuugaggau

SEQ ID NO: 852131 - RNA, 19 nt, Artificial Sequence
  Description of Artificial Sequence: Synthetic oligonucleotide
  Antisense strand to SEQ ID NO: 852130
auccucaaacuaauauaac

SEQ ID NO: 852132 - RNA, 19 nt, Artificial Sequence
  Description of Artificial Sequence: Synthetic oligonucleotide
  Sense strand starting at position 46 of SEQ ID NO: 588250
ggugguguuaaagaggagu

SEQ ID NO: 852133 - RNA, 19 nt, Artificial Sequence
  Description of Artificial Sequence: Synthetic oligonucleotide
  Antisense strand to SEQ ID NO: 852132
acuccucuuuaacaccacc

SEQ ID NO: 852134 - RNA, 19 nt, Artificial Sequence
  Description of Artificial Sequence: Synthetic oligonucleotide
  Sense strand starting at position 48 of SEQ ID NO: 588250
ugguguuaaagaggaguua

SEQ ID NO: 852135 - RNA, 19 nt, Artificial Sequence
  Description of Artificial Sequence: Synthetic oligonucleotide
  Antisense strand to SEQ ID NO: 852134
uaacuccucuuuaacacca

SEQ ID NO: 852136 - RNA, 19 nt, Artificial Sequence
  Description of Artificial Sequence: Synthetic oligonucleotide
  Sense strand starting at position 111 of SEQ ID NO: 588250
ugccuaaaucaaggaauua

SEQ ID NO: 852137 - RNA, 19 nt, Artificial Sequence
  Description of Artificial Sequence: Synthetic oligonucleotide
  Antisense strand to SEQ ID NO: 852136
uaauuccuugauuuaggca

SEQ ID NO: 852138 - RNA, 19 nt, Artificial Sequence
  Description of Artificial Sequence: Synthetic oligonucleotide
  Sense strand starting at position 150 of SEQ ID NO: 588250
auuaaauccuguccugaga

SEQ ID NO: 852139 - RNA, 19 nt, Artificial Sequence
  Description of Artificial Sequence: Synthetic oligonucleotide
  Antisense strand to SEQ ID NO: 852138
ucucaggacaggauuuaau

SEQ ID NO: 852140 - RNA, 19 nt, Artificial Sequence
  Description of Artificial Sequence: Synthetic oligonucleotide
  Sense strand starting at position 169 of SEQ ID NO: 588250
aagugaaacugacucaguu

SEQ ID NO: 852141 - RNA, 19 nt, Artificial Sequence
  Description of Artificial Sequence: Synthetic oligonucleotide
  Antisense strand to SEQ ID NO: 852140
aacugagucaguuucacuu

SEQ ID NO: 852142 - RNA, 19 nt, Artificial Sequence
  Description of Artificial Sequence: Synthetic oligonucleotide
  Sense strand starting at position 357 of SEQ ID NO: 588250
aguaacccauauguaaaua

SEQ ID NO: 852143 - RNA, 19 nt, Artificial Sequence
  Description of Artificial Sequence: Synthetic oligonucleotide
  Antisense strand to SEQ ID NO: 852142
uauuuacauauggguuacu

SEQ ID NO: 852144 - RNA, 19 nt, Artificial Sequence
  Description of Artificial Sequence: Synthetic oligonucleotide
  Sense strand starting at position 428 of SEQ ID NO: 588250
aaauguguaggaugcuuaa

SEQ ID NO: 852145 - RNA, 19 nt, Artificial Sequence
  Description of Artificial Sequence: Synthetic oligonucleotide
  Antisense strand to SEQ ID NO: 852144
uuaagcauccuacacauuu

SEQ ID NO: 852146 - RNA, 19 nt, Artificial Sequence
  Description of Artificial Sequence: Synthetic oligonucleotide
  Sense strand starting at position 534 of SEQ ID NO: 588250
acaccaauguaguuaggau

SEQ ID NO: 852147 - RNA, 19 nt, Artificial Sequence
  Description of Artificial Sequence: Synthetic oligonucleotide
  Antisense strand to SEQ ID NO: 852146
auccuaacuacauuggugu

SEQ ID NO: 852148 - RNA, 19 nt, Artificial Sequence
  Description of Artificial Sequence: Synthetic oligonucleotide
  Sense strand starting at position 546 of SEQ ID NO: 588250
uuaggauucuaagccaaca

SEQ ID NO: 852149 - RNA, 19 nt, Artificial Sequence
  Description of Artificial Sequence: Synthetic oligonucleotide
  Antisense strand to SEQ ID NO: 852148
uguuggcuuagaauccuaa

SEQ ID NO: 852150 - RNA, 19 nt, Artificial Sequence
  Description of Artificial Sequence: Synthetic oligonucleotide
  Sense strand starting at position 731 of SEQ ID NO: 588250
augcuaaguuacccaugua

SEQ ID NO: 852151 - RNA, 19 nt, Artificial Sequence
  Description of Artificial Sequence: Synthetic oligonucleotide
  Antisense strand to SEQ ID NO: 852150
uacauggguaacuuagcau

SEQ ID NO: 852152 - RNA, 19 nt, Artificial Sequence
  Description of Artificial Sequence: Synthetic oligonucleotide
  Sense strand starting at position 734 of SEQ ID NO: 588250
cuaaguuacccauguauua

SEQ ID NO: 852153 - RNA, 19 nt, Artificial Sequence
  Description of Artificial Sequence: Synthetic oligonucleotide
  Antisense strand to SEQ ID NO: 852152
uaauacauggguaacuuag

SEQ ID NO: 852154 - RNA, 19 nt, Artificial Sequence
  Description of Artificial Sequence: Synthetic oligonucleotide
  Sense strand starting at position 896 of SEQ ID NO: 588250
guuagcagauauucccaaa

SEQ ID NO: 852155 - RNA, 19 nt, Artificial Sequence
  Description of Artificial Sequence: Synthetic oligonucleotide
  Antisense strand to SEQ ID NO: 852154
uuugggaauaucugcuaac

SEQ ID NO: 852156 - RNA, 19 nt, Artificial Sequence
  Description of Artificial Sequence: Synthetic oligonucleotide
  Sense strand starting at position 946 of SEQ ID NO: 588250
acaugaauguggcucauua

SEQ ID NO: 852157 - RNA, 19 nt, Artificial Sequence
  Description of Artificial Sequence: Synthetic oligonucleotide
  Antisense strand to SEQ ID NO: 852156
uaaugagccacauucaugu

SEQ ID NO: 852158 - RNA, 19 nt, Artificial Sequence
  Description of Artificial Sequence: Synthetic oligonucleotide
  Sense strand starting at position 948 of SEQ ID NO: 588250
augaauguggcucauuauu

SEQ ID NO: 852159 - RNA, 19 nt, Artificial Sequence
  Description of Artificial Sequence: Synthetic oligonucleotide
  Antisense strand to SEQ ID NO: 852158
aauaaugagccacauucau

SEQ ID NO: 852160 - RNA, 19 nt, Artificial Sequence
  Description of Artificial Sequence: Synthetic oligonucleotide
  Sense strand starting at position 954 of SEQ ID NO: 588250
guggcucauuauuuccuaa

SEQ ID NO: 852161 - RNA, 19 nt, Artificial Sequence
  Description of Artificial Sequence: Synthetic oligonucleotide
  Antisense strand to SEQ ID NO: 852160
uuaggaaauaaugagccac

SEQ ID NO: 852162 - RNA, 19 nt, Artificial Sequence
  Description of Artificial Sequence: Synthetic oligonucleotide
  Sense strand starting at position 956 of SEQ ID NO: 588250
ggcucauuauuuccuaagu

SEQ ID NO: 852163 - RNA, 19 nt, Artificial Sequence
  Description of Artificial Sequence: Synthetic oligonucleotide
  Antisense strand to SEQ ID NO: 852162
acuuaggaaauaaugagcc

SEQ ID NO: 852164 - RNA, 19 nt, Artificial Sequence
  Description of Artificial Sequence: Synthetic oligonucleotide
  Sense strand starting at position 1369 of SEQ ID NO: 588250
cugaauaauuucgaucaaa

SEQ ID NO: 852165 - RNA, 19 nt, Artificial Sequence
  Description of Artificial Sequence: Synthetic oligonucleotide
  Antisense strand to SEQ ID NO: 852164
uuugaucgaaauuauucag

SEQ ID NO: 852166 - RNA, 19 nt, Artificial Sequence
  Description of Artificial Sequence: Synthetic oligonucleotide
  Sense strand starting at position 1608 of SEQ ID NO: 588250
agaucuucucagcauucga

SEQ ID NO: 852167 - RNA, 19 nt, Artificial Sequence
  Description of Artificial Sequence: Synthetic oligonucleotide
  Antisense strand to SEQ ID NO: 852166
ucgaaugcugagaagaucu

SEQ ID NO: 852168 - RNA, 19 nt, Artificial Sequence
  Description of Artificial Sequence: Synthetic oligonucleotide
  Sense strand starting at position 1612 of SEQ ID NO: 588250
cuucucagcauucgagaga

SEQ ID NO: 852169 - RNA, 19 nt, Artificial Sequence
  Description of Artificial Sequence: Synthetic oligonucleotide
  Antisense strand to SEQ ID NO: 852168
ucucucgaaugcugagaag

SEQ ID NO: 852170 - RNA, 19 nt, Artificial Sequence
  Description of Artificial Sequence: Synthetic oligonucleotide
  Sense strand starting at position 1615 of SEQ ID NO: 588250
cucagcauucgagagaucu

SEQ ID NO: 852171 - RNA, 19 nt, Artificial Sequence
  Description of Artificial Sequence: Synthetic oligonucleotide
  Antisense strand to SEQ ID NO: 852170
agaucucucgaaugcugag

SEQ ID NO: 852172 - RNA, 19 nt, Artificial Sequence
  Description of Artificial Sequence: Synthetic oligonucleotide
  Sense strand starting at position 1693 of SEQ ID NO: 588250
ggaggaggucugugauuac

SEQ ID NO: 852173 - RNA, 19 nt, Artificial Sequence
  Description of Artificial Sequence: Synthetic oligonucleotide
  Antisense strand to SEQ ID NO: 852172
guaaucacagaccuccucc

SEQ ID NO: 852174 - RNA, 19 nt, Artificial Sequence
  Description of Artificial Sequence: Synthetic oligonucleotide
  Sense strand starting at position 1696 of SEQ ID NO: 588250
ggaggucugugauuacaaa

SEQ ID NO: 852175 - RNA, 19 nt, Artificial Sequence
  Description of Artificial Sequence: Synthetic oligonucleotide
  Antisense strand to SEQ ID NO: 852174
uuuguaaucacagaccucc

SEQ ID NO: 852176 - RNA, 19 nt, Artificial Sequence
  Description of Artificial Sequence: Synthetic oligonucleotide
  Sense strand starting at position 2156 of SEQ ID NO: 588250
gagggaccgcgguaucuuu

SEQ ID NO: 852177 - RNA, 19 nt, Artificial Sequence
  Description of Artificial Sequence: Synthetic oligonucleotide
  Antisense strand to SEQ ID NO: 852176
aaagauaccgcggucccuc

SEQ ID NO: 852178 - RNA, 19 nt, Artificial Sequence
  Description of Artificial Sequence: Synthetic oligonucleotide
  Sense strand starting at position 2196 of SEQ ID NO: 588250
gcgagugcucggaggaggu

SEQ ID NO: 852179 - RNA, 19 nt, Artificial Sequence
  Description of Artificial Sequence: Synthetic oligonucleotide
  Antisense strand to SEQ ID NO: 852178
accuccuccgagcacucgc

SEQ ID NO: 852180 - RNA, 19 nt, Artificial Sequence
  Description of Artificial Sequence: Synthetic oligonucleotide
  Sense strand starting at position 2420 of SEQ ID NO: 588250
guuugagugcguucacucu

SEQ ID NO: 852181 - RNA, 19 nt, Artificial Sequence
  Description of Artificial Sequence: Synthetic oligonucleotide
  Antisense strand to SEQ ID NO: 852180
agagugaacgcacucaaac

SEQ ID NO: 852182 - RNA, 19 nt, Artificial Sequence
  Description of Artificial Sequence: Synthetic oligonucleotide
  Sense strand starting at position 2517 of SEQ ID NO: 588250
uuuggugucauagggaaag

SEQ ID NO: 852183 - RNA, 19 nt, Artificial Sequence
  Description of Artificial Sequence: Synthetic oligonucleotide
  Antisense strand to SEQ ID NO: 852182
cuuucccuaugacaccaaa

SEQ ID NO: 852184 - RNA, 19 nt, Artificial Sequence
  Description of Artificial Sequence: Synthetic oligonucleotide
  Sense strand starting at position 2519 of SEQ ID NO: 588250
uggugucauagggaaagua

SEQ ID NO: 852185 - RNA, 19 nt, Artificial Sequence
  Description of Artificial Sequence: Synthetic oligonucleotide
  Antisense strand to SEQ ID NO: 852184
uacuuucccuaugacacca

SEQ ID NO: 852186 - RNA, 19 nt, Artificial Sequence
  Description of Artificial Sequence: Synthetic oligonucleotide
  Sense strand starting at position 2606 of SEQ ID NO: 588250
aucgaaaucaccuguacga

SEQ ID NO: 852187 - RNA, 19 nt, Artificial Sequence
  Description of Artificial Sequence: Synthetic oligonucleotide
  Antisense strand to SEQ ID NO: 852186
ucguacaggugauuucgau

SEQ ID NO: 852188 - RNA, 19 nt, Artificial Sequence
  Description of Artificial Sequence: Synthetic oligonucleotide
  Sense strand starting at position 2608 of SEQ ID NO: 588250
cgaaaucaccuguacgacu

SEQ ID NO: 852189 - RNA, 19 nt, Artificial Sequence
  Description of Artificial Sequence: Synthetic oligonucleotide
  Antisense strand to SEQ ID NO: 852188
agucguacaggugauuucg

SEQ ID NO: 852190 - RNA, 19 nt, Artificial Sequence
  Description of Artificial Sequence: Synthetic oligonucleotide
  Sense strand starting at position 2859 of SEQ ID NO: 588250
ggagaauucugccuguagg

SEQ ID NO: 852191 - RNA, 19 nt, Artificial Sequence
  Description of Artificial Sequence: Synthetic oligonucleotide
  Antisense strand to SEQ ID NO: 852190
ccuacaggcagaauucucc

SEQ ID NO: 852192 - RNA, 19 nt, Artificial Sequence
  Description of Artificial Sequence: Synthetic oligonucleotide
  Sense strand starting at position 2898 of SEQ ID NO: 588250
gagucauuggaaggacgga

SEQ ID NO: 852193 - RNA, 19 nt, Artificial Sequence
  Description of Artificial Sequence: Synthetic oligonucleotide
  Antisense strand to SEQ ID NO: 852192
uccguccuuccaaugacuc

SEQ ID NO: 852194 - RNA, 19 nt, Artificial Sequence
  Description of Artificial Sequence: Synthetic oligonucleotide
  Sense strand starting at position 2957 of SEQ ID NO: 588250
cucaguguucuagaagcag

SEQ ID NO: 852195 - RNA, 19 nt, Artificial Sequence
  Description of Artificial Sequence: Synthetic oligonucleotide
  Antisense strand to SEQ ID NO: 852194
cugcuucuagaacacugag

SEQ ID NO: 852196 - RNA, 19 nt, Artificial Sequence
  Description of Artificial Sequence: Synthetic oligonucleotide
  Sense strand starting at position 2971 of SEQ ID NO: 588250
agcagaguugcacagugau

SEQ ID NO: 852197 - RNA, 19 nt, Artificial Sequence
  Description of Artificial Sequence: Synthetic oligonucleotide
  Antisense strand to SEQ ID NO: 852196
aucacugugcaacucugcu

SEQ ID NO: 852198 - RNA, 19 nt, Artificial Sequence
  Description of Artificial Sequence: Synthetic oligonucleotide
  Sense strand starting at position 2974 of SEQ ID NO: 588250
agaguugcacagugaucca

SEQ ID NO: 852199 - RNA, 19 nt, Artificial Sequence
  Description of Artificial Sequence: Synthetic oligonucleotide
  Antisense strand to SEQ ID NO: 852198
uggaucacugugcaacucu

SEQ ID NO: 852200 - RNA, 19 nt, Artificial Sequence
  Description of Artificial Sequence: Synthetic oligonucleotide
  Sense strand starting at position 2977 of SEQ ID NO: 588250
guugcacagugauccaaag

SEQ ID NO: 852201 - RNA, 19 nt, Artificial Sequence
  Description of Artificial Sequence: Synthetic oligonucleotide
  Antisense strand to SEQ ID NO: 852200
cuuuggaucacugugcaac

SEQ ID NO: 852202 - RNA, 19 nt, Artificial Sequence
  Description of Artificial Sequence: Synthetic oligonucleotide
  Sense strand starting at position 3127 of SEQ ID NO: 588250
gugaguuuaaaugauguau

SEQ ID NO: 852203 - RNA, 19 nt, Artificial Sequence
  Description of Artificial Sequence: Synthetic oligonucleotide
  Antisense strand to SEQ ID NO: 852202
auacaucauuuaaacucac

SEQ ID NO: 852204 - RNA, 19 nt, Artificial Sequence
  Description of Artificial Sequence: Synthetic oligonucleotide
  Sense strand starting at position 3194 of SEQ ID NO: 588250
cuguuagcucuugaauuau

SEQ ID NO: 852205 - RNA, 19 nt, Artificial Sequence
  Description of Artificial Sequence: Synthetic oligonucleotide
  Antisense strand to SEQ ID NO: 852204
auaauucaagagcuaacag

SEQ ID NO: 852206 - RNA, 19 nt, Artificial Sequence
  Description of Artificial Sequence: Synthetic oligonucleotide
  Sense strand starting at position 3219 of SEQ ID NO: 588250
ugaggacuggcuugcaauc

SEQ ID NO: 852207 - RNA, 19 nt, Artificial Sequence
  Description of Artificial Sequence: Synthetic oligonucleotide
  Antisense strand to SEQ ID NO: 852206
gauugcaagccaguccuca

SEQ ID NO: 852208 - RNA, 19 nt, Artificial Sequence
  Description of Artificial Sequence: Synthetic oligonucleotide
  Sense strand starting at position 70 of SEQ ID NO: 588251
auaaauagagcuuggaugu

SEQ ID NO: 852209 - RNA, 19 nt, Artificial Sequence
  Description of Artificial Sequence: Synthetic oligonucleotide
  Antisense strand to SEQ ID NO: 852208
acauccaagcucuauuuau

SEQ ID NO: 852210 - RNA, 19 nt, Artificial Sequence
  Description of Artificial Sequence: Synthetic oligonucleotide
  Sense strand starting at position 71 of SEQ ID NO: 588251
uaaauagagcuuggauguu

SEQ ID NO: 852211 - RNA, 19 nt, Artificial Sequence
  Description of Artificial Sequence: Synthetic oligonucleotide
  Antisense strand to SEQ ID NO: 852210
aacauccaagcucuauuua

SEQ ID NO: 852212 - RNA, 19 nt, Artificial Sequence
  Description of Artificial Sequence: Synthetic oligonucleotide
  Sense strand starting at position 138 of SEQ ID NO: 588251
ggaguaauccuguagcagc

SEQ ID NO: 852213 - RNA, 19 nt, Artificial Sequence
  Description of Artificial Sequence: Synthetic oligonucleotide
  Antisense strand to SEQ ID NO: 852212
gcugcuacaggauuacucc

SEQ ID NO: 852214 - RNA, 19 nt, Artificial Sequence
  Description of Artificial Sequence: Synthetic oligonucleotide
  Sense strand starting at position 290 of SEQ ID NO: 588251
auugaaaggcaguauacuu

SEQ ID NO: 852215 - RNA, 19 nt, Artificial Sequence
  Description of Artificial Sequence: Synthetic oligonucleotide
  Antisense strand to SEQ ID NO: 852214
aaguauacugccuuucaau

SEQ ID NO: 852216 - RNA, 19 nt, Artificial Sequence
  Description of Artificial Sequence: Synthetic oligonucleotide
  Sense strand starting at position 655 of SEQ ID NO: 588251
uagugaggugaguacugaa

SEQ ID NO: 852217 - RNA, 19 nt, Artificial Sequence
  Description of Artificial Sequence: Synthetic oligonucleotide
  Antisense strand to SEQ ID NO: 852216
uucaguacucaccucacua

SEQ ID NO: 852218 - RNA, 19 nt, Artificial Sequence
  Description of Artificial Sequence: Synthetic oligonucleotide
  Sense strand starting at position 704 of SEQ ID NO: 588251
agaguuguccgagauugua

SEQ ID NO: 852219 - RNA, 19 nt, Artificial Sequence
  Description of Artificial Sequence: Synthetic oligonucleotide
  Antisense strand to SEQ ID NO: 852218
uacaaucucggacaacucu

SEQ ID NO: 852220 - RNA, 19 nt, Artificial Sequence
  Description of Artificial Sequence: Synthetic oligonucleotide
  Sense strand starting at position 751 of SEQ ID NO: 588251
aaagcaggauucguacuua

SEQ ID NO: 852221 - RNA, 19 nt, Artificial Sequence
  Description of Artificial Sequence: Synthetic oligonucleotide
  Antisense strand to SEQ ID NO: 852220
uaaguacgaauccugcuuu

SEQ ID NO: 852222 - RNA, 19 nt, Artificial Sequence
  Description of Artificial Sequence: Synthetic oligonucleotide
  Sense strand starting at position 755 of SEQ ID NO: 588251
caggauucguacuuaaaca

SEQ ID NO: 852223 - RNA, 19 nt, Artificial Sequence
  Description of Artificial Sequence: Synthetic oligonucleotide
  Antisense strand to SEQ ID NO: 852222
uguuuaaguacgaauccug

SEQ ID NO: 852224 - RNA, 19 nt, Artificial Sequence
  Description of Artificial Sequence: Synthetic oligonucleotide
  Sense strand starting at position 808 of SEQ ID NO: 588251
ugcauuauuuaugaagauc

SEQ ID NO: 852225 - RNA, 19 nt, Artificial Sequence
  Description of Artificial Sequence: Synthetic oligonucleotide
  Antisense strand to SEQ ID NO: 852224
gaucuucauaaauaaugca

SEQ ID NO: 852226 - RNA, 19 nt, Artificial Sequence
  Description of Artificial Sequence: Synthetic oligonucleotide
  Sense strand starting at position 870 of SEQ ID NO: 588251
uuuguaaucugggcacuga

SEQ ID NO: 852227 - RNA, 19 nt, Artificial Sequence
  Description of Artificial Sequence: Synthetic oligonucleotide
  Antisense strand to SEQ ID NO: 852226
ucagugcccagauuacaaa

SEQ ID NO: 852228 - RNA, 19 nt, Artificial Sequence
  Description of Artificial Sequence: Synthetic oligonucleotide
  Sense strand starting at position 878 of SEQ ID NO: 588251
cugggcacugaguaugaua

SEQ ID NO: 852229 - RNA, 19 nt, Artificial Sequence
  Description of Artificial Sequence: Synthetic oligonucleotide
  Antisense strand to SEQ ID NO: 852228
uaucauacucagugcccag

SEQ ID NO: 852230 - RNA, 19 nt, Artificial Sequence
  Description of Artificial Sequence: Synthetic oligonucleotide
  Sense strand starting at position 880 of SEQ ID NO: 588251
gggcacugaguaugauaau

SEQ ID NO: 852231 - RNA, 19 nt, Artificial Sequence
  Description of Artificial Sequence: Synthetic oligonucleotide
  Antisense strand to SEQ ID NO: 852230
auuaucauacucagugccc

SEQ ID NO: 852232 - RNA, 19 nt, Artificial Sequence
  Description of Artificial Sequence: Synthetic oligonucleotide
  Sense strand starting at position 978 of SEQ ID NO: 588251
uaaguacugugguugagga

SEQ ID NO: 852233 - RNA, 19 nt, Artificial Sequence
  Description of Artificial Sequence: Synthetic oligonucleotide
  Antisense strand to SEQ ID NO: 852232
uccucaaccacaguacuua

SEQ ID NO: 852234 - RNA, 19 nt, Artificial Sequence
  Description of Artificial Sequence: Synthetic oligonucleotide
  Sense strand starting at position 979 of SEQ ID NO: 588251
aaguacugugguugaggaa

SEQ ID NO: 852235 - RNA, 19 nt, Artificial Sequence
  Description of Artificial Sequence: Synthetic oligonucleotide
  Antisense strand to SEQ ID NO: 852234
uuccucaaccacaguacuu

SEQ ID NO: 852236 - RNA, 19 nt, Artificial Sequence
  Description of Artificial Sequence: Synthetic oligonucleotide
  Sense strand starting at position 980 of SEQ ID NO: 588251
aguacugugguugaggaau

SEQ ID NO: 852237 - RNA, 19 nt, Artificial Sequence
  Description of Artificial Sequence: Synthetic oligonucleotide
  Antisense strand to SEQ ID NO: 852236
auuccucaaccacaguacu

SEQ ID NO: 852238 - RNA, 19 nt, Artificial Sequence
  Description of Artificial Sequence: Synthetic oligonucleotide
  Sense strand starting at position 1048 of SEQ ID NO: 588251
cauauaguagcuuagaagu

SEQ ID NO: 852239 - RNA, 19 nt, Artificial Sequence
  Description of Artificial Sequence: Synthetic oligonucleotide
  Antisense strand to SEQ ID NO: 852238
acuucuaagcuacuauaug

SEQ ID NO: 852240 - RNA, 19 nt, Artificial Sequence
  Description of Artificial Sequence: Synthetic oligonucleotide
  Sense strand starting at position 1145 of SEQ ID NO: 588251
uuaucuuuaucguugaaag

SEQ ID NO: 852241 - RNA, 19 nt, Artificial Sequence
  Description of Artificial Sequence: Synthetic oligonucleotide
  Antisense strand to SEQ ID NO: 852240
cuuucaacgauaaagauaa

SEQ ID NO: 852242 - RNA, 19 nt, Artificial Sequence
  Description of Artificial Sequence: Synthetic oligonucleotide
  Sense strand starting at position 1147 of SEQ ID NO: 588251
aucuuuaucguugaaagca

SEQ ID NO: 852243 - RNA, 19 nt, Artificial Sequence
  Description of Artificial Sequence: Synthetic oligonucleotide
  Antisense strand to SEQ ID NO: 852242
ugcuuucaacgauaaagau

SEQ ID NO: 852244 - RNA, 19 nt, Artificial Sequence
  Description of Artificial Sequence: Synthetic oligonucleotide
  Sense strand starting at position 1238 of SEQ ID NO: 588251
ugcaucucugaucaugaga

SEQ ID NO: 852245 - RNA, 19 nt, Artificial Sequence
  Description of Artificial Sequence: Synthetic oligonucleotide
  Antisense strand to SEQ ID NO: 852244
ucucaugaucagagaugca

SEQ ID NO: 852246 - RNA, 19 nt, Artificial Sequence
  Description of Artificial Sequence: Synthetic oligonucleotide
  Sense strand starting at position 1245 of SEQ ID NO: 588251
cugaucaugagauggcaga

SEQ ID NO: 852247 - RNA, 19 nt, Artificial Sequence
  Description of Artificial Sequence: Synthetic oligonucleotide
  Antisense strand to SEQ ID NO: 852246
ucugccaucucaugaucag

SEQ ID NO: 852248 - RNA, 19 nt, Artificial Sequence
  Description of Artificial Sequence: Synthetic oligonucleotide
  Sense strand starting at position 1372 of SEQ ID NO: 588251
cggagacuccuguacaaau

SEQ ID NO: 852249 - RNA, 19 nt, Artificial Sequence
  Description of Artificial Sequence: Synthetic oligonucleotide
  Antisense strand to SEQ ID NO: 852248
auuuguacaggagucuccg

SEQ ID NO: 852250 - RNA, 19 nt, Artificial Sequence
  Description of Artificial Sequence: Synthetic oligonucleotide
  Sense strand starting at position 2345 of SEQ ID NO: 588251
cucccuugugaccgagaga

SEQ ID NO: 852251 - RNA, 19 nt, Artificial Sequence
  Description of Artificial Sequence: Synthetic oligonucleotide
  Antisense strand to SEQ ID NO: 852250
ucucucggucacaagggag

SEQ ID NO: 852252 - RNA, 19 nt, Artificial Sequence
  Description of Artificial Sequence: Synthetic oligonucleotide
  Sense strand starting at position 2346 of SEQ ID NO: 588251
ucccuugugaccgagagaa

SEQ ID NO: 852253 - RNA, 19 nt, Artificial Sequence
  Description of Artificial Sequence: Synthetic oligonucleotide
  Antisense strand to SEQ ID NO: 852252
uucucucggucacaaggga

SEQ ID NO: 852254 - RNA, 19 nt, Artificial Sequence
  Description of Artificial Sequence: Synthetic oligonucleotide
  Sense strand starting at position 2388 of SEQ ID NO: 588251
uucuuaagaugucugaaag

SEQ ID NO: 852255 - RNA, 19 nt, Artificial Sequence
  Description of Artificial Sequence: Synthetic oligonucleotide
  Antisense strand to SEQ ID NO: 852254
cuuucagacaucuuaagaa

SEQ ID NO: 852256 - RNA, 19 nt, Artificial Sequence
  Description of Artificial Sequence: Synthetic oligonucleotide
  Sense strand starting at position 2635 of SEQ ID NO: 588251
cuaguucgagauugagagu

SEQ ID NO: 852257 - RNA, 19 nt, Artificial Sequence
  Description of Artificial Sequence: Synthetic oligonucleotide
  Antisense strand to SEQ ID NO: 852256
acucucaaucucgaacuag

SEQ ID NO: 852258 - RNA, 19 nt, Artificial Sequence
  Description of Artificial Sequence: Synthetic oligonucleotide
  Sense strand starting at position 2768 of SEQ ID NO: 588251
uuugucagguaucuuauuu

SEQ ID NO: 852259 - RNA, 19 nt, Artificial Sequence
  Description of Artificial Sequence: Synthetic oligonucleotide
  Antisense strand to SEQ ID NO: 852258
aaauaagauaccugacaaa

SEQ ID NO: 852260 - RNA, 19 nt, Artificial Sequence
  Description of Artificial Sequence: Synthetic oligonucleotide
  Sense strand starting at position 2856 of SEQ ID NO: 588251
cugggcuugucauuaaaca

SEQ ID NO: 852261 - RNA, 19 nt, Artificial Sequence
  Description of Artificial Sequence: Synthetic oligonucleotide
  Antisense strand to SEQ ID NO: 852260
uguuuaaugacaagcccag

SEQ ID NO: 852262 - RNA, 19 nt, Artificial Sequence
  Description of Artificial Sequence: Synthetic oligonucleotide
  Sense strand starting at position 2857 of SEQ ID NO: 588251
ugggcuugucauuaaacag

SEQ ID NO: 852263 - RNA, 19 nt, Artificial Sequence
  Description of Artificial Sequence: Synthetic oligonucleotide
  Antisense strand to SEQ ID NO: 852262
cuguuuaaugacaagccca

SEQ ID NO: 852264 - RNA, 19 nt, Artificial Sequence
  Description of Artificial Sequence: Synthetic oligonucleotide
  Sense strand starting at position 2938 of SEQ ID NO: 588251
cuaaucuuccuaggugagu

SEQ ID NO: 852265 - RNA, 19 nt, Artificial Sequence
  Description of Artificial Sequence: Synthetic oligonucleotide
  Antisense strand to SEQ ID NO: 852264
acucaccuaggaagauuag

SEQ ID NO: 852266 - RNA, 19 nt, Artificial Sequence
  Description of Artificial Sequence: Synthetic oligonucleotide
  Sense strand starting at position 2939 of SEQ ID NO: 588251
uaaucuuccuaggugaguu

SEQ ID NO: 852267 - RNA, 19 nt, Artificial Sequence
  Description of Artificial Sequence: Synthetic oligonucleotide
  Antisense strand to SEQ ID NO: 852266
aacucaccuaggaagauua

SEQ ID NO: 852268 - RNA, 19 nt, Artificial Sequence
  Description of Artificial Sequence: Synthetic oligonucleotide
  Sense strand starting at position 2943 of SEQ ID NO: 588251
cuuccuaggugaguuugaa

SEQ ID NO: 852269 - RNA, 19 nt, Artificial Sequence
  Description of Artificial Sequence: Synthetic oligonucleotide
  Antisense strand to SEQ ID NO: 852268
uucaaacucaccuaggaag

SEQ ID NO: 852270 - RNA, 19 nt, Artificial Sequence
  Description of Artificial Sequence: Synthetic oligonucleotide
  Sense strand starting at position 3026 of SEQ ID NO: 588251
ccgcaaguuauggauuugu

SEQ ID NO: 852271 - RNA, 19 nt, Artificial Sequence
  Description of Artificial Sequence: Synthetic oligonucleotide
  Antisense strand to SEQ ID NO: 852270
acaaauccauaacuugcgg

SEQ ID NO: 852272 - RNA, 19 nt, Artificial Sequence
  Description of Artificial Sequence: Synthetic oligonucleotide
  Sense strand starting at position 3482 of SEQ ID NO: 588251
accuuugaguuucucugaa

SEQ ID NO: 852273 - RNA, 19 nt, Artificial Sequence
  Description of Artificial Sequence: Synthetic oligonucleotide
  Antisense strand to SEQ ID NO: 852272
uucagagaaacucaaaggu

SEQ ID NO: 852274 - RNA, 19 nt, Artificial Sequence
  Description of Artificial Sequence: Synthetic oligonucleotide
  Sense strand starting at position 3484 of SEQ ID NO: 588251
cuuugaguuucucugaaac

SEQ ID NO: 852275 - RNA, 19 nt, Artificial Sequence
  Description of Artificial Sequence: Synthetic oligonucleotide
  Antisense strand to SEQ ID NO: 852274
guuucagagaaacucaaag

SEQ ID NO: 852276 - RNA, 19 nt, Artificial Sequence
  Description of Artificial Sequence: Synthetic oligonucleotide
  Sense strand starting at position 3558 of SEQ ID NO: 588251
gguaguaaauaugucagaa

SEQ ID NO: 852277 - RNA, 19 nt, Artificial Sequence
  Description of Artificial Sequence: Synthetic oligonucleotide
  Antisense strand to SEQ ID NO: 852276
uucugacauauuuacuacc

SEQ ID NO: 852278 - RNA, 19 nt, Artificial Sequence
  Description of Artificial Sequence: Synthetic oligonucleotide
  Sense strand starting at position 3578 of SEQ ID NO: 588251
aaugaaagcuguuuggagu

SEQ ID NO: 852279 - RNA, 19 nt, Artificial Sequence
  Description of Artificial Sequence: Synthetic oligonucleotide
  Antisense strand to SEQ ID NO: 852278
acuccaaacagcuuucauu

SEQ ID NO: 852280 - RNA, 19 nt, Artificial Sequence
  Description of Artificial Sequence: Synthetic oligonucleotide
  Sense strand starting at position 3579 of SEQ ID NO: 588251
augaaagcuguuuggaguu

SEQ ID NO: 852281 - RNA, 19 nt, Artificial Sequence
  Description of Artificial Sequence: Synthetic oligonucleotide
  Antisense strand to SEQ ID NO: 852280
aacuccaaacagcuuucau

SEQ ID NO: 852282 - RNA, 19 nt, Artificial Sequence
  Description of Artificial Sequence: Synthetic oligonucleotide
  Sense strand starting at position 3640 of SEQ ID NO: 588251
aaagaauggugauagggaa

SEQ ID NO: 852283 - RNA, 19 nt, Artificial Sequence
  Description of Artificial Sequence: Synthetic oligonucleotide
  Antisense strand to SEQ ID NO: 852282
uucccuaucaccauucuuu

SEQ ID NO: 852284 - RNA, 19 nt, Artificial Sequence
  Description of Artificial Sequence: Synthetic oligonucleotide
  Sense strand starting at position 3685 of SEQ ID NO: 588251
gagaaucuugcacgaggca

SEQ ID NO: 852285 - RNA, 19 nt, Artificial Sequence
  Description of Artificial Sequence: Synthetic oligonucleotide
  Antisense strand to SEQ ID NO: 852284
ugccucgugcaagauucuc

SEQ ID NO: 852286 - RNA, 19 nt, Artificial Sequence
  Description of Artificial Sequence: Synthetic oligonucleotide
  Sense strand starting at position 3721 of SEQ ID NO: 588251
aagcaaguugacugaauga

SEQ ID NO: 852287 - RNA, 19 nt, Artificial Sequence
  Description of Artificial Sequence: Synthetic oligonucleotide
  Antisense strand to SEQ ID NO: 852286
ucauucagucaacuugcuu

SEQ ID NO: 852288 - RNA, 19 nt, Artificial Sequence
  Description of Artificial Sequence: Synthetic oligonucleotide
  Sense strand starting at position 7 of SEQ ID NO: 588252
caguguacccgggauguuu

SEQ ID NO: 852289 - RNA, 19 nt, Artificial Sequence
  Description of Artificial Sequence: Synthetic oligonucleotide
  Antisense strand to SEQ ID NO: 852288
aaacaucccggguacacug

SEQ ID NO: 852290 - RNA, 19 nt, Artificial Sequence
  Description of Artificial Sequence: Synthetic oligonucleotide
  Sense strand starting at position 203 of SEQ ID NO: 588252
gcuucccugugccaugaaa

SEQ ID NO: 852291 - RNA, 19 nt, Artificial Sequence
  Description of Artificial Sequence: Synthetic oligonucleotide
  Antisense strand to SEQ ID NO: 852290
uuucauggcacagggaagc

SEQ ID NO: 852292 - RNA, 19 nt, Artificial Sequence
  Description of Artificial Sequence: Synthetic oligonucleotide
  Sense strand starting at position 328 of SEQ ID NO: 588252
aagucacccuguugagaag

SEQ ID NO: 852293 - RNA, 19 nt, Artificial Sequence
  Description of Artificial Sequence: Synthetic oligonucleotide
  Antisense strand to SEQ ID NO: 852292
cuucucaacagggugacuu

SEQ ID NO: 852294 - RNA, 19 nt, Artificial Sequence
  Description of Artificial Sequence: Synthetic oligonucleotide
  Sense strand starting at position 518 of SEQ ID NO: 588252
cucugaagucuagggugau

SEQ ID NO: 852295 - RNA, 19 nt, Artificial Sequence
  Description of Artificial Sequence: Synthetic oligonucleotide
  Antisense strand to SEQ ID NO: 852294
aucacccuagacuucagag

SEQ ID NO: 852296 - RNA, 19 nt, Artificial Sequence
  Description of Artificial Sequence: Synthetic oligonucleotide
  Sense strand starting at position 519 of SEQ ID NO: 588252
ucugaagucuagggugaug

SEQ ID NO: 852297 - RNA, 19 nt, Artificial Sequence
  Description of Artificial Sequence: Synthetic oligonucleotide
  Antisense strand to SEQ ID NO: 852296
caucacccuagacuucaga

SEQ ID NO: 852298 - RNA, 19 nt, Artificial Sequence
  Description of Artificial Sequence: Synthetic oligonucleotide
  Sense strand starting at position 659 of SEQ ID NO: 588252
uggcgugaucccugugcaa

SEQ ID NO: 852299 - RNA, 19 nt, Artificial Sequence
  Description of Artificial Sequence: Synthetic oligonucleotide
  Antisense strand to SEQ ID NO: 852298
uugcacagggaucacgcca

SEQ ID NO: 852300 - RNA, 19 nt, Artificial Sequence
  Description of Artificial Sequence: Synthetic oligonucleotide
  Sense strand starting at position 661 of SEQ ID NO: 588252
gcgugaucccugugcaauu

SEQ ID NO: 852301 - RNA, 19 nt, Artificial Sequence
  Description of Artificial Sequence: Synthetic oligonucleotide
  Antisense strand to SEQ ID NO: 852300
aauugcacagggaucacgc

SEQ ID NO: 852302 - RNA, 19 nt, Artificial Sequence
  Description of Artificial Sequence: Synthetic oligonucleotide
  Sense strand starting at position 663 of SEQ ID NO: 588252
gugaucccugugcaauuga

SEQ ID NO: 852303 - RNA, 19 nt, Artificial Sequence
  Description of Artificial Sequence: Synthetic oligonucleotide
  Antisense strand to SEQ ID NO: 852302
ucaauugcacagggaucac

SEQ ID NO: 852304 - RNA, 19 nt, Artificial Sequence
  Description of Artificial Sequence: Synthetic oligonucleotide
  Sense strand starting at position 674 of SEQ ID NO: 588252
gcaauugagacuggccaga

SEQ ID NO: 852305 - RNA, 19 nt, Artificial Sequence
  Description of Artificial Sequence: Synthetic oligonucleotide
  Antisense strand to SEQ ID NO: 852304
ucuggccagucucaauugc

SEQ ID NO: 852306 - RNA, 19 nt, Artificial Sequence
  Description of Artificial Sequence: Synthetic oligonucleotide
  Sense strand starting at position 779 of SEQ ID NO: 588252
ggugaccucuccuuugagu

SEQ ID NO: 852307 - RNA, 19 nt, Artificial Sequence
  Description of Artificial Sequence: Synthetic oligonucleotide
  Antisense strand to SEQ ID NO: 852306
acucaaaggagaggucacc

SEQ ID NO: 852308 - RNA, 19 nt, Artificial Sequence
  Description of Artificial Sequence: Synthetic oligonucleotide
  Sense strand starting at position 781 of SEQ ID NO: 588252
ugaccucuccuuugaguca

SEQ ID NO: 852309 - RNA, 19 nt, Artificial Sequence
  Description of Artificial Sequence: Synthetic oligonucleotide
  Antisense strand to SEQ ID NO: 852308
ugacucaaaggagagguca

SEQ ID NO: 852310 - RNA, 19 nt, Artificial Sequence
  Description of Artificial Sequence: Synthetic oligonucleotide
  Sense strand starting at position 1747 of SEQ ID NO: 588252
uugggcauccuguguucua

SEQ ID NO: 852311 - RNA, 19 nt, Artificial Sequence
  Description of Artificial Sequence: Synthetic oligonucleotide
  Antisense strand to SEQ ID NO: 852310
uagaacacaggaugcccaa

SEQ ID NO: 852312 - RNA, 19 nt, Artificial Sequence
  Description of Artificial Sequence: Synthetic oligonucleotide
  Sense strand starting at position 2351 of SEQ ID NO: 588252
cgugacuucugggacagaa

SEQ ID NO: 852313 - RNA, 19 nt, Artificial Sequence
  Description of Artificial Sequence: Synthetic oligonucleotide
  Antisense strand to SEQ ID NO: 852312
uucugucccagaagucacg

SEQ ID NO: 852314 - RNA, 19 nt, Artificial Sequence
  Description of Artificial Sequence: Synthetic oligonucleotide
  Sense strand starting at position 2503 of SEQ ID NO: 588252
guggaagugucaccaucca

SEQ ID NO: 852315 - RNA, 19 nt, Artificial Sequence
  Description of Artificial Sequence: Synthetic oligonucleotide
  Antisense strand to SEQ ID NO: 852314
uggauggugacacuuccac

SEQ ID NO: 852316 - RNA, 19 nt, Artificial Sequence
  Description of Artificial Sequence: Synthetic oligonucleotide
  Sense strand starting at position 2525 of SEQ ID NO: 588252
ugauguguccugggaggga

SEQ ID NO: 852317 - RNA, 19 nt, Artificial Sequence
  Description of Artificial Sequence: Synthetic oligonucleotide
  Antisense strand to SEQ ID NO: 852316
ucccucccaggacacauca

SEQ ID NO: 852318 - RNA, 19 nt, Artificial Sequence
  Description of Artificial Sequence: Synthetic oligonucleotide
  Sense strand starting at position 2602 of SEQ ID NO: 588252
uagguuucccuguggaaac

SEQ ID NO: 852319 - RNA, 19 nt, Artificial Sequence
  Description of Artificial Sequence: Synthetic oligonucleotide
  Antisense strand to SEQ ID NO: 852318
guuuccacagggaaaccua

SEQ ID NO: 852320 - RNA, 19 nt, Artificial Sequence
  Description of Artificial Sequence: Synthetic oligonucleotide
  Sense strand starting at position 2604 of SEQ ID NO: 588252
gguuucccuguggaaacaa

SEQ ID NO: 852321 - RNA, 19 nt, Artificial Sequence
  Description of Artificial Sequence: Synthetic oligonucleotide
  Antisense strand to SEQ ID NO: 852320
uuguuuccacagggaaacc

SEQ ID NO: 852322 - RNA, 19 nt, Artificial Sequence
  Description of Artificial Sequence: Synthetic oligonucleotide
  Sense strand starting at position 2700 of SEQ ID NO: 588252
gagaaggucgugugagguu

SEQ ID NO: 852323 - RNA, 19 nt, Artificial Sequence
  Description of Artificial Sequence: Synthetic oligonucleotide
  Antisense strand to SEQ ID NO: 852322
aaccucacacgaccuucuc

SEQ ID NO: 852324 - RNA, 19 nt, Artificial Sequence
  Description of Artificial Sequence: Synthetic oligonucleotide
  Sense strand starting at position 3223 of SEQ ID NO: 588252
gcugcagugucauuuacag

SEQ ID NO: 852325 - RNA, 19 nt, Artificial Sequence
  Description of Artificial Sequence: Synthetic oligonucleotide
  Antisense strand to SEQ ID NO: 852324
cuguaaaugacacugcagc

SEQ ID NO: 852326 - RNA, 19 nt, Artificial Sequence
  Description of Artificial Sequence: Synthetic oligonucleotide
  Sense strand starting at position 3334 of SEQ ID NO: 588252
cccaguuuauaucuaugua

SEQ ID NO: 852327 - RNA, 19 nt, Artificial Sequence
  Description of Artificial Sequence: Synthetic oligonucleotide
  Antisense strand to SEQ ID NO: 852326
uacauagauauaaacuggg

SEQ ID NO: 852328 - RNA, 19 nt, Artificial Sequence
  Description of Artificial Sequence: Synthetic oligonucleotide
  Sense strand starting at position 3388 of SEQ ID NO: 588252
agaggaagauuacagagau

SEQ ID NO: 852329 - RNA, 19 nt, Artificial Sequence
  Description of Artificial Sequence: Synthetic oligonucleotide
  Antisense strand to SEQ ID NO: 852328
aucucuguaaucuuccucu

SEQ ID NO: 852330 - RNA, 19 nt, Artificial Sequence
  Description of Artificial Sequence: Synthetic oligonucleotide
  Sense strand starting at position 3503 of SEQ ID NO: 588252
gucauuaucacccggaguc

SEQ ID NO: 852331 - RNA, 19 nt, Artificial Sequence
  Description of Artificial Sequence: Synthetic oligonucleotide
  Antisense strand to SEQ ID NO: 852330
gacuccgggugauaaugac

SEQ ID NO: 852332 - RNA, 19 nt, Artificial Sequence
  Description of Artificial Sequence: Synthetic oligonucleotide
  Sense strand starting at position 3641 of SEQ ID NO: 588252
ugcuuuagccucugaagua

SEQ ID NO: 852333 - RNA, 19 nt, Artificial Sequence
  Description of Artificial Sequence: Synthetic oligonucleotide
  Antisense strand to SEQ ID NO: 852332
uacuucagaggcuaaagca

SEQ ID NO: 852334 - RNA, 19 nt, Artificial Sequence
  Description of Artificial Sequence: Synthetic oligonucleotide
  Sense strand starting at position 3642 of SEQ ID NO: 588252
gcuuuagccucugaaguag

SEQ ID NO: 852335 - RNA, 19 nt, Artificial Sequence
  Description of Artificial Sequence: Synthetic oligonucleotide
  Antisense strand to SEQ ID NO: 852334
cuacuucagaggcuaaagc

SEQ ID NO: 852336 - RNA, 19 nt, Artificial Sequence
  Description of Artificial Sequence: Synthetic oligonucleotide
  Sense strand starting at position 232 of SEQ ID NO: 588253
aaaucuuguggccaguaaa

SEQ ID NO: 852337 - RNA, 19 nt, Artificial Sequence
  Description of Artificial Sequence: Synthetic oligonucleotide
  Antisense strand to SEQ ID NO: 852336
uuuacuggccacaagauuu

SEQ ID NO: 852338 - RNA, 19 nt, Artificial Sequence
  Description of Artificial Sequence: Synthetic oligonucleotide
  Sense strand starting at position 235 of SEQ ID NO: 588253
ucuuguggccaguaaagaa

SEQ ID NO: 852339 - RNA, 19 nt, Artificial Sequence
  Description of Artificial Sequence: Synthetic oligonucleotide
  Antisense strand to SEQ ID NO: 852338
uucuuuacuggccacaaga

SEQ ID NO: 852340 - RNA, 19 nt, Artificial Sequence
  Description of Artificial Sequence: Synthetic oligonucleotide
  Sense strand starting at position 301 of SEQ ID NO: 588253
cuguuagggcaguguauuu

SEQ ID NO: 852341 - RNA, 19 nt, Artificial Sequence
  Description of Artificial Sequence: Synthetic oligonucleotide
  Antisense strand to SEQ ID NO: 852340
aaauacacugcccuaacag

SEQ ID NO: 852342 - RNA, 19 nt, Artificial Sequence
  Description of Artificial Sequence: Synthetic oligonucleotide
  Sense strand starting at position 416 of SEQ ID NO: 588253
uagcaagggucuuuaauac

SEQ ID NO: 852343 - RNA, 19 nt, Artificial Sequence
  Description of Artificial Sequence: Synthetic oligonucleotide
  Antisense strand to SEQ ID NO: 852342
guauuaaagacccuugcua

SEQ ID NO: 852344 - RNA, 19 nt, Artificial Sequence
  Description of Artificial Sequence: Synthetic oligonucleotide
  Sense strand starting at position 982 of SEQ ID NO: 588253
aagucauuaucaguugaga

SEQ ID NO: 852345 - RNA, 19 nt, Artificial Sequence
  Description of Artificial Sequence: Synthetic oligonucleotide
  Antisense strand to SEQ ID NO: 852344
ucucaacugauaaugacuu

SEQ ID NO: 852346 - RNA, 19 nt, Artificial Sequence
  Description of Artificial Sequence: Synthetic oligonucleotide
  Sense strand starting at position 984 of SEQ ID NO: 588253
gucauuaucaguugagaug

SEQ ID NO: 852347 - RNA, 19 nt, Artificial Sequence
  Description of Artificial Sequence: Synthetic oligonucleotide
  Antisense strand to SEQ ID NO: 852346
caucucaacugauaaugac

SEQ ID NO: 852348 - RNA, 19 nt, Artificial Sequence
  Description of Artificial Sequence: Synthetic oligonucleotide
  Sense strand starting at position 993 of SEQ ID NO: 588253
aguugagaugguuagcuga

SEQ ID NO: 852349 - RNA, 19 nt, Artificial Sequence
  Description of Artificial Sequence: Synthetic oligonucleotide
  Antisense strand to SEQ ID NO: 852348
ucagcuaaccaucucaacu

SEQ ID NO: 852350 - RNA, 19 nt, Artificial Sequence
  Description of Artificial Sequence: Synthetic oligonucleotide
  Sense strand starting at position 1062 of SEQ ID NO: 588253
agagauacuucugcauacu

SEQ ID NO: 852351 - RNA, 19 nt, Artificial Sequence
  Description of Artificial Sequence: Synthetic oligonucleotide
  Antisense strand to SEQ ID NO: 852350
aguaugcagaaguaucucu

SEQ ID NO: 852352 - RNA, 19 nt, Artificial Sequence
  Description of Artificial Sequence: Synthetic oligonucleotide
  Sense strand starting at position 1063 of SEQ ID NO: 588253
gagauacuucugcauacug

SEQ ID NO: 852353 - RNA, 19 nt, Artificial Sequence
  Description of Artificial Sequence: Synthetic oligonucleotide
  Antisense strand to SEQ ID NO: 852352
caguaugcagaaguaucuc

SEQ ID NO: 852354 - RNA, 19 nt, Artificial Sequence
  Description of Artificial Sequence: Synthetic oligonucleotide
  Sense strand starting at position 1065 of SEQ ID NO: 588253
gauacuucugcauacugga

SEQ ID NO: 852355 - RNA, 19 nt, Artificial Sequence
  Description of Artificial Sequence: Synthetic oligonucleotide
  Antisense strand to SEQ ID NO: 852354
uccaguaugcagaaguauc

SEQ ID NO: 852356 - RNA, 19 nt, Artificial Sequence
  Description of Artificial Sequence: Synthetic oligonucleotide
  Sense strand starting at position 1084 of SEQ ID NO: 588253
ggcggaauuaucuagcuag

SEQ ID NO: 852357 - RNA, 19 nt, Artificial Sequence
  Description of Artificial Sequence: Synthetic oligonucleotide
  Antisense strand to SEQ ID NO: 852356
cuagcuagauaauuccgcc

SEQ ID NO: 852358 - RNA, 19 nt, Artificial Sequence
  Description of Artificial Sequence: Synthetic oligonucleotide
  Sense strand starting at position 1087 of SEQ ID NO: 588253
ggaauuaucuagcuaggga

SEQ ID NO: 852359 - RNA, 19 nt, Artificial Sequence
  Description of Artificial Sequence: Synthetic oligonucleotide
  Antisense strand to SEQ ID NO: 852358
ucccuagcuagauaauucc

SEQ ID NO: 852360 - RNA, 19 nt, Artificial Sequence
  Description of Artificial Sequence: Synthetic oligonucleotide
  Sense strand starting at position 1090 of SEQ ID NO: 588253
auuaucuagcuagggauau

SEQ ID NO: 852361 - RNA, 19 nt, Artificial Sequence
  Description of Artificial Sequence: Synthetic oligonucleotide
  Antisense strand to SEQ ID NO: 852360
auaucccuagcuagauaau

SEQ ID NO: 852362 - RNA, 19 nt, Artificial Sequence
  Description of Artificial Sequence: Synthetic oligonucleotide
  Sense strand starting at position 1143 of SEQ ID NO: 588253
gacgacugcgauuaaacga

SEQ ID NO: 852363 - RNA, 19 nt, Artificial Sequence
  Description of Artificial Sequence: Synthetic oligonucleotide
  Antisense strand to SEQ ID NO: 852362
ucguuuaaucgcagucguc

SEQ ID NO: 852364 - RNA, 19 nt, Artificial Sequence
  Description of Artificial Sequence: Synthetic oligonucleotide
  Sense strand starting at position 1160 of SEQ ID NO: 588253
gaguuaauacccugcaaug

SEQ ID NO: 852365 - RNA, 19 nt, Artificial Sequence
  Description of Artificial Sequence: Synthetic oligonucleotide
  Antisense strand to SEQ ID NO: 852364
cauugcaggguauuaacuc

SEQ ID NO: 852366 - RNA, 19 nt, Artificial Sequence
  Description of Artificial Sequence: Synthetic oligonucleotide
  Sense strand starting at position 1223 of SEQ ID NO: 588253
aucgucaugacaggaucaa

SEQ ID NO: 852367 - RNA, 19 nt, Artificial Sequence
  Description of Artificial Sequence: Synthetic oligonucleotide
  Antisense strand to SEQ ID NO: 852366
uugauccugucaugacgau

SEQ ID NO: 852368 - RNA, 19 nt, Artificial Sequence
  Description of Artificial Sequence: Synthetic oligonucleotide
  Sense strand starting at position 1224 of SEQ ID NO: 588253
ucgucaugacaggaucaau

SEQ ID NO: 852369 - RNA, 19 nt, Artificial Sequence
  Description of Artificial Sequence: Synthetic oligonucleotide
  Antisense strand to SEQ ID NO: 852368
auugauccugucaugacga

SEQ ID NO: 852370 - RNA, 19 nt, Artificial Sequence
  Description of Artificial Sequence: Synthetic oligonucleotide
  Sense strand starting at position 2028 of SEQ ID NO: 588253
ugggaacugaauuguggua

SEQ ID NO: 852371 - RNA, 19 nt, Artificial Sequence
  Description of Artificial Sequence: Synthetic oligonucleotide
  Antisense strand to SEQ ID NO: 852370
uaccacaauucaguuccca

SEQ ID NO: 852372 - RNA, 19 nt, Artificial Sequence
  Description of Artificial Sequence: Synthetic oligonucleotide
  Sense strand starting at position 2296 of SEQ ID NO: 588253
cgaaguucugcccagaaua

SEQ ID NO: 852373 - RNA, 19 nt, Artificial Sequence
  Description of Artificial Sequence: Synthetic oligonucleotide
  Antisense strand to SEQ ID NO: 852372
uauucugggcagaacuucg

SEQ ID NO: 852374 - RNA, 19 nt, Artificial Sequence
  Description of Artificial Sequence: Synthetic oligonucleotide
  Sense strand starting at position 2337 of SEQ ID NO: 588253
uugggagucucuucuggaa

SEQ ID NO: 852375 - RNA, 19 nt, Artificial Sequence
  Description of Artificial Sequence: Synthetic oligonucleotide
  Antisense strand to SEQ ID NO: 852374
uuccagaagagacucccaa

SEQ ID NO: 852376 - RNA, 19 nt, Artificial Sequence
  Description of Artificial Sequence: Synthetic oligonucleotide
  Sense strand starting at position 2523 of SEQ ID NO: 588253
aagguagaccugcauuaua

SEQ ID NO: 852377 - RNA, 19 nt, Artificial Sequence
  Description of Artificial Sequence: Synthetic oligonucleotide
  Antisense strand to SEQ ID NO: 852376
uauaaugcaggucuaccuu

SEQ ID NO: 852378 - RNA, 19 nt, Artificial Sequence
  Description of Artificial Sequence: Synthetic oligonucleotide
  Sense strand starting at position 2526 of SEQ ID NO: 588253
guagaccugcauuauaauc

SEQ ID NO: 852379 - RNA, 19 nt, Artificial Sequence
  Description of Artificial Sequence: Synthetic oligonucleotide
  Antisense strand to SEQ ID NO: 852378
gauuauaaugcaggucuac

SEQ ID NO: 852380 - RNA, 19 nt, Artificial Sequence
  Description of Artificial Sequence: Synthetic oligonucleotide
  Sense strand starting at position 2797 of SEQ ID NO: 588253
uugggucuucuaggaggaa

SEQ ID NO: 852381 - RNA, 19 nt, Artificial Sequence
  Description of Artificial Sequence: Synthetic oligonucleotide
  Antisense strand to SEQ ID NO: 852380
uuccuccuagaagacccaa

SEQ ID NO: 852382 - RNA, 19 nt, Artificial Sequence
  Description of Artificial Sequence: Synthetic oligonucleotide
  Sense strand starting at position 2889 of SEQ ID NO: 588253
cguuacauccuguuucugu

SEQ ID NO: 852383 - RNA, 19 nt, Artificial Sequence
  Description of Artificial Sequence: Synthetic oligonucleotide
  Antisense strand to SEQ ID NO: 852382
acagaaacaggauguaacg

SEQ ID NO: 852384 - RNA, 19 nt, Artificial Sequence
  Description of Artificial Sequence: Synthetic oligonucleotide
  Sense strand starting at position 2904 of SEQ ID NO: 588253
cugucagacuuuguuaaag

SEQ ID NO: 852385 - RNA, 19 nt, Artificial Sequence
  Description of Artificial Sequence: Synthetic oligonucleotide
  Antisense strand to SEQ ID NO: 852384
cuuuaacaaagucugacag

SEQ ID NO: 852386 - RNA, 19 nt, Artificial Sequence
  Description of Artificial Sequence: Synthetic oligonucleotide
  Sense strand starting at position 2932 of SEQ ID NO: 588253
gaauguaugagugagucaa

SEQ ID NO: 852387 - RNA, 19 nt, Artificial Sequence
  Description of Artificial Sequence: Synthetic oligonucleotide
  Antisense strand to SEQ ID NO: 852386
uugacucacucauacauuc

SEQ ID NO: 852388 - RNA, 19 nt, Artificial Sequence
  Description of Artificial Sequence: Synthetic oligonucleotide
  Sense strand starting at position 3082 of SEQ ID NO: 588253
ucaugaaagauguggaugu

SEQ ID NO: 852389 - RNA, 19 nt, Artificial Sequence
  Description of Artificial Sequence: Synthetic oligonucleotide
  Antisense strand to SEQ ID NO: 852388
acauccacaucuuucauga

SEQ ID NO: 852390 - RNA, 19 nt, Artificial Sequence
  Description of Artificial Sequence: Synthetic oligonucleotide
  Sense strand starting at position 3403 of SEQ ID NO: 588253
agaaguuucggauguggag

SEQ ID NO: 852391 - RNA, 19 nt, Artificial Sequence
  Description of Artificial Sequence: Synthetic oligonucleotide
  Antisense strand to SEQ ID NO: 852390
cuccacauccgaaacuucu

SEQ ID NO: 852392 - RNA, 19 nt, Artificial Sequence
  Description of Artificial Sequence: Synthetic oligonucleotide
  Sense strand starting at position 3468 of SEQ ID NO: 588253
ggcaguuauaggcagacau

SEQ ID NO: 852393 - RNA, 19 nt, Artificial Sequence
  Description of Artificial Sequence: Synthetic oligonucleotide
  Antisense strand to SEQ ID NO: 852392
augucugccuauaacugcc

SEQ ID NO: 852394 - RNA, 19 nt, Artificial Sequence
  Description of Artificial Sequence: Synthetic oligonucleotide
  Sense strand starting at position 3523 of SEQ ID NO: 588253
agauaaauguuagcucuga

SEQ ID NO: 852395 - RNA, 19 nt, Artificial Sequence
  Description of Artificial Sequence: Synthetic oligonucleotide
  Antisense strand to SEQ ID NO: 852394
ucagagcuaacauuuaucu

SEQ ID NO: 852396 - RNA, 19 nt, Artificial Sequence
  Description of Artificial Sequence: Synthetic oligonucleotide
  Sense strand starting at position 3524 of SEQ ID NO: 588253
gauaaauguuagcucugaa

SEQ ID NO: 852397 - RNA, 19 nt, Artificial Sequence
  Description of Artificial Sequence: Synthetic oligonucleotide
  Antisense strand to SEQ ID NO: 852396
uucagagcuaacauuuauc

SEQ ID NO: 852398 - RNA, 19 nt, Artificial Sequence
  Description of Artificial Sequence: Synthetic oligonucleotide
  Sense strand starting at position 3531 of SEQ ID NO: 588253
guuagcucugaacaccaaa

SEQ ID NO: 852399 - RNA, 19 nt, Artificial Sequence
  Description of Artificial Sequence: Synthetic oligonucleotide
  Antisense strand to SEQ ID NO: 852398
uuugguguucagagcuaac

SEQ ID NO: 852400 - RNA, 19 nt, Artificial Sequence
  Description of Artificial Sequence: Synthetic oligonucleotide
  Sense strand starting at position 3557 of SEQ ID NO: 588253
agugauguuguggagguau

SEQ ID NO: 852401 - RNA, 19 nt, Artificial Sequence
  Description of Artificial Sequence: Synthetic oligonucleotide
  Antisense strand to SEQ ID NO: 852400
auaccuccacaacaucacu

SEQ ID NO: 852402 - RNA, 19 nt, Artificial Sequence
  Description of Artificial Sequence: Synthetic oligonucleotide
  Sense strand starting at position 3568 of SEQ ID NO: 588253
ggagguauaaugugugaug

SEQ ID NO: 852403 - RNA, 19 nt, Artificial Sequence
  Description of Artificial Sequence: Synthetic oligonucleotide
  Antisense strand to SEQ ID NO: 852402
caucacacauuauaccucc

SEQ ID NO: 852404 - RNA, 19 nt, Artificial Sequence
  Description of Artificial Sequence: Synthetic oligonucleotide
  Sense strand starting at position 3585 of SEQ ID NO: 588253
uguggaacuugaccagaau

SEQ ID NO: 852405 - RNA, 19 nt, Artificial Sequence
  Description of Artificial Sequence: Synthetic oligonucleotide
  Antisense strand to SEQ ID NO: 852404
auucuggucaaguuccaca

SEQ ID NO: 852406 - RNA, 19 nt, Artificial Sequence
  Description of Artificial Sequence: Synthetic oligonucleotide
  Sense strand starting at position 3711 of SEQ ID NO: 588253
cguuaaguagacuaucacu

SEQ ID NO: 852407 - RNA, 19 nt, Artificial Sequence
  Description of Artificial Sequence: Synthetic oligonucleotide
  Antisense strand to SEQ ID NO: 852406
agugauagucuacuuaacg

SEQ ID NO: 852408 - RNA, 19 nt, Artificial Sequence
  Description of Artificial Sequence: Synthetic oligonucleotide
  Sense strand starting at position 3716 of SEQ ID NO: 588253
aguagacuaucacuagcau

SEQ ID NO: 852409 - RNA, 19 nt, Artificial Sequence
  Description of Artificial Sequence: Synthetic oligonucleotide
  Antisense strand to SEQ ID NO: 852408
augcuagugauagucuacu

SEQ ID NO: 852410 - RNA, 19 nt, Artificial Sequence
  Description of Artificial Sequence: Synthetic oligonucleotide
  Sense strand starting at position 3717 of SEQ ID NO: 588253
guagacuaucacuagcaua

SEQ ID NO: 852411 - RNA, 19 nt, Artificial Sequence
  Description of Artificial Sequence: Synthetic oligonucleotide
  Antisense strand to SEQ ID NO: 852410
uaugcuagugauagucuac

SEQ ID NO: 852412 - RNA, 19 nt, Artificial Sequence
  Description of Artificial Sequence: Synthetic oligonucleotide
  Sense strand starting at position 3906 of SEQ ID NO: 588253
uugcucucuggauaagaau

SEQ ID NO: 852413 - RNA, 19 nt, Artificial Sequence
  Description of Artificial Sequence: Synthetic oligonucleotide
  Antisense strand to SEQ ID NO: 852412
auucuuauccagagagcaa

SEQ ID NO: 852414 - RNA, 19 nt, Artificial Sequence
  Description of Artificial Sequence: Synthetic oligonucleotide
  Sense strand starting at position 3909 of SEQ ID NO: 588253
cucucuggauaagaauuua

SEQ ID NO: 852415 - RNA, 19 nt, Artificial Sequence
  Description of Artificial Sequence: Synthetic oligonucleotide
  Antisense strand to SEQ ID NO: 852414
uaaauucuuauccagagag

SEQ ID NO: 852416 - RNA, 19 nt, Artificial Sequence
  Description of Artificial Sequence: Synthetic oligonucleotide
  Sense strand starting at position 57 of SEQ ID NO: 588254
cuguaaccuguuuaagauc

SEQ ID NO: 852417 - RNA, 19 nt, Artificial Sequence
  Description of Artificial Sequence: Synthetic oligonucleotide
  Antisense strand to SEQ ID NO: 852416
gaucuuaaacagguuacag

SEQ ID NO: 852418 - RNA, 19 nt, Artificial Sequence
  Description of Artificial Sequence: Synthetic oligonucleotide
  Sense strand starting at position 66 of SEQ ID NO: 588254
guuuaagaucacuauuggu

SEQ ID NO: 852419 - RNA, 19 nt, Artificial Sequence
  Description of Artificial Sequence: Synthetic oligonucleotide
  Antisense strand to SEQ ID NO: 852418
accaauagugaucuuaaac

SEQ ID NO: 852420 - RNA, 19 nt, Artificial Sequence
  Description of Artificial Sequence: Synthetic oligonucleotide
  Sense strand starting at position 72 of SEQ ID NO: 588254
gaucacuauuggucgugau

SEQ ID NO: 852421 - RNA, 19 nt, Artificial Sequence
  Description of Artificial Sequence: Synthetic oligonucleotide
  Antisense strand to SEQ ID NO: 852420
aucacgaccaauagugauc

SEQ ID NO: 852422 - RNA, 19 nt, Artificial Sequence
  Description of Artificial Sequence: Synthetic oligonucleotide
  Sense strand starting at position 225 of SEQ ID NO: 588254
ugcccagcucuagaaucaa

SEQ ID NO: 852423 - RNA, 19 nt, Artificial Sequence
  Description of Artificial Sequence: Synthetic oligonucleotide
  Antisense strand to SEQ ID NO: 852422
uugauucuagagcugggca

SEQ ID NO: 852424 - RNA, 19 nt, Artificial Sequence
  Description of Artificial Sequence: Synthetic oligonucleotide
  Sense strand starting at position 308 of SEQ ID NO: 588254
gggccugucaguggaaaga

SEQ ID NO: 852425 - RNA, 19 nt, Artificial Sequence
  Description of Artificial Sequence: Synthetic oligonucleotide
  Antisense strand to SEQ ID NO: 852424
ucuuuccacugacaggccc

SEQ ID NO: 852426 - RNA, 19 nt, Artificial Sequence
  Description of Artificial Sequence: Synthetic oligonucleotide
  Sense strand starting at position 619 of SEQ ID NO: 588254
cgcagucauuuaucugaca

SEQ ID NO: 852427 - RNA, 19 nt, Artificial Sequence
  Description of Artificial Sequence: Synthetic oligonucleotide
  Antisense strand to SEQ ID NO: 852426
ugucagauaaaugacugcg

SEQ ID NO: 852428 - RNA, 19 nt, Artificial Sequence
  Description of Artificial Sequence: Synthetic oligonucleotide
  Sense strand starting at position 622 of SEQ ID NO: 588254
agucauuuaucugacacug

SEQ ID NO: 852429 - RNA, 19 nt, Artificial Sequence
  Description of Artificial Sequence: Synthetic oligonucleotide
  Antisense strand to SEQ ID NO: 852428
cagugucagauaaaugacu

SEQ ID NO: 852430 - RNA, 19 nt, Artificial Sequence
  Description of Artificial Sequence: Synthetic oligonucleotide
  Sense strand starting at position 624 of SEQ ID NO: 588254
ucauuuaucugacacugag

SEQ ID NO: 852431 - RNA, 19 nt, Artificial Sequence
  Description of Artificial Sequence: Synthetic oligonucleotide
  Antisense strand to SEQ ID NO: 852430
cucagugucagauaaauga

SEQ ID NO: 852432 - RNA, 19 nt, Artificial Sequence
  Description of Artificial Sequence: Synthetic oligonucleotide
  Sense strand starting at position 627 of SEQ ID NO: 588254
uuuaucugacacugagacu

SEQ ID NO: 852433 - RNA, 19 nt, Artificial Sequence
  Description of Artificial Sequence: Synthetic oligonucleotide
  Antisense strand to SEQ ID NO: 852432
agucucagugucagauaaa

SEQ ID NO: 852434 - RNA, 19 nt, Artificial Sequence
  Description of Artificial Sequence: Synthetic oligonucleotide
  Sense strand starting at position 689 of SEQ ID NO: 588254
cacagcguggcguuuaaau

SEQ ID NO: 852435 - RNA, 19 nt, Artificial Sequence
  Description of Artificial Sequence: Synthetic oligonucleotide
  Antisense strand to SEQ ID NO: 852434
auuuaaacgccacgcugug

SEQ ID NO: 852436 - RNA, 19 nt, Artificial Sequence
  Description of Artificial Sequence: Synthetic oligonucleotide
  Sense strand starting at position 753 of SEQ ID NO: 588254
ucucaagagcucuaacaug

SEQ ID NO: 852437 - RNA, 19 nt, Artificial Sequence
  Description of Artificial Sequence: Synthetic oligonucleotide
  Antisense strand to SEQ ID NO: 852436
cauguuagagcucuugaga

SEQ ID NO: 852438 - RNA, 19 nt, Artificial Sequence
  Description of Artificial Sequence: Synthetic oligonucleotide
  Sense strand starting at position 780 of SEQ ID NO: 588254
uggauauucgagcacuuug

SEQ ID NO: 852439 - RNA, 19 nt, Artificial Sequence
  Description of Artificial Sequence: Synthetic oligonucleotide
  Antisense strand to SEQ ID NO: 852438
caaagugcucgaauaucca

SEQ ID NO: 852440 - RNA, 19 nt, Artificial Sequence
  Description of Artificial Sequence: Synthetic oligonucleotide
  Sense strand starting at position 844 of SEQ ID NO: 588254
agaagcucccuuuggaaau

SEQ ID NO: 852441 - RNA, 19 nt, Artificial Sequence
  Description of Artificial Sequence: Synthetic oligonucleotide
  Antisense strand to SEQ ID NO: 852440
auuuccaaagggagcuucu

SEQ ID NO: 852442 - RNA, 19 nt, Artificial Sequence
  Description of Artificial Sequence: Synthetic oligonucleotide
  Sense strand starting at position 855 of SEQ ID NO: 588254
uuggaaauuuccugauugg

SEQ ID NO: 852443 - RNA, 19 nt, Artificial Sequence
  Description of Artificial Sequence: Synthetic oligonucleotide
  Antisense strand to SEQ ID NO: 852442
ccaaucaggaaauuuccaa

SEQ ID NO: 852444 - RNA, 19 nt, Artificial Sequence
  Description of Artificial Sequence: Synthetic oligonucleotide
  Sense strand starting at position 910 of SEQ ID NO: 588254
guccgacugaaauguuaac

SEQ ID NO: 852445 - RNA, 19 nt, Artificial Sequence
  Description of Artificial Sequence: Synthetic oligonucleotide
  Antisense strand to SEQ ID NO: 852444
guuaacauuucagucggac

SEQ ID NO: 852446 - RNA, 19 nt, Artificial Sequence
  Description of Artificial Sequence: Synthetic oligonucleotide
  Sense strand starting at position 1015 of SEQ ID NO: 588254
aagucuaauuguguggauu

SEQ ID NO: 852447 - RNA, 19 nt, Artificial Sequence
  Description of Artificial Sequence: Synthetic oligonucleotide
  Antisense strand to SEQ ID NO: 852446
aauccacacaauuagacuu

SEQ ID NO: 852448 - RNA, 19 nt, Artificial Sequence
  Description of Artificial Sequence: Synthetic oligonucleotide
  Sense strand starting at position 1016 of SEQ ID NO: 588254
agucuaauuguguggauuu

SEQ ID NO: 852449 - RNA, 19 nt, Artificial Sequence
  Description of Artificial Sequence: Synthetic oligonucleotide
  Antisense strand to SEQ ID NO: 852448
aaauccacacaauuagacu

SEQ ID NO: 852450 - RNA, 19 nt, Artificial Sequence
  Description of Artificial Sequence: Synthetic oligonucleotide
  Sense strand starting at position 1047 of SEQ ID NO: 588254
ucuagacucuauuuguguu

SEQ ID NO: 852451 - RNA, 19 nt, Artificial Sequence
  Description of Artificial Sequence: Synthetic oligonucleotide
  Antisense strand to SEQ ID NO: 852450
aacacaaauagagucuaga

SEQ ID NO: 852452 - RNA, 19 nt, Artificial Sequence
  Description of Artificial Sequence: Synthetic oligonucleotide
  Sense strand starting at position 1071 of SEQ ID NO: 588254
aguaaauacguccauguag

SEQ ID NO: 852453 - RNA, 19 nt, Artificial Sequence
  Description of Artificial Sequence: Synthetic oligonucleotide
  Antisense strand to SEQ ID NO: 852452
cuacauggacguauuuacu

SEQ ID NO: 852454 - RNA, 19 nt, Artificial Sequence
  Description of Artificial Sequence: Synthetic oligonucleotide
  Sense strand starting at position 1079 of SEQ ID NO: 588254
cguccauguagugauacaa

SEQ ID NO: 852455 - RNA, 19 nt, Artificial Sequence
  Description of Artificial Sequence: Synthetic oligonucleotide
  Antisense strand to SEQ ID NO: 852454
uuguaucacuacauggacg

SEQ ID NO: 852456 - RNA, 19 nt, Artificial Sequence
  Description of Artificial Sequence: Synthetic oligonucleotide
  Sense strand starting at position 1315 of SEQ ID NO: 588254
acggaagucagagaucagu

SEQ ID NO: 852457 - RNA, 19 nt, Artificial Sequence
  Description of Artificial Sequence: Synthetic oligonucleotide
  Antisense strand to SEQ ID NO: 852456
acugaucucugacuuccgu

SEQ ID NO: 852458 - RNA, 19 nt, Artificial Sequence
  Description of Artificial Sequence: Synthetic oligonucleotide
  Sense strand starting at position 1348 of SEQ ID NO: 588254
gaacauggguguccaggaa

SEQ ID NO: 852459 - RNA, 19 nt, Artificial Sequence
  Description of Artificial Sequence: Synthetic oligonucleotide
  Antisense strand to SEQ ID NO: 852458
uuccuggacacccauguuc

SEQ ID NO: 852460 - RNA, 19 nt, Artificial Sequence
  Description of Artificial Sequence: Synthetic oligonucleotide
  Sense strand starting at position 1480 of SEQ ID NO: 588254
cuaaauguugcuuaguaaa

SEQ ID NO: 852461 - RNA, 19 nt, Artificial Sequence
  Description of Artificial Sequence: Synthetic oligonucleotide
  Antisense strand to SEQ ID NO: 852460
uuuacuaagcaacauuuag

SEQ ID NO: 852462 - RNA, 19 nt, Artificial Sequence
  Description of Artificial Sequence: Synthetic oligonucleotide
  Sense strand starting at position 1631 of SEQ ID NO: 588254
gcaugacuugcgcugucuu

SEQ ID NO: 852463 - RNA, 19 nt, Artificial Sequence
  Description of Artificial Sequence: Synthetic oligonucleotide
  Antisense strand to SEQ ID NO: 852462
aagacagcgcaagucaugc

SEQ ID NO: 852464 - RNA, 19 nt, Artificial Sequence
  Description of Artificial Sequence: Synthetic oligonucleotide
  Sense strand starting at position 1638 of SEQ ID NO: 588254
uugcgcugucuuucuggua

SEQ ID NO: 852465 - RNA, 19 nt, Artificial Sequence
  Description of Artificial Sequence: Synthetic oligonucleotide
  Antisense strand to SEQ ID NO: 852464
uaccagaaagacagcgcaa

SEQ ID NO: 852466 - RNA, 19 nt, Artificial Sequence
  Description of Artificial Sequence: Synthetic oligonucleotide
  Sense strand starting at position 2164 of SEQ ID NO: 588254
acccucacuuagguauaua

SEQ ID NO: 852467 - RNA, 19 nt, Artificial Sequence
  Description of Artificial Sequence: Synthetic oligonucleotide
  Antisense strand to SEQ ID NO: 852466
uauauaccuaagugagggu

SEQ ID NO: 852468 - RNA, 19 nt, Artificial Sequence
  Description of Artificial Sequence: Synthetic oligonucleotide
  Sense strand starting at position 2260 of SEQ ID NO: 588254
uggcccuuugcagaagaca

SEQ ID NO: 852469 - RNA, 19 nt, Artificial Sequence
  Description of Artificial Sequence: Synthetic oligonucleotide
  Antisense strand to SEQ ID NO: 852468
ugucuucugcaaagggcca

SEQ ID NO: 852470 - RNA, 19 nt, Artificial Sequence
  Description of Artificial Sequence: Synthetic oligonucleotide
  Sense strand starting at position 2426 of SEQ ID NO: 588254
augucucguaaauggagaa

SEQ ID NO: 852471 - RNA, 19 nt, Artificial Sequence
  Description of Artificial Sequence: Synthetic oligonucleotide
  Antisense strand to SEQ ID NO: 852470
uucuccauuuacgagacau

SEQ ID NO: 852472 - RNA, 19 nt, Artificial Sequence
  Description of Artificial Sequence: Synthetic oligonucleotide
  Sense strand starting at position 2427 of SEQ ID NO: 588254
ugucucguaaauggagaaa

SEQ ID NO: 852473 - RNA, 19 nt, Artificial Sequence
  Description of Artificial Sequence: Synthetic oligonucleotide
  Antisense strand to SEQ ID NO: 852472
uuucuccauuuacgagaca

SEQ ID NO: 852474 - RNA, 19 nt, Artificial Sequence
  Description of Artificial Sequence: Synthetic oligonucleotide
  Sense strand starting at position 2809 of SEQ ID NO: 588254
gggauacucugucucaaac

SEQ ID NO: 852475 - RNA, 19 nt, Artificial Sequence
  Description of Artificial Sequence: Synthetic oligonucleotide
  Antisense strand to SEQ ID NO: 852474
guuugagacagaguauccc

SEQ ID NO: 852476 - RNA, 19 nt, Artificial Sequence
  Description of Artificial Sequence: Synthetic oligonucleotide
  Sense strand starting at position 3033 of SEQ ID NO: 588254
gggccauuucugugcuucu

SEQ ID NO: 852477 - RNA, 19 nt, Artificial Sequence
  Description of Artificial Sequence: Synthetic oligonucleotide
  Antisense strand to SEQ ID NO: 852476
agaagcacagaaauggccc

SEQ ID NO: 852478 - RNA, 19 nt, Artificial Sequence
  Description of Artificial Sequence: Synthetic oligonucleotide
  Sense strand starting at position 3036 of SEQ ID NO: 588254
ccauuucugugcuucugaa

SEQ ID NO: 852479 - RNA, 19 nt, Artificial Sequence
  Description of Artificial Sequence: Synthetic oligonucleotide
  Antisense strand to SEQ ID NO: 852478
uucagaagcacagaaaugg

SEQ ID NO: 852480 - RNA, 19 nt, Artificial Sequence
  Description of Artificial Sequence: Synthetic oligonucleotide
  Sense strand starting at position 3043 of SEQ ID NO: 588254
ugugcuucugaauaguaaa

SEQ ID NO: 852481 - RNA, 19 nt, Artificial Sequence
  Description of Artificial Sequence: Synthetic oligonucleotide
  Antisense strand to SEQ ID NO: 852480
uuuacuauucagaagcaca

SEQ ID NO: 852482 - RNA, 19 nt, Artificial Sequence
  Description of Artificial Sequence: Synthetic oligonucleotide
  Sense strand starting at position 3152 of SEQ ID NO: 588254
ucuuacucuggguguggaa

SEQ ID NO: 852483 - RNA, 19 nt, Artificial Sequence
  Description of Artificial Sequence: Synthetic oligonucleotide
  Antisense strand to SEQ ID NO: 852482
uuccacacccagaguaaga

SEQ ID NO: 852484 - RNA, 19 nt, Artificial Sequence
  Description of Artificial Sequence: Synthetic oligonucleotide
  Sense strand starting at position 3154 of SEQ ID NO: 588254
uuacucuggguguggaauu

SEQ ID NO: 852485 - RNA, 19 nt, Artificial Sequence
  Description of Artificial Sequence: Synthetic oligonucleotide
  Antisense strand to SEQ ID NO: 852484
aauuccacacccagaguaa

SEQ ID NO: 852486 - RNA, 19 nt, Artificial Sequence
  Description of Artificial Sequence: Synthetic oligonucleotide
  Sense strand starting at position 3558 of SEQ ID NO: 588254
aucuguaaucuuuguaauc

SEQ ID NO: 852487 - RNA, 19 nt, Artificial Sequence
  Description of Artificial Sequence: Synthetic oligonucleotide
  Antisense strand to SEQ ID NO: 852486
gauuacaaagauuacagau

SEQ ID NO: 852488 - RNA, 19 nt, Artificial Sequence
  Description of Artificial Sequence: Synthetic oligonucleotide
  Sense strand starting at position 3591 of SEQ ID NO: 588254
aaauuucugucucaggaga

SEQ ID NO: 852489 - RNA, 19 nt, Artificial Sequence
  Description of Artificial Sequence: Synthetic oligonucleotide
  Antisense strand to SEQ ID NO: 852488
ucuccugagacagaaauuu

SEQ ID NO: 852490 - RNA, 19 nt, Artificial Sequence
  Description of Artificial Sequence: Synthetic oligonucleotide
  Sense strand starting at position 3800 of SEQ ID NO: 588254
ccugacacauccucuagua

SEQ ID NO: 852491 - RNA, 19 nt, Artificial Sequence
  Description of Artificial Sequence: Synthetic oligonucleotide
  Antisense strand to SEQ ID NO: 852490
uacuagaggaugugucagg

SEQ ID NO: 852492 - RNA, 19 nt, Artificial Sequence
  Description of Artificial Sequence: Synthetic oligonucleotide
  Sense strand starting at position 3875 of SEQ ID NO: 588254
cuuugcuagggugauuaua

SEQ ID NO: 852493 - RNA, 19 nt, Artificial Sequence
  Description of Artificial Sequence: Synthetic oligonucleotide
  Antisense strand to SEQ ID NO: 852492
uauaaucacccuagcaaag

SEQ ID NO: 852494 - RNA, 19 nt, Artificial Sequence
  Description of Artificial Sequence: Synthetic oligonucleotide
  Sense strand starting at position 3877 of SEQ ID NO: 588254
uugcuagggugauuauaga

SEQ ID NO: 852495 - RNA, 19 nt, Artificial Sequence
  Description of Artificial Sequence: Synthetic oligonucleotide
  Antisense strand to SEQ ID NO: 852494
ucuauaaucacccuagcaa

SEQ ID NO: 852496 - RNA, 19 nt, Artificial Sequence
  Description of Artificial Sequence: Synthetic oligonucleotide
  Sense strand starting at position 504 of SEQ ID NO: 588255
auuccaguccuguaacuca

SEQ ID NO: 852497 - RNA, 19 nt, Artificial Sequence
  Description of Artificial Sequence: Synthetic oligonucleotide
  Antisense strand to SEQ ID NO: 852496
ugaguuacaggacuggaau

SEQ ID NO: 852498 - RNA, 19 nt, Artificial Sequence
  Description of Artificial Sequence: Synthetic oligonucleotide
  Sense strand starting at position 602 of SEQ ID NO: 588255
ugccuccauuauguagaaa

SEQ ID NO: 852499 - RNA, 19 nt, Artificial Sequence
  Description of Artificial Sequence: Synthetic oligonucleotide
  Antisense strand to SEQ ID NO: 852498
uuucuacauaauggaggca

SEQ ID NO: 852500 - RNA, 19 nt, Artificial Sequence
  Description of Artificial Sequence: Synthetic oligonucleotide
  Sense strand starting at position 621 of SEQ ID NO: 588255
augcuaagugcucaaagga

SEQ ID NO: 852501 - RNA, 19 nt, Artificial Sequence
  Description of Artificial Sequence: Synthetic oligonucleotide
  Antisense strand to SEQ ID NO: 852500
uccuuugagcacuuagcau

SEQ ID NO: 852502 - RNA, 19 nt, Artificial Sequence
  Description of Artificial Sequence: Synthetic oligonucleotide
  Sense strand starting at position 697 of SEQ ID NO: 588255
gagucuggaucccuaauua

SEQ ID NO: 852503 - RNA, 19 nt, Artificial Sequence
  Description of Artificial Sequence: Synthetic oligonucleotide
  Antisense strand to SEQ ID NO: 852502
uaauuagggauccagacuc

SEQ ID NO: 852504 - RNA, 19 nt, Artificial Sequence
  Description of Artificial Sequence: Synthetic oligonucleotide
  Sense strand starting at position 1189 of SEQ ID NO: 588255
ucugucaaauguuuaauga

SEQ ID NO: 852505 - RNA, 19 nt, Artificial Sequence
  Description of Artificial Sequence: Synthetic oligonucleotide
  Antisense strand to SEQ ID NO: 852504
ucauuaaacauuugacaga

SEQ ID NO: 852506 - RNA, 19 nt, Artificial Sequence
  Description of Artificial Sequence: Synthetic oligonucleotide
  Sense strand starting at position 1190 of SEQ ID NO: 588255
cugucaaauguuuaaugau

SEQ ID NO: 852507 - RNA, 19 nt, Artificial Sequence
  Description of Artificial Sequence: Synthetic oligonucleotide
  Antisense strand to SEQ ID NO: 852506
aucauuaaacauuugacag

SEQ ID NO: 852508 - RNA, 19 nt, Artificial Sequence
  Description of Artificial Sequence: Synthetic oligonucleotide
  Sense strand starting at position 1199 of SEQ ID NO: 588255
guuuaaugaugucccaaac

SEQ ID NO: 852509 - RNA, 19 nt, Artificial Sequence
  Description of Artificial Sequence: Synthetic oligonucleotide
  Antisense strand to SEQ ID NO: 852508
guuugggacaucauuaaac

SEQ ID NO: 852510 - RNA, 19 nt, Artificial Sequence
  Description of Artificial Sequence: Synthetic oligonucleotide
  Sense strand starting at position 1222 of SEQ ID NO: 588255
cuaagagcucugcaggcau

SEQ ID NO: 852511 - RNA, 19 nt, Artificial Sequence
  Description of Artificial Sequence: Synthetic oligonucleotide
  Antisense strand to SEQ ID NO: 852510
augccugcagagcucuuag

SEQ ID NO: 852512 - RNA, 19 nt, Artificial Sequence
  Description of Artificial Sequence: Synthetic oligonucleotide
  Sense strand starting at position 2103 of SEQ ID NO: 588255
ugagauaguggucgggaga

SEQ ID NO: 852513 - RNA, 19 nt, Artificial Sequence
  Description of Artificial Sequence: Synthetic oligonucleotide
  Antisense strand to SEQ ID NO: 852512
ucucccgaccacuaucuca

SEQ ID NO: 852514 - RNA, 19 nt, Artificial Sequence
  Description of Artificial Sequence: Synthetic oligonucleotide
  Sense strand starting at position 2106 of SEQ ID NO: 588255
gauaguggucgggagaguu

SEQ ID NO: 852515 - RNA, 19 nt, Artificial Sequence
  Description of Artificial Sequence: Synthetic oligonucleotide
  Antisense strand to SEQ ID NO: 852514
aacucucccgaccacuauc

SEQ ID NO: 852516 - RNA, 19 nt, Artificial Sequence
  Description of Artificial Sequence: Synthetic oligonucleotide
  Sense strand starting at position 2128 of SEQ ID NO: 588255
ggguuugcgaaagaguuua

SEQ ID NO: 852517 - RNA, 19 nt, Artificial Sequence
  Description of Artificial Sequence: Synthetic oligonucleotide
  Antisense strand to SEQ ID NO: 852516
uaaacucuuucgcaaaccc

SEQ ID NO: 852518 - RNA, 19 nt, Artificial Sequence
  Description of Artificial Sequence: Synthetic oligonucleotide
  Sense strand starting at position 2133 of SEQ ID NO: 588255
ugcgaaagaguuuacugau

SEQ ID NO: 852519 - RNA, 19 nt, Artificial Sequence
  Description of Artificial Sequence: Synthetic oligonucleotide
  Antisense strand to SEQ ID NO: 852518
aucaguaaacucuuucgca

SEQ ID NO: 852520 - RNA, 19 nt, Artificial Sequence
  Description of Artificial Sequence: Synthetic oligonucleotide
  Sense strand starting at position 2490 of SEQ ID NO: 588255
gugaaauguggauguaaca

SEQ ID NO: 852521 - RNA, 19 nt, Artificial Sequence
  Description of Artificial Sequence: Synthetic oligonucleotide
  Antisense strand to SEQ ID NO: 852520
uguuacauccacauuucac

SEQ ID NO: 852522 - RNA, 19 nt, Artificial Sequence
  Description of Artificial Sequence: Synthetic oligonucleotide
  Sense strand starting at position 2595 of SEQ ID NO: 588255
gugggaacggcugauugaa

SEQ ID NO: 852523 - RNA, 19 nt, Artificial Sequence
  Description of Artificial Sequence: Synthetic oligonucleotide
  Antisense strand to SEQ ID NO: 852522
uucaaucagccguucccac

SEQ ID NO: 852524 - RNA, 19 nt, Artificial Sequence
  Description of Artificial Sequence: Synthetic oligonucleotide
  Sense strand starting at position 2604 of SEQ ID NO: 588255
gcugauugaacgugaacug

SEQ ID NO: 852525 - RNA, 19 nt, Artificial Sequence
  Description of Artificial Sequence: Synthetic oligonucleotide
  Antisense strand to SEQ ID NO: 852524
caguucacguucaaucagc

SEQ ID NO: 852526 - RNA, 19 nt, Artificial Sequence
  Description of Artificial Sequence: Synthetic oligonucleotide
  Sense strand starting at position 2615 of SEQ ID NO: 588255
gugaacugcggucauuaaa

SEQ ID NO: 852527 - RNA, 19 nt, Artificial Sequence
  Description of Artificial Sequence: Synthetic oligonucleotide
  Antisense strand to SEQ ID NO: 852526
uuuaaugaccgcaguucac

SEQ ID NO: 852528 - RNA, 19 nt, Artificial Sequence
  Description of Artificial Sequence: Synthetic oligonucleotide
  Sense strand starting at position 2644 of SEQ ID NO: 588255
cuguguuaauaucuacaaa

SEQ ID NO: 852529 - RNA, 19 nt, Artificial Sequence
  Description of Artificial Sequence: Synthetic oligonucleotide
  Antisense strand to SEQ ID NO: 852528
uuuguagauauuaacacag

SEQ ID NO: 852530 - RNA, 19 nt, Artificial Sequence
  Description of Artificial Sequence: Synthetic oligonucleotide
  Sense strand starting at position 2666 of SEQ ID NO: 588255
gccuuaauuucuguaguuu

SEQ ID NO: 852531 - RNA, 19 nt, Artificial Sequence
  Description of Artificial Sequence: Synthetic oligonucleotide
  Antisense strand to SEQ ID NO: 852530
aaacuacagaaauuaaggc

SEQ ID NO: 852532 - RNA, 19 nt, Artificial Sequence
  Description of Artificial Sequence: Synthetic oligonucleotide
  Sense strand starting at position 2819 of SEQ ID NO: 588255
gaaauaauguccucgggau

SEQ ID NO: 852533 - RNA, 19 nt, Artificial Sequence
  Description of Artificial Sequence: Synthetic oligonucleotide
  Antisense strand to SEQ ID NO: 852532
aucccgaggacauuauuuc

SEQ ID NO: 852534 - RNA, 19 nt, Artificial Sequence
  Description of Artificial Sequence: Synthetic oligonucleotide
  Sense strand starting at position 2820 of SEQ ID NO: 588255
aaauaauguccucgggauu

SEQ ID NO: 852535 - RNA, 19 nt, Artificial Sequence
  Description of Artificial Sequence: Synthetic oligonucleotide
  Antisense strand to SEQ ID NO: 852534
aaucccgaggacauuauuu

SEQ ID NO: 852536 - RNA, 19 nt, Artificial Sequence
  Description of Artificial Sequence: Synthetic oligonucleotide
  Sense strand starting at position 2821 of SEQ ID NO: 588255
aauaauguccucgggauua

SEQ ID NO: 852537 - RNA, 19 nt, Artificial Sequence
  Description of Artificial Sequence: Synthetic oligonucleotide
  Antisense strand to SEQ ID NO: 852536
uaaucccgaggacauuauu

SEQ ID NO: 852538 - RNA, 19 nt, Artificial Sequence
  Description of Artificial Sequence: Synthetic oligonucleotide
  Sense strand starting at position 2823 of SEQ ID NO: 588255
uaauguccucgggauuauu

SEQ ID NO: 852539 - RNA, 19 nt, Artificial Sequence
  Description of Artificial Sequence: Synthetic oligonucleotide
  Antisense strand to SEQ ID NO: 852538
aauaaucccgaggacauua

SEQ ID NO: 852540 - RNA, 19 nt, Artificial Sequence
  Description of Artificial Sequence: Synthetic oligonucleotide
  Sense strand starting at position 2845 of SEQ ID NO: 588255
agcaauguuuaaguaugaa

SEQ ID NO: 852541 - RNA, 19 nt, Artificial Sequence
  Description of Artificial Sequence: Synthetic oligonucleotide
  Antisense strand to SEQ ID NO: 852540
uucauacuuaaacauugcu

SEQ ID NO: 852542 - RNA, 19 nt, Artificial Sequence
  Description of Artificial Sequence: Synthetic oligonucleotide
  Sense strand starting at position 2939 of SEQ ID NO: 588255
ggaaguuaaguggaagcua

SEQ ID NO: 852543 - RNA, 19 nt, Artificial Sequence
  Description of Artificial Sequence: Synthetic oligonucleotide
  Antisense strand to SEQ ID NO: 852542
uagcuuccacuuaacuucc

SEQ ID NO: 852544 - RNA, 19 nt, Artificial Sequence
  Description of Artificial Sequence: Synthetic oligonucleotide
  Sense strand starting at position 2998 of SEQ ID NO: 588255
augcaauugcuagagcaau

SEQ ID NO: 852545 - RNA, 19 nt, Artificial Sequence
  Description of Artificial Sequence: Synthetic oligonucleotide
  Antisense strand to SEQ ID NO: 852544
auugcucuagcaauugcau

SEQ ID NO: 852546 - RNA, 19 nt, Artificial Sequence
  Description of Artificial Sequence: Synthetic oligonucleotide
  Sense strand starting at position 3015 of SEQ ID NO: 588255
augauaguccuccgguaga

SEQ ID NO: 852547 - RNA, 19 nt, Artificial Sequence
  Description of Artificial Sequence: Synthetic oligonucleotide
  Antisense strand to SEQ ID NO: 852546
ucuaccggaggacuaucau

SEQ ID NO: 852548 - RNA, 19 nt, Artificial Sequence
  Description of Artificial Sequence: Synthetic oligonucleotide
  Sense strand starting at position 3026 of SEQ ID NO: 588255
ccgguagagccuuagacau

SEQ ID NO: 852549 - RNA, 19 nt, Artificial Sequence
  Description of Artificial Sequence: Synthetic oligonucleotide
  Antisense strand to SEQ ID NO: 852548
augucuaaggcucuaccgg

SEQ ID NO: 852550 - RNA, 19 nt, Artificial Sequence
  Description of Artificial Sequence: Synthetic oligonucleotide
  Sense strand starting at position 3039 of SEQ ID NO: 588255
agacauuguguuuauugca

SEQ ID NO: 852551 - RNA, 19 nt, Artificial Sequence
  Description of Artificial Sequence: Synthetic oligonucleotide
  Antisense strand to SEQ ID NO: 852550
ugcaauaaacacaaugucu

SEQ ID NO: 852552 - RNA, 19 nt, Artificial Sequence
  Description of Artificial Sequence: Synthetic oligonucleotide
  Sense strand starting at position 3046 of SEQ ID NO: 588255
guguuuauugcauuccugu

SEQ ID NO: 852553 - RNA, 19 nt, Artificial Sequence
  Description of Artificial Sequence: Synthetic oligonucleotide
  Antisense strand to SEQ ID NO: 852552
acaggaaugcaauaaacac

SEQ ID NO: 852554 - RNA, 19 nt, Artificial Sequence
  Description of Artificial Sequence: Synthetic oligonucleotide
  Sense strand starting at position 3134 of SEQ ID NO: 588255
gagauauggucaccaauua

SEQ ID NO: 852555 - RNA, 19 nt, Artificial Sequence
  Description of Artificial Sequence: Synthetic oligonucleotide
  Antisense strand to SEQ ID NO: 852554
uaauuggugaccauaucuc

SEQ ID NO: 852556 - RNA, 19 nt, Artificial Sequence
  Description of Artificial Sequence: Synthetic oligonucleotide
  Sense strand starting at position 3279 of SEQ ID NO: 588255
acucucugacucugagaua

SEQ ID NO: 852557 - RNA, 19 nt, Artificial Sequence
  Description of Artificial Sequence: Synthetic oligonucleotide
  Antisense strand to SEQ ID NO: 852556
uaucucagagucagagagu

SEQ ID NO: 852558 - RNA, 19 nt, Artificial Sequence
  Description of Artificial Sequence: Synthetic oligonucleotide
  Sense strand starting at position 3291 of SEQ ID NO: 588255
ugagauaacugcucuucug

SEQ ID NO: 852559 - RNA, 19 nt, Artificial Sequence
  Description of Artificial Sequence: Synthetic oligonucleotide
  Antisense strand to SEQ ID NO: 852558
cagaagagcaguuaucuca

SEQ ID NO: 852560 - RNA, 19 nt, Artificial Sequence
  Description of Artificial Sequence: Synthetic oligonucleotide
  Sense strand starting at position 3360 of SEQ ID NO: 588255
guaaguaagcaguauauaa

SEQ ID NO: 852561 - RNA, 19 nt, Artificial Sequence
  Description of Artificial Sequence: Synthetic oligonucleotide
  Antisense strand to SEQ ID NO: 852560
uuauauacugcuuacuuac

SEQ ID NO: 852562 - RNA, 19 nt, Artificial Sequence
  Description of Artificial Sequence: Synthetic oligonucleotide
  Sense strand starting at position 3402 of SEQ ID NO: 588255
uuuacuuaucguuaccuuu

SEQ ID NO: 852563 - RNA, 19 nt, Artificial Sequence
  Description of Artificial Sequence: Synthetic oligonucleotide
  Antisense strand to SEQ ID NO: 852562
aaagguaacgauaaguaaa

SEQ ID NO: 852564 - RNA, 19 nt, Artificial Sequence
  Description of Artificial Sequence: Synthetic oligonucleotide
  Sense strand starting at position 3433 of SEQ ID NO: 588255
cguguugacauauagagau

SEQ ID NO: 852565 - RNA, 19 nt, Artificial Sequence
  Description of Artificial Sequence: Synthetic oligonucleotide
  Antisense strand to SEQ ID NO: 852564
aucucuauaugucaacacg

SEQ ID NO: 852566 - RNA, 19 nt, Artificial Sequence
  Description of Artificial Sequence: Synthetic oligonucleotide
  Sense strand starting at position 3477 of SEQ ID NO: 588255
augggaguuccauguagaa

SEQ ID NO: 852567 - RNA, 19 nt, Artificial Sequence
  Description of Artificial Sequence: Synthetic oligonucleotide
  Antisense strand to SEQ ID NO: 852566
uucuacauggaacucccau

SEQ ID NO: 852568 - RNA, 19 nt, Artificial Sequence
  Description of Artificial Sequence: Synthetic oligonucleotide
  Sense strand starting at position 3551 of SEQ ID NO: 588255
uuacgauuucuuuguugcu

SEQ ID NO: 852569 - RNA, 19 nt, Artificial Sequence
  Description of Artificial Sequence: Synthetic oligonucleotide
  Antisense strand to SEQ ID NO: 852568
agcaacaaagaaaucguaa

SEQ ID NO: 852570 - RNA, 19 nt, Artificial Sequence
  Description of Artificial Sequence: Synthetic oligonucleotide
  Sense strand starting at position 3684 of SEQ ID NO: 588255
cgaauuucuucuucucagu

SEQ ID NO: 852571 - RNA, 19 nt, Artificial Sequence
  Description of Artificial Sequence: Synthetic oligonucleotide
  Antisense strand to SEQ ID NO: 852570
acugagaagaagaaauucg

SEQ ID NO: 852572 - RNA, 19 nt, Artificial Sequence
  Description of Artificial Sequence: Synthetic oligonucleotide
  Sense strand starting at position 3743 of SEQ ID NO: 588255
gcuguucgucagguuucua

SEQ ID NO: 852573 - RNA, 19 nt, Artificial Sequence
  Description of Artificial Sequence: Synthetic oligonucleotide
  Antisense strand to SEQ ID NO: 852572
uagaaaccugacgaacagc

SEQ ID NO: 852574 - RNA, 19 nt, Artificial Sequence
  Description of Artificial Sequence: Synthetic oligonucleotide
  Sense strand starting at position 3841 of SEQ ID NO: 588255
cuaggcagauuacuucuaa

SEQ ID NO: 852575 - RNA, 19 nt, Artificial Sequence
  Description of Artificial Sequence: Synthetic oligonucleotide
  Antisense strand to SEQ ID NO: 852574
uuagaaguaaucugccuag

SEQ ID NO: 852576 - RNA, 19 nt, Artificial Sequence
  Description of Artificial Sequence: Synthetic oligonucleotide
  Sense strand starting at position 51 of SEQ ID NO: 588256
guaggcucccaauacauau

SEQ ID NO: 852577 - RNA, 19 nt, Artificial Sequence
  Description of Artificial Sequence: Synthetic oligonucleotide
  Antisense strand to SEQ ID NO: 852576
auauguauugggagccuac

SEQ ID NO: 852578 - RNA, 19 nt, Artificial Sequence
  Description of Artificial Sequence: Synthetic oligonucleotide
  Sense strand starting at position 96 of SEQ ID NO: 588256
agaacauucuagguuuaau

SEQ ID NO: 852579 - RNA, 19 nt, Artificial Sequence
  Description of Artificial Sequence: Synthetic oligonucleotide
  Antisense strand to SEQ ID NO: 852578
auuaaaccuagaauguucu

SEQ ID NO: 852580 - RNA, 19 nt, Artificial Sequence
  Description of Artificial Sequence: Synthetic oligonucleotide
  Sense strand starting at position 380 of SEQ ID NO: 588256
ccaacagaguagucauuau

SEQ ID NO: 852581 - RNA, 19 nt, Artificial Sequence
  Description of Artificial Sequence: Synthetic oligonucleotide
  Antisense strand to SEQ ID NO: 852580
auaaugacuacucuguugg

SEQ ID NO: 852582 - RNA, 19 nt, Artificial Sequence
  Description of Artificial Sequence: Synthetic oligonucleotide
  Sense strand starting at position 878 of SEQ ID NO: 588256
gugggauagcuuuagcaag

SEQ ID NO: 852583 - RNA, 19 nt, Artificial Sequence
  Description of Artificial Sequence: Synthetic oligonucleotide
  Antisense strand to SEQ ID NO: 852582
cuugcuaaagcuaucccac

SEQ ID NO: 852584 - RNA, 19 nt, Artificial Sequence
  Description of Artificial Sequence: Synthetic oligonucleotide
  Sense strand starting at position 927 of SEQ ID NO: 588256
aguaauuaaguauggacua

SEQ ID NO: 852585 - RNA, 19 nt, Artificial Sequence
  Description of Artificial Sequence: Synthetic oligonucleotide
  Antisense strand to SEQ ID NO: 852584
uaguccauacuuaauuacu

SEQ ID NO: 852586 - RNA, 19 nt, Artificial Sequence
  Description of Artificial Sequence: Synthetic oligonucleotide
  Sense strand starting at position 950 of SEQ ID NO: 588256
gauuaagaccaucguaaau

SEQ ID NO: 852587 - RNA, 19 nt, Artificial Sequence
  Description of Artificial Sequence: Synthetic oligonucleotide
  Antisense strand to SEQ ID NO: 852586
auuuacgauggucuuaauc

SEQ ID NO: 852588 - RNA, 19 nt, Artificial Sequence
  Description of Artificial Sequence: Synthetic oligonucleotide
  Sense strand starting at position 962 of SEQ ID NO: 588256
cguaaauggauaugagagu

SEQ ID NO: 852589 - RNA, 19 nt, Artificial Sequence
  Description of Artificial Sequence: Synthetic oligonucleotide
  Antisense strand to SEQ ID NO: 852588
acucucauauccauuuacg

SEQ ID NO: 852590 - RNA, 19 nt, Artificial Sequence
  Description of Artificial Sequence: Synthetic oligonucleotide
  Sense strand starting at position 975 of SEQ ID NO: 588256
gagaguauuugggaaggag

SEQ ID NO: 852591 - RNA, 19 nt, Artificial Sequence
  Description of Artificial Sequence: Synthetic oligonucleotide
  Antisense strand to SEQ ID NO: 852590
cuccuucccaaauacucuc

SEQ ID NO: 852592 - RNA, 19 nt, Artificial Sequence
  Description of Artificial Sequence: Synthetic oligonucleotide
  Sense strand starting at position 1043 of SEQ ID NO: 588256
auauuaauagagugcagaa

SEQ ID NO: 852593 - RNA, 19 nt, Artificial Sequence
  Description of Artificial Sequence: Synthetic oligonucleotide
  Antisense strand to SEQ ID NO: 852592
uucugcacucuauuaauau

SEQ ID NO: 852594 - RNA, 19 nt, Artificial Sequence
  Description of Artificial Sequence: Synthetic oligonucleotide
  Sense strand starting at position 1056 of SEQ ID NO: 588256
gcagaaagauagcuacaga

SEQ ID NO: 852595 - RNA, 19 nt, Artificial Sequence
  Description of Artificial Sequence: Synthetic oligonucleotide
  Antisense strand to SEQ ID NO: 852594
ucuguagcuaucuuucugc

SEQ ID NO: 852596 - RNA, 19 nt, Artificial Sequence
  Description of Artificial Sequence: Synthetic oligonucleotide
  Sense strand starting at position 1074 of SEQ ID NO: 588256
aggaguucuggugauuacu

SEQ ID NO: 852597 - RNA, 19 nt, Artificial Sequence
  Description of Artificial Sequence: Synthetic oligonucleotide
  Antisense strand to SEQ ID NO: 852596
aguaaucaccagaacuccu

SEQ ID NO: 852598 - RNA, 19 nt, Artificial Sequence
  Description of Artificial Sequence: Synthetic oligonucleotide
  Sense strand starting at position 1077 of SEQ ID NO: 588256
aguucuggugauuacucua

SEQ ID NO: 852599 - RNA, 19 nt, Artificial Sequence
  Description of Artificial Sequence: Synthetic oligonucleotide
  Antisense strand to SEQ ID NO: 852598
uagaguaaucaccagaacu

SEQ ID NO: 852600 - RNA, 19 nt, Artificial Sequence
  Description of Artificial Sequence: Synthetic oligonucleotide
  Sense strand starting at position 1080 of SEQ ID NO: 588256
ucuggugauuacucuaaau

SEQ ID NO: 852601 - RNA, 19 nt, Artificial Sequence
  Description of Artificial Sequence: Synthetic oligonucleotide
  Antisense strand to SEQ ID NO: 852600
auuuagaguaaucaccaga

SEQ ID NO: 852602 - RNA, 19 nt, Artificial Sequence
  Description of Artificial Sequence: Synthetic oligonucleotide
  Sense strand starting at position 1082 of SEQ ID NO: 588256
uggugauuacucuaaauuc

SEQ ID NO: 852603 - RNA, 19 nt, Artificial Sequence
  Description of Artificial Sequence: Synthetic oligonucleotide
  Antisense strand to SEQ ID NO: 852602
gaauuuagaguaaucacca

SEQ ID NO: 852604 - RNA, 19 nt, Artificial Sequence
  Description of Artificial Sequence: Synthetic oligonucleotide
  Sense strand starting at position 1115 of SEQ ID NO: 588256
gaggguacagucugacuua

SEQ ID NO: 852605 - RNA, 19 nt, Artificial Sequence
  Description of Artificial Sequence: Synthetic oligonucleotide
  Antisense strand to SEQ ID NO: 852604
uaagucagacuguacccuc

SEQ ID NO: 852606 - RNA, 19 nt, Artificial Sequence
  Description of Artificial Sequence: Synthetic oligonucleotide
  Sense strand starting at position 1127 of SEQ ID NO: 588256
ugacuuauaucucugagua

SEQ ID NO: 852607 - RNA, 19 nt, Artificial Sequence
  Description of Artificial Sequence: Synthetic oligonucleotide
  Antisense strand to SEQ ID NO: 852606
uacucagagauauaaguca

SEQ ID NO: 852608 - RNA, 19 nt, Artificial Sequence
  Description of Artificial Sequence: Synthetic oligonucleotide
  Sense strand starting at position 1128 of SEQ ID NO: 588256
gacuuauaucucugaguag

SEQ ID NO: 852609 - RNA, 19 nt, Artificial Sequence
  Description of Artificial Sequence: Synthetic oligonucleotide
  Antisense strand to SEQ ID NO: 852608
cuacucagagauauaaguc

SEQ ID NO: 852610 - RNA, 19 nt, Artificial Sequence
  Description of Artificial Sequence: Synthetic oligonucleotide
  Sense strand starting at position 1131 of SEQ ID NO: 588256
uuauaucucugaguagauc

SEQ ID NO: 852611 - RNA, 19 nt, Artificial Sequence
  Description of Artificial Sequence: Synthetic oligonucleotide
  Antisense strand to SEQ ID NO: 852610
gaucuacucagagauauaa

SEQ ID NO: 852612 - RNA, 19 nt, Artificial Sequence
  Description of Artificial Sequence: Synthetic oligonucleotide
  Sense strand starting at position 1139 of SEQ ID NO: 588256
cugaguagaucaccuccaa

SEQ ID NO: 852613 - RNA, 19 nt, Artificial Sequence
  Description of Artificial Sequence: Synthetic oligonucleotide
  Antisense strand to SEQ ID NO: 852612
uuggaggugaucuacucag

SEQ ID NO: 852614 - RNA, 19 nt, Artificial Sequence
  Description of Artificial Sequence: Synthetic oligonucleotide
  Sense strand starting at position 1220 of SEQ ID NO: 588256
uugacaguaucaucauauc

SEQ ID NO: 852615 - RNA, 19 nt, Artificial Sequence
  Description of Artificial Sequence: Synthetic oligonucleotide
  Antisense strand to SEQ ID NO: 852614
gauaugaugauacugucaa

SEQ ID NO: 852616 - RNA, 19 nt, Artificial Sequence
  Description of Artificial Sequence: Synthetic oligonucleotide
  Sense strand starting at position 1301 of SEQ ID NO: 588256
ugccaaauccuaugaugaa

SEQ ID NO: 852617 - RNA, 19 nt, Artificial Sequence
  Description of Artificial Sequence: Synthetic oligonucleotide
  Antisense strand to SEQ ID NO: 852616
uucaucauaggauuuggca

SEQ ID NO: 852618 - RNA, 19 nt, Artificial Sequence
  Description of Artificial Sequence: Synthetic oligonucleotide
  Sense strand starting at position 1326 of SEQ ID NO: 588256
aggaccaaaucuguaguua

SEQ ID NO: 852619 - RNA, 19 nt, Artificial Sequence
  Description of Artificial Sequence: Synthetic oligonucleotide
  Antisense strand to SEQ ID NO: 852618
uaacuacagauuugguccu

SEQ ID NO: 852620 - RNA, 19 nt, Artificial Sequence
  Description of Artificial Sequence: Synthetic oligonucleotide
  Sense strand starting at position 1897 of SEQ ID NO: 588256
ugccguguggucuuuccua

SEQ ID NO: 852621 - RNA, 19 nt, Artificial Sequence
  Description of Artificial Sequence: Synthetic oligonucleotide
  Antisense strand to SEQ ID NO: 852620
uaggaaagaccacacggca

SEQ ID NO: 852622 - RNA, 19 nt, Artificial Sequence
  Description of Artificial Sequence: Synthetic oligonucleotide
  Sense strand starting at position 1925 of SEQ ID NO: 588256
guaccagcagcugaaauaa

SEQ ID NO: 852623 - RNA, 19 nt, Artificial Sequence
  Description of Artificial Sequence: Synthetic oligonucleotide
  Antisense strand to SEQ ID NO: 852622
uuauuucagcugcugguac

SEQ ID NO: 852624 - RNA, 19 nt, Artificial Sequence
  Description of Artificial Sequence: Synthetic oligonucleotide
  Sense strand starting at position 2082 of SEQ ID NO: 588256
ucaguagccaggcagaaua

SEQ ID NO: 852625 - RNA, 19 nt, Artificial Sequence
  Description of Artificial Sequence: Synthetic oligonucleotide
  Antisense strand to SEQ ID NO: 852624
uauucugccuggcuacuga

SEQ ID NO: 852626 - RNA, 19 nt, Artificial Sequence
  Description of Artificial Sequence: Synthetic oligonucleotide
  Sense strand starting at position 2104 of SEQ ID NO: 588256
acauuuauuguuugcuuga

SEQ ID NO: 852627 - RNA, 19 nt, Artificial Sequence
  Description of Artificial Sequence: Synthetic oligonucleotide
  Antisense strand to SEQ ID NO: 852626
ucaagcaaacaauaaaugu

SEQ ID NO: 852628 - RNA, 19 nt, Artificial Sequence
  Description of Artificial Sequence: Synthetic oligonucleotide
  Sense strand starting at position 2235 of SEQ ID NO: 588256
gggcuuaaagagcaguauu

SEQ ID NO: 852629 - RNA, 19 nt, Artificial Sequence
  Description of Artificial Sequence: Synthetic oligonucleotide
  Antisense strand to SEQ ID NO: 852628
aauacugcucuuuaagccc

SEQ ID NO: 852630 - RNA, 19 nt, Artificial Sequence
  Description of Artificial Sequence: Synthetic oligonucleotide
  Sense strand starting at position 2243 of SEQ ID NO: 588256
agagcaguauuagcaaaga

SEQ ID NO: 852631 - RNA, 19 nt, Artificial Sequence
  Description of Artificial Sequence: Synthetic oligonucleotide
  Antisense strand to SEQ ID NO: 852630
ucuuugcuaauacugcucu

SEQ ID NO: 852632 - RNA, 19 nt, Artificial Sequence
  Description of Artificial Sequence: Synthetic oligonucleotide
  Sense strand starting at position 2277 of SEQ ID NO: 588256
cuaaauuucccauggcugu

SEQ ID NO: 852633 - RNA, 19 nt, Artificial Sequence
  Description of Artificial Sequence: Synthetic oligonucleotide
  Antisense strand to SEQ ID NO: 852632
acagccaugggaaauuuag

SEQ ID NO: 852634 - RNA, 19 nt, Artificial Sequence
  Description of Artificial Sequence: Synthetic oligonucleotide
  Sense strand starting at position 2532 of SEQ ID NO: 588256
gagcuagaaggauguuaau

SEQ ID NO: 852635 - RNA, 19 nt, Artificial Sequence
  Description of Artificial Sequence: Synthetic oligonucleotide
  Antisense strand to SEQ ID NO: 852634
auuaacauccuucuagcuc

SEQ ID NO: 852636 - RNA, 19 nt, Artificial Sequence
  Description of Artificial Sequence: Synthetic oligonucleotide
  Sense strand starting at position 2562 of SEQ ID NO: 588256
agggacauauuguuucuua

SEQ ID NO: 852637 - RNA, 19 nt, Artificial Sequence
  Description of Artificial Sequence: Synthetic oligonucleotide
  Antisense strand to SEQ ID NO: 852636
uaagaaacaauaugucccu

SEQ ID NO: 852638 - RNA, 19 nt, Artificial Sequence
  Description of Artificial Sequence: Synthetic oligonucleotide
  Sense strand starting at position 2695 of SEQ ID NO: 588256
aucaauuaaugggugcuaa

SEQ ID NO: 852639 - RNA, 19 nt, Artificial Sequence
  Description of Artificial Sequence: Synthetic oligonucleotide
  Antisense strand to SEQ ID NO: 852638
uuagcacccauuaauugau

SEQ ID NO: 852640 - RNA, 19 nt, Artificial Sequence
  Description of Artificial Sequence: Synthetic oligonucleotide
  Sense strand starting at position 2723 of SEQ ID NO: 588256
cuggucagucaucagauaa

SEQ ID NO: 852641 - RNA, 19 nt, Artificial Sequence
  Description of Artificial Sequence: Synthetic oligonucleotide
  Antisense strand to SEQ ID NO: 852640
uuaucugaugacugaccag

SEQ ID NO: 852642 - RNA, 19 nt, Artificial Sequence
  Description of Artificial Sequence: Synthetic oligonucleotide
  Sense strand starting at position 2819 of SEQ ID NO: 588256
agggaaaugucucccucca

SEQ ID NO: 852643 - RNA, 19 nt, Artificial Sequence
  Description of Artificial Sequence: Synthetic oligonucleotide
  Antisense strand to SEQ ID NO: 852642
uggagggagacauuucccu

SEQ ID NO: 852644 - RNA, 19 nt, Artificial Sequence
  Description of Artificial Sequence: Synthetic oligonucleotide
  Sense strand starting at position 3302 of SEQ ID NO: 588256
cuuucuuuccaagaaguga

SEQ ID NO: 852645 - RNA, 19 nt, Artificial Sequence
  Description of Artificial Sequence: Synthetic oligonucleotide
  Antisense strand to SEQ ID NO: 852644
ucacuucuuggaaagaaag

SEQ ID NO: 852646 - RNA, 19 nt, Artificial Sequence
  Description of Artificial Sequence: Synthetic oligonucleotide
  Sense strand starting at position 3341 of SEQ ID NO: 588256
aggcauuucuguucuucuu

SEQ ID NO: 852647 - RNA, 19 nt, Artificial Sequence
  Description of Artificial Sequence: Synthetic oligonucleotide
  Antisense strand to SEQ ID NO: 852646
aagaagaacagaaaugccu

SEQ ID NO: 852648 - RNA, 19 nt, Artificial Sequence
  Description of Artificial Sequence: Synthetic oligonucleotide
  Sense strand starting at position 3343 of SEQ ID NO: 588256
gcauuucuguucuucuuga

SEQ ID NO: 852649 - RNA, 19 nt, Artificial Sequence
  Description of Artificial Sequence: Synthetic oligonucleotide
  Antisense strand to SEQ ID NO: 852648
ucaagaagaacagaaaugc

SEQ ID NO: 852650 - RNA, 19 nt, Artificial Sequence
  Description of Artificial Sequence: Synthetic oligonucleotide
  Sense strand starting at position 3363 of SEQ ID NO: 588256
agccaugccugauuucuau

SEQ ID NO: 852651 - RNA, 19 nt, Artificial Sequence
  Description of Artificial Sequence: Synthetic oligonucleotide
  Antisense strand to SEQ ID NO: 852650
auagaaaucaggcauggcu

SEQ ID NO: 852652 - RNA, 19 nt, Artificial Sequence
  Description of Artificial Sequence: Synthetic oligonucleotide
  Sense strand starting at position 3508 of SEQ ID NO: 588256
gcuaguauuaaugaaaggu

SEQ ID NO: 852653 - RNA, 19 nt, Artificial Sequence
  Description of Artificial Sequence: Synthetic oligonucleotide
  Antisense strand to SEQ ID NO: 852652
accuuucauuaauacuagc

SEQ ID NO: 852654 - RNA, 19 nt, Artificial Sequence
  Description of Artificial Sequence: Synthetic oligonucleotide
  Sense strand starting at position 3521 of SEQ ID NO: 588256
aaaggugcuguugauauau

SEQ ID NO: 852655 - RNA, 19 nt, Artificial Sequence
  Description of Artificial Sequence: Synthetic oligonucleotide
  Antisense strand to SEQ ID NO: 852654
auauaucaacagcaccuuu

SEQ ID NO: 852656 - RNA, 19 nt, Artificial Sequence
  Description of Artificial Sequence: Synthetic oligonucleotide
  Sense strand starting at position 1311 of SEQ ID NO: 588257
cucucuuggucugagugua

SEQ ID NO: 852657 - RNA, 19 nt, Artificial Sequence
  Description of Artificial Sequence: Synthetic oligonucleotide
  Antisense strand to SEQ ID NO: 852656
uacacucagaccaagagag

SEQ ID NO: 852658 - RNA, 19 nt, Artificial Sequence
  Description of Artificial Sequence: Synthetic oligonucleotide
  Sense strand starting at position 1316 of SEQ ID NO: 588257
uuggucugaguguagaacu

SEQ ID NO: 852659 - RNA, 19 nt, Artificial Sequence
  Description of Artificial Sequence: Synthetic oligonucleotide
  Antisense strand to SEQ ID NO: 852658
aguucuacacucagaccaa

SEQ ID NO: 852660 - RNA, 19 nt, Artificial Sequence
  Description of Artificial Sequence: Synthetic oligonucleotide
  Sense strand starting at position 1751 of SEQ ID NO: 588257
agaucuccuuuccuaggaa

SEQ ID NO: 852661 - RNA, 19 nt, Artificial Sequence
  Description of Artificial Sequence: Synthetic oligonucleotide
  Antisense strand to SEQ ID NO: 852660
uuccuaggaaaggagaucu

SEQ ID NO: 852662 - RNA, 19 nt, Artificial Sequence
  Description of Artificial Sequence: Synthetic oligonucleotide
  Sense strand starting at position 2008 of SEQ ID NO: 588257
ugagaagcauucuggagag

SEQ ID NO: 852663 - RNA, 19 nt, Artificial Sequence
  Description of Artificial Sequence: Synthetic oligonucleotide
  Antisense strand to SEQ ID NO: 852662
cucuccagaaugcuucuca

SEQ ID NO: 852664 - RNA, 19 nt, Artificial Sequence
  Description of Artificial Sequence: Synthetic oligonucleotide
  Sense strand starting at position 2092 of SEQ ID NO: 588257
ggauucccuuucuaaagca

SEQ ID NO: 852665 - RNA, 19 nt, Artificial Sequence
  Description of Artificial Sequence: Synthetic oligonucleotide
  Antisense strand to SEQ ID NO: 852664
ugcuuuagaaagggaaucc

SEQ ID NO: 852666 - RNA, 19 nt, Artificial Sequence
  Description of Artificial Sequence: Synthetic oligonucleotide
  Sense strand starting at position 2163 of SEQ ID NO: 588257
guccuauugguccaagggu

SEQ ID NO: 852667 - RNA, 19 nt, Artificial Sequence
  Description of Artificial Sequence: Synthetic oligonucleotide
  Antisense strand to SEQ ID NO: 852666
acccuuggaccaauaggac

SEQ ID NO: 852668 - RNA, 19 nt, Artificial Sequence
  Description of Artificial Sequence: Synthetic oligonucleotide
  Sense strand starting at position 2178 of SEQ ID NO: 588257
gggugcuauggucagaaug

SEQ ID NO: 852669 - RNA, 19 nt, Artificial Sequence
  Description of Artificial Sequence: Synthetic oligonucleotide
  Antisense strand to SEQ ID NO: 852668
cauucugaccauagcaccc

SEQ ID NO: 852670 - RNA, 19 nt, Artificial Sequence
  Description of Artificial Sequence: Synthetic oligonucleotide
  Sense strand starting at position 2180 of SEQ ID NO: 588257
gugcuauggucagaauguc

SEQ ID NO: 852671 - RNA, 19 nt, Artificial Sequence
  Description of Artificial Sequence: Synthetic oligonucleotide
  Antisense strand to SEQ ID NO: 852670
gacauucugaccauagcac

SEQ ID NO: 852672 - RNA, 19 nt, Artificial Sequence
  Description of Artificial Sequence: Synthetic oligonucleotide
  Sense strand starting at position 2189 of SEQ ID NO: 588257
ucagaauguccgugacccu

SEQ ID NO: 852673 - RNA, 19 nt, Artificial Sequence
  Description of Artificial Sequence: Synthetic oligonucleotide
  Antisense strand to SEQ ID NO: 852672
agggucacggacauucuga

SEQ ID NO: 852674 - RNA, 19 nt, Artificial Sequence
  Description of Artificial Sequence: Synthetic oligonucleotide
  Sense strand starting at position 2230 of SEQ ID NO: 588257
uaauguuaaugucagggua

SEQ ID NO: 852675 - RNA, 19 nt, Artificial Sequence
  Description of Artificial Sequence: Synthetic oligonucleotide
  Antisense strand to SEQ ID NO: 852674
uacccugacauuaacauua

SEQ ID NO: 852676 - RNA, 19 nt, Artificial Sequence
  Description of Artificial Sequence: Synthetic oligonucleotide
  Sense strand starting at position 2232 of SEQ ID NO: 588257
auguuaaugucaggguauu

SEQ ID NO: 852677 - RNA, 19 nt, Artificial Sequence
  Description of Artificial Sequence: Synthetic oligonucleotide
  Antisense strand to SEQ ID NO: 852676
aauacccugacauuaacau

SEQ ID NO: 852678 - RNA, 19 nt, Artificial Sequence
  Description of Artificial Sequence: Synthetic oligonucleotide
  Sense strand starting at position 2233 of SEQ ID NO: 588257
uguuaaugucaggguauua

SEQ ID NO: 852679 - RNA, 19 nt, Artificial Sequence
  Description of Artificial Sequence: Synthetic oligonucleotide
  Antisense strand to SEQ ID NO: 852678
uaauacccugacauuaaca

SEQ ID NO: 852680 - RNA, 19 nt, Artificial Sequence
  Description of Artificial Sequence: Synthetic oligonucleotide
  Sense strand starting at position 2633 of SEQ ID NO: 588257
gcggcuagugcccuuauaa

SEQ ID NO: 852681 - RNA, 19 nt, Artificial Sequence
  Description of Artificial Sequence: Synthetic oligonucleotide
  Antisense strand to SEQ ID NO: 852680
uuauaagggcacuagccgc

SEQ ID NO: 852682 - RNA, 19 nt, Artificial Sequence
  Description of Artificial Sequence: Synthetic oligonucleotide
  Sense strand starting at position 3367 of SEQ ID NO: 588257
uaugcagucuaagauaugu

SEQ ID NO: 852683 - RNA, 19 nt, Artificial Sequence
  Description of Artificial Sequence: Synthetic oligonucleotide
  Antisense strand to SEQ ID NO: 852682
acauaucuuagacugcaua

SEQ ID NO: 852684 - RNA, 19 nt, Artificial Sequence
  Description of Artificial Sequence: Synthetic oligonucleotide
  Sense strand starting at position 3372 of SEQ ID NO: 588257
agucuaagauauguuguua

SEQ ID NO: 852685 - RNA, 19 nt, Artificial Sequence
  Description of Artificial Sequence: Synthetic oligonucleotide
  Antisense strand to SEQ ID NO: 852684
uaacaacauaucuuagacu

SEQ ID NO: 852686 - RNA, 19 nt, Artificial Sequence
  Description of Artificial Sequence: Synthetic oligonucleotide
  Sense strand starting at position 3376 of SEQ ID NO: 588257
uaagauauguuguuauagc

SEQ ID NO: 852687 - RNA, 19 nt, Artificial Sequence
  Description of Artificial Sequence: Synthetic oligonucleotide
  Antisense strand to SEQ ID NO: 852686
gcuauaacaacauaucuua

SEQ ID NO: 852688 - RNA, 19 nt, Artificial Sequence
  Description of Artificial Sequence: Synthetic oligonucleotide
  Sense strand starting at position 3377 of SEQ ID NO: 588257
aagauauguuguuauagca

SEQ ID NO: 852689 - RNA, 19 nt, Artificial Sequence
  Description of Artificial Sequence: Synthetic oligonucleotide
  Antisense strand to SEQ ID NO: 852688
ugcuauaacaacauaucuu

SEQ ID NO: 852690 - RNA, 19 nt, Artificial Sequence
  Description of Artificial Sequence: Synthetic oligonucleotide
  Sense strand starting at position 3500 of SEQ ID NO: 588257
acuuucuugccucagaguu

SEQ ID NO: 852691 - RNA, 19 nt, Artificial Sequence
  Description of Artificial Sequence: Synthetic oligonucleotide
  Antisense strand to SEQ ID NO: 852690
aacucugaggcaagaaagu

SEQ ID NO: 852692 - RNA, 19 nt, Artificial Sequence
  Description of Artificial Sequence: Synthetic oligonucleotide
  Sense strand starting at position 3679 of SEQ ID NO: 588257
gcuucuagucauugaggca

SEQ ID NO: 852693 - RNA, 19 nt, Artificial Sequence
  Description of Artificial Sequence: Synthetic oligonucleotide
  Antisense strand to SEQ ID NO: 852692
ugccucaaugacuagaagc

SEQ ID NO: 852694 - RNA, 19 nt, Artificial Sequence
  Description of Artificial Sequence: Synthetic oligonucleotide
  Sense strand starting at position 222 of SEQ ID NO: 588258
guaccucgacuuuaaggau

SEQ ID NO: 852695 - RNA, 19 nt, Artificial Sequence
  Description of Artificial Sequence: Synthetic oligonucleotide
  Antisense strand to SEQ ID NO: 852694
auccuuaaagucgagguac

SEQ ID NO: 852696 - RNA, 19 nt, Artificial Sequence
  Description of Artificial Sequence: Synthetic oligonucleotide
  Sense strand starting at position 267 of SEQ ID NO: 588258
uucguuaggugggcagaua

SEQ ID NO: 852697 - RNA, 19 nt, Artificial Sequence
  Description of Artificial Sequence: Synthetic oligonucleotide
  Antisense strand to SEQ ID NO: 852696
uaucugcccaccuaacgaa

SEQ ID NO: 852698 - RNA, 19 nt, Artificial Sequence
  Description of Artificial Sequence: Synthetic oligonucleotide
  Sense strand starting at position 408 of SEQ ID NO: 588258
cucuaagcgucccuaagaa

SEQ ID NO: 852699 - RNA, 19 nt, Artificial Sequence
  Description of Artificial Sequence: Synthetic oligonucleotide
  Antisense strand to SEQ ID NO: 852698
uucuuagggacgcuuagag

SEQ ID NO: 852700 - RNA, 19 nt, Artificial Sequence
  Description of Artificial Sequence: Synthetic oligonucleotide
  Sense strand starting at position 436 of SEQ ID NO: 588258
guccaagcucugcugucau

SEQ ID NO: 852701 - RNA, 19 nt, Artificial Sequence
  Description of Artificial Sequence: Synthetic oligonucleotide
  Antisense strand to SEQ ID NO: 852700
augacagcagagcuuggac

SEQ ID NO: 852702 - RNA, 19 nt, Artificial Sequence
  Description of Artificial Sequence: Synthetic oligonucleotide
  Sense strand starting at position 563 of SEQ ID NO: 588258
aaaugaagacuacguguca

SEQ ID NO: 852703 - RNA, 19 nt, Artificial Sequence
  Description of Artificial Sequence: Synthetic oligonucleotide
  Antisense strand to SEQ ID NO: 852702
ugacacguagucuucauuu

SEQ ID NO: 852704 - RNA, 19 nt, Artificial Sequence
  Description of Artificial Sequence: Synthetic oligonucleotide
  Sense strand starting at position 564 of SEQ ID NO: 588258
aaugaagacuacgugucaa

SEQ ID NO: 852705 - RNA, 19 nt, Artificial Sequence
  Description of Artificial Sequence: Synthetic oligonucleotide
  Antisense strand to SEQ ID NO: 852704
uugacacguagucuucauu

SEQ ID NO: 852706 - RNA, 19 nt, Artificial Sequence
  Description of Artificial Sequence: Synthetic oligonucleotide
  Sense strand starting at position 608 of SEQ ID NO: 588258
acucccaaacugugguaau

SEQ ID NO: 852707 - RNA, 19 nt, Artificial Sequence
  Description of Artificial Sequence: Synthetic oligonucleotide
  Antisense strand to SEQ ID NO: 852706
auuaccacaguuugggagu

SEQ ID NO: 852708 - RNA, 19 nt, Artificial Sequence
  Description of Artificial Sequence: Synthetic oligonucleotide
  Sense strand starting at position 609 of SEQ ID NO: 588258
cucccaaacugugguaauu

SEQ ID NO: 852709 - RNA, 19 nt, Artificial Sequence
  Description of Artificial Sequence: Synthetic oligonucleotide
  Antisense strand to SEQ ID NO: 852708
aauuaccacaguuugggag

SEQ ID NO: 852710 - RNA, 19 nt, Artificial Sequence
  Description of Artificial Sequence: Synthetic oligonucleotide
  Sense strand starting at position 611 of SEQ ID NO: 588258
cccaaacugugguaauugu

SEQ ID NO: 852711 - RNA, 19 nt, Artificial Sequence
  Description of Artificial Sequence: Synthetic oligonucleotide
  Antisense strand to SEQ ID NO: 852710
acaauuaccacaguuuggg

SEQ ID NO: 852712 - RNA, 19 nt, Artificial Sequence
  Description of Artificial Sequence: Synthetic oligonucleotide
  Sense strand starting at position 667 of SEQ ID NO: 588258
ccaacugugguguguugaa

SEQ ID NO: 852713 - RNA, 19 nt, Artificial Sequence
  Description of Artificial Sequence: Synthetic oligonucleotide
  Antisense strand to SEQ ID NO: 852712
uucaacacaccacaguugg

SEQ ID NO: 852714 - RNA, 19 nt, Artificial Sequence
  Description of Artificial Sequence: Synthetic oligonucleotide
  Sense strand starting at position 742 of SEQ ID NO: 588258
cuguucuggugucuacaga

SEQ ID NO: 852715 - RNA, 19 nt, Artificial Sequence
  Description of Artificial Sequence: Synthetic oligonucleotide
  Antisense strand to SEQ ID NO: 852714
ucuguagacaccagaacag

SEQ ID NO: 852716 - RNA, 19 nt, Artificial Sequence
  Description of Artificial Sequence: Synthetic oligonucleotide
  Sense strand starting at position 2631 of SEQ ID NO: 588258
cucucuuggucugagugua

SEQ ID NO: 852717 - RNA, 19 nt, Artificial Sequence
  Description of Artificial Sequence: Synthetic oligonucleotide
  Antisense strand to SEQ ID NO: 852716
uacacucagaccaagagag

SEQ ID NO: 852718 - RNA, 19 nt, Artificial Sequence
  Description of Artificial Sequence: Synthetic oligonucleotide
  Sense strand starting at position 2636 of SEQ ID NO: 588258
uuggucugaguguagaacu

SEQ ID NO: 852719 - RNA, 19 nt, Artificial Sequence
  Description of Artificial Sequence: Synthetic oligonucleotide
  Antisense strand to SEQ ID NO: 852718
aguucuacacucagaccaa

SEQ ID NO: 852720 - RNA, 19 nt, Artificial Sequence
  Description of Artificial Sequence: Synthetic oligonucleotide
  Sense strand starting at position 3071 of SEQ ID NO: 588258
agaucuccuuuccuaggaa

SEQ ID NO: 852721 - RNA, 19 nt, Artificial Sequence
  Description of Artificial Sequence: Synthetic oligonucleotide
  Antisense strand to SEQ ID NO: 852720
uuccuaggaaaggagaucu

SEQ ID NO: 852722 - RNA, 19 nt, Artificial Sequence
  Description of Artificial Sequence: Synthetic oligonucleotide
  Sense strand starting at position 3328 of SEQ ID NO: 588258
ugagaagcauucuggagag

SEQ ID NO: 852723 - RNA, 19 nt, Artificial Sequence
  Description of Artificial Sequence: Synthetic oligonucleotide
  Antisense strand to SEQ ID NO: 852722
cucuccagaaugcuucuca

SEQ ID NO: 852724 - RNA, 19 nt, Artificial Sequence
  Description of Artificial Sequence: Synthetic oligonucleotide
  Sense strand starting at position 3412 of SEQ ID NO: 588258
ggauucccuuucuaaagca

SEQ ID NO: 852725 - RNA, 19 nt, Artificial Sequence
  Description of Artificial Sequence: Synthetic oligonucleotide
  Antisense strand to SEQ ID NO: 852724
ugcuuuagaaagggaaucc

SEQ ID NO: 852726 - RNA, 19 nt, Artificial Sequence
  Description of Artificial Sequence: Synthetic oligonucleotide
  Sense strand starting at position 3483 of SEQ ID NO: 588258
guccuauugguccaagggu

SEQ ID NO: 852727 - RNA, 19 nt, Artificial Sequence
  Description of Artificial Sequence: Synthetic oligonucleotide
  Antisense strand to SEQ ID NO: 852726
acccuuggaccaauaggac

SEQ ID NO: 852728 - RNA, 19 nt, Artificial Sequence
  Description of Artificial Sequence: Synthetic oligonucleotide
  Sense strand starting at position 3498 of SEQ ID NO: 588258
gggugcuauggucagaaug

SEQ ID NO: 852729 - RNA, 19 nt, Artificial Sequence
  Description of Artificial Sequence: Synthetic oligonucleotide
  Antisense strand to SEQ ID NO: 852728
cauucugaccauagcaccc

SEQ ID NO: 852730 - RNA, 19 nt, Artificial Sequence
  Description of Artificial Sequence: Synthetic oligonucleotide
  Sense strand starting at position 3500 of SEQ ID NO: 588258
gugcuauggucagaauguc

SEQ ID NO: 852731 - RNA, 19 nt, Artificial Sequence
  Description of Artificial Sequence: Synthetic oligonucleotide
  Antisense strand to SEQ ID NO: 852730
gacauucugaccauagcac

SEQ ID NO: 852732 - RNA, 19 nt, Artificial Sequence
  Description of Artificial Sequence: Synthetic oligonucleotide
  Sense strand starting at position 3509 of SEQ ID NO: 588258
ucagaauguccgugacccu

SEQ ID NO: 852733 - RNA, 19 nt, Artificial Sequence
  Description of Artificial Sequence: Synthetic oligonucleotide
  Antisense strand to SEQ ID NO: 852732
agggucacggacauucuga

SEQ ID NO: 852734 - RNA, 19 nt, Artificial Sequence
  Description of Artificial Sequence: Synthetic oligonucleotide
  Sense strand starting at position 3550 of SEQ ID NO: 588258
uaauguuaaugucagggua

SEQ ID NO: 852735 - RNA, 19 nt, Artificial Sequence
  Description of Artificial Sequence: Synthetic oligonucleotide
  Antisense strand to SEQ ID NO: 852734
uacccugacauuaacauua

SEQ ID NO: 852736 - RNA, 19 nt, Artificial Sequence
  Description of Artificial Sequence: Synthetic oligonucleotide
  Sense strand starting at position 3552 of SEQ ID NO: 588258
auguuaaugucaggguauu

SEQ ID NO: 852737 - RNA, 19 nt, Artificial Sequence
  Description of Artificial Sequence: Synthetic oligonucleotide
  Antisense strand to SEQ ID NO: 852736
aauacccugacauuaacau

SEQ ID NO: 852738 - RNA, 19 nt, Artificial Sequence
  Description of Artificial Sequence: Synthetic oligonucleotide
  Sense strand starting at position 3553 of SEQ ID NO: 588258
uguuaaugucaggguauua

SEQ ID NO: 852739 - RNA, 19 nt, Artificial Sequence
  Description of Artificial Sequence: Synthetic oligonucleotide
  Antisense strand to SEQ ID NO: 852738
uaauacccugacauuaaca

SEQ ID NO: 852740 - RNA, 19 nt, Artificial Sequence
  Description of Artificial Sequence: Synthetic oligonucleotide
  Sense strand starting at position 3953 of SEQ ID NO: 588258
gcggcuagugcccuuauaa

SEQ ID NO: 852741 - RNA, 19 nt, Artificial Sequence
  Description of Artificial Sequence: Synthetic oligonucleotide
  Antisense strand to SEQ ID NO: 852740
uuauaagggcacuagccgc

SEQ ID NO: 852742 - RNA, 19 nt, Artificial Sequence
  Description of Artificial Sequence: Synthetic oligonucleotide
  Sense strand starting at position 7 of SEQ ID NO: 588259
ugacuuuaucaaggucaca

SEQ ID NO: 852743 - RNA, 19 nt, Artificial Sequence
  Description of Artificial Sequence: Synthetic oligonucleotide
  Antisense strand to SEQ ID NO: 852742
ugugaccuugauaaaguca

SEQ ID NO: 852744 - RNA, 19 nt, Artificial Sequence
  Description of Artificial Sequence: Synthetic oligonucleotide
  Sense strand starting at position 135 of SEQ ID NO: 588259
cuuagcaagucauugaucu

SEQ ID NO: 852745 - RNA, 19 nt, Artificial Sequence
  Description of Artificial Sequence: Synthetic oligonucleotide
  Antisense strand to SEQ ID NO: 852744
agaucaaugacuugcuaag

SEQ ID NO: 852746 - RNA, 19 nt, Artificial Sequence
  Description of Artificial Sequence: Synthetic oligonucleotide
  Sense strand starting at position 136 of SEQ ID NO: 588259
uuagcaagucauugaucuu

SEQ ID NO: 852747 - RNA, 19 nt, Artificial Sequence
  Description of Artificial Sequence: Synthetic oligonucleotide
  Antisense strand to SEQ ID NO: 852746
aagaucaaugacuugcuaa

SEQ ID NO: 852748 - RNA, 19 nt, Artificial Sequence
  Description of Artificial Sequence: Synthetic oligonucleotide
  Sense strand starting at position 139 of SEQ ID NO: 588259
gcaagucauugaucuugag

SEQ ID NO: 852749 - RNA, 19 nt, Artificial Sequence
  Description of Artificial Sequence: Synthetic oligonucleotide
  Antisense strand to SEQ ID NO: 852748
cucaagaucaaugacuugc

SEQ ID NO: 852750 - RNA, 19 nt, Artificial Sequence
  Description of Artificial Sequence: Synthetic oligonucleotide
  Sense strand starting at position 143 of SEQ ID NO: 588259
gucauugaucuugagcaca

SEQ ID NO: 852751 - RNA, 19 nt, Artificial Sequence
  Description of Artificial Sequence: Synthetic oligonucleotide
  Antisense strand to SEQ ID NO: 852750
ugugcucaagaucaaugac

SEQ ID NO: 852752 - RNA, 19 nt, Artificial Sequence
  Description of Artificial Sequence: Synthetic oligonucleotide
  Sense strand starting at position 166 of SEQ ID NO: 588259
agucuuccucuccagauua

SEQ ID NO: 852753 - RNA, 19 nt, Artificial Sequence
  Description of Artificial Sequence: Synthetic oligonucleotide
  Antisense strand to SEQ ID NO: 852752
uaaucuggagaggaagacu

SEQ ID NO: 852754 - RNA, 19 nt, Artificial Sequence
  Description of Artificial Sequence: Synthetic oligonucleotide
  Sense strand starting at position 1019 of SEQ ID NO: 588259
ccagaaacccugggcuuua

SEQ ID NO: 852755 - RNA, 19 nt, Artificial Sequence
  Description of Artificial Sequence: Synthetic oligonucleotide
  Antisense strand to SEQ ID NO: 852754
uaaagcccaggguuucugg

SEQ ID NO: 852756 - RNA, 19 nt, Artificial Sequence
  Description of Artificial Sequence: Synthetic oligonucleotide
  Sense strand starting at position 1123 of SEQ ID NO: 588259
gagaaucacugaguugagu

SEQ ID NO: 852757 - RNA, 19 nt, Artificial Sequence
  Description of Artificial Sequence: Synthetic oligonucleotide
  Antisense strand to SEQ ID NO: 852756
acucaacucagugauucuc

SEQ ID NO: 852758 - RNA, 19 nt, Artificial Sequence
  Description of Artificial Sequence: Synthetic oligonucleotide
  Sense strand starting at position 1125 of SEQ ID NO: 588259
gaaucacugaguugaguug

SEQ ID NO: 852759 - RNA, 19 nt, Artificial Sequence
  Description of Artificial Sequence: Synthetic oligonucleotide
  Antisense strand to SEQ ID NO: 852758
caacucaacucagugauuc

SEQ ID NO: 852760 - RNA, 19 nt, Artificial Sequence
  Description of Artificial Sequence: Synthetic oligonucleotide
  Sense strand starting at position 1172 of SEQ ID NO: 588259
ggcugagaguuccuccaag

SEQ ID NO: 852761 - RNA, 19 nt, Artificial Sequence
  Description of Artificial Sequence: Synthetic oligonucleotide
  Antisense strand to SEQ ID NO: 852760
cuuggaggaacucucagcc

SEQ ID NO: 852762 - RNA, 19 nt, Artificial Sequence
  Description of Artificial Sequence: Synthetic oligonucleotide
  Sense strand starting at position 1216 of SEQ ID NO: 588259
agugaaaccagcugauugu

SEQ ID NO: 852763 - RNA, 19 nt, Artificial Sequence
  Description of Artificial Sequence: Synthetic oligonucleotide
  Antisense strand to SEQ ID NO: 852762
acaaucagcugguuucacu

SEQ ID NO: 852764 - RNA, 19 nt, Artificial Sequence
  Description of Artificial Sequence: Synthetic oligonucleotide
  Sense strand starting at position 1217 of SEQ ID NO: 588259
gugaaaccagcugauugua

SEQ ID NO: 852765 - RNA, 19 nt, Artificial Sequence
  Description of Artificial Sequence: Synthetic oligonucleotide
  Antisense strand to SEQ ID NO: 852764
uacaaucagcugguuucac

SEQ ID NO: 852766 - RNA, 19 nt, Artificial Sequence
  Description of Artificial Sequence: Synthetic oligonucleotide
  Sense strand starting at position 1219 of SEQ ID NO: 588259
gaaaccagcugauuguaga

SEQ ID NO: 852767 - RNA, 19 nt, Artificial Sequence
  Description of Artificial Sequence: Synthetic oligonucleotide
  Antisense strand to SEQ ID NO: 852766
ucuacaaucagcugguuuc

SEQ ID NO: 852768 - RNA, 19 nt, Artificial Sequence
  Description of Artificial Sequence: Synthetic oligonucleotide
  Sense strand starting at position 1220 of SEQ ID NO: 588259
aaaccagcugauuguagau

SEQ ID NO: 852769 - RNA, 19 nt, Artificial Sequence
  Description of Artificial Sequence: Synthetic oligonucleotide
  Antisense strand to SEQ ID NO: 852768
aucuacaaucagcugguuu

SEQ ID NO: 852770 - RNA, 19 nt, Artificial Sequence
  Description of Artificial Sequence: Synthetic oligonucleotide
  Sense strand starting at position 1328 of SEQ ID NO: 588259
cagauauguugaccuagga

SEQ ID NO: 852771 - RNA, 19 nt, Artificial Sequence
  Description of Artificial Sequence: Synthetic oligonucleotide
  Antisense strand to SEQ ID NO: 852770
uccuaggucaacauaucug

SEQ ID NO: 852772 - RNA, 19 nt, Artificial Sequence
  Description of Artificial Sequence: Synthetic oligonucleotide
  Sense strand starting at position 1332 of SEQ ID NO: 588259
uauguugaccuaggauauc

SEQ ID NO: 852773 - RNA, 19 nt, Artificial Sequence
  Description of Artificial Sequence: Synthetic oligonucleotide
  Antisense strand to SEQ ID NO: 852772
gauauccuaggucaacaua

SEQ ID NO: 852774 - RNA, 19 nt, Artificial Sequence
  Description of Artificial Sequence: Synthetic oligonucleotide
  Sense strand starting at position 1549 of SEQ ID NO: 588259
guuuguggcguuaggaaug

SEQ ID NO: 852775 - RNA, 19 nt, Artificial Sequence
  Description of Artificial Sequence: Synthetic oligonucleotide
  Antisense strand to SEQ ID NO: 852774
cauuccuaacgccacaaac

SEQ ID NO: 852776 - RNA, 19 nt, Artificial Sequence
  Description of Artificial Sequence: Synthetic oligonucleotide
  Sense strand starting at position 1691 of SEQ ID NO: 588259
gucagagguccugagccua

SEQ ID NO: 852777 - RNA, 19 nt, Artificial Sequence
  Description of Artificial Sequence: Synthetic oligonucleotide
  Antisense strand to SEQ ID NO: 852776
uaggcucaggaccucugac

SEQ ID NO: 852778 - RNA, 19 nt, Artificial Sequence
  Description of Artificial Sequence: Synthetic oligonucleotide
  Sense strand starting at position 1703 of SEQ ID NO: 588259
gagccuacuuaugcaugau

SEQ ID NO: 852779 - RNA, 19 nt, Artificial Sequence
  Description of Artificial Sequence: Synthetic oligonucleotide
  Antisense strand to SEQ ID NO: 852778
aucaugcauaaguaggcuc

SEQ ID NO: 852780 - RNA, 19 nt, Artificial Sequence
  Description of Artificial Sequence: Synthetic oligonucleotide
  Sense strand starting at position 1709 of SEQ ID NO: 588259
acuuaugcaugaucaaaug

SEQ ID NO: 852781 - RNA, 19 nt, Artificial Sequence
  Description of Artificial Sequence: Synthetic oligonucleotide
  Antisense strand to SEQ ID NO: 852780
cauuugaucaugcauaagu

SEQ ID NO: 852782 - RNA, 19 nt, Artificial Sequence
  Description of Artificial Sequence: Synthetic oligonucleotide
  Sense strand starting at position 2008 of SEQ ID NO: 588259
ggguguugguagaaggagu

SEQ ID NO: 852783 - RNA, 19 nt, Artificial Sequence
  Description of Artificial Sequence: Synthetic oligonucleotide
  Antisense strand to SEQ ID NO: 852782
acuccuucuaccaacaccc

SEQ ID NO: 852784 - RNA, 19 nt, Artificial Sequence
  Description of Artificial Sequence: Synthetic oligonucleotide
  Sense strand starting at position 2474 of SEQ ID NO: 588259
aggaguugacccugaguga

SEQ ID NO: 852785 - RNA, 19 nt, Artificial Sequence
  Description of Artificial Sequence: Synthetic oligonucleotide
  Antisense strand to SEQ ID NO: 852784
ucacucagggucaacuccu

SEQ ID NO: 852786 - RNA, 19 nt, Artificial Sequence
  Description of Artificial Sequence: Synthetic oligonucleotide
  Sense strand starting at position 2863 of SEQ ID NO: 588259
uggucauuugugcgauccu

SEQ ID NO: 852787 - RNA, 19 nt, Artificial Sequence
  Description of Artificial Sequence: Synthetic oligonucleotide
  Antisense strand to SEQ ID NO: 852786
aggaucgcacaaaugacca

SEQ ID NO: 852788 - RNA, 19 nt, Artificial Sequence
  Description of Artificial Sequence: Synthetic oligonucleotide
  Sense strand starting at position 2956 of SEQ ID NO: 588259
uugugucaggcauauauug

SEQ ID NO: 852789 - RNA, 19 nt, Artificial Sequence
  Description of Artificial Sequence: Synthetic oligonucleotide
  Antisense strand to SEQ ID NO: 852788
caauauaugccugacacaa

SEQ ID NO: 852790 - RNA, 19 nt, Artificial Sequence
  Description of Artificial Sequence: Synthetic oligonucleotide
  Sense strand starting at position 3172 of SEQ ID NO: 588259
agcugaguccaugagguuu

SEQ ID NO: 852791 - RNA, 19 nt, Artificial Sequence
  Description of Artificial Sequence: Synthetic oligonucleotide
  Antisense strand to SEQ ID NO: 852790
aaaccucauggacucagcu

SEQ ID NO: 852792 - RNA, 19 nt, Artificial Sequence
  Description of Artificial Sequence: Synthetic oligonucleotide
  Sense strand starting at position 3180 of SEQ ID NO: 588259
ccaugagguuucucuagaa

SEQ ID NO: 852793 - RNA, 19 nt, Artificial Sequence
  Description of Artificial Sequence: Synthetic oligonucleotide
  Antisense strand to SEQ ID NO: 852792
uucuagagaaaccucaugg

SEQ ID NO: 852794 - RNA, 19 nt, Artificial Sequence
  Description of Artificial Sequence: Synthetic oligonucleotide
  Sense strand starting at position 3211 of SEQ ID NO: 588259
ggcccaagggucugggaau

SEQ ID NO: 852795 - RNA, 19 nt, Artificial Sequence
  Description of Artificial Sequence: Synthetic oligonucleotide
  Antisense strand to SEQ ID NO: 852794
auucccagacccuugggcc

SEQ ID NO: 852796 - RNA, 19 nt, Artificial Sequence
  Description of Artificial Sequence: Synthetic oligonucleotide
  Sense strand starting at position 3363 of SEQ ID NO: 588259
ggaaccaaaccuuggugua

SEQ ID NO: 852797 - RNA, 19 nt, Artificial Sequence
  Description of Artificial Sequence: Synthetic oligonucleotide
  Antisense strand to SEQ ID NO: 852796
uacaccaagguuugguucc

SEQ ID NO: 852798 - RNA, 19 nt, Artificial Sequence
  Description of Artificial Sequence: Synthetic oligonucleotide
  Sense strand starting at position 3364 of SEQ ID NO: 588259
gaaccaaaccuugguguaa

SEQ ID NO: 852799 - RNA, 19 nt, Artificial Sequence
  Description of Artificial Sequence: Synthetic oligonucleotide
  Antisense strand to SEQ ID NO: 852798
uuacaccaagguuugguuc

SEQ ID NO: 852800 - RNA, 19 nt, Artificial Sequence
  Description of Artificial Sequence: Synthetic oligonucleotide
  Sense strand starting at position 3368 of SEQ ID NO: 588259
caaaccuugguguaaugua

SEQ ID NO: 852801 - RNA, 19 nt, Artificial Sequence
  Description of Artificial Sequence: Synthetic oligonucleotide
  Antisense strand to SEQ ID NO: 852800
uacauuacaccaagguuug

SEQ ID NO: 852802 - RNA, 19 nt, Artificial Sequence
  Description of Artificial Sequence: Synthetic oligonucleotide
  Sense strand starting at position 3373 of SEQ ID NO: 588259
cuugguguaauguacugua

SEQ ID NO: 852803 - RNA, 19 nt, Artificial Sequence
  Description of Artificial Sequence: Synthetic oligonucleotide
  Antisense strand to SEQ ID NO: 852802
uacaguacauuacaccaag

SEQ ID NO: 852804 - RNA, 19 nt, Artificial Sequence
  Description of Artificial Sequence: Synthetic oligonucleotide
  Sense strand starting at position 3470 of SEQ ID NO: 588259
guaugcauuugucuguuua

SEQ ID NO: 852805 - RNA, 19 nt, Artificial Sequence
  Description of Artificial Sequence: Synthetic oligonucleotide
  Antisense strand to SEQ ID NO: 852804
uaaacagacaaaugcauac

SEQ ID NO: 852806 - RNA, 19 nt, Artificial Sequence
  Description of Artificial Sequence: Synthetic oligonucleotide
  Sense strand starting at position 3472 of SEQ ID NO: 588259
augcauuugucuguuuacu

SEQ ID NO: 852807 - RNA, 19 nt, Artificial Sequence
  Description of Artificial Sequence: Synthetic oligonucleotide
  Antisense strand to SEQ ID NO: 852806
aguaaacagacaaaugcau

SEQ ID NO: 852808 - RNA, 19 nt, Artificial Sequence
  Description of Artificial Sequence: Synthetic oligonucleotide
  Sense strand starting at position 3474 of SEQ ID NO: 588259
gcauuugucuguuuacuua

SEQ ID NO: 852809 - RNA, 19 nt, Artificial Sequence
  Description of Artificial Sequence: Synthetic oligonucleotide
  Antisense strand to SEQ ID NO: 852808
uaaguaaacagacaaaugc

SEQ ID NO: 852810 - RNA, 19 nt, Artificial Sequence
  Description of Artificial Sequence: Synthetic oligonucleotide
  Sense strand starting at position 3514 of SEQ ID NO: 588259
aaguguguucagugggaga

SEQ ID NO: 852811 - RNA, 19 nt, Artificial Sequence
  Description of Artificial Sequence: Synthetic oligonucleotide
  Antisense strand to SEQ ID NO: 852810
ucucccacugaacacacuu

SEQ ID NO: 852812 - RNA, 19 nt, Artificial Sequence
  Description of Artificial Sequence: Synthetic oligonucleotide
  Sense strand starting at position 3516 of SEQ ID NO: 588259
guguguucagugggagaga

SEQ ID NO: 852813 - RNA, 19 nt, Artificial Sequence
  Description of Artificial Sequence: Synthetic oligonucleotide
  Antisense strand to SEQ ID NO: 852812
ucucucccacugaacacac

SEQ ID NO: 852814 - RNA, 19 nt, Artificial Sequence
  Description of Artificial Sequence: Synthetic oligonucleotide
  Sense strand starting at position 3678 of SEQ ID NO: 588259
uucugauuccaacaguuga

SEQ ID NO: 852815 - RNA, 19 nt, Artificial Sequence
  Description of Artificial Sequence: Synthetic oligonucleotide
  Antisense strand to SEQ ID NO: 852814
ucaacuguuggaaucagaa

SEQ ID NO: 852816 - RNA, 19 nt, Artificial Sequence
  Description of Artificial Sequence: Synthetic oligonucleotide
  Sense strand starting at position 3713 of SEQ ID NO: 588259
cuuaacuugccugaaguca

SEQ ID NO: 852817 - RNA, 19 nt, Artificial Sequence
  Description of Artificial Sequence: Synthetic oligonucleotide
  Antisense strand to SEQ ID NO: 852816
ugacuucaggcaaguuaag

SEQ ID NO: 852818 - RNA, 19 nt, Artificial Sequence
  Description of Artificial Sequence: Synthetic oligonucleotide
  Sense strand starting at position 3801 of SEQ ID NO: 588259
uuagauuaugcaugaaaug

SEQ ID NO: 852819 - RNA, 19 nt, Artificial Sequence
  Description of Artificial Sequence: Synthetic oligonucleotide
  Antisense strand to SEQ ID NO: 852818
cauuucaugcauaaucuaa

SEQ ID NO: 852820 - RNA, 19 nt, Artificial Sequence
  Description of Artificial Sequence: Synthetic oligonucleotide
  Sense strand starting at position 3955 of SEQ ID NO: 588259
ccuugaaggcuggguaaau

SEQ ID NO: 852821 - RNA, 19 nt, Artificial Sequence
  Description of Artificial Sequence: Synthetic oligonucleotide
  Antisense strand to SEQ ID NO: 852820
auuuacccagccuucaagg

SEQ ID NO: 852822 - RNA, 19 nt, Artificial Sequence
  Description of Artificial Sequence: Synthetic oligonucleotide
  Sense strand starting at position 20 of SEQ ID NO: 588260
ggauuugaaucccacuguu

SEQ ID NO: 852823 - RNA, 19 nt, Artificial Sequence
  Description of Artificial Sequence: Synthetic oligonucleotide
  Antisense strand to SEQ ID NO: 852822
aacagugggauucaaaucc

SEQ ID NO: 852824 - RNA, 19 nt, Artificial Sequence
  Description of Artificial Sequence: Synthetic oligonucleotide
  Sense strand starting at position 58 of SEQ ID NO: 588260
uccugauggguuggagcaa

SEQ ID NO: 852825 - RNA, 19 nt, Artificial Sequence
  Description of Artificial Sequence: Synthetic oligonucleotide
  Antisense strand to SEQ ID NO: 852824
uugcuccaacccaucagga

SEQ ID NO: 852826 - RNA, 19 nt, Artificial Sequence
  Description of Artificial Sequence: Synthetic oligonucleotide
  Sense strand starting at position 59 of SEQ ID NO: 588260
ccugauggguuggagcaaa

SEQ ID NO: 852827 - RNA, 19 nt, Artificial Sequence
  Description of Artificial Sequence: Synthetic oligonucleotide
  Antisense strand to SEQ ID NO: 852826
uuugcuccaacccaucagg

SEQ ID NO: 852828 - RNA, 19 nt, Artificial Sequence
  Description of Artificial Sequence: Synthetic oligonucleotide
  Sense strand starting at position 215 of SEQ ID NO: 588260
uuuggucucuucucaaaug

SEQ ID NO: 852829 - RNA, 19 nt, Artificial Sequence
  Description of Artificial Sequence: Synthetic oligonucleotide
  Antisense strand to SEQ ID NO: 852828
cauuugagaagagaccaaa

SEQ ID NO: 852830 - RNA, 19 nt, Artificial Sequence
  Description of Artificial Sequence: Synthetic oligonucleotide
  Sense strand starting at position 216 of SEQ ID NO: 588260
uuggucucuucucaaaugu

SEQ ID NO: 852831 - RNA, 19 nt, Artificial Sequence
  Description of Artificial Sequence: Synthetic oligonucleotide
  Antisense strand to SEQ ID NO: 852830
acauuugagaagagaccaa

SEQ ID NO: 852832 - RNA, 19 nt, Artificial Sequence
  Description of Artificial Sequence: Synthetic oligonucleotide
  Sense strand starting at position 231 of SEQ ID NO: 588260
augucacuucugcagagaa

SEQ ID NO: 852833 - RNA, 19 nt, Artificial Sequence
  Description of Artificial Sequence: Synthetic oligonucleotide
  Antisense strand to SEQ ID NO: 852832
uucucugcagaagugacau

SEQ ID NO: 852834 - RNA, 19 nt, Artificial Sequence
  Description of Artificial Sequence: Synthetic oligonucleotide
  Sense strand starting at position 233 of SEQ ID NO: 588260
gucacuucugcagagaaca

SEQ ID NO: 852835 - RNA, 19 nt, Artificial Sequence
  Description of Artificial Sequence: Synthetic oligonucleotide
  Antisense strand to SEQ ID NO: 852834
uguucucugcagaagugac

SEQ ID NO: 852836 - RNA, 19 nt, Artificial Sequence
  Description of Artificial Sequence: Synthetic oligonucleotide
  Sense strand starting at position 411 of SEQ ID NO: 588260
caagaucuaugagggcaga

SEQ ID NO: 852837 - RNA, 19 nt, Artificial Sequence
  Description of Artificial Sequence: Synthetic oligonucleotide
  Antisense strand to SEQ ID NO: 852836
ucugcccucauagaucuug

SEQ ID NO: 852838 - RNA, 19 nt, Artificial Sequence
  Description of Artificial Sequence: Synthetic oligonucleotide
  Sense strand starting at position 438 of SEQ ID NO: 588260
cugucuuauucguugcuga

SEQ ID NO: 852839 - RNA, 19 nt, Artificial Sequence
  Description of Artificial Sequence: Synthetic oligonucleotide
  Antisense strand to SEQ ID NO: 852838
ucagcaacgaauaagacag

SEQ ID NO: 852840 - RNA, 19 nt, Artificial Sequence
  Description of Artificial Sequence: Synthetic oligonucleotide
  Sense strand starting at position 439 of SEQ ID NO: 588260
ugucuuauucguugcugaa

SEQ ID NO: 852841 - RNA, 19 nt, Artificial Sequence
  Description of Artificial Sequence: Synthetic oligonucleotide
  Antisense strand to SEQ ID NO: 852840
uucagcaacgaauaagaca

SEQ ID NO: 852842 - RNA, 19 nt, Artificial Sequence
  Description of Artificial Sequence: Synthetic oligonucleotide
  Sense strand starting at position 441 of SEQ ID NO: 588260
ucuuauucguugcugaauc

SEQ ID NO: 852843 - RNA, 19 nt, Artificial Sequence
  Description of Artificial Sequence: Synthetic oligonucleotide
  Antisense strand to SEQ ID NO: 852842
gauucagcaacgaauaaga

SEQ ID NO: 852844 - RNA, 19 nt, Artificial Sequence
  Description of Artificial Sequence: Synthetic oligonucleotide
  Sense strand starting at position 490 of SEQ ID NO: 588260
gcagguaccuaguaaauau

SEQ ID NO: 852845 - RNA, 19 nt, Artificial Sequence
  Description of Artificial Sequence: Synthetic oligonucleotide
  Antisense strand to SEQ ID NO: 852844
auauuuacuagguaccugc

SEQ ID NO: 852846 - RNA, 19 nt, Artificial Sequence
  Description of Artificial Sequence: Synthetic oligonucleotide
  Sense strand starting at position 586 of SEQ ID NO: 588260
agaucagagucaggaucua

SEQ ID NO: 852847 - RNA, 19 nt, Artificial Sequence
  Description of Artificial Sequence: Synthetic oligonucleotide
  Antisense strand to SEQ ID NO: 852846
uagauccugacucugaucu

SEQ ID NO: 852848 - RNA, 19 nt, Artificial Sequence
  Description of Artificial Sequence: Synthetic oligonucleotide
  Sense strand starting at position 629 of SEQ ID NO: 588260
gggaacucaucucggaguu

SEQ ID NO: 852849 - RNA, 19 nt, Artificial Sequence
  Description of Artificial Sequence: Synthetic oligonucleotide
  Antisense strand to SEQ ID NO: 852848
aacuccgagaugaguuccc

SEQ ID NO: 852850 - RNA, 19 nt, Artificial Sequence
  Description of Artificial Sequence: Synthetic oligonucleotide
  Sense strand starting at position 631 of SEQ ID NO: 588260
gaacucaucucggaguucu

SEQ ID NO: 852851 - RNA, 19 nt, Artificial Sequence
  Description of Artificial Sequence: Synthetic oligonucleotide
  Antisense strand to SEQ ID NO: 852850
agaacuccgagaugaguuc

SEQ ID NO: 852852 - RNA, 19 nt, Artificial Sequence
  Description of Artificial Sequence: Synthetic oligonucleotide
  Sense strand starting at position 706 of SEQ ID NO: 588260
uguuuccucaucgguaaga

SEQ ID NO: 852853 - RNA, 19 nt, Artificial Sequence
  Description of Artificial Sequence: Synthetic oligonucleotide
  Antisense strand to SEQ ID NO: 852852
ucuuaccgaugaggaaaca

SEQ ID NO: 852854 - RNA, 19 nt, Artificial Sequence
  Description of Artificial Sequence: Synthetic oligonucleotide
  Sense strand starting at position 707 of SEQ ID NO: 588260
guuuccucaucgguaagau

SEQ ID NO: 852855 - RNA, 19 nt, Artificial Sequence
  Description of Artificial Sequence: Synthetic oligonucleotide
  Antisense strand to SEQ ID NO: 852854
aucuuaccgaugaggaaac

SEQ ID NO: 852856 - RNA, 19 nt, Artificial Sequence
  Description of Artificial Sequence: Synthetic oligonucleotide
  Sense strand starting at position 708 of SEQ ID NO: 588260
uuuccucaucgguaagaug

SEQ ID NO: 852857 - RNA, 19 nt, Artificial Sequence
  Description of Artificial Sequence: Synthetic oligonucleotide
  Antisense strand to SEQ ID NO: 852856
caucuuaccgaugaggaaa

SEQ ID NO: 852858 - RNA, 19 nt, Artificial Sequence
  Description of Artificial Sequence: Synthetic oligonucleotide
  Sense strand starting at position 716 of SEQ ID NO: 588260
ucgguaagauggagugaaa

SEQ ID NO: 852859 - RNA, 19 nt, Artificial Sequence
  Description of Artificial Sequence: Synthetic oligonucleotide
  Antisense strand to SEQ ID NO: 852858
uuucacuccaucuuaccga

SEQ ID NO: 852860 - RNA, 19 nt, Artificial Sequence
  Description of Artificial Sequence: Synthetic oligonucleotide
  Sense strand starting at position 2308 of SEQ ID NO: 588260
gggaugaagugagagaguu

SEQ ID NO: 852861 - RNA, 19 nt, Artificial Sequence
  Description of Artificial Sequence: Synthetic oligonucleotide
  Antisense strand to SEQ ID NO: 852860
aacucucucacuucauccc

SEQ ID NO: 852862 - RNA, 19 nt, Artificial Sequence
  Description of Artificial Sequence: Synthetic oligonucleotide
  Sense strand starting at position 2458 of SEQ ID NO: 588260
agcaguucuguccaagcca

SEQ ID NO: 852863 - RNA, 19 nt, Artificial Sequence
  Description of Artificial Sequence: Synthetic oligonucleotide
  Antisense strand to SEQ ID NO: 852862
uggcuuggacagaacugcu

SEQ ID NO: 852864 - RNA, 19 nt, Artificial Sequence
  Description of Artificial Sequence: Synthetic oligonucleotide
  Sense strand starting at position 2575 of SEQ ID NO: 588260
ccucaaauguccugggaaa

SEQ ID NO: 852865 - RNA, 19 nt, Artificial Sequence
  Description of Artificial Sequence: Synthetic oligonucleotide
  Antisense strand to SEQ ID NO: 852864
uuucccaggacauuugagg

SEQ ID NO: 852866 - RNA, 19 nt, Artificial Sequence
  Description of Artificial Sequence: Synthetic oligonucleotide
  Sense strand starting at position 2576 of SEQ ID NO: 588260
cucaaauguccugggaaac

SEQ ID NO: 852867 - RNA, 19 nt, Artificial Sequence
  Description of Artificial Sequence: Synthetic oligonucleotide
  Antisense strand to SEQ ID NO: 852866
guuucccaggacauuugag

SEQ ID NO: 852868 - RNA, 19 nt, Artificial Sequence
  Description of Artificial Sequence: Synthetic oligonucleotide
  Sense strand starting at position 2706 of SEQ ID NO: 588260
aggcaucugucucuccaau

SEQ ID NO: 852869 - RNA, 19 nt, Artificial Sequence
  Description of Artificial Sequence: Synthetic oligonucleotide
  Antisense strand to SEQ ID NO: 852868
auuggagagacagaugccu

SEQ ID NO: 852870 - RNA, 19 nt, Artificial Sequence
  Description of Artificial Sequence: Synthetic oligonucleotide
  Sense strand starting at position 2824 of SEQ ID NO: 588260
agggauauccagcaguuua

SEQ ID NO: 852871 - RNA, 19 nt, Artificial Sequence
  Description of Artificial Sequence: Synthetic oligonucleotide
  Antisense strand to SEQ ID NO: 852870
uaaacugcuggauaucccu

SEQ ID NO: 852872 - RNA, 19 nt, Artificial Sequence
  Description of Artificial Sequence: Synthetic oligonucleotide
  Sense strand starting at position 2874 of SEQ ID NO: 588260
cuuugaauguuggcugaac

SEQ ID NO: 852873 - RNA, 19 nt, Artificial Sequence
  Description of Artificial Sequence: Synthetic oligonucleotide
  Antisense strand to SEQ ID NO: 852872
guucagccaacauucaaag

SEQ ID NO: 852874 - RNA, 19 nt, Artificial Sequence
  Description of Artificial Sequence: Synthetic oligonucleotide
  Sense strand starting at position 2875 of SEQ ID NO: 588260
uuugaauguuggcugaacu

SEQ ID NO: 852875 - RNA, 19 nt, Artificial Sequence
  Description of Artificial Sequence: Synthetic oligonucleotide
  Antisense strand to SEQ ID NO: 852874
aguucagccaacauucaaa

SEQ ID NO: 852876 - RNA, 19 nt, Artificial Sequence
  Description of Artificial Sequence: Synthetic oligonucleotide
  Sense strand starting at position 3264 of SEQ ID NO: 588260
ugcccugccuuccugagaa

SEQ ID NO: 852877 - RNA, 19 nt, Artificial Sequence
  Description of Artificial Sequence: Synthetic oligonucleotide
  Antisense strand to SEQ ID NO: 852876
uucucaggaaggcagggca

SEQ ID NO: 852878 - RNA, 19 nt, Artificial Sequence
  Description of Artificial Sequence: Synthetic oligonucleotide
  Sense strand starting at position 3300 of SEQ ID NO: 588260
ccgaguucauggguggaaa

SEQ ID NO: 852879 - RNA, 19 nt, Artificial Sequence
  Description of Artificial Sequence: Synthetic oligonucleotide
  Antisense strand to SEQ ID NO: 852878
uuuccacccaugaacucgg

SEQ ID NO: 852880 - RNA, 19 nt, Artificial Sequence
  Description of Artificial Sequence: Synthetic oligonucleotide
  Sense strand starting at position 3301 of SEQ ID NO: 588260
cgaguucauggguggaaag

SEQ ID NO: 852881 - RNA, 19 nt, Artificial Sequence
  Description of Artificial Sequence: Synthetic oligonucleotide
  Antisense strand to SEQ ID NO: 852880
cuuuccacccaugaacucg

SEQ ID NO: 852882 - RNA, 19 nt, Artificial Sequence
  Description of Artificial Sequence: Synthetic oligonucleotide
  Sense strand starting at position 3443 of SEQ ID NO: 588260
ucgaguacuugcuuguuga

SEQ ID NO: 852883 - RNA, 19 nt, Artificial Sequence
  Description of Artificial Sequence: Synthetic oligonucleotide
  Antisense strand to SEQ ID NO: 852882
ucaacaagcaaguacucga

SEQ ID NO: 852884 - RNA, 19 nt, Artificial Sequence
  Description of Artificial Sequence: Synthetic oligonucleotide
  Sense strand starting at position 3444 of SEQ ID NO: 588260
cgaguacuugcuuguugag

SEQ ID NO: 852885 - RNA, 19 nt, Artificial Sequence
  Description of Artificial Sequence: Synthetic oligonucleotide
  Antisense strand to SEQ ID NO: 852884
cucaacaagcaaguacucg

SEQ ID NO: 852886 - RNA, 19 nt, Artificial Sequence
  Description of Artificial Sequence: Synthetic oligonucleotide
  Sense strand starting at position 3604 of SEQ ID NO: 588260
gguugaugugaaggaguag

SEQ ID NO: 852887 - RNA, 19 nt, Artificial Sequence
  Description of Artificial Sequence: Synthetic oligonucleotide
  Antisense strand to SEQ ID NO: 852886
cuacuccuucacaucaacc

SEQ ID NO: 852888 - RNA, 19 nt, Artificial Sequence
  Description of Artificial Sequence: Synthetic oligonucleotide
  Sense strand starting at position 3752 of SEQ ID NO: 588260
cagacuggugagcauagua

SEQ ID NO: 852889 - RNA, 19 nt, Artificial Sequence
  Description of Artificial Sequence: Synthetic oligonucleotide
  Antisense strand to SEQ ID NO: 852888
uacuaugcucaccagucug

SEQ ID NO: 852890 - RNA, 19 nt, Artificial Sequence
  Description of Artificial Sequence: Synthetic oligonucleotide
  Sense strand starting at position 3892 of SEQ ID NO: 588260
cugucaacucugcaaugga

SEQ ID NO: 852891 - RNA, 19 nt, Artificial Sequence
  Description of Artificial Sequence: Synthetic oligonucleotide
  Antisense strand to SEQ ID NO: 852890
uccauugcagaguugacag

SEQ ID NO: 852892 - RNA, 19 nt, Artificial Sequence
  Description of Artificial Sequence: Synthetic oligonucleotide
  Sense strand starting at position 3928 of SEQ ID NO: 588260
cugggaugcugcuagaacu

SEQ ID NO: 852893 - RNA, 19 nt, Artificial Sequence
  Description of Artificial Sequence: Synthetic oligonucleotide
  Antisense strand to SEQ ID NO: 852892
aguucuagcagcaucccag

SEQ ID NO: 852894 - RNA, 19 nt, Artificial Sequence
  Description of Artificial Sequence: Synthetic oligonucleotide
  Sense strand starting at position 3940 of SEQ ID NO: 588260
uagaacuugucugggucua

SEQ ID NO: 852895 - RNA, 19 nt, Artificial Sequence
  Description of Artificial Sequence: Synthetic oligonucleotide
  Antisense strand to SEQ ID NO: 852894
uagacccagacaaguucua

SEQ ID NO: 852896 - RNA, 19 nt, Artificial Sequence
  Description of Artificial Sequence: Synthetic oligonucleotide
  Sense strand starting at position 3941 of SEQ ID NO: 588260
agaacuugucugggucuau

SEQ ID NO: 852897 - RNA, 19 nt, Artificial Sequence
  Description of Artificial Sequence: Synthetic oligonucleotide
  Antisense strand to SEQ ID NO: 852896
auagacccagacaaguucu

SEQ ID NO: 852898 - RNA, 19 nt, Artificial Sequence
  Description of Artificial Sequence: Synthetic oligonucleotide
  Sense strand starting at position 3942 of SEQ ID NO: 588260
gaacuugucugggucuaua

SEQ ID NO: 852899 - RNA, 19 nt, Artificial Sequence
  Description of Artificial Sequence: Synthetic oligonucleotide
  Antisense strand to SEQ ID NO: 852898
uauagacccagacaaguuc

SEQ ID NO: 852900 - RNA, 19 nt, Artificial Sequence
  Description of Artificial Sequence: Synthetic oligonucleotide
  Sense strand starting at position 3945 of SEQ ID NO: 588260
cuugucugggucuauacua

SEQ ID NO: 852901 - RNA, 19 nt, Artificial Sequence
  Description of Artificial Sequence: Synthetic oligonucleotide
  Antisense strand to SEQ ID NO: 852900
uaguauagacccagacaag

SEQ ID NO: 852902 - RNA, 19 nt, Artificial Sequence
  Description of Artificial Sequence: Synthetic oligonucleotide
  Sense strand starting at position 291 of SEQ ID NO: 588261
agcugagacugcucuccau

SEQ ID NO: 852903 - RNA, 19 nt, Artificial Sequence
  Description of Artificial Sequence: Synthetic oligonucleotide
  Antisense strand to SEQ ID NO: 852902
auggagagcagucucagcu

SEQ ID NO: 852904 - RNA, 19 nt, Artificial Sequence
  Description of Artificial Sequence: Synthetic oligonucleotide
  Sense strand starting at position 294 of SEQ ID NO: 588261
ugagacugcucuccauauu

SEQ ID NO: 852905 - RNA, 19 nt, Artificial Sequence
  Description of Artificial Sequence: Synthetic oligonucleotide
  Antisense strand to SEQ ID NO: 852904
aauauggagagcagucuca

SEQ ID NO: 852906 - RNA, 19 nt, Artificial Sequence
  Description of Artificial Sequence: Synthetic oligonucleotide
  Sense strand starting at position 295 of SEQ ID NO: 588261
gagacugcucuccauauug

SEQ ID NO: 852907 - RNA, 19 nt, Artificial Sequence
  Description of Artificial Sequence: Synthetic oligonucleotide
  Antisense strand to SEQ ID NO: 852906
caauauggagagcagucuc

SEQ ID NO: 852908 - RNA, 19 nt, Artificial Sequence
  Description of Artificial Sequence: Synthetic oligonucleotide
  Sense strand starting at position 300 of SEQ ID NO: 588261
ugcucuccauauugggaaa

SEQ ID NO: 852909 - RNA, 19 nt, Artificial Sequence
  Description of Artificial Sequence: Synthetic oligonucleotide
  Antisense strand to SEQ ID NO: 852908
uuucccaauauggagagca

SEQ ID NO: 852910 - RNA, 19 nt, Artificial Sequence
  Description of Artificial Sequence: Synthetic oligonucleotide
  Sense strand starting at position 302 of SEQ ID NO: 588261
cucuccauauugggaaauu

SEQ ID NO: 852911 - RNA, 19 nt, Artificial Sequence
  Description of Artificial Sequence: Synthetic oligonucleotide
  Antisense strand to SEQ ID NO: 852910
aauuucccaauauggagag

SEQ ID NO: 852912 - RNA, 19 nt, Artificial Sequence
  Description of Artificial Sequence: Synthetic oligonucleotide
  Sense strand starting at position 303 of SEQ ID NO: 588261
ucuccauauugggaaauug

SEQ ID NO: 852913 - RNA, 19 nt, Artificial Sequence
  Description of Artificial Sequence: Synthetic oligonucleotide
  Antisense strand to SEQ ID NO: 852912
caauuucccaauauggaga

SEQ ID NO: 852914 - RNA, 19 nt, Artificial Sequence
  Description of Artificial Sequence: Synthetic oligonucleotide
  Sense strand starting at position 456 of SEQ ID NO: 588261
ccugucagauggcaucuaa

SEQ ID NO: 852915 - RNA, 19 nt, Artificial Sequence
  Description of Artificial Sequence: Synthetic oligonucleotide
  Antisense strand to SEQ ID NO: 852914
uuagaugccaucugacagg

SEQ ID NO: 852916 - RNA, 19 nt, Artificial Sequence
  Description of Artificial Sequence: Synthetic oligonucleotide
  Sense strand starting at position 469 of SEQ ID NO: 588261
aucuaaucugaaugugagu

SEQ ID NO: 852917 - RNA, 19 nt, Artificial Sequence
  Description of Artificial Sequence: Synthetic oligonucleotide
  Antisense strand to SEQ ID NO: 852916
acucacauucagauuagau

SEQ ID NO: 852918 - RNA, 19 nt, Artificial Sequence
  Description of Artificial Sequence: Synthetic oligonucleotide
  Sense strand starting at position 474 of SEQ ID NO: 588261
aucugaaugugagugaagu

SEQ ID NO: 852919 - RNA, 19 nt, Artificial Sequence
  Description of Artificial Sequence: Synthetic oligonucleotide
  Antisense strand to SEQ ID NO: 852918
acuucacucacauucagau

SEQ ID NO: 852920 - RNA, 19 nt, Artificial Sequence
  Description of Artificial Sequence: Synthetic oligonucleotide
  Sense strand starting at position 475 of SEQ ID NO: 588261
ucugaaugugagugaagug

SEQ ID NO: 852921 - RNA, 19 nt, Artificial Sequence
  Description of Artificial Sequence: Synthetic oligonucleotide
  Antisense strand to SEQ ID NO: 852920
cacuucacucacauucaga

SEQ ID NO: 852922 - RNA, 19 nt, Artificial Sequence
  Description of Artificial Sequence: Synthetic oligonucleotide
  Sense strand starting at position 494 of SEQ ID NO: 588261
ugcugaguauugcccaaag

SEQ ID NO: 852923 - RNA, 19 nt, Artificial Sequence
  Description of Artificial Sequence: Synthetic oligonucleotide
  Antisense strand to SEQ ID NO: 852922
cuuugggcaauacucagca

SEQ ID NO: 852924 - RNA, 19 nt, Artificial Sequence
  Description of Artificial Sequence: Synthetic oligonucleotide
  Sense strand starting at position 496 of SEQ ID NO: 588261
cugaguauugcccaaagag

SEQ ID NO: 852925 - RNA, 19 nt, Artificial Sequence
  Description of Artificial Sequence: Synthetic oligonucleotide
  Antisense strand to SEQ ID NO: 852924
cucuuugggcaauacucag

SEQ ID NO: 852926 - RNA, 19 nt, Artificial Sequence
  Description of Artificial Sequence: Synthetic oligonucleotide
  Sense strand starting at position 602 of SEQ ID NO: 588261
uaguguccucaugagugaa

SEQ ID NO: 852927 - RNA, 19 nt, Artificial Sequence
  Description of Artificial Sequence: Synthetic oligonucleotide
  Antisense strand to SEQ ID NO: 852926
uucacucaugaggacacua

SEQ ID NO: 852928 - RNA, 19 nt, Artificial Sequence
  Description of Artificial Sequence: Synthetic oligonucleotide
  Sense strand starting at position 604 of SEQ ID NO: 588261
guguccucaugagugaacu

SEQ ID NO: 852929 - RNA, 19 nt, Artificial Sequence
  Description of Artificial Sequence: Synthetic oligonucleotide
  Antisense strand to SEQ ID NO: 852928
aguucacucaugaggacac

SEQ ID NO: 852930 - RNA, 19 nt, Artificial Sequence
  Description of Artificial Sequence: Synthetic oligonucleotide
  Sense strand starting at position 605 of SEQ ID NO: 588261
uguccucaugagugaacua

SEQ ID NO: 852931 - RNA, 19 nt, Artificial Sequence
  Description of Artificial Sequence: Synthetic oligonucleotide
  Antisense strand to SEQ ID NO: 852930
uaguucacucaugaggaca

SEQ ID NO: 852932 - RNA, 19 nt, Artificial Sequence
  Description of Artificial Sequence: Synthetic oligonucleotide
  Sense strand starting at position 663 of SEQ ID NO: 588261
aguugagauuuagagcaau

SEQ ID NO: 852933 - RNA, 19 nt, Artificial Sequence
  Description of Artificial Sequence: Synthetic oligonucleotide
  Antisense strand to SEQ ID NO: 852932
auugcucuaaaucucaacu

SEQ ID NO: 852934 - RNA, 19 nt, Artificial Sequence
  Description of Artificial Sequence: Synthetic oligonucleotide
  Sense strand starting at position 879 of SEQ ID NO: 588261
gaggguuauuuggaaaguc

SEQ ID NO: 852935 - RNA, 19 nt, Artificial Sequence
  Description of Artificial Sequence: Synthetic oligonucleotide
  Antisense strand to SEQ ID NO: 852934
gacuuuccaaauaacccuc

SEQ ID NO: 852936 - RNA, 19 nt, Artificial Sequence
  Description of Artificial Sequence: Synthetic oligonucleotide
  Sense strand starting at position 981 of SEQ ID NO: 588261
uggugaucuccaggacuca

SEQ ID NO: 852937 - RNA, 19 nt, Artificial Sequence
  Description of Artificial Sequence: Synthetic oligonucleotide
  Antisense strand to SEQ ID NO: 852936
ugaguccuggagaucacca

SEQ ID NO: 852938 - RNA, 19 nt, Artificial Sequence
  Description of Artificial Sequence: Synthetic oligonucleotide
  Sense strand starting at position 1043 of SEQ ID NO: 588261
gagacaugggucugaguag

SEQ ID NO: 852939 - RNA, 19 nt, Artificial Sequence
  Description of Artificial Sequence: Synthetic oligonucleotide
  Antisense strand to SEQ ID NO: 852938
cuacucagacccaugucuc

SEQ ID NO: 852940 - RNA, 19 nt, Artificial Sequence
  Description of Artificial Sequence: Synthetic oligonucleotide
  Sense strand starting at position 1433 of SEQ ID NO: 588261
ggcccauccuuccaaguua

SEQ ID NO: 852941 - RNA, 19 nt, Artificial Sequence
  Description of Artificial Sequence: Synthetic oligonucleotide
  Antisense strand to SEQ ID NO: 852940
uaacuuggaaggaugggcc

SEQ ID NO: 852942 - RNA, 19 nt, Artificial Sequence
  Description of Artificial Sequence: Synthetic oligonucleotide
  Sense strand starting at position 2461 of SEQ ID NO: 588261
agauuuggcuaaggaagga

SEQ ID NO: 852943 - RNA, 19 nt, Artificial Sequence
  Description of Artificial Sequence: Synthetic oligonucleotide
  Antisense strand to SEQ ID NO: 852942
uccuuccuuagccaaaucu

SEQ ID NO: 852944 - RNA, 19 nt, Artificial Sequence
  Description of Artificial Sequence: Synthetic oligonucleotide
  Sense strand starting at position 2529 of SEQ ID NO: 588261
gggcgcuuccgccuguaau

SEQ ID NO: 852945 - RNA, 19 nt, Artificial Sequence
  Description of Artificial Sequence: Synthetic oligonucleotide
  Antisense strand to SEQ ID NO: 852944
auuacaggcggaagcgccc

SEQ ID NO: 852946 - RNA, 19 nt, Artificial Sequence
  Description of Artificial Sequence: Synthetic oligonucleotide
  Sense strand starting at position 2531 of SEQ ID NO: 588261
gcgcuuccgccuguaaucu

SEQ ID NO: 852947 - RNA, 19 nt, Artificial Sequence
  Description of Artificial Sequence: Synthetic oligonucleotide
  Antisense strand to SEQ ID NO: 852946
agauuacaggcggaagcgc

SEQ ID NO: 852948 - RNA, 19 nt, Artificial Sequence
  Description of Artificial Sequence: Synthetic oligonucleotide
  Sense strand starting at position 2908 of SEQ ID NO: 588261
ccguaacaauccuuggcua

SEQ ID NO: 852949 - RNA, 19 nt, Artificial Sequence
  Description of Artificial Sequence: Synthetic oligonucleotide
  Antisense strand to SEQ ID NO: 852948
uagccaaggauuguuacgg

SEQ ID NO: 852950 - RNA, 19 nt, Artificial Sequence
  Description of Artificial Sequence: Synthetic oligonucleotide
  Sense strand starting at position 2910 of SEQ ID NO: 588261
guaacaauccuuggcuacu

SEQ ID NO: 852951 - RNA, 19 nt, Artificial Sequence
  Description of Artificial Sequence: Synthetic oligonucleotide
  Antisense strand to SEQ ID NO: 852950
aguagccaaggauuguuac

SEQ ID NO: 852952 - RNA, 19 nt, Artificial Sequence
  Description of Artificial Sequence: Synthetic oligonucleotide
  Sense strand starting at position 2923 of SEQ ID NO: 588261
gcuacuaaguaguaauucu

SEQ ID NO: 852953 - RNA, 19 nt, Artificial Sequence
  Description of Artificial Sequence: Synthetic oligonucleotide
  Antisense strand to SEQ ID NO: 852952
agaauuacuacuuaguagc

SEQ ID NO: 852954 - RNA, 19 nt, Artificial Sequence
  Description of Artificial Sequence: Synthetic oligonucleotide
  Sense strand starting at position 3238 of SEQ ID NO: 588261
gccaccucuccuggacuaa

SEQ ID NO: 852955 - RNA, 19 nt, Artificial Sequence
  Description of Artificial Sequence: Synthetic oligonucleotide
  Antisense strand to SEQ ID NO: 852954
uuaguccaggagagguggc

SEQ ID NO: 852956 - RNA, 19 nt, Artificial Sequence
  Description of Artificial Sequence: Synthetic oligonucleotide
  Sense strand starting at position 3289 of SEQ ID NO: 588261
cugccuugugcgugucaca

SEQ ID NO: 852957 - RNA, 19 nt, Artificial Sequence
  Description of Artificial Sequence: Synthetic oligonucleotide
  Antisense strand to SEQ ID NO: 852956
ugugacacgcacaaggcag

SEQ ID NO: 852958 - RNA, 19 nt, Artificial Sequence
  Description of Artificial Sequence: Synthetic oligonucleotide
  Sense strand starting at position 3425 of SEQ ID NO: 588261
agcagaauucgcgcgucca

SEQ ID NO: 852959 - RNA, 19 nt, Artificial Sequence
  Description of Artificial Sequence: Synthetic oligonucleotide
  Antisense strand to SEQ ID NO: 852958
uggacgcgcgaauucugcu

SEQ ID NO: 852960 - RNA, 19 nt, Artificial Sequence
  Description of Artificial Sequence: Synthetic oligonucleotide
  Sense strand starting at position 3427 of SEQ ID NO: 588261
cagaauucgcgcguccaua

SEQ ID NO: 852961 - RNA, 19 nt, Artificial Sequence
  Description of Artificial Sequence: Synthetic oligonucleotide
  Antisense strand to SEQ ID NO: 852960
uauggacgcgcgaauucug

SEQ ID NO: 852962 - RNA, 19 nt, Artificial Sequence
  Description of Artificial Sequence: Synthetic oligonucleotide
  Sense strand starting at position 3428 of SEQ ID NO: 588261
agaauucgcgcguccauaa

SEQ ID NO: 852963 - RNA, 19 nt, Artificial Sequence
  Description of Artificial Sequence: Synthetic oligonucleotide
  Antisense strand to SEQ ID NO: 852962
uuauggacgcgcgaauucu

SEQ ID NO: 852964 - RNA, 19 nt, Artificial Sequence
  Description of Artificial Sequence: Synthetic oligonucleotide
  Sense strand starting at position 3429 of SEQ ID NO: 588261
gaauucgcgcguccauaaa

SEQ ID NO: 852965 - RNA, 19 nt, Artificial Sequence
  Description of Artificial Sequence: Synthetic oligonucleotide
  Antisense strand to SEQ ID NO: 852964
uuuauggacgcgcgaauuc

SEQ ID NO: 852966 - RNA, 19 nt, Artificial Sequence
  Description of Artificial Sequence: Synthetic oligonucleotide
  Sense strand starting at position 3534 of SEQ ID NO: 588261
cuggacuagucguggaaga

SEQ ID NO: 852967 - RNA, 19 nt, Artificial Sequence
  Description of Artificial Sequence: Synthetic oligonucleotide
  Antisense strand to SEQ ID NO: 852966
ucuuccacgacuaguccag

SEQ ID NO: 852968 - RNA, 19 nt, Artificial Sequence
  Description of Artificial Sequence: Synthetic oligonucleotide
  Sense strand starting at position 3545 of SEQ ID NO: 588261
guggaagagcuaggacuua

SEQ ID NO: 852969 - RNA, 19 nt, Artificial Sequence
  Description of Artificial Sequence: Synthetic oligonucleotide
  Antisense strand to SEQ ID NO: 852968
uaaguccuagcucuuccac

SEQ ID NO: 852970 - RNA, 19 nt, Artificial Sequence
  Description of Artificial Sequence: Synthetic oligonucleotide
  Sense strand starting at position 3666 of SEQ ID NO: 588261
uucgaaugcugggcugaga

SEQ ID NO: 852971 - RNA, 19 nt, Artificial Sequence
  Description of Artificial Sequence: Synthetic oligonucleotide
  Antisense strand to SEQ ID NO: 852970
ucucagcccagcauucgaa

SEQ ID NO: 852972 - RNA, 19 nt, Artificial Sequence
  Description of Artificial Sequence: Synthetic oligonucleotide
  Sense strand starting at position 3677 of SEQ ID NO: 588261
ggcugagaaguaggcuuua

SEQ ID NO: 852973 - RNA, 19 nt, Artificial Sequence
  Description of Artificial Sequence: Synthetic oligonucleotide
  Antisense strand to SEQ ID NO: 852972
uaaagccuacuucucagcc

SEQ ID NO: 852974 - RNA, 19 nt, Artificial Sequence
  Description of Artificial Sequence: Synthetic oligonucleotide
  Sense strand starting at position 3689 of SEQ ID NO: 588261
ggcuuuauccucuaagggu

SEQ ID NO: 852975 - RNA, 19 nt, Artificial Sequence
  Description of Artificial Sequence: Synthetic oligonucleotide
  Antisense strand to SEQ ID NO: 852974
acccuuagaggauaaagcc

SEQ ID NO: 852976 - RNA, 19 nt, Artificial Sequence
  Description of Artificial Sequence: Synthetic oligonucleotide
  Sense strand starting at position 3724 of SEQ ID NO: 588261
gggugugaaccucaugagu

SEQ ID NO: 852977 - RNA, 19 nt, Artificial Sequence
  Description of Artificial Sequence: Synthetic oligonucleotide
  Antisense strand to SEQ ID NO: 852976
acucaugagguucacaccc

SEQ ID NO: 852978 - RNA, 19 nt, Artificial Sequence
  Description of Artificial Sequence: Synthetic oligonucleotide
  Sense strand starting at position 3726 of SEQ ID NO: 588261
gugugaaccucaugaguga

SEQ ID NO: 852979 - RNA, 19 nt, Artificial Sequence
  Description of Artificial Sequence: Synthetic oligonucleotide
  Antisense strand to SEQ ID NO: 852978
ucacucaugagguucacac

SEQ ID NO: 852980 - RNA, 19 nt, Artificial Sequence
  Description of Artificial Sequence: Synthetic oligonucleotide
  Sense strand starting at position 3739 of SEQ ID NO: 588261
gagugacagcaucaaaucu

SEQ ID NO: 852981 - RNA, 19 nt, Artificial Sequence
  Description of Artificial Sequence: Synthetic oligonucleotide
  Antisense strand to SEQ ID NO: 852980
agauuugaugcugucacuc

SEQ ID NO: 852982 - RNA, 19 nt, Artificial Sequence
  Description of Artificial Sequence: Synthetic oligonucleotide
  Sense strand starting at position 87 of SEQ ID NO: 588262
uaguguccucaugagugaa

SEQ ID NO: 852983 - RNA, 19 nt, Artificial Sequence
  Description of Artificial Sequence: Synthetic oligonucleotide
  Antisense strand to SEQ ID NO: 852982
uucacucaugaggacacua

SEQ ID NO: 852984 - RNA, 19 nt, Artificial Sequence
  Description of Artificial Sequence: Synthetic oligonucleotide
  Sense strand starting at position 89 of SEQ ID NO: 588262
guguccucaugagugaacu

SEQ ID NO: 852985 - RNA, 19 nt, Artificial Sequence
  Description of Artificial Sequence: Synthetic oligonucleotide
  Antisense strand to SEQ ID NO: 852984
aguucacucaugaggacac

SEQ ID NO: 852986 - RNA, 19 nt, Artificial Sequence
  Description of Artificial Sequence: Synthetic oligonucleotide
  Sense strand starting at position 90 of SEQ ID NO: 588262
uguccucaugagugaacua

SEQ ID NO: 852987 - RNA, 19 nt, Artificial Sequence
  Description of Artificial Sequence: Synthetic oligonucleotide
  Antisense strand to SEQ ID NO: 852986
uaguucacucaugaggaca

SEQ ID NO: 852988 - RNA, 19 nt, Artificial Sequence
  Description of Artificial Sequence: Synthetic oligonucleotide
  Sense strand starting at position 148 of SEQ ID NO: 588262
aguugagauuuagagcaau

SEQ ID NO: 852989 - RNA, 19 nt, Artificial Sequence
  Description of Artificial Sequence: Synthetic oligonucleotide
  Antisense strand to SEQ ID NO: 852988
auugcucuaaaucucaacu

SEQ ID NO: 852990 - RNA, 19 nt, Artificial Sequence
  Description of Artificial Sequence: Synthetic oligonucleotide
  Sense strand starting at position 364 of SEQ ID NO: 588262
gaggguuauuuggaaaguc

SEQ ID NO: 852991 - RNA, 19 nt, Artificial Sequence
  Description of Artificial Sequence: Synthetic oligonucleotide
  Antisense strand to SEQ ID NO: 852990
gacuuuccaaauaacccuc

SEQ ID NO: 852992 - RNA, 19 nt, Artificial Sequence
  Description of Artificial Sequence: Synthetic oligonucleotide
  Sense strand starting at position 466 of SEQ ID NO: 588262
uggugaucuccaggacuca

SEQ ID NO: 852993 - RNA, 19 nt, Artificial Sequence
  Description of Artificial Sequence: Synthetic oligonucleotide
  Antisense strand to SEQ ID NO: 852992
ugaguccuggagaucacca

SEQ ID NO: 852994 - RNA, 19 nt, Artificial Sequence
  Description of Artificial Sequence: Synthetic oligonucleotide
  Sense strand starting at position 528 of SEQ ID NO: 588262
gagacaugggucugaguag

SEQ ID NO: 852995 - RNA, 19 nt, Artificial Sequence
  Description of Artificial Sequence: Synthetic oligonucleotide
  Antisense strand to SEQ ID NO: 852994
cuacucagacccaugucuc

SEQ ID NO: 852996 - RNA, 19 nt, Artificial Sequence
  Description of Artificial Sequence: Synthetic oligonucleotide
  Sense strand starting at position 918 of SEQ ID NO: 588262
ggcccauccuuccaaguua

SEQ ID NO: 852997 - RNA, 19 nt, Artificial Sequence
  Description of Artificial Sequence: Synthetic oligonucleotide
  Antisense strand to SEQ ID NO: 852996
uaacuuggaaggaugggcc

SEQ ID NO: 852998 - RNA, 19 nt, Artificial Sequence
  Description of Artificial Sequence: Synthetic oligonucleotide
  Sense strand starting at position 1879 of SEQ ID NO: 588262
uacaguccgucaggaguuu

SEQ ID NO: 852999 - RNA, 19 nt, Artificial Sequence
  Description of Artificial Sequence: Synthetic oligonucleotide
  Antisense strand to SEQ ID NO: 852998
aaacuccugacggacugua

SEQ ID NO: 853000 - RNA, 19 nt, Artificial Sequence
  Description of Artificial Sequence: Synthetic oligonucleotide
  Sense strand starting at position 1946 of SEQ ID NO: 588262
agauuuggcuaaggaagga

SEQ ID NO: 853001 - RNA, 19 nt, Artificial Sequence
  Description of Artificial Sequence: Synthetic oligonucleotide
  Antisense strand to SEQ ID NO: 853000
uccuuccuuagccaaaucu

SEQ ID NO: 853002 - RNA, 19 nt, Artificial Sequence
  Description of Artificial Sequence: Synthetic oligonucleotide
  Sense strand starting at position 2014 of SEQ ID NO: 588262
gggcgcuuccgccuguaau

SEQ ID NO: 853003 - RNA, 19 nt, Artificial Sequence
  Description of Artificial Sequence: Synthetic oligonucleotide
  Antisense strand to SEQ ID NO: 853002
auuacaggcggaagcgccc

SEQ ID NO: 853004 - RNA, 19 nt, Artificial Sequence
  Description of Artificial Sequence: Synthetic oligonucleotide
  Sense strand starting at position 2015 of SEQ ID NO: 588262
ggcgcuuccgccuguaauc

SEQ ID NO: 853005 - RNA, 19 nt, Artificial Sequence
  Description of Artificial Sequence: Synthetic oligonucleotide
  Antisense strand to SEQ ID NO: 853004
gauuacaggcggaagcgcc

SEQ ID NO: 853006 - RNA, 19 nt, Artificial Sequence
  Description of Artificial Sequence: Synthetic oligonucleotide
  Sense strand starting at position 2016 of SEQ ID NO: 588262
gcgcuuccgccuguaaucu

SEQ ID NO: 853007 - RNA, 19 nt, Artificial Sequence
  Description of Artificial Sequence: Synthetic oligonucleotide
  Antisense strand to SEQ ID NO: 853006
agauuacaggcggaagcgc

SEQ ID NO: 853008 - RNA, 19 nt, Artificial Sequence
  Description of Artificial Sequence: Synthetic oligonucleotide
  Sense strand starting at position 2393 of SEQ ID NO: 588262
ccguaacaauccuuggcua

SEQ ID NO: 853009 - RNA, 19 nt, Artificial Sequence
  Description of Artificial Sequence: Synthetic oligonucleotide
  Antisense strand to SEQ ID NO: 853008
uagccaaggauuguuacgg

SEQ ID NO: 853010 - RNA, 19 nt, Artificial Sequence
  Description of Artificial Sequence: Synthetic oligonucleotide
  Sense strand starting at position 2395 of SEQ ID NO: 588262
guaacaauccuuggcuacu

SEQ ID NO: 853011 - RNA, 19 nt, Artificial Sequence
  Description of Artificial Sequence: Synthetic oligonucleotide
  Antisense strand to SEQ ID NO: 853010
aguagccaaggauuguuac

SEQ ID NO: 853012 - RNA, 19 nt, Artificial Sequence
  Description of Artificial Sequence: Synthetic oligonucleotide
  Sense strand starting at position 2408 of SEQ ID NO: 588262
gcuacuaaguaguaauucu

SEQ ID NO: 853013 - RNA, 19 nt, Artificial Sequence
  Description of Artificial Sequence: Synthetic oligonucleotide
  Antisense strand to SEQ ID NO: 853012
agaauuacuacuuaguagc

SEQ ID NO: 853014 - RNA, 19 nt, Artificial Sequence
  Description of Artificial Sequence: Synthetic oligonucleotide
  Sense strand starting at position 2550 of SEQ ID NO: 588262
cgccucagcuuccagaaua

SEQ ID NO: 853015 - RNA, 19 nt, Artificial Sequence
  Description of Artificial Sequence: Synthetic oligonucleotide
  Antisense strand to SEQ ID NO: 853014
uauucuggaagcugaggcg

SEQ ID NO: 853016 - RNA, 19 nt, Artificial Sequence
  Description of Artificial Sequence: Synthetic oligonucleotide
  Sense strand starting at position 2723 of SEQ ID NO: 588262
gccaccucuccuggacuaa

SEQ ID NO: 853017 - RNA, 19 nt, Artificial Sequence
  Description of Artificial Sequence: Synthetic oligonucleotide
  Antisense strand to SEQ ID NO: 853016
uuaguccaggagagguggc

SEQ ID NO: 853018 - RNA, 19 nt, Artificial Sequence
  Description of Artificial Sequence: Synthetic oligonucleotide
  Sense strand starting at position 2774 of SEQ ID NO: 588262
cugccuugugcgugucaca

SEQ ID NO: 853019 - RNA, 19 nt, Artificial Sequence
  Description of Artificial Sequence: Synthetic oligonucleotide
  Antisense strand to SEQ ID NO: 853018
ugugacacgcacaaggcag

SEQ ID NO: 853020 - RNA, 19 nt, Artificial Sequence
  Description of Artificial Sequence: Synthetic oligonucleotide
  Sense strand starting at position 2910 of SEQ ID NO: 588262
agcagaauucgcgcgucca

SEQ ID NO: 853021 - RNA, 19 nt, Artificial Sequence
  Description of Artificial Sequence: Synthetic oligonucleotide
  Antisense strand to SEQ ID NO: 853020
uggacgcgcgaauucugcu

SEQ ID NO: 853022 - RNA, 19 nt, Artificial Sequence
  Description of Artificial Sequence: Synthetic oligonucleotide
  Sense strand starting at position 2911 of SEQ ID NO: 588262
gcagaauucgcgcguccau

SEQ ID NO: 853023 - RNA, 19 nt, Artificial Sequence
  Description of Artificial Sequence: Synthetic oligonucleotide
  Antisense strand to SEQ ID NO: 853022
auggacgcgcgaauucugc

SEQ ID NO: 853024 - RNA, 19 nt, Artificial Sequence
  Description of Artificial Sequence: Synthetic oligonucleotide
  Sense strand starting at position 2912 of SEQ ID NO: 588262
cagaauucgcgcguccaua

SEQ ID NO: 853025 - RNA, 19 nt, Artificial Sequence
  Description of Artificial Sequence: Synthetic oligonucleotide
  Antisense strand to SEQ ID NO: 853024
uauggacgcgcgaauucug

SEQ ID NO: 853026 - RNA, 19 nt, Artificial Sequence
  Description of Artificial Sequence: Synthetic oligonucleotide
  Sense strand starting at position 2913 of SEQ ID NO: 588262
agaauucgcgcguccauaa

SEQ ID NO: 853027 - RNA, 19 nt, Artificial Sequence
  Description of Artificial Sequence: Synthetic oligonucleotide
  Antisense strand to SEQ ID NO: 853026
uuauggacgcgcgaauucu

SEQ ID NO: 853028 - RNA, 19 nt, Artificial Sequence
  Description of Artificial Sequence: Synthetic oligonucleotide
  Sense strand starting at position 2914 of SEQ ID NO: 588262
gaauucgcgcguccauaaa

SEQ ID NO: 853029 - RNA, 19 nt, Artificial Sequence
  Description of Artificial Sequence: Synthetic oligonucleotide
  Antisense strand to SEQ ID NO: 853028
uuuauggacgcgcgaauuc

SEQ ID NO: 853030 - RNA, 19 nt, Artificial Sequence
  Description of Artificial Sequence: Synthetic oligonucleotide
  Sense strand starting at position 3019 of SEQ ID NO: 588262
cuggacuagucguggaaga

SEQ ID NO: 853031 - RNA, 19 nt, Artificial Sequence
  Description of Artificial Sequence: Synthetic oligonucleotide
  Antisense strand to SEQ ID NO: 853030
ucuuccacgacuaguccag

SEQ ID NO: 853032 - RNA, 19 nt, Artificial Sequence
  Description of Artificial Sequence: Synthetic oligonucleotide
  Sense strand starting at position 3030 of SEQ ID NO: 588262
guggaagagcuaggacuua

SEQ ID NO: 853033 - RNA, 19 nt, Artificial Sequence
  Description of Artificial Sequence: Synthetic oligonucleotide
  Antisense strand to SEQ ID NO: 853032
uaaguccuagcucuuccac

SEQ ID NO: 853034 - RNA, 19 nt, Artificial Sequence
  Description of Artificial Sequence: Synthetic oligonucleotide
  Sense strand starting at position 3151 of SEQ ID NO: 588262
uucgaaugcugggcugaga

SEQ ID NO: 853035 - RNA, 19 nt, Artificial Sequence
  Description of Artificial Sequence: Synthetic oligonucleotide
  Antisense strand to SEQ ID NO: 853034
ucucagcccagcauucgaa

SEQ ID NO: 853036 - RNA, 19 nt, Artificial Sequence
  Description of Artificial Sequence: Synthetic oligonucleotide
  Sense strand starting at position 3162 of SEQ ID NO: 588262
ggcugagaaguaggcuuua

SEQ ID NO: 853037 - RNA, 19 nt, Artificial Sequence
  Description of Artificial Sequence: Synthetic oligonucleotide
  Antisense strand to SEQ ID NO: 853036
uaaagccuacuucucagcc

SEQ ID NO: 853038 - RNA, 19 nt, Artificial Sequence
  Description of Artificial Sequence: Synthetic oligonucleotide
  Sense strand starting at position 3174 of SEQ ID NO: 588262
ggcuuuauccucuaagggu

SEQ ID NO: 853039 - RNA, 19 nt, Artificial Sequence
  Description of Artificial Sequence: Synthetic oligonucleotide
  Antisense strand to SEQ ID NO: 853038
acccuuagaggauaaagcc

SEQ ID NO: 853040 - RNA, 19 nt, Artificial Sequence
  Description of Artificial Sequence: Synthetic oligonucleotide
  Sense strand starting at position 3209 of SEQ ID NO: 588262
gggugugaaccucaugagu

SEQ ID NO: 853041 - RNA, 19 nt, Artificial Sequence
  Description of Artificial Sequence: Synthetic oligonucleotide
  Antisense strand to SEQ ID NO: 853040
acucaugagguucacaccc

SEQ ID NO: 853042 - RNA, 19 nt, Artificial Sequence
  Description of Artificial Sequence: Synthetic oligonucleotide
  Sense strand starting at position 3211 of SEQ ID NO: 588262
gugugaaccucaugaguga

SEQ ID NO: 853043 - RNA, 19 nt, Artificial Sequence
  Description of Artificial Sequence: Synthetic oligonucleotide
  Antisense strand to SEQ ID NO: 853042
ucacucaugagguucacac

SEQ ID NO: 853044 - RNA, 19 nt, Artificial Sequence
  Description of Artificial Sequence: Synthetic oligonucleotide
  Sense strand starting at position 3224 of SEQ ID NO: 588262
gagugacagcaucaaaucu

SEQ ID NO: 853045 - RNA, 19 nt, Artificial Sequence
  Description of Artificial Sequence: Synthetic oligonucleotide
  Antisense strand to SEQ ID NO: 853044
agauuugaugcugucacuc

SEQ ID NO: 853046 - RNA, 19 nt, Artificial Sequence
  Description of Artificial Sequence: Synthetic oligonucleotide
  Sense strand starting at position 3654 of SEQ ID NO: 588262
caccuugaucugggugcua

SEQ ID NO: 853047 - RNA, 19 nt, Artificial Sequence
  Description of Artificial Sequence: Synthetic oligonucleotide
  Antisense strand to SEQ ID NO: 853046
uagcacccagaucaaggug

SEQ ID NO: 853048 - RNA, 19 nt, Artificial Sequence
  Description of Artificial Sequence: Synthetic oligonucleotide
  Sense strand starting at position 3686 of SEQ ID NO: 588262
ccaggauugaaucgugacu

SEQ ID NO: 853049 - RNA, 19 nt, Artificial Sequence
  Description of Artificial Sequence: Synthetic oligonucleotide
  Antisense strand to SEQ ID NO: 853048
agucacgauucaauccugg

SEQ ID NO: 853050 - RNA, 19 nt, Artificial Sequence
  Description of Artificial Sequence: Synthetic oligonucleotide
  Sense strand starting at position 3753 of SEQ ID NO: 588262
cugguuuccuccuugguga

SEQ ID NO: 853051 - RNA, 19 nt, Artificial Sequence
  Description of Artificial Sequence: Synthetic oligonucleotide
  Antisense strand to SEQ ID NO: 853050
ucaccaaggaggaaaccag

SEQ ID NO: 853052 - RNA, 19 nt, Artificial Sequence
  Description of Artificial Sequence: Synthetic oligonucleotide
  Sense strand starting at position 3793 of SEQ ID NO: 588262
ugguaaggaugacauuaca

SEQ ID NO: 853053 - RNA, 19 nt, Artificial Sequence
  Description of Artificial Sequence: Synthetic oligonucleotide
  Antisense strand to SEQ ID NO: 853052
uguaaugucauccuuacca

SEQ ID NO: 853054 - RNA, 19 nt, Artificial Sequence
  Description of Artificial Sequence: Synthetic oligonucleotide
  Sense strand starting at position 3910 of SEQ ID NO: 588262
gcacuaacuuccuguguug

SEQ ID NO: 853055 - RNA, 19 nt, Artificial Sequence
  Description of Artificial Sequence: Synthetic oligonucleotide
  Antisense strand to SEQ ID NO: 853054
caacacaggaaguuagugc

SEQ ID NO: 853056 - RNA, 19 nt, Artificial Sequence
  Description of Artificial Sequence: Synthetic oligonucleotide
  Sense strand starting at position 3928 of SEQ ID NO: 588262
gguucaucuuucugggaag

SEQ ID NO: 853057 - RNA, 19 nt, Artificial Sequence
  Description of Artificial Sequence: Synthetic oligonucleotide
  Antisense strand to SEQ ID NO: 853056
cuucccagaaagaugaacc

SEQ ID NO: 853058 - RNA, 19 nt, Artificial Sequence
  Description of Artificial Sequence: Synthetic oligonucleotide
  Sense strand starting at position 3931 of SEQ ID NO: 588262
ucaucuuucugggaagcaa

SEQ ID NO: 853059 - RNA, 19 nt, Artificial Sequence
  Description of Artificial Sequence: Synthetic oligonucleotide
  Antisense strand to SEQ ID NO: 853058
uugcuucccagaaagauga

SEQ ID NO: 853060 - RNA, 19 nt, Artificial Sequence
  Description of Artificial Sequence: Synthetic oligonucleotide
  Sense strand starting at position 3965 of SEQ ID NO: 588262
ucaagaaucuugggccgau

SEQ ID NO: 853061 - RNA, 19 nt, Artificial Sequence
  Description of Artificial Sequence: Synthetic oligonucleotide
  Antisense strand to SEQ ID NO: 853060
aucggcccaagauucuuga

SEQ ID NO: 853062 - RNA, 19 nt, Artificial Sequence
  Description of Artificial Sequence: Synthetic oligonucleotide
  Sense strand starting at position 29 of SEQ ID NO: 588263
gccuuagugcuauauuauu

SEQ ID NO: 853063 - RNA, 19 nt, Artificial Sequence
  Description of Artificial Sequence: Synthetic oligonucleotide
  Antisense strand to SEQ ID NO: 853062
aauaauauagcacuaaggc

SEQ ID NO: 853064 - RNA, 19 nt, Artificial Sequence
  Description of Artificial Sequence: Synthetic oligonucleotide
  Sense strand starting at position 75 of SEQ ID NO: 588263
ggaaauuacuauccuguuu

SEQ ID NO: 853065 - RNA, 19 nt, Artificial Sequence
  Description of Artificial Sequence: Synthetic oligonucleotide
  Antisense strand to SEQ ID NO: 853064
aaacaggauaguaauuucc

SEQ ID NO: 853066 - RNA, 19 nt, Artificial Sequence
  Description of Artificial Sequence: Synthetic oligonucleotide
  Sense strand starting at position 371 of SEQ ID NO: 588263
uuaguaagauuauuacggu

SEQ ID NO: 853067 - RNA, 19 nt, Artificial Sequence
  Description of Artificial Sequence: Synthetic oligonucleotide
  Antisense strand to SEQ ID NO: 853066
accguaauaaucuuacuaa

SEQ ID NO: 853068 - RNA, 19 nt, Artificial Sequence
  Description of Artificial Sequence: Synthetic oligonucleotide
  Sense strand starting at position 428 of SEQ ID NO: 588263
cuugauuaacaucgcauaa

SEQ ID NO: 853069 - RNA, 19 nt, Artificial Sequence
  Description of Artificial Sequence: Synthetic oligonucleotide
  Antisense strand to SEQ ID NO: 853068
uuaugcgauguuaaucaag

SEQ ID NO: 853070 - RNA, 19 nt, Artificial Sequence
  Description of Artificial Sequence: Synthetic oligonucleotide
  Sense strand starting at position 432 of SEQ ID NO: 588263
auuaacaucgcauaauuga

SEQ ID NO: 853071 - RNA, 19 nt, Artificial Sequence
  Description of Artificial Sequence: Synthetic oligonucleotide
  Antisense strand to SEQ ID NO: 853070
ucaauuaugcgauguuaau

SEQ ID NO: 853072 - RNA, 19 nt, Artificial Sequence
  Description of Artificial Sequence: Synthetic oligonucleotide
  Sense strand starting at position 459 of SEQ ID NO: 588263
agcauauuacacgaguaua

SEQ ID NO: 853073 - RNA, 19 nt, Artificial Sequence
  Description of Artificial Sequence: Synthetic oligonucleotide
  Antisense strand to SEQ ID NO: 853072
uauacucguguaauaugcu

SEQ ID NO: 853074 - RNA, 19 nt, Artificial Sequence
  Description of Artificial Sequence: Synthetic oligonucleotide
  Sense strand starting at position 462 of SEQ ID NO: 588263
auauuacacgaguauaguu

SEQ ID NO: 853075 - RNA, 19 nt, Artificial Sequence
  Description of Artificial Sequence: Synthetic oligonucleotide
  Antisense strand to SEQ ID NO: 853074
aacuauacucguguaauau

SEQ ID NO: 853076 - RNA, 19 nt, Artificial Sequence
  Description of Artificial Sequence: Synthetic oligonucleotide
  Sense strand starting at position 467 of SEQ ID NO: 588263
acacgaguauaguuuauua

SEQ ID NO: 853077 - RNA, 19 nt, Artificial Sequence
  Description of Artificial Sequence: Synthetic oligonucleotide
  Antisense strand to SEQ ID NO: 853076
uaauaaacuauacucgugu

SEQ ID NO: 853078 - RNA, 19 nt, Artificial Sequence
  Description of Artificial Sequence: Synthetic oligonucleotide
  Sense strand starting at position 685 of SEQ ID NO: 588263
uaaauagcauucggagaaa

SEQ ID NO: 853079 - RNA, 19 nt, Artificial Sequence
  Description of Artificial Sequence: Synthetic oligonucleotide
  Antisense strand to SEQ ID NO: 853078
uuucuccgaaugcuauuua

SEQ ID NO: 853080 - RNA, 19 nt, Artificial Sequence
  Description of Artificial Sequence: Synthetic oligonucleotide
  Sense strand starting at position 688 of SEQ ID NO: 588263
auagcauucggagaaaucu

SEQ ID NO: 853081 - RNA, 19 nt, Artificial Sequence
  Description of Artificial Sequence: Synthetic oligonucleotide
  Antisense strand to SEQ ID NO: 853080
agauuucuccgaaugcuau

SEQ ID NO: 853082 - RNA, 19 nt, Artificial Sequence
  Description of Artificial Sequence: Synthetic oligonucleotide
  Sense strand starting at position 774 of SEQ ID NO: 588263
cccuaaaucuugguaguau

SEQ ID NO: 853083 - RNA, 19 nt, Artificial Sequence
  Description of Artificial Sequence: Synthetic oligonucleotide
  Antisense strand to SEQ ID NO: 853082
auacuaccaagauuuaggg

SEQ ID NO: 853084 - RNA, 19 nt, Artificial Sequence
  Description of Artificial Sequence: Synthetic oligonucleotide
  Sense strand starting at position 785 of SEQ ID NO: 588263
gguaguaucccagaacgca

SEQ ID NO: 853085 - RNA, 19 nt, Artificial Sequence
  Description of Artificial Sequence: Synthetic oligonucleotide
  Antisense strand to SEQ ID NO: 853084
ugcguucugggauacuacc

SEQ ID NO: 853086 - RNA, 19 nt, Artificial Sequence
  Description of Artificial Sequence: Synthetic oligonucleotide
  Sense strand starting at position 808 of SEQ ID NO: 588263
ucuagucgcuaccuaguua

SEQ ID NO: 853087 - RNA, 19 nt, Artificial Sequence
  Description of Artificial Sequence: Synthetic oligonucleotide
  Antisense strand to SEQ ID NO: 853086
uaacuagguagcgacuaga

SEQ ID NO: 853088 - RNA, 19 nt, Artificial Sequence
  Description of Artificial Sequence: Synthetic oligonucleotide
  Sense strand starting at position 812 of SEQ ID NO: 588263
gucgcuaccuaguuaagaa

SEQ ID NO: 853089 - RNA, 19 nt, Artificial Sequence
  Description of Artificial Sequence: Synthetic oligonucleotide
  Antisense strand to SEQ ID NO: 853088
uucuuaacuagguagcgac

SEQ ID NO: 853090 - RNA, 19 nt, Artificial Sequence
  Description of Artificial Sequence: Synthetic oligonucleotide
  Sense strand starting at position 867 of SEQ ID NO: 588263
ugaagugucccgcauacag

SEQ ID NO: 853091 - RNA, 19 nt, Artificial Sequence
  Description of Artificial Sequence: Synthetic oligonucleotide
  Antisense strand to SEQ ID NO: 853090
cuguaugcgggacacuuca

SEQ ID NO: 853092 - RNA, 19 nt, Artificial Sequence
  Description of Artificial Sequence: Synthetic oligonucleotide
  Sense strand starting at position 869 of SEQ ID NO: 588263
aagugucccgcauacagua

SEQ ID NO: 853093 - RNA, 19 nt, Artificial Sequence
  Description of Artificial Sequence: Synthetic oligonucleotide
  Antisense strand to SEQ ID NO: 853092
uacuguaugcgggacacuu

SEQ ID NO: 853094 - RNA, 19 nt, Artificial Sequence
  Description of Artificial Sequence: Synthetic oligonucleotide
  Sense strand starting at position 1103 of SEQ ID NO: 588263
aguucuuaaucggccuuaa

SEQ ID NO: 853095 - RNA, 19 nt, Artificial Sequence
  Description of Artificial Sequence: Synthetic oligonucleotide
  Antisense strand to SEQ ID NO: 853094
uuaaggccgauuaagaacu

SEQ ID NO: 853096 - RNA, 19 nt, Artificial Sequence
  Description of Artificial Sequence: Synthetic oligonucleotide
  Sense strand starting at position 1149 of SEQ ID NO: 588263
auuguaugacugcggcuaa

SEQ ID NO: 853097 - RNA, 19 nt, Artificial Sequence
  Description of Artificial Sequence: Synthetic oligonucleotide
  Antisense strand to SEQ ID NO: 853096
uuagccgcagucauacaau

SEQ ID NO: 853098 - RNA, 19 nt, Artificial Sequence
  Description of Artificial Sequence: Synthetic oligonucleotide
  Sense strand starting at position 1290 of SEQ ID NO: 588263
aaguguuccucuguguuaa

SEQ ID NO: 853099 - RNA, 19 nt, Artificial Sequence
  Description of Artificial Sequence: Synthetic oligonucleotide
  Antisense strand to SEQ ID NO: 853098
uuaacacagaggaacacuu

SEQ ID NO: 853100 - RNA, 19 nt, Artificial Sequence
  Description of Artificial Sequence: Synthetic oligonucleotide
  Sense strand starting at position 1291 of SEQ ID NO: 588263
aguguuccucuguguuaac

SEQ ID NO: 853101 - RNA, 19 nt, Artificial Sequence
  Description of Artificial Sequence: Synthetic oligonucleotide
  Antisense strand to SEQ ID NO: 853100
guuaacacagaggaacacu

SEQ ID NO: 853102 - RNA, 19 nt, Artificial Sequence
  Description of Artificial Sequence: Synthetic oligonucleotide
  Sense strand starting at position 1383 of SEQ ID NO: 588263
aagugugucacgguugcua

SEQ ID NO: 853103 - RNA, 19 nt, Artificial Sequence
  Description of Artificial Sequence: Synthetic oligonucleotide
  Antisense strand to SEQ ID NO: 853102
uagcaaccgugacacacuu

SEQ ID NO: 853104 - RNA, 19 nt, Artificial Sequence
  Description of Artificial Sequence: Synthetic oligonucleotide
  Sense strand starting at position 1385 of SEQ ID NO: 588263
gugugucacgguugcuaaa

SEQ ID NO: 853105 - RNA, 19 nt, Artificial Sequence
  Description of Artificial Sequence: Synthetic oligonucleotide
  Antisense strand to SEQ ID NO: 853104
uuuagcaaccgugacacac

SEQ ID NO: 853106 - RNA, 19 nt, Artificial Sequence
  Description of Artificial Sequence: Synthetic oligonucleotide
  Sense strand starting at position 2012 of SEQ ID NO: 588263
gucccaacgauccggauuu

SEQ ID NO: 853107 - RNA, 19 nt, Artificial Sequence
  Description of Artificial Sequence: Synthetic oligonucleotide
  Antisense strand to SEQ ID NO: 853106
aaauccggaucguugggac

SEQ ID NO: 853108 - RNA, 19 nt, Artificial Sequence
  Description of Artificial Sequence: Synthetic oligonucleotide
  Sense strand starting at position 2165 of SEQ ID NO: 588263
gcgagguugcccgagggaa

SEQ ID NO: 853109 - RNA, 19 nt, Artificial Sequence
  Description of Artificial Sequence: Synthetic oligonucleotide
  Antisense strand to SEQ ID NO: 853108
uucccucgggcaaccucgc

SEQ ID NO: 853110 - RNA, 19 nt, Artificial Sequence
  Description of Artificial Sequence: Synthetic oligonucleotide
  Sense strand starting at position 2241 of SEQ ID NO: 588263
gggcgaagucgggacguua

SEQ ID NO: 853111 - RNA, 19 nt, Artificial Sequence
  Description of Artificial Sequence: Synthetic oligonucleotide
  Antisense strand to SEQ ID NO: 853110
uaacgucccgacuucgccc

SEQ ID NO: 853112 - RNA, 19 nt, Artificial Sequence
  Description of Artificial Sequence: Synthetic oligonucleotide
  Sense strand starting at position 2286 of SEQ ID NO: 588263
cguggaaaguuccaggaca

SEQ ID NO: 853113 - RNA, 19 nt, Artificial Sequence
  Description of Artificial Sequence: Synthetic oligonucleotide
  Antisense strand to SEQ ID NO: 853112
uguccuggaacuuuccacg

SEQ ID NO: 853114 - RNA, 19 nt, Artificial Sequence
  Description of Artificial Sequence: Synthetic oligonucleotide
  Sense strand starting at position 2893 of SEQ ID NO: 588263
gaaugcuuucuguagccua

SEQ ID NO: 853115 - RNA, 19 nt, Artificial Sequence
  Description of Artificial Sequence: Synthetic oligonucleotide
  Antisense strand to SEQ ID NO: 853114
uaggcuacagaaagcauuc

SEQ ID NO: 853116 - RNA, 19 nt, Artificial Sequence
  Description of Artificial Sequence: Synthetic oligonucleotide
  Sense strand starting at position 2946 of SEQ ID NO: 588263
uggaaagcuugagggaaua

SEQ ID NO: 853117 - RNA, 19 nt, Artificial Sequence
  Description of Artificial Sequence: Synthetic oligonucleotide
  Antisense strand to SEQ ID NO: 853116
uauucccucaagcuuucca

SEQ ID NO: 853118 - RNA, 19 nt, Artificial Sequence
  Description of Artificial Sequence: Synthetic oligonucleotide
  Sense strand starting at position 2973 of SEQ ID NO: 588263
uucugcugcggccaagaau

SEQ ID NO: 853119 - RNA, 19 nt, Artificial Sequence
  Description of Artificial Sequence: Synthetic oligonucleotide
  Antisense strand to SEQ ID NO: 853118
auucuuggccgcagcagaa

SEQ ID NO: 853120 - RNA, 19 nt, Artificial Sequence
  Description of Artificial Sequence: Synthetic oligonucleotide
  Sense strand starting at position 2996 of SEQ ID NO: 588263
augcuaauuccuggauaag

SEQ ID NO: 853121 - RNA, 19 nt, Artificial Sequence
  Description of Artificial Sequence: Synthetic oligonucleotide
  Antisense strand to SEQ ID NO: 853120
cuuauccaggaauuagcau

SEQ ID NO: 853122 - RNA, 19 nt, Artificial Sequence
  Description of Artificial Sequence: Synthetic oligonucleotide
  Sense strand starting at position 3111 of SEQ ID NO: 588263
aauguaacuggugguuauu

SEQ ID NO: 853123 - RNA, 19 nt, Artificial Sequence
  Description of Artificial Sequence: Synthetic oligonucleotide
  Antisense strand to SEQ ID NO: 853122
aauaaccaccaguuacauu

SEQ ID NO: 853124 - RNA, 19 nt, Artificial Sequence
  Description of Artificial Sequence: Synthetic oligonucleotide
  Sense strand starting at position 3214 of SEQ ID NO: 588263
cgaaaugcuccagcgcagu

SEQ ID NO: 853125 - RNA, 19 nt, Artificial Sequence
  Description of Artificial Sequence: Synthetic oligonucleotide
  Antisense strand to SEQ ID NO: 853124
acugcgcuggagcauuucg

SEQ ID NO: 853126 - RNA, 19 nt, Artificial Sequence
  Description of Artificial Sequence: Synthetic oligonucleotide
  Sense strand starting at position 3251 of SEQ ID NO: 588263
gguggcugugacuaaguaa

SEQ ID NO: 853127 - RNA, 19 nt, Artificial Sequence
  Description of Artificial Sequence: Synthetic oligonucleotide
  Antisense strand to SEQ ID NO: 853126
uuacuuagucacagccacc

SEQ ID NO: 853128 - RNA, 19 nt, Artificial Sequence
  Description of Artificial Sequence: Synthetic oligonucleotide
  Sense strand starting at position 3287 of SEQ ID NO: 588263
agacaaaguuuccagacua

SEQ ID NO: 853129 - RNA, 19 nt, Artificial Sequence
  Description of Artificial Sequence: Synthetic oligonucleotide
  Antisense strand to SEQ ID NO: 853128
uagucuggaaacuuugucu

SEQ ID NO: 853130 - RNA, 19 nt, Artificial Sequence
  Description of Artificial Sequence: Synthetic oligonucleotide
  Sense strand starting at position 3363 of SEQ ID NO: 588263
ccgguuucugaacaaguga

SEQ ID NO: 853131 - RNA, 19 nt, Artificial Sequence
  Description of Artificial Sequence: Synthetic oligonucleotide
  Antisense strand to SEQ ID NO: 853130
ucacuuguucagaaaccgg

SEQ ID NO: 853132 - RNA, 19 nt, Artificial Sequence
  Description of Artificial Sequence: Synthetic oligonucleotide
  Sense strand starting at position 3402 of SEQ ID NO: 588263
uuauaaucuccauggguga

SEQ ID NO: 853133 - RNA, 19 nt, Artificial Sequence
  Description of Artificial Sequence: Synthetic oligonucleotide
  Antisense strand to SEQ ID NO: 853132
ucacccauggagauuauaa

SEQ ID NO: 853134 - RNA, 19 nt, Artificial Sequence
  Description of Artificial Sequence: Synthetic oligonucleotide
  Sense strand starting at position 3504 of SEQ ID NO: 588263
ggaagaggguguuuggaau

SEQ ID NO: 853135 - RNA, 19 nt, Artificial Sequence
  Description of Artificial Sequence: Synthetic oligonucleotide
  Antisense strand to SEQ ID NO: 853134
auuccaaacacccucuucc

SEQ ID NO: 853136 - RNA, 19 nt, Artificial Sequence
  Description of Artificial Sequence: Synthetic oligonucleotide
  Sense strand starting at position 3774 of SEQ ID NO: 588263
aagugcugggaucgucaga

SEQ ID NO: 853137 - RNA, 19 nt, Artificial Sequence
  Description of Artificial Sequence: Synthetic oligonucleotide
  Antisense strand to SEQ ID NO: 853136
ucugacgaucccagcacuu

SEQ ID NO: 853138 - RNA, 19 nt, Artificial Sequence
  Description of Artificial Sequence: Synthetic oligonucleotide
  Sense strand starting at position 3931 of SEQ ID NO: 588263
uaaagaccuuguugaugaa

SEQ ID NO: 853139 - RNA, 19 nt, Artificial Sequence
  Description of Artificial Sequence: Synthetic oligonucleotide
  Antisense strand to SEQ ID NO: 853138
uucaucaacaaggucuuua

SEQ ID NO: 853140 - RNA, 19 nt, Artificial Sequence
  Description of Artificial Sequence: Synthetic oligonucleotide
  Sense strand starting at position 3934 of SEQ ID NO: 588263
agaccuuguugaugaaaca

SEQ ID NO: 853141 - RNA, 19 nt, Artificial Sequence
  Description of Artificial Sequence: Synthetic oligonucleotide
  Antisense strand to SEQ ID NO: 853140
uguuucaucaacaaggucu

SEQ ID NO: 853142 - RNA, 19 nt, Artificial Sequence
  Description of Artificial Sequence: Synthetic oligonucleotide
  Sense strand starting at position 14 of SEQ ID NO: 588264
ggaagugaucccgagaccu

SEQ ID NO: 853143 - RNA, 19 nt, Artificial Sequence
  Description of Artificial Sequence: Synthetic oligonucleotide
  Antisense strand to SEQ ID NO: 853142
aggucucgggaucacuucc

SEQ ID NO: 853144 - RNA, 19 nt, Artificial Sequence
  Description of Artificial Sequence: Synthetic oligonucleotide
  Sense strand starting at position 16 of SEQ ID NO: 588264
aagugaucccgagaccucu

SEQ ID NO: 853145 - RNA, 19 nt, Artificial Sequence
  Description of Artificial Sequence: Synthetic oligonucleotide
  Antisense strand to SEQ ID NO: 853144
agaggucucgggaucacuu

SEQ ID NO: 853146 - RNA, 19 nt, Artificial Sequence
  Description of Artificial Sequence: Synthetic oligonucleotide
  Sense strand starting at position 66 of SEQ ID NO: 588264
cgacaaagaugccuuuauu

SEQ ID NO: 853147 - RNA, 19 nt, Artificial Sequence
  Description of Artificial Sequence: Synthetic oligonucleotide
  Antisense strand to SEQ ID NO: 853146
aauaaaggcaucuuugucg

SEQ ID NO: 853148 - RNA, 19 nt, Artificial Sequence
  Description of Artificial Sequence: Synthetic oligonucleotide
  Sense strand starting at position 76 of SEQ ID NO: 588264
gccuuuauugggcgacaga

SEQ ID NO: 853149 - RNA, 19 nt, Artificial Sequence
  Description of Artificial Sequence: Synthetic oligonucleotide
  Antisense strand to SEQ ID NO: 853148
ucugucgcccaauaaaggc

SEQ ID NO: 853150 - RNA, 19 nt, Artificial Sequence
  Description of Artificial Sequence: Synthetic oligonucleotide
  Sense strand starting at position 158 of SEQ ID NO: 588264
ugcggacacguguauuuga

SEQ ID NO: 853151 - RNA, 19 nt, Artificial Sequence
  Description of Artificial Sequence: Synthetic oligonucleotide
  Antisense strand to SEQ ID NO: 853150
ucaaauacacguguccgca

SEQ ID NO: 853152 - RNA, 19 nt, Artificial Sequence
  Description of Artificial Sequence: Synthetic oligonucleotide
  Sense strand starting at position 638 of SEQ ID NO: 588264
ucuugaugaacgcggagaa

SEQ ID NO: 853153 - RNA, 19 nt, Artificial Sequence
  Description of Artificial Sequence: Synthetic oligonucleotide
  Antisense strand to SEQ ID NO: 853152
uucuccgcguucaucaaga

SEQ ID NO: 853154 - RNA, 19 nt, Artificial Sequence
  Description of Artificial Sequence: Synthetic oligonucleotide
  Sense strand starting at position 891 of SEQ ID NO: 588264
uccagaaaguccucgaucu

SEQ ID NO: 853155 - RNA, 19 nt, Artificial Sequence
  Description of Artificial Sequence: Synthetic oligonucleotide
  Antisense strand to SEQ ID NO: 853154
agaucgaggacuuucugga

SEQ ID NO: 853156 - RNA, 19 nt, Artificial Sequence
  Description of Artificial Sequence: Synthetic oligonucleotide
  Sense strand starting at position 892 of SEQ ID NO: 588264
ccagaaaguccucgaucug

SEQ ID NO: 853157 - RNA, 19 nt, Artificial Sequence
  Description of Artificial Sequence: Synthetic oligonucleotide
  Antisense strand to SEQ ID NO: 853156
cagaucgaggacuuucugg

SEQ ID NO: 853158 - RNA, 19 nt, Artificial Sequence
  Description of Artificial Sequence: Synthetic oligonucleotide
  Sense strand starting at position 1418 of SEQ ID NO: 588264
ccuggaaucuugucagagc

SEQ ID NO: 853159 - RNA, 19 nt, Artificial Sequence
  Description of Artificial Sequence: Synthetic oligonucleotide
  Antisense strand to SEQ ID NO: 853158
gcucugacaagauuccagg

SEQ ID NO: 853160 - RNA, 19 nt, Artificial Sequence
  Description of Artificial Sequence: Synthetic oligonucleotide
  Sense strand starting at position 1634 of SEQ ID NO: 588264
gaccguaagcuccacuguu

SEQ ID NO: 853161 - RNA, 19 nt, Artificial Sequence
  Description of Artificial Sequence: Synthetic oligonucleotide
  Antisense strand to SEQ ID NO: 853160
aacaguggagcuuacgguc

SEQ ID NO: 853162 - RNA, 19 nt, Artificial Sequence
  Description of Artificial Sequence: Synthetic oligonucleotide
  Sense strand starting at position 2402 of SEQ ID NO: 588264
gcucucccuuccgcaaaua

SEQ ID NO: 853163 - RNA, 19 nt, Artificial Sequence
  Description of Artificial Sequence: Synthetic oligonucleotide
  Antisense strand to SEQ ID NO: 853162
uauuugcggaagggagagc

SEQ ID NO: 853164 - RNA, 19 nt, Artificial Sequence
  Description of Artificial Sequence: Synthetic oligonucleotide
  Sense strand starting at position 2863 of SEQ ID NO: 588264
gugauuggaacccacaguu

SEQ ID NO: 853165 - RNA, 19 nt, Artificial Sequence
  Description of Artificial Sequence: Synthetic oligonucleotide
  Antisense strand to SEQ ID NO: 853164
aacuguggguuccaaucac

SEQ ID NO: 853166 - RNA, 19 nt, Artificial Sequence
  Description of Artificial Sequence: Synthetic oligonucleotide
  Sense strand starting at position 3168 of SEQ ID NO: 588264
gccugaugcuucucuggau

SEQ ID NO: 853167 - RNA, 19 nt, Artificial Sequence
  Description of Artificial Sequence: Synthetic oligonucleotide
  Antisense strand to SEQ ID NO: 853166
auccagagaagcaucaggc

SEQ ID NO: 853168 - RNA, 19 nt, Artificial Sequence
  Description of Artificial Sequence: Synthetic oligonucleotide
  Sense strand starting at position 3169 of SEQ ID NO: 588264
ccugaugcuucucuggaua

SEQ ID NO: 853169 - RNA, 19 nt, Artificial Sequence
  Description of Artificial Sequence: Synthetic oligonucleotide
  Antisense strand to SEQ ID NO: 853168
uauccagagaagcaucagg

SEQ ID NO: 853170 - RNA, 19 nt, Artificial Sequence
  Description of Artificial Sequence: Synthetic oligonucleotide
  Sense strand starting at position 3172 of SEQ ID NO: 588264
gaugcuucucuggauacca

SEQ ID NO: 853171 - RNA, 19 nt, Artificial Sequence
  Description of Artificial Sequence: Synthetic oligonucleotide
  Antisense strand to SEQ ID NO: 853170
ugguauccagagaagcauc

SEQ ID NO: 853172 - RNA, 19 nt, Artificial Sequence
  Description of Artificial Sequence: Synthetic oligonucleotide
  Sense strand starting at position 3209 of SEQ ID NO: 588264
gacacagagccuuggaaau

SEQ ID NO: 853173 - RNA, 19 nt, Artificial Sequence
  Description of Artificial Sequence: Synthetic oligonucleotide
  Antisense strand to SEQ ID NO: 853172
auuuccaaggcucuguguc

SEQ ID NO: 853174 - RNA, 19 nt, Artificial Sequence
  Description of Artificial Sequence: Synthetic oligonucleotide
  Sense strand starting at position 3321 of SEQ ID NO: 588264
ucuggacacugugguuaua

SEQ ID NO: 853175 - RNA, 19 nt, Artificial Sequence
  Description of Artificial Sequence: Synthetic oligonucleotide
  Antisense strand to SEQ ID NO: 853174
uauaaccacaguguccaga

SEQ ID NO: 853176 - RNA, 19 nt, Artificial Sequence
  Description of Artificial Sequence: Synthetic oligonucleotide
  Sense strand starting at position 3424 of SEQ ID NO: 588264
ccggcauccugugucuuua

SEQ ID NO: 853177 - RNA, 19 nt, Artificial Sequence
  Description of Artificial Sequence: Synthetic oligonucleotide
  Antisense strand to SEQ ID NO: 853176
uaaagacacaggaugccgg

SEQ ID NO: 853178 - RNA, 19 nt, Artificial Sequence
  Description of Artificial Sequence: Synthetic oligonucleotide
  Sense strand starting at position 3435 of SEQ ID NO: 588264
ugucuuuaacaccgacaga

SEQ ID NO: 853179 - RNA, 19 nt, Artificial Sequence
  Description of Artificial Sequence: Synthetic oligonucleotide
  Antisense strand to SEQ ID NO: 853178
ucugucgguguuaaagaca

SEQ ID NO: 853180 - RNA, 19 nt, Artificial Sequence
  Description of Artificial Sequence: Synthetic oligonucleotide
  Sense strand starting at position 3972 of SEQ ID NO: 588264
aguuguguccagggagaag

SEQ ID NO: 853181 - RNA, 19 nt, Artificial Sequence
  Description of Artificial Sequence: Synthetic oligonucleotide
  Antisense strand to SEQ ID NO: 853180
cuucucccuggacacaacu

SEQ ID NO: 853182 - RNA, 19 nt, Artificial Sequence
  Description of Artificial Sequence: Synthetic oligonucleotide
  Sense strand starting at position 69 of SEQ ID NO: 588265
cagaaugugguauauucua

SEQ ID NO: 853183 - RNA, 19 nt, Artificial Sequence
  Description of Artificial Sequence: Synthetic oligonucleotide
  Antisense strand to SEQ ID NO: 853182
uagaauauaccacauucug

SEQ ID NO: 853184 - RNA, 19 nt, Artificial Sequence
  Description of Artificial Sequence: Synthetic oligonucleotide
  Sense strand starting at position 81 of SEQ ID NO: 588265
uauucuaagaguggguaga

SEQ ID NO: 853185 - RNA, 19 nt, Artificial Sequence
  Description of Artificial Sequence: Synthetic oligonucleotide
  Antisense strand to SEQ ID NO: 853184
ucuacccacucuuagaaua

SEQ ID NO: 853186 - RNA, 19 nt, Artificial Sequence
  Description of Artificial Sequence: Synthetic oligonucleotide
  Sense strand starting at position 181 of SEQ ID NO: 588265
gguuaaacuaagggucuaa

SEQ ID NO: 853187 - RNA, 19 nt, Artificial Sequence
  Description of Artificial Sequence: Synthetic oligonucleotide
  Antisense strand to SEQ ID NO: 853186
uuagacccuuaguuuaacc

SEQ ID NO: 853188 - RNA, 19 nt, Artificial Sequence
  Description of Artificial Sequence: Synthetic oligonucleotide
  Sense strand starting at position 294 of SEQ ID NO: 588265
ccuaguuuaguccaaccua

SEQ ID NO: 853189 - RNA, 19 nt, Artificial Sequence
  Description of Artificial Sequence: Synthetic oligonucleotide
  Antisense strand to SEQ ID NO: 853188
uagguuggacuaaacuagg

SEQ ID NO: 853190 - RNA, 19 nt, Artificial Sequence
  Description of Artificial Sequence: Synthetic oligonucleotide
  Sense strand starting at position 326 of SEQ ID NO: 588265
ugcauauucgggcauauua

SEQ ID NO: 853191 - RNA, 19 nt, Artificial Sequence
  Description of Artificial Sequence: Synthetic oligonucleotide
  Antisense strand to SEQ ID NO: 853190
uaauaugcccgaauaugca

SEQ ID NO: 853192 - RNA, 19 nt, Artificial Sequence
  Description of Artificial Sequence: Synthetic oligonucleotide
  Sense strand starting at position 328 of SEQ ID NO: 588265
cauauucgggcauauuaca

SEQ ID NO: 853193 - RNA, 19 nt, Artificial Sequence
  Description of Artificial Sequence: Synthetic oligonucleotide
  Antisense strand to SEQ ID NO: 853192
uguaauaugcccgaauaug

SEQ ID NO: 853194 - RNA, 19 nt, Artificial Sequence
  Description of Artificial Sequence: Synthetic oligonucleotide
  Sense strand starting at position 474 of SEQ ID NO: 588265
ggcacaguaacuugagacu

SEQ ID NO: 853195 - RNA, 19 nt, Artificial Sequence
  Description of Artificial Sequence: Synthetic oligonucleotide
  Antisense strand to SEQ ID NO: 853194
agucucaaguuacugugcc

SEQ ID NO: 853196 - RNA, 19 nt, Artificial Sequence
  Description of Artificial Sequence: Synthetic oligonucleotide
  Sense strand starting at position 496 of SEQ ID NO: 588265
ggaucugaaugccuuuaca

SEQ ID NO: 853197 - RNA, 19 nt, Artificial Sequence
  Description of Artificial Sequence: Synthetic oligonucleotide
  Antisense strand to SEQ ID NO: 853196
uguaaaggcauucagaucc

SEQ ID NO: 853198 - RNA, 19 nt, Artificial Sequence
  Description of Artificial Sequence: Synthetic oligonucleotide
  Sense strand starting at position 629 of SEQ ID NO: 588265
gguagacacuacuccuaua

SEQ ID NO: 853199 - RNA, 19 nt, Artificial Sequence
  Description of Artificial Sequence: Synthetic oligonucleotide
  Antisense strand to SEQ ID NO: 853198
uauaggaguagugucuacc

SEQ ID NO: 853200 - RNA, 19 nt, Artificial Sequence
  Description of Artificial Sequence: Synthetic oligonucleotide
  Sense strand starting at position 741 of SEQ ID NO: 588265
uguauuauuaaguaggucu

SEQ ID NO: 853201 - RNA, 19 nt, Artificial Sequence
  Description of Artificial Sequence: Synthetic oligonucleotide
  Antisense strand to SEQ ID NO: 853200
agaccuacuuaauaauaca

SEQ ID NO: 853202 - RNA, 19 nt, Artificial Sequence
  Description of Artificial Sequence: Synthetic oligonucleotide
  Sense strand starting at position 791 of SEQ ID NO: 588265
gguuaaggcauccaaaggu

SEQ ID NO: 853203 - RNA, 19 nt, Artificial Sequence
  Description of Artificial Sequence: Synthetic oligonucleotide
  Antisense strand to SEQ ID NO: 853202
accuuuggaugccuuaacc

SEQ ID NO: 853204 - RNA, 19 nt, Artificial Sequence
  Description of Artificial Sequence: Synthetic oligonucleotide
  Sense strand starting at position 839 of SEQ ID NO: 588265
acuugaguuuggcugagaa

SEQ ID NO: 853205 - RNA, 19 nt, Artificial Sequence
  Description of Artificial Sequence: Synthetic oligonucleotide
  Antisense strand to SEQ ID NO: 853204
uucucagccaaacucaagu

SEQ ID NO: 853206 - RNA, 19 nt, Artificial Sequence
  Description of Artificial Sequence: Synthetic oligonucleotide
  Sense strand starting at position 841 of SEQ ID NO: 588265
uugaguuuggcugagaaca

SEQ ID NO: 853207 - RNA, 19 nt, Artificial Sequence
  Description of Artificial Sequence: Synthetic oligonucleotide
  Antisense strand to SEQ ID NO: 853206
uguucucagccaaacucaa

SEQ ID NO: 853208 - RNA, 19 nt, Artificial Sequence
  Description of Artificial Sequence: Synthetic oligonucleotide
  Sense strand starting at position 884 of SEQ ID NO: 588265
cccugauugguuuaggcua

SEQ ID NO: 853209 - RNA, 19 nt, Artificial Sequence
  Description of Artificial Sequence: Synthetic oligonucleotide
  Antisense strand to SEQ ID NO: 853208
uagccuaaaccaaucaggg

SEQ ID NO: 853210 - RNA, 19 nt, Artificial Sequence
  Description of Artificial Sequence: Synthetic oligonucleotide
  Sense strand starting at position 889 of SEQ ID NO: 588265
auugguuuaggcuaaucuu

SEQ ID NO: 853211 - RNA, 19 nt, Artificial Sequence
  Description of Artificial Sequence: Synthetic oligonucleotide
  Antisense strand to SEQ ID NO: 853210
aagauuagccuaaaccaau

SEQ ID NO: 853212 - RNA, 19 nt, Artificial Sequence
  Description of Artificial Sequence: Synthetic oligonucleotide
  Sense strand starting at position 919 of SEQ ID NO: 588265
aggcaauauugccuaccaa

SEQ ID NO: 853213 - RNA, 19 nt, Artificial Sequence
  Description of Artificial Sequence: Synthetic oligonucleotide
  Antisense strand to SEQ ID NO: 853212
uugguaggcaauauugccu

SEQ ID NO: 853214 - RNA, 19 nt, Artificial Sequence
  Description of Artificial Sequence: Synthetic oligonucleotide
  Sense strand starting at position 920 of SEQ ID NO: 588265
ggcaauauugccuaccaaa

SEQ ID NO: 853215 - RNA, 19 nt, Artificial Sequence
  Description of Artificial Sequence: Synthetic oligonucleotide
  Antisense strand to SEQ ID NO: 853214
uuugguaggcaauauugcc

SEQ ID NO: 853216 - RNA, 19 nt, Artificial Sequence
  Description of Artificial Sequence: Synthetic oligonucleotide
  Sense strand starting at position 983 of SEQ ID NO: 588265
aucgcucaacgauagcaaa

SEQ ID NO: 853217 - RNA, 19 nt, Artificial Sequence
  Description of Artificial Sequence: Synthetic oligonucleotide
  Antisense strand to SEQ ID NO: 853216
uuugcuaucguugagcgau

SEQ ID NO: 853218 - RNA, 19 nt, Artificial Sequence
  Description of Artificial Sequence: Synthetic oligonucleotide
  Sense strand starting at position 1419 of SEQ ID NO: 588265
gagccuagguuucugaaag

SEQ ID NO: 853219 - RNA, 19 nt, Artificial Sequence
  Description of Artificial Sequence: Synthetic oligonucleotide
  Antisense strand to SEQ ID NO: 853218
cuuucagaaaccuaggcuc

SEQ ID NO: 853220 - RNA, 19 nt, Artificial Sequence
  Description of Artificial Sequence: Synthetic oligonucleotide
  Sense strand starting at position 2121 of SEQ ID NO: 588265
ggcggaagugcugccugau

SEQ ID NO: 853221 - RNA, 19 nt, Artificial Sequence
  Description of Artificial Sequence: Synthetic oligonucleotide
  Antisense strand to SEQ ID NO: 853220
aucaggcagcacuuccgcc

SEQ ID NO: 853222 - RNA, 19 nt, Artificial Sequence
  Description of Artificial Sequence: Synthetic oligonucleotide
  Sense strand starting at position 2256 of SEQ ID NO: 588265
ccgauuacugaagaggcau

SEQ ID NO: 853223 - RNA, 19 nt, Artificial Sequence
  Description of Artificial Sequence: Synthetic oligonucleotide
  Antisense strand to SEQ ID NO: 853222
augccucuucaguaaucgg

SEQ ID NO: 853224 - RNA, 19 nt, Artificial Sequence
  Description of Artificial Sequence: Synthetic oligonucleotide
  Sense strand starting at position 2418 of SEQ ID NO: 588265
ggucccuggcuuuauaaau

SEQ ID NO: 853225 - RNA, 19 nt, Artificial Sequence
  Description of Artificial Sequence: Synthetic oligonucleotide
  Antisense strand to SEQ ID NO: 853224
auuuauaaagccagggacc

SEQ ID NO: 853226 - RNA, 19 nt, Artificial Sequence
  Description of Artificial Sequence: Synthetic oligonucleotide
  Sense strand starting at position 2477 of SEQ ID NO: 588265
ucccuuagagcccauagau

SEQ ID NO: 853227 - RNA, 19 nt, Artificial Sequence
  Description of Artificial Sequence: Synthetic oligonucleotide
  Antisense strand to SEQ ID NO: 853226
aucuaugggcucuaaggga

SEQ ID NO: 853228 - RNA, 19 nt, Artificial Sequence
  Description of Artificial Sequence: Synthetic oligonucleotide
  Sense strand starting at position 2610 of SEQ ID NO: 588265
cggagcuagacagaaguua

SEQ ID NO: 853229 - RNA, 19 nt, Artificial Sequence
  Description of Artificial Sequence: Synthetic oligonucleotide
  Antisense strand to SEQ ID NO: 853228
uaacuucugucuagcuccg

SEQ ID NO: 853230 - RNA, 19 nt, Artificial Sequence
  Description of Artificial Sequence: Synthetic oligonucleotide
  Sense strand starting at position 2755 of SEQ ID NO: 588265
ccaagauacuagcuacagu

SEQ ID NO: 853231 - RNA, 19 nt, Artificial Sequence
  Description of Artificial Sequence: Synthetic oligonucleotide
  Antisense strand to SEQ ID NO: 853230
acuguagcuaguaucuugg

SEQ ID NO: 853232 - RNA, 19 nt, Artificial Sequence
  Description of Artificial Sequence: Synthetic oligonucleotide
  Sense strand starting at position 2895 of SEQ ID NO: 588265
agugguuccaguuaaucau

SEQ ID NO: 853233 - RNA, 19 nt, Artificial Sequence
  Description of Artificial Sequence: Synthetic oligonucleotide
  Antisense strand to SEQ ID NO: 853232
augauuaacuggaaccacu

SEQ ID NO: 853234 - RNA, 19 nt, Artificial Sequence
  Description of Artificial Sequence: Synthetic oligonucleotide
  Sense strand starting at position 3087 of SEQ ID NO: 588265
acgcacauaucuuugauga

SEQ ID NO: 853235 - RNA, 19 nt, Artificial Sequence
  Description of Artificial Sequence: Synthetic oligonucleotide
  Antisense strand to SEQ ID NO: 853234
ucaucaaagauaugugcgu

SEQ ID NO: 853236 - RNA, 19 nt, Artificial Sequence
  Description of Artificial Sequence: Synthetic oligonucleotide
  Sense strand starting at position 3201 of SEQ ID NO: 588265
guaugaaccauaggaaagu

SEQ ID NO: 853237 - RNA, 19 nt, Artificial Sequence
  Description of Artificial Sequence: Synthetic oligonucleotide
  Antisense strand to SEQ ID NO: 853236
acuuuccuaugguucauac

SEQ ID NO: 853238 - RNA, 19 nt, Artificial Sequence
  Description of Artificial Sequence: Synthetic oligonucleotide
  Sense strand starting at position 3207 of SEQ ID NO: 588265
accauaggaaaguguugaa

SEQ ID NO: 853239 - RNA, 19 nt, Artificial Sequence
  Description of Artificial Sequence: Synthetic oligonucleotide
  Antisense strand to SEQ ID NO: 853238
uucaacacuuuccuauggu

SEQ ID NO: 853240 - RNA, 19 nt, Artificial Sequence
  Description of Artificial Sequence: Synthetic oligonucleotide
  Sense strand starting at position 3318 of SEQ ID NO: 588265
gcaacagugcaugaaguau

SEQ ID NO: 853241 - RNA, 19 nt, Artificial Sequence
  Description of Artificial Sequence: Synthetic oligonucleotide
  Antisense strand to SEQ ID NO: 853240
auacuucaugcacuguugc

SEQ ID NO: 853242 - RNA, 19 nt, Artificial Sequence
  Description of Artificial Sequence: Synthetic oligonucleotide
  Sense strand starting at position 3432 of SEQ ID NO: 588265
guaguagcuccggaacaga

SEQ ID NO: 853243 - RNA, 19 nt, Artificial Sequence
  Description of Artificial Sequence: Synthetic oligonucleotide
  Antisense strand to SEQ ID NO: 853242
ucuguuccggagcuacuac

SEQ ID NO: 853244 - RNA, 19 nt, Artificial Sequence
  Description of Artificial Sequence: Synthetic oligonucleotide
  Sense strand starting at position 3469 of SEQ ID NO: 588265
aaugcaugacuuugggaga

SEQ ID NO: 853245 - RNA, 19 nt, Artificial Sequence
  Description of Artificial Sequence: Synthetic oligonucleotide
  Antisense strand to SEQ ID NO: 853244
ucucccaaagucaugcauu

SEQ ID NO: 853246 - RNA, 19 nt, Artificial Sequence
  Description of Artificial Sequence: Synthetic oligonucleotide
  Sense strand starting at position 3482 of SEQ ID NO: 588265
gggagaaacucuccuguga

SEQ ID NO: 853247 - RNA, 19 nt, Artificial Sequence
  Description of Artificial Sequence: Synthetic oligonucleotide
  Antisense strand to SEQ ID NO: 853246
ucacaggagaguuucuccc

SEQ ID NO: 853248 - RNA, 19 nt, Artificial Sequence
  Description of Artificial Sequence: Synthetic oligonucleotide
  Sense strand starting at position 3565 of SEQ ID NO: 588265
ggaggaauagcugaugugu

SEQ ID NO: 853249 - RNA, 19 nt, Artificial Sequence
  Description of Artificial Sequence: Synthetic oligonucleotide
  Antisense strand to SEQ ID NO: 853248
acacaucagcuauuccucc

SEQ ID NO: 853250 - RNA, 19 nt, Artificial Sequence
  Description of Artificial Sequence: Synthetic oligonucleotide
  Sense strand starting at position 3574 of SEQ ID NO: 588265
gcugauguguuuacggaug

SEQ ID NO: 853251 - RNA, 19 nt, Artificial Sequence
  Description of Artificial Sequence: Synthetic oligonucleotide
  Antisense strand to SEQ ID NO: 853250
cauccguaaacacaucagc

SEQ ID NO: 853252 - RNA, 19 nt, Artificial Sequence
  Description of Artificial Sequence: Synthetic oligonucleotide
  Sense strand starting at position 3579 of SEQ ID NO: 588265
uguguuuacggaugauuuc

SEQ ID NO: 853253 - RNA, 19 nt, Artificial Sequence
  Description of Artificial Sequence: Synthetic oligonucleotide
  Antisense strand to SEQ ID NO: 853252
gaaaucauccguaaacaca

SEQ ID NO: 853254 - RNA, 19 nt, Artificial Sequence
  Description of Artificial Sequence: Synthetic oligonucleotide
  Sense strand starting at position 3648 of SEQ ID NO: 588265
gucaauaaugagggucuaa

SEQ ID NO: 853255 - RNA, 19 nt, Artificial Sequence
  Description of Artificial Sequence: Synthetic oligonucleotide
  Antisense strand to SEQ ID NO: 853254
uuagacccucauuauugac

SEQ ID NO: 853256 - RNA, 19 nt, Artificial Sequence
  Description of Artificial Sequence: Synthetic oligonucleotide
  Sense strand starting at position 3725 of SEQ ID NO: 588265
ugaguaaauuaguuggagu

SEQ ID NO: 853257 - RNA, 19 nt, Artificial Sequence
  Description of Artificial Sequence: Synthetic oligonucleotide
  Antisense strand to SEQ ID NO: 853256
acuccaacuaauuuacuca

SEQ ID NO: 853258 - RNA, 19 nt, Artificial Sequence
  Description of Artificial Sequence: Synthetic oligonucleotide
  Sense strand starting at position 3726 of SEQ ID NO: 588265
gaguaaauuaguuggaguc

SEQ ID NO: 853259 - RNA, 19 nt, Artificial Sequence
  Description of Artificial Sequence: Synthetic oligonucleotide
  Antisense strand to SEQ ID NO: 853258
gacuccaacuaauuuacuc

SEQ ID NO: 853260 - RNA, 19 nt, Artificial Sequence
  Description of Artificial Sequence: Synthetic oligonucleotide
  Sense strand starting at position 3727 of SEQ ID NO: 588265
aguaaauuaguuggagucu

SEQ ID NO: 853261 - RNA, 19 nt, Artificial Sequence
  Description of Artificial Sequence: Synthetic oligonucleotide
  Antisense strand to SEQ ID NO: 853260
agacuccaacuaauuuacu

SEQ ID NO: 853262 - RNA, 19 nt, Artificial Sequence
  Description of Artificial Sequence: Synthetic oligonucleotide
  Sense strand starting at position 47 of SEQ ID NO: 588266
gaggauuuguguggguugu

SEQ ID NO: 853263 - RNA, 19 nt, Artificial Sequence
  Description of Artificial Sequence: Synthetic oligonucleotide
  Antisense strand to SEQ ID NO: 853262
acaacccacacaaauccuc

SEQ ID NO: 853264 - RNA, 19 nt, Artificial Sequence
  Description of Artificial Sequence: Synthetic oligonucleotide
  Sense strand starting at position 49 of SEQ ID NO: 588266
ggauuuguguggguuguga

SEQ ID NO: 853265 - RNA, 19 nt, Artificial Sequence
  Description of Artificial Sequence: Synthetic oligonucleotide
  Antisense strand to SEQ ID NO: 853264
ucacaacccacacaaaucc

SEQ ID NO: 853266 - RNA, 19 nt, Artificial Sequence
  Description of Artificial Sequence: Synthetic oligonucleotide
  Sense strand starting at position 51 of SEQ ID NO: 588266
auuuguguggguugugaca

SEQ ID NO: 853267 - RNA, 19 nt, Artificial Sequence
  Description of Artificial Sequence: Synthetic oligonucleotide
  Antisense strand to SEQ ID NO: 853266
ugucacaacccacacaaau

SEQ ID NO: 853268 - RNA, 19 nt, Artificial Sequence
  Description of Artificial Sequence: Synthetic oligonucleotide
  Sense strand starting at position 80 of SEQ ID NO: 588266
agaggcauaguuugagaca

SEQ ID NO: 853269 - RNA, 19 nt, Artificial Sequence
  Description of Artificial Sequence: Synthetic oligonucleotide
  Antisense strand to SEQ ID NO: 853268
ugucucaaacuaugccucu

SEQ ID NO: 853270 - RNA, 19 nt, Artificial Sequence
  Description of Artificial Sequence: Synthetic oligonucleotide
  Sense strand starting at position 120 of SEQ ID NO: 588266
agucauugcuagcccuaca

SEQ ID NO: 853271 - RNA, 19 nt, Artificial Sequence
  Description of Artificial Sequence: Synthetic oligonucleotide
  Antisense strand to SEQ ID NO: 853270
uguagggcuagcaaugacu

SEQ ID NO: 853272 - RNA, 19 nt, Artificial Sequence
  Description of Artificial Sequence: Synthetic oligonucleotide
  Sense strand starting at position 131 of SEQ ID NO: 588266
gcccuacaucccugggaau

SEQ ID NO: 853273 - RNA, 19 nt, Artificial Sequence
  Description of Artificial Sequence: Synthetic oligonucleotide
  Antisense strand to SEQ ID NO: 853272
auucccagggauguagggc

SEQ ID NO: 853274 - RNA, 19 nt, Artificial Sequence
  Description of Artificial Sequence: Synthetic oligonucleotide
  Sense strand starting at position 133 of SEQ ID NO: 588266
ccuacaucccugggaaucu

SEQ ID NO: 853275 - RNA, 19 nt, Artificial Sequence
  Description of Artificial Sequence: Synthetic oligonucleotide
  Antisense strand to SEQ ID NO: 853274
agauucccagggauguagg

SEQ ID NO: 853276 - RNA, 19 nt, Artificial Sequence
  Description of Artificial Sequence: Synthetic oligonucleotide
  Sense strand starting at position 367 of SEQ ID NO: 588266
cagaacaacuaguguuaga

SEQ ID NO: 853277 - RNA, 19 nt, Artificial Sequence
  Description of Artificial Sequence: Synthetic oligonucleotide
  Antisense strand to SEQ ID NO: 853276
ucuaacacuaguuguucug

SEQ ID NO: 853278 - RNA, 19 nt, Artificial Sequence
  Description of Artificial Sequence: Synthetic oligonucleotide
  Sense strand starting at position 687 of SEQ ID NO: 588266
gauacacuacucggagcaa

SEQ ID NO: 853279 - RNA, 19 nt, Artificial Sequence
  Description of Artificial Sequence: Synthetic oligonucleotide
  Antisense strand to SEQ ID NO: 853278
uugcuccgaguaguguauc

SEQ ID NO: 853280 - RNA, 19 nt, Artificial Sequence
  Description of Artificial Sequence: Synthetic oligonucleotide
  Sense strand starting at position 943 of SEQ ID NO: 588266
gcggauucacacggacaca

SEQ ID NO: 853281 - RNA, 19 nt, Artificial Sequence
  Description of Artificial Sequence: Synthetic oligonucleotide
  Antisense strand to SEQ ID NO: 853280
uguguccgugugaauccgc

SEQ ID NO: 853282 - RNA, 19 nt, Artificial Sequence
  Description of Artificial Sequence: Synthetic oligonucleotide
  Sense strand starting at position 1255 of SEQ ID NO: 588266
cgaguuugcaggcaaaguu

SEQ ID NO: 853283 - RNA, 19 nt, Artificial Sequence
  Description of Artificial Sequence: Synthetic oligonucleotide
  Antisense strand to SEQ ID NO: 853282
aacuuugccugcaaacucg

SEQ ID NO: 853284 - RNA, 19 nt, Artificial Sequence
  Description of Artificial Sequence: Synthetic oligonucleotide
  Sense strand starting at position 1264 of SEQ ID NO: 588266
aggcaaaguuucucgugaa

SEQ ID NO: 853285 - RNA, 19 nt, Artificial Sequence
  Description of Artificial Sequence: Synthetic oligonucleotide
  Antisense strand to SEQ ID NO: 853284
uucacgagaaacuuugccu

SEQ ID NO: 853286 - RNA, 19 nt, Artificial Sequence
  Description of Artificial Sequence: Synthetic oligonucleotide
  Sense strand starting at position 1265 of SEQ ID NO: 588266
ggcaaaguuucucgugaac

SEQ ID NO: 853287 - RNA, 19 nt, Artificial Sequence
  Description of Artificial Sequence: Synthetic oligonucleotide
  Antisense strand to SEQ ID NO: 853286
guucacgagaaacuuugcc

SEQ ID NO: 853288 - RNA, 19 nt, Artificial Sequence
  Description of Artificial Sequence: Synthetic oligonucleotide
  Sense strand starting at position 1267 of SEQ ID NO: 588266
caaaguuucucgugaacuu

SEQ ID NO: 853289 - RNA, 19 nt, Artificial Sequence
  Description of Artificial Sequence: Synthetic oligonucleotide
  Antisense strand to SEQ ID NO: 853288
aaguucacgagaaacuuug

SEQ ID NO: 853290 - RNA, 19 nt, Artificial Sequence
  Description of Artificial Sequence: Synthetic oligonucleotide
  Sense strand starting at position 1268 of SEQ ID NO: 588266
aaaguuucucgugaacuuu

SEQ ID NO: 853291 - RNA, 19 nt, Artificial Sequence
  Description of Artificial Sequence: Synthetic oligonucleotide
  Antisense strand to SEQ ID NO: 853290
aaaguucacgagaaacuuu

SEQ ID NO: 853292 - RNA, 19 nt, Artificial Sequence
  Description of Artificial Sequence: Synthetic oligonucleotide
  Sense strand starting at position 2422 of SEQ ID NO: 588266
uccagugucuccgaugaca

SEQ ID NO: 853293 - RNA, 19 nt, Artificial Sequence
  Description of Artificial Sequence: Synthetic oligonucleotide
  Antisense strand to SEQ ID NO: 853292
ugucaucggagacacugga

SEQ ID NO: 853294 - RNA, 19 nt, Artificial Sequence
  Description of Artificial Sequence: Synthetic oligonucleotide
  Sense strand starting at position 2847 of SEQ ID NO: 588266
agggaaaugucuccauguu

SEQ ID NO: 853295 - RNA, 19 nt, Artificial Sequence
  Description of Artificial Sequence: Synthetic oligonucleotide
  Antisense strand to SEQ ID NO: 853294
aacauggagacauuucccu

SEQ ID NO: 853296 - RNA, 19 nt, Artificial Sequence
  Description of Artificial Sequence: Synthetic oligonucleotide
  Sense strand starting at position 2848 of SEQ ID NO: 588266
gggaaaugucuccauguuu

SEQ ID NO: 853297 - RNA, 19 nt, Artificial Sequence
  Description of Artificial Sequence: Synthetic oligonucleotide
  Antisense strand to SEQ ID NO: 853296
aaacauggagacauuuccc

SEQ ID NO: 853298 - RNA, 19 nt, Artificial Sequence
  Description of Artificial Sequence: Synthetic oligonucleotide
  Sense strand starting at position 3455 of SEQ ID NO: 588266
uugggagcagucgggaauu

SEQ ID NO: 853299 - RNA, 19 nt, Artificial Sequence
  Description of Artificial Sequence: Synthetic oligonucleotide
  Antisense strand to SEQ ID NO: 853298
aauucccgacugcucccaa

SEQ ID NO: 853300 - RNA, 19 nt, Artificial Sequence
  Description of Artificial Sequence: Synthetic oligonucleotide
  Sense strand starting at position 3468 of SEQ ID NO: 588266
ggaauucugucccggucca

SEQ ID NO: 853301 - RNA, 19 nt, Artificial Sequence
  Description of Artificial Sequence: Synthetic oligonucleotide
  Antisense strand to SEQ ID NO: 853300
uggaccgggacagaauucc

SEQ ID NO: 853302 - RNA, 19 nt, Artificial Sequence
  Description of Artificial Sequence: Synthetic oligonucleotide
  Sense strand starting at position 3469 of SEQ ID NO: 588266
gaauucugucccgguccaa

SEQ ID NO: 853303 - RNA, 19 nt, Artificial Sequence
  Description of Artificial Sequence: Synthetic oligonucleotide
  Antisense strand to SEQ ID NO: 853302
uuggaccgggacagaauuc

SEQ ID NO: 853304 - RNA, 19 nt, Artificial Sequence
  Description of Artificial Sequence: Synthetic oligonucleotide
  Sense strand starting at position 3589 of SEQ ID NO: 588266
uggacguguggaugucaga

SEQ ID NO: 853305 - RNA, 19 nt, Artificial Sequence
  Description of Artificial Sequence: Synthetic oligonucleotide
  Antisense strand to SEQ ID NO: 853304
ucugacauccacacgucca

SEQ ID NO: 853306 - RNA, 19 nt, Artificial Sequence
  Description of Artificial Sequence: Synthetic oligonucleotide
  Sense strand starting at position 3596 of SEQ ID NO: 588266
guggaugucagacgauaaa

SEQ ID NO: 853307 - RNA, 19 nt, Artificial Sequence
  Description of Artificial Sequence: Synthetic oligonucleotide
  Antisense strand to SEQ ID NO: 853306
uuuaucgucugacauccac

SEQ ID NO: 853308 - RNA, 19 nt, Artificial Sequence
  Description of Artificial Sequence: Synthetic oligonucleotide
  Sense strand starting at position 3872 of SEQ ID NO: 588266
gggucaacagacuaguagu

SEQ ID NO: 853309 - RNA, 19 nt, Artificial Sequence
  Description of Artificial Sequence: Synthetic oligonucleotide
  Antisense strand to SEQ ID NO: 853308
acuacuagucuguugaccc

SEQ ID NO: 853310 - RNA, 19 nt, Artificial Sequence
  Description of Artificial Sequence: Synthetic oligonucleotide
  Sense strand starting at position 3926 of SEQ ID NO: 588266
cacaguagccuuugagcuu

SEQ ID NO: 853311 - RNA, 19 nt, Artificial Sequence
  Description of Artificial Sequence: Synthetic oligonucleotide
  Antisense strand to SEQ ID NO: 853310
aagcucaaaggcuacugug

SEQ ID NO: 853312 - RNA, 19 nt, Artificial Sequence
  Description of Artificial Sequence: Synthetic oligonucleotide
  Sense strand starting at position 3981 of SEQ ID NO: 588266
gggcaaaguugaguuucuu

SEQ ID NO: 853313 - RNA, 19 nt, Artificial Sequence
  Description of Artificial Sequence: Synthetic oligonucleotide
  Antisense strand to SEQ ID NO: 853312
aagaaacucaacuuugccc

SEQ ID NO: 853314 - RNA, 19 nt, Artificial Sequence
  Description of Artificial Sequence: Synthetic oligonucleotide
  Sense strand starting at position 47 of SEQ ID NO: 588267
gugagauucugggugugag

SEQ ID NO: 853315 - RNA, 19 nt, Artificial Sequence
  Description of Artificial Sequence: Synthetic oligonucleotide
  Antisense strand to SEQ ID NO: 853314
cucacacccagaaucucac

SEQ ID NO: 853316 - RNA, 19 nt, Artificial Sequence
  Description of Artificial Sequence: Synthetic oligonucleotide
  Sense strand starting at position 57 of SEQ ID NO: 588267
gggugugagcucuaggucu

SEQ ID NO: 853317 - RNA, 19 nt, Artificial Sequence
  Description of Artificial Sequence: Synthetic oligonucleotide
  Antisense strand to SEQ ID NO: 853316
agaccuagagcucacaccc

SEQ ID NO: 853318 - RNA, 19 nt, Artificial Sequence
  Description of Artificial Sequence: Synthetic oligonucleotide
  Sense strand starting at position 59 of SEQ ID NO: 588267
gugugagcucuaggucuca

SEQ ID NO: 853319 - RNA, 19 nt, Artificial Sequence
  Description of Artificial Sequence: Synthetic oligonucleotide
  Antisense strand to SEQ ID NO: 853318
ugagaccuagagcucacac

SEQ ID NO: 853320 - RNA, 19 nt, Artificial Sequence
  Description of Artificial Sequence: Synthetic oligonucleotide
  Sense strand starting at position 64 of SEQ ID NO: 588267
agcucuaggucucaaugua

SEQ ID NO: 853321 - RNA, 19 nt, Artificial Sequence
  Description of Artificial Sequence: Synthetic oligonucleotide
  Antisense strand to SEQ ID NO: 853320
uacauugagaccuagagcu

SEQ ID NO: 853322 - RNA, 19 nt, Artificial Sequence
  Description of Artificial Sequence: Synthetic oligonucleotide
  Sense strand starting at position 71 of SEQ ID NO: 588267
ggucucaauguagaucuaa

SEQ ID NO: 853323 - RNA, 19 nt, Artificial Sequence
  Description of Artificial Sequence: Synthetic oligonucleotide
  Antisense strand to SEQ ID NO: 853322
uuagaucuacauugagacc

SEQ ID NO: 853324 - RNA, 19 nt, Artificial Sequence
  Description of Artificial Sequence: Synthetic oligonucleotide
  Sense strand starting at position 95 of SEQ ID NO: 588267
aggguaagaccgugaaucu

SEQ ID NO: 853325 - RNA, 19 nt, Artificial Sequence
  Description of Artificial Sequence: Synthetic oligonucleotide
  Antisense strand to SEQ ID NO: 853324
agauucacggucuuacccu

SEQ ID NO: 853326 - RNA, 19 nt, Artificial Sequence
  Description of Artificial Sequence: Synthetic oligonucleotide
  Sense strand starting at position 96 of SEQ ID NO: 588267
ggguaagaccgugaaucua

SEQ ID NO: 853327 - RNA, 19 nt, Artificial Sequence
  Description of Artificial Sequence: Synthetic oligonucleotide
  Antisense strand to SEQ ID NO: 853326
uagauucacggucuuaccc

SEQ ID NO: 853328 - RNA, 19 nt, Artificial Sequence
  Description of Artificial Sequence: Synthetic oligonucleotide
  Sense strand starting at position 104 of SEQ ID NO: 588267
ccgugaaucuaagcaugag

SEQ ID NO: 853329 - RNA, 19 nt, Artificial Sequence
  Description of Artificial Sequence: Synthetic oligonucleotide
  Antisense strand to SEQ ID NO: 853328
cucaugcuuagauucacgg

SEQ ID NO: 853330 - RNA, 19 nt, Artificial Sequence
  Description of Artificial Sequence: Synthetic oligonucleotide
  Sense strand starting at position 164 of SEQ ID NO: 588267
augugagucuauguggaaa

SEQ ID NO: 853331 - RNA, 19 nt, Artificial Sequence
  Description of Artificial Sequence: Synthetic oligonucleotide
  Antisense strand to SEQ ID NO: 853330
uuuccacauagacucacau

SEQ ID NO: 853332 - RNA, 19 nt, Artificial Sequence
  Description of Artificial Sequence: Synthetic oligonucleotide
  Sense strand starting at position 192 of SEQ ID NO: 588267
ugaaguguaucccuggaua

SEQ ID NO: 853333 - RNA, 19 nt, Artificial Sequence
  Description of Artificial Sequence: Synthetic oligonucleotide
  Antisense strand to SEQ ID NO: 853332
uauccagggauacacuuca

SEQ ID NO: 853334 - RNA, 19 nt, Artificial Sequence
  Description of Artificial Sequence: Synthetic oligonucleotide
  Sense strand starting at position 194 of SEQ ID NO: 588267
aaguguaucccuggauaug

SEQ ID NO: 853335 - RNA, 19 nt, Artificial Sequence
  Description of Artificial Sequence: Synthetic oligonucleotide
  Antisense strand to SEQ ID NO: 853334
cauauccagggauacacuu

SEQ ID NO: 853336 - RNA, 19 nt, Artificial Sequence
  Description of Artificial Sequence: Synthetic oligonucleotide
  Sense strand starting at position 195 of SEQ ID NO: 588267
aguguaucccuggauauga

SEQ ID NO: 853337 - RNA, 19 nt, Artificial Sequence
  Description of Artificial Sequence: Synthetic oligonucleotide
  Antisense strand to SEQ ID NO: 853336
ucauauccagggauacacu

SEQ ID NO: 853338 - RNA, 19 nt, Artificial Sequence
  Description of Artificial Sequence: Synthetic oligonucleotide
  Sense strand starting at position 222 of SEQ ID NO: 588267
acguaagugucaguccaua

SEQ ID NO: 853339 - RNA, 19 nt, Artificial Sequence
  Description of Artificial Sequence: Synthetic oligonucleotide
  Antisense strand to SEQ ID NO: 853338
uauggacugacacuuacgu

SEQ ID NO: 853340 - RNA, 19 nt, Artificial Sequence
  Description of Artificial Sequence: Synthetic oligonucleotide
  Sense strand starting at position 227 of SEQ ID NO: 588267
agugucaguccauaugaau

SEQ ID NO: 853341 - RNA, 19 nt, Artificial Sequence
  Description of Artificial Sequence: Synthetic oligonucleotide
  Antisense strand to SEQ ID NO: 853340
auucauauggacugacacu

SEQ ID NO: 853342 - RNA, 19 nt, Artificial Sequence
  Description of Artificial Sequence: Synthetic oligonucleotide
  Sense strand starting at position 230 of SEQ ID NO: 588267
gucaguccauaugaaugua

SEQ ID NO: 853343 - RNA, 19 nt, Artificial Sequence
  Description of Artificial Sequence: Synthetic oligonucleotide
  Antisense strand to SEQ ID NO: 853342
uacauucauauggacugac

SEQ ID NO: 853344 - RNA, 19 nt, Artificial Sequence
  Description of Artificial Sequence: Synthetic oligonucleotide
  Sense strand starting at position 284 of SEQ ID NO: 588267
gugugcaucugaguaugga

SEQ ID NO: 853345 - RNA, 19 nt, Artificial Sequence
  Description of Artificial Sequence: Synthetic oligonucleotide
  Antisense strand to SEQ ID NO: 853344
uccauacucagaugcacac

SEQ ID NO: 853346 - RNA, 19 nt, Artificial Sequence
  Description of Artificial Sequence: Synthetic oligonucleotide
  Sense strand starting at position 285 of SEQ ID NO: 588267
ugugcaucugaguauggau

SEQ ID NO: 853347 - RNA, 19 nt, Artificial Sequence
  Description of Artificial Sequence: Synthetic oligonucleotide
  Antisense strand to SEQ ID NO: 853346
auccauacucagaugcaca

SEQ ID NO: 853348 - RNA, 19 nt, Artificial Sequence
  Description of Artificial Sequence: Synthetic oligonucleotide
  Sense strand starting at position 314 of SEQ ID NO: 588267
ccagaaguccugugcauga

SEQ ID NO: 853349 - RNA, 19 nt, Artificial Sequence
  Description of Artificial Sequence: Synthetic oligonucleotide
  Antisense strand to SEQ ID NO: 853348
ucaugcacaggacuucugg

SEQ ID NO: 853350 - RNA, 19 nt, Artificial Sequence
  Description of Artificial Sequence: Synthetic oligonucleotide
  Sense strand starting at position 318 of SEQ ID NO: 588267
aaguccugugcaugaacuu

SEQ ID NO: 853351 - RNA, 19 nt, Artificial Sequence
  Description of Artificial Sequence: Synthetic oligonucleotide
  Antisense strand to SEQ ID NO: 853350
aaguucaugcacaggacuu

SEQ ID NO: 853352 - RNA, 19 nt, Artificial Sequence
  Description of Artificial Sequence: Synthetic oligonucleotide
  Sense strand starting at position 362 of SEQ ID NO: 588267
cagggucucaguuggagua

SEQ ID NO: 853353 - RNA, 19 nt, Artificial Sequence
  Description of Artificial Sequence: Synthetic oligonucleotide
  Antisense strand to SEQ ID NO: 853352
uacuccaacugagacccug

SEQ ID NO: 853354 - RNA, 19 nt, Artificial Sequence
  Description of Artificial Sequence: Synthetic oligonucleotide
  Sense strand starting at position 376 of SEQ ID NO: 588267
gaguaucagcccugacagu

SEQ ID NO: 853355 - RNA, 19 nt, Artificial Sequence
  Description of Artificial Sequence: Synthetic oligonucleotide
  Antisense strand to SEQ ID NO: 853354
acugucagggcugauacuc

SEQ ID NO: 853356 - RNA, 19 nt, Artificial Sequence
  Description of Artificial Sequence: Synthetic oligonucleotide
  Sense strand starting at position 393 of SEQ ID NO: 588267
gugugaaccuuagcucuau

SEQ ID NO: 853357 - RNA, 19 nt, Artificial Sequence
  Description of Artificial Sequence: Synthetic oligonucleotide
  Antisense strand to SEQ ID NO: 853356
auagagcuaagguucacac

SEQ ID NO: 853358 - RNA, 19 nt, Artificial Sequence
  Description of Artificial Sequence: Synthetic oligonucleotide
  Sense strand starting at position 450 of SEQ ID NO: 588267
gaggauuuguguggguugu

SEQ ID NO: 853359 - RNA, 19 nt, Artificial Sequence
  Description of Artificial Sequence: Synthetic oligonucleotide
  Antisense strand to SEQ ID NO: 853358
acaacccacacaaauccuc

SEQ ID NO: 853360 - RNA, 19 nt, Artificial Sequence
  Description of Artificial Sequence: Synthetic oligonucleotide
  Sense strand starting at position 452 of SEQ ID NO: 588267
ggauuuguguggguuguga

SEQ ID NO: 853361 - RNA, 19 nt, Artificial Sequence
  Description of Artificial Sequence: Synthetic oligonucleotide
  Antisense strand to SEQ ID NO: 853360
ucacaacccacacaaaucc

SEQ ID NO: 853362 - RNA, 19 nt, Artificial Sequence
  Description of Artificial Sequence: Synthetic oligonucleotide
  Sense strand starting at position 454 of SEQ ID NO: 588267
auuuguguggguugugaca

SEQ ID NO: 853363 - RNA, 19 nt, Artificial Sequence
  Description of Artificial Sequence: Synthetic oligonucleotide
  Antisense strand to SEQ ID NO: 853362
ugucacaacccacacaaau

SEQ ID NO: 853364 - RNA, 19 nt, Artificial Sequence
  Description of Artificial Sequence: Synthetic oligonucleotide
  Sense strand starting at position 483 of SEQ ID NO: 588267
agaggcauaguuugagaca

SEQ ID NO: 853365 - RNA, 19 nt, Artificial Sequence
  Description of Artificial Sequence: Synthetic oligonucleotide
  Antisense strand to SEQ ID NO: 853364
ugucucaaacuaugccucu

SEQ ID NO: 853366 - RNA, 19 nt, Artificial Sequence
  Description of Artificial Sequence: Synthetic oligonucleotide
  Sense strand starting at position 523 of SEQ ID NO: 588267
agucauugcuagcccuaca

SEQ ID NO: 853367 - RNA, 19 nt, Artificial Sequence
  Description of Artificial Sequence: Synthetic oligonucleotide
  Antisense strand to SEQ ID NO: 853366
uguagggcuagcaaugacu

SEQ ID NO: 853368 - RNA, 19 nt, Artificial Sequence
  Description of Artificial Sequence: Synthetic oligonucleotide
  Sense strand starting at position 534 of SEQ ID NO: 588267
gcccuacaucccugggaau

SEQ ID NO: 853369 - RNA, 19 nt, Artificial Sequence
  Description of Artificial Sequence: Synthetic oligonucleotide
  Antisense strand to SEQ ID NO: 853368
auucccagggauguagggc

SEQ ID NO: 853370 - RNA, 19 nt, Artificial Sequence
  Description of Artificial Sequence: Synthetic oligonucleotide
  Sense strand starting at position 536 of SEQ ID NO: 588267
ccuacaucccugggaaucu

SEQ ID NO: 853371 - RNA, 19 nt, Artificial Sequence
  Description of Artificial Sequence: Synthetic oligonucleotide
  Antisense strand to SEQ ID NO: 853370
agauucccagggauguagg

SEQ ID NO: 853372 - RNA, 19 nt, Artificial Sequence
  Description of Artificial Sequence: Synthetic oligonucleotide
  Sense strand starting at position 770 of SEQ ID NO: 588267
cagaacaacuaguguuaga

SEQ ID NO: 853373 - RNA, 19 nt, Artificial Sequence
  Description of Artificial Sequence: Synthetic oligonucleotide
  Antisense strand to SEQ ID NO: 853372
ucuaacacuaguuguucug

SEQ ID NO: 853374 - RNA, 19 nt, Artificial Sequence
  Description of Artificial Sequence: Synthetic oligonucleotide
  Sense strand starting at position 1090 of SEQ ID NO: 588267
gauacacuacucggagcaa

SEQ ID NO: 853375 - RNA, 19 nt, Artificial Sequence
  Description of Artificial Sequence: Synthetic oligonucleotide
  Antisense strand to SEQ ID NO: 853374
uugcuccgaguaguguauc

SEQ ID NO: 853376 - RNA, 19 nt, Artificial Sequence
  Description of Artificial Sequence: Synthetic oligonucleotide
  Sense strand starting at position 1346 of SEQ ID NO: 588267
gcggauucacacggacaca

SEQ ID NO: 853377 - RNA, 19 nt, Artificial Sequence
  Description of Artificial Sequence: Synthetic oligonucleotide
  Antisense strand to SEQ ID NO: 853376
uguguccgugugaauccgc

SEQ ID NO: 853378 - RNA, 19 nt, Artificial Sequence
  Description of Artificial Sequence: Synthetic oligonucleotide
  Sense strand starting at position 1658 of SEQ ID NO: 588267
cgaguuugcaggcaaaguu

SEQ ID NO: 853379 - RNA, 19 nt, Artificial Sequence
  Description of Artificial Sequence: Synthetic oligonucleotide
  Antisense strand to SEQ ID NO: 853378
aacuuugccugcaaacucg

SEQ ID NO: 853380 - RNA, 19 nt, Artificial Sequence
  Description of Artificial Sequence: Synthetic oligonucleotide
  Sense strand starting at position 1667 of SEQ ID NO: 588267
aggcaaaguuucucgugaa

SEQ ID NO: 853381 - RNA, 19 nt, Artificial Sequence
  Description of Artificial Sequence: Synthetic oligonucleotide
  Antisense strand to SEQ ID NO: 853380
uucacgagaaacuuugccu

SEQ ID NO: 853382 - RNA, 19 nt, Artificial Sequence
  Description of Artificial Sequence: Synthetic oligonucleotide
  Sense strand starting at position 1671 of SEQ ID NO: 588267
aaaguuucucgugaacuuu

SEQ ID NO: 853383 - RNA, 19 nt, Artificial Sequence
  Description of Artificial Sequence: Synthetic oligonucleotide
  Antisense strand to SEQ ID NO: 853382
aaaguucacgagaaacuuu

SEQ ID NO: 853384 - RNA, 19 nt, Artificial Sequence
  Description of Artificial Sequence: Synthetic oligonucleotide
  Sense strand starting at position 2825 of SEQ ID NO: 588267
uccagugucuccgaugaca

SEQ ID NO: 853385 - RNA, 19 nt, Artificial Sequence
  Description of Artificial Sequence: Synthetic oligonucleotide
  Antisense strand to SEQ ID NO: 853384
ugucaucggagacacugga

SEQ ID NO: 853386 - RNA, 19 nt, Artificial Sequence
  Description of Artificial Sequence: Synthetic oligonucleotide
  Sense strand starting at position 3250 of SEQ ID NO: 588267
agggaaaugucuccauguu

SEQ ID NO: 853387 - RNA, 19 nt, Artificial Sequence
  Description of Artificial Sequence: Synthetic oligonucleotide
  Antisense strand to SEQ ID NO: 853386
aacauggagacauuucccu

SEQ ID NO: 853388 - RNA, 19 nt, Artificial Sequence
  Description of Artificial Sequence: Synthetic oligonucleotide
  Sense strand starting at position 3251 of SEQ ID NO: 588267
gggaaaugucuccauguuu

SEQ ID NO: 853389 - RNA, 19 nt, Artificial Sequence
  Description of Artificial Sequence: Synthetic oligonucleotide
  Antisense strand to SEQ ID NO: 853388
aaacauggagacauuuccc

SEQ ID NO: 853390 - RNA, 19 nt, Artificial Sequence
  Description of Artificial Sequence: Synthetic oligonucleotide
  Sense strand starting at position 3858 of SEQ ID NO: 588267
uugggagcagucgggaauu

SEQ ID NO: 853391 - RNA, 19 nt, Artificial Sequence
  Description of Artificial Sequence: Synthetic oligonucleotide
  Antisense strand to SEQ ID NO: 853390
aauucccgacugcucccaa

SEQ ID NO: 853392 - RNA, 19 nt, Artificial Sequence
  Description of Artificial Sequence: Synthetic oligonucleotide
  Sense strand starting at position 3872 of SEQ ID NO: 588267
gaauucugucccgguccaa

SEQ ID NO: 853393 - RNA, 19 nt, Artificial Sequence
  Description of Artificial Sequence: Synthetic oligonucleotide
  Antisense strand to SEQ ID NO: 853392
uuggaccgggacagaauuc

SEQ ID NO: 853394 - RNA, 19 nt, Artificial Sequence
  Description of Artificial Sequence: Synthetic oligonucleotide
  Sense strand starting at position 59 of SEQ ID NO: 588268
gccaaagagugucuuagau

SEQ ID NO: 853395 - RNA, 19 nt, Artificial Sequence
  Description of Artificial Sequence: Synthetic oligonucleotide
  Antisense strand to SEQ ID NO: 853394
aucuaagacacucuuuggc

SEQ ID NO: 853396 - RNA, 19 nt, Artificial Sequence
  Description of Artificial Sequence: Synthetic oligonucleotide
  Sense strand starting at position 66 of SEQ ID NO: 588268
agugucuuagauuaggacu

SEQ ID NO: 853397 - RNA, 19 nt, Artificial Sequence
  Description of Artificial Sequence: Synthetic oligonucleotide
  Antisense strand to SEQ ID NO: 853396
aguccuaaucuaagacacu

SEQ ID NO: 853398 - RNA, 19 nt, Artificial Sequence
  Description of Artificial Sequence: Synthetic oligonucleotide
  Sense strand starting at position 91 of SEQ ID NO: 588268
aucaaaggccuuuaucaug

SEQ ID NO: 853399 - RNA, 19 nt, Artificial Sequence
  Description of Artificial Sequence: Synthetic oligonucleotide
  Antisense strand to SEQ ID NO: 853398
caugauaaaggccuuugau

SEQ ID NO: 853400 - RNA, 19 nt, Artificial Sequence
  Description of Artificial Sequence: Synthetic oligonucleotide
  Sense strand starting at position 133 of SEQ ID NO: 588268
aagggugaggucugcagau

SEQ ID NO: 853401 - RNA, 19 nt, Artificial Sequence
  Description of Artificial Sequence: Synthetic oligonucleotide
  Antisense strand to SEQ ID NO: 853400
aucugcagaccucacccuu

SEQ ID NO: 853402 - RNA, 19 nt, Artificial Sequence
  Description of Artificial Sequence: Synthetic oligonucleotide
  Sense strand starting at position 135 of SEQ ID NO: 588268
gggugaggucugcagauga

SEQ ID NO: 853403 - RNA, 19 nt, Artificial Sequence
  Description of Artificial Sequence: Synthetic oligonucleotide
  Antisense strand to SEQ ID NO: 853402
ucaucugcagaccucaccc

SEQ ID NO: 853404 - RNA, 19 nt, Artificial Sequence
  Description of Artificial Sequence: Synthetic oligonucleotide
  Sense strand starting at position 195 of SEQ ID NO: 588268
cuccuuauccaacgaagaa

SEQ ID NO: 853405 - RNA, 19 nt, Artificial Sequence
  Description of Artificial Sequence: Synthetic oligonucleotide
  Antisense strand to SEQ ID NO: 853404
uucuucguuggauaaggag

SEQ ID NO: 853406 - RNA, 19 nt, Artificial Sequence
  Description of Artificial Sequence: Synthetic oligonucleotide
  Sense strand starting at position 360 of SEQ ID NO: 588268
agaacaaacuaugagagaa

SEQ ID NO: 853407 - RNA, 19 nt, Artificial Sequence
  Description of Artificial Sequence: Synthetic oligonucleotide
  Antisense strand to SEQ ID NO: 853406
uucucucauaguuuguucu

SEQ ID NO: 853408 - RNA, 19 nt, Artificial Sequence
  Description of Artificial Sequence: Synthetic oligonucleotide
  Sense strand starting at position 705 of SEQ ID NO: 588268
auugguuucuaaguugaag

SEQ ID NO: 853409 - RNA, 19 nt, Artificial Sequence
  Description of Artificial Sequence: Synthetic oligonucleotide
  Antisense strand to SEQ ID NO: 853408
cuucaacuuagaaaccaau

SEQ ID NO: 853410 - RNA, 19 nt, Artificial Sequence
  Description of Artificial Sequence: Synthetic oligonucleotide
  Sense strand starting at position 752 of SEQ ID NO: 588268
gugaguuucccacauccaa

SEQ ID NO: 853411 - RNA, 19 nt, Artificial Sequence
  Description of Artificial Sequence: Synthetic oligonucleotide
  Antisense strand to SEQ ID NO: 853410
uuggaugugggaaacucac

SEQ ID NO: 853412 - RNA, 19 nt, Artificial Sequence
  Description of Artificial Sequence: Synthetic oligonucleotide
  Sense strand starting at position 851 of SEQ ID NO: 588268
cuuugaacaugaguauagu

SEQ ID NO: 853413 - RNA, 19 nt, Artificial Sequence
  Description of Artificial Sequence: Synthetic oligonucleotide
  Antisense strand to SEQ ID NO: 853412
acuauacucauguucaaag

SEQ ID NO: 853414 - RNA, 19 nt, Artificial Sequence
  Description of Artificial Sequence: Synthetic oligonucleotide
  Sense strand starting at position 857 of SEQ ID NO: 588268
acaugaguauagucaaguc

SEQ ID NO: 853415 - RNA, 19 nt, Artificial Sequence
  Description of Artificial Sequence: Synthetic oligonucleotide
  Antisense strand to SEQ ID NO: 853414
gacuugacuauacucaugu

SEQ ID NO: 853416 - RNA, 19 nt, Artificial Sequence
  Description of Artificial Sequence: Synthetic oligonucleotide
  Sense strand starting at position 988 of SEQ ID NO: 588268
gaauuaccauagcugguua

SEQ ID NO: 853417 - RNA, 19 nt, Artificial Sequence
  Description of Artificial Sequence: Synthetic oligonucleotide
  Antisense strand to SEQ ID NO: 853416
uaaccagcuaugguaauuc

SEQ ID NO: 853418 - RNA, 19 nt, Artificial Sequence
  Description of Artificial Sequence: Synthetic oligonucleotide
  Sense strand starting at position 990 of SEQ ID NO: 588268
auuaccauagcugguuaau

SEQ ID NO: 853419 - RNA, 19 nt, Artificial Sequence
  Description of Artificial Sequence: Synthetic oligonucleotide
  Antisense strand to SEQ ID NO: 853418
auuaaccagcuaugguaau

SEQ ID NO: 853420 - RNA, 19 nt, Artificial Sequence
  Description of Artificial Sequence: Synthetic oligonucleotide
  Sense strand starting at position 993 of SEQ ID NO: 588268
accauagcugguuaauaaa

SEQ ID NO: 853421 - RNA, 19 nt, Artificial Sequence
  Description of Artificial Sequence: Synthetic oligonucleotide
  Antisense strand to SEQ ID NO: 853420
uuuauuaaccagcuauggu

SEQ ID NO: 853422 - RNA, 19 nt, Artificial Sequence
  Description of Artificial Sequence: Synthetic oligonucleotide
  Sense strand starting at position 1062 of SEQ ID NO: 588268
aacguuacucgucuguguu

SEQ ID NO: 853423 - RNA, 19 nt, Artificial Sequence
  Description of Artificial Sequence: Synthetic oligonucleotide
  Antisense strand to SEQ ID NO: 853422
aacacagacgaguaacguu

SEQ ID NO: 853424 - RNA, 19 nt, Artificial Sequence
  Description of Artificial Sequence: Synthetic oligonucleotide
  Sense strand starting at position 1085 of SEQ ID NO: 588268
acuuaaguuugacugggua

SEQ ID NO: 853425 - RNA, 19 nt, Artificial Sequence
  Description of Artificial Sequence: Synthetic oligonucleotide
  Antisense strand to SEQ ID NO: 853424
uacccagucaaacuuaagu

SEQ ID NO: 853426 - RNA, 19 nt, Artificial Sequence
  Description of Artificial Sequence: Synthetic oligonucleotide
  Sense strand starting at position 1087 of SEQ ID NO: 588268
uuaaguuugacuggguaaa

SEQ ID NO: 853427 - RNA, 19 nt, Artificial Sequence
  Description of Artificial Sequence: Synthetic oligonucleotide
  Antisense strand to SEQ ID NO: 853426
uuuacccagucaaacuuaa

SEQ ID NO: 853428 - RNA, 19 nt, Artificial Sequence
  Description of Artificial Sequence: Synthetic oligonucleotide
  Sense strand starting at position 1169 of SEQ ID NO: 588268
aaccgaaguguuuacacuu

SEQ ID NO: 853429 - RNA, 19 nt, Artificial Sequence
  Description of Artificial Sequence: Synthetic oligonucleotide
  Antisense strand to SEQ ID NO: 853428
aaguguaaacacuucgguu

SEQ ID NO: 853430 - RNA, 19 nt, Artificial Sequence
  Description of Artificial Sequence: Synthetic oligonucleotide
  Sense strand starting at position 1301 of SEQ ID NO: 588268
cgaguauccaagugaccaa

SEQ ID NO: 853431 - RNA, 19 nt, Artificial Sequence
  Description of Artificial Sequence: Synthetic oligonucleotide
  Antisense strand to SEQ ID NO: 853430
uuggucacuuggauacucg

SEQ ID NO: 853432 - RNA, 19 nt, Artificial Sequence
  Description of Artificial Sequence: Synthetic oligonucleotide
  Sense strand starting at position 2476 of SEQ ID NO: 588268
ugacauccagcugacuaau

SEQ ID NO: 853433 - RNA, 19 nt, Artificial Sequence
  Description of Artificial Sequence: Synthetic oligonucleotide
  Antisense strand to SEQ ID NO: 853432
auuagucagcuggauguca

SEQ ID NO: 853434 - RNA, 19 nt, Artificial Sequence
  Description of Artificial Sequence: Synthetic oligonucleotide
  Sense strand starting at position 2493 of SEQ ID NO: 588268
augucaaggagauguggaa

SEQ ID NO: 853435 - RNA, 19 nt, Artificial Sequence
  Description of Artificial Sequence: Synthetic oligonucleotide
  Antisense strand to SEQ ID NO: 853434
uuccacaucuccuugacau

SEQ ID NO: 853436 - RNA, 19 nt, Artificial Sequence
  Description of Artificial Sequence: Synthetic oligonucleotide
  Sense strand starting at position 2528 of SEQ ID NO: 588268
gggacuaucaagcagguuu

SEQ ID NO: 853437 - RNA, 19 nt, Artificial Sequence
  Description of Artificial Sequence: Synthetic oligonucleotide
  Antisense strand to SEQ ID NO: 853436
aaaccugcuugauaguccc

SEQ ID NO: 853438 - RNA, 19 nt, Artificial Sequence
  Description of Artificial Sequence: Synthetic oligonucleotide
  Sense strand starting at position 2545 of SEQ ID NO: 588268
uuccaacuugaaugaugau

SEQ ID NO: 853439 - RNA, 19 nt, Artificial Sequence
  Description of Artificial Sequence: Synthetic oligonucleotide
  Antisense strand to SEQ ID NO: 853438
aucaucauucaaguuggaa

SEQ ID NO: 853440 - RNA, 19 nt, Artificial Sequence
  Description of Artificial Sequence: Synthetic oligonucleotide
  Sense strand starting at position 2554 of SEQ ID NO: 588268
gaaugaugauccuuuguac

SEQ ID NO: 853441 - RNA, 19 nt, Artificial Sequence
  Description of Artificial Sequence: Synthetic oligonucleotide
  Antisense strand to SEQ ID NO: 853440
guacaaaggaucaucauuc

SEQ ID NO: 853442 - RNA, 19 nt, Artificial Sequence
  Description of Artificial Sequence: Synthetic oligonucleotide
  Sense strand starting at position 2654 of SEQ ID NO: 588268
gaggaaguguagcccacau

SEQ ID NO: 853443 - RNA, 19 nt, Artificial Sequence
  Description of Artificial Sequence: Synthetic oligonucleotide
  Antisense strand to SEQ ID NO: 853442
augugggcuacacuuccuc

SEQ ID NO: 853444 - RNA, 19 nt, Artificial Sequence
  Description of Artificial Sequence: Synthetic oligonucleotide
  Sense strand starting at position 2691 of SEQ ID NO: 588268
cuuggagcaguuugaaauc

SEQ ID NO: 853445 - RNA, 19 nt, Artificial Sequence
  Description of Artificial Sequence: Synthetic oligonucleotide
  Antisense strand to SEQ ID NO: 853444
gauuucaaacugcuccaag

SEQ ID NO: 853446 - RNA, 19 nt, Artificial Sequence
  Description of Artificial Sequence: Synthetic oligonucleotide
  Sense strand starting at position 2710 of SEQ ID NO: 588268
aguaauuuggagcguggau

SEQ ID NO: 853447 - RNA, 19 nt, Artificial Sequence
  Description of Artificial Sequence: Synthetic oligonucleotide
  Antisense strand to SEQ ID NO: 853446
auccacgcuccaaauuacu

SEQ ID NO: 853448 - RNA, 19 nt, Artificial Sequence
  Description of Artificial Sequence: Synthetic oligonucleotide
  Sense strand starting at position 2885 of SEQ ID NO: 588268
ccagaacaucccugaaagu

SEQ ID NO: 853449 - RNA, 19 nt, Artificial Sequence
  Description of Artificial Sequence: Synthetic oligonucleotide
  Antisense strand to SEQ ID NO: 853448
acuuucagggauguucugg

SEQ ID NO: 853450 - RNA, 19 nt, Artificial Sequence
  Description of Artificial Sequence: Synthetic oligonucleotide
  Sense strand starting at position 3021 of SEQ ID NO: 588268
ucaccaucucugcaugaga

SEQ ID NO: 853451 - RNA, 19 nt, Artificial Sequence
  Description of Artificial Sequence: Synthetic oligonucleotide
  Antisense strand to SEQ ID NO: 853450
ucucaugcagagaugguga

SEQ ID NO: 853452 - RNA, 19 nt, Artificial Sequence
  Description of Artificial Sequence: Synthetic oligonucleotide
  Sense strand starting at position 3023 of SEQ ID NO: 588268
accaucucugcaugagaau

SEQ ID NO: 853453 - RNA, 19 nt, Artificial Sequence
  Description of Artificial Sequence: Synthetic oligonucleotide
  Antisense strand to SEQ ID NO: 853452
auucucaugcagagauggu

SEQ ID NO: 853454 - RNA, 19 nt, Artificial Sequence
  Description of Artificial Sequence: Synthetic oligonucleotide
  Sense strand starting at position 3024 of SEQ ID NO: 588268
ccaucucugcaugagaauc

SEQ ID NO: 853455 - RNA, 19 nt, Artificial Sequence
  Description of Artificial Sequence: Synthetic oligonucleotide
  Antisense strand to SEQ ID NO: 853454
gauucucaugcagagaugg

SEQ ID NO: 853456 - RNA, 19 nt, Artificial Sequence
  Description of Artificial Sequence: Synthetic oligonucleotide
  Sense strand starting at position 3173 of SEQ ID NO: 588268
uuauaagccugucuuagaa

SEQ ID NO: 853457 - RNA, 19 nt, Artificial Sequence
  Description of Artificial Sequence: Synthetic oligonucleotide
  Antisense strand to SEQ ID NO: 853456
uucuaagacaggcuuauaa

SEQ ID NO: 853458 - RNA, 19 nt, Artificial Sequence
  Description of Artificial Sequence: Synthetic oligonucleotide
  Sense strand starting at position 3337 of SEQ ID NO: 588268
acuguaacuucucugaagu

SEQ ID NO: 853459 - RNA, 19 nt, Artificial Sequence
  Description of Artificial Sequence: Synthetic oligonucleotide
  Antisense strand to SEQ ID NO: 853458
acuucagagaaguuacagu

SEQ ID NO: 853460 - RNA, 19 nt, Artificial Sequence
  Description of Artificial Sequence: Synthetic oligonucleotide
  Sense strand starting at position 3338 of SEQ ID NO: 588268
cuguaacuucucugaagug

SEQ ID NO: 853461 - RNA, 19 nt, Artificial Sequence
  Description of Artificial Sequence: Synthetic oligonucleotide
  Antisense strand to SEQ ID NO: 853460
cacuucagagaaguuacag

SEQ ID NO: 853462 - RNA, 19 nt, Artificial Sequence
  Description of Artificial Sequence: Synthetic oligonucleotide
  Sense strand starting at position 3444 of SEQ ID NO: 588268
ccacaccugugacuugaaa

SEQ ID NO: 853463 - RNA, 19 nt, Artificial Sequence
  Description of Artificial Sequence: Synthetic oligonucleotide
  Antisense strand to SEQ ID NO: 853462
uuucaagucacaggugugg

SEQ ID NO: 853464 - RNA, 19 nt, Artificial Sequence
  Description of Artificial Sequence: Synthetic oligonucleotide
  Sense strand starting at position 3475 of SEQ ID NO: 588268
ucuugauagucugugagau

SEQ ID NO: 853465 - RNA, 19 nt, Artificial Sequence
  Description of Artificial Sequence: Synthetic oligonucleotide
  Antisense strand to SEQ ID NO: 853464
aucucacagacuaucaaga

SEQ ID NO: 853466 - RNA, 19 nt, Artificial Sequence
  Description of Artificial Sequence: Synthetic oligonucleotide
  Sense strand starting at position 3476 of SEQ ID NO: 588268
cuugauagucugugagauu

SEQ ID NO: 853467 - RNA, 19 nt, Artificial Sequence
  Description of Artificial Sequence: Synthetic oligonucleotide
  Antisense strand to SEQ ID NO: 853466
aaucucacagacuaucaag

SEQ ID NO: 853468 - RNA, 19 nt, Artificial Sequence
  Description of Artificial Sequence: Synthetic oligonucleotide
  Sense strand starting at position 3511 of SEQ ID NO: 588268
ugggaagucuaaccacaua

SEQ ID NO: 853469 - RNA, 19 nt, Artificial Sequence
  Description of Artificial Sequence: Synthetic oligonucleotide
  Antisense strand to SEQ ID NO: 853468
uaugugguuagacuuccca

SEQ ID NO: 853470 - RNA, 19 nt, Artificial Sequence
  Description of Artificial Sequence: Synthetic oligonucleotide
  Sense strand starting at position 3636 of SEQ ID NO: 588268
aaagcagugguauaaauau

SEQ ID NO: 853471 - RNA, 19 nt, Artificial Sequence
  Description of Artificial Sequence: Synthetic oligonucleotide
  Antisense strand to SEQ ID NO: 853470
auauuuauaccacugcuuu

SEQ ID NO: 853472 - RNA, 19 nt, Artificial Sequence
  Description of Artificial Sequence: Synthetic oligonucleotide
  Sense strand starting at position 3686 of SEQ ID NO: 588268
ugacucuuugacuaggcau

SEQ ID NO: 853473 - RNA, 19 nt, Artificial Sequence
  Description of Artificial Sequence: Synthetic oligonucleotide
  Antisense strand to SEQ ID NO: 853472
augccuagucaaagaguca

SEQ ID NO: 853474 - RNA, 19 nt, Artificial Sequence
  Description of Artificial Sequence: Synthetic oligonucleotide
  Sense strand starting at position 229 of SEQ ID NO: 588269
guagcucauuuauauguuu

SEQ ID NO: 853475 - RNA, 19 nt, Artificial Sequence
  Description of Artificial Sequence: Synthetic oligonucleotide
  Antisense strand to SEQ ID NO: 853474
aaacauauaaaugagcuac

SEQ ID NO: 853476 - RNA, 19 nt, Artificial Sequence
  Description of Artificial Sequence: Synthetic oligonucleotide
  Sense strand starting at position 232 of SEQ ID NO: 588269
gcucauuuauauguuuguu

SEQ ID NO: 853477 - RNA, 19 nt, Artificial Sequence
  Description of Artificial Sequence: Synthetic oligonucleotide
  Antisense strand to SEQ ID NO: 853476
aacaaacauauaaaugagc

SEQ ID NO: 853478 - RNA, 19 nt, Artificial Sequence
  Description of Artificial Sequence: Synthetic oligonucleotide
  Sense strand starting at position 785 of SEQ ID NO: 588269
agacaacucucugcuagag

SEQ ID NO: 853479 - RNA, 19 nt, Artificial Sequence
  Description of Artificial Sequence: Synthetic oligonucleotide
  Antisense strand to SEQ ID NO: 853478
cucuagcagagaguugucu

SEQ ID NO: 853480 - RNA, 19 nt, Artificial Sequence
  Description of Artificial Sequence: Synthetic oligonucleotide
  Sense strand starting at position 787 of SEQ ID NO: 588269
acaacucucugcuagagau

SEQ ID NO: 853481 - RNA, 19 nt, Artificial Sequence
  Description of Artificial Sequence: Synthetic oligonucleotide
  Antisense strand to SEQ ID NO: 853480
aucucuagcagagaguugu

SEQ ID NO: 853482 - RNA, 19 nt, Artificial Sequence
  Description of Artificial Sequence: Synthetic oligonucleotide
  Sense strand starting at position 1144 of SEQ ID NO: 588269
guaguuaggacagguuauu

SEQ ID NO: 853483 - RNA, 19 nt, Artificial Sequence
  Description of Artificial Sequence: Synthetic oligonucleotide
  Antisense strand to SEQ ID NO: 853482
aauaaccuguccuaacuac

SEQ ID NO: 853484 - RNA, 19 nt, Artificial Sequence
  Description of Artificial Sequence: Synthetic oligonucleotide
  Sense strand starting at position 1150 of SEQ ID NO: 588269
aggacagguuauuaauuua

SEQ ID NO: 853485 - RNA, 19 nt, Artificial Sequence
  Description of Artificial Sequence: Synthetic oligonucleotide
  Antisense strand to SEQ ID NO: 853484
uaaauuaauaaccuguccu

SEQ ID NO: 853486 - RNA, 19 nt, Artificial Sequence
  Description of Artificial Sequence: Synthetic oligonucleotide
  Sense strand starting at position 1361 of SEQ ID NO: 588269
acagcauuugcacgcuaau

SEQ ID NO: 853487 - RNA, 19 nt, Artificial Sequence
  Description of Artificial Sequence: Synthetic oligonucleotide
  Antisense strand to SEQ ID NO: 853486
auuagcgugcaaaugcugu

SEQ ID NO: 853488 - RNA, 19 nt, Artificial Sequence
  Description of Artificial Sequence: Synthetic oligonucleotide
  Sense strand starting at position 1370 of SEQ ID NO: 588269
gcacgcuaaucucuuauua

SEQ ID NO: 853489 - RNA, 19 nt, Artificial Sequence
  Description of Artificial Sequence: Synthetic oligonucleotide
  Antisense strand to SEQ ID NO: 853488
uaauaagagauuagcgugc

SEQ ID NO: 853490 - RNA, 19 nt, Artificial Sequence
  Description of Artificial Sequence: Synthetic oligonucleotide
  Sense strand starting at position 1372 of SEQ ID NO: 588269
acgcuaaucucuuauuaag

SEQ ID NO: 853491 - RNA, 19 nt, Artificial Sequence
  Description of Artificial Sequence: Synthetic oligonucleotide
  Antisense strand to SEQ ID NO: 853490
cuuaauaagagauuagcgu

SEQ ID NO: 853492 - RNA, 19 nt, Artificial Sequence
  Description of Artificial Sequence: Synthetic oligonucleotide
  Sense strand starting at position 2761 of SEQ ID NO: 588269
gcgccuacugugugcuaga

SEQ ID NO: 853493 - RNA, 19 nt, Artificial Sequence
  Description of Artificial Sequence: Synthetic oligonucleotide
  Antisense strand to SEQ ID NO: 853492
ucuagcacacaguaggcgc

SEQ ID NO: 853494 - RNA, 19 nt, Artificial Sequence
  Description of Artificial Sequence: Synthetic oligonucleotide
  Sense strand starting at position 356 of SEQ ID NO: 588271
aaauauuuggugugugcca

SEQ ID NO: 853495 - RNA, 19 nt, Artificial Sequence
  Description of Artificial Sequence: Synthetic oligonucleotide
  Antisense strand to SEQ ID NO: 853494
uggcacacaccaaauauuu

SEQ ID NO: 853496 - RNA, 19 nt, Artificial Sequence
  Description of Artificial Sequence: Synthetic oligonucleotide
  Sense strand starting at position 357 of SEQ ID NO: 588271
aauauuuggugugugccaa

SEQ ID NO: 853497 - RNA, 19 nt, Artificial Sequence
  Description of Artificial Sequence: Synthetic oligonucleotide
  Antisense strand to SEQ ID NO: 853496
uuggcacacaccaaauauu

SEQ ID NO: 853498 - RNA, 19 nt, Artificial Sequence
  Description of Artificial Sequence: Synthetic oligonucleotide
  Sense strand starting at position 420 of SEQ ID NO: 588271
acaaaccuuugagauagaa

SEQ ID NO: 853499 - RNA, 19 nt, Artificial Sequence
  Description of Artificial Sequence: Synthetic oligonucleotide
  Antisense strand to SEQ ID NO: 853498
uucuaucucaaagguuugu

SEQ ID NO: 853500 - RNA, 19 nt, Artificial Sequence
  Description of Artificial Sequence: Synthetic oligonucleotide
  Sense strand starting at position 761 of SEQ ID NO: 588271
agagcagucacuugaugga

SEQ ID NO: 853501 - RNA, 19 nt, Artificial Sequence
  Description of Artificial Sequence: Synthetic oligonucleotide
  Antisense strand to SEQ ID NO: 853500
uccaucaagugacugcucu

SEQ ID NO: 853502 - RNA, 19 nt, Artificial Sequence
  Description of Artificial Sequence: Synthetic oligonucleotide
  Sense strand starting at position 768 of SEQ ID NO: 588271
ucacuugauggauggcaaa

SEQ ID NO: 853503 - RNA, 19 nt, Artificial Sequence
  Description of Artificial Sequence: Synthetic oligonucleotide
  Antisense strand to SEQ ID NO: 853502
uuugccauccaucaaguga

SEQ ID NO: 853504 - RNA, 19 nt, Artificial Sequence
  Description of Artificial Sequence: Synthetic oligonucleotide
  Sense strand starting at position 780 of SEQ ID NO: 588271
uggcaaaucuggucuuaua

SEQ ID NO: 853505 - RNA, 19 nt, Artificial Sequence
  Description of Artificial Sequence: Synthetic oligonucleotide
  Antisense strand to SEQ ID NO: 853504
uauaagaccagauuugcca

SEQ ID NO: 853506 - RNA, 19 nt, Artificial Sequence
  Description of Artificial Sequence: Synthetic oligonucleotide
  Sense strand starting at position 811 of SEQ ID NO: 588271
auuguugucaaagacuguu

SEQ ID NO: 853507 - RNA, 19 nt, Artificial Sequence
  Description of Artificial Sequence: Synthetic oligonucleotide
  Antisense strand to SEQ ID NO: 853506
aacagucuuugacaacaau

SEQ ID NO: 853508 - RNA, 19 nt, Artificial Sequence
  Description of Artificial Sequence: Synthetic oligonucleotide
  Sense strand starting at position 814 of SEQ ID NO: 588271
guugucaaagacuguuaau

SEQ ID NO: 853509 - RNA, 19 nt, Artificial Sequence
  Description of Artificial Sequence: Synthetic oligonucleotide
  Antisense strand to SEQ ID NO: 853508
auuaacagucuuugacaac

SEQ ID NO: 853510 - RNA, 19 nt, Artificial Sequence
  Description of Artificial Sequence: Synthetic oligonucleotide
  Sense strand starting at position 905 of SEQ ID NO: 588271
aaauuaauccuggguugag

SEQ ID NO: 853511 - RNA, 19 nt, Artificial Sequence
  Description of Artificial Sequence: Synthetic oligonucleotide
  Antisense strand to SEQ ID NO: 853510
cucaacccaggauuaauuu

SEQ ID NO: 853512 - RNA, 19 nt, Artificial Sequence
  Description of Artificial Sequence: Synthetic oligonucleotide
  Sense strand starting at position 906 of SEQ ID NO: 588271
aauuaauccuggguugaga

SEQ ID NO: 853513 - RNA, 19 nt, Artificial Sequence
  Description of Artificial Sequence: Synthetic oligonucleotide
  Antisense strand to SEQ ID NO: 853512
ucucaacccaggauuaauu

SEQ ID NO: 853514 - RNA, 19 nt, Artificial Sequence
  Description of Artificial Sequence: Synthetic oligonucleotide
  Sense strand starting at position 936 of SEQ ID NO: 588271
agccaaagauucucuaaga

SEQ ID NO: 853515 - RNA, 19 nt, Artificial Sequence
  Description of Artificial Sequence: Synthetic oligonucleotide
  Antisense strand to SEQ ID NO: 853514
ucuuagagaaucuuuggcu

SEQ ID NO: 853516 - RNA, 19 nt, Artificial Sequence
  Description of Artificial Sequence: Synthetic oligonucleotide
  Sense strand starting at position 937 of SEQ ID NO: 588271
gccaaagauucucuaagau

SEQ ID NO: 853517 - RNA, 19 nt, Artificial Sequence
  Description of Artificial Sequence: Synthetic oligonucleotide
  Antisense strand to SEQ ID NO: 853516
aucuuagagaaucuuuggc

SEQ ID NO: 853518 - RNA, 19 nt, Artificial Sequence
  Description of Artificial Sequence: Synthetic oligonucleotide
  Sense strand starting at position 1017 of SEQ ID NO: 588271
uggcuuguucuuggaaaga

SEQ ID NO: 853519 - RNA, 19 nt, Artificial Sequence
  Description of Artificial Sequence: Synthetic oligonucleotide
  Antisense strand to SEQ ID NO: 853518
ucuuuccaagaacaagcca

SEQ ID NO: 853520 - RNA, 19 nt, Artificial Sequence
  Description of Artificial Sequence: Synthetic oligonucleotide
  Sense strand starting at position 1101 of SEQ ID NO: 588271
gccaacuugcagcaaagau

SEQ ID NO: 853521 - RNA, 19 nt, Artificial Sequence
  Description of Artificial Sequence: Synthetic oligonucleotide
  Antisense strand to SEQ ID NO: 853520
aucuuugcugcaaguuggc

SEQ ID NO: 853522 - RNA, 19 nt, Artificial Sequence
  Description of Artificial Sequence: Synthetic oligonucleotide
  Sense strand starting at position 1162 of SEQ ID NO: 588271
agaguuuaauggcuauuau

SEQ ID NO: 853523 - RNA, 19 nt, Artificial Sequence
  Description of Artificial Sequence: Synthetic oligonucleotide
  Antisense strand to SEQ ID NO: 853522
auaauagccauuaaacucu

SEQ ID NO: 853524 - RNA, 19 nt, Artificial Sequence
  Description of Artificial Sequence: Synthetic oligonucleotide
  Sense strand starting at position 1163 of SEQ ID NO: 588271
gaguuuaauggcuauuauu

SEQ ID NO: 853525 - RNA, 19 nt, Artificial Sequence
  Description of Artificial Sequence: Synthetic oligonucleotide
  Antisense strand to SEQ ID NO: 853524
aauaauagccauuaaacuc

SEQ ID NO: 853526 - RNA, 19 nt, Artificial Sequence
  Description of Artificial Sequence: Synthetic oligonucleotide
  Sense strand starting at position 1329 of SEQ ID NO: 588271
gucccauauguggaaauca

SEQ ID NO: 853527 - RNA, 19 nt, Artificial Sequence
  Description of Artificial Sequence: Synthetic oligonucleotide
  Antisense strand to SEQ ID NO: 853526
ugauuuccacauaugggac

SEQ ID NO: 853528 - RNA, 19 nt, Artificial Sequence
  Description of Artificial Sequence: Synthetic oligonucleotide
  Sense strand starting at position 1358 of SEQ ID NO: 588271
agauaagcaguuugcuaau

SEQ ID NO: 853529 - RNA, 19 nt, Artificial Sequence
  Description of Artificial Sequence: Synthetic oligonucleotide
  Antisense strand to SEQ ID NO: 853528
auuagcaaacugcuuaucu

SEQ ID NO: 853530 - RNA, 19 nt, Artificial Sequence
  Description of Artificial Sequence: Synthetic oligonucleotide
  Sense strand starting at position 1360 of SEQ ID NO: 588271
auaagcaguuugcuaauaa

SEQ ID NO: 853531 - RNA, 19 nt, Artificial Sequence
  Description of Artificial Sequence: Synthetic oligonucleotide
  Antisense strand to SEQ ID NO: 853530
uuauuagcaaacugcuuau

SEQ ID NO: 853532 - RNA, 19 nt, Artificial Sequence
  Description of Artificial Sequence: Synthetic oligonucleotide
  Sense strand starting at position 1651 of SEQ ID NO: 588271
uuaguaccagaauguuaca

SEQ ID NO: 853533 - RNA, 19 nt, Artificial Sequence
  Description of Artificial Sequence: Synthetic oligonucleotide
  Antisense strand to SEQ ID NO: 853532
uguaacauucugguacuaa

SEQ ID NO: 853534 - RNA, 19 nt, Artificial Sequence
  Description of Artificial Sequence: Synthetic oligonucleotide
  Sense strand starting at position 1712 of SEQ ID NO: 588271
gaaguauguggucagacca

SEQ ID NO: 853535 - RNA, 19 nt, Artificial Sequence
  Description of Artificial Sequence: Synthetic oligonucleotide
  Antisense strand to SEQ ID NO: 853534
uggucugaccacauacuuc

SEQ ID NO: 853536 - RNA, 19 nt, Artificial Sequence
  Description of Artificial Sequence: Synthetic oligonucleotide
  Sense strand starting at position 1745 of SEQ ID NO: 588271
aagugauaccuuuaugguc

SEQ ID NO: 853537 - RNA, 19 nt, Artificial Sequence
  Description of Artificial Sequence: Synthetic oligonucleotide
  Antisense strand to SEQ ID NO: 853536
gaccauaaagguaucacuu

SEQ ID NO: 853538 - RNA, 19 nt, Artificial Sequence
  Description of Artificial Sequence: Synthetic oligonucleotide
  Sense strand starting at position 1750 of SEQ ID NO: 588271
auaccuuuauggucuugau

SEQ ID NO: 853539 - RNA, 19 nt, Artificial Sequence
  Description of Artificial Sequence: Synthetic oligonucleotide
  Antisense strand to SEQ ID NO: 853538
aucaagaccauaaagguau

SEQ ID NO: 853540 - RNA, 19 nt, Artificial Sequence
  Description of Artificial Sequence: Synthetic oligonucleotide
  Sense strand starting at position 2161 of SEQ ID NO: 588271
cacugaugaccuugccaga

SEQ ID NO: 853541 - RNA, 19 nt, Artificial Sequence
  Description of Artificial Sequence: Synthetic oligonucleotide
  Antisense strand to SEQ ID NO: 853540
ucuggcaaggucaucagug

SEQ ID NO: 853542 - RNA, 19 nt, Artificial Sequence
  Description of Artificial Sequence: Synthetic oligonucleotide
  Sense strand starting at position 2241 of SEQ ID NO: 588271
uccuguucuguuuauugaa

SEQ ID NO: 853543 - RNA, 19 nt, Artificial Sequence
  Description of Artificial Sequence: Synthetic oligonucleotide
  Antisense strand to SEQ ID NO: 853542
uucaauaaacagaacagga

SEQ ID NO: 853544 - RNA, 19 nt, Artificial Sequence
  Description of Artificial Sequence: Synthetic oligonucleotide
  Sense strand starting at position 2335 of SEQ ID NO: 588271
agcaguauuuaauacugau

SEQ ID NO: 853545 - RNA, 19 nt, Artificial Sequence
  Description of Artificial Sequence: Synthetic oligonucleotide
  Antisense strand to SEQ ID NO: 853544
aucaguauuaaauacugcu

SEQ ID NO: 853546 - RNA, 19 nt, Artificial Sequence
  Description of Artificial Sequence: Synthetic oligonucleotide
  Sense strand starting at position 2489 of SEQ ID NO: 588271
aucagaacuccucauuggu

SEQ ID NO: 853547 - RNA, 19 nt, Artificial Sequence
  Description of Artificial Sequence: Synthetic oligonucleotide
  Antisense strand to SEQ ID NO: 853546
accaaugaggaguucugau

SEQ ID NO: 853548 - RNA, 19 nt, Artificial Sequence
  Description of Artificial Sequence: Synthetic oligonucleotide
  Sense strand starting at position 2513 of SEQ ID NO: 588271
cuaguuucugucuaaucuu

SEQ ID NO: 853549 - RNA, 19 nt, Artificial Sequence
  Description of Artificial Sequence: Synthetic oligonucleotide
  Antisense strand to SEQ ID NO: 853548
aagauuagacagaaacuag

SEQ ID NO: 853550 - RNA, 19 nt, Artificial Sequence
  Description of Artificial Sequence: Synthetic oligonucleotide
  Sense strand starting at position 2521 of SEQ ID NO: 588271
ugucuaaucuuaucuugga

SEQ ID NO: 853551 - RNA, 19 nt, Artificial Sequence
  Description of Artificial Sequence: Synthetic oligonucleotide
  Antisense strand to SEQ ID NO: 853550
uccaagauaagauuagaca

SEQ ID NO: 853552 - RNA, 19 nt, Artificial Sequence
  Description of Artificial Sequence: Synthetic oligonucleotide
  Sense strand starting at position 2567 of SEQ ID NO: 588271
augccauguguuuacucua

SEQ ID NO: 853553 - RNA, 19 nt, Artificial Sequence
  Description of Artificial Sequence: Synthetic oligonucleotide
  Antisense strand to SEQ ID NO: 853552
uagaguaaacacauggcau

SEQ ID NO: 853554 - RNA, 19 nt, Artificial Sequence
  Description of Artificial Sequence: Synthetic oligonucleotide
  Sense strand starting at position 2570 of SEQ ID NO: 588271
ccauguguuuacucuauuu

SEQ ID NO: 853555 - RNA, 19 nt, Artificial Sequence
  Description of Artificial Sequence: Synthetic oligonucleotide
  Antisense strand to SEQ ID NO: 853554
aaauagaguaaacacaugg

SEQ ID NO: 853556 - RNA, 19 nt, Artificial Sequence
  Description of Artificial Sequence: Synthetic oligonucleotide
  Sense strand starting at position 2858 of SEQ ID NO: 588271
ggauuacauauggguguga

SEQ ID NO: 853557 - RNA, 19 nt, Artificial Sequence
  Description of Artificial Sequence: Synthetic oligonucleotide
  Antisense strand to SEQ ID NO: 853556
ucacacccauauguaaucc

SEQ ID NO: 853558 - RNA, 19 nt, Artificial Sequence
  Description of Artificial Sequence: Synthetic oligonucleotide
  Sense strand starting at position 2940 of SEQ ID NO: 588271
uuuccaauugccuacguga

SEQ ID NO: 853559 - RNA, 19 nt, Artificial Sequence
  Description of Artificial Sequence: Synthetic oligonucleotide
  Antisense strand to SEQ ID NO: 853558
ucacguaggcaauuggaaa

SEQ ID NO: 853560 - RNA, 19 nt, Artificial Sequence
  Description of Artificial Sequence: Synthetic oligonucleotide
  Sense strand starting at position 2955 of SEQ ID NO: 588271
gugauaucucauuggcauc

SEQ ID NO: 853561 - RNA, 19 nt, Artificial Sequence
  Description of Artificial Sequence: Synthetic oligonucleotide
  Antisense strand to SEQ ID NO: 853560
gaugccaaugagauaucac

SEQ ID NO: 853562 - RNA, 19 nt, Artificial Sequence
  Description of Artificial Sequence: Synthetic oligonucleotide
  Sense strand starting at position 3035 of SEQ ID NO: 588271
uccaguguucccuaaauac

SEQ ID NO: 853563 - RNA, 19 nt, Artificial Sequence
  Description of Artificial Sequence: Synthetic oligonucleotide
  Antisense strand to SEQ ID NO: 853562
guauuuagggaacacugga

SEQ ID NO: 853564 - RNA, 19 nt, Artificial Sequence
  Description of Artificial Sequence: Synthetic oligonucleotide
  Sense strand starting at position 3119 of SEQ ID NO: 588271
gucccauacucagucaauc

SEQ ID NO: 853565 - RNA, 19 nt, Artificial Sequence
  Description of Artificial Sequence: Synthetic oligonucleotide
  Antisense strand to SEQ ID NO: 853564
gauugacugaguaugggac

SEQ ID NO: 853566 - RNA, 19 nt, Artificial Sequence
  Description of Artificial Sequence: Synthetic oligonucleotide
  Sense strand starting at position 3306 of SEQ ID NO: 588271
gucagauagccagagugau

SEQ ID NO: 853567 - RNA, 19 nt, Artificial Sequence
  Description of Artificial Sequence: Synthetic oligonucleotide
  Antisense strand to SEQ ID NO: 853566
aucacucuggcuaucugac

SEQ ID NO: 853568 - RNA, 19 nt, Artificial Sequence
  Description of Artificial Sequence: Synthetic oligonucleotide
  Sense strand starting at position 3673 of SEQ ID NO: 588271
gcagucuguaaugaaggaa

SEQ ID NO: 853569 - RNA, 19 nt, Artificial Sequence
  Description of Artificial Sequence: Synthetic oligonucleotide
  Antisense strand to SEQ ID NO: 853568
uuccuucauuacagacugc

SEQ ID NO: 853570 - RNA, 19 nt, Artificial Sequence
  Description of Artificial Sequence: Synthetic oligonucleotide
  Sense strand starting at position 3676 of SEQ ID NO: 588271
gucuguaaugaaggaaauc

SEQ ID NO: 853571 - RNA, 19 nt, Artificial Sequence
  Description of Artificial Sequence: Synthetic oligonucleotide
  Antisense strand to SEQ ID NO: 853570
gauuuccuucauuacagac

SEQ ID NO: 853572 - RNA, 19 nt, Artificial Sequence
  Description of Artificial Sequence: Synthetic oligonucleotide
  Sense strand starting at position 3860 of SEQ ID NO: 588271
cagagaucagcucaacugu

SEQ ID NO: 853573 - RNA, 19 nt, Artificial Sequence
  Description of Artificial Sequence: Synthetic oligonucleotide
  Antisense strand to SEQ ID NO: 853572
acaguugagcugaucucug

SEQ ID NO: 853574 - RNA, 19 nt, Artificial Sequence
  Description of Artificial Sequence: Synthetic oligonucleotide
  Sense strand starting at position 93 of SEQ ID NO: 588272
ggucuuguugcccaggaga

SEQ ID NO: 853575 - RNA, 19 nt, Artificial Sequence
  Description of Artificial Sequence: Synthetic oligonucleotide
  Antisense strand to SEQ ID NO: 853574
ucuccugggcaacaagacc

SEQ ID NO: 853576 - RNA, 19 nt, Artificial Sequence
  Description of Artificial Sequence: Synthetic oligonucleotide
  Sense strand starting at position 95 of SEQ ID NO: 588272
ucuuguugcccaggagaca

SEQ ID NO: 853577 - RNA, 19 nt, Artificial Sequence
  Description of Artificial Sequence: Synthetic oligonucleotide
  Antisense strand to SEQ ID NO: 853576
ugucuccugggcaacaaga

SEQ ID NO: 853578 - RNA, 19 nt, Artificial Sequence
  Description of Artificial Sequence: Synthetic oligonucleotide
  Sense strand starting at position 96 of SEQ ID NO: 588272
cuuguugcccaggagacaa

SEQ ID NO: 853579 - RNA, 19 nt, Artificial Sequence
  Description of Artificial Sequence: Synthetic oligonucleotide
  Antisense strand to SEQ ID NO: 853578
uugucuccugggcaacaag

SEQ ID NO: 853580 - RNA, 19 nt, Artificial Sequence
  Description of Artificial Sequence: Synthetic oligonucleotide
  Sense strand starting at position 194 of SEQ ID NO: 588272
agagguuguuuccuagacu

SEQ ID NO: 853581 - RNA, 19 nt, Artificial Sequence
  Description of Artificial Sequence: Synthetic oligonucleotide
  Antisense strand to SEQ ID NO: 853580
agucuaggaaacaaccucu

SEQ ID NO: 853582 - RNA, 19 nt, Artificial Sequence
  Description of Artificial Sequence: Synthetic oligonucleotide
  Sense strand starting at position 197 of SEQ ID NO: 588272
gguuguuuccuagacuuuc

SEQ ID NO: 853583 - RNA, 19 nt, Artificial Sequence
  Description of Artificial Sequence: Synthetic oligonucleotide
  Antisense strand to SEQ ID NO: 853582
gaaagucuaggaaacaacc

SEQ ID NO: 853584 - RNA, 19 nt, Artificial Sequence
  Description of Artificial Sequence: Synthetic oligonucleotide
  Sense strand starting at position 229 of SEQ ID NO: 588272
aauugaagauguguacuaa

SEQ ID NO: 853585 - RNA, 19 nt, Artificial Sequence
  Description of Artificial Sequence: Synthetic oligonucleotide
  Antisense strand to SEQ ID NO: 853584
uuaguacacaucuucaauu

SEQ ID NO: 853586 - RNA, 19 nt, Artificial Sequence
  Description of Artificial Sequence: Synthetic oligonucleotide
  Sense strand starting at position 652 of SEQ ID NO: 588272
caacauuucuaggaaggua

SEQ ID NO: 853587 - RNA, 19 nt, Artificial Sequence
  Description of Artificial Sequence: Synthetic oligonucleotide
  Antisense strand to SEQ ID NO: 853586
uaccuuccuagaaauguug

SEQ ID NO: 853588 - RNA, 19 nt, Artificial Sequence
  Description of Artificial Sequence: Synthetic oligonucleotide
  Sense strand starting at position 712 of SEQ ID NO: 588272
ggcacagagcgaugaaauc

SEQ ID NO: 853589 - RNA, 19 nt, Artificial Sequence
  Description of Artificial Sequence: Synthetic oligonucleotide
  Antisense strand to SEQ ID NO: 853588
gauuucaucgcucugugcc

SEQ ID NO: 853590 - RNA, 19 nt, Artificial Sequence
  Description of Artificial Sequence: Synthetic oligonucleotide
  Sense strand starting at position 772 of SEQ ID NO: 588272
gcagucugaccuuaaccga

SEQ ID NO: 853591 - RNA, 19 nt, Artificial Sequence
  Description of Artificial Sequence: Synthetic oligonucleotide
  Antisense strand to SEQ ID NO: 853590
ucgguuaaggucagacugc

SEQ ID NO: 853592 - RNA, 19 nt, Artificial Sequence
  Description of Artificial Sequence: Synthetic oligonucleotide
  Sense strand starting at position 846 of SEQ ID NO: 588272
cugaguucugcuggagaaa

SEQ ID NO: 853593 - RNA, 19 nt, Artificial Sequence
  Description of Artificial Sequence: Synthetic oligonucleotide
  Antisense strand to SEQ ID NO: 853592
uuucuccagcagaacucag

SEQ ID NO: 853594 - RNA, 19 nt, Artificial Sequence
  Description of Artificial Sequence: Synthetic oligonucleotide
  Sense strand starting at position 847 of SEQ ID NO: 588272
ugaguucugcuggagaaac

SEQ ID NO: 853595 - RNA, 19 nt, Artificial Sequence
  Description of Artificial Sequence: Synthetic oligonucleotide
  Antisense strand to SEQ ID NO: 853594
guuucuccagcagaacuca

SEQ ID NO: 853596 - RNA, 19 nt, Artificial Sequence
  Description of Artificial Sequence: Synthetic oligonucleotide
  Sense strand starting at position 885 of SEQ ID NO: 588272
gggaucagaucucuggcuu

SEQ ID NO: 853597 - RNA, 19 nt, Artificial Sequence
  Description of Artificial Sequence: Synthetic oligonucleotide
  Antisense strand to SEQ ID NO: 853596
aagccagagaucugauccc

SEQ ID NO: 853598 - RNA, 19 nt, Artificial Sequence
  Description of Artificial Sequence: Synthetic oligonucleotide
  Sense strand starting at position 886 of SEQ ID NO: 588272
ggaucagaucucuggcuuc

SEQ ID NO: 853599 - RNA, 19 nt, Artificial Sequence
  Description of Artificial Sequence: Synthetic oligonucleotide
  Antisense strand to SEQ ID NO: 853598
gaagccagagaucugaucc

SEQ ID NO: 853600 - RNA, 19 nt, Artificial Sequence
  Description of Artificial Sequence: Synthetic oligonucleotide
  Sense strand starting at position 932 of SEQ ID NO: 588272
ggagccacugcccaugaua

SEQ ID NO: 853601 - RNA, 19 nt, Artificial Sequence
  Description of Artificial Sequence: Synthetic oligonucleotide
  Antisense strand to SEQ ID NO: 853600
uaucaugggcaguggcucc

SEQ ID NO: 853602 - RNA, 19 nt, Artificial Sequence
  Description of Artificial Sequence: Synthetic oligonucleotide
  Sense strand starting at position 934 of SEQ ID NO: 588272
agccacugcccaugauaga

SEQ ID NO: 853603 - RNA, 19 nt, Artificial Sequence
  Description of Artificial Sequence: Synthetic oligonucleotide
  Antisense strand to SEQ ID NO: 853602
ucuaucaugggcaguggcu

SEQ ID NO: 853604 - RNA, 19 nt, Artificial Sequence
  Description of Artificial Sequence: Synthetic oligonucleotide
  Sense strand starting at position 967 of SEQ ID NO: 588272
uaacucagagcuggguuaa

SEQ ID NO: 853605 - RNA, 19 nt, Artificial Sequence
  Description of Artificial Sequence: Synthetic oligonucleotide
  Antisense strand to SEQ ID NO: 853604
uuaacccagcucugaguua

SEQ ID NO: 853606 - RNA, 19 nt, Artificial Sequence
  Description of Artificial Sequence: Synthetic oligonucleotide
  Sense strand starting at position 980 of SEQ ID NO: 588272
gguuaagcaaccgagcaau

SEQ ID NO: 853607 - RNA, 19 nt, Artificial Sequence
  Description of Artificial Sequence: Synthetic oligonucleotide
  Antisense strand to SEQ ID NO: 853606
auugcucgguugcuuaacc

SEQ ID NO: 853608 - RNA, 19 nt, Artificial Sequence
  Description of Artificial Sequence: Synthetic oligonucleotide
  Sense strand starting at position 991 of SEQ ID NO: 588272
cgagcaauucaguuccguu

SEQ ID NO: 853609 - RNA, 19 nt, Artificial Sequence
  Description of Artificial Sequence: Synthetic oligonucleotide
  Antisense strand to SEQ ID NO: 853608
aacggaacugaauugcucg

SEQ ID NO: 853610 - RNA, 19 nt, Artificial Sequence
  Description of Artificial Sequence: Synthetic oligonucleotide
  Sense strand starting at position 1003 of SEQ ID NO: 588272
uuccguuauuucuugagca

SEQ ID NO: 853611 - RNA, 19 nt, Artificial Sequence
  Description of Artificial Sequence: Synthetic oligonucleotide
  Antisense strand to SEQ ID NO: 853610
ugcucaagaaauaacggaa

SEQ ID NO: 853612 - RNA, 19 nt, Artificial Sequence
  Description of Artificial Sequence: Synthetic oligonucleotide
  Sense strand starting at position 1007 of SEQ ID NO: 588272
guuauuucuugagcagcaa

SEQ ID NO: 853613 - RNA, 19 nt, Artificial Sequence
  Description of Artificial Sequence: Synthetic oligonucleotide
  Antisense strand to SEQ ID NO: 853612
uugcugcucaagaaauaac

SEQ ID NO: 853614 - RNA, 19 nt, Artificial Sequence
  Description of Artificial Sequence: Synthetic oligonucleotide
  Sense strand starting at position 1558 of SEQ ID NO: 588272
agaugugcccgagggagaa

SEQ ID NO: 853615 - RNA, 19 nt, Artificial Sequence
  Description of Artificial Sequence: Synthetic oligonucleotide
  Antisense strand to SEQ ID NO: 853614
uucucccucgggcacaucu

SEQ ID NO: 853616 - RNA, 19 nt, Artificial Sequence
  Description of Artificial Sequence: Synthetic oligonucleotide
  Sense strand starting at position 1991 of SEQ ID NO: 588272
uuauguaaccugcgaggaa

SEQ ID NO: 853617 - RNA, 19 nt, Artificial Sequence
  Description of Artificial Sequence: Synthetic oligonucleotide
  Antisense strand to SEQ ID NO: 853616
uuccucgcagguuacauaa

SEQ ID NO: 853618 - RNA, 19 nt, Artificial Sequence
  Description of Artificial Sequence: Synthetic oligonucleotide
  Sense strand starting at position 2153 of SEQ ID NO: 588272
gugauuuccuuauaugaug

SEQ ID NO: 853619 - RNA, 19 nt, Artificial Sequence
  Description of Artificial Sequence: Synthetic oligonucleotide
  Antisense strand to SEQ ID NO: 853618
caucauauaaggaaaucac

SEQ ID NO: 853620 - RNA, 19 nt, Artificial Sequence
  Description of Artificial Sequence: Synthetic oligonucleotide
  Sense strand starting at position 2494 of SEQ ID NO: 588272
gccaauaaacgcuggauga

SEQ ID NO: 853621 - RNA, 19 nt, Artificial Sequence
  Description of Artificial Sequence: Synthetic oligonucleotide
  Antisense strand to SEQ ID NO: 853620
ucauccagcguuuauuggc

SEQ ID NO: 853622 - RNA, 19 nt, Artificial Sequence
  Description of Artificial Sequence: Synthetic oligonucleotide
  Sense strand starting at position 2495 of SEQ ID NO: 588272
ccaauaaacgcuggaugaa

SEQ ID NO: 853623 - RNA, 19 nt, Artificial Sequence
  Description of Artificial Sequence: Synthetic oligonucleotide
  Antisense strand to SEQ ID NO: 853622
uucauccagcguuuauugg

SEQ ID NO: 853624 - RNA, 19 nt, Artificial Sequence
  Description of Artificial Sequence: Synthetic oligonucleotide
  Sense strand starting at position 2665 of SEQ ID NO: 588272
uggguaaacccucaauggu

SEQ ID NO: 853625 - RNA, 19 nt, Artificial Sequence
  Description of Artificial Sequence: Synthetic oligonucleotide
  Antisense strand to SEQ ID NO: 853624
accauugaggguuuaccca

SEQ ID NO: 853626 - RNA, 19 nt, Artificial Sequence
  Description of Artificial Sequence: Synthetic oligonucleotide
  Sense strand starting at position 2716 of SEQ ID NO: 588272
gugugagaucuuggaguga

SEQ ID NO: 853627 - RNA, 19 nt, Artificial Sequence
  Description of Artificial Sequence: Synthetic oligonucleotide
  Antisense strand to SEQ ID NO: 853626
ucacuccaagaucucacac

SEQ ID NO: 853628 - RNA, 19 nt, Artificial Sequence
  Description of Artificial Sequence: Synthetic oligonucleotide
  Sense strand starting at position 2718 of SEQ ID NO: 588272
gugagaucuuggagugaga

SEQ ID NO: 853629 - RNA, 19 nt, Artificial Sequence
  Description of Artificial Sequence: Synthetic oligonucleotide
  Antisense strand to SEQ ID NO: 853628
ucucacuccaagaucucac

SEQ ID NO: 853630 - RNA, 19 nt, Artificial Sequence
  Description of Artificial Sequence: Synthetic oligonucleotide
  Sense strand starting at position 2924 of SEQ ID NO: 588272
auggcaugggaauggauau

SEQ ID NO: 853631 - RNA, 19 nt, Artificial Sequence
  Description of Artificial Sequence: Synthetic oligonucleotide
  Antisense strand to SEQ ID NO: 853630
auauccauucccaugccau

SEQ ID NO: 853632 - RNA, 19 nt, Artificial Sequence
  Description of Artificial Sequence: Synthetic oligonucleotide
  Sense strand starting at position 2925 of SEQ ID NO: 588272
uggcaugggaauggauaua

SEQ ID NO: 853633 - RNA, 19 nt, Artificial Sequence
  Description of Artificial Sequence: Synthetic oligonucleotide
  Antisense strand to SEQ ID NO: 853632
uauauccauucccaugcca

SEQ ID NO: 853634 - RNA, 19 nt, Artificial Sequence
  Description of Artificial Sequence: Synthetic oligonucleotide
  Sense strand starting at position 2995 of SEQ ID NO: 588272
gcuuuagcuguguuaucuc

SEQ ID NO: 853635 - RNA, 19 nt, Artificial Sequence
  Description of Artificial Sequence: Synthetic oligonucleotide
  Antisense strand to SEQ ID NO: 853634
gagauaacacagcuaaagc

SEQ ID NO: 853636 - RNA, 19 nt, Artificial Sequence
  Description of Artificial Sequence: Synthetic oligonucleotide
  Sense strand starting at position 3100 of SEQ ID NO: 588272
aggcuaaugaauggcagau

SEQ ID NO: 853637 - RNA, 19 nt, Artificial Sequence
  Description of Artificial Sequence: Synthetic oligonucleotide
  Antisense strand to SEQ ID NO: 853636
aucugccauucauuagccu

SEQ ID NO: 853638 - RNA, 19 nt, Artificial Sequence
  Description of Artificial Sequence: Synthetic oligonucleotide
  Sense strand starting at position 3157 of SEQ ID NO: 588272
gccaguaagcaagaagauu

SEQ ID NO: 853639 - RNA, 19 nt, Artificial Sequence
  Description of Artificial Sequence: Synthetic oligonucleotide
  Antisense strand to SEQ ID NO: 853638
aaucuucuugcuuacuggc

SEQ ID NO: 853640 - RNA, 19 nt, Artificial Sequence
  Description of Artificial Sequence: Synthetic oligonucleotide
  Sense strand starting at position 3278 of SEQ ID NO: 588272
gaugguuggccuggagauc

SEQ ID NO: 853641 - RNA, 19 nt, Artificial Sequence
  Description of Artificial Sequence: Synthetic oligonucleotide
  Antisense strand to SEQ ID NO: 853640
gaucuccaggccaaccauc

SEQ ID NO: 853642 - RNA, 19 nt, Artificial Sequence
  Description of Artificial Sequence: Synthetic oligonucleotide
  Sense strand starting at position 3337 of SEQ ID NO: 588272
ggugaaguugggcaaaucu

SEQ ID NO: 853643 - RNA, 19 nt, Artificial Sequence
  Description of Artificial Sequence: Synthetic oligonucleotide
  Antisense strand to SEQ ID NO: 853642
agauuugcccaacuucacc

SEQ ID NO: 853644 - RNA, 19 nt, Artificial Sequence
  Description of Artificial Sequence: Synthetic oligonucleotide
  Sense strand starting at position 3494 of SEQ ID NO: 588272
auuauuagagguuguggau

SEQ ID NO: 853645 - RNA, 19 nt, Artificial Sequence
  Description of Artificial Sequence: Synthetic oligonucleotide
  Antisense strand to SEQ ID NO: 853644
auccacaaccucuaauaau

SEQ ID NO: 853646 - RNA, 19 nt, Artificial Sequence
  Description of Artificial Sequence: Synthetic oligonucleotide
  Sense strand starting at position 3713 of SEQ ID NO: 588272
auucccugugaauguaaau

SEQ ID NO: 853647 - RNA, 19 nt, Artificial Sequence
  Description of Artificial Sequence: Synthetic oligonucleotide
  Antisense strand to SEQ ID NO: 853646
auuuacauucacagggaau

SEQ ID NO: 853648 - RNA, 19 nt, Artificial Sequence
  Description of Artificial Sequence: Synthetic oligonucleotide
  Sense strand starting at position 3753 of SEQ ID NO: 588272
cugugaugggccuaaccuu

SEQ ID NO: 853649 - RNA, 19 nt, Artificial Sequence
  Description of Artificial Sequence: Synthetic oligonucleotide
  Antisense strand to SEQ ID NO: 853648
aagguuaggcccaucacag

SEQ ID NO: 853650 - RNA, 19 nt, Artificial Sequence
  Description of Artificial Sequence: Synthetic oligonucleotide
  Sense strand starting at position 3910 of SEQ ID NO: 588272
aucaguuauggcuacauag

SEQ ID NO: 853651 - RNA, 19 nt, Artificial Sequence
  Description of Artificial Sequence: Synthetic oligonucleotide
  Antisense strand to SEQ ID NO: 853650
cuauguagccauaacugau

SEQ ID NO: 853652 - RNA, 19 nt, Artificial Sequence
  Description of Artificial Sequence: Synthetic oligonucleotide
  Sense strand starting at position 3912 of SEQ ID NO: 588272
caguuauggcuacauagua

SEQ ID NO: 853653 - RNA, 19 nt, Artificial Sequence
  Description of Artificial Sequence: Synthetic oligonucleotide
  Antisense strand to SEQ ID NO: 853652
uacuauguagccauaacug

SEQ ID NO: 853654 - RNA, 19 nt, Artificial Sequence
  Description of Artificial Sequence: Synthetic oligonucleotide
  Sense strand starting at position 363 of SEQ ID NO: 588274
uugucuuccaaucgugaag

SEQ ID NO: 853655 - RNA, 19 nt, Artificial Sequence
  Description of Artificial Sequence: Synthetic oligonucleotide
  Antisense strand to SEQ ID NO: 853654
cuucacgauuggaagacaa

SEQ ID NO: 853656 - RNA, 19 nt, Artificial Sequence
  Description of Artificial Sequence: Synthetic oligonucleotide
  Sense strand starting at position 505 of SEQ ID NO: 588274
cccgccugucaauaaggau

SEQ ID NO: 853657 - RNA, 19 nt, Artificial Sequence
  Description of Artificial Sequence: Synthetic oligonucleotide
  Antisense strand to SEQ ID NO: 853656
auccuuauugacaggcggg

SEQ ID NO: 853658 - RNA, 19 nt, Artificial Sequence
  Description of Artificial Sequence: Synthetic oligonucleotide
  Sense strand starting at position 547 of SEQ ID NO: 588274
ggcucugauguucgagagu

SEQ ID NO: 853659 - RNA, 19 nt, Artificial Sequence
  Description of Artificial Sequence: Synthetic oligonucleotide
  Antisense strand to SEQ ID NO: 853658
acucucgaacaucagagcc

SEQ ID NO: 853660 - RNA, 19 nt, Artificial Sequence
  Description of Artificial Sequence: Synthetic oligonucleotide
  Sense strand starting at position 853 of SEQ ID NO: 588274
gcugccuuccagggaucaa

SEQ ID NO: 853661 - RNA, 19 nt, Artificial Sequence
  Description of Artificial Sequence: Synthetic oligonucleotide
  Antisense strand to SEQ ID NO: 853660
uugaucccuggaaggcagc

SEQ ID NO: 853662 - RNA, 19 nt, Artificial Sequence
  Description of Artificial Sequence: Synthetic oligonucleotide
  Sense strand starting at position 935 of SEQ ID NO: 588274
cgaacacuuaggugaccaa

SEQ ID NO: 853663 - RNA, 19 nt, Artificial Sequence
  Description of Artificial Sequence: Synthetic oligonucleotide
  Antisense strand to SEQ ID NO: 853662
uuggucaccuaaguguucg

SEQ ID NO: 853664 - RNA, 19 nt, Artificial Sequence
  Description of Artificial Sequence: Synthetic oligonucleotide
  Sense strand starting at position 1128 of SEQ ID NO: 588274
agaggaaguucugcuguag

SEQ ID NO: 853665 - RNA, 19 nt, Artificial Sequence
  Description of Artificial Sequence: Synthetic oligonucleotide
  Antisense strand to SEQ ID NO: 853664
cuacagcagaacuuccucu

SEQ ID NO: 853666 - RNA, 19 nt, Artificial Sequence
  Description of Artificial Sequence: Synthetic oligonucleotide
  Sense strand starting at position 1170 of SEQ ID NO: 588274
gccugugaugugggacaga

SEQ ID NO: 853667 - RNA, 19 nt, Artificial Sequence
  Description of Artificial Sequence: Synthetic oligonucleotide
  Antisense strand to SEQ ID NO: 853666
ucugucccacaucacaggc

SEQ ID NO: 853668 - RNA, 19 nt, Artificial Sequence
  Description of Artificial Sequence: Synthetic oligonucleotide
  Sense strand starting at position 2242 of SEQ ID NO: 588274
cccuguucuuucucugaga

SEQ ID NO: 853669 - RNA, 19 nt, Artificial Sequence
  Description of Artificial Sequence: Synthetic oligonucleotide
  Antisense strand to SEQ ID NO: 853668
ucucagagaaagaacaggg

SEQ ID NO: 853670 - RNA, 19 nt, Artificial Sequence
  Description of Artificial Sequence: Synthetic oligonucleotide
  Sense strand starting at position 2386 of SEQ ID NO: 588274
guuugaucacuucggguua

SEQ ID NO: 853671 - RNA, 19 nt, Artificial Sequence
  Description of Artificial Sequence: Synthetic oligonucleotide
  Antisense strand to SEQ ID NO: 853670
uaacccgaagugaucaaac

SEQ ID NO: 853672 - RNA, 19 nt, Artificial Sequence
  Description of Artificial Sequence: Synthetic oligonucleotide
  Sense strand starting at position 2438 of SEQ ID NO: 588274
uucuuuaacguggaggagu

SEQ ID NO: 853673 - RNA, 19 nt, Artificial Sequence
  Description of Artificial Sequence: Synthetic oligonucleotide
  Antisense strand to SEQ ID NO: 853672
acuccuccacguuaaagaa

SEQ ID NO: 853674 - RNA, 19 nt, Artificial Sequence
  Description of Artificial Sequence: Synthetic oligonucleotide
  Sense strand starting at position 2622 of SEQ ID NO: 588274
ugugcuuggacgggaacau

SEQ ID NO: 853675 - RNA, 19 nt, Artificial Sequence
  Description of Artificial Sequence: Synthetic oligonucleotide
  Antisense strand to SEQ ID NO: 853674
auguucccguccaagcaca

SEQ ID NO: 853676 - RNA, 19 nt, Artificial Sequence
  Description of Artificial Sequence: Synthetic oligonucleotide
  Sense strand starting at position 2631 of SEQ ID NO: 588274
acgggaacaucuggguuau

SEQ ID NO: 853677 - RNA, 19 nt, Artificial Sequence
  Description of Artificial Sequence: Synthetic oligonucleotide
  Antisense strand to SEQ ID NO: 853676
auaacccagauguucccgu

SEQ ID NO: 853678 - RNA, 19 nt, Artificial Sequence
  Description of Artificial Sequence: Synthetic oligonucleotide
  Sense strand starting at position 2632 of SEQ ID NO: 588274
cgggaacaucuggguuauu

SEQ ID NO: 853679 - RNA, 19 nt, Artificial Sequence
  Description of Artificial Sequence: Synthetic oligonucleotide
  Antisense strand to SEQ ID NO: 853678
aauaacccagauguucccg

SEQ ID NO: 853680 - RNA, 19 nt, Artificial Sequence
  Description of Artificial Sequence: Synthetic oligonucleotide
  Sense strand starting at position 2633 of SEQ ID NO: 588274
gggaacaucuggguuauua

SEQ ID NO: 853681 - RNA, 19 nt, Artificial Sequence
  Description of Artificial Sequence: Synthetic oligonucleotide
  Antisense strand to SEQ ID NO: 853680
uaauaacccagauguuccc

SEQ ID NO: 853682 - RNA, 19 nt, Artificial Sequence
  Description of Artificial Sequence: Synthetic oligonucleotide
  Sense strand starting at position 2637 of SEQ ID NO: 588274
acaucuggguuauuaauca

SEQ ID NO: 853683 - RNA, 19 nt, Artificial Sequence
  Description of Artificial Sequence: Synthetic oligonucleotide
  Antisense strand to SEQ ID NO: 853682
ugauuaauaacccagaugu

SEQ ID NO: 853684 - RNA, 19 nt, Artificial Sequence
  Description of Artificial Sequence: Synthetic oligonucleotide
  Sense strand starting at position 2642 of SEQ ID NO: 588274
uggguuauuaaucaggcga

SEQ ID NO: 853685 - RNA, 19 nt, Artificial Sequence
  Description of Artificial Sequence: Synthetic oligonucleotide
  Antisense strand to SEQ ID NO: 853684
ucgccugauuaauaaccca

SEQ ID NO: 853686 - RNA, 19 nt, Artificial Sequence
  Description of Artificial Sequence: Synthetic oligonucleotide
  Sense strand starting at position 2646 of SEQ ID NO: 588274
uuauuaaucaggcgaaguu

SEQ ID NO: 853687 - RNA, 19 nt, Artificial Sequence
  Description of Artificial Sequence: Synthetic oligonucleotide
  Antisense strand to SEQ ID NO: 853686
aacuucgccugauuaauaa

SEQ ID NO: 853688 - RNA, 19 nt, Artificial Sequence
  Description of Artificial Sequence: Synthetic oligonucleotide
  Sense strand starting at position 2647 of SEQ ID NO: 588274
uauuaaucaggcgaaguuu

SEQ ID NO: 853689 - RNA, 19 nt, Artificial Sequence
  Description of Artificial Sequence: Synthetic oligonucleotide
  Antisense strand to SEQ ID NO: 853688
aaacuucgccugauuaaua

SEQ ID NO: 853690 - RNA, 19 nt, Artificial Sequence
  Description of Artificial Sequence: Synthetic oligonucleotide
  Sense strand starting at position 3116 of SEQ ID NO: 588274
ccaguuacaucuccagacu

SEQ ID NO: 853691 - RNA, 19 nt, Artificial Sequence
  Description of Artificial Sequence: Synthetic oligonucleotide
  Antisense strand to SEQ ID NO: 853690
agucuggagauguaacugg

SEQ ID NO: 853692 - RNA, 19 nt, Artificial Sequence
  Description of Artificial Sequence: Synthetic oligonucleotide
  Sense strand starting at position 3128 of SEQ ID NO: 588274
ccagacugggcgugaaauu

SEQ ID NO: 853693 - RNA, 19 nt, Artificial Sequence
  Description of Artificial Sequence: Synthetic oligonucleotide
  Antisense strand to SEQ ID NO: 853692
aauuucacgcccagucugg

SEQ ID NO: 853694 - RNA, 19 nt, Artificial Sequence
  Description of Artificial Sequence: Synthetic oligonucleotide
  Sense strand starting at position 3204 of SEQ ID NO: 588274
agguuagguuugccaggau

SEQ ID NO: 853695 - RNA, 19 nt, Artificial Sequence
  Description of Artificial Sequence: Synthetic oligonucleotide
  Antisense strand to SEQ ID NO: 853694
auccuggcaaaccuaaccu

SEQ ID NO: 853696 - RNA, 19 nt, Artificial Sequence
  Description of Artificial Sequence: Synthetic oligonucleotide
  Sense strand starting at position 3260 of SEQ ID NO: 588274
guugcuaacuuggugauga

SEQ ID NO: 853697 - RNA, 19 nt, Artificial Sequence
  Description of Artificial Sequence: Synthetic oligonucleotide
  Antisense strand to SEQ ID NO: 853696
ucaucaccaaguuagcaac
